(19) United States
(12) Patent Application Publication
(10) Pub. No.: US 2006/0288444 A1
(43) Pub. Date: Dec. 21, 2006

(54) Soybean polymorphisms and methods of genotyping

(76) Inventors: Robert McCarroll, Lexington, MA (US); David Butruille, Urbandale, IA (US); Kunsheng Wu, Ballwin, MO (US); Anju Gupta, Ankeny, IA (US); Sam Eathington, Ames, IA (US); Dick Johnson, Urbana, IL (US); Jason Bull, St. Louis, MO (US); Marlin Edwards, Davis, CA (US)

Correspondence Address: MONSANTO COMPANY, 800 N. LINDBERGH BLVD., ATTENTION: GAIL P. WUELLNER, IP PARALEGAL, (E2NA), ST. LOUIS, MO, 63167, US

(21) Appl. No.: 11/204,780

(22) Filed: Aug. 15, 2005

Related U.S. Application Data
(60) Provisional application No. 60/601,756, filed on Aug. 13, 2004.

(51) Int. Cl. A01H 5/00; C12Q 1/68; C12N 15/82; C12N 5/04; A01H 1/00

(52) U.S. Cl. 800/279; 800/312; 435/6; 435/415; 435/468

(57) ABSTRACT

Polymorphic soybean DNA loci are useful for genotyping between at least two varieties of soybean. Sequences of the loci are useful for designing primers and probe oligonucleotides for detecting polymorphisms in soybean DNA. Polymorphisms are useful for genotyping applications in soybean. The polymorphic markers are useful to establish marker/trait associations, e.g. in linkage disequilibrium mapping and association studies, positional cloning and transgenic applications, marker-aided breeding and marker-assisted selection, and identity by descent studies. The polymorphic markers are also useful in mapping libraries of DNA clones, e.g. for soybean QTLs and genes linked to polymorphisms.

### CROSS REFERENCE TO RELATED APPLICATIONS

[0001] This application claims the benefit of earlier filing date under 35 U.S.C. 119(e) of provisional application Ser. No. 60/601,756, filed Aug. 13, 2004, which is incorporated herein by reference.

### INCORPORATION OF SEQUENCE LISTING

[0002] Two copies of the sequence listing (Copy 1 and Copy 2) and a computer readable form (CRF) of the sequence listing, all on CD-ROMs, each containing the file named “SoySNP.ST25.txt” which is 7.31 MB (measured in MS-Windows), all of which were created on Aug. 11, 2005, are incorporated herein by reference.

### INCORPORATION OF TABLES

[0003] Two copies of tables, i.e. Table 1 and Table 2, on CD-ROMs containing files named “Table 1.txt” which is 967 KB (measured in MS Windows) and “Table 2.txt” which is 108 KB (measured in MS-Windows), which were created on Aug. 12, 2005, are incorporated herein by reference.

### FIELD OF THE INVENTION

[0004] Disclosed herein are soybean polymorphisms, nucleic acid molecules related to such polymorphisms and methods of using such polymorphisms and molecules, e.g. in genotyping.

### BACKGROUND

[0005] Polymorphisms are useful as genetic markers for genotyping applications in the agriculture field, e.g. in plant genetic studies and commercial breeding. See for instance U.S. Pat. Nos. 5,385,835; 5,437,697; 5,385,835; 5,492,547; 5,746,023; 5,962,764; 5,981,832 and 6,100,030, and U.S. application Ser. No. 09/861,478 (filed May 18, 2001), Ser. No. 09/969,373 (filed (Oct. 2, 2001), and Ser. No. 10/389,566 (filed Mar. 14, 2003), the disclosures of all of which are incorporated herein by reference. The highly conserved nature of DNA combined with the rare occurrences of stable polymorphisms provides genetic markers, which are both predictable and discerning of different genotypes. Among the classes of existing genetic markers are a variety of polymorphisms indicating genetic variation including restriction-fragment-length polymorphisms (RFLPs), amplified fragment-length polymorphisms (AFLPs), simple sequence repeats (SSRs), single nucleotide polymorphisms (SNPs) and insertion/deletion polymorphisms (Indels). Because the number of genetic markers for a plant species is limited, the discovery of additional genetic markers will facilitate genotyping applications including marker-trait association studies, gene mapping, gene discovery, marker-assisted selection and marker-assisted breeding. Evolving technologies make certain genetic markers more amenable for rapid, large scale use. For instance, technologies for SNP detection indicate that SNPs may be preferred genetic markers.

### SUMMARY OF THE INVENTION

[0006] This invention provides a large number of genetic markers from soybean genomic DNA. These genetic markers comprise soybean DNA loci, which are useful for genotyping applications involving at least two varieties of soybean. A polymorphic soybean locus of this invention comprises at least 20 consecutive nucleotides which include or are adjacent to a polymorphism which is identified herein, e.g. in Table 1.

[0007] One aspect of this invention is a method of analyzing DNA of a soybean plant comprising the steps of accessing a set of polymorphic soybean DNA sequences comprising one or more of the polymorphisms identified in Table 1, e.g. where the set of polymorphic soybean DNA sequences comprises any one of SEQ ID NO: 1 through SEQ ID NO: 6578. Such a method further comprises assembling a selected set of DNA sequences from the accessed set of polymorphic soybean DNA sequences and storing the selected set on a computer readable medium. A sequence of DNA extracted from a soybean plant can be analyzed by comparing the extracted DNA sequence with sequences in the selected set of DNA sequences, e.g. to identify polymorphisms in the DNA extracted from a soybean plant. In one aspect of the method the selected set comprises all of the DNA sequences of SEQ ID NO: 1 through SEQ ID NO:6578. In other aspects of the method the selected set can comprise significantly fewer of the polymorphic soybean DNA sequences, e.g. a set of limited to a single chromosome or QTL or a set which is relatively evenly distributed over the genome, or a set which is informative for a trait.

[0008] Another aspect of this invention provides a method for determining the genotype of a soybean plant, e.g. by determining the sequence of DNA of a soybean plant, its transcribed mRNA or its translated amino acids, and comparing the determined sequence to the sequence of a selected set of polymorphic soybean DNA sequences, their transcribed mRNA or translated amino acids. Such comparing allows the identification of allelic character of polymorphisms in the genome of a soybean plant. Still another aspect of this invention provides a method for genotyping a soybean plant by assaying DNA from tissue of a soybean plant to identify the allelic state of a nucleic acid polymorphism in a polymorphic soybean DNA locus identified herein in Table 1. Such assaying can comprise amplifying segments of soybean DNA using a pair of oligonucleotide primers designed to hybridize to the 5′ end of each of opposite strands of a segment of soybean DNA including a polymorphism which is identified in Table 1. The assaying can further comprise hybridizing an oligonucleotide detector, e.g. having a sequence which hybridizes to the sequence of the DNA at or adjacent to the polymorphism. In such assaying the oligonucleotide primers and oligonucleotide detector can be designed to hybridize to segments of one of the selected set of DNA sequences. A useful assay includes Taqman® assays for SNP detection. Such a method of analyzing a soybean plant more particularly comprises the steps of
[0009] (a) acquiring a set of one or more oligonucleotide primer pairs and cognate oligonucleotide probe pairs for detecting one or more of the allelic SNP or Indel polymorphisms identified in Table 1, wherein a primer pair is useful for amplifying a segment of DNA including said allelic SNP or Indel polymorphism and said cognate oligonucleotide probe pair is useful for detecting allelic forms of said SNP or Indel polymorphism in said segment of DNA; and
[0010] (b) analyzing the genome of a population of soybean plants using said oligonucleotide primers and probes to identify the presence of allelic forms of said one or more of the allelic SNP or Indel polymorphisms identified in Table 1.

[0011] An aspect of the method uses a set of oligonucleotide primers and probes for detecting at least a polymorphism in each chromosome. Another aspect of the method uses a set of oligonucleotides primers and probes for detecting polymorphisms in a plurality of sequences of polymorphic soybean DNA sequences which includes at least one sequence in the set of sequences consisting of SEQ ID NO: 1-6750.

[0012] In another aspect of the invention the polymorphisms are used to identify haplotypes which are allelic segments of genomic DNA characterized by at least two polymorphisms in linkage disequilibrium and wherein said polymorphisms are in a genomic windows of not more than 10 centimorgans in length, e.g. not more than about 8 centimorgans or smaller windows, e.g. in the range of say 1 to 5 centimorgans. Especially useful methods of the invention use such polymorphisms to identify a plurality of haplotypes in a series of adjacent genomic windows in each soybean chromosome, e.g. providing essentially full genome coverage with such windows. With a sufficiently large and diverse breeding population of soybeans, it is possible to identify a high quantity of haplotypes in each window, thus providing allelic DNA that can be associated with one or more traits to allow focused marker assisted breeding. Thus, an aspect of the soybean analysis of this invention further comprises the steps of characterizing one or more traits for said population of soybean plants and associating said traits with said allelic SNP or Indel polymorphisms, preferably organized to define haplotypes. Such traits include yield, lodging, maturity, plant height and disease resistance, e.g. resistance to soybean cyst nematode, soybean rust, brown stem rot, sudden death syndrome and the like. To facilitate breeding it is useful to compute a value for each trait or a value for a combination of traits, e.g. a multiple trait index. The weight allocated to various traits in a multiple trait index can vary depending of the objectives of breeding. For instance, if yield is a key objective, the yield value may be weighted at 50 to 80%, maturity, lodging, plant height or disease resistance may be weighted at lower percentages in a multiple trait index.

[0013] Another aspect of this invention provides a method of genotyping further comprising identifying one or more phenotypic traits for at least two soybean lines and determining associations between said traits and polymorphisms.

[0014] Still another aspect of this invention is directed to the use of a selected set of polymorphic soybean DNA sequences in soybean breeding, e.g. by selecting a soybean line on the basis of its genotype at a polymorphic locus has a sequence within the selected set of polymorphic soybean DNA sequences

[0015] Another aspect of this invention provides a method of breeding soybean plants comprising the steps of:
[0016] (a) identifying trait values for at least two haplotypes in at least two genomic windows of up to 10 centimorgans for a breeding population of at least two soybean plants;
[0017] (b) breeding two soybean plants in said breeding population to produce a population of progeny seed;
[0018] (c) identifying the allelic state of polymorphisms in each of said windows in said progeny seed to determine the presence of said haplotypes; and
[0019] (c) selecting progeny seed having the higher trait values identified for determined haplotypes in said progeny seed.

[0020] In aspects of the breeding method trait values are identified for at least two haplotypes in each adjacent genomic window over essentially the entirety of each chromosome. In another useful aspect of the method progeny seed is selected for a higher trait value for yield for a haplotype in a genomic window of up to 10 centimorgans in each chromosome. In another aspect of the invention, the breeding method is directed to increased yield, where the trait value is for the yield trait, where trait values are ranked for haplotypes in each window, and where a progeny seed is selected which has a trait value for yield in a window that is higher than the mean trait value for yield in said window. In certain aspects of the breeding methods the haplotypes are defined using the polymorphisms identified in Table I or are defined as being in the set of 5 DNA sequences that comprises all of the DNA sequences of SEQ ID NO: 1 through SEQ ID NO:6750, or as being in linkage disequilibrium with a mapped polymorphism identified in Table 2.

[0021] The methods of this invention characterized by marker identification can be carried out using oligonucleotide primers and oligonucleotides detectors. Thus, another aspect of the invention is directed to such oligonucleotides, e.g. sets of oligonucleotides functional with a marker. More particularly, this invention provides a pair of isolated nucleic acid molecules comprising oligonucleotide primers for amplifying soybean DNA to identify the presence of a polymorphism in the DNA, e.g. oligonucleotides comprising at least 12 consecutive nucleotides which are at least 90% identical to ends of a segment of DNA of the same number of nucleotides in opposite strands of a polymorphic soybean DNA locus having a sequence which is at least 90% identical to a sequence in a subset of polymorphic soybean DNA sequences disclosed herein (or a complement thereof). More preferably such a pair of oligonucleotides comprise at least 15 consecutive nucleotides, or more, e.g. at least 20 consecutive nucleotides. More particularly, when hybridization to a SNP is contemplated for marker assay for identifying a polymorphism in soybean DNA, a set will comprise four oligonucleotides, e.g. a pair of isolated nucleic acid molecules for amplifying DNA which can hybridize to DNA which flanks a polymorphism and a pair of detector nucleic acid molecules which are useful for detecting each nucleotide in a single nucleotide polymorphism in a segment of the amplified DNA. In preferred aspects of the invention such detector nucleic acid molecules comprise at least 12 nucleotide bases and a detectable label, or at least 15 nucleotide bases, and the sequence of the detector nucleic acid molecules is identical except for the nucleotide polymorphism (e.g. SNP or Indel) and is at least 95 percent identical to a sequence of the same number of consecutive nucleotides in either strand of the segment of polymorphic soybean DNA locus containing the polymorphism.

### DETAILED DESCRIPTION OF PREFERRED EMBODIMENTS

A. Definitions:

[0022] As used herein certain terms are defined as follows.

[0023] An “allele” means an alternative sequence at a particular locus; the length of an allele can be as small as 1 nucleotide base, but is typically larger. Allelic sequence can be amino acid sequence or nucleic acid sequence. A “locus” is a short sequence that is usually unique and usually found at one particular location in the genome by a point of reference, e.g. a short DNA sequence that is a gene, or part of a gene or intergenic region. A locus of this invention can be a unique PCR product at a particular location in the genome. The loci of this invention comprise one or more polymorphisms i.e. alternative alleles present in some individuals. “Genotype” means the specification of an allelic composition at one or more loci within an individual organism. In the case of diploid organisms, there are two alleles at each locus; a diploid genotype is said to be homozygous when the alleles are the same, and heterozygous when the alleles are different. “Haplotype” means an allelic segment of genomic DNA that tends to be inherited as a unit; such haplotypes can be characterized by two or more polymorphisms and can be defined by a size of not greater than 10 centimorgans, e.g. not greater 8 centimorgans. With higher precision, from higher density of mapped polymorphisms, haplotypes can be characterized by genomic windows in the range of 1-5 centimorgans.

[0024] “Consensus sequence” means DNA sequence constructed as the consensus at each nucleotide position of a cluster of aligned sequences. Such clusters are used to identify SNP and Indel polymorphisms in alleles at a locus. Consensus sequence can be based on either strand of DNA at the locus and states the nucleotide base of either one of each SNP in the locus and the nucleotide bases of all Indels in the locus. Thus, although a consensus sequence may not be a copy of an actual DNA sequence, a consensus sequence is useful for precisely designing primers and probes for actual polymorphisms in the locus.

[0025] “Phenotype” means the detectable characteristics of a cell or organism which are a manifestation of gene expression.

[0026] “Marker” means a polymorphic sequence. A “polymorphism” is a variation among individuals in sequence, particularly in DNA sequence. Useful polymorphisms include single base substitutions (single nucleotide polymorphisms SNPs), or insertions or deletions in DNA sequence (Indels) and simple sequence repeats of DNA sequence (SSRs).

[0027] “Marker Assay” means a method for detecting a polymorphism at a particular locus using a particular method, e.g. phenotype (such as seed color, flower color, or other visually detectable trait), restriction fragment length polymorphism (RFLP), single base extension, electrophoresis, sequence alignment, allelic specific oligonucleotide hybridization (ASO), RAPID, etc. Preferred marker assays include single base extension as disclosed in U.S. Pat. No. 6,013,431 and allelic discrimination where endonuclease activity releases a reporter dye from a hybridization probe as disclosed in U.S. Pat. No. 5,538,848 the disclosures of both of which are incorporated herein by reference.

[0028] “Linkage” refers to relative frequency at which types of gametes are produced in a cross. For example, if locus A has genes “A” or “a” and locus B has genes “B” or “b” and a cross between parent I with AABB and parent B with aabb will produce four possible gametes where the genes are segregated into AB, Ab, aB and ab. The null expectation is that there will be independent equal segregation into each of the four possible genotypes, i.e. with no linkage ¼ of the gametes will of each genotype. Segregation of gametes into a genotypes differing from ¼ are attributed to linkage.

[0029] “Linkage disequilibrium” is defined in the context of the relative frequency of gamete types in a population of many individuals in a single generation. If the frequency of allele A is p, a is p′, B is q and b is q′, then the expected frequency (with no linkage disequilibrium) of genotype AB is pq, Ab is pq′, aB is p′q and ab is p′q′. Any deviation from the expected frequency is called linkage disequilibrium.

[0030] “Quantitative Trait Locus (QTL)” means a locus that controls to some degree numerically representable traits that are usually continuously distributed.

[0031] Nucleic acid molecules or fragments thereof of the present invention are capable of hybridizing to other nucleic acid molecules under certain circumstances. As used herein, two nucleic acid molecules are said to be capable of hybridizing to one another if the two molecules are capable of forming an anti-parallel, double-stranded nucleic acid structure. A nucleic acid molecule is said to be the “complement” of another nucleic acid molecule if they exhibit “complete complementarity” i.e. each nucleotide in one sequence is complementary to its base pairing partner nucleotide in another sequence. Two molecules are said to be “minimally complementary” if they can hybridize to one another with sufficient stability to permit them to remain annealed to one another under at least conventional “low-stringency” conditions. Similarly, the molecules are said to be “complementary” if they can hybridize to one another with sufficient stability to permit them to remain annealed to one another under conventional “high-stringency” conditions. Nucleic acid molecules which hybridize to other nucleic acid molecules, e.g. at least under low stringency conditions are said to be “hybridizable cognates” of the other nucleic acid molecules. Conventional stringency conditions are described by Sambrook et al., Molecular Cloning, A Laboratory Manual, 2nd Ed., Cold Spring Harbor Press, Cold Spring Harbor, N.Y., 1989 (Now onwards referred as Sambrook et al.) and by Haymes et al., Nucleic Acid Hybridization, A Practical Approach, IRL Press, Washington, D.C. (1985), each of which is incorporated herein by reference. Departures from complete complementarity are therefore permissible, as long as such departures do not completely preclude the capacity of the molecules to form a double-stranded structure. Thus, in order for a nucleic acid molecule to serve as a primer or probe it need only be sufficiently complementary in sequence to be able to form a stable double-stranded structure under the particular solvent and salt concentrations employed.

[0032] Appropriate stringency conditions which promote DNA hybridization, for example, 6.0× sodium chloride/sodium citrate (SSC) at about 45° C., followed by a wash of 2.0×SSC at 50° C., are known to those skilled in the art or can be found in Current Protocols in Molecular Biology, John Wiley & Sons, N.Y. (1989), 6.3.1-6.3.6, incorporated herein by reference. For example, the salt concentration in the wash step can be selected from a low stringency of about 2.0×SSC at 50° C. to a high stringency of about 0.2×SSC at 50° C. In addition, the temperature in the wash step can be increased from low stringency conditions at room temperature, about 22° C., to high stringency conditions at about 65° C. Both temperature and salt may be varied, or either the temperature or the salt concentration may be held constant while the other variable is changed.

[0033] In a preferred embodiment, a nucleic acid molecule of the present invention will specifically hybridize to one strand of a segment of soybean DNA having a nucleic acid sequence as set forth in SEQ ID NO: 1 through SEQ ID NO: 6578 under moderately stringent conditions, for example at about 2.0×SSC and about 65° C., more preferably under high stringency conditions such as 0.2×SSC and about 65° C.

[0034] As used herein “sequence identity” refers to the extent to which two optimally aligned polynucleotide or peptide sequences are invariant throughout a window of alignment of components, e.g. nucleotides or amino acids. An “identity fraction” for aligned segments of a test sequence and a reference sequence is the number of identical components which are shared by the two aligned sequences divided by the total number of components in reference sequence segment, i.e. the entire reference sequence or a smaller defined part of the reference sequence. “Percent identity” is the identity fraction times 100.

B. Nucleic Acid Molecules—Loci, Primers and Probes

[0035] The soybean loci of this invention comprise DNA sequence which comprises at least 20 consecutive nucleotides and includes or is adjacent to one or more polymorphisms identified in Table 1. Such soybean loci have a nucleic acid sequence having at least 90% sequence identity, more preferably at least 95% or even more preferably for some alleles at least 98% and in many cases at least 99% sequence identity, to the sequence of the same number of nucleotides in either strand of a segment of soybean DNA which includes or is adjacent to the polymorphism. The nucleotide sequence of one strand of such a segment of soybean DNA may be found in a sequence in the group consisting of SEQ ID NO: 1 through SEQ ID NO:6578. It is understood by the very nature of polymorphisms that for at least some alleles there will be no identity at the polymorphic site itself. Thus, sequence identity can be determined for sequence that is exclusive of the polymorphism sequence. The polymorphisms in each locus are identified more particularly in Table 1.

[0036] For many genotyping applications it is useful to employ as markers polymorphisms from more than one locus. Thus, one aspect of the invention provides a collection of different loci. The number of loci in such a collection can vary but will be a finite number, e.g. as few as 2 or 5 or 10 or 25 loci or more, for instance up to 40 or 75 or 100 or more loci, e.g. selected because they comprise a set which is limited to a single chromosome or QTL or is relatively evenly distributed over the genome, or is informative for one or more traits.

[0037] Another aspect of the invention provides nucleic acid molecules which are capable of hybridizing to the polymorphic soybean loci of this invention. In certain embodiments of the invention, e.g. which provide PCR primers, such molecules comprises at least 15 nucleotide bases. Molecules useful as primers can hybridize under high stringency conditions to a one of the strands of a segment of DNA in a polymorphic locus of this invention. Primers for amplifying DNA are provided in pairs, i.e. a forward primer and a reverse primer. One primer will be complementary to one strand of DNA in the locus and the other primer will be complementary to the other strand of DNA in the locus, i.e. the sequence of a primer is preferably at least 90%, more preferably at least 95%, identical to a sequence of the same number of nucleotides in one of the strands. It is understood that such primers can hybridize to sequence in the locus which is distant from the polymorphism, e.g. at least 5, 10, 20, 50 or up to about 100 nucleotide bases away from the polymorphism. Design of a primer of this invention will depend on factors well known in the art, e.g. avoidance of repetitive sequence.

[0038] Another aspect of the nucleic acid molecules of this invention are hybridization probes for polymorphism assays. In one aspect of the invention such probes are oligonucleotides comprising at least 12 nucleotide bases and a detectable label. The purpose of such a molecule is to hybridize, e.g. under high stringency conditions, to one strand of DNA in a segment of nucleotide bases which includes or is adjacent to the polymorphism of interest in an amplified part of a polymorphic locus. Such oligonucleotides are preferably at least 90%, more preferably at least 95%, identical to the sequence of a segment of the same number of nucleotides in one strand of soybean DNA in a polymorphic locus. The detectable label can be a radioactive element or a dye. In preferred aspects of the invention, the hybridization probe further comprises a fluorescent label and a quencher, e.g. for use hybridization probe assays of the type known as Taqman® assays, available from Applied Biosystems, Foster City, Calif.

[0039] For assays where the molecule is designed to hybridize adjacent to a polymorphism which is detected by single base extension, e.g. of a labeled dideoxynucleotide, such molecules can comprise at least 15, more preferably at least 16 or 17, nucleotide bases in a sequence which is at least 90 percent, preferably at least 95%, identical to a sequence of the same number of consecutive nucleotides in either strand of a segment of polymorphic soybean DNA. Oligonucleotides for single base extension assays are available from Orchid Biosciences, Inc.

[0040] Such primer and probe molecules are generally provided in groups of two primers and one or more probes for use in genotyping assays. Moreover, it is often desirable to conduct a plurality of genotyping assays for a plurality of polymorphisms. Thus, this invention also provides collections of nucleic acid molecules, e.g. in sets which characterize a plurality of polymorphisms.

C. Identifying Polymorphisms

[0041] Polymorphisms in a genome can be determined by comparing cDNA sequence from different lines. While the detection of polymorphisms by comparing cDNA sequence is relatively convenient, evaluation of cDNA sequence allows no information about the position of introns in the corresponding genomic DNA. Moreover, polymorphisms in non-coding sequence cannot be identified from cDNA. This can be a disadvantage, e.g. when using cDNA-derived polymorphisms as markers for genotyping of genomic DNA. More efficient genotyping assays can be designed if the scope of polymorphisms includes those present in non-coding unique sequence.

[0042] Genomic DNA sequence is more useful than cDNA for identifying and detecting polymorphisms. Polymorphisms in a genome can be determined by comparing genomic DNA sequence from different lines. However, the genomic DNA of higher eukaryotes typically contains a large fraction of repetitive sequence and transposons. Genomic DNA can be more efficiently sequenced if the coding/unique fraction is enriched by subtracting or eliminating the repetitive sequence.

[0043] There are a number of strategies that can be employed to enrich for coding/unique sequence. Examples of these include the use of enzymes which are sensitive to cytosine methylation, the use of the McrBC endonuclease to cleave repetitive sequence, and the printing of microarrays of genomic libraries which are then hybridized with repetitive sequence probes.

C.1. Methylated Cytosine Sensitive Enzymes:

[0044] The DNA of higher eukaryotes tends to be very heavily methylated, however it is not uniformly methylated. In fact, repetitive sequence is much more highly methylated than coding sequence. Coding/unique sequence can therefore be enriched by exploiting this difference in methylation pattern. See U.S. Pat. No. 6,017,704 for methods of mapping and assessment of DNA methylation patterns in CG islands. Some restriction endonucleases are sensitive to the presence of methylated cytosine residues in their recognition site. Such methylation sensitive restriction endonucleases may not cleave at their recognition site if the cytosine residue in either an overlapping 5′-CG-3′ or an overlapping 5′-CNG-3′ is methylated. Methylation sensitive restriction endonucleases include the 4 base cutters: Aci I, Hha I, HinP1 I, HpaII and Msp I, the 6 base cutters: Apa I, Age I, Bsr F I, BssH II, Eag I, Eae I, MspM II, Nar I, Pst I, Pvu I, Sac II, Sma I, Stu I and Xho I and the 8 base cutter: Not I. For example, DNA cleavage at the site CTGCAG by Pst I is inhibited when the C residues are methylated. In order to enrich for coding/unique sequence soybean libraries can be constructed from genomic DNA digested with Pst I (or other methylation sensitive enzymes), and size fractionated by agarose gel electrophoresis. Regions of the genome which are heavily methylated (i.e., regions with a high fraction of repetitive sequences) have a higher number of Pst I sites that are methylated. Therefore, most of the Pst I sites in repetitive DNA will not be cleaved during Pst I digestion, and the repetitive sequence will tend to consist mostly of high molecular weight, uncleaved DNA. In contrast, regions of the genome that are not heavily methylated (i.e. regions containing a large fraction of coding/unique sequence) should contain a large fraction of unmethylated Pst I sites which will be cleaved during digestion, producing relatively smaller fragments. When digested DNA is electrophoresed through agarose, relatively larger fragments from heavily methylated, non-coding DNA regions are separated from relatively smaller fragments derived from coding/unique sequence. Coding region-enriched DNA fragments (commonly between 500-3000 bp) can be excised from the gel, purified and ligated into a Pst I digested vector, e.g. pUC18. The ligation products are transformed by electroporation into a plurality of suitable bacterial hosts, e.g. DH10B, to produce a library of clones enriched for coding/unique sequence. Individual clones can be sequenced to provide the sequence of the inserted coding region DNA.

[0045] In order to reduce the sequence complexity of any particular library, the DNA in the range 500 to 10,000 bp can be further size-fractionated by incrementally excising fragments from the gel. Useful ranges of size-fractionated fragments include 500-600 bp, 600-700 bp, 700-800 bp, 800-900 bp, 900-1100 bp, 1100-1500 bp, 1500-2000 bp, 2000-2500 bp and 2500-3000 bp. A series of size-fractionated reduced representation libraries are constructed by ligating purified DNA from each size fraction separately to the vector. A small sample of clones from each library (for example about 400 clones) is sequenced to determine the fraction of repetitive sequence present in each particular library. Comparison of reduced representation libraries prepared from a variety of different soybean lines indicates that many fractions contain less than 10% repetitive sequence and some fractions contain more than 20% repetitive sequence. Preferred reduced representation libraries contain less than 20% repetitive sequence, more preferably less than 15% repetitive sequence and even more preferably less than 10% repetitive sequence. By determining the fraction of repetitive sequence throughout the whole series of size fractionated reduced representation libraries, the libraries with the smallest fraction of repetitive sequence can be selected for deep sequencing (usually 10,000-20,000 clones). Since the purpose of obtaining sequence is for polymorphism detection, the equivalent libraries representing the same size fraction for both soybean strains are sequenced, or alternatively a library consisting of a mixture of DNA from different soybean strains is sequenced. Another advantage of using reduced representation libraries for polymorphism detection is that it increases the probability of recovering the equivalent sequences from both soybean lines. Polymorphisms can only be detected if the equivalent sequence is available from both lines.

C.2. McrBC Endonuclease

[0046] An alternative method for enriching coding region DNA sequence enrichment uses McrBC endonuclease restriction. As a defense against invading foreign DNA from phage/viruses, E. coli contain endonucleases, e.g. an McrBC endonuclease, which cleave methylated cytosine-containing DNA. This feature can be exploited to enrich DNA with regions of the genome which are not heavily methylated, e.g. the presumed coding region DNA. Reduced representation libraries can be constructed using genomic DNA fragments which are cleaved by physical shearing or digestion with any restriction enzyme. DNA fragments are transformed into an E. coli host that contains an McrBC endonuclease, e.g. E. coli strain JM107 or DH5a. When the bacterial host is transformed with a DNA fragment which contains methylated DNA region, the McrBC endonuclease will cleave the inserted DNA and the plasmid will not be propagated. When the bacterial host is transformed with a DNA fragment that is not methylated, the plasmid will be propagated, and a colony will grow on the agar plate allowing the clone to be sequenced. A small sample of clones from libraries generated in this manner are sampled, and the fraction of repetitive sequenced determined. McrBC endonuclease can also be used with methylated cytosine sensitive endonuclease to further reduce the fraction of repetitive sequence in libraries that are not suitable for sequencing, e.g. sequences that contain more than 15% repetitive sequence.

C.3. Microarraying Reduced Representation Libraries

[0047] Another method to enrich for coding/unique sequence is to construct reduced representation libraries (using methylation sensitive or non-methylation sensitive enzymes), print microarrays of the library on nylon membrane, and hybridize with probes made from repetitive elements known to be present in the library. Clones containing repetitive sequence elements are identified, and the library is re-arrayed by picking only the negative clones. This process is performed by randomly picking clones from a reduced representation library into 384-well plates and culturing them. Micro-arrays can be prepared by printing clone DNA from the collection of 384-well plates in determined patterns on supports, such as glass supports or nylon membranes. The fabrication of microarrays comprising thousands of distinct clones, e.g. up to about 25,000 clones or more, are well known in the art. See for instance, U.S. Pat. No. 5,807,522 for methods for fabricating microarrays of spotted polynucleotides at high density. A small sample of clones from the reduced representation library, e.g. about 400 clones, can be sequenced to identify repetitive sequence elements. Clones containing the repetitive sequences are retrieved, and the clones used to make radioactive probes which are hybridized on the nylon arrays. Radioactive isotope label elements include ³²P, ³³P, ³⁵S, ¹²⁵I, and the like with ³³P being especially preferred. The arrays are analyzed for hybridization by detecting radiation, e.g. using a Fuji Phosphoimager™ imaging screen. After an appropriate exposure time the array image is read as a digital file representing the hybridization intensity from each array element which is proportional to amount of labeled repeat sequence. This radiation image identifies all the clones on the array which correspond to repetitive sequence clones, and also identifies the 384-well plate and well location of each repetitive sequence clone. With this information, all the non-repetitive sequence clones can be picked from the original plates and relocated onto a new set of plates which do not contain repetitive sequence clones. This method can be used to lower the fraction of repetitive sequence in reduced representation libraries from approximately 25% to about 1-2%.

D. Detecting Polymorphisms

[0048] Polymorphisms in DNA sequences can be detected by a variety of effective methods well known in the art including those disclosed in U.S. Pat. Nos. 5,468,613 and 5,217,863; 5,210,015; 5,876,930; 6,030,787 6,004,744; 6,013,431; 5,595,890; 5,762,876; 5,945,283; 5,468,613; 6,090,558; 5,800,944 and 5,616,464, all of which are incorporated herein by reference in their entireties. For instance, polymorphisms in DNA sequences can be detected by hybridization to allele-specific oligonucleotide (ASO) probes as disclosed in U.S. Pat. Nos. 5,468,613 and 5,217,863. The nucleotide sequence of an ASO probe is designed to form either a perfectly matched hybrid or to contain a mismatched base pair at the site of the variable nucleotide residues. The distinction between a matched and a mismatched hybrid is based on differences in the thermal stability of the hybrids in the conditions used during hybridization or washing, differences in the stability of the hybrids analyzed by denaturing gradient electrophoresis or chemical cleavage at the site of the mismatch.

[0049] U.S. Pat. No. 5,468,613 discloses allele specific oligonucleotide hybridizations where single or multiple nucleotide variations in nucleic acid sequence can be detected in nucleic acids by a process in which the sequence containing the nucleotide variation is amplified, spotted on a membrane and treated with a labeled sequence-specific oligonucleotide probe.

[0050] Length variation in DNA nucleotide sequence repeats such as microsatellites, simple sequence repeats (SSRs) and short tandem repeats (STRs) can be detected by mass spectroscopy methods as disclosed in U.S. Pat. No. 6,090,558 The advantages of using mass spectrometry include a dramatic increase in both the speed of analysis (a few seconds per sample) and the accuracy of direct mass measurements.

[0051] Target nucleic acid sequence can also be detected by probe ligation methods as disclosed in U.S. Pat. No. 5,800,944 where sequence of interest is amplified and hybridized to probes followed by ligation to detect a labeled part of the probe.

[0052] Target nucleic acid sequence can also be detected by probe linking methods as disclosed in U.S. Pat. No. 5,616,464 employing at least one pair of probes having sequences homologous to adjacent portions of the target nucleic acid sequence and having side chains which non-covalently bind to form a stem upon base pairing of said probes to said target nucleic acid sequence. At least one of the side chains has a photoactivatable group which can form a covalent cross-link with the other side chain member of the stem.

D.1. Primer Base Extension Assay

[0053] A preferred method for detecting SNPs and Indels is a labeled base extension method as disclosed in U.S. Pat. Nos. 6,004,744; 6,013,431; 5,595,890; 5,762,876; and 5,945,283. These methods are based on primer extension and incorporation of detectable nucleoside triphosphates. The primer is designed to anneal to the sequence immediately adjacent to the variable nucleotide which can be can be detected after incorporation of as few as one labeled nucleoside triphosphate. The method uses three synthetic oligonucleotides. Two of the oligonucleotides serve as PCR primers and are complementary to sequence of the locus of soybean genomic DNA which flanks a region containing the polymorphism to be assayed. Using soybean genomic DNA as a template the primer oligonucleotides are used in PCR to produce sufficient copies of the region of the locus containing the polymorphisms so that allelic discrimination can be conducted. Following amplification of the region of the soybean genome containing the polymorphism, the PCR product is mixed with the third oligonucleotide (called an extension primer) which is designed to hybridize to the amplified DNA immediately adjacent to the polymorphism in the presence of DNA polymerase and two differentially labeled dideoxynucleosidetriphosphates. If the polymorphism is present on the template, one of the labeled dideoxynucleosidetriphosphates can be added to the primer in a single base chain extension. The allele present is then inferred by determining which of the two differential labels was added to the extension primer. Homozygous samples will result in only one of the two labeled bases being incorporated and thus only one of the two labels will be detected. Heterozygous samples have both alleles present, and will thus direct incorporation of both labels (into different molecules of the extension primer) and thus both labels will be detected.

[0054] To design primers for soybean polymorphism detection by single base extension the sequence of the locus is first masked to prevent design of any of the three primers to sites that match known soybean repetitive elements (e.g., transposons) or are of very low sequence complexity (di- or tri-nucleotide repeat sequences). Design of primers to such repetitive elements will result in assays of low specificity, through amplification of multiple loci or annealing of the extension primer to multiple sites.

[0055] PCR primers are preferably designed (a) to have an optimal annealing temperature for PCR in the range of 55 to 60° C., (b) to have lengths in the range of 18 to 25 bases, and (c) to produce a product in the size range 75 to 200 base pairs with the polymorphism to be assayed located at least 25 bases from the 3′end of each primer. The extension primers must be chosen to contain minimal self- or inter-primer complementarity, or the efficiency and/or specificity of the PCR reaction will be reduced.

[0056] The extension primer is designed to anneal immediately adjacent to the polymorphism, such that the 3′ end of the annealed extension primer immediately abuts the polymorphic site. The extension primer can lie either to the 5′ or 3′ side of the polymorphism; however, if it is designed to lie on the 3′ side, then the sequence of the extension primer must match the reverse complement of the sequence adjacent to the polymorphism. The extension primer must contain no self-complementarity that will enable self-annealing, or the incorporation of the labeled ddNTPs may result from self-priming of the extension primer, obscuring the results of polymorphism-directed incorporation. If the nature of the sequence adjacent to the polymorphic site makes it impossible to design an extension primer that is fully non-self-complementary, the extent of self-annealing may be limited by replacing one or two bases of the extension primer with abasic sites, as long as the abasic sites are not introduced into the three 3′ most positions.

[0057] The labeled ddNTPs chosen for inclusion in the reaction are determined by the nature of the polymorphism, and whether the extension primer lies those that match the first base of the polymorphism. For example, in the case of an AG polymorphism, the ddNTPs would be ddATP-label(1) and ddGTP-label(2) for one strand as template or ddTTP-label(1) and ddCTP-label(2) for the other stand. Labels can be chosen from among a wide variety of chemical moieties, including affinity or immunological labels, fluorescent dyes and mass tags. In the most common embodiment of the process, affinity and immunological labels are used, followed by appropriate detection reagents. In the present example, ddATP-FITC and ddGTP-biotin might be employed, followed by incubation with anti-FITC-antibody conjugated to the enzyme horseradish peroxidase (HRP-anti-FITC), and streptavidin conjugated to the enzyme alkaline phosphatase (AP-streptavidin).

D.2. Labeled Probe Degradation Assay

[0058] In another preferred method for detecting polymorphisms SNPs and Indels can be detected by methods disclosed in U.S. Pat. Nos. 5,210,015; 5,876,930 and 6,030,787 in which an oligonucleotide probe having a 5′fluorescent reporter dye and a 3′quencher dye covalently linked to the 5′ and 3′ ends of the probe. When the probe is intact, the proximity of the reporter dye to the quencher dye results in the suppression of the reporter fluorescence, e.g. by Forster-type energy transfer. During PCR forward and reverse primers hybridize to a specific sequence of the target DNA flanking a polymorphism. The hybridization probe hybridizes to polymorphism-containing sequence within the amplified PCR product. In the subsequent PCR cycle DNA polymerase with 5′→3′ exonuclease activity cleaves the probe and separates the reporter dye from the quencher dye resulting in increased fluorescence of the reporter. A useful assay is available from Applied Biosystems as the Taqman® assay which employs four synthetic oligonucleotides in a single reaction that concurrently amplifies the soybean genomic DNA, discriminates between the alleles present, and directly provides a signal for discrimination and detection. Two of the four oligonucleotides serve as PCR primers and generate a PCR product encompassing the polymorphism to be detected. Two others are allele-specific fluorescence-resonance-energy-transfer (FRET) probes. FRET probes incorporate a fluorophore and a quencher molecule in close proximity so that the fluorescence of the fluorophore is quenched. The signal from a FRET probes is generated by degradation of the FRET oligonucleotide, so that the fluorophore is released from proximity to the quencher, and is thus able to emit light when excited at an appropriate wavelength. In the assay, two FRET probes bearing different fluorescent reporter dyes are used, where a unique dye is incorporated into an oligonucleotide that can anneal with high specificity to only one of the two alleles. Useful reporter dyes include 6-carboxy-4,7,2′,7′-tetrachlorofluorecein (TET), (VIC) and 6-carboxyfluorescein phosphoramidite (FAM). A useful quencher is 6-carboxy-N,N,N′,N′-tetramethylrhodamine (TAMRA). Additionally, the 3′end of each FRET probe is chemically blocked so that it can not act as a PCR primer. During the assay, soybean genomic DNA is added to a buffer containing the two PCR primers and two FRET probes. Also present is a third fluorophore used as a passive reference, e.g., rhodamine X (ROX) to aid in later normalization of the relevant fluorescence values (correcting for volumetric errors in reaction assembly). Amplification of the genomic DNA is initiated. During each cycle of the PCR, the FRET probes anneal in an allele-specific manner to the template DNA molecules. Annealed (but not non-annealed) FRET probes are degraded by TAQ DNA polymerase as the enzyme encounters the 5′ end of the annealed probe, thus releasing the fluorophore from proximity to its quencher. Following the PCR reaction, the fluorescence of each of the two fluorescers, as well as that of the passive reference, is determined fluorometrically. The normalized intensity of fluorescence for each of the two dyes will be proportional to the amounts of each allele initially present in the sample, and thus the genotype of the sample can be inferred.

[0059] To design primers and probes for the assay the locus sequence is first masked to prevent design of any of the three primers to sites that match known soybean repetitive elements (e.g., transposons) or are of very low sequence complexity (di- or tri-nucleotide repeat sequences). Design of primers to such repetitive elements will result in assays of low specificity, through amplification of multiple loci or annealing of the FRET probes to multiple sites.

[0060] PCR primers are designed (a) to have a length in the size range of 18 to 25 bases and matching sequences in the polymorphic locus, (b) to have a calculated melting temperature in the range of 57 to 60° C., e.g. corresponding to an optimal PCR annealing temperature of 52 to 55o C, (c) to produce a product which includes the polymorphic site and has a length in the size range of 75 to 250 base pairs. The PCR primers are preferably located on the locus so that the polymorphic site is at least one base away from the 3′ end of each PCR primer. The PCR primers must not be contain regions that are extensively self- or inter-complementary.

[0061] FRET probes are designed to span the sequence of the polymorphic site, preferably with the polymorphism located in the 3′ most ⅔ of the oligonucleotide. In the preferred embodiment, the FRET probes will have incorporated at their 3′end a chemical moiety which, when the probe is annealed to the template DNA, binds to the minor groove of the DNA, thus enhancing the stability of the probe-template complex. The probes should have a length in the range of 12 to 17 bases, and with the 3′MGB, have a calculated melting temperature of 5 to 7° C. above that of the PCR primers. Probe design is disclosed in U.S. Pat. Nos. 5,538,848; 6,084,102 and 6,127,121.

E. Construction of Genetic Linkage Maps

[0062] Genetic linkage maps can be constructed using the JoinMap version 2.0 software which is described by Stam, P. “Construction of integrated genetic linkage maps by means of a new computer package: JoinMap, The Plant Journal, 3: 739-744 (1993); Stam, P. and van Ooijen, J. W. “JoinMap version 2.0: Software for the calculation of genetic linkage maps (1995) CPRO-DLO, Wageningen. JoinMap implements a weighted-least squares approach to multipoint mapping in which information from all pairs of linked loci (adjacent or not) is incorporated. Linkage groups are formed using a LOD threshold of 5.0.

[0063] Alternatively genetic linkage maps can be constructed using the MAPMAKER/EXP v3.0 software described by Landers et al (Lander E. S., Green P., Abrahamson J., Barlow A., Daly M. J., Lincoln S. E., and Newburg I., Genomics 1: 174-181, 1987). MAPMAKER/EXP performs full multipoint linkage analysis (simultaneous estimation of all recombination fractions from the primary data) for dominant, recessive, and co-dominant (e.g. RFLP-like) markers. Public SSRs, e.g. approximately 1 every 20 cM, can be used as frameworks prior to SNP placement on the 20 linkage groups of soybean (Cregan P. B., Jarvik T., Bush L., Shoemaker R. C., Lark K. G., Kahler A. L., VanToai T. T., Lohnes D. G., Chung J., Specht J. E., Crop Sci. 39:1464-1490, 1999). MAPMAKER/EXP's “group” command can be used at LOD thresholds of 20.0, 10.0, 5.0, and 3.0 for gross linkage group assignment. Next, “order” command (LOD threshold 2.0) is used to order markers within the linkage groups. The “try” command is used to place all remaining markers onto the linkage groups. Then the “ripple” command is used to verify local order. (group”, “order”, “try”, and “ripple” commands are described in MAPMAKER/EXP). Centimorgan distance is calculated using the Kosambi or Haldane mapping function. (Kosambi D. D., Ann Eugen. 12: 172-175, 1944; Haldane, J. B. S., J. Genet. 8:299-309, 1919.).

[0064] The ordered linkage groups, defined by soft wares JointMap v 2.0 or MAPMAKER/EXP, are arranged in Microsoft Excel in accordance to the software's output. SSR and SNP loci, cM distance (Kosambi mapping function), and genotypic scores are arranged, from top to bottom, to detect possible errors in scores (double-crossovers and misscores). After verifying genotypic scores for accuracy and consistency, the loci can be once again mapped using JointMap v 2.0 or MAPMAKER/EXP to finalize map order, cM distance, and the addition of previously unmapped loci.

[0065] Jansen discloses an alternative approach for linkage map construction based on finding a locus order to minimize the total number of recombination events (Jansen J. et al. in Theor Appl Genet. 102: 1113-1122, 2001). Under many conditions this approach yields a close approximation to a maximum-likelihood map. A map estimated by this approach agrees quite closely with the map obtained using JoinMap 2.0

F. Use Of Polymorphisms To Establish Marker/Trait Associations

[0066] The polymorphisms in the loci of this invention can be used in marker/trait associations which are inferred from statistical analysis of genotypes and phenotypes of the members of a population. These members may be individual organisms, e.g. soybean, families of closely related individuals, inbred lines, dihaploids or other groups of closely related individuals. Such soybean groups are referred to as “lines”, indicating line of descent. The population may be descended from a single cross between two individuals or two lines (e.g. a mapping population) or it may consist of individuals with many lines of descent. Each individual or line is characterized by a single or average trait phenotype and by the genotypes at one or more marker loci.

[0067] Several types of statistical analysis can be used to infer marker/trait association from the phenotype/genotype data, but a basic idea is to detect markers, i.e. polymorphisms, for which alternative genotypes have significantly different average phenotypes. For example, if a given marker locus A has three alternative genotypes (AA, Aa and aa), and if those three classes of individuals have significantly different phenotypes, then one infers that locus A is associated with the trait. The significance of differences in phenotype may be tested by several types of standard statistical tests such as linear regression of marker genotypes on phenotype or analysis of variance (ANOVA). Commercially available, statistical software packages commonly used to do this type of analysis include SAS Enterprise Miner (SAS Institute Inc., Cary, N.C.) and Splus (Insightful Corporation. Cambridge, Mass.). When many markers are tested simultaneously, an adjustment such as Bonferonni correction is made in the level of significance required to declare an association.

[0068] Often the goal of an association study is not simply to detect marker/trait associations, but to estimate the location of genes affecting the trait directly (i.e. QTLs) relative to the marker locations. In a simple approach to this goal, one makes a comparison among marker loci of the magnitude of difference among alternative genotypes or the level of significance of that difference. Trait genes are inferred to be located nearest the marker(s) that have the greatest associated genotypic difference. In a more complex analysis, such as interval mapping (Lander and Botstein, Genetics 121:185-199 (1989), each of many positions along the genetic map (say at 1 cM intervals) is tested for the likelihood that a QTL is located at that position. The genotype/phenotype data are used to calculate for each test position a LOD score (log of likelihood ratio). When the LOD score exceeds a critical threshold value, there is significant evidence for the location of a QTL at that position on the genetic map (which will fall between two particular marker loci).

F.1. Linkage Disequilibrium Mapping and Association Studies

[0069] Another approach to determining trait gene location is to analyze trait-marker associations in a population within which individuals differ at both trait and marker loci. Certain marker alleles may be associated with certain trait locus alleles in this population due to population genetic process such as the unique origin of mutations, founder events, random drift and population structure. This association is referred to as linkage disequilibrium. In linkage disequilibrium mapping, one compares the trait values of individuals with different genotypes at a marker locus. Typically, a significant trait difference indicates close proximity between marker locus and one or more trait loci. If the marker density is appropriately high and the linkage disequilibrium occurs only between very closely linked sites on a chromosome, the location of trait loci can be very precise.

[0070] A specific type of linkage disequilibrium mapping is known as association studies. This approach makes use of markers within candidate genes, which are genes that are thought to be functionally involved in development of the trait because of information such as biochemistry, physiology, transcriptional profiling and reverse genetic experiments in model organisms. In association studies, markers within candidate genes are tested for association with trait variation. If linkage disequilibrium in the study population is restricted to very closely linked sites (i.e. within a gene or between adjacent genes), a positive association provides nearly conclusive evidence that the candidate gene is a trait gene.

F.2. Positional Cloning and Transgenic Applications

[0071] Traditional linkage mapping typically localizes a trait gene to an interval between two genetic markers (referred to as flanking markers). When this interval is relatively small (say less than 1 Mb), it becomes feasible to precisely identify the trait gene by a positional cloning procedure. A high marker density is required to narrow down the interval length sufficiently. This procedure requires a library of large insert genomic clones (such as a BAC library), where the inserts are pieces (usually 100-150 kb in length) of genomic DNA from the species of interest. The library is screened by probe hybridization or PCR to identify clones that contain the flanking marker sequences. Then a series of partially overlapping clones that connects the two flanking clones (a “contig”) is built up through physical mapping procedures. These procedures include fingerprinting, STS content mapping and sequence-tagged connector methodologies. Once the physical contig is constructed and sequenced, the sequence is searched for all transcriptional units. The transcriptional unit that corresponds to the trait gene can be determined by comparing sequences between mutant and wild type strains, by additional fine-scale genetic mapping, and/or by functional testing through plant transformation. Trait genes identified in this way become leads for transgenic product development. Similarly, trait genes identified by association studies with candidate genes become leads for transgenic product development.

F.3. Marker-Aided Breeding and Marker-Assisted Selection

[0072] When a trait gene has been localized in the vicinity of genetic markers, those markers can be used to select for improved values of the trait without the need for phenotypic analysis at each cycle of selection. In marker aided breeding and marker-assisted selection, associations between trait genes and markers are established initially through genetic mapping analysis (as in A.1 or A.2). In the same process, one determines which marker alleles are linked to favorable trait gene alleles. Subsequently, marker alleles associated with favorable trait gene alleles are selected in the population. This procedure will improve the value of the trait provided that there is sufficiently close linkage between markers and trait genes. The degree of linkage required depends upon the number of generations of selection because, at each generation, there is opportunity for breakdown of the association through recombination. Prediction of crosses for new inbred line development

[0073] The associations between specific marker alleles and favorable trait gene alleles also can be used to predict what types of progeny may segregate from a given cross. This prediction may allow selection of appropriate parents to generation populations from which new combinations of favorable trait gene alleles are assembled to produce a new inbred line. For example, if line A has marker alleles previously known to be associated with favorable trait alleles at loci 1, 20 and 31, while line B has marker alleles associated with favorable effects at loci 15, 27 and 29, then a new line could be developed by crossing A×B and selecting progeny that have favorable alleles at all 6 trait loci.

F.4. Fingerprinting and Introgression of Transgenes

[0074] A fingerprint of an inbred line is the combination of alleles at a set of marker loci. High density fingerprints can be used to establish and trace the identity of germplasm, which has utility in germplasm ownership protection.

[0075] Genetic markers are used to accelerate introgression of transgenes into new genetic backgrounds (i.e. into a diverse range of genmplasm). Simple introgression involves crossing a transgenic line to an elite inbred line and then backcrossing the hybrid repeatedly to the elite (recurrent) parent, while selecting for maintenance of the transgene. Over multiple backcross generations, the genetic background of the original transgenic line is replaced gradually by the genetic background of the elite inbred through recombination and segregation. This process can be accelerated by selection on marker alleles that derive from the recurrent parent.

G. Use of Polymorphism Assay for Identifying Gene of Interest.

[0076] The polymorphisms and loci of this invention are useful for identifying and mapping DNA sequence of QTLs and genes linked to the polymorphisms. For instance, BAC or YAC clone libraries can be queried using polymorphisms linked to a trait to find a clone containing specific QTLs and genes associated with the trait. For instance, QTLs and genes in a plurality, e.g. hundreds or thousands, of large, multi-gene sequences can be identified by hybridization with an oligonucleotide probe which hybridizes to a mapped and/or linked polymorphism. Such hybridization screening can be improved by providing clone sequence in a high density array. The screening method is more preferably enhanced by employing a pooling strategy to significantly reduce the number of hybridizations required to identify a clone containing the polymorphism. When the polymorphisms are mapped, the screening effectively maps the clones.

[0077] For instance, in a case where thousands of clones are arranged in a defined array, e.g. in 96 well plates, the plates can be arbitrarily arranged in three-dimensionally, arrayed stacks of wells each comprising a unique DNA clone. The wells in each stack can be represented as discrete elements in a three dimensional array of rows, columns and plates. In one aspect of the invention the number of stacks and plates in a stack are about equal to minimize the number of assays. The stacks of plates allow the construction of pools of cloned DNA.

[0078] For a three-dimensionally arrayed stack pools of cloned DNA can be created for (a) all of the elements in each row, (b) all of the elements of each column, and (c) all of the elements of each plate. Hybridization screening of the pools with an oligonucleotide probe which hybridizes to a polymorphism unique to one of the clones will provide a positive indication for one column pool, one row pool and one plate pool, thereby indicating the well element containing the target clone.

[0079] In the case of multiple stacks, additional pools of all of the clone DNA in each stack allows indication of the stack having the row-column-plate coordinates of the target clone. For instance, a 4608 clone set can be disposed in 48 96-well plates. The 48 plates can be arranged in 8 sets of 6 plate stacks providing 6×12×8 three-dimensional arrays of elements, i.e. each stack comprises 6 stacks of 8 rows and 12 columns. For the entire clone set there are 36 pools, i.e. 6 stack pools, 8 row pools, 12 column pools and 8 stack pools. Thus, a maximum of 36 hybridization reactions is required to find the clone harboring QTLs or genes associated or linked to each mapped polymorphism.

[0080] Once a clone is identified, oligonucleotide primers designed from the locus of the polymorphism can be used for positional cloning of the linked QTL and/or genes.

H. Computer Readable Media and Databases

[0081] The sequences of nucleic acid molecules of this invention can be “provided” in a variety of mediums to facilitate use, e.g. a database or computer readable medium, which can also contain descriptive annotations in a form that allows a skilled artisan to examine or query the sequences and obtain useful information. In one embodiment of the invention computer readable media may be prepared that comprise nucleic acid sequences where at least 10% or more, e.g. at least 25%, or even at least 50% or more of the sequences of the loci and nucleic acid molecules of this invention. For instance, such database or computer readable medium may comprise sets of the loci of this invention or sets of primers and probes useful for assaying the polymorphisms of this invention. In addition such database or computer readable medium may comprise a figure or table of the mapped or unmapped polymorphisms or this invention and genetic maps.

[0082] As used herein “database” refers to any representation of retrievable collected data including computer files such as text files, database files, spreadsheet files and image files, printed tabulations and graphical representations and combinations of digital and image data collections. In a preferred aspect of the invention, “database” means a memory system that can store computer searchable information. Currently, preferred database applications include those provided by DB2, Sybase and Oracle.

[0083] As used herein, “computer readable media” refers to any medium that can be read and accessed directly by a computer. Such media include, but are not limited to: magnetic storage media, such as floppy discs, hard disc, storage medium and magnetic tape; optical storage media such as CD-ROM; electrical storage media such as RAM and ROM; and hybrids of these categories such as magnetic/optical storage media. A skilled artisan can readily appreciate how any of the presently known computer readable mediums can be used to create a manufacture comprising computer readable medium having recorded thereon a nucleotide sequence of the present invention.

[0084] As used herein, “recorded” refers to the result of a process for storing information in a retrievable database or computer readable medium. For instance, a skilled artisan can readily adopt any of the presently known methods for recording information on computer readable medium to generate media comprising the mapped polymorphisms and other nucleotide sequence information of the present invention. A variety of data storage structures are available to a skilled artisan for creating a computer readable medium where the choice of the data storage structure will generally be based on the means chosen to access the stored information. In addition, a variety of data processor programs and formats can be used to store the polymorphisms and nucleotide sequence information of the present invention on computer readable medium.

[0085] Computer software is publicly available which allows a skilled artisan to access sequence information provided in a computer readable medium. The examples which follow demonstrate how software which implements a search algorithm such as the BLAST algorithm (Altschul et al., J. Mol. Biol. 215:403-410 (1990), incorporated herein by reference) and the BLAZE algorithm (Brutlag et al., Comp. Chem. 17:203-207 (1993), incorporated herein by reference) on a Sybase system can be used to identify DNA sequence which is homologous to the sequence of loci of this invention with a high level of identity. Sequence of high identity can be compared to find polymorphic markers useful with a soybean varieties.

[0086] The present invention further provides systems, particularly computer-based systems, which contain the sequence information described herein. Such systems are designed to identify commercially important sequence segments of the nucleic acid molecules of this invention. As used herein, “a computer-based system” refers to the hardware, software and memory used to analyze the nucleotide sequence information. A skilled artisan can readily appreciate that any one of the currently available computer-based system are suitable for use in the present invention.

[0087] As indicated above, the computer-based systems of the present invention comprise a database having stored therein polymorphic markers, genetic maps, and/or the sequence of nucleic acid molecules of the present invention and the necessary hardware and software for supporting and implementing genotyping applications.

### EXAMPLE 1

[0088] This example illustrates identification of SNP and Indel polymorphisms by comparing alignments of the sequences of contigs and singletons from at least two separate soybean lines. Genomic libraries from multiple soybean line were made by isolating genomic DNA from different soybean lines by Plant DNAzol Reagent” from Life Technologies now Invitrogen (Invitrogen Life Technologies, Carlsbad, Calif.). Genomic DNA were digested with Pst I endonuclease restriction enzyme, size fractionated over 1% agarose gel and ligated in plasmid vector for sequencing by standard molecular biology techniques as described in Sambrook et al. These libraries were sequenced by standard procedures on ABI Prism® 377 DNA Sequencer using commercially available reagents (Applied Biosystems, Foster City, Calif.). All sequences are assembles to identify non redundant sequences by Pangea Clustering and Alignment Tools which is available from DoubleTwist Inc., Oakland, Calif. Difference in sequences from multiple clones on assembles contigs is identified as single or multiple nucleotide polymorphism. Sequence from multiple soybean lines is assembled to into loci having one or more polymorphisms, i.e. SNPs and/or Indels. Candidate polymorphisms are qualified by the following parameters:
[0089] (a) The minimum length of a contig or singleton for a consensus alignment is 200 bases.
[0090] (b) The percentage identity of observed bases in a region of 15 bases on each side of a candidate SNP, is at least 75%.
[0091] (c) The minimum Phred quality in each contig at a polymorphism site is 35.
[0092] (d) The minimum Phredquality in a region of 15 bases on each side of the polymorphism site is 20.

[0093] A plurality of loci having qualified polymorphisms are identified as having consensus sequence as reported as SEQ ID NO: 1 through SEQ ID NO:6578. Qualified SNP and Indel polymorphisms in each locus are identified in Table 1. More particularly, Table 1 identifies the type and location of the polymorphisms as follows:

[0094] SEQ_NUM refers to the sequence number of the polymorphic soybean DNA locus, e.g. a SEQ ID NO.

[0095] SEQ_ID refers to an arbitrary identifying name for the polymorphic soybean DNA locus.

[0096] MUTATION_ID refers to an arbitrary identifying name for each polymorphism.

[0097] START_POS refers to the position in the nucleotide sequence of the polymorphic soybean DNA locus where the polymorphism begins.

[0098] END_POS refers to the position in the nucleotide sequence of the polymorphic soybean DNA locus where the polymorphism ends; for SNPs the START_POS and END_POS are common.

[0099] TYPE refers to the identification of the polymorphism as an SNP or IND (Indel).

[0100] ALLELEn and STRAINn refers to the nucleotide sequence of a polymorphism in a specific allelic soybean variety.

[0101] CHROMOSOME refers to the chromosome for a mapped polymorphism.

[0102] POSITION refers to the distance of a mapped polymorphism measured in cM from the 5′ end of the chromosome.

[0103] A set of 1445 mapped SNP polymorphisms are identified in Table 2 along with 181 public SSR markers. More specifically, Table 2 identified marker mapping as follows:

[0104] Marker refers to an arbitrary marker name for a SNP, e.g. “Q-NS0092678”, or a name of a public SSR marker, e.g. “SATT405”.

[0105] MutationID and Sequence ID are the same as in Table 1.

[0106] Linkage Group refers to a soybean chromosome.

[0107] Map Position (cM) is the distance measured in cM from the end of a soybean chromosome.

### EXAMPLE 2

[0108] This example illustrates the use of primer base extension for detecting a SNP polymorphism. Reference is made to Mutation ID: 99994 in the polymorphic soybean locus of SEQ ID NO:1654. Three polymorphisms in that locus are described more particularly in the following Table 3A which is extracted from Table 1.

TABLE 3A

| | MUTA- | | | | | |
|---|---|---|---|---|---|---|
| SEQ | TION | START | END | | ALLELE 1/ | ALLELE 2/ |
| NUM | ID | POS | POS | TYPE | STRAIN 1 | STRAIN 2 |
| 1654 | 99989 | 211 | 211 | IND | */PI507354 | T/WILL |
| 1654 | 99990 | 341 | 341 | SNP | G/WILL | T/PI507354 |
| 1654 | 99994 | 988 | 988 | SNP | A/WILL | T/PI507354 |

[0109] TABLE 3B

| | | | | |
|---|---|---|---|---|
| Description | Name | Probe | SNP | Sequence |

| | | | | |
|---|---|---|---|---|
| PCR primer | 99994F | | | CCTGCGATTAAAGCACCTAGCT |
| PCR primer | 99994R | | | TGATGGTTTTTGCTGTCACATA |
| | | | | TCTT |
| SNP probe | 99994V | VIC | A | VIC-ACAGGGTGCATATC |
| SNP probe | 99994M | FAM | T | 6FAM-ACAGGGAGCATATC |

[0110] With reference to Table 3B, forward and reverse PCR primers (“99994F” and “99994R”) and reporter dye-tagged probes (“99994V” and “99994M”) are designed to hybridize to template DNA sequence in the polymorphic soybean DNA locus of SEQ ID NO: 1654 around the A/T SNP polymorphism of Mutation ID:99994. Such probes can be designed and provided by Applied Biosystems for their proprietary Taqman® assay.

[0111] A quantity of soybean genomic template DNA (e.g. about 2-20 nanograms) is mixed in microliter total volume with four oligonucleotides, i.e. “99994F” forward primer, “99994R” reverse primer, “99994V” SNP hybridization probe having a VIC reporter attached to the 5′ end, and “99994M” SNP hybridization probe having a FAM reporter attached to the 5′ end with appropriate amount of PCR reaction buffer containing the passive reference dye ROX. The PCR reaction is conducted for 35 cycles using a 60° C. annealing-extension temperature. Following the reaction, the fluorescence of each fluorophore as well as that of the passive reference is determined in a fluorimeter. The fluorescence value for each fluorophore is normalized to the fluorescence value of the passive reference. The normalized values are plotted against each other for each sample to produce an allelogram. A successful genotyping assay using the primers and hybridization probes of this example provides an allelogram with data points in clearly separable clusters.

[0112] To confirm that an assay produces accurate results, each new assay is performed on a number of replicates of samples of known genotypic identity representing each of the three possible genotypes, i.e. two homozygous alleles and a heterozygous sample. To be a valid and useful assay, it must produce clearly separable clusters of data points, such that one of the three genotypes can be assigned for at least 90% of the data points, and the assignment is observed to be correct for at least 98% of the data points. Subsequent to this validation step, the assay is applied to progeny of a cross between two highly inbred individuals to obtain segregation data, which are then used to calculate a genetic map position for the polymorphic locus.

### EXAMPLE 3

[0113] This example illustrates methods of the invention using polymorphisms disclosed in Table 1 and in the DNA sequences of SEQ ID NO: 1-6750.

[0114] A breeding population of soybeans with diverse heritage is analyzed using primer pairs and probe pairs prepared as indicated in Example 2 for each of the polymorphisms identified in Table 1 based on sequences of SEQ ID NO:1-6750. Closely linked polymorphisms are identified as characterizing haplotypes in adjacent genomic windows of about 8 centimorgans across the soybean genome. Haplotypes representing at least 4% of the population are associated with trait values identified for each member of the soybean population including the trait values for yield, maturity, lodging, plant height, soybean cyst nematode resistance, brown stem rot resistance, soybean rust resistance, sudden death syndrome resistance, drought tolerance and cold germination. The trait values for each haplotype are ranked in each 8 centimorgan window. Progeny seed from randomly-mated members of the population are analyzed for the identity of haplotypes in each window. Progeny seed are selected for planting based on high trait values for haploytpes identified in said seeds.

The application's sequence listing, which the Patent Office published only in electronic form, follows.

SEQUENCE LISTING (6578 sequences)

SEQ ID NO: 1 - DNA, 362 bp, Glycine max
tcaccagcctatccaccaccttctttgggaccttgaaaaaagaaaagaaaaagataggaataaaaatcctcttaaaactgataaataattatgcaagcgtcttccaattacattggctttttctataatttgaatgttttattattgatttttttagataaacttaaatgtaccacagatatttaaaggaaaatgaatatatattttaaacatgtttaacatatgagctagtagtgtaatattttttacattgtcattgtttccactttgaaagttttctcacacttaattggatcctatgtctcacttcgccttgggtttgccccaatgggtatacctaggtacgaaaagggcaacgacaa

SEQ ID NO: 2 - DNA, 398 bp, Glycine max
tctaaactgtattttctgcttctggtccaagttatatttatatatatatatatatatatattaaaagaatatgatttaacataaattctagtaattaggagaagaggtggtggtccatcaagtacacacagctttgtcttgcttatcaagcaaccccctaatactgcccactcatctctctctctctctcactcttgtgtgtgcaaaatattcatggcaaaagcatcatgatcagcactccagctcaaagcccatgtgagtttctattatccctttttcccttatttccatctgggtgtctcactctgtctttctttaatttctctccctaaaaatctcggctttattattatatgtctcacattaatctgttatgcttaaataatgagaccgtaatt

SEQ ID NO: 3 - DNA, 548 bp, Glycine max
tcttcaagaaattcaacatcaaggggtcttactttccctgagatggttatgcacgagggtgcggcttccaatgatttcagtgaccagcttcctgctccttggcaattgaagacgcctaccaccccagtcagaacatttaaattacaaattttcagcagactgcaaaatagtcaataataatatgattttcagtaaagaatgaaaactattcagaaaattctggttattcttagagacagatagtaacattttaacttaccttttaccatccattacaggatcttcaaataaacaatctcaagtagggtggccggcatatcttgctctcaagactgatccatcaggcagcactagcttcttcaggattttaaaatcatgatttccaggcttgtcactgtaatgtatcaaatttgataaatatcttcttctttttttccaatttttatgttattaagaaagtgatttttaaaaaggtaaaccagcaagatcaagacttctatctgctttggtgccttacctaacatatactgcacaaccacctattgatc

SEQ ID NO: 4 - DNA, 439 bp, Glycine max
aaccaaactcctttttgtgttttacttaggcagccaaatgcttgggatatcttagattgaaaagaagaggaatttgtaacataattacagtcaacaaaaataccaatgggtgctatctaatcactaggtaaaaaaatttagaaaaaaaaactgataaaaacagcaaagggacacaattcaattgaaatatggaaactgtaacacattatttaagttcatacttaattagcaagtttgacaaattgaatatggagagctagcatagaaatgatatcattcattaaaatagaaataaataaataaatagcaaggacaagttgatcttaaatttttaaacagtacaacaataagcactaagtagaccaagacaccatgatagcgataatatcaccagttcagaattagagtatcagtcattgaatatgaaaaatgaatgtca

SEQ ID NO: 5 - DNA, 480 bp, Glycine max
tagttgagttggcttgattgttatgctgcaagcagctggaaccttggtgagacttgttcagctgttcaccttgaggacaaggtgaaactttagtgagagtattgttatgtctgttaatatctgttggttgtaaatatttgttagttgttatattagctagtgagagagggagttagttgtttatatctgttagtttaatggctgagatggagaggaactaaggaagattgcctataaatttgaggggaggtcgagagagagacaagttgtcatttgtgacaggatttaagttctacattgctgtagttggggaagaattcccctactctattaataagataccaggtttctatttttttttgacggagataccaggtttctatcagactatagcatatgggaccaataacgaaaacatacaacagaatcactgctaatttactttctcaaatatctgattagttgtgttgttagacctga

SEQ ID NO: 6 - DNA, 430 bp, Glycine max
acttcatttaggaaacattgaatttgttaagggaggggaagatgaaacagattcctctcagcccaaggatgaaaaatcccatttccatctcaaaatcgcagctgagcttttgatgtaagtgaagtttctaattaatttattgtttctctagaagattaagcttattttttttatcggcaaatattagttagaatgttagttttgttagcagaggggatccaacccacgacctttccctccttctcttttcccttaactatccaacccacattatatctccttctggaagattaagctttaagtctattacatctatggtaatttatttatttgtttatgttaggtgtgatgagaagtcccttgaagactctttctgcaaacgtgttatggtgactcgtggtgacaccataacaaaatcacttgatccaaa

SEQ ID NO: 7 - DNA, 528 bp, Glycine max
gtagataaactcggtcgtaaactctcaatgtcaatcatgttcttcatgtgctgtattttccttctcccattattattctatctgcctgaaggcctaacaacgagctttttatttctagctcgcatatgcatcacagcaaccttcacaattgtgtatatatatgcacccgaggtaatgtatgctactatattgcaaaataatttttaattatcttgttgaatcagagagtatttgaaatagaggaatgctagcaatagattttctaacactcactctactattagttaaaatttagtgaaaactaaaaatgtaagagagagattgattaaatataaactttgtatttcgatacgaaaattgtcctttatgttacagaaatctcccttccactaattaaaaaatgaattgtatgaagtacaatatttattctcaatatataagataaatgctggatgtggtttgacagggtgtaagacaataatgttttgatctaatacttctttatacatgactgaaatttaaaatgaa

SEQ ID NO: 8 - DNA, 539 bp, Glycine max
aagtccttccaccaagagggaaaatgactactcattctttcttcagcaatggatctccacccttcatatttcgaaattagaactctggcccacatgtctccctgattctgaaatagctcccagctccactttcctagcagcgctgtgttaaaagcccgtagatctttgatgccaagaccacctttgtcttttggaagacacacggtcttcaaattgacccaggcaatcttacgctattccaaatctccaccccataaaaatctacgctgaattatagtcagctttgtctacaactttgtccggaatcctgaaaaaagataacaagtatataggaagcgctgttaatactgaatttatcaaggtgactctccctccaaaggaaacatatttttgtttccagctagctaattttctttcacacttcctaacgacaggctcccaaacgtcactatgtcttgagtttgccccaattgggataccaagatatacaaaaggcatggacagcacactactatttaaataatctgcaggcatgcaag

SEQ ID NO: 9 - DNA, 537 bp, Glycine max
aagtaacaaagagcatgcttctgcaaacagaggttggagttgccgaaatggcaatccaaacacgcactaagtctgtaacttattctcaggttactgcaagtgcaagtggaacttccttgttatctattcaaaagctcacatcataaacatttttttttaccaagatacaccagatgaatttagaggaagatagaacggaatatcttagatagatttaggaaatgagaatgctttataattcgaggaaatgccatacataggttcagcatatcatccatatatatagactcttgacacccttagtggagactatttgctagactaaaaattaatcaagtgcaactcattagacactgataccacccatgaacacttaatagattttatcacgcacttcatcaacatacaatttcctaagtgtgtcaaactattattattggtattatttccaacacatactgtgaattcacaagggagctttatctacagactacatacagcactagttattaaggaataatgaataccttaaaagct

SEQ ID NO: 10 - DNA, 418 bp, Glycine max
aaagcagtgtagcagttatgcataaaccaatggaaaaagagtgagaagcccatccaataggcttattagggttttctactctcttttttcttatctaacttcaaaagctgcaaatcatgtattatttgcaagcatatattactgattattttggagtagtactattcatgttctcaacaaatcaacgattactgggtctagcaaacctcttttagttatgtttctactcagattaataatgctaaagcacaaaaatcgtgaggtgagagagactagtaacacagcgagagcagatatcaacaaacaccgagtaaagaaccagaaagagaaaataaagaaaacaaatgagtggaattaaagtgaaacagaaaatgactagtgactactactaaccgtaaagagttggaagagaagaacc

SEQ ID NO: 11 - DNA, 549 bp, Glycine max
agagtcgacctgcaggatccttctgtttctttgttaaggtttatggattcagttggttctctacttttcagtgccaatatctgcaccagaaaatattgattaatccaataagggtacaataacaaaatatgcaatatgcatgcagaaagtaggacctaaaaggctaaaacattaaacaccacccatattagttagccccccaaaagaccaaaacaaaaagtgctaacatgagagttttataagatatctagattctagaaactagaatatggtatgatgagaaattgaaaaatgaaaacggttatgtgcaaaacaaaaccagtgtggactatgcaagagagggaatggaagttgtcattggagagatgatggatcattgaatcttgaagaagtcactgtagatgaaaggaaaaagcacaactttatagaaagtcactcactagttagagaaggggtgaaaggaacggttctggaaactatacacaagtcaaaaaagcataaacacttaaagaaaaaaaaagatcatcattgctaccaccaagctttatt

SEQ ID NO: 12 - DNA, 543 bp, Glycine max
ttcgtccgtgtctggccccaccacaccgtcgtctgtcccgactgcgacggcggcttcatcgaagaaatcgaacacccgccccgctccgtccacctcgacccccgacgccaccgccatcgcttccccgctgccgccatgtacatgatcggacaacgaccctcctccgacccccgccccgcctcatccctccgccgcacccgccgcaacggcggcgaccgctcccccttcaaccccgtcatcgtcctccgcggcggcgcagccaccgcggaggacgaaagtcgcggctttgaactcttctacgacgacggcaccggttccggcctccgacccctgccaccaagcatgtcagagtttcttctcggatctggcttcgataggcttttggaacaactctctcagattgagatcaacggtattggaaggtacgagcaccctcctgcttcaaaagcagccattgattcattaccaaccatcgaaatcgatgacacccatttagccatggaatcacactgcgcggtctgcaaggaagcttttgaaacaagc

SEQ ID NO: 13 - DNA, 410 bp, Glycine max
attcttgctaaatgaaacaaaacattattctgcaaaggagtgcgacccccaccctagataccttcaactttttttcttttgaaactttaaactcggattcagttcgatggccaataaaaagccatcataaggaaactctaaagcaaagttaacatagaatcaaacaaaactacagtttcaacattgtttttcctccttatcctaaatcaaaacaatgtgtcaaggtctaacagaggatacataaaattttacgtctaaagtaagtaacacttcctgagatgagaaaaaaaaaacaaaaatgaaaacagaactaagattgagggcatagaatgatctattgatgtgggaactctttctgcctacttttgcttgacaacctgaattcctgaggcgattgtagtacccttcat

SEQ ID NO: 14 - DNA, 530 bp, Glycine max
tgacgttgcttccaggttttcttactacaaaggccattggaatctgccctgcctcttcatcaggatacctgtccccaaaagattagcagatttagtgaaccttgttacaagatcaagtcatgtatgttaaagagaatgaattgtagcaacacctttttcttttggattgaatttgaattctcaaaattgaacgtggataaagtaagtaatagactaatcatactcattgatgaaaaaatcaacaattgatattcaaacacatttataatttgttattatgcatgtgcatgtaatatcgaccgatgactttctcatcaactgggattatttagtttaacttttaaagtgatttgctcactttaaaggagtcaaacacacaacaactaatagttcaaagtcaaaaaaagaaagtttgattccccaggggaactagaattgggaaaaagctagtagatttaaatcattgtcattgaagacaactgatttgcttctgagcacacaacattaaaggacttgatacatacggaact

SEQ ID NO: 15 - DNA, 524 bp, Glycine max
tattttatatcaccactttttttagggttcccattgatagccatgttgtgatggtgaccagagcatcaattttctgaactgtgtattcactaaactgctgaacctcttctaagcaaatttcataacatatgtctagcatcttaattgttgttctcattggcaatactaacctaatctattaaaccaatcatcaaactggacatagtagtagcatttgcactataaaataggcaatgtggttgtataattaaataattaagttgacatctacatgactatatcaaatgccacaacggacctttataaagctgctgctcaacacataaaaatccccaaaaatatgtgctttgttagactgcaaacaaaataaagcttatcaacacgtgaatcaaatacactgggcataaatctacaatgtggttaaatatcaccttaacagcattttgaatagattgacatagggacaacattttagatgcatcttggggtgtaaatgatgaaggcaataaggaaagagaatcact

SEQ ID NO: 16 - DNA, 468 bp, Glycine max
tttttgtagtggaatcacccttgcttgaaaaccaagcgttcatgagggaaacataagagagacagattcggccatacctaagcaatcatactctctcttttttttagggaggaaagaaggaaggcaaattcaccctataaaaggtatcgacattattgcaactctcttgctgtcaacactccaacaaagggttactccaaactctctagtatctactgtctagtagctatcttgaataaacattccaacagatcaattttggttaccaaaattaaacttgtgacatatatgtcaagtaccaatgtgacaatgtaatacttagacatatgaacgttggaatcaaatgtggatcagatgagtgatacgctattgtaaaagaatgcaagccaactttttttttttttttttacagttatgctccaaaaatggataaagaaaaagagggagaaaaaacaaagatatgctaaa

SEQ ID NO: 17 - DNA, 461 bp, Glycine max
ttaaagatttcaatgttcttgatgaattcttgggggaaaaagggatgctatttactgtccttgctgctgacttctcttttggctaggactcactttctactaatgcgttcttgctggacttccagttatttggatactttctattgtattactgcttccgggagccatgtaactcatgttcttggtagccattttcctctcatcacgtcatcgaagctttatttcttgtggacatgccaagctgcaagcttctctcatggttcttgattgaataaacggactgggtcaacatattcatcttgcaggccagccaaataagcatcaacaagatagtctttggataagcaagcttacaagaaatcacatcaaatgcatcattaaattctgccaaggtgccatgctgttgcaaacgcctcaaatcttgaaggtgatcttgatggcatatatggtggtgcccttct

SEQ ID NO: 18 - DNA, 482 bp, Glycine max
cttcatggtcccaaatgatacaggttttttggtttttcatttatctgtttttatgacaaagctttcctttctgcattaacattttaacatgcattattttgcagttgaactttctcaagcattttttagggggagggttcatcaagcatattcaggttggctttctcttggcatttttcatcagtaagattttaattttggtgaaaagcttatcatttcagtggttaatttatcatttttcgtttacccttcttctcccttggcgaatcaggaaaatgagttccttcaagatgtatttaatttcaaaccaaagagaagatatcttaataacaatgaacatcggatgtctagtggtgagaaggttggtttctatgactgattgtgtttcactgtcatttttgttactgaatgttctcttatctgtcggctactctctcatgttatatacttttttttcctgtttcttgccattgtgtgctgat

SEQ ID NO: 19 - DNA, 479 bp, Glycine max
aaggagaatgatgcagatcagcacacaatgacaagacacgggggaaaagtatataacatgacaaagtagccaacagataagaggacattcagtaacaaaaatgacagtgaaacacaatcagtcatagaaaccaaccttctcaccactagacatccgatgttcattgttattaagatatcttctcttgggtgtgaaattaaatacttcttgaaggaactcattttcctgattcaccaaggaagaagaagggcaaatgaaaaatgttaaattaacaactgaaatgatgaaaaatgccaagagaaagccaacctgcatatgcttgacgaaccctccccctaaaaagtgcttgagaaagttcaactgcaaaaaacgcatgttaaaatgttaatgcagaaaaggaaagctttgtaagaaaaaagtttaaaaaacagataaatgaaaaagcaaaaaacctgtatcatttgggaccatgaagatgt

SEQ ID NO: 20 - DNA, 421 bp, Glycine max
acagaatagctggtccccctcctcccaaataataaaaagtcaacatacagtaacagtgtaacacaacaaactacacataaggtcatgatgtagctgatcaacaatgcttgattattatagttaaaaatttcttagcaaaatccatatcagtggatactctttctcaattttcagtatacataggctccctcgaactaagttcctttaattgaaagatgtcaagtgcactgcatgttcttgagactgaatttctatgtccaagacctcaaagagtgagtgaactttctatcaagtacatgcaacttggtaagatgtatagtgggtctttcaagctaaaagttatacacgacatgggacatagatacaatacaacctgaatatgagaatataacaaatgcaaaatatttgagcacagaaatga

SEQ ID NO: 21 - DNA, 462 bp, Glycine max
agttgaaaaccacattggattataattgttgcatatttagaatagttgtgcagcaacatactgaagaatccaatggcaaacaagtatgatgcttattgcaacaaatgttgaaaaatgcccctattttccaatcaagttggggaggaggggttacataaaagttacaatgcatattttgaactaaagaattccatacatgccagtcaatattgaggttggaagtcatgcctgcggtaagtttgcaaataagtggtaacatattcctaagaaaattttaccactatttcaacatacagatgctgctaaagggccagccagttactctgtttaaaaatcaaagcaatggtgctaagacgctaatgaaccacctgcttattggattaaaccacaagacatcaaaaagataagttgtatgtttgtgcaagtaaatgacaatggcagtttgtatgttttagctctcta

SEQ ID NO: 22 - DNA, 521 bp, Glycine max
tttctccttatcttgttcaccaaacagttctgtggctttgtcaggattcctaagtatcaaccgtgacttaatattctgctgaagcagtgatgctactaccagctgccctgaattgcaagggatcaacttcttcacaaacttccccaagcaaattataggcaagaattatgtatacttttcacagtttacaactctaatctgaatgtataaaataacattataaaggggatcccaaaggcatataaatgcacaaggaaggatacacaaaaaacagaagttactacaatactcatgttgatttaatatcattatttcaattggttatagagtaaaccttcaatttcatcctctaaagattggggtgtcaccacatcagtcctcagatgtttgtaaccagattagtccctctgatatttcagccaatcatagaaagagtgtcagaaaaagagtgtcaaagagagtactgcattactcatgttacaattccctttacaactccatccataccactaacaataaat

SEQ ID NO: 23 - DNA, 476 bp, Glycine max
acaaattttgaagacaaaaatgaacccctcacaaagaggaaaacgttgaaataaaagtgaaaagttgatcatagtcaactccctggttctgttgggtggctctattattgtaaactttaagatgtaagcaatttgagcagagcgtgacaaatacctggtgaagaagaagttttgttggtggacactgatggtgcatctgagtctaattttaatgttggtccatagaagacgtaggggtcaaatctaattctacaactgggttttaaaacattgccaccagccttgccactacaacactctggaatttttgaaatagcttcttccaagcacttggtgcaatcttccgatgacaaatcaggggtgcactgcgtataaccaaatatggtttgaaaactcggagcaggtgtgctagccgtagcatacttgagacgagagtcacttgatgcagctgtgcgtgttagattcctcatcaagct

SEQ ID NO: 24 - DNA, 515 bp, Glycine max
agttattagaactcctgcccatacagggatgtggaagagtatgttcaaagcaaaggccgtgccaatcactgtcacaatcaagtttagataaaattaatgagcatcaaagtatatagtctggttcaacttatatatatatatatatatatatatatatatatatatatatatatataattgtcaactttatgaaaaagcttttaacaaaaaacgtaattattatttttttaaaacaagaaagcaattccaaagctgctaagaatagtatcttgttatttacttatgaataatattacttttaatcataactgttaagatattctttttcttgtctttatctcctcaattatcttatacctacctcattttattttttttcctcctggaaatctctctctttattttaaaattgctatgaaaagctattgtaggacattattcttataagattttgattgaaagggaaagaaaacaaggtgatggaacaatagaaaaacaaattagaaccttcaggt

SEQ ID NO: 25 - DNA, 401 bp, Glycine max
atatttacccataacaccactgcacctgttaatgcatgacaattttcattaacttaagcataagtttacttagagcccaagagaaaacaagataactgaaccatttgattcaaccatattgatataatcaaacattttatactacaattgcaagagaatcaaagtataagaattacagactaaaatcacagaatgaatattgctccaatgcatgctattgacaaaaaaaaaatgatattgctgagccctgagcttggttatgctacactccattctattctaggttaatcctttgaaacaccaataaaccaaggttcataacttaacaaaaacacaagtggtggtttactttatgttagagtcatttagaaaaaaagggttttagtatgtatatgggcttg

SEQ ID NO: 26 - DNA, 661 bp, Glycine max
acatataccatattataaattgtacctttctggcacatctgttccggatagatcatctcttggatctggctcagtataacctgcttcctttgcttcagaaactacctcactaaaagcccggccgtctttgaagttattaaatatgtaactcaaagtcccactgcagagaatcaacttgaaagaattagttgtgctctgctgcatcatcagagtaccaacctagacttgtgaacaaataaaagtatatttaagattcaagaccgtcagtctgtcactcttcttttggtgcaaacataacaggcacactacagtctcaacctccacagttatcactaatcatagttgtgactgttacacagctcaaaggaaaaataaaattggaacaaaatggaatccaaattttaaattcaatagaaagtttttattataatagacagattttatgtctgatgcaaaaagaaaacaaatagcatgaagttgttttaaggaacattcagcagattatgttatatcctcttacaaacatagaatgtgaaaaaaattaaaatttatagaaaagcagcttaaatatatgtctcaaagtaacaatatagtatctctatgttaatataagaaaaatagttacggatacgaatgacacagggaggtacgaatgacacag

SEQ ID NO: 27 - DNA, 524 bp, Glycine max
agcttgcatgcctgcagaaagatatggagcaatcagattaattaaattcagtaaatgtaggacctccaggtgttcatgtttcaaaaccttatcttctttacattcatcagaagtgctcaaagcatttaatttcagtgccaaagcactgcaacttttcagctcagacaaaacaaacttgctagcttccttggtaactgtggaggatttgatagacttgaaaaccttctcaacagattcttgagcacatctgcgtacctaaaaagcaaacaaaccacaacacaatttaaacaaagaaaaaatccataagctcagagtaatgaaatgattaataggcatggaccaatgtctcgaaatcaaaggtcatatcataaccaaatgctgattgcattgtaaggtaaaaccatcaccaaatctatacataattggatataaacaaggtttaaaactaaagttgcagacacattagcagcaccaaaaattgcagaatattgaaaatagattcagttgattccttttgaaagtga

SEQ ID NO: 28 - DNA, 554 bp, Glycine max
aaaaaaaaggacaatcattaaacacgtatctaaaatgcatttcatcaaaatgaaaaattatgcaatactgaaaatccatgcgtgttataaaggcaaacaaaatgaacttggagagcaatgcaacaaagtactttttacagtcaatgtgcactttaaaaaatagtatatttcatacttacataaaagagctgaatgagtgcaagacgtacgaaagaataaaatttcaaagtgccacctaagtcacagagtttatgagaaacaaactgtgagctttggtcaggtaatatccaccacaatgcagggatgacaaccgagtttaggacgaatatactgcacaaaaatttaaaagatgttgaaatcattaaacacgtagattttagattcatgatttgttcaggacaatcaatccatggatgacaaaaatatgtacaatcagattccttcgagtcattatgtcaaaagtatacataatccaatttctttgccacaaaatttcattcactgtgttgaaataaattgaagctagtttcacttctccttctgcaggtcgactt

SEQ ID NO: 29 - DNA, 543 bp, Glycine max
tatgtctttcttgtctttggatggaatttgtgtccttgagaaaattgcctgatgtttttgttacttttctggttactaacacatgatgattgaagggtaacttttgtttgttatgttctctacttctcctcaatgtaaaattgtagacaatggttgtgttggtaaaattgctatggtaaacctgacgggagaatcatgcttatttgttagcagatagatgaaaatgtacaaagggaaattataaatcacagatcactgaggcatcctaacattgtcaggttcaaggaggtgtgcaaacccctaatgtctgatcctatttctttctatcttaaaaatattttattaatcgttttctgatgtgactttaggttatattgaccccaacacatttagcaattgtgatggaatatgcttctggaggagagctatttgagagaatatgcaatgcaggaaggttcagtgaggatgaggttcttatcttttgcattcattcatttgtgtaatgctgctgtatatgccttttatgtctgttttttgttttat

SEQ ID NO: 30 - DNA, 521 bp, Glycine max
tatttaacttgttttgttttggtgatctgatcacatgagcaacgcattagactgttcttagtgtttgatatataattttacatttcttattaaaagtacatcacaattttcaattatggcatgtttatttatctgtgtaaattaaaaattgacatttttttgtgtgtggatgtatcatggatgtgaagttgtttaaggataatgggtcggaaagctggtacgctttttatcaaccccaagagattcggtaatcttcaaaaaccttgcatgaaggaaatggcattgtttctcagttgtatggctgcaaaccatagtgacaccgaagcctgtgctcgtcagaaggagctattgaatgtctgtattgatgctcaggtaataatatagatatacagtttaatcaaaactgcttttagttgcctttgagttgagaatttaagttgtgcaagagaaaaagaaaaacacttcaattttgtttttacagagtaaaaagaacagaaagtcttgggggagtatcaattatc

SEQ ID NO: 31 - DNA, 539 bp, Glycine max
gaataactacaggtctctttacaatactctaataccccccctcaaactcaaggtggttgagactttgacaaagtctcaattacattgagtttgcctcgaagaaaaacaaatctggttggagagagaggtttgctgagtgcatctgcccattgatcaagagcaggaatgtgatgaacaatcagttgcttgctgagcacattttctcaaacaaagaagatatcaatctccatgtgctttgttcttgcatgaagtactggattatgagtgagtcagtgagagttacctttgattaccacaaaatataacaggagttatgaatggtactcctaattcagttaacaaggtcttgatccaagaaatttctgcggtggtttcagctagacttctgtactcggcctctgtgctggatcttgcaacaactttctgcttgggagaccaccaggatatgagattaggaccaaagtatatagctgcgcaccagaagtagaacatctatcatcagtgtctgatgccaatcagcatcacaaagagctctaata

SEQ ID NO: 32 - DNA, 488 bp, Glycine max
atagtctaataggagctctttctggtgagctttatgtactgaaatagtctatgttcttctagcatgcttaattgaggacaaatagtagcaataaaatggatatttgtatgtgcagggattgcaagaggtggaggatttcagcaaataggggcttatgtgaaccttggagcctattatcttgtgggagttcctttggcattcttattgggttttgttctacatttcaatgccaagggactctggatgggaagtcttacagggtctgttctacaagtgattattctgactgttgtaacagtgttaacagattggcagaaagaggttggtttatactttcttatgtgacttctccattgctaataattgcttgagtcatttgttttttttcttttccaactagtttttgagcccttttcgttgcctttgcttgatgaatccaatggatgtctgttaattaaagtggctctaaatgattatcttttgtggtt

SEQ ID NO: 33 - DNA, 505 bp, Glycine max
acaatccattgccccgggcatacaccttactcgcttataagataagctcacttaaaagaaactttttccatttacatcctcggttttaccaaaaggagtgacacgcccattactcccttaaaatatcatagagattgttccaaagaatagccaaccatacaaaattgagtcgtttattgtttctgaattagatatgcagataccacacaaatttggagaacgagcaatatgacaaggacatacacaatgcagcatgttgaagcaattttgatatccatgaaacatggttcttatatcagacagaatattttgtgagaaaattagattcaggaggtaaaacatataaaaacaaataaaggcaaacgaatagaaaatcatagtgtctacctgaaggtgttatcttaagcctaagcgggagcttgtgttacatttcctattgtttttcgatcaaagatttcaatccagtatccatcaggatctttaataaatgctatacctttcattt

SEQ ID NO: 34 - DNA, 429 bp, Glycine max
aagtgtgatagaactaattagctgagtaaaaacttgaactttgggaggattcaaggataatagagcaaagaacttgtaatcattaagaaatccaaacttgggatccaaaataacatttctttattcaccaatagtaaatatagataacttatgatcaatgttcaatgataggcatgtgaaattcagcattcctgataagtgagtattgtgctatcccttagttaattaaatattttgacttatccaagtagtaataattattaaagaaattcatcgtttcctttaggttagaggatgcatatagccccctcatcatatccttgatgtcccattaatttttacagttaggtctctatgtatgtttcatgcagatatatagtttacacttaacaaaaacatgttaatagaacaatataagctagaaatttt

SEQ ID NO: 35 - DNA, 417 bp, Glycine max
tcaaatgatattcctgttgatcatttgtcttattctatcccatttgatgccacccttttgtcctcttgtgaaccttggtctatctttataccctttttaattagtatttttattttcttcttcatggaacatgaggctcttaattggtgctgttttgtgcctacagttagttattatgtacatacagaaaacaacaaaagacaaacatgatacttacactggaaaatagtatcaaaatgaaggtgcatattgcatagtaatgaactggttttctttttcttcttcttttttttttaaaaaaaagatgtgcttgctttttagctggatttatttaattcaattagtctgatgccaaaaaaatggtgcatttagtgaattggatgggtgtatagcattgattttaaactgaactactaa

SEQ ID NO: 36 - DNA, 433 bp, Glycine max
ttgccaatgcagctgctggcttgagtgcagccatggcagctcagcttgtgtggacccctgttgatgtcgtgagccagaggctgatggttcaaggtgtttgtgattcgggaaatcctaaggcttcagctcttcggtacatcaacgggattgatgccttcaggaagatcttgagcagtgatggtcttaggggcttgtataggggttttgggatatcaattttgacctatgccccttcaaatgcagtttggtgggcttcatattctgttgcacaaaggatggtttggggtggagttgggtactacttgtgcaagggaaatgatagtgcactgaagcctgatacaaagactgtgatggcagttcagggagtcagtgcagcagtggctggtggcatgtctgctttgatcaccatgccactggataccatcaagacaag

SEQ ID NO: 37 - DNA, 555 bp, Glycine max
attccatgaaaattgaaagaaaatcaaatgcaatgttaaatcctagattcaaatctcgcacagaatagtgagaatacagaaaaactgattcagacagctcttacacatatggtggcaagaactcctcttggaaaatctacataaagcttcctctgaagctccttttctattcctctcctatcaacaaagcacctgataaatatagcaattgcagtccctcctttaatcaaaagctgtacacataacaaacaatgttggaaacaactcaactaacctagccgaagcacttgctattttggtttctaaaattggaagagtctatacactagtgattaccgatcattaacaagacgaaaatcatgagaagaaagaaggctgtgtagttccttttcccaacacagttattcagccactggagacaagcgatggcaattatatatttatatcacattatcacaataaccaaagatgagaagaaatacatgaaataagaaatgactgaacataatactacctaccctgcaatggtgatcaaacccttcaacacagcgattg

SEQ ID NO: 38 - DNA, 401 bp, Glycine max
ctgaagcagctgaaatctcacgcggccatgttcgggacatgggttgttgttattcgagtcaccccttacgttcttcattttctctgcgccgagaaagaggaacttaagctcgagctttagcttctcaatcttccccgccaggtaccttcctcgtttattctgaattctcacatgattttttcctgcaactcactcttattttgtagtgaaaagttatggatacatctttaacagagcaaaattaaaatataaatggtagaataattactcccataaaatctttttattttccccttgaaatattggcctttgtttctcccatacctaatgtagcttaagaagtaaaatttgtacagacaggcgggtaatatatgctgtgccaaaccctggaatttacaacc

SEQ ID NO: 39 - DNA, 436 bp, Glycine max
aatagtgttggaggaaattgtccaatggcctgcagtggataaccttgtcttcattgacccaagagaagaattcccaccaaataggcataatcttatcacatttgaaaaaaagatgggatgcagtttcaggttgactgtggcagaaagggcagaggtcattttcaacctgaatttgtctcttaaccaggttatccttggtagggagtctatcccaaagcaacctccaggcaaaagaaagtgccctaggagggatttttatcttacaaagttgctggaacccctcatactgaccttgatcatccagctcagattgaagaacttggtaagtagatttagttgtgaaatctccattagcttcagctctccaagtccaggtgtccttcaggttgatatttagactacaagcatggatttgatcaatgaatttagacgctaa

SEQ ID NO: 40 - DNA, 530 bp, Glycine max
tctggatcatcttttcttggaaaggatgcaacttgggccacagcgccgggttgttgtagaaagagaaagggttttgaaggctttgaagttgcatgtgcagttggagtctttcaagagctgaagagcttagggcatttgaataagaattctcctctattccattgtttgtgtcttttgcgcttaagttagattgtttgcgcctcccgagcagtttcttcttcaatctagtgttccaatagttcttgatgtcgttatctgtccttccaggtaactgagcagcaattatggaccacctatacacatagattatatatgttggaacatgtttagttaatttctaagaatattaattaaccaatgaagaagaagaaaacatgtggagctagctagagagattctagtgacaaaacaaaaaggacaaacaattatgttcaaaaactacagcacaggctcgtagatagagatggggggttttgagagagaaggacctgcttccaatgctaatgtacaggctgcaggcatgcaagctt

SEQ ID NO: 41 - DNA, 479 bp, Glycine max
gctggaaccttttgttacattgatcctgagtaccaacaaacaggaaggttaacaaaaaaatcagacatttattccttggggataatgctactacaaatcatcacagccaagcctccaatggggcttgcacaccacgttaagagggcggcaattgagaaggaaacattctcagaaatgcttgatattatgatcagtgatgtgccactggaagaggctctagcatttgccaaactctcattgagttgtgcagagctcagcaaaaaggacaggcctgatcttgcaacagttgtggtgccggagcttaaccgtttaagggactttggattgacatttcagaaaaattagaaccgtagccaccctccacactctctcacgcatgaagtcggcgattaagtacttaaaataggggttccatgttggtatgttggctcacctgccatgtttgttttgtgtagagacatttgctccaactaacttct

SEQ ID NO: 42 - DNA, 408 bp, Glycine max
agtgcatgcgcagctattccatatccactgcaaataaaagcaaactttcaatcaagcaatggttggaatcaagttgaacattgaaatgaagaccttccccaaggctctttttgatagatgtcctcatcatattatgagtgatgtcaatatataagatacagaaagaaagagcctttaagaaaactaaggacagataaatttacaaactcaaagcccttttccagctaatggaattcttggtctccatattccaccttcaccataagctcattttgggggctaaaaagtatagagggtgtgttacagaagaaatgcaacgaggtagagaaaccgaggggagtgatcatcatagccaaagaaatagtagcaacggattacctgccccagtcccctaagacaggtccagca

SEQ ID NO: 43 - DNA, 447 bp, Glycine max
ctctagagtcgacctgcagacccttcggtaagatcgtcaacaccaagtgcaatgtcggcgccaatcgcaaccaggcttttgtcgaattcgtaagtaactccctttcctattcttttcattccttccttattttttagggtttttagccgggtatttgtttattcatgagaaatttagctctgttacacatgagctctgggcatcacaattaggcctttcattctctttctctcttttcactctgtccgtgcataaatccaaccaatctgctcaatcatcatggactgggtaaaaaatttgaatgattaataaaaataaaccattgattatgtttttttttaaattaatgagttaagatattaacagtttttgtaatgagtgaatttttaaagggagggtttttgctgacaagtaaagaaaaaggtgatggagatcgaggtctcttgc

SEQ ID NO: 44 - DNA, 406 bp, Glycine max
gtctctccaaagaggttgcagagcttctaggggaagggttacctaaaacccataaccaaacactatcagctccagtgaattcaaacaaacaataaacaaagaccttatctaaattctaaacaactattaagaaaatatatctaactaatccacaaatcacagtcaagaaaaaataatataaggttatcacctcaacaattgacaataagattttgagcaatctgatcctcaaagacaatgaggacgaagcatgaaaacaatcaatgtcaatcttcactttgccttcagaatgaacaatatgtttggaagaactagggttgctcttacaagcactgaaggttctacagcaggaagagcatggagctcccccagagaaataggcatgaaggcacaaatcacatatgga

SEQ ID NO: 45 - DNA, 453 bp, Glycine max
tgatgaggtataatatataatgaacaagtctaacactccaaaagaaagagttagaaagtattcctttactatcctataagccattgaatataaaaaataacaaggggaaagagaaagaattgtacgagttccatttattatgccccttagaattagaaaaaagcagatggaccttttggaataacatccacacccaatttagtcagtagtctagatgcaccacagaatgggaatagttaacaaccaatattagtgacttcatggcatgcaccgcagaaagcatgtttaagaaagaaggatttctttttttataaaccatctttataagattacaccaacctttcttgccaataatgaacatgtaaaataacaaggtaccattttatccaagcataaagcaaccgtataacttcattttcacagactgatatatctcatacctataggcaaaag

SEQ ID NO: 46 - DNA, 461 bp, Glycine max
ctatacctcccgaaccctaaatttagtacaactacaacctgctcaatgccaaactcacttttagctagagagagaaagatgcctaactcccacattaatctcgtttctgtttgttaattgttgattacgaaaggaaagtatccctacattttgggagtggtaccaaccacgagtcaattgaaggaggaaccctcaaattttgtccaacttctagagaagtgcatgttgttttctccctttgtaaattttcttcttccatttgctaaaagatatcctccattttagtcgtctttcaatcgtgaataatgtttgttgcacggcattcagcatcccatccctcacaataatgagacgataattggagtaggtatatgaaaaatgagacgactctctttttctatcgaaaaaaatatctctattataaatttcttgttttttatcttacgtacgctttatttgga

SEQ ID NO: 47 - DNA, 533 bp, Glycine max
tcaaaccatgttaaactgtctatttttcttctccctctgttcgcacagcttctaagcatggcattcctcaaattggtgccaaattgcaagaatttctggctgatttttggaatataattttacttcggaagagggaggagcaacttcaataaaaaatactttctaatttgaaattttaactccactattttataagtaataatcccaaacatttttcttcgatttttcaatagcaatccctcctctttcctctactttgaaaattaattcaactcatcccagtttagaatttgtgatttaaaattttgatcatagaaattaggaatatacagtaaaactttatttggggctaagaaaatgataaccagaaaaggaataaaacataaaagacaacaattaattgaaacatacatgtcaataattagtttaataaggacgctcacagccacatccgttgatggttttccactgttattacttagtctagttgatgctgtagtagcattggtattcggggaataagcctctgagca

SEQ ID NO: 48 - DNA, 490 bp, Glycine max
gttaaatccctatcagccatagtacctgctggagagcaggccgattccatgcaggtactttcattgatttagggtccatttgtttcaaattttggtaaaattgaatttggaaaaattgatttgttgagtataatatttaaaattgaattgtgaaaatatgattttgtttgattggtaaagtagatatgctttttggaatataaatgagacattccaaaatcacgcccagtatcaattcaactcaacagaaaagcttaaaaactccacttcttccaaaatgaattctacccaccacaactgattttctccaccacaaaaattacccaaacaaacatgggtactgtacaaaatcaattcttcaatcaccaatggctgcttggccattaactaaacaggcacttaagtagcaacataataactcagaaatcaagtctcttgctttacccaatgtattcctatcagccatggaaggtgccattactggaatgct

SEQ ID NO: 49 - DNA, 546 bp, Glycine max
acaaaaaaggatgtcaaaagaattacaatagaagcggcatttttttttttgtgaatacaatagaagcggcgttatttttttgtgaatacaatagaagcagcaaaaagcatatgaagtaatttatagaataatatagtgtttacctcaaggctgagaggagaagtggtgggataatagcgacccactacttgtccattcttatcaaccacaaacttggaaaagttccactgaatatcatcaccaaaaattccccatttccccaacttcaagaatttgtacaaaggagcagaattgtccccattcacttcaatctagcacaagatcgaaggagacacatatataataccagtacatgtcacggttcttcaaataatttagcagaatagcaaaacggaaaatacaaaaatctgacttttttttttagtagtatcatatcacaattttgacaagtcggagtgcttaaaaatggtagttcaggtaaactttccaagatcagttatatgttgaactaccttatcaaagatggggaattcagatttgaagcga

SEQ ID NO: 50 - DNA, 545 bp, Glycine max
aatgatctcatcatctttctccagaacaaacatataaaaacgacaaaaataaatccttgttaagtttgacctgaatagtaaatggcaacaattgatcaaaaggttgttaatgcctgattgcttatacagaaagtagaaaatattagaagcatttgaatgaacaaaacaacaagaacatgatgacagcagcagtaatgagtcgcatgccgtaagatggacaaaactataagtgctgcaacaatgtggaataatactatctatatgcttacccgcgactgtaaactatactttgaatcacgttgatgcccgtatgtgtgtgggttagtttcttgagagctttattcataaacatccaagtaacaaccattgagttattttctgagcatagattcgtatggataccgagtaatcttacccttcttctcacatttgggagcacttgaagccttcttttttctctacaaccaggtccaaaaccagcccaaagtatttgcataaaaatattgacaaaaccaatcattttgtggaaccctctgcaggcatgc

SEQ ID NO: 51 - DNA, 553 bp, Glycine max
taattattctttttttaaaaaaatattttgaatatcccttgtctgggttcgaatccggaaacagcctctttgcatatgcaaaggtaagactgcgtacaatatccctcccccataccttcgcatagcgaagagcctctgggcaatggggtacgaagttttttatcccttgtctggttgtgtttattgattttcatgttagccatatatactttgcttacctagtgtgattgacattaatagtgttgtaagtgcaatataagcgtagtcaaggttagtttttgtatgtgtactagaggaagagatgatggaattgagagcacttgattaatccaattgctgcataaacttaaaaggaggttgttggtatattatagatttgtatgcattgaagtttgtaggttatgtatgcatactatatgttagcttaatttgttctcaatggcaggggcataatatagcaggaaaggatcaccgtgttcattgttccataaatatcaacacagagactggacgtttgtcagcaagaaggccaaatctgcaggcatgcaagctt

SEQ ID NO: 52 - DNA, 454 bp, Glycine max
aaaatgttacccgaatcaaaggacatcgagtttgaacaggttgagtctggtactaaccaaacaacatccaaatttagatcatggtgcttgggtcaattcggattcatggggaacccaaacctacaaacacccctacacgtgatgcattcctttaataattaattgaaaaattaacaagggttgttttgtttcacacactttacagaccttaagaattgagatacaactctttaaatattagagacaaagaggttgtttcacacacatgatgcaaagttgcaaaccttgagagtgtcaatttgcattttctcctatattttatgagcatgagtaccaatcatggcaattcttagagtccctatccatatttatttaatatatattatggtgggacatcgatggaaccttgccaaatggtcaccaaactcatcaataaaaaacaaagttgattatc

SEQ ID NO: 53 - DNA, 455 bp, Glycine max
cgtgatcaacccttgaacaccaaagacacggtggttggaggccaacacatttggcaaattttgtgatgaggtaactgaacaaagagttaaggagaaggagtgcaatcaagagccattcaagcactgcatagactagaatcacaaccattttattggtgtttctatgcaacatggtagcaaagttattggtagccattgatgtttgtttacctttgtttttctcttgtgactttgagtggtgtgtgtgacactgttagagttattgggaaagaagaaaggagcacaacacaagagtacagaatagaatagaaaacaggttcagaagagaaaagaaaatgtttatgaaggtttgagaaggaatgagtaattgggaagaaaagcagatagctctgagaaacgtgctagtggattcagtgagtgtatcacagtatcagtaatatgcaccgttaaagtgg

SEQ ID NO: 54 - DNA, 564 bp, Glycine max
aaaaaataattatacttgactgatccatatcaagccaaccatcaaataagctcacaagaaaaatcaaccagcaacctcaaccagacataaaagtaatgcctgaatcacaagcaaaagtactcaagatcaacctgatactcagcaaattcaactgccagttccttgaacgctttgtctgctggttgaagtaacttatgggcttcctgaaattcgacaagaatgggatttcatggaagaatatgcaaaaactatcagcaccaagtagaacaaataaaacaatattagatgaatcatccacaacatattatgcagatgaatattttacatatttgctaatataaatcaaatgtcaaatattacatctatgaaagttggtatcctttccattttcatcactagatacaatgggacttgcaaatatttggaatgaatctcatcccatgtcaccatctatcaaggttgagcttataacaaggaaatgacataaataacaattgatatattttctattaaaaagaaaagaatcaacaattcaacaaccaaattgagacaaataccttttca

SEQ ID NO: 55 - DNA, 502 bp, Glycine max
attcagaaaactcacttcttgctaaaagttcaacaacctgattccccaaacctaccacatcctgtaacgtagtgtaaaattagtcccttgtgtatgtgcagaatgaatcaagttatagagttttgattttgaacaactggggtttctttaaaattgacctatcttgaaatgggattcttgtattttcgccttaattcaacgcgagactagtgcttagagccttaaatttttcattacatctcaggttcttacccacctaagatcattcctagcattcctcaatacctctaaaacttgttttaaatattggtcaattgaaaaaaataatgtttaacagaatcctgggataaaatttttgaggcaatgtttagtagcatgtatcaaatagcttagtgaaagatgatttgaggtatatgatgcttaccaaaagaagatcctcctcattaatgccaaatgctttgcgagcctcttctaaagacttcgaagaagtgctcttatgttt

SEQ ID NO: 56 - DNA, 452 bp, Glycine max
aaataagtaagaaattgaatcctgatggagttggaagtgaagagaaagagacaaagcaaaagtccaggtttgattactgttgtcaattgtttagaggataacatatgcttattgtcctgattttatttcaaattaagtccaggtttgatttttgttccggggatgtcctaaataggaagtaggagacatgaactcataatgtttgaactgatggtgcgaaaaatagagagaaaactgagaagtgtttctgtatttcttattatgttcgggataatagaagatacaatacttttatgttgttacagaacagttgtaattagttcaaacttgcaactgatgcgacacttaaccaactatcctaactgtgcatgaggaatagtaggtacattgtagttgaggaacctccccactcttgcattgcaaagttgctgagttatggggacttgtgccct

SEQ ID NO: 57 - DNA, 455 bp, Glycine max
ataataaatttggtgtttgaattgatgacagttaccttggttttatttgtcacgttgaagtcctaataaaaaaatggaggaaggaaaagtgggttataattccttttgtttatatgtatttgtgtgcaggtgatttggaaactcgaacctacttctggagagttacagatagaggtaatcaaagaagcacttgatttgctaggtgacaacaaagagcttcaaagtgtagaaagcagttcaacaagctcaacatctagtgtgagttatatatatatatatatatatatatatatatatatatttaaatttctggtgcatataagtttggattgtggtggttgcagtagaattttcaaatgcagaaaatgctcacaataaaaaatgatttatttgcattaaataatgattcaaaatgtaacttgaaaatttttgggcccctttgattgaagttttaa

SEQ ID NO: 58 - DNA, 409 bp, Glycine max
aaagaagaaagtcttgttatatgggtattgcaacttaatgatttttaattacataacctaaacttgcatgtgtccttatttggaggattttccatgtcctcaatttggtgctcagactatgaccaaatttttcatgaaagtgtttcttttacattcttataatgtttttcattttctatttacaatcttgaatttggatgattcagtttattgataattacctgcttcagtttgagctttctgcatagcttgcttaatgaattctactgagaaagagattatggaaccttcaaatattgacatagcatgtcaaacttcttctgttttaggcaacttcacgcttacaggatagtaggcgagcattaacggagttggctgatccacaattgaacgggaacttccctgaaga

SEQ ID NO: 59 - DNA, 398 bp, Glycine max
tctgtactgcaagatctagaagaggaactttctaaaaagaatgttgtttccatccagaatattcgaatcattaatggctctaagctaagacgggtatttttcatattttatttagaaataccgtgttcccatcttatatgattttcgtatatccatagattctatgctataccatcattttatttagtttataaaaaatacatcattattgaaagaaaaaaaaaaccattaaagctcgtgtctgttcccactatccagcaaactcttgtttatcaactatccatagacgaatttagaagttaataaaattaatttattggttgttatttttgtgacatcttgaagacttcagtccagcaaactcttgtttgtcaacttatagttatgttgtggacaat

SEQ ID NO: 60 - DNA, 498 bp, Glycine max
attccgttaataggggtaacgccgttagaaaaattaaacgacagaagggctcgcataaacgacgtaacgggtttctatgtatggttcaagcgagggtaagcgagagccgtcagatcagagatcaacggtaaagaatttccggagcgtggcagaagatttatataacagagagcatttcgctctatcactgagaacaaagcgaagaagaagaagaagaaacaccctgtacccttcttacatcttctaatttatttttctgaggacttttttatttttatttcttcgtttccaccattttctgttacgccaaactgcgtctgcgacgcgaattgtgattagtgaacggtgaatgttgaggatctgctactttttgaacattgaataaggttactgcaattttcaacttcgtttcttcttttgctatttttctttctggattttgagcataatcaaatcgctaatcttgactttgtttttttcgtctcattttttttctat

SEQ ID NO: 61 - DNA, 415 bp, Glycine max
tcaaattagtcaaattacctgagagctcttggcttttccatagatcctggctcctccccaagtcctggctaaacaagtccacaccaaactcaccctccaccttaatccttgacaagccaaagtcagagatcttcccacgccactcagaatcaatcagaacattgcttggcttgatatccccatggatcactggaggatcacatccaaggtgcaagaactccaaagctctagcaacatccaatattatgcataacctgctctcccaactcaaactcataccccccccatcatctccaaagagggactcctgcaagcttctgttgggtatatactcatacaccaacactcttttgttcttttccacacagtaacccaagagggtcaccaagaatggagaccttaaccctccaagaat

SEQ ID NO: 62 - DNA, 492 bp, Glycine max
atattgtggctgcattgtctggcatgaatctgtcagctgatgatgtgttagatggtgatagccatttcccgtcacaggttgagtcagatgttgataatcatcagagatacctatttggcatgcaaggtggtcaggatcctggcaaacaacatgcatacttaaagaagtctgaatcaggacacttgcataaatctgcttactctgattcaggtaagaatggtgggagtatgtcagacatcaacaatccatctttggataggcatgctgagctacaaaagtgtgctgttcctcccaataactcatacttcaagggatcacctacctcagcttttagtggtggaggtggcgtgcctgctcagtactcgcccttagatggtactaattcagcatttacttactatggcctgagtgggtacgctggaaatccagcattggcatccttggtggctagccaacttggaactagtaatctgccacccttatttgaaaatg

SEQ ID NO: 63 - DNA, 448 bp, Glycine max
aaatggtagtaaagttcatctgtataaaaaggaagatctacaaataggtgacaaaatttataggcctcttgctgatggggataaagtgctgataaataggcccccttccatacatcaacattctatgattgctctcacagttagggtccttccaatatcttctgtagtgtgtattaacccactctgttgttccccattacgtggggattttgatggtgattgccttcacgggtatattccacaatcagttactgcaagaattgagcttaatgagctggttgctttagataggcaattgattaatgggcaaagtggtagaaatcttctttcactttcccaagatagtttgactgctgcatatttgctaatggaagatggggtccttttgaatgtttatcaaatgcagcagcttcaaatgctttctatttctgacaaaagattaatacct

SEQ ID NO: 64 - DNA, 497 bp, Glycine max
aaaatcggtatatatcacaacttgattagttacagacttacgtccctttcaaacttaatcccttgtatttgttcccaggtgattaagatcagtgacatctccacaaattcaaatcaaaaggtgcaaaagcacattaacttattaagaccagtaattgtttttactataaaaaaacctaaatactgtcaaataatcaaataagtaggcttgaaaactatgtaaaagagcataagagaaacaaactgcaaacataataacattagaaggaaaaaacatacaggcactaaatagcatgtacaactaagatttgcaaacttcaactttaaaatacagttaaattgtaacgtctgatgacactccaactttactgaaatcactaaaacaaatactagttctgcactaaactagatgatttaatatcataagagccattctcttccaaattgtatgccttctggtggcatcaaagtaattgtatatagtattgcatatttcag

SEQ ID NO: 65 - DNA, 485 bp, Glycine max
agagaacaccaaggaatctcgttgcactgcattgtgacggtagtaggacaagcttgatgccatttgtgagagattcttgagcagtttaggagcaagagcatattaagtaagaagtgaccagtttgtaacaaaatgttacgtaaggacaaggtgatgtttataggcgtagctgtgatatgatataaaagggcaagtgaggggtgcatggtgagaagattgatggagtttatatagtgaaaagagaagttgaaataaatgaaaataagggacttctgacattccaaaaacgttgttgtttcagtgaagtttgaagaaaaaggatgaggttagtggacccaaaaactgtgaattgatgggatttaaaaaacccttcttttcccttgttctagctttgtctttctctgatcccttacagcgagaagtcttgattataaatcagataaaaatggcgactgatttgagagaagaaaggataaagtacagta

SEQ ID NO: 66 - DNA, 500 bp, Glycine max
agcttttcaaccattattctctgctgagcaccactcaatgtctcagagttcataatcgcattagctacaacaatagttgtgtgtggagatgctgcatcgacctagatgaaaaagttcagaaaggaaagcagaaattaatagaatgaaatttcaccaactctaactcaaatgatggtcaagcatatgcttcatacgagacaagtccatttaaagaagcaaaaaaaaaaagaacgtaatatggcacgctagagatagagggtgtctgcatacccaaacacgtccatttaagccaactgctatctcaaacgacagtttcttccctaaagcatcaagtactggacatgtgggagaactgagaagcctacaaacaacacacaatctctcatgtcaagatcttttaatgttatgcatagacaagcaaaattaaattccacagccatacatccttgattgacctgttgtacactcaaacatatagccatcttttagggcaccaaatt

SEQ ID NO: 67 - DNA, 474 bp, Glycine max
aagtgtaaagtcattccccaatatgctcactaggacttctgtcttggttggacgagccatctaaaaaaaccaaaaaatatatttaagacatactacaaaggcaatgataaaaagggaaaacaaatctagcaaatcctggctagacaatgccaccgttcaaactttcctggccatgaaataacccaaacgttcagaacttcataagagcatataaattataaacttgttgtcaaatgtttggtacactaatttgaatcacaaatgtccctaataaaattcactgaactttgtagcaaaattggtgttgaaatgcgatttgatagatgatccccagaataataatgatttttttttaacacaagcaactaataaagttacttatcacttattcaagcattttgatcacctggttctgatccttctgttgttgctccattatggcaaatactctttcaattcccagacttacaccaa

SEQ ID NO: 68 - DNA, 852 bp, Glycine max
aagcgcctctccgcaagcgtgctcaagtgcggcagaggaaaggtttggcttgaccccaatgaagtcaacgaaatctccatggccaattctcgtaaccactctcactcctttttttttttctttcttttttcatcactataatctctgtttctcttatttatcagtataaatatttttatttatttgttttcttatcgatgtgttgaggaccgagaaattatattgaatccgaagcttattgttgtttgcaatattatatttctaacttgagcttgcactgtcggctatcatttccattgaaataaattgctttctagtttgattgtatgtaattttcattaattttgtcttatttgtgattgatatttaaagtgctcttaagtggactagtgaaactgaaacttgtctgcaggaagggtacctttttctgacactgtcaaattaaatgtatgctctaagaatatacacaagcatttatattttggtagctcgtcaccattaccaattgagaaggcaatgacttctgtctgtcttgttactattggggatggagtatgggcatctggtgttttgcttaacagtcaaggtctcatacttaccaatgctcatctgtgggaacctggagatttgggaaagaacatgtaaaggggggaggatatggaactaattcaaaaagaatttcttccatgtttggaaggaacctgcatatctttgtttaccggaagtggagaaccaattcaagttttgtcgaaaacttttcaccattttgaaagaagccccaattcgtttttatcccttttcccgctgcgttaaagaggccccgggggggtaattttaaaggtcgaaggtccc

SEQ ID NO: 69 - DNA, 410 bp, Glycine max
aagtaaggaggagaaagcttctcacttgttttttgattgcccaaaaacaaaacccttatggtgggaatccctatcttggactaaaaccatgggagttttttcaacaaatccaaggcaacacttcatgcagcaaccaattggcataaatggagggagacagtattctagatggaagtgctggtggatggcccttacctggactatttggcagcacagaaatcggactgttttcctaaaagagccattcaatggaagcaagctgctggaggatgcagtgttcctagtatggtcatggcttagagagttggagaaagattttgtagagccctataattactggtctagtaatctaccagcagctttttgtatctagcacaacaatgaagggttttacactgtaataataaatt

SEQ ID NO: 70 - DNA, 530 bp, Glycine max
atctcatttggctgatttgacaatgctttgtctcttttttttttttgggtgcccactgaatactgagctgacaagagttctctttgaaaatttaatgcctctcagattcaaagtttactcagcaagaacttccagcgtgtaagccaattctcacgccacgagcggtaacattacctactactatttttgtaatacgttgcattgttgctcatgagtatatgtgtacctcaatgcatctttgtgtccttatttatgtggtggtatagcttgcacttaataagtttttccatgcaggttatttcggcattcttgcttgtcagcattgtattcgttcctattggagttgcttcactaatagcttcaaggaaggtaatgttgagtgctataatgtgttgaatttatgcttacagttgtctataatgctgagcacaactttcactttcttgtatttatcaggttgttgaaattgtttctaggtatgaatcaacatgcataccagatggtgttactgacaaggtagcatacattca

SEQ ID NO: 71 - DNA, 367 bp, Glycine max
tggtatggtgacaaactatagttttctatttatgaacttttggggtcaaacatactttgtcatttataaaatattgtgataagtgtcttattgttcaaaattagagacttactgatggttacatcttttggttttttccttttctccattcagcaaatattgtgttattgccattcagttatttgatcagttcaagcagtgaaggttcaagaaatccaatagcagatagcagtcttcaagtgcttcttgttctcattcattatcataaatgtcttgtgagtgagggctactctgtcctaaagaatcaagtatctgcctcttcagattctttaccaaaagagaatacatatttttctaacaaccctta

SEQ ID NO: 72 - DNA, 407 bp, Glycine max
tgatactcctctagaccatattattctgaagactcacaactcttgttcctcctcacagctgaggtgatccctgctgaagatgagcccaagttcaacccattttctggaactgggagacgcttggatggaaaacctttgaattatcagcctcctccagtttcctcttcagggtctaaggaccagaaacctgatgttgtcaatttgcagtcttctacagcttctagttcacaaagtaatgctcgtcaatctcagggcaagcttgtgtttgggtcaaatgctaaccgtactaaagagacaggaaaggtaatttgctgctaatatttcaaagcacatgtttatcgtttatctcgggattctactcctttcggtaagtgatagactgctaagttttacatctttcatctcat

SEQ ID NO: 73 - DNA, 516 bp, Glycine max
aagcttgcatgcctgcagtcttgcaaatgttgatcctattgacgtggctagaaatatcacaggattaaatcctgaaacaacacttggtaaatcatcatatataacagatgaatatatagatgtggaggcttatcttgtatgtctaattgttgtttgtaataattgcagttgtggttgtttcaaagacttttacaactgctgagactatgctgaatgctcgaactcttagagaatggatttcatcagcacttgggtaagtacaatattaagagtagttcttcaaggatagtagtgtaggcattggttgggggttctgtagttttctttctttttatgtggaaacttgaagaactggatttgaaacttatacttcctgatttgttgtaatatactccccaacccctggcccccaccttctaaatatattcggcgatttttcaaaggatagagaatggacaatattcaaaatggactttgatgatgaattgaagactgtctcatgatatcattacttac

SEQ ID NO: 74 - DNA, 545 bp, Glycine max
gattatattaattgtcaaaagtacataatcctctgcatattgcttctaggaatgttgacatactgaatgtaataaacactacattaaattgcatgacaaactttttagctaaatatttaaagccgacttgctttgattcaattatatttccaaaaacagtggcaaatgatttgacagaagctgcaagctaatatgcatattctattttattttattgctacgcaagctaatatgcatgtgaatattaatgtttttgttcaaaagggaattcgcttcttttgtgagattactacatacacacccagcttcaaatatcacggatgcatagaaagctgatagggtcatcaaaatcataaatgcatagctgcctaagatatgcaaatcaaaccataaaagaaatacaggcacaaagtaaaacttgcctccatttggcgagctggataggaaggtaaattcccgacaacattccttgctgatgatggtgcacgtggactccccatagatggcaacaaaattcgtgaaaagaatgatgagatcatctctgg

SEQ ID NO: 75 - DNA, 549 bp, Glycine max
aatatcctctaggagacccagccgttgaaatcacctttggagttcccgtcggtgtaagacgtggtgtgatatatggggtcaaagaaaacctttgccctgaatacctggaagctataggagcaaaaatgacaaagaacaaaagggtattatcacacacgtcatattaaatttataacacctgcaagcccatttttccttattattgatagttcccactatacttttattgaacccattttttaaacatttttccagttaaatccaattgttttagatagaaaagtccaaactatttattttccagtacaatagcttgtttccccatttttggtttcattaaataatataatttcaattttctctataacctttccaaatcctaaatattgagtattgaagtttacttcttttacataatttcttagacatgatactacttatataaaaaaaaatttgttcaattctgataattaaacaatagtagcatgatttgcaatcaatgatatgtctggaaaatccatctaccttcgtcatttgttttacccacat

SEQ ID NO: 76 - DNA, 436 bp, Glycine max
ttctcaacatagcaatgcacctgatgtcggcccctctaaattcagtgagcaaattaatagaggacaactggaccttaattgtgaaaatcaatctagcaagctaaggtgcaaaggtttatcactgtctgatgccattactagtacttgtgattctcagatgcatagtggagaatttgaagccctaaataaaaaacccaagtcctcagatattgaaaataaaggtactaataatgatgaagaattgccatctcttgagctcagtttaaagaggcttagaggagttgaagatgctgatattacaattcaggatgaccggaatgttttaagacgttctgatcagtctgctttctcaaggtatgatgatttagtgttattgttttgtattgttcataattaattttaagatggataactgtttaattgttaaaagtctttt

SEQ ID NO: 77 - DNA, 390 bp, Glycine max
agttcaaaacatcctatgaaactacattgcatgagatataatgttatataaaagtatcaaaatagtagatgatcaaaagagctgatatgaaaatgacaacatgcagggtaattataattttctccaaacaaacaacaataacaaaagcttgatatccttcattaaaatggataaacaaccaaagattcatagaaaccacacaatgaatcaagaatctagtaatgcactgaagttaatgatttttcctcattgttgctagaaaagccatagtaaggtatccataagatatctacaggcagggtttcaaattttatttatttttaaatctaagccatataagataacaacacatagcagagttcaggtaaatgtacaagtattgaagtacat

SEQ ID NO: 78 - DNA, 463 bp, Glycine max
tgaaaatagagtttctacctcgtagagttatttacaggttcaatcccacattcccacttcacttgatcataggataagtcctaaaactgatgtatagttggtcctagtgtaatacaaaaatgatcttttaccaattaaaatgctacttcttctaacgttgtcaaacatcatcaatccaattccaaatttcaaacggaactggttctagaggtcatgggcttagattcagcctcaactcttaagtgggcaaggctgtcttcctcccaaggctccactaattcgaaaccttgtgcactgaatgggcctttatgttttaaagtttttgaaaaggagagaatagatgtctaggaatttccttttgggaaaatcttttataataaatagaaattgaaataacttcatctattctaaagatttcgatacaaccataataacaatagtcaatagaatcaaccaccaaatt

SEQ ID NO: 79 - DNA, 485 bp, Glycine max
ggtaagcaatgtcaaaataagaatgaaaggagaacaaaaagaataaccaaataaaagaaaagaaaaaaaaaaggtaaaagcaagcttagatcctgaaatctgaaactttttcctttttcttttatctttctttttactgaaaacttgaagtatcactcactcgtttaaagttatatataatgccgactaaaaacaaaaccatgttgcaagttaaaagaattaattaactggtactttgcagtctgcaaataaatgaatgatcagattaaaaattatttcaactcttgattgaaggagaagggaatgtttggcctctttttcagtctgtgagaacatgctattcaagctaaaaaaagacagagggaatttcgggaatatgtcggggaataagagtgttgtgtgtttgaccttgactcgtttgagtaaatcatagccactcatcccaggcatgcaatagtctgtcatgatcaaattcactttgattc

SEQ ID NO: 80 - DNA, 444 bp, Glycine max
aatggttggggatgtgtttttgcacatttaacatcatgtgtcaccagattaattgacaaagatatgtggatgtggatgtattccttttcttgacttgatacatcaatggtatttggaatctatgaatcttttacaactcattaactatggttgggaaattttattcatccttgctgaaaaaaaagtgccaaaccgcatttgatatttcacaaattctatttgctgacattttcatatgtaaagcagtttaatggattaattcttagtaccctttgttttttgcttcttttaaagagacctttctctcttaaatgttacgacaacactttatttcccgtatatagggaaattccaccagctctttattgtacatagctaatgggtgccgcatatcatatatatgttgtctcattagtcagttacaatatattcccttttgcttca

SEQ ID NO: 81 - DNA, 502 bp, Glycine max
aagcttgcatgcctgcagaagaacccatactgcaaaccctttctataaccatccataagtgaatgcactaataacctaatcagttgagcttagatttccaattgtcaaagttggatcaccacccaaccccatatattataggcaggacaaaatagagatttgtttaaaattgaaatatatagtcaaacaagttatgaaatagcaatttgtttaaaatagattgacacaaaatgatagtatgagaactatgacaagaaactaaaagtgtttttgaattaatgagattatcaacccaggagaaccaaccaggaactagtttttcttatgtttgtgaatggcagggacaggacctggtttctaaggatgctattttccccttcccgaggggggagaatgagaaaacctgttttaagtttgaaaaaagtaaaggtctatagaaagcttttggtcaagaatacaaacttaccggcaacagtaggatccagatctgcatcatccgcag

SEQ ID NO: 82 - DNA, 386 bp, Glycine max
tgaagacgtattattattattatcaataaagaaacaaaaaaaaaaaaaagcatttcatcatccaagtccacccaacaaaataaaggatgaagtttttctaaattgaacttatctaggaactgcaaaaacaatgcgcttttaatttaatttagtgcatatggtgatataaagtcattaaaatttaaagatgagcagacctagcttattattatttattactttttagatgaaataactttaaaaaaaatacatatgttaactccactaactctaagcagtatctgtttgtgttaactatcataattgccaagcaggtccaaaccaaataaaaatggttgaacttttctgacataaaaaaaagaaaaataaagccaaaacaaaatcag

SEQ ID NO: 83 - DNA, 505 bp, Glycine max
atctttccattcccattttggcctctctctgaaaagaatggagaaacgctcggctggagtggaaggcaaagacgcgacactgaaggcacgaacccatgtctcaactccaagtctctctgttaatacctctccttccacaagatcaaaagtgggatgcattccgtctggaatcttctgcttccattcatccatgaaactctctaactttctcttaccccctttcaggatttctcttgcaaaatgtatgcatactcgcttctcatccaacttccaaacaaagctaggcatgcactcatttactttgttgctatatacgtgcaaacaatgccttgcaagcaccctaggaaatccatctgattccagtatactcacaacttcatcttcatttaaagcattaagtgaccagtcattcaacactgcatttttcaaaagcattcccagaatcatgtccatgtaactcccgtctactagtctccaatacccattaatctccagcgctgaaaga

SEQ ID NO: 84 - DNA, 431 bp, Glycine max
tagtctgaccattcatatacacaaagtgtcttagacatagtcaaatacagtaggatggctaaattataactagcaaacattaaccaaagagacaaaaggatttttttttttcactctgataatctctataaatatcagagtgtgtttgtttgttgttagagtatatttgttaaataatacaaggttacaaatttcactgaataatcttaagtatatcaaatagaattgtgtaggtaatatcagggtcaacaccctacatttactcattacagtccttatataaatatgcaaatacttctggtacgcagaaaggaaactttagagcagagatacctcctcatttcatcatcccgttgtttagcatccatttccttgcttgggggatattttggaagacttgaaggatcgcaagcataaggttctgtggtaaa

SEQ ID NO: 85 - DNA, 897 bp, Glycine max
gcacatgacattgctattaggaacagaggaacaagttatacatctgctgtccccaataaaggggtatattcataatcatagcaaagtcctcaaaagggtctgagcatttcaaaattttgagaaaaaatgtggtgcgctctaaccaagctgtggaacaaaagaagaatgaatatgggagtcctcaactcttttccttagtaacattgtgagtgaactttaaaattatttgatcacataatgatagcatctacttcaaatcaaacaaagccaatgtagttaagtaccgattgaaatctgatagtcgcatgtttgggatttcagctaaatcaaacacacactaagatgatttagagaccatatacagaccttaaaatgccttctggctcaaaaggagcgtaacaccatgaaggagcattttttttaaaaggaccttcatatggggaattctcggtgcaagcctgcagctcttcctcaagctgaatacaaggtgtcagaaaagacgagagaagctggttttggtattgaaccagatgatattgcatcagttgttcgaggccatgattacacgaactataaaaaaattggtcaagttgaagggattatagagaaactccgtgcctcagtcgatgacggtgttggtcaagccagtatagataccaggcaagagatttatggagtcaaccgttatactgagaaaccttctaaaagcttcctcatgtttgtttgggaagcactgcatgacttaacactaatcattctcatggtttgtgctatagtttctatagctatagggcttcccactgaagggtggccaaaaggtgtttatgatggtctgggaatcatacttagtatattcttggtggtcattgttactgctatcagtgactaccagcaatc

SEQ ID NO: 86 - DNA, 503 bp, Glycine max
ggtttataggtagtaaattgtactttctaagccaacaggattaatcacttggttatgcaagaaatcttgatatggaacttctttcagttcttgattggctatgcatgctatctttttatgttactatgcacattatactgataccaaatccaagacactaaccctatttagctttatatggaatgttcagatagcaagtgggctaaccactatggaattgaatccaaccttaatccttccttctgggtctgggatggcatatattatttgcaagtaaattgtcaaacttagcttcatgatcattcttattccataggaagataagagatgtagcacctcaagaggtgttaatgggttaaacaaaatcactaaatttcaaacaaaaaaaaaacacaagaggaatgtatattccaccaagacatatttgtataatcaaaatcggcatcatatgaacagataaccataaaaataagtgctcaattagttcatgaacttactggaac

SEQ ID NO: 87 - DNA, 566 bp, Glycine max
tgatttaattcccattgatttggagattaacgccacctgtagaaggcataattcagagagaatcagaaaattcttgcaggatttagaagcagtagcaactccagaagaagaacctcgatcttccaaggcatcttctagttttcctattgcagggcattctcatataaaacctgttgaagacccaatcatggctgaagagccaagaagagtaaccctagaggattattcaagttctactgtgccacaatttttcaccagtattgcacagccagaagttcaagctcagacaattacttatcctccttctttgatacagctgattcaaaataaatatatttcatggtctacccaatgaagacccttatgctcacttggccacctatatagagatatgcaatactatcaggctagcgggtgtgcctgcggatgcaatcaggttgagtctgttctcattttctttatctggagaagctaagagatggcttcattcttttaaaggaaatagtctgaagtcatgggatgaagtggtagaaaagttcttaaagaagtacttccctgaatcgaag

SEQ ID NO: 88 - DNA, 429 bp, Glycine max
caccattgtggggtctatggaaggtcagatgttcggtagtatggggctctatgtacatttttaaaatctacctcaaagaatgatttaatgctaatgtattgtgtttgagtttagaaagtggcctacacatggacctatatattgcttaaatcagttatgaatagagtttgtgctattaaataaaatctcctgatagccatgcctgacatgttttttgtttaacaattaatatttgtttattgcaatataattaatcaaggaaaagtcttctatcaaaggagctatatataggaagacatttgcatatgtcctgattaggtgtgctgcaaatgtagagagttcttgaagtattgaacaagtctactgtatttcatgatgtataaagttttattactgacttttgtggtctgctgcatttctcttgaccct

SEQ ID NO: 89 - DNA, 470 bp, Glycine max
ctgaggagaaattaaagcgaagagggttggtaaaatattcacaaaccaaagaaaaggtgtgtttttttttttccttcaatacataaactataaatatttttcatttttcttttattatccaacctttccaggatccaatataattagcctactgttatatgttgcggtacagatccgaataaataattgccagcctgaatcgaacgcctcataacttatcaatcatggcaatgcaatacaatatgtttggacaaaatgttttatagtatctctctccatctgttcaaccaattgaagtagaccccttaacggcaaagcatcaaatttgcctcaaatttgcaacgagggcactggtaaaccataattctgaacctggaagatgccttccacgagatttttctatactcccgtgtagctgcgtacataggaattagaaagaattacatggtctgatcattcatatttcatac

SEQ ID NO: 90 - DNA, 426 bp, Glycine max
aaaagggaaattaaagagtgatcacagaagtatattgctgaatggtgacacacatatacaaaagtggggggggagaactggaatacaaaatcataccatactgattagacagtggggagccaataaaaacctccgttcaaatagagcaagccctgtgtataacttttgtttaaaactttcaactgatttctcatattgcatcatgtactcgtcagaatcagaagcttctccattatattctgcaaaagtgtcaagccagcttggatgctcttttatcaattttgataagtagcaaagtgccaaattcaatttaatatggaactcgagatgcacagacatgttagcagacaaccagttagagcattttcttggcaaaggcttaagagtactggacagcacatcatgactgtcacctaattcactctc

SEQ ID NO: 91 - DNA, 517 bp, Glycine max
aagttgtcagcagaggcttgcatgcatgctgtgcagaacgagcggcttcccatgcgcgttgttgtgcaggtcctcttctttgaacagctgagagctacaacatcatcaggaggcaacggaacaccggatcattccggctctatcagggcctctcttcccggtggatctcatgggagttcaaggtcggaagaggaatgggaagccgtgggaacgatggaagacataaaatctctgaaaggggagcttattgctctgaaattatcaggaggaacaaggggagccagcagcagaagcaacaacaatgacagtagtaaaggcaattctgagagtgttgctgctagtaaaatgaaaggtctcgtgtcgaagaagataatctccaagatttggtcaagcaaagaaagaagtggtgagctaagtagctctgatacatcagagagccctgcttctacggttgtagaggaaacaaaatctactccatctagaagtaggaggcattcattgtcttagagaccatgtt

SEQ ID NO: 92 - DNA, 387 bp, Glycine max
gaatgtccatgatctaaattttcaaaggccatgttgaattattgccacctcctttttgtgagcttacttgaaaatgttttcaagttatttttgtcatattatttaactcaactatatcattctatgtaaaaattcatttgtatgttgtgtaatctctgtgatactaacaaagtgggaaaggtaatatttttattaaaaaagagttgataagcttcctaaaaataattatggttttatgcacgattgcttgaatctccttttgcttattaagcatttccttatcaggctatatatgtttttggattcggggtcccattgttcaatcacaatgttggaagtacacatacgatccagtggagtttgtggataatacataaattattgctt

SEQ ID NO: 93 - DNA, 491 bp, Glycine max
gatacaaatttctaatgtctctccaccagtgggaatatccccttttgtctctatcattttggaattctgacccagagctgttgctgatcagatgcaaaagcccaaatccatcttcccatcaaagctacattgaatttagaaatatcctttatccctagacccccatcagtcttaggcaaacaaatatcagcccatttcacccaaggaatttttttatgatcattgtctccaccccacagaaaattcctttggagggatatcagctttttgactacctttagaggtattttgaaaaaggagaggagataaattgggagggcattaaggacagaatttataagggtgatcttcccagccatggatatatctctctgagagcccatttggctaatttagacttgaatttagtgatgagaggctcccacaccagctggcttgaaggattagccccaataggtacacccaaatagagaaaaggataatccagctgt

SEQ ID NO: 94 - DNA, 444 bp, Glycine max
caaactagataaccgatagcaaactgatgcagcaaatataaccaaaaaccaaaccattagcaagttaagaatacacataaatcaatctatatgccccaaaagtagcaaggagagagcagcatacataccaggcacggggcaagttatcaaaaaagtcgttggatagagacacggccataagcacaggccggccaagttgaatcagagcagaatcatcactgacgggagaaattgcaggcgtgttgtcatcatccgaagctttagagaattcaacaaaaagatagattccgtagcccacaatggccagaccagtgagggtcagtatgaagttaaacagcttcaaaaggcactcccagcaccccctacaagccatctctaccaataacggtactttaatccctcaaccacaattcgaaaaggagaccaatgcacagtatatatttt

SEQ ID NO: 95 - DNA, 477 bp, Glycine max
aacaagatattccgatgtctgaagacattgtttctgtttgttgtgatgaagaaaggaagatccattctgaagatgaggcattgggagtacccaatggaactgaaacatcatgttttcctacaaactcttgtgttgaaaacataatttgtgactgtcaattatcacccccatacatacaatcacccccttgtgcacaaccggttgatgagcttgataacaccaagaaaattgaagctcgtctcgaagtggagatgcctggagaaactaatttgctttgcacattgagggaatatttgaaacacaacatatgtctgccagttgtggaagcagtccaggggaccaagatgcagcaatttcaagccccacatgatacttttaccggacaaccaccttccttggaaatgcattggtccagctttcaaataaatattgatccttcgtcttttgatgaaaaacatgctgctgcaggcatgcaaa

SEQ ID NO: 96 - DNA, 397 bp, Glycine max
gtagggtacaggaagcaccatgtaactagcctgctagggctaagctgaaacttgagtagggattagttcctcaccaaagggtatcggaatacctcatggtcctatttcttttcaaaactttcaataaatttaatacaacatttacaaactaaatctatgtaacatttaacctttcaatgtaaaatttaaagtatgtttttgagctagaatacccttcataactaattgtcacttgaagggggagaaataaggataaaattaagacacaaaaccccaacaaaccttggatgttcctctctgagaaaaaaatacgtgaattaagcttttgctagtatctgactttataagtccttcagatgcttcaacttcctacaaagatcaagcacaacgtcacaca

SEQ ID NO: 97 - DNA, 471 bp, Glycine max
aaggaaaattaaaggacataaaaaatgtaggaggaaaaaggctactaatgcagccgacaataaactaagacaaaaccaaatcgtgaaagcagaaaatgttgattgatctacaggggatcagttttcttactgcaattgtcgctatctggctacggtcaccccactcagcaaggaatgttaaaataaaagactgcataaaaaagaaaagatgatattacatgtagcacaaatgtggttattttctcagtcaaataaatgatgcaaaagttgtacttgcctccaaaaatattggtgtacaaaatcttgaaaagaagcgcctaactgaagttttcccttgtccaccatccagtttttcttcaacctagttaacaagattaataaattcttagcatgtaccaaatttgaccaagatatttttttaatataaaaaattgaatcaattaaagtatagaatccgtgccagctgctgat

SEQ ID NO: 98 - DNA, 489 bp, Glycine max
aatcacttcagcctcagagccaagtgaattttaacaatgttttcaataatcagaaccttttcatcaacaccaccaacaacaacatcaaccagtttctgcctcagagttctaactttacagctggtgctggaagtagtagtactgccaatttcaatccaattggaggagagtttccaaatcagagtgctacattgcaacagccacttcagactccgagccaagagaatgttaatactgttttcaatcagagtattctgaacgacggcgacgaggataacaacaacaacagacagtttctggctctgatttctaactttcctttgcttgctcgtggcaccaaaaatcttgatttagaaagctgtctccgtttcaccaattggccagctgagtttggaaaaaagttgctaggtgggaacttggaattggatttggaaccttcttcaagcaatctgaacgtgccatctccaacacatgacatggtgaatgaaa

SEQ ID NO: 99 - DNA, 459 bp, Glycine max
tacttccttatcatgaagccaataaaaggactgatcgagaaggacattgcaaatgagagaaagccaacatgggagagacgcgatgctgcttttcggaagagagatttatattagttgtgcatttctgtgcccatgaaattccattgatgttttagcttcctttgctgacacattttagtttttgtctgttctatgagtgaaacttggatgattttccttatactgtaattgctagtagtctggcataggaatttgtttgtgcctgagaggattgcatgtatgctggtaagtttttggcttttgcatgattcagtttgttaatgttagtatttagttgtcttgtaaacatagctctagatgtggctactatcgataatagcttgatattctaataaaattagcccgaagtatcgatattaatgatatgaaatattgataattactgcaggcatgcaagct

SEQ ID NO: 100 - DNA, 424 bp, Glycine max
ggagtatagaatcaaaatgggagggcaagaaatatcaccactaaacgacaccggtttgttcaggaaatgggccggtgacgaagaagattatttgatcaaacaaaatccagagaataatgatcttccaggtgacatggatggtaagatgaacataaccgtgaatcctgattacgtggcacccaaggaactctacagaacagcgcgtagcatgggcacaaacgccactctgaacaaaatcagcaacctgacttgggagttcccggttgattctggcttcacttacgttctcaggctccacttttgcgagcttgaccccaatattactaaagatgataacagggcgttcttcatttacatagcgagccagttggctgaggaccacgctgatgttatgcaatggagccacaatcagaaaggtctcgca

SEQ ID NO: 101 - DNA, 511 bp, Glycine max
ctagagtcgacctgcagtcttttgcagttgctgctattaagtagtcctttacaattctcaagctttcatccaatgtagcagaatgcaaagaggtatatcttttcagttgctcttcactcaattctctacatatcatgcactgttgatgagtaatgtcataataagcatggatggctccttctatgtcaacattatcaagcttctgaacatccaggagtcgatcaaggactcccgatttttgcacagcctcagcaacaatagtaagcaagttctctgtacacagaccattatcagcttgaatgacagacttaagtgcatcttcaaatgctttagcaataccaaagtttgtatcttctgcaccacctcccagaccaccaaatatgagagagccattcataaatacacgaaaattgttttgaggtgtagtgaagagatccttgatagctttataaattctttcctttgatccagagaacagatcaagaggattgtattcacttagcagtgatat

SEQ ID NO: 102 - DNA, 448 bp, Glycine max
aatgtccagtttctggagatgatcccatttctcctaaagagaaaccaacacaatctcctagtcagttaatagaagagactagtttagaagtaaaacctcttgagcagtcttccattaatctggaaagggaacaagaagatccttcaacctcacccatgtcacctcctaatctagaaattgaggagaccaatcacagcctgctaccttcagatggagaaatggtgtttccattggttacatcttctcaaacacgtgagcgtgataatactgagatgccaaatggaaaaccaaagaataagcgtcctcttcctcaggaggatcctgtaattgatcctgttgctgctctagacaaaagcagggtaatgacagttttcttgttctcatataatgtactctttagtctttatgtggtcttgaaattcttgcatgacacactgcctttgaacca

SEQ ID NO: 103 - DNA, 422 bp, Glycine max
agttttatcgtcttcgctcaagtcttaaagctaagcaagaacatgcttcactgctagaagattttaaagaatttgatcgaacaagattagatttggaacaagtagactctgaacagcatgcactcctaaaagaacgcacatctatcagccgaaatacaggacatgtcagtgatacaatagtttattttgcttttctgatataaagtgctgttttctttctttttaatccagagattccagatattcccaatggaatattacactattacaatgcatctgatttgtatattgcctaatttttctctgggttaggggctttttaacttactgcaaaaaactgctttttgagaagtctttgatttttcaaaattgtatctaatgttcaattgggcgagtcttattttgagtttttctgcctattg

SEQ ID NO: 104 - DNA, 541 bp, Glycine max
gaagataaacttcaaaatggggtatgttaatgtttctctttcagacattagagggaagcaatggcccactttcttatctttcaacgtcacagtgaaactgcctgagtattcaatagagtagaggactagtggtttttccatttttcaagttaatatgtgtgtacttcgacgttagccatgttctattttgtcataagtcataacaacttgtaagtgttctaaatgttgtcttatgagtttgtttgtgtcataggttcctgagtgcattgacaagctagcgcaggcaggaattaagctatgggttctgactggtgataaaatggagacagcaatcaatattgggtaagttcaaagttattcaatagaatttgacatcctttgaaattataacacgacatcattgattgaataatttctgtgactgtaggtttgcttgtagtttactaagacaaggaatgaagcaaattataattagttcagacactacagaaaccaaatcactcgagaaaatggaggacaagtctgctgctgcaggcatgca

SEQ ID NO: 105 - DNA, 886 bp, Glycine max
tttattttggtccaaacttaatctcttggtggtcttgcaaacaaaaggtagttgctagatcaagtactgaagccgaacatagaagcctagcccaaactacagctgaaatttcatggatcaagacattgctgactgaaataaaagtcccattcagaactcatgtgatcttcagtgataatctgagtgctggggctctcactcataatccggttcttcatgctcggacaaaacacagggagattggcatcttttttgttagggaaaatgtcctcaccaagcagctagttgctcattacattcttgcattagatcagtgggctgatgcactgacaaaagctctttctgccacaaggtttatgtttctcgggcaaactcaatgtagttgacactttgattaagtctcaacttccttgagtttgaggcggagtattagagtaatacaaagacctgcagacaatcacataagggacaagaggcttcctgagtaatgacatttcttcttacgaggttgaccttggtagggagtctattcttaagaagtctccaacaaaaaatgagtgcccgaggtgggatgtgcagctgccatagagtcttaaaactcttgtcatcaggatttcctgagctggtattcatacataaactataagctgacctggtagagtattgaccattaggttcagccagccacaacattttatccttgacctgattttgaataggcacagagctgatttcctccaaaaactgaacagccatctggctttcatgatcaaaaagattcctcctccacctcaagtcccagcaccagctattattggtaaagtggcccatttgagagatgagatccctttgctgtctactgatgaggaatagctgataatacttc

SEQ ID NO: 106 - DNA, 388 bp, Glycine max
aagttaaaattactccgggttcaaattatgcaaaacgaaatccatcattaaaattactcctgggaaatcaaagtatacaaatacagcgcaaatgtttaatttgtcttcaaaatttacctgagttttgcagatcacctacctttggcttattctaaattaaatatcatggtaattttatataccaggtagagtgtactcactctaacatttgataacacagactttttgtagttgtttttttatgaattaataattgcagaagaaagcgtaccgatactattggcagtggcacaaaaaaatatctctctgctgtcaagttgacactgccctcctctgcgatagtggcaagctgcacattcatcagttaattctactttagtggagatat

SEQ ID NO: 107 - DNA, 449 bp, Glycine max
tgttattcaaagaacctatttagtagttgtagttgtagtagaattttcattttttagtagaaactttcatatgaatgtgatgttccatttttctaggggaatgtcccaccagtgctacggactatattggaaatcttaccgctgttacgtccaacagagcacatatcttctacgtggcctgttcttcttcgagagtttctgaagtatcttcctagacaggattctcatttacagaatgaggatggtaaaatcgatcaagcaagaggttatgatcttattttagttatggaagtgtctggttgtatctaatctagttttcagttttcctttaagtaaaagtgtaaaacctatgcttgtgtttgcagattctcaggtgaactatgatgcacctaatggtgctactccaatatcacccaacaaaatagcagtatccccgggttctggatcaa

SEQ ID NO: 108 - DNA, 420 bp, Glycine max
acacgtgaatttgataccaagaagctgtgtaatgcaaggtagcactaatgtttattattgatcccccactagaagagttgctccttccttctccccctttcttgagatattttagtgcttcatggcacattgtgaatgtgccaacagaatcgatgtccagaactgcaaagaatacaacttatcaccatttcctttgtattactgaattagtataatcagaataaggttgcatcatgttctaaacctgagaaacatgtcttggagaaagcactcatctgaaatgtaacaaatctattgttgtgccaaaatcagattttacttcacaaaaaaatgagtttcttgtatgaacaagaataagaaaaatgcagaaaacagatgaaccaaaactgcacagaactcacagcagccacttttactcaa

SEQ ID NO: 109 - DNA, 452 bp, Glycine max
gagtgaacctgcaggacacccactactgacctatagagagttggatcatgaaatagatcagccccatttgagttttatgaagtagatctcagacatacttgctttgagacatcaaaatagacctgttagggagatacttaatctctagacccaagaaatagtctaagtgacctagctgtttgagagaaaaggttgtattcaattttgaagttaactgttgaatgagagagttagaacttcctttgatgatgatatcatgtacataaactaaaatgtagacagtgtgttgttgatgtgtataaatgaacaaagagggatcacacttgcttcctacaaacccaatctgtattagtgtcgaccttaacctatcaaaccactgccttggagcttgctttaacccatagagagccttgttaagtttacaaaccaaggattttccttcaacttctaaa

SEQ ID NO: 110 - DNA, 443 bp, Glycine max
atgatgcgctatcaagtgcttcgtaagcctttgttatcgcttttacaaaaatcaccttcattatgcattttttttttcttttaatttcaactgataacagaattaatgcattatgtagtaggagataatagtcctttttcatcctatactccaagctggttaacaaactgaaagttccacaatccaaattgcttatgtttgccatttaattacaaaatgaaaactgaataattggatagtcttttttattcatttcccagttgcataaaattgcaaccttaatgttgactatgctgaccatattgaccttggttacctcttctaagctatattgagatcactgatggcagttcatatttttgaaaaaaataatatttttataggaatgaatgttccatgtctcacacctggataatatagtactttgtagttcacactcgtgt

SEQ ID NO: 111 - DNA, 458 bp, Glycine max
taattaacagtgttgtagaagcatcttcctccaatggacccccaacagggagcctttgcacaatagcatcagcctaataagaatatcaaggttagagcactaaatgtaccttgaaataatcaatagatgaggaggattcccaattgttcgtttggtataacctcgaaactttatgatgtattttttctactattttatttatttagttttttagagaaatttcttgaaaggcacgtgacaacctgaaatccttctgcacattcagtcacaacaatcagatgcagatactttaaataagttttgcattcttcagaaatgaatattgttacaaatcaagcaaaagagtaaagacacgatcttgtgtttcaactgcctctcatgctcaacggtgagcttgtttaaggatatattaaaattcaggatgaacttgtgacagaagaagtttaggaagatagaaa

SEQ ID NO: 112 - DNA, 1078 bp, Glycine max
aagattgcaagtatcactcgtgatattttgtccaatgacatgtcttgactccaataatttgataaaagtgatgaaaaagatcaattcctagtgtgagcagtgtccaacatgagcagcccatacaataaaattaccaaagctatgaacgactcaccagccacctaggagaatcagggatgaagggaagactcagaagttgcacaagacacggaataattcctgagacaaagacaaaaaaaacatgagagttacatggagcccttttgtttttttaatttgctttatgaaaagaacacaagaaagaagaatattacctattgtagccaagatccgccaattcacatatgctccaataagataagttaatgacatcccacaacaaatcattaactgtcaaaataagatcatttagggattttaaataagcctataaatgacatagtaaaacataagtgctatggtatatacaataagagaaaaaatgacactaaagattgaatcattctagtattgctttacctgatgaactgcagtgaaaatattctggaaaacttaaatcttcacaaaaatgagtcagacccgtatgagccaatttaccttcgtgtgccgtatctatgatatgtattaacaaagactagagtaaagatcatgtgtgatgaaaatatcaaatcaccgcatccatatatcgcatcttgtggaactgcatgatgaaaaccaaatgagcaccaaaacaaccaaaaaggagtcaaagctaaagaactcgagtacaatagtatactaacaattaatcaagaggacttcaaagacactatccggacgaggcagtgtagcaagtttagacccctgcacaatacatgaaatgtagttaaattaaaagattatttgaaaggagaaaaaaaaatctaacttgcatagtttactactcagtcacctagaaagaaaagaaacagtttaactgcaagtgaaatgatgtttgtttaaaaagcacacattctaaaataagtatacctcccggcaatgatagtttggaccaggaagctgcgtagcataaaatgtcactatgcgtagagcttgggaa

SEQ ID NO: 113 - DNA, 463 bp, Glycine max
aattccagttggtggagttccaatccaattatagaagtcttaactaccaaaattgctgaattgcaagaatttatttgtacagttgtactctggatctgtatcaatgtctcctctatttcctgatccatgttactactaaattacatctcatagataaacaaaacaattgcagcagctccttgctatttttcaggttcctctccctttctccaactacattatttcaacaaaaagatactaaaaatcaggtatctcgtatgtctattatcagcaaagatgccaataataattagataaaaaatccccatttcctacaacagatgatgggatataccctccacaactacaaatttcacaagctgttaaccataacatttcaccaacctcactcctccacacatcgaacacaaattgtaagaatcattcccaatcattcacattctttcagaagcatcaaagtcat

SEQ ID NO: 114 - DNA, 478 bp, Glycine max
agaatcagaacacagaacaaacaccaaagctattaattttagcattatactattttctatttcgtatttgattattgcttaaacgccatcattcacttattcatatgctgacaagggaagaaattattgtttacaggcaaccattactattagctcaagtgagcactattggcatggaacatggaagtggctataatttacttaaaaataacttgagaaacctaaaataaattacttctcctaattgaggctggatcattcctattatcttattacaccatttcaaacaatccacttacatttatttgggaataatatatatagcacagcatgttgtattccaagaattgtaaataaatttgcgaataattcatggctataagaatattgcatacctttggccggacaggcttaacaaaggaaggtcggacaggtagaccaaaaatctttatttgggattgctgcaggcatgcaagct

SEQ ID NO: 115 - DNA, 505 bp, Glycine max
tcaattttccacttattcacacatctgataattccggaattgttgaatgaagatcagacgactcatattttatctcggtaaatcagacttaaaacacatttgaaatgtgagcagtctactcttcatccaactatacgccttgattatgtgagattgtgcaaaattgactgtaccgaatccagttctagggaaggtgttatttttcaattgaaaagacagagaaatgagacatgtgatccaaatccaaatccaaatccaaatcaatgaaagcttccaagaataggtgtagaacaacagatcatatcagagaaacatcctgacatattgaacagactacaactttttgcatttctttgaaaatcttccctaaccagcaaccaaatactaatctatatattgatcagtgaccttatcataaagatcaaagcatccaacaaaaagatcacagaatcacatgcatatcgaaaaaggtattaatggaagaaaaaaaaaagtgtgacctttc

SEQ ID NO: 116 - DNA, 416 bp, Glycine max
attatatgagggctcttgggtttttcaaggacactgatgcacccttacctgtaagaatatgattttgttattattattattatatttattgtgagtctatatatataagaagaattttccattttgtttcatctaattaatatagttttaataatttttaaattttgctttgtttaatgcttagtttggtgttggaaattaagattgttccagggtttgatgctgctggtgtggtggtgagagtgggaagtaaagtgagcaaattcaaggttggagatgaagtttatggtgatatcattgagtatgcttggaataatccaaagaccattgggactttggcagaatatactgctactgaggagaaagtgttggctcacaaaccctccaatttaagctttattgaagcagctagcctt

SEQ ID NO: 117 - DNA, 464 bp, Glycine max
acaagttctcacctgatcaccttcttgactgtctcaaaataagttctgaacatgaagcacttgagctggcagataaggttgagtcttcaatgttcacttgaaggcgaaaagcttgtctgagccactcaaaaacatcatggaacaaagttaaggatctcatggctgacactgaccgaagtgacaaaaactacatcttagctgagagagctgagactttgttgttttgcttgaagcaaagatatcctgaactttcacaaacatcattggacacatgcaaaattcaatacaaccaggtaagttcagccacttacaacatatcaagttgaaaaataacaaaaaagacattacgaggtcatttttttacaaatgatgaacattttaggacaccatgatatggatatctattgtagaaactagcagatatctagattatgaactcatggactaagaatgagtattatctt

SEQ ID NO: 118 - DNA, 467 bp, Glycine max
ttgcatgcctgcaggacatgcacaaggcaacaaccttgttacagtgttactgataccttgtctcatggggaccagtgagtggtgatcaaggaatcttagagctttttgctaggacattgtgcaaagataacagggtggaggacatacccttttattgagagagatgatcctgaatctgctgacgcactacaataacaaagtcttatctcattatgaatgacatgatattattttacacgattaaaaaccaatgtttcagacttattattaagccgatgacttcctccaaagtccttgttattgcctctcgttacttttttatcagactaaaaatcatacaatttgctgacacactactctacagatttttttgatagatgaatatgatattatgtgaaatcataccaaaaactgctagaactaaaactagtattgcatgcaaatgctgattggtgaatgctggtgtt

SEQ ID NO: 119 - DNA, 915 bp, Glycine max
aaataaactgcctaaaaataaaacaaaatctcaattttatttttgtaaattctaaatctgggttctcattcaaaatcaatttacctgagtcatgcacctagttgccagtatacggattaacttattgaagtaaggatcatcaccctgaaaaaagtattttgtaaaagagaaacatgaaaccaaataagacctaaaaaaaatatgcttaagctagcaagctagtaaagagccacagccaaaatcatcgcatcattatagctaataatcatccataaaacatatatataattatggttgatggaaaacaactaacaaacaataatgatgaaaataataataataataaatgcaagataaaatttaccacagcatggtcaagagaatcagccaacgcttttgatgatgagacatccaagtgcaagccaactgcagcactgttaattccatacgtttcttcaacagccatgtgatgcttgtactccttttgaaataacttcacagtcaaaacagtggtttttccagtaccagagcgacccaatacaaatgtacttttaggaaagaggattatgtcatattcttcatctgatacttcaaagggaagatcaaattcatcactgatacgatcagaaagcaagtgactaattacaactgatgataaggagtagaatttcatcaataacaaactctcctcaacctttgagttctccacataaattctttgatcacaaccacttaattcagcttcatttccattattatcaagagtcttaaatttagtgatctctgttgatctttcccaacttattgggaccaccatattcctagaaaagaagcaaaacacttgatattagcagctataaaagcttagctctaactgaatttaacttacagtacttacccctctaagcatttctc

SEQ ID NO: 120 - DNA, 444 bp, Glycine max
atggattccttgctggtgtcatgagtaaaagtacgttaatatactctatatatcttggcttctttatgtttatgcatttactttcatttcttcttattttttggagaagggttctcggtttgtagactgaattatcattttcttcttttaaggaatcattcagagataatgttgaattatgctgagtattttaaatggctttttttttttttttttttttattgatggtcaatttgatgttgcaaaaatgttgatttcagagtcactgtctactgatgctcatttatcaagatcatcaaagttggaggaaaaagacaaagagcacaagcgtgatttggatggagctaaagagaaggaaagatacagggagaaatacatgggaaaatccattcaagaacttgaccttagtgactgtaaacgttgtactcccagctaccggcttct

SEQ ID NO: 121 - DNA, 463 bp, Glycine max
tattcgccctaggatatgaactacacaagatttctatttccttgcactaataaatgagttgtttgcatttatattgcaattactttactatgctattgaacaagaatgatgcatggttaaagggtttgtgacttgaaacaatgagggccatattatgtttcttctttgttttagagttccattttttccccattgctatttctgtatctttatctggttgatacaagagacaaacatatttttctattagattctgtctgtttacattttgtactaattgagacagtctataaaataatgcattaaatgagatatggtttattctttttaactgataggtaaattcaggcacctccctgttgtggaaaatggtgaagtcattgccatactggatattaccagatgtctttatgatgccataactaggatggagaaggctgctgagcagggcagtgccattgct

SEQ ID NO: 122 - DNA, 540 bp, Glycine max
tcatcaagcatatgtcccctgatatcgccaaaattcgcaagcttgtgaggcagtccaaatgccttcaagacaaaatgacagcaaaggaaagtgcaacctggcttgccatcatcaaccaagaggaagccttggctagagagctttaccctgattattgccctccgttttcctctgctgtagctaatggatccatggtgatcaacgattgcagtgagtatgatgttgatggggctgaagaagagccgaacttcgatgttgaggaccggaagcccgaccatcttcatccatcaaaccttgggatggagagaatgatgggaaggatgccaattcagcaaccttctcatcccatgaagggagatgttgtcacaaacctagatttcatccggaagaggaagatttctagtgacttcaacatgatgatggatcagaaaatctacacatgcgagcatccccaatgcccttacagcgaagttcgccttggtttccatgataggtctgctagggacaatcatcaattgaattgtgcatatagaaacagtt

SEQ ID NO: 123 - DNA, 498 bp, Glycine max
actctccaaacatggctctgatttactgctagatccctccttttacagatctgttgttggagccttgcattatgttacaatcactcaccctgaactcagttttgctgttaacaaagtatgtcagtttatggcttctcttgagtctcactggactgctgtgaaaaggattttgaggtaccttaaaggtgcccttcattctcgacttattctgtatcctgcctctcttaaaaaccatcttcctcttaggggcttttgtgactctgactgggcttcagacctagatgacagaagatctacatctggtgcagctgtctttgttggtcctaacctggtgtcttggtggtctagaaagcaaaaggcggtttctaggtccagtactgaagcagaatatagaagtttagttgctgccacagctgatattctctggattcagactcttctcttggaacttgcagtccctcattctatacctatcatgctgtgagacaattccagtgc

SEQ ID NO: 124 - DNA, 544 bp, Glycine max
cagtttgcatgcctgcagttacgaatttatagtgaaatttacatatagtgtatcatcaaactcaagtcacaactagtgtaagcggaagactcgatatgatatgcacactaaaacaactattctattacttagaaagagaaaaaaaaaaacagaataaaatttgaaatttcagccctacttcttgaaaattccagagctttctcattaacaagcatgcaaacagtcttaaaagcagtggaaaattactacgtacaacttcacaacttgcttgcaaccttggacagttagattataagttattataacactaatcaacatgttaacgtcatcacttcctagttccgacacacttgttcctcttcctcttcgctttcaccacaggagttgtagcgctatacaaatctttaatacaacgatacctcttattctttctcgcaaagctttcatcttcggactccaccgcagtggtaactgcgacggacgaaacatcgccgccggaatcaaccttgctctgttggggtggtttcccttgcaccacgctgta

SEQ ID NO: 125 - DNA, 911 bp, Glycine max
gagcagttcagcagcctctcttgtccattgttcagattttcccaacgcaccaaaacagcttttcgcaaaattaattttaagaccagaagccagttcaaatcccctcaaaattgatttgatggtgatgacattttgcatagatgcctcaccaaaaaatatggtgtcatcagcatattgtagaatgctgactggaactctgtctttcccaactagaaattcagaaaataaattcttgttgaccgcctctctcataagtcctgttagaccttccgctgcaatattaaacagcaaaggagccaatggatcaccttgacgaagacctctttgcggagtaaattcagaggttgggcttccgtttaccaaaaccgaaactgaagcagatttgagacaaccttggatccattggatccacttactgcaggaagactttttgcaggtggtatggctggtgcagttgcacagatggctatctatccaatggatcttgtcaaaactaggttacagacttgtgcttctgatggtggaagggttcctaagcttggcacacttacaaaggatatatgggtccatgagggacctcgggctttctacagagggcttgttccatctcttcttggtatgattccttatgcagggattgatctcactgcatatgacaccttgaaagatctatccaagagatatattctttatgacagtggtatggtattactgcaacaacattatctcttgaacttaatgattttattttaccagtttgaattttttttaatgataaattaacacttctaaattcaacctttgaaacttaaaacatgttattcttttttctcctttacagatcccggtcctctagtacaactcggatgtgggactgtttcaggtgctcttggagctacatgtgtctatcc

SEQ ID NO: 126 - DNA, 823 bp, Glycine max
aagaaagagggtacgtaagtgacactcggcacatgcatgttgaaaatcaaataagatagctagaaaattggattttctgctgttgttttttttagcaggtccgatgctggctatttaatttgtattaatatttaattttgtgattcaatttaaaattatgtgatttttaaaaaacagcgagaggataactgaaaaaaggacagaaaaaaactagattaaggtaactagctatacgcacctgtgcaatcttgcaaacaatgacatgcccatcgtctccccacccatggatatttggaagcaaaaggataaataatgagactatggccacaagctgatgatgaattgagtattgacccatggttggttctctacattaattaacaaatcatgcacatgatggcttattatatatagatgtgcctgcagtgcttatgtctatcttttgaatctttgcagcgttttgctgctgttattatgaggatcagggaaccaaaaactactggacttatttttgcatctggcaaggatggtatttttttttttttttgggtgaatctggaactttctggccaattaagttggaatgcatgacatgcaataggtaatgggagttggacaattacgtgttgtttgcccacgaaggttgttaagaactctcctctttcttcttgtgcgcgaacaaggtacttttgcggttttcgccttgttcccccgaggacgtctgaatatcgatgtttcgcggacactccgcctgtatagccattgcttgagtccgtcgcccaggccggtaagccatcatgactggttattagctctcttatca

SEQ ID NO: 127 - DNA, 479 bp, Glycine max
cttgcatgcctgcagcacagcagcagcagctacaacattgatggtggtttcctcctacctggaacaagcttagctctaacatgaaccattattattcaacaaaacaaattattgtttcgaatgttttttttagaattagcaaataagtcaggaattcagttggcactctacaataaataatttagtcttttgcaacaatggtagtactctgatctgaagggaattactttctttgcatctttcacaaaataggggtttgaagattattagagaaggcattgactactatcttattcaccaaggcgagatacagcgacatcttggttcaagaaagaatcatgaaaaggaaattggtcactgctccaatactttgaattcagaaagtaacttcaatggagaaggttctctagctgaagagagatcatgtcgtggaattttagacagaatcctttttttcattggggatttggaagttgctt

SEQ ID NO: 128 - DNA, 465 bp, Glycine max
tttttactggcgtatctgatttatctcatgtcaaaatggttgtggcactaagactttcaaagaaaatatacatgtatatgattttttatgaacttgaagatatttatgcatacgagctatcgaatttgctgagtgtaacagcaggctcccaagtaagttacttttaaggatcctttaatgattgcttagtttcatggacaacagatatgggacaagttgggcacatgtatgtgctgttgtgtcatgcttatgtatgaccacttccttgattcttgcaacttgtaacttcggttcatttttaattggatttcattttctctcccatttttctaaattagtactgtcggtttttctttaagatgttggaatgatgactgaacaaaagcttggtcaagagagtaatttagttgcttctttttctgatatccacataatggattcattattcttctctctaattatttg

SEQ ID NO: 129 - DNA, 457 bp, Glycine max
gaatgtggaacactttaagatttgcagagacattacgtgcatgcgtgggtgagtgcaatgattatgtcaagaataattcaaagacaatacatgcatgcacacgtgtgtgactgtgtgcaggtaaggttggtataaatacatgctagaaaacataatattaaacctattgatacagttagtagtaatgagtcagttctttgaattattgtatataactgagtcgatgcataattaatgccatcagcaagacaatgtctcctttggcataattatggcaattataactcctgtttctgaatcttaaataatgcacattccagtaactaataacctaaatttaacaatttaattactcaataataagaaagaattcatagcactccttactttggctcggtctccttggcttctgcatctgcaacagcaggctcctctttcaccagtataggtgctggtt

SEQ ID NO: 130 - DNA, 516 bp, Glycine max
caaacccgccgatcctctataggcgacctgcagtattaaacacaatttcctccttgagaatttttaagttaaagttatagtttcaaaatttaaaagaaatgacaaatgaggaattcaaacctgacaagacaccttggatggcatcaagtaatattgaaatggcaagcaagggtgtcactgaagcaaactcctttttaattgtagaactgtcgctgaaaaactgaatccagatattgtgaccaaatccaagtgccaaaacaaaacataatccaaggaggagagagagcttcagtgtgacactcatcgcatgtttagctcgttccgggttgcctgctcccaattcattggatacccttgtgctgttaaagttaaatttcaacttttcaacacatgtactagaatgttgattcagaagatatgcaacaatgcaagcaaaggagaatgtgttcaatcaactaaccttgcagctgcactgagaccataagtgatcatgtaggcaatgaattctgtgtttat

SEQ ID NO: 131 - DNA, 399 bp, Glycine max
atatggaggaaaaggtgcacgctgttttgaagctcctagaggaagagggggattcctttgccaagagagcagaaatgtattataaaaggagaccagagctgataaactttgtggaagaatcattcagggcataccgttctttagcggataggtatgatcacatatcaactgagttgcaaaatgcaaacaacactatcgcttctgtgtgcccggatcaagtcccatatatggatgatgatgatgaggattcgcctagaccgaaaaccccgagaaaaatgccagaagggcacaagccaaatattcctaatgttccaaaggttccaaagcctccacttagagatttaaaaagtgtcataacaacagccacaaagaaactcaatcccaagaaggtagtagcat

SEQ ID NO: 132 - DNA, 418 bp, Glycine max
ccaaatccagacggatcttgatgatcttgtgggagcgttttcagattcaatgacggtggaaactccggcgtcccgaacgtgggtgttggcgctggcggattctgagcaactgcatcagtaatgaatccatcaatggtttcaatggtgtcaccctgcctaattccgtgaaactgaaacgactcttcttcacgcagcaccttctgcttgtgaacgaagaaataaccgccattttcgggaagacggaacctgaacgccttgcgacattcattcagctcttgcctcaacgccgccacgttatccgcgggattcacttttatcagaatcttcattcctgtatgcatcggcatcacagtcacggccagcttctgaggtttcaccaccacgtcgatctcgttattctctggaaccgaacaacaat

SEQ ID NO: 133 - DNA, 450 bp, Glycine max
tgtcgctttcagcttaaataatatcataaatggtatgaatgtaagacaagagagcatagacatccatagttgaataatgaaatataaaaaatgaaacgtgcttgttaaggatgtgctaaaatcaatgaagttaactggacttggtctgtttcttctctgtgaaactttcaaattgacataccttataagctcggaatgctgtttggatccttgttgcagcaatagtttcaactgataccccatctgactctagattttcgcttttcattccatttgctaaaccattggacttttttcttgtataaatcttagtctgcaacacaattaatctccatgaagctaaagatccctatctcaaaaggtgagcatattagtggggatagaaactttcaggtcacaacagccctcatacaaaacaagttccaatatattctaagttctagcaaatga

SEQ ID NO: 134 - DNA, 536 bp, Glycine max
ggagggatttataaagaaaggagaggaagagaaagtttatcggctaaagaaggcattatatggccttaaacaggcaccacgagcctggtacaataagattgaagcctattttgcccaagaaaagttttacaagtgtcctagtgaacacacattgttcacaaaatcaccggaagtgataaaactatgtgtgatgaatttaagcactcaatgatgttgcattttgatatgtctgatctgggacaaatgcgtcattttcttggaattgaagtcaagcaatgtgcaaatggaatatttatttgtcaaagaaggtatgcacaagaggtgttatcaagatttggaatgcagaatagcaatgctgtgaaaaatccaatggtaccaggaacgaggctatcttaagacaaaggaggaaggagtgctgatgaaacattatttaaacaattagttggaagcctgatgtatctaactgttactaggcctgatctgatgtatacagtaagtttaataagcagatttatgaccaatcctaccacggcaca

SEQ ID NO: 135 - DNA, 455 bp, Glycine max
agttctgatgccgatgacctcaaaattggttccctacagaaggattatatatttataagtgaattttgtaatctgataatgaacatttgaaaagaaagcatactaggcatacgttctctctctctctctctctctctctctctctctctcacacacacacacacacacaagtgacacaactaacaacttgaatgttaaactcctcttttttgagaaatagttgacaatatagaaatgtgctgaggaatctttctcccccaatccccttcttgcccccgcaccacccaccaaaaagaaaaactcaatgatgttttgcatgatcaatcttccatcatatacttcaaaaaacataattgacacaatgaaacacactaaaactagaaatttgtgatacaagcaaagcaggagaaaattaaaagtaacatacttctgcaaacattttagcagaaaatctt

SEQ ID NO: 136 - DNA, 458 bp, Glycine max
aagattttctgctaaaatgtttgcagaagtatgttacttttaattttctcctgctttgcttgtatcacaattcacaaattcctaattttagtgtgtttcattgtgtcaattatgttttgaagtatatgatggaagattgatcatgctaaacattattgagtttttctttttggtggttggagtgggggcaggaagggggttgggggagaaagattcctcagcacatttctatactgtcaactatttgtcaaaaaagaggagtttaatgttcaagttgtgtcacttgtgtgtgtgtgtgtgcgtgtgcgagtgtgtgtgtgtgtgtgtgagagagagagagagataatgtatgccttgtatgctttcttttcaaatgttcattatcagatcacaaaagtcacatataaaaatataatccttttgtagggaaccaattttgaggtcatcggcatccaaac

SEQ ID NO: 137 - DNA, 526 bp, Glycine max
atatcaaaccttttgcaactaaagagcttaaaaggtttgcaattggatttaaggtattattggtatcacttgatgtctgggctgaggcactgctgacattagaggaagccggtggtagagtagatgccctaggtggtccagcctttcttagaggtatttttggaagaacagatacattttcgctggaaggacctaacgaagatggtgatgcaattttggacactgaagaaattaatgtggcaggggaagggccacctgaccgtgaaggccgaacccctaaccgagatggaagattccctgtatccagattacttttagtttctctggctaaaggcacttcggacatgggtggcttctcagtcttaacagtaacttcattgtgagaagagcccagttggtgctgatgccttgcctgaaaagtcgttgaagagaatggaccctgcaagtttttcagttgtgaactttgtaagttaccaacctgaatactaggaggaggggcgggtgaagaatctttaatatattggct

SEQ ID NO: 138 - DNA, 458 bp, Glycine max
ataagaccttccaagttggggatgtacttggtaagttcaactcatcaaattattttatagtttgctcgcttctgctaatttcgttcaagaatttaaatgtaaagttttaaatagtttcatgcatctaatcataaatgatcatgtattataatattattgattaaatttttatactgataatatatccaaattaaactcttaccttcaatggttcgattaaatttaaactcttatgtcatattattgataatagagtaaagtgcttcataataaaacccgattcgttttgtaatttgtagtattcaattatgctgttggagaacacaatgtgttcaaagtgaatggaactgcattccagagctgcacgattcctccagcaagtgaagcattgtctactggaaatgaccgtattgtattggcaattcctggcagaaaatggtacatatgtggtgttgaag

SEQ ID NO: 139 - DNA, 462 bp, Glycine max
ataagaccttccaagttggggatgtacttggtaagttcaactcatcaaattattttatagtttgctcgcttctgctaatttcgttcaagaatttaaatgtaaagttttaaatagtttcatgcatctaatcataaatgatcatgtattataatattattgattaaatttttatactgataatatatccaaattaaactcttaccttcaatggttcgattaaatttaaactcttatgtcatattattgataatagagtaaagtgcttcataataaaacccgattcgttttgtaatttgtagtattcaattatgctgttggagaacacaatgtgttcaaagtgaatggaactgcattccagagctgcacgattcctccagcaagtgaagcattgtctactggaaatgaccgtattgtattggcaattcctggcagaaaatggtacatatgtggtgttgaagatca

SEQ ID NO: 140 - DNA, 561 bp, Glycine max
catcttgcatgcctgcagtgacctcagccatcatgcctgcaataattgttcactgggttacaatcaagcaagatggcgaaataacgtttgattactgtgtcagagacattagtcatcaagcagagcatttaatgaaacactactaaatatccaagccacactctgacccaatgggtttcacccagatatcactctactcttacattattagataaaaaaaatgcagttaccacaatgttcataggccacaaggagtaaaggacatgtatcttatgttgacactattattatgattaccaactcttgcatagcatatcctctatcaattatcaaccatgttcacttgtatttagcacatccaaagcaagagcagatttaatcaatattattcagaatagtaagcttaccttttcggtctatacatactacagataaccattggatggagtgcccttccatattgtgccaagaagcaattttctgggcttgccaactttctaaacctggcaggacttccttatatcttggaatgttaacttgaataatctttgcgacaaggtt

SEQ ID NO: 141 - DNA, 488 bp, Glycine max
caagaggaacttctcatggatcacctttaggcaagacagctgcaggtggagttgcgtgcaacaatggagatagaaggggtgtttgcggagaagaggaggagtacagtgctattaataattttttatttaattttttaataattaaggattttgattaatttataattaatataataacttaattaattataattatttgttaataatctatcaagaggatcaaaatcactaatttataagattaggggaccaaatattacaattaaaatccggaaaatcaaaatcaaggatttgagaaattaggaggagtaaaatcgcaatttagcccattgtatatcatataaatcaagcttgatctctatgatacaataataagccaagatttgttgcaggccagaagaaaagaaatacaaatatctacaggctatctcacattcttatttcaaagggactaaacatacagcttaattcttatagaaactctggtt

SEQ ID NO: 142 - DNA, 534 bp, Glycine max
caaagtctatatggagtgcagaaatatctcctgatacatgctcacctgtggagcatatattgcatttggaacctatagaggtacccatatatattatataaataatagatagaaaaggaaactagtcagatatggttgccttggtttatctttgatattaagtaaattgcctgtggtttcatcgcaatcattgacactgccgaaaattgcaatcgtgatgcagttgcagtcagttgaaaaacctttatgttgcagatcacaattaaaacgatgttaagtagtatcctgctatattttgtatagttcacccttatatcattctgttccttctctttggaaggtagatatcttccgaggaatcactcctccagatgctccaaaatttgggaaggtatttggtggacaaatagttggacaggtaagaaaaattgccttgacttcatagtacagcatgttctcatgtcagtagcactttctaggcaatgattgcttacatgataatgcgtaatatacaggcactggctgcaggcatgc

SEQ ID NO: 143 - DNA, 543 bp, Glycine max
acgaagaggcaaagaagaaagctcgacttgctaggtttgcacctgcttccaaagttgatcctcaagaagaagataagaggaaagcaagggcacttaggtgggttcatcattcctctcataatttgtttctcccaattcatattgtttacaagaatcaagcatgcatggtgtcttattagttattaggtctttctgttttgggttcccaggtttgcgaatccgtcgtcaacttctatagctaatgttaatggcgaggcaaagattgagccggtaagacccttttggtcactttcaatgctttgcgtcatacaaagatgaaaaaaaaatgtatttttgtgttgactgttgttctgttgtgtttcaaactagaaggctgctattgcaggcaatgctggaggagggacctgaatgacaggtcgcgtctttaatttgtaggaatttttcttgtaagtcaattatcttttgctcttgcttattaccctttgctttgcatattgcatatctgatttgtgatgttattctctttttttcccctcaactttt

SEQ ID NO: 144 - DNA, 410 bp, Glycine max
aaggatgttgcaatattttcaaaaataaatcaaaatacaaaaatccaaatcatcaaaaccaatacaaagttgtttcatcatgtaaaactggcaacaaaacacattcagtgaactggcatttccaaataacaccttggcattaaggatatgatattaaatatataatctaagtctatataccaaagaaccatgccccagaaggagagacacacaaatcacagctagagaagacaattatcgcatacatcaaactgacagtctatttttcctgaaaatgctcaaaagcaagagtcaatttggtcaacaagtgttcatgtcacaacacatgtagacagcccagttagacaacttacagctactacagcaggtatcaagacaactttgctttcccctttaaacatgaccagctg

SEQ ID NO: 145 - DNA, 412 bp, Glycine max
aaggatgttggaatattttcaaaattaaaatcaaaatacaaatatccaaatcatctaaagtgatacaaggttgctccatcatgtaaaacttgcaacaaaacacattcaatgaactggcatttccaaattacaccttggcattaaggatatgattttaaatatctaatctaagtctatataccatagaaccatgccccagaaggagagacacaaatcacagcaagaggaaacatattatcgcatacttgcaaaaatcaaacagtatatttttcctgaaaaaactcaaaagcaagaatcaatttggtcatcaagtgttcaggtcactgacttatgtagacagcccagtttgacaacttacagctactacaacaggtatgcagacaactttgctttcccctttaaacatgactaa

SEQ ID NO: 146 - DNA, 464 bp, Glycine max
ttgtttcacaaatgaagtcgtttactttttctgtattctttctcagtgtttctgatcaagagtgctcctgtcctctctgatttcttccaatcacgtttaccttctatcaatgtggcataaattagactagtaacttattttggagggaaaaaaatcttcttaggaagtaggcgttgtacatcaagaaaaaaaatacttcaagaatacatacatgacaccaatattttctctggatataatgctttgatagattctctttacaatattttgattgtgaaatactgtggatgttttcagtatcatttttgatcctttgggaaagaaacataggatgcatcatatcatgtacttttaaatcgggattcggctgtttttttgtagcaatctttcatttttcttactttcgtattaggttttgatagtttcatgaaatgtttagtgaaattattctgtcctgcaatctc

SEQ ID NO: 147 - DNA, 475 bp, Glycine max
ttacatgatgcaaatgatattgtttctctattttaaattactttcgcttttattgagtggattctctatatcttgtgctttttttaccttcaagtttatggttaaataattactggactccatttcattatgcataatcctaggttccaaactcacgtataccagtctactgtagactgttgatctcaattttataaattgatattaatactagtattgtgtgttaataaaggtatatactaggtatctgagggttaattttatttccttgtaggttgagcagttgcatcggatttttaaactttgtggctcaccatctgacgactattggcttaaatcgcggttgtcacattccacagtattcaggccaccacaccattataggcgttgtgttgcagatacatttaaggactacccatctactgcggtaaagcttatagagaccctactttctgtagagccagcacatcgaggg

SEQ ID NO: 148 - DNA, 401 bp, Glycine max
actctcgcagaaggggcaatggttgggtacactgaaaaaggaatgcaaatggctcaagatgttctggtaggtcatcatagcttcgtcatcaacttcattacaatgagatttatataatctgtttaaagacttaaaatttaattttgtaaatgtaggtaaggatgaacgagagaaacatttttttgaataacaaattgggaagtgagctcctatttacagctgcgggagaaaaggtatgcaaactatatctcgttacatgattgatccaaagtttatatttgttgccctggattttaaaagtgtattattttttcttatttcttaaatggtagactgggggatatatcactgctaactacatatgggacttgatgcaagctcgtggaattaccccttcgttt

SEQ ID NO: 149 - DNA, 475 bp, Glycine max
tgaaagactttcaatatttgaaaagatggaaatcaaaatagtaaaccagtaacaacataccaacaactcaacaaggggttaacttgagctgttatggacttgcgtactttaaacaaacaagtgatcaaagatttgagttctaactcttgtgtataaaaagaaccaagttaagaggggacaaacaacctctaacccttcgtttggttgagttcaaattagtaagaagagagagaattttttttcaaaaattaatgggagtctcacatctctaccacactacaaacatgatgatagaacataatgaaagaacttataaatatcaaaatcgtctgaatttttttccatttgcctattttttagtttacatatggagagttctagacaaaaaatacatacaacaatagcacatacatgaaatatctgcatctctatcatcatgcatatatataatccgcgttgcaaaggccatgacata

SEQ ID NO: 150 - DNA, 440 bp, Glycine max
aggggatgaaagcaaagatccgagaatgggcaaaagttgttgcttccagttccaagcaacaacaacgtgtcacaactgacaagtgcaaagtgaatatgtatttagctagtactaatttgttataggaacaaaacaattgttgcctaagctttacccagaaattgaatactaccatgttttattcaccagcgttaataagcaatagttatcacatcgcatttgttgtgcagtgcatccgatgggataaacatcaagaagatttacatcgcatgctctattcaatgtaaaattttatctcacgcttgtagtccagcagcatgctgtgtcaattagtgttatacacactaatttgacctcatctttttgtaagtctacacactaattcgacatgtgcaaagtcatgcacctaatcttttaacgtcatcatcttgcaattatct

SEQ ID NO: 151 - DNA, 374 bp, Glycine max
aagacattctccaattatttctaaaactgccaatatgtcgtcctagatggcgattttcccaggacgtaagcgggggagaaagtctagggtttaggttgacattggaattgtaatacgccaaataagctggatcagctcgcaattgttcttcagactcgcaattttgcgtagtgctgcttagatttgcaaagcttgcattctgggcggtgttatgctggggtaaaaggttttctatggccagaaatgagccttcaatgctgggaggtgcactgccactgcgattgggtgccgcatcctttccaccaccttggaacctatggcccttcagaagtatacccaaatcctccgtcgccatgttacgagacgatgaacca

SEQ ID NO: 152 - DNA, 469 bp, Glycine max
ttaggcttgtcaacactacataccctcttttcctctatcactcctttctccacttcctcatcttcccctttgtcttcatctccttctccttcttcctcatatactgtactaaggcacaccctttggccaaagtttggtgaaaaaacatgagcatcttcttttacaccagtcaaagcattcggacaaggttgatttgataagtcctgcttaacattgtaatcacccctgctcataactccaccaacgatatttacctcgtggccaaggggttcttgatcatccatgtccaaatccattgacttcaccattccaggatcatcctcacttttgtaaacacgcaataaccttctcataaacccactcgactccatgtcttttgactcattttccacacaacacccttgctttgaacacagctgcaactcaatctcttccagtctccttctcagagtttcaacttcctcctgct

SEQ ID NO: 153 - DNA, 469 bp, Glycine max
tgatggatggccctagaggctcagattctcacctgaaagcctatgaaagggcacagcaaatgctgaaagaccttgagtctgagatgatgaacaagggagttgataggattgaacaaagcaggctctttgaggcctttttgggttcttcatcaatttggcaaccacagccttgcaaggatcaccaccacaccacaaccttgccggcaacaacaacaataaattcagccaaaattcatgatgagtttgctgatgagaacatcaattccaacataatgttaacaaatcacacagcactgccaccatctaagggtagcaacaacaacaacagcaacaaacaagttggtgctattttggggaactcactcaatgttgcagcccctccattctatgcatcaaaatcatctatgttaagggaaccaattgagaaccagttgttctcagagacccttaagagaacaaggtctggaaa

SEQ ID NO: 154 - DNA, 422 bp, Glycine max
aatatgtaaaatcacaagacaaaccacagcatatgatgctctttttttcctgttctaatcaattagaaacaatcttgacactagtatttgaagttagatacacgataaaacagtgtcttttacaacacaattccactagacgattgacgcatctccatcatctgtgaatcaaagaaatgaaagtccttcaaaaatcaaaattgagctgtaagaaaatgttgaagagaatgactaaggcaacgaaggcacaccttttcctggaacaataacaacagtggtgaaagcaatacttccctgtagcacaccgaagaaaatcacaagaagatgcttcagtaacatgataacagcaggatttaggtggagggtcaatttctcaaatcaaacctttgaatcaagcttgtgcctcgggtccccataaccac

SEQ ID NO: 155 - DNA, 474 bp, Glycine max
aatgatagaagaaattataagaaaacaaatcaacaaataagaattaaagtactgcaaaggcataacaatgcacttacgcaaatagccccttccttctcctccaatgtgcaagttcttgctgggttttcaggtgttccccggtgatcaatgcacgctgcaaaaagtaattaaaacgccatgtctaagaaactgtggaagctgtgcaaaaataatttcaccggctcgtgtgacttacctaaatcaaacacgcgtctgtagtccttaatgaaacctataatcttctcattgtaatcgaatccagggttccacaccagtgaaccgtagccaaaaacccagaaaaccatgatttctgaagggggggggggggggacgcagcatcagtgatatattcataaaatgaatgtataagttgaaataaccattaaaagattcaattaattgtctaagctttaaaacaacgccacattcgtggtc

SEQ ID NO: 156 - DNA, 476 bp, Glycine max
tataggcagtggaacagacttaaacggaaaagggaatcttttgcctgctcaacttaatttagtgtattgtcaacaagaagtccgttttcttttcttgtggcttgctttagggcaattctgcctttgatatttcatgctttgtgtggatatactaacattcacttgaaaaatctcccaattaatgcaccagtaataaacactttttttagaacatacgtattctgcaaatactcctagttatacttgcgcctagaggaaaaataagccagtcatgcagaaaaactgataggctaaatggaatctttaacaactacataaactaagaatcattatgaaatatctgtcagttaaatttaccaagtgactccgtttgaaagtgccaacagagagtgacacatggataatttcatgacactcgatgtctcaaccacctggatttttagacttaaaggagaaaatctgcaaaactgcttcaa

SEQ ID NO: 157 - DNA, 442 bp, Glycine max
gcaaagttcttcccctcagctcttcttaattggcaacccctacttatgtcatctcaaatagtgcaggttacacctggttggagctgacccctttaactggtagaaaacaccaggtaacaagatgatatttgtgtcacaacttaaaatgttaaatcatttcatatgcctcaccatatttctattctaactgcgttgtactggtaccacagcttcgagtccactgtgctgaggtgttaggtacaccaatagtaggagactacaagtatggatggcaagctcacaggaagtggggacattttgatttgcctaatgtggaggactcacgtgaagaacttctcaatgaagaaaaactcccctttggccttaatttgaataaagggagcatctctgagaatcatcctcgtttacatcttcattgcaagcaaatggtcttgcccaatat

SEQ ID NO: 158 - DNA, 528 bp, Glycine max
ctccaaaaagtcctcatttggaaagtatttaactttgaaaatcttagaaactaaagcttagtctgggctagaaataaacttccagcttgcttccccagcatcaccaaattgaaagcataaaggtccctaaatccaaaaacaccaccctctttattcactgtcaacttctcccaagctaaccatttaatagaacaccacaaaaatgaattaagcatcacttggatctcatcaaaaagggagtggagaaattaataaataaataactcataggataagtggggataacttgagcaacgaatttaatcaatacctttttgtttgcgatagaaagatatctcccacgccaagagttcaacctcttctagataccctcgttaacaaaatgtaatgtggtttttttgcttcttcccagcacaacaagcataccaagatactaaccaccaccaatactttccctcactcttagcacaacaaactagctgcctttacgtgattatgcacattaccactgaaagtagcatctgagtt

SEQ ID NO: 159 - DNA, 496 bp, Glycine max
agcatgttgtgggtggttctgccggttggattattccttcccaaggagacacctccttatatacctcctttgcagctaataacactttcagactaaacgacatactcggtcaatatctctctctacatacacaataaccttactaacttcttttctttctttttctaaacaagtgtaatctgtcttcttagtccgatcttagggattcttattcacgtagactctagtgaatactaacttttttctttgttcttgaaaaccattcatttaaatacttgtttgtttgtttgttttgcagtgttcaacttcgcaacaggatttcacaacgtagtcaccctgtcaaagaaacactacgacagttgcaacgtgagtgaagtaatgcaatcattcgacacagcgccggcgagaatcactctgaaccgcacgggcgagttctatttcgcatgcgcgttctcgagtcactgctccctcggccaaaagctgagtattcatgtga

SEQ ID NO: 160 - DNA, 483 bp, Glycine max
attagttggcagtggagctggtaatgtctgaaaagtctcaacacaacaaaactaaaggcagctctcaaatcggaccttacaaaaaatcataatcatattcatctccccagcataaactgctagctaatatacagtagtagcattctacaaaaccgacatagcaacatgcttgatctacaataaaaaaactaatttagggaattgcttgcacccaaaataaatgatcaagggaaaagtggaaattacaactgtagatgaaagccatattattccctatccattcatcaaagaataaatacatagacggggggctatgctacagattacataagtaatcataataggctatagaataaatggatgggttactagaaaatagtgtagttccatcttactttgggggaattgaaagattattctcaagcataaaggagagatcatgcatctgtgacatcaacatctctacgtcatcttttgacccta

SEQ ID NO: 161 - DNA, 492 bp, Glycine max
aacaaactccaacaccccaacgacgtcattcatggaaggacgctgggtcccatcctcatgcaaacagcttagcgcaacctcgccaaatctgttcaaacactgagttgctatctggccctttagttttgcatccacaatggcacccagagaacccttctgatatagatgcttcgcccaatcaaccagtgacacctgttgcttctccaccatgcggagcaaaggctgtctcccagacaatacctccaagagcaccaccccaaaggagtacacgtcagacttctcagtcaaacgctgtcgtttgtaatactccgggtctaaatatccaacgctacctttcacctgagtgctcacatgggtcattgaagaaccaatgggcccaattcgggataacccgaagtctgaaaccttggccacccatttctcatccaataagatgttggtgctcttcacgtcacggtgaatgatcatgtgcttcgcacccgtatgcagata

SEQ ID NO: 162 - DNA, 419 bp, Glycine max
atgtattatagctatcgctgacctcaacttggctccagccacattctttaaccaatcctttaccatctatcagatttcttaacatgtgcctccttccacctgcccaaagaggtagacaagttagccgtcattaatacataacttccagagcttccaggactactgtctaataacctaacagttgcaagctcccccagctcaacattgccataaatcctataagcactaagcaatggaccccaagcttgagcttggactttcagtagcattctctgaattgcatctaaagctaagtcaagctgcctgactcgaccaagaagatccatcaagagaggtacaatgttctaccataggagctattcgaaaatccttttgcatagtttgaagtacttcagtccatcttctaccaatctggaatg

SEQ ID NO: 163 - DNA, 441 bp, Glycine max
taaacatgtgacaatatgaaattaattaaattttatgcaatgaaaaagaaattttaaaatattttgtactttgaagcaaattaaatacactaaacgtgtttattttttaagaaatttgacacaaattaaccaaataagcaaatattagacatggaagatatttaataaaaaataaaaaaaatcaagtagtcatgaactcaacatccaaaacaacttatacatgaacatgcatgctgccttgaaggcataacatatcaaaaacatggctgtcatatatataaggttaataagtttatataaacaacagaataggaagtttcacttgaatgagaaccattgggcatattagatggtagtgtttcctgcttaataggtgattgaatatcatttctaaaagtatgagtttgccatatgaactaaaagggtctctgatacctgtac

SEQ ID NO: 164 - DNA, 423 bp, Glycine max
aatatgcaaggcagcatcagaatggggattttttcaagtggtgaatcatggtataagccatgacttgctaagaaaaatgagagaggaacaagtgaagttgtttgaagtaccgtttgagaagaaagttacttgcgggcttctaaataacccatataggtgggggacaccaacagctactcgttcaaaacacttctcatggtctgaagctttccacattcctctcaccatgatctcagaagctgcttcctggggtgaattcacttctttgaggtatatatctcgctcttacattccattccagttaaatttgacagtgtttacttacttattggaaatctttcttttttatttttatgcacaatgcaccgttgataacaatcctaaagcatgaatattgcagaacaatgacaaagactaataatg

SEQ ID NO: 165 - DNA, 403 bp, Glycine max
aacacaggttttgaagagaacaggagtataaatggatccaatgacccaaagttaataactgtgcgttgaagcgctgtcatatcacacagctggaggccagtacagggaagttgttgcatagcacccatcatgcatgctttcacaacatcccaaataacaccattttgaagcttgtcacaaacacaattggcaaagtagcttaaaaaacctttgccctggcttggggctaatcgcaaaaaccatccaaacaagcagaatcacaaactaccctcacagatctcttccattcgacccaagcatcagacaaagagctctcagatgtgtttttatttttcaaccaaaccacaggtggagattccagccaactgacagcaccccatcttgtgcatgttctgctcacatt

SEQ ID NO: 166 - DNA, 459 bp, Glycine max
aatatataaaagagagtttaatttgttgtgaaactgatatggtgtctagatacaatctcttggtcagcacatcacccctttatgcttttgttagtaaagtgtggtgatcaataaactggctccgccaaagagaggcaatgtaacttgaagaaacaagttttgtttataaatttttttataaataaacatgaataaattagttagggacacaatgttaggtgccgtactataaccacatcctgggctgatacatgttttcaattgcatctcttgattgaaaaataacttaggcatattattagcagtcacccaccaaagccataacaggatttccagaatttgcaaaaggaagccgattgtcagaatctctggtttgatggacagttcctgtaacagcattgataccaattaccaaatcaaaagcatataacagcaagttgatttaaatgcataagatat

SEQ ID NO: 167 - DNA, 402 bp, Glycine max
tgtagcttctccttggtggaaagatctcaaggttgtcttcaagcagcagccaagcaacacaatctgcaatcacttgaagtggaagctgggattgggtgataaaattagtttttggaagggtaaatggctgcaccataatctgactctccaacagaaatatcctactttgtatcaaatcagtggccaacagtcctctacaatcaacctaatggggaaattggtagcaaaaaggtgggaatggaagttcaaatgaaggaagaatcttttttaccatgaaatccaaacggtagcagctttcttggctgagcttgacaatgttcacattactcagtccagcagggattctctaatttggcaacctgaccctaatggtaactactctacaaagtcagcttatatact

SEQ ID NO: 168 - DNA, 436 bp, Glycine max
aaaaacataagtgcaaatcaaaacagccagcaatctaaacaagagaaatgtttgttaaaatattacttcaccatccatccaccaatattgtcttgttgttaaatctcaaaagttgacttgtaaatttcaaaaatgtggagtggaagatgcaagcctccacacaaaaaccaattatgaaatgcatgccgcaaccgaatcataagaaatatagaactccggtgatgtttaaagtgcagtacagactacagagtaactagctccaataaccattacgttagagagtcaccaaagattcacagtacttattacctattgaacttaaaggttcacaacagcatcaaacgatgaaaagttgatgagaagagttatcgaatcgagtggatccacttcaacctcagtctatagcatcaaatcagtagcaccagcaaacaatcca

SEQ ID NO: 169 - DNA, 873 bp, Glycine max
aaaaacataagtgcaaatcaaaacaaccaacaatgtaaacaagagaaatgtttgttaaaatattacttcgccatccatccaccaatattgtcttattgttaaatctcaaaagttgacttgtacattacaaaaatgtggagtggaagatgcaagcctccacacaaaaatcaattatgaaatgcatgccgcaatagaatcataagaaattaagaactccggtgatgtttaaagtgcattacagactacagagtaaccatctccaacaaccattacgttagggagtcacaaaagcttctcagtacttattacctattgaacttaaaggttcacaacagcatcaaacgatgaaaagttgatgagaagagttatcgaatcgagtggatccacttcaacctcagtctatagcatcaaatcagtagcaccagcaaacaatccactgcagagactaacaaacttctaactactacagaactgatgcaactgtcagtgtcagctaagggtgatgacatcatacatgtactgatcaaacatagctatacatatacattaacacttacacactgcatcaaacttgaagaaagaaggatgggtgtctttaccgtaaccagttccaccggatatggttgtattctgcgtgattgtgattttctgtctggaatattctttgggcaactttttgcatttactcgcaaggtatggaaagttgtgtgccaatacctctcttctctttttacatcttcatggactgagaaccaccatctttcagccatctcttgagcaccttcgagagcaaataaccagtctttcaactctatagttacatccacaatatctgggttcttcaagtttggaaaactggtatctctcccttct

SEQ ID NO: 170 - DNA, 518 bp, Glycine max
ggcatgagcacatttaagtaatgtagggcccccatggactttgcccaaatattctgccatagtgccatcaaaccgtctaggggaaataatactcatgaggtttgggcaaaccctatgtagacattatatttattggcataaaggattttcacttgctcccaaacagcttcacacgtctcgtgaacacaaaagatctgcattgaagaggtgtgaatgggtggacttgatgatgctacaacatagagcatcaatcttatttcacttggaataatcaacctcagcaacaatatcagtctcagtggtgaagtgatcaaagtaatcctatccctttagccatctaacttgtcagtagacaatagagcaatgacatggtaaaaatagctagcatagcctcaaaagccactagaggtagatccaaccatgggtgagagtgggtagcaaaattacacccaaaacaagggctaaagaacacaaatcaagggtaaccaaccaaaccaagggccaaaccaaacaagtga

SEQ ID NO: 171 - DNA, 422 bp, Glycine max
aggtattcaaggattgcacaatattcatgggagctttaatgttcccaacatgcccggtacactcacatcaagaaactcaactataaataatgtaccatcggggggtgttcaacaacccactggaagcctttctagtggaagatttacatccaacaatctcccagttgcattgtctcaggtatgagagtaataactgaaatttttagcttattctcacctctttattctgtcattgtattttttatgttatgttatttactgttttttcgcctgtctcaattatatttgcagctatctcatggaagctcccttggacattcaggagtcaccaatagaggaggtataagtgttgtaggaaaccctggatttagtagtagcacaaatggagttggtggttctattcctgggattcttcctacatc

SEQ ID NO: 172 - DNA, 413 bp, Glycine max
tttgtctggcttgtgcatgaacattcctggaaacatgatgatgccttcttctctgatctgatttcgcttaaaccctaactctcaatcttcactcttctcttcaatttagggtgatgacagggaaaaggttttgaggtccaataaaagcatcacacgtggcggtcaacgtaagtaattaacagtcaacgaccaatttcggggttggagactaaaataacaggattgcaaaaaaatgggggactcaattggtgaattaaattacaagagaaccaaattcgtaagctgagataaatagggggataaatttgcaattaagcctttaatatatgatagatatgttatattatattgttttcttttgtttccttgaaatgtttttgagtttttattagaaagtcacaaagtattgtaca

SEQ ID NO: 173 - DNA, 422 bp, Glycine max
tgttgcaataagcttacacatggacattgataaggtaactcaaatgtcaagcatttggaaattggaagtatgttatgagtcctacattgattgaatggaataaaaaacttaatttggtacttaagttattagtcttttgggttgaactctctttttgtgcttaagtcagaataattggtgcttttgttgagagagttgggacgaaaaggcctacttatatacaggctaaattaaggtgcaatgtactgaattctgataaatgaccacctaatggactagtcattttggatttatctcttctttgtgtttaggtcataacaaagtgccataaccaatgtaattggctgattgtgaattttttatttgtgcatatgtaggtaagctttacgggttcgacagaagtggggcgtgaagtaatgcgt

SEQ ID NO: 174 - DNA, 443 bp, Glycine max
caataagctcacacatggacattgataaggtaacttaaatgtcacgcatttggaagtatgtttgagtcctacattgattgagtggaataaaaagcttaatgtggtacttaagttatgaaattctctcatgtaatagattagtcttttgggttcaactcttcttttgtgcttaagtcaaaataattggtgcttttgttgagagtagggaggaaaaggcctacttatttacaggctaaattaaggtgcaatgtactgaatactgataagtgaccacctaatagactagtcatttggatttgactcttctttgtgttttagtcataacagatgaccaaaatttaaatatagtaagaccaatgtaattggctgattgtgaatttgtgatttgtgcatatgtaggtaagctttacgggttcaacagaagtggggcgtgaagtaatgcg

SEQ ID NO: 175 - DNA, 524 bp, Glycine max
cttgcatgcctgcagaaaaatgtggatacacttatagtgattccaaatgaccgcctgcttgacatggctgatgagcagacacctcttcaagatgctttccgtctagcagatgacgttctacgacaaggagtacagggaatatcagacatcataacagtgagttgattaacaatattttcagactttctatctggtggtcactataacatgaaaaacattagttgatccctctagattggtagattgtgaagaaaaaaaagaggggacattaaaggcttgaatcattctccatctcctttctcccaactcccaagttatttgagtgttgctcctccaccataattggacaattaatgaaaagtacattttgatgtcagcttttgaggatattatttgctgttgcatctttttacagatacccgggcttgtaaatgtggattttgctgatgtaaaagctgtgatgaaagactctggaactgctatgcttggtgtgggtgtttcctccagtaaaaaccgtgcagaag

SEQ ID NO: 176 - DNA, 451 bp, Glycine max
agatcttacaccattgaatgttgatggaaacccagtagccatctcgccccctgaaataggatctacctgagcaagagacctagtagaatcaccaatttcagatccagaattaccagacttaccagattcctggctcagactcacctttccattattattataagcaacatctttgatagccatagtttcaatgtcatcctgttcctctgtggccatccgcaaagaatcttcctcatcaaattcaaggtcatcaaattctttatttttctgagtatcagataccattgatgctttcatccggatagcgttgccgacagaacctgaacctatgttattcccttttttaaggaaagacctaggtgattgatcataagggcctagatgactctcgcccatatcaaatttcaatggagacaaaacaatcccatctgagttcaaaggggacaaatcc

SEQ ID NO: 177 - DNA, 403 bp, Glycine max
aatcagcacaatcacccttttgtttctaatttttccccacaatttaagagatttattggtggtaaacccttcaatactatgcagggacagttggtgaaatccgtctacctcttcttccttatcctcccactgatttttcttagggcctccttcctccgcttcttccataatcatcaatctgaactgtttattcttacacacgagcaggattatacttctctttacaagtaaaacattctcatttcctcatcttctcatttactttcgcatgtgacaaattatggaaggttcttctacctcaccatccactggatcctgttttagcaacattagtaggatcaactacctaactatttactggttgccaatcccttacaaatttctgacccgaataactgggttt

SEQ ID NO: 178 - DNA, 473 bp, Glycine max
gacagcgagttgtattattagagtcttttctggaattttcaaggagttagaagggttgccaccacataggaatttagtgcactcaattaccttacaaccaaaggctggatcagttagtgttcttccatatcagtaccctcatcaccacaagattgatatagagcagtaagtgtagtctatgctaaagggttatgatgtggtgttggtagtagttgatcaactttctatatatggtcacttcattcaatcattcccttaaaacatccatatactgcacaaagtgtggctgccatatttgttaatctaaaagaagtgattcagtactttagtttcatagggttccataatccattgatgaccacaatacattatttgtcagtaattcttggaagaaattatttctatagggaagagttttaaagaaaagcaagacacttggcatggacaaacaaaatggtcaaactgaagttgta

SEQ ID NO: 179 - DNA, 470 bp, Glycine max
agactttgaggcatttcttttgttacaggagatttggtttcacaagaatgcttcaccttatgttctatatctgaaactgaaatgcatggcataggtctatgtagatagatgggagattggttgatgacatagtcactgcattcatgtgcttgcagttataacactctagtcctaactactgtgccacctttttaagtttcatcatgttcctaatgacatgctactagctaggtcgttatttggaactctagtcagtgtagagtggatctgatgggattcatgtgaaaggtaaaggtaggacgatctcttccattggcttttataagtaaattggtgttttagttggcaaggaatagtaggttaactaaattaggatagcaactatttattcgagtgcttttcaggttaagggaattgtggattattttggttggctccatctattttgtaattttatttcatatggggtt

SEQ ID NO: 180 - DNA, 535 bp, Glycine max
aagtgtattaattccttcaacaaaaagcagcgtctgcaccaccctcactttatcatcctgaatcatcgtatcaatatttgaaatatcaatatcaattttctacataataggacaatgcaaagtaaaactaaagaccatgaggaaatttcactttcagaatcaacaatttttcttctctgtgggacccacacggctcatttcagcatatgatatgtcaaaacaaaaaacaatgtaaaggcaaaacaaaaagttcctccaatccacctcagtagagagatttggcaatatcaaagaatttcatttcatgttacataataatataaaaaaactaacaaagaagaagcaaggcaaaaggagttgaaggaagaagtattggattcgaatccccaactaacatttttaatccaaactaacatttaccaataaaagaaataataatataaaaaaatgaagcaaagcaaaaggagttgaagttggagggaatgacttacatcacttccacccatcaaaggcacaagaaatgaaggaatcatga

SEQ ID NO: 181 - DNA, 969 bp, Glycine max
tgttgaattgtccttgagcttgatgatgatgaccttagtcctgctccaaaaccttgcataaatgatttcttcccaaccattgtcttgaaggcagtatcaatgttttcttgttccgttgtttccaccacttcctgagaatcttctatttgacatctcttctcattagtttgttcagcaactttgtcctacaatgaattggtacaacaattggtcatttagagaagacggggaacatcaaatcaaatcatatataagaaaatatagcagtaatgtaaaatgcagttacattgatttccttagatgctttgtcaatccattccccatttccccttttgtgtgtcaactggcaaaatgtctgcaaatcaggctcctttccggtcactgggtcacgctgttaaaattatgtttattaaacattatacaaaaaatgtcataaaattagatgagacaatcataagagcaaacattgagttcaacagaaatctcactgcatcattgctgacagctagaaaggattttgagcctgcagaagtgtattaattccttcaacaaaaagcagcgtctgcaccaccctcactttatcatcctgaatcattgtatcaatatttgaaatatcaatatcaaatctctatataataggacaatgcaaagtaaaactaaaaaagaccatgaggtaatttcactttcagaatcaacatttttccttctctgtgggacccacacggctcatttcagcatatggtgcgtcaaaacaaaatatataaaacaaaaaacaaaaaaacaatgtaaaggcaaaacaaaaagtttctccattcctcctcagtagagagatttggcaatatcaaacaatttcatcatacataataatataaaacaaaatgaagaagcaaaacaaaaggaattgaagttgaagggaatgacttacatcacttccacccatcaaaggcacaagaaatgaaggaatcatga

SEQ ID NO: 182 - DNA, 498 bp, Glycine max
gagaacagcgtagctcttttgtctatatttctggaatttattttatatactgttgtctgtcagagttaaatgtatgatgtcttggagttcactacatcatgccattattatgcgagagttttacaacaaaaacaggataaaaattagtcatttgaaattatcataaattgttgggaggaagatgattctaaagaactgctgcgtggtagttctgtcaacagatttacttgtgtttagaacttcatctgcaatacagattgattgccaccctctctattcatgtctatcagtggcagcaagaagtagcttctgcatttaatgtgttttgttcagcatcaaacaaaaactcgcgtctctactctaaatactcgccaagagcatcaaccaaaaaagacgcaggagcaaatataccaagcttccacgtcaagtgctgttccacacacattgataacgttcatgtctatttcgtgaagtgccatggttttttatgttaattct

SEQ ID NO: 183 - DNA, 446 bp, Glycine max
tgatgctgatgttctttctgccatggatgatgccatccatgatggggttgacatactatctctttcccttggccctgaccctccgcagccaatttacttcgagaatgcaatcagtgtaggagcattccatgcattccaaaagggtgttcttgtttctgcttctgctgggaactcagtttttccacgtactgcatgcaatgttgctccttggatcctcactgttgctgctagcacaatagacagggaattcagttcaaatatctaccttggtaactcgaaggttttaaaggtgaggccaataacacaaatttggtcaccaatatacatcctaatgcatattagtatcagttagtaaatcaagaaagatttatgtgccttcagggttcttctttaaatccaataagaatggagcattcgaatggtttaatatatggaagtgccgctgc

SEQ ID NO: 184 - DNA, 448 bp, Glycine max
tgatgctgatattctttctgccatggatgatgccatccatgatggggttgacatattatccctttcccttggccctgatcttccccatccaatttactttgatgaggcaatcagtataggagcattccattcatttcaaaagggagttcttgtttctgctggagctggaaactcatttttccaggtactgcatgcaatgttgctccttggatcctcactgttgatgctagcacaatagacagggaattcagttcaaatatctaccttggtaactcctgtcttaaaagtgaagtcaataacacaaaccatttctaaattttaacaccaatatacatctattgcatatcagtaccagctagtaaaccaagaaaggtttatgtgctttcaggattcttctttgaatccaataagaatggagcaatcatatggtttgatatatggaaattcc

SEQ ID NO: 185 - DNA, 513 bp, Glycine max
aagaaaaaatgccactaactatgctctgttgtccttagtgaagaactaagaaataatacttcacgtgaccagtgaatcttatttttgtaatccttctttgttaggaaaatagacttgtattatatttcaacaaaaaataaataaaaaagaaattagcatgtagttttacctaatagaataatattatcttcatttataatttattcataaaatatgacttgagtctgttcaaatatccacgtacagaggctttcgtctagcttaagttaattaacctaaggcatctagaatatacatgtttggggatgggactttgaagggaaaaagaaagagcgggaaaaaaaattaaaattaagagtaattatataatatttataaaaataaacagaagattatgaaattaattttatattaatttatcattttgtttttatttcaaaattattaaataaaaatatttattagaaacaaaaaaattttcttcctctttcctactctctccaaaactttact

SEQ ID NO: 186 - DNA, 449 bp, Glycine max
gttacaatacaacatactttagttttgttatctggaatcagtctcaaaagattcaaagaaacaatgaaacaccgcataagtgttatatgaaagcatgtgttcaaattaaaatttacctaggatttattgaattagatttgatattgacttgattttgttggcaggtagctgaacgagcactgtttctgtggaacaatgatcatattcgaaatttgatcttacaaaacagcaaagtgatactgcctataatcttccctgctatggagaaaaatatacggggccattggaatcaagctgttcaaagcttgaccatgaatgttagaaaaatattctctgatgctgaccaggcactttttgatgaatgcttgaagagattccaagaagaagaaatcaatgatagggagaagcaagagaagcgagaatccatatggaaacaactggaagatgtt

SEQ ID NO: 187 - DNA, 423 bp, Glycine max
actgtccattagcattagatcaaaaatcagaaaattcagtatttgaagaagctatttccaattgatgataagacataacattcctaatagaaattgtaactaccaagttgaaatgaagaacctgagtttctatcctacaaaaacagaacagtataacaatcaaacaattttcaagaaaagtaacgctacgatagaggaaaatccacatcaattatcaaaccaccagacatcatgaacaaaagtttagctaggttttattgatatgaggatcttctaaaaggccacaaactaatactcatctaacccttgcatccacatgtgtatttatgaacaaaaataacacattgatcagggaaacattaaccaagtatagtagtagtagcaactaatttcactcagaaatgctaatactcatttaacaat

SEQ ID NO: 188 - DNA, 496 bp, Glycine max
gtgaaagagcatgtccctcaggaccagttattccaagttctatcattttttcctgaccttcgtacacagcatctccattttctgcatggaccatagctaaggcaccaagagacttgcactttttaaatccttccagaagaagctcatcattgatcataagagctcctttgtatgccatgaaaaacttaaaagagttgatgcctgcaattacaaaacatagatgcaatagctgaaataaattccacataaactcaaaaccaaagggttattgccacataatcagccaaattatcaaggaaataaatcatgacctttctccttgaccatgagctccatttctcttgacacagtttcatcccatttggtaatagccatatggaaaccataatccatgcaagacttctttgccttcttttcataggcttcaaaaccagccgttaaacttcctttatgtggtataacaaagtcaatgtgcattgttgtcccaccagctaat

SEQ ID NO: 189 - DNA, 495 bp, Glycine max
atgaaagagcttgcccctcaggaccagttattccaagttctataattttttttctgaccttcgtccacagcatctccattttctgcatggaccatagctaaggcaccaagagacttgcactttttaaatccttccagaagaaactcatcattgatcataagagctcctttatatgccatgaaaaacttaaaagagttggtacctgcaattacaaaaacatagatgcactagatgaaataaattccccataaactcaaccaaagggttatttccacataattagctaaattatcaaggaaataaattatgacctttctccttgaccatgagctccatttctctcgacatggtttcatcccatttggtaatagcaatatggaaaccataatccatgcaagacttccttgccttcttttcataggcttcaataccagccgttaaacttcctttacgtggtataacaaagtcaatgtgcattgttgtcccaccagctaa

SEQ ID NO: 190 - DNA, 532 bp, Glycine max
caacgaagaacaattatctgctgaactctccactgtgagtgttatgacaatctttggcatgcatgatccctcatcccaaaaaaaaaatctatatgtgctttttagactagctgcttcatgatttgttctgccattaactatttggctttgcaaacattaagattaacatgaacagtaaaggcaatgctggtctccttgcccatctccacctgtccttgaaacctagacattggcacacctgtcacgatcacagaataagtagcatttgaggtattcatcaatcccacctcccttcttaagattcagaaaatggtgaaagggttttgagaatgaaaaaaaatagagattgtattattgaactgatgggatacaacagatatttatatgaagagctacagagggttcagttgtaatggaacactaatagtcctatacagtacaattgtgctctgaataataccctgtgaaaaatactgtaacatgcccccccccccagctggaggtggctgagcaagggtctgaagaactgaca

SEQ ID NO: 191 - DNA, 498 bp, Glycine max
tttactcttattcagtttggttttgtagctagtaaacgtgatccttctttgttcatctacgcagcctcagtttatcttttggtctatgtggatgacattattatctccggcagctccattcaattgattcaacagctcacctctcaacttaattcaaatttttctctcaaacaacttggtcaacttgattattttgttgggattgaagtcaagactttatctgatagttctctattacttacacagagcaaatatattagagatctcttacagaaaactaatttgacacaggcacaagttatttcttcccctacgacttcaagctgcaagctcactacaacaggctcagatttgtttactgatcctaccatgtatcgttcagtggtaggtgccttgcagtacttgactataactagaccagtgataagctttgctgtaaacaaagtctgccaattcatgccaaatcctttggatactcattgggctgcaggcatgcaa

SEQ ID NO: 192 - DNA, 988 bp, Glycine max
ttgcaaaagctcgacttccatctggacataacccccttcagcagctagttttaataattgcagatggtcggtttgttgaaaaggtacttgataaaaaattgcttttttttttcctatttatccttttagtcatcggtactggcctttgttcactcatcttcaattttaatttttccagaagaaattaaagcagtgtgttagagatgtgtcaactggtaatcgaatggttgctttcttgcttctggataattctcaggagtcaattatggatctcaaggtatttaaacaactagatcagcaccgtgcaattgcacggtagaaaagtaaaaagtaactaaactgtgtccactttatttttattattatttgtcattaaaaaagcaactgtagagagaaagtgctgactgcaatacattgacacctattagcgaaaatggaggctggatggttttttaaatttatgctcaaatgtttttttttatataaaaaatgtgagtattatatgcaacttctcacttaacatgacgttctggactgcagggattaattgaacattaaaaatctaattagatttaaaaataaggataaactagtcataatagagtgtacggaacaaaaacatactaactatactgaaactacaagaagtgaagaactattgctttgcatattagtaaacatacttgcagatcttcaacactagcagtatgtccaataaatggagcattatcaacattccacgttccagcagatgtaggctcccacagataaatacaattattgcaatccccttcaaaaatgaagatcattgtcaagcttcatatatctgtgatcactaaatatggagacatgccagaggaaaacatagctaaactgaaaaacatataactaaagattaccagatgcaagctttccaggaacaagaggactccagtctatagcataaccttcatctttgtgtttaaatttatacaatgggtcctgatta

SEQ ID NO: 193 - DNA, 460 bp, Glycine max
agaatattgatgtttttcctaagttgaagaaaatggagatcatctgcatggagaaacttaataccatttggcaaccccatattggtcttcattcctttcacagtttggactctttgataataagagagtgccacaaacttgttacgatttttcctagttatatggggcaaagatttcagagccttcaaagcttgataattacagattgcaagttagtggaaaacatatttgactctgaaaatattccacaaactggtgttaggaatgaaacaaacttgcaaaatgtatttctagaggcgttgccaaatttggtgcatatatggaagaatgacagctgtgaaatacttaaatataataatttgcaaagcataagcattaatgggtgtccgaatttaaagcatctctttctactttctgttgccactgacttagaaaaattggaaatccttgatgtgtacaa

SEQ ID NO: 194 - DNA, 506 bp, Glycine max
ataagctacaactatcaagctctctaagttattctcacaaataatgtaaaactaattccacaccaaattacacggcagtttctctttttagtcttctatctatctatcaaagaaaggtgctgtagcaaatgagaaattctatcaacacgaagccatacttttctacttttacagaaatactccaaccattatgccatgcttttggaagataggatactaaatgttcttgtgtacctctgccgttgtttctgcccaatgtatagttgacctggccaaagcatccattgggtctatgcatttccttagaagaggatcattgtgagggagaacccccagcaaatcatcagatgccagaagcaccacattcactgccctaaccaaaagaacatggattgcaattctcaataaattccttgccccttccacgtcctttctgtacaacgcctccattgcaggaaccaatacatgttcttcggttgctttgtctagaaacactacttcaaatc

SEQ ID NO: 195 - DNA, 351 bp, Glycine max
atatcaatcagatacatcctaactctgttgtgcatgtaagtgatgatgtcatatatgaactggttccagcactttttttttgatagtcatgtttttttttagtttcttgcttgtcagtgacatgctgtaaagtttttcttcttttgctatataaattgtgtatggagcagggctatatatgtaacttaattgagtctggctgctttgttcgtttccttggtcatttaaccggctttgctcctagaaataaggtatctcaatttaacaaatccccttccctttgtttctctattacacacctcactttatcctaggcatatgatagcctgataaccttgttctattgtatag

SEQ ID NO: 196 - DNA, 435 bp, Glycine max
aggcatcggaagatgagaagactgatgccccaaaagcaattgagagtacaccccagtcgacaccccagtctacttctggaattgaggatttatttaaagactcacctttagttacaccaagtttaactccagaaaaaccacaaaaagatctaaaaaatgatatcatgagcctctttgagaaggtatgtgccagtgcttcaataggtttgtttaaggctgagttacttctttgagtttatatatatatatatggttagaaatgctttttaaaatatacacattctatattgttgacatttcctccttgcccgatgtgagttattatccaagacaccaaaacaagtgaatttagttgtcgatcgatctctatccttagatgggtttttatgttttggtatgtgaataagattttacctgacccagtaaattggacat

SEQ ID NO: 197 - DNA, 410 bp, Glycine max
gggagaacaatttctcctccgtgctcccgcagaacctggggcaaaacgggaagttcaagttcttcgacgtcactaagaatcacttcagcgggttgatccctcgggatttgtgcaagagtgggaggttacaaacgttcttgatcacagataacttcttccatggcccaatccctaacgagattgctaactgcaagtctctaaccaagatccgagcctccaataactaccttaacggcgcagttccgtcggggattttcaagctaccttccgtcacgataatcgagttggccaataaccgttttaacggagaactgcctcccgaaatttccggcgattcactcgggattctcactctttccaacaacttattcactgggaaaattcccccagcgttgaagaacttaagggca

SEQ ID NO: 198 - DNA, 465 bp, Glycine max
atcagcaggatctatggacaaaagagtctccatgagtgctaaagcaggtgcagcgaaatccttgaatgtgtcggcaacacaacgccaatagggttgtcggggcttaaatattgttgcatgtggcaactttgattttctccaataatcctcagaaggtgaaccacacagtttaaaaattttatgtaactgctccacctagaagacagaacagtaccttttaatcatcttaataatacaagtatactactagactactggtgcacaaagccatacaaaggaacatcaattggaaattgtacagacataatatttatcagttttaatatgcactactgatattcccttgtcaacacatcctaattaatgctaaccgaaataattgttcaaaagccaccacgcataatacacaagtattttctagaatttcttatgccccttatgaagagcaaaagtattaacagtata

SEQ ID NO: 199 - DNA, 433 bp, Glycine max
ttgtgattgcagtttttgtagtgatccttggtattgcaaaaaattgtggacaaatgcagctaatgcaacagcaattgcgatgcagtcatagaatcccaaaagattctgacattatggccacaattgcagttgcaaaccattttttaaaacctagttgtgaatctcatatatatctatccttttcattccctttttaatttgttcttaaacaaactattaagaatgaatagagatgaagcgttaagtgcacttcaaaacattagtaagttaaatcttacttttgggatctaattatcaatcctaatgcatagaattttattttcgaaggacataaatgctaatcacctcataacaatctccacatataaggcgagcaggaaatgtaaactttttacgtcgttgatgatgatcagcatcaccgttgtaacgtgtt

SEQ ID NO: 200 - DNA, 1294 bp, Glycine max
aattgccatctattggggtcaaaacggaaacgaaggctccttggcagacgcatgcaactctggcaactaccaatttgtgaacatagcattcttgtccacatttggcaatggccaaaccccccaactaaacctcgctggccactgtgaacccagcaccaacggctgcaccaaattcagcgacgaaatcaaggcgtgccagggcaaaggcatcaaagtgctactctccctcggaggagccagtgggagctactccctcggctcagccgaggaagcaacacagcttgcaacctttctttggaacaacttcctcggaggacagtcgagttcccgcccattgggcgatgctgtcctcgatggcatagactttgacattgaggccggtggcggcaaccattgggatgaacttgcaagggccctcaatgggttcagctcacagaagaaggtgtacttggctgcagaaacactcccaccatgcctatccaagataaggattctcaccaaagcggcataattttatggaagctgaaaaacaaatgggcttcctcctcttccttttctctacaaaatgggcataatctatcaatgatgtcaacattccttctacacaaattggatttagtggccaatctatcccgtaataatctccaagcaaaaaacacagctttacttgtaatttttaacttccatatgtcatgaaataccccatctatattcttatctcttgaatccctgtcaagcagtttgtatgcactacgtacagtgtataacccagtggggtcactcaaccacacccacttgtcttgttgatgagcatttatgttgagcccttggatttcctccaaaaaattggcaaccataggtatctcagcctcaaaaagtaatctccactgcagcacgccaccacactcccctttgtggcgcatcacactctcccctttgaatttttcagttcgttctcctcttcatcttcatcttcttcccctcttcctttttcatttctattgctttcctccacaatctgttaggagagggacactaaaaaacttccttttttagaaagatgaggatcttaaccctcatcttccatgctagagaccccaagtctctctctggtggaagacctcatttgtaaaatattttatagaaatgtataagggtttttttcttcttaaaatgagtaaataattaaaatctgaaaaatattagattttaggttagtctaaaattactttttcatgcttagacaaacgacaatcaatccaaattaaaatatttcgggttctgaatagaacct

SEQ ID NO: 201 - DNA, 863 bp, Glycine max
aacactgcaaataataaaggcattagttgatagacacaaatactttgactaacagctggcacaaaactatacattttcagagaaccatcattgattaggatttttatggggaaagggagggagttatacaccaaaaaaagaatgagtttgtaaaaccaaccctagcaagtttaatgctttcaggatcgcctcatgtgccttctggtcctatttgttacagaaaataaattcaaaggaaaaaaaaaaggtttagaatcattgcatgaattaaagccacctaaattgaaaagtatgcaattcaactttaacagaaaaaaaaatatcaaaccacaaaattaacaaaataaacatcataaatatggttccagcagttctagaaaatggtcacagaaaggagtttcaaaatagaattacttactttcaatagcaaaggaatgtgccaaatatttggaacgtcatggagagtaagtatgtttgacagctgcagaagcatcaaatccaagttctatcaggaatcaaattgcatcaagattcaaacttttatgtgtaaattaaaaccaaaacgtacaatccaagatgttaattttaatgttaaaataaagataatcaagaaaatcagaaatgaccccagatgcccgttttctttaattagaccataagtgatccaagatatgttaaattttagcataagataatgatattaatgtttaattaagaaatgatgcgtaggtagagagtattgggagtttggttatacctgtacatgtaaatatctttgtctggactgagttgcttattgcatagattgcaagttttaaggaagcaaaagtcttgagggatggattgttggtttgcctttctca

SEQ ID NO: 202 - DNA, 852 bp, Glycine max
atcaaatgaaattcactcaaaaccaatccaaaccgccaaaccattaaataattttatttttttttaaaaaaagcctcctctggctcaagccgcttcaaggtttccaaatactagaaactacagagaactaacaaaagaaaaggaaaatagataaataaaaaaaaaatggcaatttcttcagaaactcgaaattaaaaacaatctaatcgaattcgcttccgaatttcagaaattacaacttccctaggtgtaattaagcaagcagagaaaggaataccatgatttcacgtatggcggtgggagagacaccatcgccatccttggattgcttgaatttttttatggcgatggattttccgcgattggtggaagacttgattcgagcgaggaagacgagaccgtaggtgccttctccaatcttccctattagatcatactgctgcagaatcaaatatgtcttcaaaatgattttcagtgaacgctaagcgaccttcatatgatagtttatcaacaccaccagcatatagatttgccaagtgtatcttcagccaacgtaggcccgactttccaagagagcgtccctctgcaaattccaatataccccggcataaatctgaaccaaggtgatttaagtgtgggtgcatgggatatgcacgccctcggaaatcaaggttgtgtgggtagtaaaaaccctcttcatccttcatttttcgcgctacctgtaccccacatcgggcgtgtcaccagacatagaatatggattacaaactaatgtacataatgttcaaggaagcttacagcaagtttaagttctatgtcacaacgttgtgaatatctctctctgttctcttt

SEQ ID NO: 203 - DNA, 462 bp, Glycine max
atgtacctccccttttttgttcaaaatcagagtcattggagagcctttatcttctctccggcaatccctctagagaatgtgacccactccagtactcccgctggcgagcaacacaacacacacttttgctgtttacccacaacatgatctggcacaaggcatagccgatttttgtttttgtgcaatggacttctattttctattgacaacttttaataatggagggcttaaagatgcatcatgactgaaatgaaaagttctcactatattagaatatcttaaaattccccctgctcttttagcctttttttatggaggcattgctgatatgcctcgtgaaatgaaactgcaatcaaaatgtgtgcatgcatgtctgtgtcccctccctgaagcaattacaccaaacaaaataattgtttttgatttttaaatattttagtgatcagtatttttatttgacat

SEQ ID NO: 204 - DNA, 1064 bp, Glycine max
agtgccaagcttgcatgcctgcagcactgtcctgtataaatatggaaagcctgttgctaaaagcagctcgcacaaaagtagcatcattggccaatcgcatggacaaattgtcagcactgttttcctcatcatcaaaccatcccacttcattgcgtagcatggctgccattattatagaagcaggttaagtaatgttcaaaattataaattttttgaaagaaaaacactgtgaaagaggagttatgaacctgagaacatcattctcctaactctttccgtcattttctctcccataataccaaagtagaaatgctgtaaaaagttggcaactaaagttacaatacccatgcagccaatgatcaagcaccacctgtctacctcccgttcaaggtgatgagtgtcatcaattctatagtaagctgtcaccacaagaccaataacataagcaagaaggggattgaaagacccaaagatagcagcacctatgcttcctaacacagcataaagccactcagcaaaactaagctcagccagcttctgcaggttctcgtccctagatctgaaatacgttttgttttcatccttgttacttatttgtccttgacaagaaggattgaggattgaaaacgcaatgaatctgtgcggttcggctttaggggttttgaggtttggggaatatgaaaagagaaaagggcctgggcaatttgtggcgatcaaatactacccataatttataagtttgaaagtatatagttatattatttttttacattttaaaaattataaaccctaacctaaactatctgtcaaatgagtgaatgatcagagcaaagacccctaatttaatcgcacgtcgtcgttcctgctagcagaggacagaggccaccgtcgtgtgttcttcaatctgaggtatcttctgcctgcgttcgttctatcattgtgcgtctcttctgttatactttcattggcatggactaccctgttatgattatgatatgtttcctgctttgtaactcttcatggtcttttctctcattaagtttttaaatactaaaacaacaata

SEQ ID NO: 205 - DNA, 476 bp, Glycine max
gaggtgttagtgctgacaaagctattgagtggcaagagaagtactgggaagcttctgatgattttggctataaggaacttggttcagagaaatctggacgtgatgcaaatggaaatatttggcgtgaattttggagagaatccttgtgtctggtcagcaaaatttgacacattttaaatgcctttcttattataatgatagtttgctgaaaatatgatcagtagcatatttctagtatcattatcactgtgtgcattcatatttattcttctgtggaattgggcacctgtttgtgaaattggtcactagtgtagcttgccaattattaatgcattaactgtagctgtagccttggcgctcatagatctgacctatagagtcttggacaacagattctttttatttcactaaaataaataccaagtatggtactatggttttcacttgcaggaaaatgggcttatgagttttgagaa

SEQ ID NO: 206 - DNA, 539 bp, Glycine max
atgacttggtcagaagctttagcataatcattcaacgcattcagaatatggtcacattctaccaaagctactctaaaataaatgaaacagtcgtcagcaaagagtaagtaagagatgataggtgcacccctatagattttaatgccataagtatgtccttgcccctccaacttcttaataagagcttaaatcccttcagaacaaaggatgaacaaaaaatgagagaggggatctcctagtctgagacctttcccctggataataggaccaaccaagctttcattgataataacagagtagacagattggatgcaaattaaaatccacttaacccaagtcgcactaaatctcattttggccatgacgttttttaaataattcccatcgacttggtcatacgctttgttgatatccatcttcagcgcaacttgtaacctcccccattttacccttgaccttacacttcatatgatggagaatctcattagcaatgagagcattgtccaagatagaatgcccatggatgaaagttgattgat

SEQ ID NO: 207 - DNA, 439 bp, Glycine max
tgcaaggagctcatttggaaagccattcttgaggagacacttttcacttggatcaaagtggagccgatccctgtccgagaatgattctgccaggaagaaaggcttttgggcaagatatcgttaagatttagttccatttgctgtaagagtcaatcattctctaattatagttgtaataacaccatcaatttagaatgaatattttctatgtagcctaactttactgataactttgaatgctttaaaataattaatttttacttttgaccagaaattccagtcaggttgatgtggttcatatgaactgtatgaatataaacgtcctttgacaaatggagctgagccaaagcagtgatgagcgcaagaaggcagaggaagcaaatgcacatttatgaagatagttatgcttcagttgtttttatggtagtagaggcagact

SEQ ID NO: 208 - DNA, 418 bp, Glycine max
taaataaccttagctctgttggcttttaacctttactccgtgctatatgttaacagtctactactccagctttatgcttctattaatgtaaattcaaataaggtgatatctacctttctgaaagtattaattgtaatccgattttcattgtagcctgcacgtgttagcaatgactttatggttgtcataacttaataagcttgatggctatatctgtaattaaaatatttcaaggctgttctttctatttaaaacttatgttttcaggtctgctaagtcttttcatatagcaataattcaattgaacttgttttgcaggttttacaggagagaggtgagagcacatcacggcatggaagggctacattttctgttcttctttttcaggttcctttgtaacttaccatctatctagaaa

SEQ ID NO: 209 - DNA, 494 bp, Glycine max
aggcattgaatgatgtacgtataattgctcctttatgtccttcattcttttaattgtcgtgttagttttgcctgatttgtaaagcaagggaactccaataattttgtttggaagggaaccacctttttttgttaatttgtgcttgtcccgtgttccaattacagattactagtagaatagcggttggtcttttgactgataatatttctccagttatggatgaggtttttttttttttaactttcgtccatctctttcaaaatgaaggtgcctaatttagttacagtcagggaattaaattgttaggttactattaatttaatttgcactattttttctattggaaagcagtggttggcaaagaacattgattgcatgatgttattggtacttattctgactgtgttattctgtgttcaattttcattttcagatgcctatcagaaagctatacatgttgattgagatggcagcgcaaggggagcaaggtggat

SEQ ID NO: 210 - DNA, 476 bp, Glycine max
actcttggtctatctggcttaggatccagagctggtttcgagagcatgcactatttgtaatgtattattaccttgtgtgttttagaactatcttgaattaaatttattgattttttttgtactaacctttctaggtttgagagtgtatgggatcctactttagttccgggagcaccaaagagaataagttacaacttcctaagttctgtaagaaaaatgtttgcttttccgtgattatgaatcctgaatttcaagtttacttctgaatatcaagggccaattttcattctatgcagtttgagaagtggttaaattttgataccaatccactctatgctcttctacatgaatccatctattgtcaggtagatttcttttttggttccttgtttattcatgttgtatggttcttcttcaactctggtccctcattctctctgtagggttctgctaataaatggtctgctaatagtgta

SEQ ID NO: 211 - DNA, 429 bp, Glycine max
aatcatcttcaatatttctgcaagaagagttttcataagcattctttgttcaaataaaaagctaacaattatagagctaaaagtaaatgacacttaaacaaaattcagacaacaacaaaaaaatcaaccaataaaaaatcaaggaaggagtattgcccataaaaacaccagatgaataaggaggtaaattctaattgccattatccaagccaacaataaaaagagacacggaaaagcataggttcctttcctcattagttattatgacttctataaacacacgcacacaacaacaacaacaacaacaataataataattattgcttaaaaggatgatacacagatctcctcgtcagtgtcctgcaagttgaagaaggaaataaaatcttacgcaatctaccttagtgttccactatgacgaagagaaga

SEQ ID NO: 212 - DNA, 502 bp, Glycine max
ttccctgttctcttgaaagataaaaattgtaaactctattcgtaggattcttgtaacatatttaatgtggaaatgaaaagtgcacaaatactgctgttccccttcttctggggattcttgtaatgctgttagttttccaaccactagctgttatagagccaatttgagaagctcgagcatgattcggaagttttcaaattctttgacatgttttacaaccttttgtgtctcctggattcagttttgaggtggattttttttattttatttatttcaagtttcttactgttgatgaattttccaagttcaagtttctaacccttctagttgtttgctgcgtgtctttgcacccttctattttggttaggttgttatccaaacaaaataattttacgaagtatttggataccctatagaagttcaatcccttatatatatatatatatatatggatttgcttaccctagaaaaaagaaaaaaaaatataagaaatatcagtcat

SEQ ID NO: 213 - DNA, 454 bp, Glycine max
aaatgtttccttcttcagttcatattaagtgatattttcttgtgggtttattcaatgcaagttcaagctgaggttctttgttggcacttctggatattacggaaacagaaactttgatgttggggactaggacacactaaggatcaaattactaatttgaattgaataaccatatccagtgattgtttggtccaaagcataaatcttgtcctaaacaggttgcaaccgtcaacaatatgccctttttaatttgttcatacgttttttgtttgtgattggctctcttgtatctgcattattcttgtctgttcatatgttttagagaagttcaggaacataattatgcttcaacgctttacacttgcttgttttatttggatacactaatatcccatatttgacacaggaggaaaatataaaaattgtgttatttatatagcacaggataagtttt

SEQ ID NO: 214 - DNA, 503 bp, Glycine max
ttcctagctttgctgccaacacttaggcctaatgtgagggtcattgctgaatgtggaaactggtaggaagcctacttttctgaacctttttgttattattgttagtattttgttataggtagtatagtttttttctttttttgctgcttgtttctagaaattgtcagtgctatctgctgtaaaacttgtgcttgaggacttgaaatatagcatgagtttgattgtgcaggatttaaactcattgtcttcatgcttatatacctcttaacttgtgtctaacgctataatatggaactttgttctctaatactgttgtttgatatcattctggtgtcaatgatcaggagaaagtttatgtggaagccacttaaagaaattgcgggactaacaaccagtgaggaagcttgatgctgctacattgctacttatcatctctgagttccaaccatcaacaatcaagtacaaatattaagtttattttctccaatttaaggcttcaaata

SEQ ID NO: 215 - DNA, 388 bp, Glycine max
aatcagaacatttcatacattgaggtctgtttatctacttattaatttgtttagttgtaatattacactcagatgactatttagcacctgatgccttgtacatcaaagcaataaaggataacataaaactgaatcctattaaaatacttatatgcccttttttaaacagggacaaacgaatttggaaaggcaaacgatattgtctctatttataaaggttatgaagaagttctacaaatatctagatggccttgcatccaaggagattgaatcaaccttgccaagactgaaagaagtaagtttcttaatgaaaatttacctttgtgtattccatggcatggtgctttcactagaattcatagaaaattttggttagtgaactcacttc

SEQ ID NO: 216 - DNA, 522 bp, Glycine max
aatttcatttagcattgtgcttttggatccactataggctactcggatccaatggttgtttcaatggaattgtgacttccctctcttctttgtaataaataaatctttttttgtcatcaaatatatgtaaaacttatccttgttaaatataaccacaacttcctaataatatactaccaattttttttaatcaataacaagaagaaaaaaatgtctaaccattagtcatttgctatgcaagtgaaaacatcctttggaacccatgttatccgaagtgacacgatgatttgagtctcatatgtgagaatcaatatttaacatttaattttagtagataaataaaccccaaaagataggaggtagaaaccatgctcagatgtgtataatgaaagctgtaccttttgggactttttctttttcccttcatcagcttcttcactctcttcactttcaacatatgataccttcctgactgtcctactagaagtgcgaatctcactgttgcgcgaagaaaaacctgtg

SEQ ID NO: 217 - DNA, 543 bp, Glycine max
attaattgcagatcccccggttcatcaacataaaagatcctcccattcaggtccactgacccaccgtgcggcatggactaataaagctgggaagaaccaggaagatgctccaaagatttcaatggggggtgacttatcaacagtatcgggcttagttgcagcaaggaggagtatgttgtctgacgatcgcagagaatggtctggatcatcacaagcagaggccccaaaactaataagcaggtttccaggatccttcaaggaggcttctgagtcaatgatgcaacaggatcagaagcatcatgcacatgctcctcaaaaggaagaggggagaggcagccgcaacaaagactcaaatcttgtaagtagttgcactttctcccttgcctaccttctctatacatatagtcaactacgtgtccgagtggatgttgggtggacataacccagcaggacattagtctatttctatcttgatattcacagcttggttagagttttgtcttttgcttgcttgcttgcttactctattatctttttcacaat

SEQ ID NO: 218 - DNA, 454 bp, Glycine max
tcattcttggaggtatctgcataaatagtataaacacatcatcagtttgacccatcgaacagctaacagaaaattcgactttaaatcaaaacaacaaaatgaaacattcagagcaacaatattttcttagcaaccttaaattatgattctgcgaactaacatgaaacttgatcattagtaccctcattcagttgtaaattgaattcccacgttcatctcaaaacccattgcacaaaatcaaattttgagaacagaaaggtgcaagacttactatgtagacgtaacactcgggcacttgaaagagaacgagctctatgggttcagcgtcttcgctttcgccgccacttttctgaatgtggggttcgttctcctcattctccatgattcggaagcacagaaagatcgcaaatttggtggcggagaattagatagaaggaagaaaagcgatctgggt

SEQ ID NO: 219 - DNA, 473 bp, Glycine max
agtgaatctgtgaatggtgcttgactgattggtttgtctattctaggaataataaggccggaaaatagataaaatgaaaatctgaaaaaatggattcaatgaaaatctgaagacacagtgaatctttcttctttcttttaattggtgggaattaaaaacagtgtcaggggatttactacaactcatgcaaacttgctcaatcaattgaattagatccccttgacagacacagtgaatagggctgtgcatttttaccaaataattaaaatgagtagtgtgctggcaaaagatggtaatcttcttatagtgcattggtgagagaagtgaagttggaatgcttggtacaggaaattaaaggaataatgtattgtattctgaacacaatgagatgaaactttgtactactgtactggttataccatatggggtgattgcattgttgttatctgaatctatctggttgaccctggctc

SEQ ID NO: 220 - DNA, 475 bp, Glycine max
aagattcagcaacatatatatttcccgcattgccaggcataatgttctgattatgttcttgtgcgtaagatccagtggtagaagctccatgtgaaaatgcaaattgcttctgacaagtgcaagccatactcatgagggagcaaactttgcatgtatcagcagcaatttcttgtaccctctgactaagaagcatctacaaaaggaatgaagtttaaaacaccaaagcaataatgtcaacaacatttcacaaccaatcatttctataccaagttcaatgacctacatatttaaatattttcagggatagaagttttttgagccagacattgggtttgttttagaagcaaaatgaaaattataacttattaaacttagttgctttagaggcattatgaaaaatataactccaaattatataagcattttttaaaatggcaaatgcaatactaaatttaaacaacaaattaatctcagc

SEQ ID NO: 221 - DNA, 526 bp, Glycine max
aagattcagcaacatatatatttcccacattgccaggcataatgttctgattgtgttcttgcacgtaagatccggaggtagaagctccatgtgaaaatgcaaattgcttctgacaagtgcaggccatgttcatgagggagcaaactttgcatgtatcagcagcaatttcttgtaccctctgactaagaagcatctacaaaaggaatgaagattaaaacaccaaaacaataatgtcaacaacatttcataaccaataatttctataccaagttcaatgacttatatattgaatgattgatttgcaaagattgagattgtaataattaatatatttaaatatttcagggatagaagttttttttttttgagccagatattgggtttgttttagaggcaaaacaaaaattataacttgttaaacttggttacttcagaggcataatgaaaaatataactttgaaattatataagcattttttgatatggcaaatgcaatactaaatttaaacaacaaattaatctaagt

SEQ ID NO: 222 - DNA, 472 bp, Glycine max
atgaacagacaagttctttttaacactattcacttcgcaaagtgaaaacaatagtgtgacaatcatgcataagcttgacacaccaaatacaaatattacaaacaaatttacattccccaaggagaaaatgtatgaccctaataatatgatcgatcttcgtaggtcacaggacaataagttgagtggtcatgaatgactgaaactcacctctattgtcttagtcatatgaagatcccacaaatgtcgcatttccaaatcagaagtgttggagattatgccttcaggtaatgcatgatttccaccaggcctgcactgattctactaagcaaaatataagcatcaaagttgaacattccaaacagtagataatcaatggctcaaatactttctaatttacgtgctgagtaagagaatgaaccttgcaattgtcatttcccaatttcttggtgttcattttccatcttaatagttt

SEQ ID NO: 223 - DNA, 439 bp, Glycine max
agtttgatgtaataatttaagtgttgttattatggtatgctagatactaattatattttccactctagaactaagcacgtttaattaagacttgcattttatgtaggataaccagagtggtagatactagagagcttctgacttctgagacattttattattattgcagttatgtcgttttttattgtccaatagtctggagttaaaacatcaagtgtatgtgtgatcattaattgagttcattataatcaatatatactctctccctctgtgtatctctctctcccaattcattaatttctcttgctgataccatcatattaaactcttaatttcaagtgtgaacggaatatatgagattttacatttgcctctcgacaaagcaaagaccccttgactgtgtgtaccatatttcacaccaacagaaatagatcaaatt

SEQ ID NO: 224 - DNA, 438 bp, Glycine max
atgctataaccggcaccaacagtcgcattttcacaggacaaaaggaagggatgacattacatcactcattataacatgagaagcaaactccacatcatcataaaatcatgaccacattctcatggatccagacctctactccaatgaaacatcagattttcagctgctccaagctctgcactgtctcaggttcaggtggaatgttctcagtcttggtctctgtctcgggagttttagttggcagtttgtcttccaagctaggggcactaatggttggtgattcgtctttagggacggcgacaggttcgtcttttgggatgggaacaggttcatcttttcggactggtggaggtggagcagcaaataccggaacagcttgccgaatagtgaccggaggagcaactcgtacatgaggagctcgtagtacttgatgggaca

SEQ ID NO: 225 - DNA, 445 bp, Glycine max
attcttgtggcattttgcggggtgtcctatttagaagttatcaaaactagggacgaccaagttccaacaaacggtgatttcttagctgctttacttcctttagtctgcattccagcagtgctgtcgctttgctgtggattgcttaagtggtaggtaacactttcttgtatttgtcaatttatctttatggtaaattgacagctattgctgtgtgatagatgtctgatctttttaaaatgtctatttgcaggaaggatgatgattggaaactttctcgtggtgtatatatttttgttataattggtcttttgcttctgcttggtgctatttcagctttgatagttgttgtcaagccttggactgtaagtgtgttgaattcattgtctctttaactccctcttccccaaggtcaaaattctttggctgaacctcttcctttatatta

SEQ ID NO: 226 - DNA, 455 bp, Glycine max
aaagatttcttaaagcagtgcttgatatccctttagcttttaagagaattgaagccatgctgtacagagctaattttgaaactgaagttaactaccttaggaagtcctttcagaccctggaggtatggctggcttatattcatcccttgatatcttcaatgtcttgcttttgattgcattttgttctgcctccttataaactaatcaatcggctgttgatatctgtcaggcagcaagtgaggaattaaagaacagtcggttattcctcaaacttcttgaagctgttctaaggacaggaaacagaatgaatgttggcacaaatcgcggtggcgctaaatctttcaaactggacacacttctaaaacttgtagacataaagggcacagatggcaagacaacactgctccactttgtggttcaagagatcattagatccgaaggaacaggcggagaat

SEQ ID NO: 227 - DNA, 469 bp, Glycine max
tgctggtgaaatggccatggtggtggaggaaaggagtaggaagagtgagaaggagaaaagagttgcttgcttcatgttccagttgccaagtcaagccctgtggatggctttgatgattctggatgaatgtgaatgattggaattaatggttcttgcaatttgtgtttgatgagtggcatgtgtgaaggagacgggttatatagaggccaaggaaatgataggctggtgaaatgttatggctgtgaaatttgttagttgtggagtgtgagggtatatcgcatctgtcatgcagaactaggatcttttatctaattattattggcgtatttgccaaaccgattctttgtgtcacatatatttgggtaaattttgagtttgattatggtgaattgcgaatggacacatgaaatacctgttttaaacatctttgtagtatgtagttcgacaaggggaatgaaaatgtagagag

SEQ ID NO: 228 - DNA, 516 bp, Glycine max
atcttgcatgcctgcagtttttcgaacaagccttggatgttgattggcgatttcaatgacaccatgctctcctcagagcaacgtgggagtgagtttgatcagaaccgtgctaccatatttgcgcagaatattgatgattgtcgactcttgtgtttggaccatgtaggtgcatgctcactttacctgtcacaggaaagttggtggtctaaacgcgattcataagaagctagacagggttatgtgtgataataattggaggatgaattttccagaagctgttattgaagttcttcaaagggctcactcaaaccaccattcgctattgttgagatgtaggggagatagactgttcaagttcattgatgcctggtgcacacatgaggactacaagcatgtggttagtaatgcatggaataggtatgttgttgatatcctgacctcgttagatagcatgaagaaggactccattatctttaataaggaagtatttggaagtattttccgtcgcaaaaagga

SEQ ID NO: 229 - DNA, 463 bp, Glycine max
aagagaggactcgcaggaacaaacgccgccctaatctaacaacctgccttcaaatctgtgttttcttatgaatttcctttcccagtttccctctcagtcatggatcgcaggaaaatcgatgcaaagtttaattaactaataatcaaaaacataaaaaccacaaaaatgacagcagaaccatctttaccctaaatccaggatcaattaatccacagaaatccacccaagagaaagagatgaagaaaccaaaatcggaccagaccagtcaaagacatctttggtgtgctaactgctaaatccataaatcttcatatgataaaatttgcaaaaaaaataaaattgagagatttgttttatcgtttttattaatttttttctaaataaagaaaagcaacaacaaacaggaacaagagaaaggaactgtgtgggatgatgccctagatcctagagtacagagtagcat

SEQ ID NO: 230 - DNA, 495 bp, Glycine max
atacaaacagcttttcctttgctcttttggaggcatcaccatggtatcagctgcaatatactacaggcagtgttctgcaaccattaattgcttcttttcaaaagaaaactataacttgccactttctgagtattttggagtagtactcagatttagatatccatgtgaaaaataataccttctgtaattcttcaccattcaaaagttgtttaaacttcaaaagatggcaaaatctcttctttcaaaacagagaaccaaaagtggcggggggagggggaatcaacataaaactaaagcaattagttggatgccagttactgtctataaatactattacaaaaagtctaggtatactactaatttttattattcaagggttcaatcgaaaacaacaacagccacacgaaccaatttaaccaaggaagttcatgatcaccaaatgaagcaccaaattacagagaacaaaatccgcaaaagcacgctcaggtgcaagat

SEQ ID NO: 231 - DNA, 372 bp, Glycine max
ttaaaataaaaaaacaaatcagcaatcaatggcaatataaatgtatgaaaaaaactgaggtatttatttgagaacccaagtaatgtagaaggacacgtatacaaatttgcaggagaaaacatataaattatcatactcaaacaataaaggcagtttacttccactgaattatatttttccctcttttcctcattgcttttgtatgaatatatggtttgattgataggttcatatatcatcatgggactcttgggcatgttaatcagcatcattcagatgaatattctacatggtacgatgcattttgcactgaaccaaccagaaacaattatttaaaaaagtacaatgttcctaccatgcataaatgaggga

SEQ ID NO: 232 - DNA, 506 bp, Glycine max
attagatgtttctttatattgaagaatcctaggaccagaacaaaagggatctaggttatggaaaaattctttcccctgaaattccctttttggaaggctttgaatctcctccttttttctttttcccccgtgcaggtgtgtgtgtgtggcatagaaatagaatatcttttaagagaactaacatagcttttgcatgattgtcggtttacatgttgcattgccaagtaagaaaaaagtagctaaaagaagtgctaatggcctaatataaataactcttaaattaaacacaaccaatgttcttacatcttttgaagcggtggaacacttggtatcaaattggtggcctgaagggcatgaaagtggcatctctataccagtggagatcgaattgttggtgctatgcagtgctttggagagttccatggctgaaagactccatgatctagcaaggaactccatagattcagttggagtatcaggagggggacaggatgatgcaggccaat

SEQ ID NO: 233 - DNA, 447 bp, Glycine max
atcaacactgttttcggatattagagagatgagaatgatgtgtgactttgggttaggtttgtggggtggacttggagcaggtttttgtgttggggagagttttagttcaactgctgcacaaaggtacacttgttgttcactacatattaagaatgaggttcattcatctattatgaaaggttaaaccaattcacccattttattcatgattcatctactgtaaaaacaataatcggcagttggaacactaaaaaaaaattgagtaaaagttgaaaaaattgatgactaggaatctggttttaccaagtatttgagatccaacatcgaataataatcaagactaaataacggtattcccttatttactgagacgtattttaaatgacaaaatcgtaaagatctataagtgtaaaaacaaataataccttaaatgcgttcaacataaca

SEQ ID NO: 234 - DNA, 399 bp, Glycine max
atgggtacaggactaatggagggtggtctgattgatgttcaacaattttcactcaaagctttgcttctgtaagaattccgtcaagaaataattcactctcataatatccggctgcaccaatggggaaggacatgcagcaatggttcttggcatgccaagaacagcaatcactttaaacaaaaaaatatatttgtgctggcaatcacatggagtttggatacattggtttgcagattccacatcaatacaattcacaatttcattgtccatagctggagatttaaatgtaaccacatgatgttaaaagctgtgcatgcacaatagttcactaatttgtttaaaatgtggtatatattgaatcaaataaacaattatttcagcatactagcattatagatt

SEQ ID NO: 235 - DNA, 499 bp, Glycine max
ctttttaccactgcacttgatttgctgtaggatagattttcttggcttcactatgataaaatggagggtttgcatgctggataacatttttaggagaggaaatcattcatgggcatccatcaaatagcttaagcttcataggaaaggagagtttaggaatatgatccttgtcaacccccattttacatattgaagtctattttttccacaaatggacctgcacataattcatgattcttgcccaaagatcttttgtgtgtgagggtgtgttagacatgtccaaaccattctttgtcctagcagttacaatggaaatttgaggagttctgatagtaatatagtatagttgaaggcttttttatatctcagaggtctgtcctttttttttttttgatcagcaaaaatatgatatgttataaatagatgaaagtaccaggggtactaaagatacaatgttaattctaggtaggctgctggatccaattgtgttaggatccaa

SEQ ID NO: 236 - DNA, 429 bp, Glycine max
atgaatgatgttttgttggtcttcagctaggagcaaaatttgttgggtccataatttaattaggaatgtattatgcatagattcaggtcgaccaccaaatgaatatttatgcaaacattatagataaaaaggaccatgtactaacagagcatgcaaattttgatcaattggcctcaattaaaattcttagtataatggatcaaattcaatgcattgctaatagtagaacatatagagcgcatttactttgaagaaacagttccttttctctgcattttccactagcttgttccattgttcactcctccttaatgttgaggcagatccaaccacctatatcaacaacaaaaaatggatcacattcaggcatatggaccaattgaaattcttgaaatcatcacattaaccccaaaagatacagtaccaaca

SEQ ID NO: 237 - DNA, 428 bp, Glycine max
ttatggctattccaaggaaagatttgtttggtccttgatatctgctgttgggatattttgtcttggttctggtgccaccgttgttaatggagtacagaacttgtggattgcacaggtatttaaccaaattggatatttgaaatcaatatttttaacttctttcatcttatgttgttgtcagtttgcttattttattcatctgcaaattttctcttattcaagttattgacttttgagactttacttttccagccccctgagaatatgaaatatgcagctttggtgatatgtggttcattcgtcattgaaggtactgctgtctgcatttcaatctgaatgcagtctatttctgtcctttccttcttcaatgagcattttctgtcaggtgcctctcttattgttgccatacaagctgtcaagaaaggtgc

SEQ ID NO: 238 - DNA, 495 bp, Glycine max
ggccattattactccttttaattttcccttggagattcctgtccttcaattgatgggtgccctttacatgggcaacaagccagtccttaaagttgacagcaaggcaagttcttttggctctgtttttggcatacttttataacattatacagggcaagattctaggctgcatgaaatattgatcacaatcaattgtggatgaaaataatcgcaatgctttttctccctgtaagcgtttgtgtggggattatgtatttttcctgccatgcaatattctttgattcggttggtattctcattcagttaaagaaatatatctattgctctttcacatccttattttgattttcatctatcagattttggaaacattaattttatttgcctttaaaattcaaatctttcagcaattataattctgaattattgactcaaattaatgtaggtgagcattgttatggaacaaatgttgcgcctgcttcatacctgtggctt

SEQ ID NO: 239 - DNA, 537 bp, Glycine max
agactaaactgtggtgggacatataattgttatggcttgacctgattttctttcggttttggacttttactcggaaattcctcttacaagattcatggccatactttctgttctttaatttcatccatgtgggcatgtaaaaaatgcacggtacaaaaattaccttaccgtgaacttgtttttaatgcatgtaaggattttaagggaagttcacgagagatgaaggtctcaatcacctggagatggacgaggaagagttatgagatttgatatatggcagattatggttagtttgtttgtctatggctttactaagtaccttgtagcaaagaaacaagttcgtattatttgctaaatgacttgggctcaaaataaatgtatttctacatcgtcattatttcacttacatgccaaatgacttagcaaacgagaaaataacaacttgccagactcaactccaacctctcgaaagttcctcacatataaatacgtgcacactcttattgggttcttcaatggaataactccaaataaaat

SEQ ID NO: 240 - DNA, 504 bp, Glycine max
actctccggcgccgccgccgcgtccaccgccattggcgcgaaaccgcagacgccggagtcctcctcctccaccgacacgcttccgccgttcgcctccgacgacaccttgcgaaacgcaccgtttctccactcggaaacgcctctcccggggaaggcgcgcagcaagcgctcacgggcggcgccgggggactggtccacgcgcctgctccacctggtcgcgacggagcaggagaagctgccgcagctaaaggcggagccggcgaagaagagagaaggaacgaatgcggagtgttccggacgcaaatgcctgcactgcggtacggagaagacgccgcagtggagaacgggaccgatgggaccgaagacgctgtgcaacgcgtgtggcgtaaggttcaagtccgggaggctggtgccggagtaccgaccggcggcgagtccaacgttcatgtcaacgaagcattcgaattcgcatcggaaggttttggagctgaggcggcagaagga

SEQ ID NO: 241 - DNA, 520 bp, Glycine max
atttttttttaatttgaaattgaaggtgtctcgccaatgggagaggcgagaccctatgttgccaatggaggaagcgggtcccttcacgctagccagtatcgctagtgcgactgacggcaccctcccacgtcagcactgtatcgctgttgacaatgatcactcatactttctcgctattatcattgacgggttccatacaaaagtaacccctttgcataaatagtttttaaatgtaacccctttacataaatttgccaaaaatattagcaccccaaccacaccgtttgttccaagaaattaagtcaaattgatcgaacatgggctggtgttagtttcctcagcccactcctgacactgtcatgattgaatctgcatgttcacagtatgtctattattgtattattaattatatgattcattatgttctgttcccttgttgcccctgaatatttctgaagacttaatagatactattaaccaaaatatacaaaacagcctgcaatgggggactgctttcata

SEQ ID NO: 242 - DNA, 498 bp, Glycine max
atagttatacttcatcaggtacataaaaaaacaaatgacaattgatcagcaaatataaggtatctcaagttattaacagctaaacaccttatgatcatgacagggatagaatgtatgcttgtccatgtattaaaactaataaagtttatgcctgcccaatctctagagtaaagtaaactgggttaaatttgtagaaatttattaatcaaatacaaaaataaacctagagtattaagaaaactgaagtgataacaccaaatactgtctaccaaaaaaaaaaaaccctgttggaagccaacatagatgtttacaagtagcccaaatgcttcaataagattgaagaataatactttgcagtttttatgtaatgaccttggaaaagaaaggaaatcagattcagaaaaatacctgtgccataatttcatcacccagatcaataaaggagtcagcaaaggaaaccttcgcaggcttatcaactccaaatgcaacatctctctt

SEQ ID NO: 243 - DNA, 448 bp, Glycine max
attgagcatttgaagggaggaagagatcatgcttctggtctttgtaagcactccaaacctggaacgtaggagggaaaatgattgtagaaggtaaaaacttagatatgtatacttgcaacaggatgcagcaaaatgcacagaggtgccaagaggtaaaagccaaaaactcgaacaaccatgccatattactactctacatgtgttgagacttacatcagaattgttcaatagttctcgcactttagtgcaatgggctccttcagtagcaaaggcatgcaagacctgattaagcagataagtaactagtcaacaacaaataattaatcatcaacagaaaattgttacaaattaatcaatatcattttttttagaaacaacaacaactgcaagtactttctttaatgttagtcaaattgtgcaaataaattaatgaaaaagaaataaaata

SEQ ID NO: 244 - DNA, 473 bp, Glycine max
taccatgtgcgtgtgtataataaagaaatctagcaaataagtaaagcctctgaaacatcaaatccaggttccactatacaatgcagaacgaaattaattctagccaacttacgggattcaaaaattctattaagaataaaatccaattaaatccatacaatgaatggataaaatcaaaagcaattattgagacaaaacaaaacccattaaggtacaagaaaatctagattctacacccaaaaaaaaaaaaacacaaaaatgacaatactaaaagcatagaagcaaaattaaacagtatttaaagcttacttgtgatcattcccacccaccatagtggctccaagagataataataaccaccaacacctacaaaatgagaaaaaaaaattacaaaaccatgcataaccaaaaacaagcttccaaatagaaattataattgagaaaactcccccaccagccctgacaccagaaac

SEQ ID NO: 245 - DNA, 397 bp, Glycine max
actaatgaattttagatcgggagaagaaataacaaactaccaatctggtctccaagatgtgttgcattgttttagcaatatagggcaataactaaagtttggagttcaaaaacattcaacctaaaaatgctgcatgagtatttatactctagtacatatgcgcattaatttcaaaatttaattatatccaaggtcagaacccagtacagggtagcacacaaacctcatgtgtaaatgtcctaacaggaattccaaaagccctagccaatccaaaatctgcaagttttagtgcattattgctgcgatctatcaacaaattctgtggttttaagtctcgatgaagaactctacgtgaatgacagtaagcaatgccacagagaatttggtacaggaacat

SEQ ID NO: 246 - DNA, 504 bp, Glycine max
atattacaataaaaaaaaattaaacaaacaaactgaattgaattttacaagatattcggctaaactagctcaactaaatggtaatgcagaaatgcaccaaatgcacaaaagatatgtgaatctcatacatgacacaggtcacgggacaattttcttttcataaaagaagatattttgttggtgagaataaagaaactgcaatgttaaggtatcatccaaaacatgaagtataaaattgtttgttggctcatattgtgactcttgtctatgtgacagcgtaacttgttactaaatttttggtaagaaacacatgaagtgctcactacaacaacagaaatcaattcggagcatctaaaaaaattggggatggggaggaaaatatgaattgataatagtgttatgcaaacaatacctggtctatatttcggtctgaagctagttttatcataatttctaacttttccatttttacatagatgggatcgttgtacttgcagaagaaca

SEQ ID NO: 247 - DNA, 446 bp, Glycine max
aaagcaaagatagaaagaaaattattgtaaagaactaaacagaagaaagagttaatgaaaacaatagctggtcatcaatacaagcaacaacatatcattatgtcaatacagaaatggtttttggcatcatcctgaacacagtgaccaaagcaagtctgaaaaaactacaggtatacacgaagtaacatcagtatataacctgacatcgctggtgtaacaacaccgttagcaatcaccattgaagtaccagcaagaactaatattagtagagtcttcttcagagccagagaattctcaagtctttccttgatttttaatgacctttcaagctcaggggatggcaccttcagcctaaagcttgatatacgggcatcggatggtaactgattggggagaagactcaccttagcatgacgacagatcaaggagtacaaggcaaaagtacc

SEQ ID NO: 248 - DNA, 400 bp, Glycine max
ggttaaattagtctaaacttatgagggatcgaggtttagtattttaggctacagcatagaacaccaaagcatgattgattagagaaatatcttcatatgcatcagcttgtttgttagaaagacccaacgctttttacttattgctgtcaacttttacttacttgctatttattgtttttaccataaactttagtttatattctgttttaaccatccattattaatgtttgtttcaacaaagccttatttatgattaaaactatgtctaataagcaagttccctgagtttgatactcggatcactccgttttaattttaaatacttgacgactcaatgcgttttccgatgtttcagatttcccttgaatatatttgtataaagaaaaattggacaaaaagt

SEQ ID NO: 249 - DNA, 420 bp, Glycine max
aaacaaaatttgtgaaaaatatcatgctattcacttaattgttatggagaactttctaacattccaatctgctttattatatgcgtatacagtcaatgatggactactactaaatacaaacccagtagcagataacaaaccatagccggcatttcaaatatttacttcgcatgatgtgaatactctctagctataactaagtccaacccaaagtctagtgaaggtgttcttcaatgagcaactgattaacagaataacagacaaacaaacaaagggttgttttcatcattctttttatacatgaaagaaatcatgcaatggcaggcttctctcctgttgctgcctctccgctagcagttgccttagcacgcttagcttcatagtctttaacggctgctttgatggcatcttcagcaagca

SEQ ID NO: 250 - DNA, 451 bp, Glycine max
catatgcacgccctccttgcttttccaacacagtaatttggtagaaaagatcactgggaaattgatgattcttagtttttctgacactggttatttgacgtatcggtgcctttgacactgtccttacgcatgatagcaaatcagcatgcgtttcctcaacaagtggtaaaatgaatgatctcaaataaatagacgtcgacgaaaatgtctcagggattttcttcacctgttaattagtaaacacactcaaaggttataacgagatacattaatcctacttactaaatgaacaaggattgaatataacttagaaactttgatcgaacctgattttgatagagattttgattaagaatatcggagaaggaccaagagaagacctggtctagtaatcctctacctggaacctcttcctttttgtcatttgttctcaccatctgcatcttccttg

SEQ ID NO: 251 - DNA, 419 bp, Glycine max
gagggctttggaaggagatgcttctgacaggatattgcaagcggtaaacgttgcttgctgcatcttgtctcatgttgaatacttctagcatatagtagccatactcgacattttaaacttatgttgcttctgtgatttttgaatataaggtccgggatttgcttaagcaaagaagcactctaaaatctgagcctgatgcggtaacagtgctggatggaacacaagaaggtgcttttcaatgggtatgctttatgaacttattagtcattatttttaacttctgaacaaatttagactagaggagaattggcaaatgacaagcttttagtgacatcgaatggatagttacaatgcattttctctaaagagcaattcaatctctttgataatatatagagaagcctcactatacaaatcat

SEQ ID NO: 252 - DNA, 406 bp, Glycine max
tttaccttattaggttacctagtgctgcactcaattttgatattccttatactgtcttgttctaaacatctccagattataatttcttgaaatcatttggttgtgattgtttgcctctcttaagaccctacaatgctcataaactaaattttagatctcaagaatgtctatttcttggctactctcagtctcacaagggttataagtgtctttctgcttatggaagaatttacatctccaaggatgttatttttaatgaacaaagatttccttatgctgatttgttccctcaatgtcctgttgcctcctccatcttgcctcaatatttcactctccaacctgatttgtcaccctcttcttcagtcatctaattctgtcactcattctgcatcttagtcctctcata

SEQ ID NO: 253 - DNA, 509 bp, Glycine max
gcttgcaccatctgtcatgaaaatgtcatcaggattggcaggaaaaccatcacgctcttcaattccagcagctattgtatcacgcaagcccttgacaccctgacatggaaataagaataatttcatggccctgcctgtgaatagcaaagaaataagccaaaatttgataacccaattaatacctgactatggctataggcaccagttgctctcccaggaatctgatccacaatctgccaagctcgctgtattgcgtcggtactgcaatatgccaaaggacaatttagaccaaattatcagtaatgatagcaacttttattttgtcccacagcatagactatggcattgcaaaactgaattaaagatatcattgacacattcaaattcaatttgcatcctttcatttaatattttcttaattctatgctcatagggttgagggaaatctattatacattattaatcaaattgaaaacaatgcttctaaaccattgttagttatattagct

SEQ ID NO: 254 - DNA, 433 bp, Glycine max
atctgatatgccaaattttcctgaaacaaatccatcagtaactacaccatcatttctgctaaaagagacatctctagaataatgcaatgtggtagtagtacacgtgcctaaattatcacctattacacattttgcattataacttgcagattcatcctgtattcctgttatataattttcaaggttatgacctcagttcttacaattgcagcatctttttcagttagtttaatttctgttccattaaagtaaatgtttggtctgtatccttcaggagatgatggctcatcacttttatcataatgctttaatcacaatgctttctttggttgtttaccttcaaataatttatctatcttatcaggattattattgtgcactctgtcaacagtttgtgcacaagatccttcagctgaaacacaagcaacaactt

SEQ ID NO: 255 - DNA, 469 bp, Glycine max
accctaatctacaagcaacccttgaaaaattccagtgtcaaaaatctcacccttctcaaaccaactttgccaccaataaatgccacaagctttgtggcaaacttcacagcaaaattcagaagcttggctagtgccaaattccctgccaaggtacctcaaaaagtggacagaaaatttttcttcactgtggggctagggactagtccttgccccaaaaacacaacatgccaagggccaagtaataacaccaagttcgcagcctcggttaacaacatttcttttgcacttccatcatctgtttccatcatgcaggcctactattcaggccaggccaatggggttttcaagactgattttcctgccacccctttgaaccctttcaattacaccggaacgcctccgaacaacacaatggtcaccaatgacacaaagctggtggtgctcaaattcaacaccagtgtggaggtgg

SEQ ID NO: 256 - DNA, 430 bp, Glycine max
ccggttggaatttctgctatggcatcactaagacaccagctacagttctcaccggacaggtatgggaggcaccaaacgtagccatatgccttttgattatctgtgatgttcacggacttatcagccgatttgttagaagcacttgctgcctcacttctcaaatcattcatcatatcccacacaatgttgttgaagcgcccaacgttacccacataatcctgatcattcataaaggagagtttaggactctcctccaccgtggagaagaaacgacgatcggagtagcgcacatagcatacttggtaccatactatagcttctgtagcattgttgcaaagcgatgatatgagtttggcagcttgtgtcacacattcttgacactgttttggaatggtgtctcttgtacaaaggaagctaccatgaacagggt

SEQ ID NO: 257 - DNA, 441 bp, Glycine max
tcatcgccgcttgatgtggtggccacttagacactgctgccacatcactttacaatttgaagtatatagcgggacagagtaaactgtattttagagactgattttaatgatcagatatccaatgcttgcaggaatttagtgaccggtgggaagtggatcgctatttgagtgcgagtggttaccttggagataacactcaccccttttttgtggccctgccaaaggacaggggtaatgtttcaaatgatgagttccgcaggcagatttctcaggtagattcagaggttcttcatcatctccaagagggtgtcaagggaggttttgatgaagaaaagttcaagtcctatattggttttggccgtctgagagattatttggagtctgagcttcagaaaaaatacaaagaagccgccccagcaacccttgctttactcgagcaac

SEQ ID NO: 258 - DNA, 421 bp, Glycine max
catatatagttgcaccccttggggtcagaaagggctcgtgtggctcctccaggtgatcatccatccgaaagtcttgggttagaacaaacccaccatgtgactcttaaacacaacaaataataaaacggcacgtatcaaataaaaacaaaaacaaataaaaataaatccttattttcctaatttaggggctgtttggtttgcaaaacagaaaataatgatagaaaatatgcatgttaggttaaaattttgaaaagtattttgttgaaaatatttttaggaaacagtggaattttcaaaattcacgttttgggcattttcactaaaacgggaactattccactgaaaacatggtgacattgaacgtaactatatgaacttccttccttcctatacgcatattaattgttcatggttttaggtg

SEQ ID NO: 259 - DNA, 518 bp, Glycine max
ataataattaacctaaaagaaattgttatattcaatttatttccaatataagaaaatactatattaaactgttaaacaaaaaggttgtgaattatttgttccagttcagaaggctaagaagagtgtttaactaatcaatatttcaaacttttaagaaaggtatacttatttttctcaaaataaaaaaaaaaatggagaagaatgggaaggaacgaactgtaaaatcatcatacgaagagtagtctaactgttaattagctagaaaactagctacaatataatggatattagagacaacatatatatctttgatatctccttcatatcttaggccaaagacgaatcaaaatataataaagttgaagatgtaatagattaatcattttttgagttcatttgagtccaagaaggaagcaataatatgcttgaggcatctattgtagacacagggtcgctccaggtgaaccaggtgaccagctttctttatgctttcaaacgttgtgccattccctagttgt

SEQ ID NO: 260 - DNA, 437 bp, Glycine max
atgcaggccataactgaatagttcatgtaaagtggctcttaaggtcccatcaatctgccaattagttcctggaatgcaattgaagaaaacgcccgacacaaatatattatgaaaacctcttaataataaagtttatttttcttcaaaaaaaagtttattcaatttcaatttacttctactagaagagaactgccatacagaagcacaaagaagttaagcttttctctactatatacactgcacagctaaaacaagtaggagcttaaagattgtcatcaaataataatgttttttttttaaacaccaaattgaaagaatacaaacaaacaccaaaagcaactcaagtttccactgaaagctccgggattttgttactcaccacatatatctctcgcttgaactctgtagcaaggcattcaattgcaatatcatcaccg

SEQ ID NO: 261 - DNA, 495 bp, Glycine max
cacattacaagcacctataatggtaaactagtgaaaaatggacaaatctgaattgtataaataatataaatataaatatagcattcacttggcactagtgcccaaattcctgtccatcaatcttaccagcatagttaactaaaacacaggacaagagaattaaagacagaatcagacaattacaacttcactgcgacttgcaaaaatgtgtataaatagaatagtttctttattcttgacaaaaaaaaaaaaaaagagaatagtttctttatatactttttatgtgcaaaacatcaactgatctgtatcaactcacattaacttattgcatgtcatgcaattccaacttaattggacagaagtaccagattcaaccaaaaaaaaaaaaaaataccatcttgccagatgcaaaaatgagtgcagtagtttttggttccctgatcctcataataacagcagcaaaacgctgcaaagattcaaaagatagacataagc

SEQ ID NO: 262 - DNA, 435 bp, Glycine max
aagaagcagatataataaatactggcgatgattataccctattatcgatgatcattatgaattaatcctcaaccagaataggtaccatctttagctggaaactaaactgatagattatagaacttccaaggttgtctcaatgataattgataacagttcaacagattgttcaatcacagtagagcagatgaatgggaagtcatgggaaaatattttttttagttcaagaatgaaattgagttatttgccagttttgtcactcaaggcattttttgtctctctagtaagattttatgaccgcaaagacaagaagattgttgtgactggtgtatgagaacacaggcactgccaattgatctctccataatttcctaaactgtcatgatatgaaaatggaatcacttttgtggatatatataggctgaaagatccttc

SEQ ID NO: 263 - DNA, 485 bp, Glycine max
agttgaccatgttccattttcagtgctagtttcgatcaaaatttctgatgaggtaccagtaactaaaatttctttagaagctggattgttttcatggctttctgtgttactccctccagtactttgtgttgcctctgaatgcagatgttttttgtcctccgcagtctcgccaaccatctcatcttgttgtgtggcttcatccatactcttttctgtccctaatttgttatcatttgtgctcttgtcagattctttttcatctaaagtttccattgatcctctaagttcatcgtcatgaatttgatcattcgaagtttctgtttcttcagattctgaatttaagcttctatctgattctttctccgtctcgtcagtgctcggcttgacattcctcatttgatcattctcctcaatagtattctccagacccttctccaaatcattcttttcatctgagttgtccccaacaacctcctggttttctt

SEQ ID NO: 264 - DNA, 576 bp, Glycine max
cttgcatgcctgcagatgttctttccacaggcgatcgatattgcttaagattaggaaccgctctgcttctttcatcaagcctgctgcttgttgctccacaatatcctatggggcagcattggttgtaataaaaaggtaaatttaaaaagaaataaatggtaaagaaaattatgtgaaaagacaaggccactgaaccaattcaagacgactcaatttttagacatgacacatgatggtaaaagtccaaccttaaatagcacaaagttattacaagttgcactgaggtttgataaatccctctccccctccccgaaaaatgtataatcaattacttgatttaaatcacttatctcatttttttgtcattttaaaatttaattgaaaaaaaaaaccttactaacaaaaaatctcccctttaaatagtagaaatcttttagtctcccaaccccacccccaccccacaaatgtgttatttaattcaaggaacaggaaagaaacaaacataaggagaatggttcatttaattcccaaataatgatggttaaactgacccttttctgcaggtcgactctagaa

SEQ ID NO: 265 - DNA, 431 bp, Glycine max
gcaactacattcggatctaccatcctttttttctctgccagtaatttagatttatcattcatgatagaacagagtcacctcttcattctctttttctttgatgaagacctccttattttctctatgttgttttgtatacaaaatgtgattgattttataccaaaaataatgaaaaatagctcccatgattttgttgccgcaacagccaataatcaaccacttacctagttccattacatgtatgataaatacgtttttgataattagaattgttaataagacagagtggtttaataattagagatgaatcattaaagttagggatcggataatggactaaatatatatactacttttgtttctattaattattcagtttggtacattgagaacccaaaaatggaatatcgtttgcactcaatatttaaact

SEQ ID NO: 266 - DNA, 443 bp, Glycine max
aactgtcccactcctacacaattttataactttattgtcatacttcaatattcgttcaatcgttttctcaaacacctagcagtctagctctcaagtacaataaacaaatcacaatcttatccaaacatatccaaagtgaaccatcccactattttaagtagtctaaaactattaattgctttcaagcattccaatgagttccttttttttttttttttttcttttttcttttaccctatgataataattgatgaaactttggaagacaacaagaactaaacgacacccagaaacgttcttgtcacaaagttaagtttttttgaaaaggaaaactacattcacctgcgcgcaaacatctacgaccgaatgaaggtcgtccccgaactcgtccacgccctcctccgaaagcttccaaaagagttcaaatttgaacttctgggtct

SEQ ID NO: 267 - DNA, 484 bp, Glycine max
acacatggcagtgttctgttgtgaagttattctttgaaaagcacccagggattcggaaaggacttctgatctttgtcctgctaggaacctgtatggcaattggggatggtgtgattagtcctttgttgaagtataagtatgaggtgaagtctcacatcgaataaaaatgaaaaagttgaatattatataagtgagaaaaagactcaaacttgagttttaagattttaggttaaaatgtaatatcaagttctcttaggtgattgctcataactcagttagactatgtgtcatgaataaaatgtttttttacttttcaattcaatccatgtcattgcaaaattcttcgatcaatattaattttttttctttagttggtgtacttgttataagatcatgacttatgacttaatagttagtactggagttgatatatttttagacttatatgtgtgtttctcctttgtgtctattttccttttagttc

SEQ ID NO: 268 - DNA, 388 bp, Glycine max
ctggaaagcaatatgaatgtttgccttctcacaagttcacaaggatctaagagacaccttgtgatccttgttatgtaactgataacttccatgaaaaagaagtaagaatagcaaggagaatatttactgacattcaatttatatattttgcatattgtaaatattggatttctgccacagcacgaaacaaaaattactcctttgtttatattattattaatacaatctgctatgtgtttatcaatatgtacaagaacactacattatttccttacaatattatacccattcaaattcacttaaatgcaatattaacgaggcttaccaatcaacaagagcagtgaaccggacacaaaagtctgccattatgaccacaatattgttgcga

SEQ ID NO: 269 - DNA, 564 bp, Glycine max
tagctcactttcagattttaaataattattttaataaatcagatcaagtcaatgttcaatcaataatatttttctaagatatatagcagcacaagggatatcacatatagtcttgacacttagaaattttattttctaactattttagatttgatgcaaacaggaaatgtaggtaatttgcttcttatcatagttccagcagtctgtaaggaaagcggtagtccttttggagctgtggatgtttgtaataaaaaagggatggcatatgcttctttgtccttggcagtaagacaatctaactttgtgcacttatctaattgaatgggttcatcataccaaaagcttgacagttttgaattaagattttacattttctaattttggtttaccagataggaaacatctacctttggacttttgcatacaacattatccgcatttattcaggcaagattttcaacgtgaacaaagttgatgattccacagtaggtccagtgtcagcaatagaaacagatctcgaaagccattcaactgtaccagtggttactgcaggcatgcaaactg

SEQ ID NO: 270 - DNA, 483 bp, Glycine max
agtaggccatgcagatgcagacaaacccaaaggtctaatgtttcttccattaacatcaatgttcctccctctattgggaaccatttggttgctttgttgctgcctctgagagtaaaccccatcacattgcttctgcacattccagaccgagttctgctgctttgccagctgttgctgcctcaacaactgaaactaaaacaaaaaacaaaaaaacaaaatcagtaagatacataacaaaaggaaaaacttttagaaaataacaaaagatactgtaatggggttagcttacttgtgctatctgcaattgctggtgagagagtgattgttgttgggtgtagaaaccacccacatcagggtttggatttgcggtggtgtttttggagggtaaagtggtgactggagagggttttctttggggaacaaagtttccattgtgatggttgagagcataaccttcttgcttcaacctcatcctctcaactt

SEQ ID NO: 271 - DNA, 411 bp, Glycine max
tctagatagtcaagagccgatctcaaatattcgttgtccattcgtattaatgcgtcatggattctgctagcagcaaaccatgttggttttgacatgagatcaccagccactgctataggagtggtggtgaagatgacattgccaaagtaaccaggggtgaggggaggttgcagccttgcccgtccatcagttgcaatgtacaatttggtttcttggtcatcaggaagtgctcttgccttgcacacacttctccatacatgaccagccaacatctcataagagctgtagctgattctgttgccatcttctctggacttacccttgagggtgctcagttggtcacgggtcaatttgacagtagagacggccacagcactgtcagagcctactggttttgaggattgcagttgc

SEQ ID NO: 272 - DNA, 461 bp, Glycine max
aactacagctgctgtcaaaggacgcatcgcagtaccagcatttccaaggaataaattgatttcatctttagattctttaatagtgggaaacaatcccccacagccttccacaattgcttgtttggttgtttggtcgtcttccacacgcagtccaagggtccttaatgcaccaagcatgtaatgaatatcctcgctgtacagcaagttgtctataacagttgttccctaaataagtaaataaaaaaaaacagaataaattatagtttatgccaaacaagacatctattaaataattaaaagttataaaaataatagaatgaaagtaacacggaacttgcagcaccattctaatttgtgttttgggggagggattatcttctagagctaaaattggtaatacaaccatacttggataatcaagagtcaaagatttctttggaaggatatagtatataatctca

SEQ ID NO: 273 - DNA, 438 bp, Glycine max
atgttctggtgtcataaacagctgacatgccaagctggtccaaatacctgtgattaatatgataccattagagaataaacttgtaaggaatcattgctgatattggcaaagcaaggggaattacactaaccagaagctgtagacaaatgcatcagacacaagatgatggccactattgtaagcccctcctgcctcaccaacccatgattttactgaggctgctgaactttgaagtatacctttgaggctgctgaatgtgttagcctctccatccagataggaagggtcaagaattttttcagttaggtggtcatcaactcctgtaagtagctttcagttataatcaaatacatggagattaagaaaacatgataaatttatatccagttttgtggaagatacctggcccaaggttataaatgtggtgggtgatcacgt

SEQ ID NO: 274 - DNA, 485 bp, Glycine max
agcttggggcaaaaacaactgtgagttagttacataagttgtgcggtctgatatacagtttcgggagcattattttagttcttcccatttttaagtttatataaatagttgtgatttgtttttaggttggaccacattgtatactgggggaaggttcacagatgggtgacaaatgcagtgtgaaacgatctgtcattggccgtcattgtcggataggtcccaatgttaaggtgggatgatatattatttttacaatttaacaggaagttactttttggtcttttgatttatctgtaacactatgatctccaaacctcgatgattggtcagcaacaccgactggcatcttactaatgagttgtattcaataatgttaatactaccaagttttcttttgacttgcttttatgcatgcaggttgtcaattcagtagttatgaatcatgttactattggagaatcttgttcaatccaaggttctattat

SEQ ID NO: 275 - DNA, 469 bp, Glycine max
gtcctgctaatttagttacttgttggcatatttccaaggggaatatcatttccccaatttctctattttccatattggtattgttctcacttatgccccaattataagcattccactacaatattaatcagcttgatttttaagaatgttattttgatatgaagttcttgaatagttgcattttttttgacagttttataagtgaagagtcaatggctgagcatttgcaaaattgattttggttaagattgatctttgcttggaaacttttacaaattctccatccaatgcaaaagctacatagttgcttccactataatcaaattgggctacattttgccatttgaaacattcaccaaacatttttctaaacatgttgaaaatagcttcaattcccgtttgagccttccaaacctacacatagtaggggttttcttttcctctttggactaaggctgagcatatatga

SEQ ID NO: 276 - DNA, 479 bp, Glycine max
ccatttcatgatcaataccagactttcacagatctgattcagccttcatcaaatgtaccttaccatatgggctacaacatatcttttatctagtcagtagttttcaaacaccctaagtttgtgtctaaacatcacaagaaatcttatttcttactttttttggggggcagagaggggatatgctagcgaaaaaaacataggttcgtttcccataactggtaaggatggcaatctcaaatatattattgaatatgttataatttatatatttcattaaattccaaccttctctttgcaaaatcaaggaccatggaacctaaaattttcacttcatggagtaaaaatgatcaggtagagcatataaagaagtaaacaaaatacacatacctcatccctatcaaagttctcaccactgtgaggatcaaataatacatctccagttgcaagctcaaaacaaatgcaagcaaaagaccaaagat

SEQ ID NO: 277 - DNA, 545 bp, Glycine max
atgcttctgcttatcttgccctcagcctcagccactaatctagaggcattctatgttgggaaccaaagtaaatgaagatgaatgcatgactgcacgagataaaatagaaagaagagaaatcaatggtgaaggcaaattgatggattagagcctaattaaaattgttcaatattatttagatagggtctcaactctcaacattgtctattaattagactttcaaagatacgggttccatacatgatagagtgtgcctattacaaacatagctccaaagcaacagagttcaatacctcgaaattttaaaccttcctactagtttagacaaagtttaacacaacaggagtaggaagcacgcttatattacagcctaaaaacagcaaacgcaaacacactcaaatgacagtgataacataacaatgctgagagcaacttctaacttctaaggttacattacagaactacaacaggactggttactctgtgcctgccatctgtccaagacaaattcccaaataaaggcaacccatgacgggcaccaattg

SEQ ID NO: 278 - DNA, 446 bp, Glycine max
tctgtgttagtgacggttgatcggcatgaatggtatgcaccacctcagatatacactcgtgatgacagtactggtctttggaatgctaagcctgcttttaagcttgattcccccttcctatcattgggtgctaaagatgttgaaaatctatctagacagtcagtttcactaactggtgagcatgcttgtgggggacatgtgtgtggagataacagtcaggagttggttgatggtgtcactagcatggaaaccaattgtgaagatccctcagagtgtgtatctcaccataatgcatctgatggtgtggtgaaaaaacgaaaagtggatgaagatttatcagctgatggaaatgttgttgctgatttttccttaaatgactcaagggaaactaagctagaaaaatcaagtattatacaggatgacatgttaatggactatcagggtgc

SEQ ID NO: 279 - DNA, 524 bp, Glycine max
taccaccacaagtgcgtcctcaaagactgtggatatacccacttctgggctgaagcctgctattccatcagttctgttgtctacatctacacctgatgtgacagcttctgggactacacccacaagtgcagtgagttcattaccttctgggttttggttgaagccttcaaatccatcagtttcattattgaatcctacaccttgtaagacacccactctgtcagtgcccgcaattccatcattttcactattgtcttctacacatgatcagcctgtgactgcatcagttccattgtccaggcccgtatctggtaagccagtaactccctcagtttcattgcttacacatactcctgcgcttgatatgcacaggcctgtcagcaaaaattttcacgtgtcaagtggaatgccccctgctttaaatagccagtctcagcaagagacagctctggcatctgggccaaagcgagccgcatcattggcgtccataccttatagccaattaagctctggtccattgcctt

SEQ ID NO: 280 - DNA, 478 bp, Glycine max
agaacagaacaaagatcaaacaaacaaggcttttgttgataaacatgataatgtgggtgatcaaggggtgtttaattaaaagtggattttgaggaatacctgtgtagtctgatgcaagctttccattgcaaaacctccctgttggattgtgattcttgaagtctcttccataaggagggaagtttgctttaacaacggtgtataagtggttattatttcccacatcaaccacagagtccccaaatatgaacagggcagggaccagaggctgccctttagccacattgaacactacaaccagaagcaaggaagtcaagaaataactagaaaaccccatgcttttgagtttctcttcagcaatgagcttctttaagagagagagaaagtgatggatttgaaaaggggcgttatagtattgggaactgataatctgagggaatggtctacgctctatagcatgcagtggatctgggttggc

SEQ ID NO: 281 - DNA, 401 bp, Glycine max
atatatggcaggcaacattggcattatctttctcaataagtagttcaagcccaggcatctttaaataagttctagcaaaatctctgatggatttcacttaaactgagaaacaaaccacaacaccagaaccatcaacaggattcatgtacctcctgcatatagtactcgcatccgaactcagtgcccacgacttcaagaggaaccctggttaaactactctgtacatctgaaattacttatataaacctgcgattgaataactaccctcccaattttaaaaccaggaagcacagagaatcccaccttggccctccccttgttcggccaggtcaacctctttgtcacatcttccatgtatatcatagaaaactccacacctctttccacttgaaagatctcaa

SEQ ID NO: 282 - DNA, 951 bp, Glycine max
atcatcatggtctgaaatgatgcaggtttttctcatgtgctttctttttatatagtggtagaaatctcttttttcatttcagcattttgacatctagatttttgcagttgaattttatcaagcattttcttgggggaggattcattaagcatatgcaggttggctttctctggcttttttctttggcatgcatctggttattgtataatcttgaggtcatgtttaccccttctttttttccctcttctcccttggcaaacaggaaaatgagttcttacatgaagtctttggtttctcaccgaagagaaagtatcttaataccaacgaacacagaatgtctggtggtgaaaaggtaagctgtccatgattgtgctcaattatcttgactttgtgcacatgactttcttctttcgtttccccccctcccctcacttgttatcatgcactgacctgctccattccctccatctgcagtttttgttgatattatttaggtcttacttatcatggtaaagcttctgacacgtgggcagtaggagttactttgtactgtatgattttgggtgaatacccatttcttggagacacacttcaagacacatatgacaaagtaagacatatgttaacttaccctctaatattattacgtagtattcatgttacctgtttttaaccttaccacagaaatctgagcttacagttttccttcttttctatccagatagtcaatgatcctttagttctgccagaggacattaacccccagttaaagaatttaatagaaggattactatgcaaaggtatgtggcattcaacttttctcagacataactatattgattatattctccatgtcaatttgctcttcctttcgttacacacaaacttcatcatcatcctgattttatttcggggggcccatcattttatgtttctcaattgaactgtgtt

SEQ ID NO: 283 - DNA, 493 bp, Glycine max
tgaatgagggggaatattagagattagagatactgagataataaaactaatcttggaattcctttgggatgctacctcttcctgtgggttactacaatgtacttgtgaatgatactctttctcttattaggattcaacattgtttattgttattgctctgttatatacttatattcctttatgcagatttgaccctttttcatttaattttttttataattaatgcagggtcttgatatttatgactcaaagcaaataagagacaaacagataacacgggttattggaaaggtgtgcttatttggttctttcttctcctttcgctgttctatctctgaaaacatgcaaattatttagttacttgaatgattctagccctggttttattgattgtatcttggtggattttgtccactatcctctcaaccctatgattatttgttatgtgtcctactgctttattgccatatcatattttcactcctttttattt

SEQ ID NO: 284 - DNA, 362 bp, Glycine max
aatacaattattcaatgacaatatgctctatttataaaagaaattgagccactacactagccactaactcctaggtgcctaggaaaacaatatccagcaataacataatttattcaaataccccacatcacctaataacaatatcaataacagaaacttaaaaccaattaaatgacccacgtcacctaacattccttcccgtaaactgaatgatcaatattcagtttaaacaacataagcagtagaatattatctctgaaactaattattcaaaactgcccacaccaagcaatttttgtagcttctgaaatacaggtgctttgagaggtttagtaagtatatcagcaacttgatctttactt

SEQ ID NO: 285 - DNA, 497 bp, Glycine max
aaatgaaattaaagatatagagattagaattgacaactagtatacaaaaaagcaattatatggtttgaacaaagttaaaggccagcaaacatgagtttaactcttggtcatatcacatatcaattacttctcgaggccatccacagtacatgatttttttgagctgttcatgtaccaaaatgaatgggagtaacaatcaagtggtaacaactaacaaccaaccactatttcatcaagttaattttgtaatccaaaacaattgaccaattcggctagcaaaacagaagcatgaagacgaaaccatttcatcataagagatgatatagaacaaagttgtcagactatatatagaaatacagtaagaatatgcagatcctttcatatatacaaattctactgctgatttcctaattaaaccaaaattataaaatttaggcactgaagtaatgcaaacataaaagttcaccaaaatctctaaaaagatttcccaagatatc

SEQ ID NO: 286 - DNA, 508 bp, Glycine max
ttgctcaacatacaaaacctaccacgcattgttaatttgcaacttaatctttcgttattctatcttgtaggcccatccatgtttgtccaagaatgcctcgaccgcttccttaatggccaagtttggcactaactgtgatggatcaaggggttcccgtgtgattgggtcgaatttacccacctgtttaagaagttgaattattgcacactgacttcattgaagtggaaagcattcaacagagaaggtgaaacatgcaaatcaggttaccttctgaagatgctcaagaatcactgctctctcatatgtaagtccacttggagtgattacaggatcatggaaaatgtcgagtgtaattctacagcacaaataatctggcacctgtagactcaacaagacaatttgtgtaattaataagatggtaatttccagggcaccactgaaaaaagatttgatgaatatagaattaacaaaacaagccatgtacacacctcagtaggtgtgtcagctt

SEQ ID NO: 287 - DNA, 419 bp, Glycine max
  misc_feature (169)..(195): n is a, c, g, or t
cagttatgaactagtgggagaacatgcaaaataaataatgaaaaaagtttacccactaaacttgagaagcataagaacatagtaagtaatggacaattaccaagtgtaaacaactggctctagaagatagataaattagcatgacacaaatttcatcaggacagagagnnnnnnnnnnnnnnnnnnnnnnnnnnngtagttgcaaggagataaatcttcagaagacacactgcacattataaaccacagatagacgtgacagtgtgagacaaccataagacaaacagtctcaacttaatctgaaaagtcaagtacaaaagaaacatacatttaaaattccacacaagtcctaattgaattttctgtttggattactttgcccatcatagaatttgtttttattctagttcttcaaaaca

SEQ ID NO: 288 - DNA, 453 bp, Glycine max
gcatgccttgcagaaatttaagaataaaagtttaaacatttttgtaaccaaatttcaacataaaactaaaaaaaattagaagcaaccacatgttgcaatttaaagttaaaaatagtacagagatctattccctaccacaatgtatctgtcttcagtaacagctagcatttcccaccacgtgatgaagccttttaatggcttccttcatctccttcatttcccaaatattagacatggaggatatttagaaaataaataaaaataaagtaatcaagctgtatgataagtaattatttatatgtaattactttctttcccaaattaattcgatactagtaatctttacttaaaaggctttaataaatatataataattaataaaaatatatatacttattaataaaatatactgtgagtaataatacaatcttaagaatattatctaaggtagaa

SEQ ID NO: 289 - DNA, 507 bp, Glycine max
aagattcacaagcaaaacaccagacactcaaaattttggcaacactgattattttctcctggaaacaaaaatacacagatatttaagtaccctgagcagacctgaatcttttttgccatgcccctttgtgacaatgctttagaaattgcattcaagccaatttgcggattttgcaagcctgatttcaaaatgacaacctgcattcaaaggatttgcccaaaatgcatcaaccagccagatgcactagttcacaggaaaaaattacaatcagcacatcaactgtacttacatcaacatcacttgtcggaagatacagccctgtcctgaaagacccgaacacctccacctaagagcaacaaaaaaccaaaccctcattggaacataaaactctacaagaaaagggtgtaatgcaataactaaacaacatctatacctggcagtgaggccatatatgttttacaactccaaacacagactctatagccaagtctcgtgcagctttctctt

SEQ ID NO: 290 - DNA, 467 bp, Glycine max
aattgagaaaggaaaatttttagataggaaactattgaataggttttagtcgatctgtaaatttttactaaacttaatacatcttccatgttggagttttaagacaaacctattcaatttgttcttagtgcatgttacttttgttcttgttattttttagaagtatttttttttggtttcctaaaacaactttcgaaagagagttatttctcttaaaaaaaatcaattcgaacatgcatgcactcaatttatttatgtgctctacctgaaatttgcttctcttattggtctctttaattttgttcatgatttttattttaccccaacacttttgcttgttgatgttctcttgatccatgttattgtggttgcagaggcctcacaaagaagttcacttggaaggtttggttttggctattcattaatgcattaatggggtacgtgcgcgttctttaattcctatataa

SEQ ID NO: 291 - DNA, 510 bp, Glycine max
gcttgcatgcctgcagcaacaacataagcagtgccccactagatgaagtcagctaaatggagcacacaaagtcattgtgtattgtattaaaaagaatcaaaatttcaaaaagaccatttaaatcaaggaaaagaattacaagcaaaaaggaataaacaaatgaaaaaatattatcatatgaattaaataaaatcagtgatataacttaaaaaaccccatggccccaaatgacaggacagaatagagaaaagaacaaaatacataaagctactactaactcaccagaagaggcagttctcacaatttctgccattacaaaccatccatcctcactggacaaccgtttaaaccattccgggtttccatcacaacatgtataaatcaccatacacaacgggtcacaagtctccttggtgtgaagtctagcaagtgatacaaacccatccagatagagctctttccaaatagcacattgatgctgttttcccgccaaagaaacatttgccagaa

SEQ ID NO: 292 - DNA, 506 bp, Glycine max
tccagacaagacttcactttagaaatgaaggcatatgattcggtatcttgggaattcttgttgtatatgttaaggaggttaggatttaactcacagtggatcaaatggattgaaggatgcatcaaatctgtctcaatgacagttttggtgaatggaagtcccacagatgagttccttcctcaaaggggaattaggcaaggggatccgctagcaccctttctgtttaatgtggtagcggaagctttatcagggttgatgaggagggcaatggcagaaaatctgtacaaaggatattcagtggggtccaaaaatgttagcataagcattttacagtatgcggacgacaccatattctttggagaagcaagtatgggtaatgtgaaagctctaaaggctaccctgagggcttttgagttaatctcaggcctaaaaatcaattatgcaaagagttgtttcggagcatttggggtatttgatcaatggaagcatgatgcggctaaatattt

SEQ ID NO: 293 - DNA, 386 bp, Glycine max
atattatttctccacactttacacaaaaccatgatctgtatatattatgatatgatgaactaaacactatcatcatcttctctgtgtgttcaaaaggtttaacggaattgactttgaggagattaaagtagacatttccaaacggcaccacctttctcctgaatttagaggtatccatctaatctaggatgtaaaataagcatattatgcaccttataagttttcatttactaacgactctgcacttaacaaagtaatataattatatattattatagtattttgtcatggcactcactgagttgtagatagaaaactttaatagtttgaatccatttgatttcaattgaagtccctcttgtaatttcattgcagaagtaaaccct

SEQ ID NO: 294 - DNA, 449 bp, Glycine max
agcagagtgcaacaaatagaaaagggaaaacatccatttcaatagaaagaaaggttgagcggaaaattgttgattaccaatgcaaggggcttcttccatcattatcaggaacatcagggtcagcattccattttgaaacaatgtggtaaaggaaagctgtctgaccatattgtgcagcaacatgtgttgtctgcatccaagcaaatcataattagtaaaattagcatttacagctgcacacctgtgcttcaagtaaaacaagaacccaaactaccaaattagtatatgtaaccagatacagacagccaggtataagagctacataacatgctccaaatggcttaccccagcaatctcttgaataaagggaaaaaggaatcacaccaatctaacctgatatccattcatatcggcagcactcactcgagcaccctcctggagtaaaagct

SEQ ID NO: 295 - DNA, 495 bp, Glycine max
caaaacaacctactatcctagcaaggactgttgaccacttgaccaacaagccaatccagcggactggaagattgattagccaagttttaagataaatgacagtactaacaaagactgatatggattagcttctgttaatagaaaaaagagagtattaaagagagcagctcaatgttgtacaattaagcttgctgaactccattttacatccacaccagcctgtagaacataaaataaaatctagtacatcctagtaatattcagaatggcgatgaataaaacatacacataaattttaaagatcttaccaatgatatgcatgccactggtattacttcatcttcttccaaaacatcgattgccatgtctgcaaatatggtggcaccagctttctgatttgaaatctccacaactggaggagaagataaagatacattcaagttcatgtcatgatttgggtatttcttgtacagctggggaacaataaatctccat

SEQ ID NO: 296 - DNA, 383 bp, Glycine max
aaaataaagcaatgatgttgctcactggcaagccttctgttcaaagctaacaatcaagtgttgtagcacagtgtgaatgttcagaaaaggtggacatcagacatatcttcatcatcttgtacaacatgtttacatctctccaaacaaaggcacatatgacatcaactctttcaaacaagagacagaataggaaaaaagtgaaagaacagcatcaaattgagataataagcagtcaaatagtatgcatctctaaaatttaaaggaacatcacttgacacaaaaacttcactcttcacaatgtaggaacacagggacaatagcaagaaaatatagcatatttgatattcctgcacactgatgagaggagaaaaacattgctgatt

SEQ ID NO: 297 - DNA, 484 bp, Glycine max
tgtgtgttattagcaatgcaatttagataatgaatttctatattcttgtacctaactccaccaggggcttattgatgattatatgatagtcacggtagcaaattaaactaccatcataatagctaccactattaacgtctactcctcaatattcttcacgtgggattgctaataacctgctcagaatccggatactgttctagttgtttctcgtttaatgagctccttcttcactgtgatgatggtgtgcttttgagatagactcgtctttttcaaatttgatagggtgtgtttggtttggacacttaaacttaggttcacccctcgccgaaaattaaacatgcttgtgtggcaaattattttttcagttgagttaaatgtgactttcactcaaactgagatttactccaaagctatttctctcgtttttctgttgacagtagtggttgaataataagcatgcttaattacatacaaactgctc

SEQ ID NO: 298 - DNA, 481 bp, Glycine max
actgtcaatcaagctttgtggctgaaaaaaattttgattgatcttaacatggagcagaatgagagcacagagatttttgttgacaacaaagctgccatagctatttcccacaatcctgtctttcatgggaaaaccaagcatttcaatatcaagttgttctttgtaagagaagtacaaaaaagtggagctgttagtcttgtctactacaaaacagagaaccaagttgcagatttgtttaccaagccattgccaattagcaagttcgagtttctcagacaaaagttaggactttgcagatcttaaagcaaggaggagtgttaagaaactgctttggactacaacgtgatcattatttttccgtttttctgtttttgaataagtcctcctaatcaaagtagttattgcaatttgttagaaagttgttcctaaactttaggagaaagcaattctgatttatctaagttactttattttctgtttt

SEQ ID NO: 299 - DNA, 463 bp, Glycine max
agagtgtttaagagctagtgagtaaatgtaagaaaatggctaatggcacaaaatagtagattatcaaacattgcatgcatgttccttgcaaatttcctttgatcaattttcaataaactgataatgagagacatgagtactgatctccaaaagccaatggaaaaaaggggtagtcaaaaaagggcaaggaaaagcttaatcgaagcatgcaaattgaagttgactaaaccaccccacaagacaaaagctatagtgggccacaattttattgattcacagctcttgtagtattataattttactctctttaattaagcctgcaaaatcattctatatggcattggaaatagcatgccactaatcatatcaaaagggtcaagccgttttgtttttattttttatttttagcattttcccctttgccacacaatgctttgtcatcagtaacaccatgttggctcaa

SEQ ID NO: 300 - DNA, 506 bp, Glycine max
cagcataacagactggacaaccacagtaatttagagataatattatcagcatcaactatttttgacaattagaaggttaaggataaattacctctgctgccatttcaaaaacatgagcaaggggcaagtatgccaggtacacatccttgctacccagatttggaatcactgtcataacagctgctgtagtcgctacaatgttcccgtgagtaatcatgacaccctgaatgattacaaaaaagtttaacactccatcaaatcaaaggtaaacacataactgaactgttggggatcctcagagttctcaatgtttataggctagaaaattttcgtcatatttacagaatgacttaatagtcaatatggttattggttataatttaccacctaataacatgttgacaataaagtcataccaagacccaagtcagtactcaactactcatatttatgaactacattatttaatagggatcaggttgttgagacattcaataagaagggtt

SEQ ID NO: 301 - DNA, 502 bp, Glycine max
agttccattcgagattttggtttgtagtgaagaaactgtggtctgggggagaggtagttggttttggggtcataagggggcatcaagggatccgcatccagaggagccacaacggtggctttcaatgaaaccggaggagtggcagtggggctaagcttaaaaacgggatgagtggaagtggggctaagcttaaaagtagggtcaaggttatcataatcaggctcagtttcaaatgatggttcagtgtagtaaatgtcattctctagaaccaaaggaacattcacattcacatcattgacagattcaaacgacaaatctgtatcattctttgaaatcaaaggaacattcatataatgaatttcactagtttcactctcaccactcaaatcttcactactcagggaagatctgggaccttcctcaaaattggggatgatcccataaatcatattctcctccaagggctcagcaaaagttaccttgcgaacgtggcttttcgggt

SEQ ID NO: 302 - DNA, 420 bp, Glycine max
tgttcttcagcatcttcattgcccttttcctaccctgaaaaatatcataaacaaatgttacttttcaatctttggcatcgtcaaaagaaactattttgtatgatatcttttgttttttgttttaatttgggttggcctaatatataatactagtcacgttatcttagcatctccaatataattctaatcataggactaattacaagttgcttaggattgcaccgttatatagaaagaaaattggttgaagttgtcaaattcatgtattattgtaggatccaccataagtgaattaaacaactatataccgttggaggtgcgcttttataatggcaaaaatttcaaaggaggaacccacatatatatagcatatgaggtgaagtaaaattaatgactagcgttggttggtgatggacttga

SEQ ID NO: 303 - DNA, 434 bp, Glycine max
tatgagatctgtcgaacgagtcgaggcacgtgatcttctatgacatgggttccagcagtacctatgcagcggttgtgtatttctcgtcgtgtgggaaggtgaacccggagcttgggggtcagcatatggaattgcgattggtggagtattttgctgatgagttcaatgcacaagttggtggtggaatagatgtcaggcattttcccaaggccatggctacattgaagaaacaggttaaacgaagaaaagaaatgcttagtgcaaacacagctgctcctatttcagttgaatcgcttgatgatggcgtcgacttcgggagcacaatgaaccgtgagaaatttgaagacctctgtcaagacatttgggataaatctcttttgcctgtgaaagaggtgcttcagcattctggcctgtcattggacctaatatatgca

SEQ ID NO: 304 - DNA, 447 bp, Glycine max
ataccgcagctttaaactcttcatctgtggtgcaaggaacttgtgaaacaacctcttgggttgccttataagataataccaatattagaactcttcctttctcaaaaccaaaatcaagggattcagctcaattataagccaaatatcaaaccaaaagaagaaagaacacttacagggttgataacatcaatgaaagttaacgattttgagtccagaaaactgcccccaataagatttggaaccctctgattaattcaacacaaccaaacaaaaatgggaggtgagatgaatagataactagcaacatgaagtcaaattttgtggaaattgaaaccaagtttgagcttacagggggcttatgttgtcttgaaaatagctcagaaggtgttgataaatgagaatttgccatggcagagaactgaggtctcaaaaggttcaagtttttca

SEQ ID NO: 305 - DNA, 459 bp, Glycine max
ttgcggctgcaacacgcctaggtttttggggtttctatgaccacaattatagctgtattccccgtgtttgtctgcaatattaagtatcgtgacataaccgcaactgaaatttaaaaccttgttttttagttattattgatggatctgctgacaattggtatggtcgtagtttttgctgcaatgaatgttgtccgactttgatatttgattgatcaatttttattttgctttcaataggagagttatggggaagaatttgcaaatcagataccttcatctcctccatatttttgtggttctcctccagttcgggcttctaatcccttaatccaagatgctcgatttggagacgaagagtactctcttatatcaacaatttcatcgccttcaggtttactgtctccatcttcagcatctcgcaaagcaggatgtgctaggatgaagtttggacttaaaccg

SEQ ID NO: 306 - DNA, 481 bp, Glycine max
tcctgtatagtcgacctgcagccggtttaagtccaaacttcatcctagcacatcctgctttgcgagatgctgaagatggagacagtaaacctgaaggcgatgaaattgttgatataagagagtactcttcgtctccaaatcgagcatcttggattaagggattagaagcccgaactggaggagaaccacaaaaatatggaggagatgaaggtatctgatttgcaaattcttccccataactctcctattgaaagcaaaataaaaattgatcaatcaaatatcaaagtcggacaacattcattgcagcaaaaactacgaccataccaattgtcagcagatccatcaataataactaaaaaacaaggttttaaatttcagttgcggttatgtcacgatacttaatattgcagacaaacacggggaatacagctataattgtggtcatagaaaccccaaaaaccttggcgtgttgcagccgcaa

SEQ ID NO: 307 - DNA, 419 bp, Glycine max
gcctgccattctttcaatttggcaacctgctacagccaacaacattaaaacagacataaaaaacagccagaagctatatatatatatatatatatatatatgtggtcctgtttgggtcaacttctccataagcacttataggagaagaaaatcagaaaagtaaaatgcactgagcttttttataagctaaaatcaacttatgcacctcaaataaataaataaaaaaacgtctacaaaattaagtgcataagttgattttagcttatgcaagaagttaaattcattttacctttttattgtctccttctataagtgctaatgaagaattgtatccaaacaagatcctaattataaaaccaataaaccccaaaatgtacaacagaggctaccttttcaatcgaaacagctgaattatcact

SEQ ID NO: 308 - DNA, 527 bp, Glycine max
attgggataattatgctattgtttctagtaaaaaactaatactaacatgttttccagtgggattgattaaaatatttagtctttatacattgcatgagtctggttaacatgtattttctgtttcatttgccacaaactacacttgaaaaatttgttcaatactctttgagataattcaggggtttggtgtagttgtgacaacctattagaagtgctagatagtaagttccacgcaagaactgaagtaattgcaggcagaatgataaagaaacctcacccgatgagtatattcatttagcgtcttaaaaataggataaagcaggttgcacaatatatatgcacagggttgttcttttagtgtaaagcagtactatttctttctcaaataggaatcttgcttcctaaatattttatatagttgaagacattttttaaggtttactttatgaaatttttagcatgtactatgcctaccatgaattgatacatagtttggtattaggtacatcaagtttgatacattcact

SEQ ID NO: 309 - DNA, 510 bp, Glycine max
agctggccaatgccttggcccgagaggcttaccagtatacctccgagcttatccattgaatccgatgccagcgagatgttcttgaaggacaccaaacactggtcagaattagtttcagacgtttatagggatggtctttctatgaattggttaagtgttcgaaatataatggacatgaatgctggttatgcagggtaaagtatattcaattgtagattagctttattatgtcactcttctttgacatttatgtttaaggaatgctagcaacacattctttaaggcactttttattattggttaaaatttattaaaaactgtaaaatggtagaggttcattaattaagattacaataaatttcaaccgataaaagagactctgtactgctaacatttctctttacgttcacatatatgtttgtcattacataaactaaaatttgctcattaatctaataccttccaagttttctttgaactgataccatgcatttttttcccctcagattt

SEQ ID NO: 310 - DNA, 407 bp, Glycine max
tcactgctgtcctgtaatatatataatttttgtttcattgccaaaccaaccttcttcacgaccctttttttcatgaaaattatctttttgctacatcatctcttcaattaatgaagaggaaaggagaggttggactgctaagttcttatgaaagcataccttagctagtatttcttcattggaactttactctattacagcaaatggaagtagcttttgacattgatgtcatagtttgaaatctgagtatatattgatgacttctagtattaaaatgtgtatccctattcaactatgtttttgaaactgtcacaatgcagacaatctattgcttacggcggaccagaagtctgttaaacttgcagattttggtcttgcaagagaagaaactgtgactgaaatgatga

SEQ ID NO: 311 - DNA, 458 bp, Glycine max
acacaatttttttgttttctctattgtgattaaaccggttatgatctattttctaaaaatctaggtattttatcttttgcatgtgcagcatattaagtgtgcagtaatttactctctaatttgtgcctataacaaattgtggcctattagatcctagacttatctagttagcctcagggatttgaagttttgaactatttctgaaattgctagctaaggttctgtataaaatttttcattcacaatacttgtagatataggtgtctgttcttttggattgatgtgctcttctggttcagtgtatcttatgcacataattatttactttagaagtttaggctattgcatcatatgcttatatgattttgtgttggcgaggcattataattactgttatattgttttcataggtttatcctgtgtggaagtggtttgagaaacaagacgggattcgatct

SEQ ID NO: 312 - DNA, 444 bp, Glycine max
cgaatcccgtcttgtttctcaaaccacttccacacaggataaacctatgaaaacaatataacagaaactataatgcctcaccaacacaaaagcatataaacatatgaaacaatagcctaaatttctaaactagaaggttatgtgcatgagatacactgaaccagaagagcacatcaattgaaaagaatagacacctatatctattgtgaatgaagttttttatacaaaaccttagctagcaatttcagaaatagttcaaatccctgaggctaactagataagtcgaggatctaataggccacaatttgttataggcacaaatcagagggtaaattactgcatacttcatatgctgcatgtgcaaaagataaacatacctagatttttagaaaatagatcataactggtttaatcacaatagagaatacaaaacaaattgtgtgt

SEQ ID NO: 313 - DNA, 528 bp, Glycine max
tgcatgcctgcagtttcagacgcatgaatggcatcaattaattaatagaatagttattaagctcaagcatagaaattctttaactcattatgaaccatctgatcatggaatactgaccttcaagatgactatgacagccactacgactaaccaggacagaccataaacctgagagagaaaatgcatgttagaaaattcttctcttatatacacccctgatttttatttctttttcttttttgttcacccagggagggtggtaatggactaaattctcttttgaccaaggaactttgtctaaaatgtatattacaatatagtatggatagatgtgtgcagtcaaaccctgaggatgcagattcaaaagtttgatgtgaaaacgtgcaagtataagtaaattggcaagcaaaattaccgagatgctcttgtcacctctagcaacatgaagatgatatacaatcccatactgatagacaaagaaacgcagggcaagaatgacctcccaaatcctcccccaaatgccagtgt

SEQ ID NO: 314 - DNA, 421 bp, Glycine max
atcctgaaccttctgttcaagaacaagctctggccctagttcgcaattttgttgatggatgtgtgtactcagttgaacatgcttttgctgaagatagtatcatactagatgctgttggaagacaattaaaaaaatctacaaagattgaaattgggatacaggttggaacttggaattaattatttttgtaaataatgatgatatagatttccaaacttttcaaatatcattctgagttgtttatttattatgtcttttggttttattttccatgcaggggatgtatgttctcagcaatattgcaagtggcaatgaatttcataaggaagcagtaatgcagctactcttccctcaagatgagaatgtctctcactctttcttcgagcaatttttgcagagtcatgacagtcgcttacgcaca

SEQ ID NO: 315 - DNA, 372 bp, Glycine max
aaaaggctcttcctatgctatgagttatgcaaagaaaatgccatctcctcctgactaaattaacatgcaggtccacgcgctgtctctttagattaattgactgcaagggacaggcaaaatcaagccagcaaaaaagtgcatttaaaattaagaacaaaaaaaatgttacggaacaatacagaagttgaacaaaaaaactgatttttcagaagatttatttccaacctcataagtgagtttctcctttgcaagcacagccaaggaccctcttccattttctgtaaggaaactgaaaagacccattgctccatttctagggaagttctcaaccctaagccaacaggaaaaagaaaaacccttattgaggggcca

SEQ ID NO: 316 - DNA, 491 bp, Glycine max
ggtgctgtatttggaggcttttctgctgaagttattaattcagcaattcctggaaataccgctgttgctcagcccccagcatatgctctggtaagctgaatttactgtaagagtttttttttttttttttaactgcaaagataatttattaatgattaaaagtaccagtggtactacaggatacaatgaaagattgacttctgaagaaactaaacatacaaacaaccatcacaataacaaaacacaaaccctgcccttcctagaagcattatttaaatgctaaagacattgctgaggaccactggagaaaagggacactgaaatccctttcccaccccttcagccaggtccacataaggaaaagagtactatctgccagtttagaaatatcaaaggattgactatggaagatgatatcatttctgagcttccagattgaatttgtagctgccaaccaccagattttccatcttctatcagtagccaatgtt

SEQ ID NO: 317 - DNA, 509 bp, Glycine max
aaagtaaagagattccttaaatataaagataggtataaaataaaaaggaaacaaaaacaaactgtagttttcaattaaaaacgatagaagtaaaagcaaatgtccccatgcacattcaaatcacatggcagaatcaagaaaaagacataaaacaattttaggtacacatttgcttcaaaattctatgatatatatttaaagctaaagacaaattctatcaaaatgtaaatatataattataattaagtcatgcttaaaaaaagtccacttaaacatgtatataatcaataacaatgaatgggaagatttatgagttgtccgtcatttatcagttaagtggaagataatactgactaccaaattaggatttcaatgaacatggaacttgaactttcgatattcaaacatctttgcaaattaatactcacccttgaaaatgcattcttaattgatgatgatatatatatctctatctgatcacgatcactaattggcaaggactgtgtgct

SEQ ID NO: 318 - DNA, 494 bp, Glycine max
tggctgaagctgcattcctcattggactagaaaggaataggttggattaacttttcattataattttttccttaatttttcttccattttatgtattagttcgtgttaccttaagttaaaggtcattacttgtctttttaattatctgtttttcttactgtgatatcgtccgcatagtcagctatgcaccactctttgtaaacatgaataataggaagtaattcttctatactatatacactttggtttagtgtaaaaatttgatcattttttgctttcttattttaatttcatcattattatataccttattttattttatgataggtggacgccagatgcaattgcatttgactcttatcggcactatgaaactccccattattgggttcaatatctttttattccttcgagtggggtaactttgcttaattcaacactcatcagtttttctaataaatctcttgttgcatctgcaattgagtacacaaact

SEQ ID NO: 319 - DNA, 512 bp, Glycine max
atattaaggtgcaacaattagaaaaccagattggattaatatcaattttgagaaaaaagattatataccaataacgtaaaataattttatatttttatccaatcacaaatcaacattgtgataaatttgttaatttttacaaattaccttaaaaatcataccaaccatgatttgtgattagattaacaatgtaccataaactcatcaactatactataaatatactaaaatggagcctaatatgttgtttaatagaattaatacttgtccgggcttatagtttttcgaaacccttcaaatgcgcgatgacctcgagctgctttggccatgtgcccatcatagctgtaaatgaaaacatcactctctactgctatgatgtaatccaaagcagcaagttggttttggtgatccttaaagggtagaagctcttcttttgtggctaaagtggagtgtgtgagcaagtaacgatacttgcttcggagggacttcatttcatctttaccataaatcat

SEQ ID NO: 320 - DNA, 484 bp, Glycine max
acatattcttcattttaacattattgttccaaaacttcctaggtaggcggttcgtgtaggttcaccgtcactttttcctttgttattacaagattcccggtaattcattttgtgtacatggtcggtcactttttacgctgttaatacaagacttcttataaagaaaaccagatacttctgaagtacacagggttattgagaaaattatgttactatgcatgacaataattttaccaacttaccttgcatttcttggttaaaaaaaaaagaaaacccttaccttgtattgcaagagtttgcttgcatcatgacaaccacgtatgaagcatgtaaacttaaacatctcttctctaaattgcttttcttctctcttcatcttttcattcatcaaatcctttataccttttccctcgtaatatctttgttgggtcaaaagtattttatcgcccctgcatggccggcatcatttagattagattcttca

SEQ ID NO: 321 - DNA, 419 bp, Glycine max
tgaaaaagataaaagtggaaggtcaaggagaatgagcaaatagatagatgatgcagagataaagaggaattggacatgatacttattggaggcgatctaaccctctgttatgtaaaacagatataagaaaggaaggaagagaaatgggatgcaagtcgttttttttttgacgacgaaaacttgcggattattattgaatagaatcaaagttagccatagcttttgtacatctgctaaaagcaaagaagaaattaatgatttctaacaaattttaactaagtgtgagaggaagtgtcattaacattcctcttaaaattaaaagctaactgagccaaagattgagccactccatttgcattcctcttaacaaccggcaacaattcaacaaagatgtggattgcgtggcctgtgcaaagact

SEQ ID NO: 322 - DNA, 431 bp, Glycine max
atggtatgttcgtgctgctttctctatttattgagatgctggaggatgatttctttctcaacaggtgaatccttacacatatcagataactcgacaaaatttgtatcattgaagactttgaagcacactcttcctctgtcaggagcttatttattttacatggtatgcccttctttgccccttccaccctgaaaaagaggacaactgcttagttagtttttgtttattgtttttttattcacccctgtacttctccttagctagtcaccatggagtctgttcgtggagtaaatgttccaatgtacacaactcttaggaggaccacagtggtatttacaatgcttgtagagtttgttctggtggggcagagatatacaccttctgttattttcaggtaaattgctttttctccattggataatataatctgc

SEQ ID NO: 323 - DNA, 483 bp, Glycine max
aacctacattccgttcctcatgactggcacgaacatgcttgccaccattgctcaaaggcagtttattccttgctggaacttgagctggtcgtccctcttcaacatcagcaaaaatcctgtataagtttccttaattacaataacatgctttaatccaacattcaacaccatatacacacatcaccaagtgcaatataccagaatttcgtataggcatattctgagatgggggggctttagaaggagctggaagttccgcatcatcagataaaagaaatgagtaatctctagtattcttgattttctgggctttaactttcatctgtatgaatatgaaaaaaatcaattagagcacagaggttaagctacaacgtgacatgaaaaacttaacacagatagccacaagacctcgctgactttgggtgccagattatgagatgaagactttgatcctccactaggtactttattctggttcttctt

SEQ ID NO: 324 - DNA, 494 bp, Glycine max
ctttcagatagatttgctactgtattcccagtggctttccccttttttttctttgatcctttatcagctagcctgttggcaccaccatcactcgccatctcattggagtcattcaacctgcttgactcatgccctaattttgcttcgttggatacttgaaagtcaccagcagaccctgaaacacctaatgtctccaattctcgcacaacacgatcacagatgtcctagtagacgagggagagaaacatggcatcagtaaaccaacaataaaaaatagttgcatatagatattttttttattcaacagtaacttctacaattgattttggttcttaagcaatgagagaagatacgaaaccaaaatctgcacatagtaaaagaaattaatcacagaaagaaatataaagcccaaaagggtcatacatatgttcactaaaaaaaagggtcatacatattaacctaacatcttactccgttctgtacagtagatggca

SEQ ID NO: 325 - DNA, 450 bp, Glycine max
aagttatttggaacttccaaagttcagttccttattttaagagtctaagtgcctgtttggtataacatcttgtatgtacattaagatggaaaaaaaaaaacgtcaatagaagcctaaatacatagaagctataactgttagtaacttcttcgaatgcaaataaactttgatgcaatgtgaaaacaaacatgcacagagaaatttcaaaactacagatatagcagttacataatgcttaccagtgatcaggatagatatggacagaggtgaagtcaatatttgagattttggagttccttataaagtcagatccaagtctagatgcccaatcctcagggttcacagtcaatcttttcggatcattaggaccatagaaaccttcaagtccaacagtcacaagatggcgcttgtcaatcaatttgacaaaagctgacatttcctctatccaat

SEQ ID NO: 326 - DNA, 516 bp, Glycine max
acaaatttcatgtttactaaatttgttaacaccttttgacaaaaagagagcatcattgaacctaagagcacataacaaagcaaaaatacttacagcttcacctctaatgatatggtttgctgcattcaatatacaaaagttacttgtagcacaagctgtagagatagaataattagggcccatccatccctgcaatccataagagaaagcattcactgaaagcttgagataatgtggccaggaaaaggagaacaagcttataacaaaaaatcattgtgccccaagatcttttaaacataccagatccattgcaagcatggcagaacccatatttgttgttgcaaaaggtacacaaaaaggattcatcttcttatatgagattcttaaagcttcaatggcataacccatattttaattttgttgttctgcattgattcaagatcatggctaagttgaatactttttccatcagcaggtccttcatcagcactttccttgtcatgtgaactctgcaat

SEQ ID NO: 327 - DNA, 419 bp, Glycine max
gaattgaagcaattatgttatatattgtcaactatttagtagtattcactatttcactttgggcctcaagaaaaatgtagggcacgagtttaaattttaaatcgaaaacaaacctaaataagccccacattatacctaacacgcaaaacagtttaatttttttggaatttttacacagatttcctataaagaggggaacatattaaatgtaaggatccactataaaccaagcttaattattgtgttcaatatgagtagccaaagtaaaatttaaagccaagttgtttgactatgataaactaaattgaattctctggtctttattattgtatatatcagtcttgaggaattcaaagtaagcacgggtcgccatagttaggtatgaatacgaatgaagtcagaaaaatacaataacagct

SEQ ID NO: 328 - DNA, 558 bp, Glycine max
tactgagagtgaagttgcctcatacttagcatgacaacgctgcttccttcccacatgagttcttccttgagattatcaaactcttcatttgacatgatagcctttccctcataatagaatgcctgttgaatagaaaaaacaaaacctcaaaaaaaattaaaattcacatacacaaaaagttaatttctgttttctgcatgatcatcagttgatcacacgtaacatatataagtctattaagacatcagaaaaaatttaaaacttctggtgggggggggggggggggtggcatacttgcagtgcttggaggaattcctgctcaagttcaccaattgatttcttctcttttttgtctatgctacaatatgggagaattttactatcaacagtatttgaatcatcttcaaattcttcaactttccctgaaaggaaaaagaaaaaagaaaaaaaaaacaagttgacaaagagaggagcttttgttagaagttggccaacgaagatgattcttttagagatatgatgttattgttaagacctgttgtctgcaggcatgcaagc

SEQ ID NO: 329 - DNA, 471 bp, Glycine max
gggtaaggttctgtgcccacactgattataattataattaactaaataaaccaaaacccattaaacctttatcatcatccaccactttaaaaacaaacaaaaacaattcagtagcatttaatttctagcactttcattggaattagaatacaactagtagtagaattttcatagctatagagagagaggttattgggttttagtagttcttacttgagggcttggtgattggttcttttccatgttcccctttccggggattcttctcttttccatgaattttcaaaatatctttttgggctttgggctttgggctttgggctttgctttctcttgtggtctctctctctctctctgaagcatgtgggttttatgcttttccctctggaggaaatgtaaaacatcaccacactgctgagataaagcctgagcctgactttttgagatgtggtttctgagcctcagatcaca

SEQ ID NO: 330 - DNA, 505 bp, Glycine max
tgaaagtagttccacaagcaatacttttgacatctttgtctttcagagcttctactaatgttggggtatttctatcatctgtatcgccatggcctaaacggccatttgcacccttcccccaagtgtaaacttcagtccttgaagttaaaacggcaacatgatatgccccacaagctatctcctccacaaaactctctgacaatttccattcaacacggattggtagcttcccatcagcttgaggaattcctaactggccatagactggactacccattgtatagacatggcctttagtggtaagtgcaacagtgagactatgaccacaagcaacttgacaaaaattgggtttaacaagggcaacacgggttggaacaagttttgcttccttatcaccatgccctagtcgacctttgtctccatcaccccaagtaaacagctcccccgaagagcagttgctggaacttgaatttccaaccatgacttccacaactgcaggcatgca

SEQ ID NO: 331 - DNA, 488 bp, Glycine max
catcttactaattttgaatgcttagggtctacgattttatatgtcaatatggtatttctgacagttgattaattattaacatttaatacgagcaaagtgcaacgccagtaccacaactacagtgctattaaacttgactacacctttttattatatgaacagatagaaattgattccaacatgatcaatttcaccgggtggacgagctaggatgagactaactgcccatattgacaagaaaagtggtacaaagaatatgatttattgttaagaccccttaatatacatatacattagcaactataaaatagaaactaaaaaaaaaggaagaaaaaaaagacagaagtcaataaagaatctaagacataataaacatagcatattttacatagacgattcaaatccaatcagaaagtggccattctcttcatctcttggaaccttcagcgtctacattcagcaggaagaccttgtgggaatcgcttgag

SEQ ID NO: 332 - DNA, 528 bp, Glycine max
aatgtttgctccatctaaaatggatgttaaattggagacaagatcagagaaattatatgctaattcaatcctttcattctactgataagccttcagatattttgaggaagatatgatgatactcgagccatttggattacttgataatcaagccggttttgccaatttatggattgttgtgcaccaagttctggataccaagacttgaatttgagaatgcaacagacatcattcttctgctttcccattctgatctttttttttcctgttcaacactgattctgcctttctctctcgattcctttcttttcttcacttcctctcttgtcccatactaacttgacttctatttagctttctcaaccgatcagtgagaatgatgtcacaaatggatccatatgctaacaaatcattttgtcctattagtttgacatttttcaaattaaagtagtcgagaagaataatttactataaaataaatcatcttagttagcaattgtccagacaaagcactagggtaactttctt

SEQ ID NO: 333 - DNA, 406 bp, Glycine max
agtttcgtttaggaggagggtgggttaagggtgaaaaggacatttactcaggtcatgcataaaacaaaaacaaaaaaactaccccccagcagcaacgcaccaacaccctcctctttctttctcttgtcaaaagacatcctcttctcttgcccacccacccacaccagagatgaccttttctccgggcgactgccataacagtgcaggctgctcttctttcttccccacattccacctgtttccaaggtaattaatatgacaccatagcacctcagagcagccgctgggccccgcagccacatccttgcatggcattttgggggtcaaagctgtcacaaccaaattgcaagcttttcacgtgcaatcacagcacaattgtgatgtgtttcaaaacccaattttgccc

SEQ ID NO: 334 - DNA, 395 bp, Glycine max
agctccctgagaacctcatattctgcatcaaaaacccatcccgctgccttcaacaacccgttatgaacataaccaccgtgaaattccgcctgtcccagcttgttatcaagcaaaactatataatcactttccttccccaaattgagtccactaacagccagtatgatttcagcatgatcatgatcaaggtatatcatgtatggagtaacgcgaccttggttatcgttgtagtctttacgcaagataacccaatctggattaatgccataacctccttggggagcccattgagggttacgaatatcatcttcgtagacggctaagattagccgacagatccgaggcacaggctcaaattcttgtgcagtagccaggccccaattttcactctcata

SEQ ID NO: 335 - DNA, 420 bp, Glycine max
aagatccaggctttccaacagatagagggatggattcatcaatatacaactttgccatcctaatggaatcaacaacgctgtttccccgaagccgtgcattgttttgttgaactgggaaaccctcatccacaacaacaggactaatgttcctgctactgccacctgtttgcacctcccttttttgtgccaaattaatatctttgttggaagagcctgaggggtaaaatggtggggatgctgaattcaaatttgaagcaaccacttgatttttaacaggcacagagccagattctaccttggaagcatgtgtggaagtcctctccgaactaacaaaacaatacttatcagaatgtcttgacattatatcatgtgcccagcaaattttaaaaaatgaagcctatacttactgtttattttgca

SEQ ID NO: 336 - DNA, 405 bp, Glycine max
aagcaagagctttatattaagtctccccttgctcaattatttaacttgcttttatataacctagatacactaattcaactataatgtgtgggaaaaaaaaaaatccttttgtccagggctaggtgcagtcatgacttggactctaggattaggtctttcatgcttactggggttagtaattgggattgcagtgcgcccttacatcatccctaatgtaagttcctctcaacttgtgaagattttatattgccaaagagtaaaaattacttacaccttgtccaactgaactgtgtagacagaaaggtaccaatccttgccgttacatcgagacatggaagcgttgcctaaccagtctggggaagctagctgccgatgctgttcttcagcaccaaaagcgcaattgct

SEQ ID NO: 337 - DNA, 482 bp, Glycine max
aggaagccaagcatatccagaaattaaatcaagatattagaattgtttactcctacagaaagtaacgggaaaaaaaaaaaaaagcagaccaactatagcaactcacaactctgctgatcattgcatttgttcgctacataataaacattgacgaccctaatgactaatatcatattctgagacaaattaattttccactaatacataaacaaacagcacatcaataaacaagcaattatatagtaggattttcatgacaagaaaaaaaaaattgagtaagattataggtacaagtgttaatgtttttactctaacctcaactatgtttataaagtaagattatcatatgaaaaaaaatatataaataaaaacgagtaagattatagatacatgagatggatcaaattggacatgtggcataatataaaatatcatgcagataaagaaagagtgatcttgtcaggaaaggcaacctagaaatt

SEQ ID NO: 338 - DNA, 478 bp, Glycine max
cacttgagcctctcctgattagttgaatccaactcttctgagagccaagcattgttggaagaggaagggttgtttgagccgcaagatgatgttccagaggacacagtgcaggcattggcattgaagtttctgtatgaagctgtgaaaggagcttgagtccaatctgtcttgacaaggcctccccttgtggcccaatcatctgcattccacagacttgagtatatcctcattgcctggttcttggggaatggaacaccctttgactccatgttcttgaactccctaattggacttccatccaccgagaagctgaaacaaaattaacaaacaaatttatttagttgcttccagcacaagttataagaaaaaaaatgcacattgaattaattttataattatttatatatatcgaggattgcatactaagttagaaacctacacaatacgttgggggttccagaggatggaataggtgtga

SEQ ID NO: 339 - DNA, 468 bp, Glycine max
acaaaattagctagagagaatctattttggcaaaacttcaattctcgttagaaaataaatagcaaaacagttaataaactgcataaaagttttgttcaacaatttgagtcttggccaaactatttaactacaccagagcttggaattattgaggtactatagcaccacacactaccacttcttatccaagttctatagttcaacaagtcacattatccaagttctatttaactaccaactctgtggtagatccaccactgctgttccttctttcagctgcctcctcttgcctccttttaaagtacatgcaatagacataagagcagaagccccaaatgcacaaaacagtggccacaatcttaaaaccattgaaggcatcatggtacacaaaccaccctgccaacacattcagggacaacaaagcattagcagaaacccctccagttactgaagatgtgagaaagacca

SEQ ID NO: 340 - DNA, 485 bp, Glycine max
aagggtcttcataagcaaggcaagcatcacccttattgtttccattatcatcagtgtaaatctttatgttccaaggccactgatctttatagcccctcttctgctttattcttccaacctaaatggttaaaaatatgcaacaaaatcatggcatgttgtgcctatttcaagtaagagaagagaaaaataatcatatttccctagcacaagtaaagcatttcttatataagcacgatcagagatataacccataaaaaatgtacttacaaattaaaaaaaaaaaacatgtgaatttactcagcattgcattcatatataaaatattatcaatatgcaaaactctaatgtaaaaagatcaggatattacttgtccaatgcctccaaaaagttccctcaattcttcaatagtcacatctggtggtaggtttgagatgtagattctagagttgtcacatgtatcatcacaattctcatcacactgtctc

SEQ ID NO: 341 - DNA, 460 bp, Glycine max
agtaaaacagagtttagaaactatcgctggcaaattgcaagtgccgctttctatggtttatgttaactgtgtacatggggaagaatcaaatttgaatacttcaatgctccaattgcaagttctaatattgagcaacaaagccaaagccatattttttaatgcaagttcaatagattatcatttgtcataacaactatcagtaactaaatgtaactaaaaggactaagccagagaatttaatagccattaatatgcacctgaaaagatctatgttaagatcggacacatcctcagtccaccaatcctttgggattgaatgatgctgttttctggtataactgggcctggtgtaggtgtaggaccaattgacctacacataatcatcactgttatggaaaaaaaatgccttacttttgtcgaacaatgcatcattaagttgagcctccaaactctgtatatt

SEQ ID NO: 342 - DNA, 549 bp, Glycine max
aaggagttattgcaatattgctaaatgctaatagtttagcacccattcaacaaatatggacctcaagtgataaacagtttttcattctaatgataataaaagaactaacattgagagtagatggtctccttaactaaatttggatcattgaaccttacaattagaaatttgagctttctatttgcaattttattttattattaataacaatatacaagaacaagaagcttaaagaattctgagggaaactcaatcaaattataccacgcaccatagacaaatgtctaattcagattgacttgatctcctcccaccaaaacaacaagatttctacaaaagctgtgaaggataaatacctggagaaacagacatgcaggatactggctttgtagaagctttaaatttctccaacaggtttcctgtcatgaaatctatcaaacataccatcccatctgcaccagccgtataaatggttgacacatttgctgaagatgcaatggctctcacacctctgcagtgaaaatattctggaaaacttaaatcttcaca

SEQ ID NO: 343 - DNA, 534 bp, Glycine max
aattgacacaaaggcccaaaataccttgatgacaaatgatcacctccttttattttttcatttaaatttctatgaaaccctaatgtaatagtaagaaattgttaatttgttactggaagtggcatgcatctttttttaaatactctttccttggcaaccctaatctaattctaacttggaaccagctgagttatgattgtgataaatatttctgttccatactctttccttgacaacccaatacccagtccagtatatgtgataaacaagactattgaagaagatagatttgacattccagatgtaccaatggaggaggattaatttattgtggtatggttctgatctgcctctagatttttatttattttttaaatagaaatccttttctaggtttgatgcatttactgttacaaattcatttttatggagtatttgtgttaccctgtaaagttgatagtgattgaccgttgtggatgattgttgaatgaatctgaatggttggtagcatagttaacaatgcccaatagtgct

SEQ ID NO: 344 - DNA, 495 bp, Glycine max
caaaattgttaattgtttatcctacttgttaatctcaggttgttttgccaactgtttttgtgcttgctattgttcattaactaaaaatgtaattgcagctttcattccaagaatggacacaacaagtgcaagatatcttgaacacaaaaaagtttggggatattgcattcagagacaaggatttcaaaaatgcaattgagtattactctaaggtagattctctgtttcacctttttttaactggttttggcttattggttgcctcaaaatgttcataatctcaatatgttcttaaggtatattcctattctgaagtcatagtctgagccctttatttctttgcattaagcagttggtggttatgatgtctgttccttctgctactgtgtttgcaaggagagccttctcctacttgatgaacgatcaagcagaactggcattaagggatgccatgcaagcacaggtatgcataccggattggccaactgcattcta

SEQ ID NO: 345 - DNA, 446 bp, Glycine max
atagtgatttttttgagcccacataatatgtctactattgtgtgatttgtgtcttcatcttgtgttttctcttttgctttgtaaacttgtaaaatgcagaagtgtcaagtttttcaaaatcttggatccttacttgcaacctggatgatattttacagattaaaatacataggacctgtccaggcgagttagatgatgtggtgaagcagttggaagaagcaactggttcagtggctgttggtcagattggtcgaaccctcatcatatacaggcccagtctctccaaaatgaaggcagaagaaaagaagaaacaagctcggaaccttattcttaaaaaacaagtcaaacaaagactagttaacaaggtaaaagttacgtctttatttatgttgttgtgaataaactattgtgttctattgctatgtttctctaatggtcttgtgaaa

SEQ ID NO: 346 - DNA, 428 bp, Glycine max
aaacaatgagtttattgtaaatgttagaatattaattggacattctcttaagaattaagcagtgaaacaatgatatggtaaaatctcacaggaaatcctgattgttttactctaaacatagttgtttttctaacagaacttctccactcaaattgcttttgattatcatggtttgtgagtaatcaagacatcaaatattttatccatagcaaggaaaacggaatccaccacagccaagcctcatgttgcaattaatttaaaaaatatagaaagaaatgttatgagcatgatgaataagaatacaacggtgaaagagatcggagaacaatgcataccctcattcttcttatcagttgctgatggtcatctttagttggattccgaatgagagtagggagtgacagtaaactctctctatacctagcaga

SEQ ID NO: 347 - DNA, 439 bp, Glycine max
atcaataaaccagaagaacattccttctgttctttgacccaaacacctaactctccctatctctttctctctacttagctaatactgttcatagcagaggattcctaacacatgctgatacctcattgattacatgatttattgctttccgatgttatgtgtttgttctatgaatctgtacttgtatgtgtgtattcttaatcagtttttccttttatgatattgttgttgtgtttccattggacagattcgtttggaaaataaagttgcggttcacaatggtattgtttgcttaaatcctaaagtattgactgtattaggaggtgttgttcaatcgctctatgaagaatgggagatgaaccaaaaatattctggattctcccgatcatctttaagaaagctagagaatcgagatacaggtggtcctccacagtttgtg

SEQ ID NO: 348 - DNA, 519 bp, Glycine max
ttggtgtggctgttgggatctgcggtatgcaacttgtcaggaatataaccaccaatcctgaagtcaggtatatatggatctttcatatatgtatacaagttgttggtttggacttcatttgatttttcattgttcagattcaatgtttccttgatcgaaatacaattccatatgtaaattattgttagacatgtagctatatatatgtttaattgctgcaccataatttttgaaaacttgcataattcttttctttggatctattcctcatattattgttttagggtggatgaaacaatttaatgatatctagatctactttatgttattttttcatcatcaacaatagaactacttgaatcaatgcatcaaaaaatgtattagggacgaagattgaaattgaagctaggtacatagtgcaaaaatatttgcttattttggaactggtctgatctgtgattattgaatttgattatgctctcagggtgaccaaacagaacagagctgcaggcatgcaag

SEQ ID NO: 349 - DNA, 405 bp, Glycine max
cttaatctgctcagttgtagcagctgctatcgcagccccacctgttgctgctgcgatagctgctgctacgtcgatcccaattggatccatgggaaaatggattgacttcctctggaggaactatgaaaatgcattgaaggggcaaaaggaagtgattagctcaatgcaggctggaacatatgttgccataaaggacttagacaacattagggttctcattgataggcttgaaattgagattgagtctctattgcataatgtagattttgccattgaggaagaagctgtgaaggttgcaatagaggagatcaagaagaagcttggagtgtttatgaagaatgttgaagatttggcagttcaagctgatatgtgtagccgtgacattaggagggcaaggactgtggt

SEQ ID NO: 350 - DNA, 855 bp, Glycine max
tattccttaactgcacaaatgcatatattaccagagaagtaattagtttcacgccaatttccgtacacttcaaacccaagcaccatatacatgtatttgtcacatgaagcatcgatagtacttaacataggtatggcattggcaaatcattaagtaagaacaagctctaggtatggtacaactcatgcattgtcatacatgaaaatccttcaattacatgtgcacaactctgaaagtaatatttagatacaacaacaataacggcaacaaaaaaaaaatgagaaactgatgcataccacagtactcctattagcctcatccatcaatgatgcaccggcaagcatttctctaatatcaatgccctaaatcaaagagcattataagaaaacacaaaatgtcaatgtataaataataaatagtaaataatgaatttacatttatagccacttacctgaagggctgctggaagcaggccaactgcagatctctaagagcagcacggaaaccattacggaatgcgtgaactacaaacattgtgtcacttataatacgtacatcagttttttccatgtcttctggtgggggacatcctaatttccccccagttatatcatataacaggtttgaggcaaattcagaactattgaccagcaactcaaccaacttaggataattaacctgatcatttgcacgttttccagcaggaggtcgccgaggaacaccagaatcaatagctacaatgttaaagtcgggagacagtgattctcccgatgtttgaaagctcatgtcagcacatcttggggattctgtgatgtccgagagatcagaagattggggatatcaagccgggattat

SEQ ID NO: 351 - DNA, 482 bp, Glycine max
ggcctgcttccagcatcccttcaggtaagtggccataaatgtaaagtcattatttattatttatacattgacatttcatgttttcttataatgctctttgatttagggcattgatattagagaaatgcttgccggtgcatcattgatggatgaggctaatagaagtactgtggtatacatcagtttctcaccattttttttttgttgtcagcttgtcgctgttattgttgttgttgttgtatctaaatatttctttcagagttgtgcactagtaattgaaggattttcatgtatgataatgcatgagttgtaccatacttagagcttcttcatacttcatgatttgccaatgccataccttaagtactatcgacgcttcatgtgacaaatacatgtatgtggtgcttgggctttaagtgtatggaaataggcgtgaaactaattacatctccagtaatatatgcatttttgcagttaaggaa

SEQ ID NO: 352 - DNA, 534 bp, Glycine max
cttgcatgcctgcaggagactttgagaaagcacacttcagttgtttacccgatataggagagatacaagttaaagggttaatggtaagtactttactttctgtttagtatctatgcatccttttatgaatttctgcaccaatgagtttttgctcaagttactgcacattctcctaggtgaagcgaaaatcatgcttctactacctgcctgattcgttccctatacagtatgctttccctgcaatcagaggaacatggtttcttcatgtggaagtgaagcatttaaagcgtttgcgcattccgtgtccacctggtgatgcagctgttctttcaaaacataaggacttaaagacctgcaatggtgaggataaggcaaaatgcaacagtgaggaaaataaaatggaagggttccaaccccgttcatgttttgcagaagagcatgaaactactaatcatgtttcaaagaagctgaacaaaaagagaatttctaatgaaaaccacacgcagaatgaagccactggaatgccagaaagat

SEQ ID NO: 353 - DNA, 458 bp, Glycine max
aatttggagtcaaacataaccgaaaatacaaagcctacatctattaatgttgttaactctagcaacaccagacaaaaaatcacacaacaagctcaccaacttcaccaaaaaaaaaaggaacaggctcaccaaatgcagataaccttggcaagctcggaaacatttagatgaagaagaaaaagtaagcacagagcacagaactacagtcacagaaatcctatttcttgagcatggttaataaaaaatgattggaaatacaacaaaccaagagcacaaaagtttttcagaaagaggtctgtataatatgcaaagagacaacactcatttatacatgaaagtaagtgtcttagagctagatagttaacgaacatacatggaaatcaacaaattgaaaggaaaaagccctttcaattctgtttttctaagggtaaaaaaattgataagatactctgatcaga

SEQ ID NO: 354 - DNA, 410 bp, Glycine max
tattttttattgtttggtttgctatatgaactttcttgagcttgcttgaaatctcttttattttgaaactagtatacaaacttccatacaatacatattgtctgtaataaattgatgatgttttctattttttccctaaaaaggatatttttagacttatagttattatataaacatcagtcaatgagatgcttgacaactcataccttgatcttttaaaatactcattggagaaggtcaatactaagtcctcccactgcttggatatggctagagaaattatttccttatctgagtttaagctaattttttggatgcttattgtgccacactgccaccacttacattttagaacttttagtaaatattcgtatttttacactgaagctctttatatgtgctctataata

SEQ ID NO: 355 - DNA, 408 bp, Glycine max
tggccaaatccgggtactacattaagcactccatctggaattccagccttcaaaacataaaagcaaggaaaatcaatcaacttagactttagtagataacttgccaatgtcaatttatgtttgataagaaaatgaaccatttcttgaagacacataccagcttagcaagatgagcataaaacaaggccgagagaggtgtttgttcagcaggcttgaggaccattgtgcaaccagcagccaaggaaggactcaccttggcaacaaacatggtgctggggaaattccacggaataatgtgtcctacaacaccaattggttctaacaaagtatatgcatggaactccctagacgcttttaagacctccccatgaattttatccgcagcaccggcatagtaacgaatagtat

SEQ ID NO: 356 - DNA, 498 bp, Glycine max
aaagaggctatggatagagctgaagctaaatttaggcatgcaaagggggttagggagagagagaatacaaaagcttctaaaagcaaggaacctgtgcaattgggaaaagatggaagagcggtgtcagaggacagaggaaaacaggaaaggttagaccatgaatggcagcaaaaggagagagaggaaaaggagcaaagaagatgtgagaaggaaagggaggagaaagaaagagaacaacagagacttgagagagaaagagaaagggcaagacaggctgtggaaagagctactagagaagctcgtgagagagcagctgctgaagctcgccaaagagctgagagggctgctgttgagaaagctaatgcagaagctagaaagcgtgctgaaaggaccgcagttcagagggcacaagctgaagcccgtgaaagggctgctactgaggcaaaggaaagggccgaaaaggcttccgcggaggcaaaggaaagggaagtgcgggaa

SEQ ID NO: 357 - DNA, 431 bp, Glycine max
aaattaatttattaatgtcttattgtatgttggaacagataaaatacaatatcataaacaattcaagcaagcaaaaatagtaagaacagggttaaattaacgaatgaaattcctgaggaaacatgagtagcagtgattattgagtagggaaacaaacaaatatggctgtttgagatggaaaggatcatttcaacttcatctccagatatagtgttatatatatatatatatatatatatatatatatatatatatatatatatatatatatacatgaggagagggagaggcaaaccgagagagtgaaagtgagcaacgaagttagtacctgaattgagagaactaagatcaagagccatcacgatgatctctgaatcaagatactctgacactatgcgcgctttcgtgtcttccgcagctttcatgctagg

SEQ ID NO: 358 - DNA, 496 bp, Glycine max
ttaaaggagtgagctattaccttcacagaacgtcttgaagttgttgcagatcttgatgaaccccgttttacaacacgcttgcgctttgttcccttactgggctgataatagttaaaaataaataatatgaatattgtgaccaaaacatagttatctaggtaaaaagaaattaccacaacatacggaaaaaaaattgaaacacaaaagaataaagaaaaccttgtctttttccgcaagtaacacagttgtggttgcatgaggggcaactaaaaaatctataagcttagcaataatatcttcctgcataagtagaaatctataagcaataatagggctgtgttaaatggtattagtcaaaacacatcaataatgcttgaccaacacaccttccttgatgttgccttgttaattgttatgtcaagcacatcacagaattccagtaacttctctttattacacttgtcaagtttttcttttactttaatcctttgctttt

SEQ ID NO: 359 - DNA, 386 bp, Glycine max
agaaattaacattttcaaaggaagtaatttatacacatggttaaaataagacatactttttcactgagggcggactggataagcaacacatcacttaatacttgactcactatgtctccattattcccataagtatcaaaaaaactcatgtcttgattaagtagtacttgaacatattttgacctgatgacagcagtctgccgttctcccgtcaaaatccaacatgaaacctctatttaacaggaggggaaaagcattagaattgcacaagacttaaatgcaacatctcataaagcacacttatcattattaatttcaataaacatttaacttaccaatccaaccagcaacaaaaactcccgcagcaatataaacaatagttaaag

SEQ ID NO: 360 - DNA, 395 bp, Glycine max
aaaaaaaaaaaaaagacagaataaaagaagctcaaaatggcaagcttaccacttacaagcactatccaatgtgtcaaattacagaataccaatactattaaaagtatctaaaaacatagagtagaatatctttctaccttcaaaacacaaagatcgcttttatcatcccaagatattcttgagtggtcttctttctgaaaccatgaaacaagcatttaaatagaattaattacttccatgctcatcttataaaggagcacaccgtttaatggaatttaaaaggcttacactatcacttttcagaatcttgtttattataaattcttcaatttcactctctctagtttcaaatataggcattgccgtctgtgctatacaccccagagactgcaata

SEQ ID NO: 361 - DNA, 543 bp, Glycine max
aaggccttggagatacatggaacttcagcattctattaaaagtatcttaattgcttaacatgctagttccatcacaagtactgctccatccatcaaggattgtttattcagtacctagtcttgcagcaatgaaaactattgtgtcactgacaattctttcaagagatgcagatgggcaagatgttagcttcgtcatattaatttgccaggctctgtaagatgtggaatgacttgtgatttacatactgcatacgacttcacttcaaaggatagatttacttttttgacaatatatacatggcatgctttattcgtgaagctagttcattcattcttcttggttttaatcaaatggtctcaactctcatagtacaagttttatgcatattaccagctagtgctgactggtgtggcaacttaagagggtcttagattcttttaattgacagttaacactcgcatgcatgcacacgcacactggcatattaaaagcatgatctcttaatcttgttcatttgcgggaattaacctttctaatttgta

SEQ ID NO: 362 - DNA, 406 bp, Glycine max
ggcagagtagaatgacaagtgatcagtacctaatttatttgtatgtgtcatgtgcaacaatctttattgtataaagttaaataacatcaaacaagaaataaacaatcattacaatttttttatgcatcggaagaaattgatattgctacttagaccagcaatgttttcttccaacaacaataataataaagtcttattctactaagtgaagttagctacataaatcacaccatcctcacctcacataggacccatatcttgagtcaatttcttactaaaataattaattccacaatcttcaataaaccacatatcttcatgagttgtatgaagagagttaaaaatcaatttgaaaacttgtttctgacataaattgacaaaatataaatacaggctacttatacaa

SEQ ID NO: 363 - DNA, 514 bp, Glycine max
taacaacctaatccaacagtgtcactactggataattaaattcagcacaattcttttattttggtgttctagcaagcactgttgatcaaacaaaaaattactaaatttatgggaactgtcaacggttatgatgaatcttatggagaaaagagagagaacaagaggcatggaatgaattccgcgtgttgactaacacaacagagcagatatttatatcaagagtcataaatacaaggataattatataacaattacaagaatatacagttactctaattaacacaattacataatgtataatctgctctattcctattattacattatttctaagaaatctgttcccaagaataaacttaaaaatcaatagatgccactagcattcaaagtccaacctgccaactcttcatcaagttttgatctattctttgatgtcttgtcacaatcaaccatgactccctggtcggcgggatcaatggcagtgcatcgaacataaagaaagaacacagagaga

SEQ ID NO: 364 - DNA, 549 bp, Glycine max
ccggtaagttatggaattctttttattgtcacgctgccattagatggttagcagccacctgaatatttcagatcttctctaacaatttatttcaaattcagatgaaaatctacgaaaggaacctcgtgttgtggaactcaggaaccaggtgtgatcataatcctatgatttgtgtggttcttttttaaattttgtacataagtatggattttctccatcctcctatggaaacagtataaaataatttgtacaaccgagttggctgtggctcaagagaaactgaatgagcttgagaagcagaaagaggaaatgttgaagttgaattccccactataccttctccaatggattcaaggtatggcttcacatgatgatttacagtcataaacacttaattattataatcacaaaattttttcattgttatgacttgcttgttttcgtaatgtcttatgaaatgaatttgcagaggctatgaataatacagaagaggaatctgaaaatctgcatcagcaagtccttgacagagagattgaccttggagctttt

SEQ ID NO: 365 - DNA, 410 bp, Glycine max
atggacaaccgagccttcaatatgtacttcatattcagaaataaatcagtgcaagaaaacaaaaagactagaaaagagacaattaaaggatcatttctctttctcacaattttgtcacaaagtactcaacaagacatagcttgtagacaattttcatggatgaaggtctcttaaatctagtacctattcggctattccacatgtcagaccatcacccaacactagaaaagagaacataaaacagcaaccggaaataaacaaaataagagttcaggatttttaatgaaaaactacaattctcctccctcatcaacattgaaaaaaataaataatacagaagctgaagcaaagcaaggtagccaacagctctagtctttcttttgacaatatacacaaagatgtagatactt

SEQ ID NO: 366 - DNA, 481 bp, Glycine max
aagatctgtcttcttctcaagtgtaaccccattattagtgggcactccaacatcataccactggccacaccgtatatctagttcacgtgtgattgcaagtgtcatgataaatatagacaatagcacagcatcagaaaataggataactcaataaatattatatattaaaaagaaaattataaatatcaaaaggtaccattgtcaatagcaaagcgaacatgataaggaacatcatattcacgaacatcggttatgcaatctagaaaatcttgaggtctatgttctctgctaagcaacaagcaagctaggatcagatcagataaaaagaaaagtttatttaactaaaattatccgagataaaaaaaaatggcattggatcattaaaggaaataaaatgtcaatgtgatacttcaatctaaataattttctgtcccatgaaaattgatataccttctttctgttgacacggacaaaaaagctt

SEQ ID NO: 367 - DNA, 446 bp, Glycine max
attgaatgtgtgggggcattatgaacataaatgcatcaacaaacacaccaatctccaatgcaattaacttgcactaatgtgatacaccaaacaacatagattgatgagtccaaaacaagcacttacctttcctgatatcttgaacatttcccccaacacagaagccaacaaagaagacttgcctgagccaactgttcccacaacagcagcatggtcccctttcttgattttcatctcttcaactctcagagccacattcccatctgcatcatcccaggagaattgtccgtccttgatctccaccgccgtgtcaccgtcgcagccctccactctctccactgctccctcatccatttccttgctcgtcaagaactcgttcagcctcccgagagaaatcatcgcttgtgaaatcacgatgagagcttgagggaaggtcctcaccggct

SEQ ID NO: 368 - DNA, 500 bp, Glycine max
tatcagggttccaattataacctgaccatgaagggcattgacactattcctttccattaagaatttcaagacctatggatcaaagaagaatgaaaacaaaataacataacagtaatgaggaaagaatgataacatttagaaaagaagtgatcatagaaagagcttagtactttagatttttcatctacaagaaaacttcactcaacttctagtgcattgcacacgaatatctcctcaatcaaacactaaatagaactgtatccttcataacattctagccataattttcatttcctttttctgatgaaataaatcttactagaggattgcaatattcacatcagcaatttaattaacacttagctgaaacactatgacggctgtacagaatatcgaaatttgaatcaccaaatctaatacaagtgcaaccaggcaatgattgcaattattaaagtgcaggcataagttacttaaaatactatatgcctgcaggcatgcaa

SEQ ID NO: 369 - DNA, 484 bp, Glycine max
gagatcgggttccataataggatattttataattcaaaatccaaccagctgattaagtacatgccaactagggagttgataccaataaaatataagaattatcatacaaatttaagagtcaaggaaaaatggagcaacattttctactggacaaaataactgaaacagaaggcaatggaatgatggtgtacctgtaccaaaataaaaggtaaagatacacctccactgggaggatttcctgagctatataactgctcatttcgttgaataaggttctgaagacctacgaacttgacataataatacaagcaattagcaattagcaattagcaattagcaaatagaagctaaacataacaaaagataagtaatttgtcaggttcttcaacaagtccaaatttcaaatggagagaaccaactccacaatttcattcccaaattaaatattttagacagtggacaggacttacttgctcctcaagct

SEQ ID NO: 370 - DNA, 421 bp, Glycine max
aggcatcaatcagaaatttaccaccttctgcccttggtgaccctagtaactttgatgctatgacttttttaaatgcaaagaagggattgcccatggaggcagttgttgagcaggttcgtgatggcagtacactccgaatctatttgctcccggagtttcagtttgtccaagtttttgttgctggaattcaggtatgtgtcaaattctgttgctattgctatttgctaccatctttattcgcacatgcagctaattgttttacctttaccgcagtctccacaaatgggaaggagagctgcacctgaaagtgttgttgaaccagagttgacatctgatgacaccaatggagatgttcctggggaacctcgagccccacttacatctgcacaaaggcttgcagtttcaacatctgctgctgaaa

SEQ ID NO: 371 - DNA, 468 bp, Glycine max
atccattcacaaaccttttcaatctctggcttactttggtggctccaaattgaagtaaagattgaggaatctgcataaaactcattaagcttttcaaaattagaggactagtacatgttaattaagaagaacaaattaaacacatgaattttttttatcgacaaatattaatcattaatttgttagtaagaggatcgaactgcgcgatatttttcttgttccgttaaattagacacatgaattaatatgaagggaaaattaaacaacaacatgatacatacctcagcatgcacaacatgaagcatcgagtctccagcaagtgaggaattggcacttctaacatcaatgttctcttcatgcagcattcgaatgatctcagagaaaatgaactggtggtctaatccacaagtaagaacaacttgtaaagaagaacccacttcgtgaatctcaagttgtggcgattttggg

SEQ ID NO: 372 - DNA, 496 bp, Glycine max
tgaaaaggtgtcacgtgaatccggagtacgaagcttgggaagttcaagaccaaacgctccttgtttggctccaatccattctttcaaagtttgttctctcacatggctcgaatcactcctatcaggtttgggagaagaatcacgagcatttcagccttcacaccaaatcgatggatgaatactaccttcgtaagatcaaaggttacgttgatgaactcgccggtgttgggagttccgattcgccatgaggaatatgttgacacacttctggaaggtctcccgtctgattatgcgccagtgatctcggtgatcgaaagcaaaaaacggactttgtccaatgctgaaattgaagctctgctttacggtcacaagactcgtcttgttcactacaacagagacactcaagtgctcacttctccatccttgaattacactcaaggttatttgcactcaaattcatacaaatctggtgattctagcggctctaggggagtgt

SEQ ID NO: 373 - DNA, 476 bp, Glycine max
tttgcatgcctgcagcagaccaacatagagttctacataagaggtcaattattgatcatagatggacaaaattacatacagacacaagcccccatgtacaacatatttatgttggcaaatcaggtcacaacgataaatgcatcccagtaatctgtaaacatcattttaaaaaacaaagaaaaaagcaatgattgatcaaaacagaagtatgggagcaaatagatgaagaaaacatacgtagaaataacagtatcaatatgagaagagaccagaatagattgcccccttgcttcagatacatatttcggcaagattcttactacaacatgatttagatccgaataaacaagtgttctccctgaaaataagccactgcgcagatgatttgcaccagactttgcatgaaaaagatccacttcaacatctacctcccagagagctgttttcttaatattttcacatgctgtcaagacata

SEQ ID NO: 374 - DNA, 955 bp, Glycine max
tgataaaccaatatcatcttacaatgagaggatggccaaagttttgttagctgaatatattaactatatcctgatttctgtctcaggttttataattcgtgaatcaagttccaaaactaaagttaatttcaaagacaactaccggaactgctaaacttgggattgcaaagatgatgctggtctgtcaagttgtttgagttatgacagttttgagctaagactgcaagtggtgctcttggctgctgatttattggagttccatttcgtaaatgtgatcggtcctcaaatttgatcttttctgcatcatcagcaatatcggccctcctatattccaataggataatatgttagcacttctctttgtagaatttgtgtattttgatacatacagtatacagtacctcaaattcttaataggtactccagattctgatgttgtatccatattattacaatgttggagcatcatcctcttgttatttgaattgatgtatgaagtgctgttctcttttgctaaagctgcatatttctgtttcttcctgcagatgaataagaaattgcagcaattgagggcaccaaaaaagaagcagcttcaggctacaaaactgagcgtggaaggtcgtggtatgatcaaatatttataaatgtgaccacgttgatactggatgggtttgtttgtcctgctgcaagcttttcatataatgtgctgcctgcattgatgtggattcttctaaaggtgggctattcgttcagtgatctacatggaaatttgatggagagggatgttatgaaaataccatccgtatgctgcatttgtgtattcatctagtgcagtaggaaatccaaaatacattggacggttatgcattcgtatatatagtcaagcttgtcatcagtttaatgaaaatgtggattttgcattcgtccttggtacaagtaatctttgtagtgcagc

SEQ ID NO: 375 - DNA, 429 bp, Glycine max
atgaataagaaattgcagcaattgagggcaccaaaaaagaagcagcttcaggctacaaaactgagcgtggaaggtcgtggtatgatcaaatatttataaatgtgtccacgttgatactggacgggtttgtttgtcctgctgcaagctctcatataatgtgctgcctgcattaatgtggattcttctgaaggtggagatccagtgagctcgataaatggaaatttgaaggagagggatgtcatgaaaatacatccgtatactgcatttgtgtattcatttagtgcagcaggaaacccaaaatacatttgacggttatgcattcgtctattatttcgttttctgttgaataatcatcatgcttgtcatcaatttaatgaatatgtggattttgcattcgtcattggtagaagtaatttttgttgtgcagca

SEQ ID NO: 376 - DNA, 447 bp, Glycine max
atgtaatttcaccaaggaaatgtcatatcaagtgatgctagttatttctctatgtccacttgttgttatttcattgttgtcttgtgttctttttgctcatctaatttaaaattgaaatctcaattttattttattaatctgttacccaacctcttggcctctccttttaatgtgtatctgaggtttaatattgccttaaaaaagtgagtattggaattagttgccctttgcgtttttgttttcaaaacccagaattgattaaaatcttttccttttttcatacagatgatttgattgttgatccacgtaacttggagtggatgagagaagccaattgtcccattgtaagtaaatctttcttttatagtatgctttaagatatactgtttgaacatttatatcatttcttattgaatgaaaggatacaatcaagaagtgcattttctt

SEQ ID NO: 377 - DNA, 465 bp, Glycine max
ggttcatgtgccggtgccgccggggacgccggttactgccgagtactacccggaggcatggagatgcaagtgtggcaacaagttgtacatgccatgaatataattttctctaagtatgatgtatttttgttgggtctaatatatatagttcattttattgactataaattaagacaaatctcatctctttgattaattacgttagctttagcttgtggtggatattggatatggaaaaaaagagggtacagaacttgatttgatgtgaaatatataatatatatcttcacactgataacggattaatgttagtgacagtgaagttatgttgctacatttggttatatggtgcttggattttctttttattctcggttgtttaatgttcaatttctgttgaattgtttaattaatgcattaattgagggaatctgtgaggattagttcattcaatataggtccatt

SEQ ID NO: 378 - DNA, 411 bp, Glycine max
aagaagtgtgatgaccatggaagcaggggaagaagagaaggcaatattgacagattgggcttatgattgttgtgtggaagggaagttacatgatttggtggagaacgataaggaagccttgtctgacattggcaggttagaaaagtggataaagatagcaatttggtgcattcaagagcatcctgaaatgaggccaactatggggaaggtcaaccaaatgatggaaggtttggttgaagtccctaacccaccatcgcctaatcctgatgtttgattaatctcttgacataattcccatcctccctaaaatatttgggagaagtgattatgcaccgttcctgttcgtgtgattttactctatgcattgttattttctattatgagttattttttgtgtactttttttatttt

SEQ ID NO: 379 - DNA, 515 bp, Glycine max
aatgaacatgattgctagacattcaaaatgggaagtcttctcttgttaagttgttcataagttggcaattgatccaaaaataatcgcaaagaaaaaacaagtactttcatcggggcaacactgttccaaaatttaccaagaataggatttgaatcctgaatattctgaatttgagaggcataaaggtaactaggtgattgtaagttacacttacagaaaacaaaccgtcaggagacaagatatatctctaggtatcattctgattctgaactaaaaagtccccggccagcaatgcttccagttctgcaatgagttccaactcccattgaaaaggttgtctactccaacaccaattccaggaatcagattgttctacatcccaagctgacataccttggactgatatgtctttatccattgctaggctaaagagtcttgcatgtgattgcattaagggagtctcgttaaggcatctgtgtctccaaaacaaagtatccttcctatcaccaatcttt

SEQ ID NO: 380 - DNA, 444 bp, Glycine max
aggctctggctgccttggagaatcaaaaggaagaaaccatcaagtcccttgattcccagatcgcagcccttagccaggagattgttaataaggttcttcccactgcttaatatgtctgtgtaattttcatttcaatcccctcaccaaaggattcatagtttctacttttgaatgggtctattctgtaatcgcaatacttttcaatgtaaaatccgagattcaggttatgaattgggctcccattgttttttgttttttttaagtatatagaaaacgtaggaaaaatccccaccccagctatgtgcatctcttctctcgttatatgctagttttttttagggcaaggcaacatgaacaggttctgaggagatagatactgagttatacattttgtgttgatgcatttgctatgtgacgtgtgtttctgaaaggctgctggagatt

SEQ ID NO: 381 - DNA, 413 bp, Glycine max
ccactaccctgcgtgcaaagaaccaaagacttctttttttggatcccctgcgaagaagaagaaaacacttgtaccctaatcatcatgctttgcaaacagaaaactgtagctgttaataaagctggctctctagaaaatatgaacatagaacatgaaaaatctttataaagaaatttaaaagagaagaaaagtttgactgcattgtctaagtttgatattttagctatggctaattggcctaatataatggatggcatggattttctctatagcaagaaaattcattggttcacctttgtggtcgaaaaataccaactagaacttgcagccagataataccatataatgctacccctaatctttgatgattattgttgaaggagttgttgaaattttttatggacatgattgct

SEQ ID NO: 382 - DNA, 380 bp, Glycine max
ttgctccaaagcccaatacttttacaccatttggcaacggagtgcactcttgtccaggaaatgagcttgccaaactgaacatgttcattttaattcatcatctagtaaccaaatataggtaaattttcaacttcattttgtattcaccaaaaaccaaaaaaaaaaataatcattttatcaaatttttatatggatttttttcatcctttaaatgtttttacattactatctacttatctacttacaaatgataaatttattaatttttataattattattttaaaagtcatatttaatttttaatatttttttagtagtttactgtgtaaaaattcttatattcacaatacataaaaactgaatttttttaaaaaaatta

SEQ ID NO: 383 - DNA, 403 bp, Glycine max
aagaaaccaaagcaacatgatgatgagaagaaatgatacatgcagcctctctatatttgtattttagtatctctgcccttgttgcatttagttctacttgtaatctttgaacttgttgctgcaaagctgatattgcacccatgcatccatacactggatctcttatcctcaagttagcttcataaacaaggctatttgctgcatcagctctttggccttctggtacctcctatacataaaaataaagtttgaaagaaaataaatcagttttttacttcaataagagaagtgaatccaattgaaaaaaaaaaaaagtgactaattaatttggtgggtggagctagttgttacgtactaaccattagcatcttggaaacattgcttgcaccaaacactttgtgga

SEQ ID NO: 384 - DNA, 411 bp, Glycine max
ttattcaacagcagtctcacagtgacttatgatagagttagttagttactcaggttggttaggttagttaggcagttactaataactgattacagttactgtaataaaaacaaggccgcgagtctgcaacccccaataatacatctgaaaagtttcaagaaacaatagtaacacacacagaggggaataattcaataccatttcatctcttgaaaatctagacccttgtgaagtgggtcccacctcagaagttctaatcttacatacggagagaaaaccagtggaaggctcaatgacatataagcatctttatagcttgatgaatactctcttttccattcttccattcttcttttgacaaaggataattgaccatattcctcagaagcatcactgaagatcccatcagca

SEQ ID NO: 385 - DNA, 531 bp, Glycine max
agcttgcatgcctgcagaggcttcattgcaatatatactcgacatttgcagaattttttgatgcagaggagaaatctggcagcttgaaagcaaagatcttttggccaatattataaactaatagtttgtaaaagtatcaactacaggtcatcggaatgatgtctctattttcattttgtcatgaagggtgaccaccaagttatgtgcatcatccagcagcttccaaacatcaaggtgtcctgccatgccattgcattccttgaggatctcgtccatgctgctatacttctcgataattagtttcctcctctgtaaaactgaagcggctattgcgtaaagcaataaatcatctgtcggtggagctcgctgcctaattctgctccatgcagatttcccaataccagctctgattgctgcttgatctgcccacattacttcccacaggcagagagtctgttcaaatgtcaactcccttctaaacaataccaccaccatcctgtacacaaaaaagcaatcctcagcctggagctt

SEQ ID NO: 386 - DNA, 439 bp, Glycine max
acagcaagaccagctcttgctaggctggacctatatcagaagctccaaatccgaacaaatcaaatcaaataaaaaaaaaagagtacaatgcccttcaaatataggttaagggttttgaaaaataaaatatttataatgaaaattataagaaaatataaaaaatttataaataatataatttttcatatttcaattaaaaaaatttcttttcttaaccaaacacttataaacgtttgccaataaaaaattacattattaagggcattggagtaatttacagtactaacaggttacgtacgcgggttcgattctgaaagattttcaccgtctgagaccaacccgtacgaactgtgtgagataacatttaaaatttggtacatcgatattcgatatgagtgtgttgccataaaaaggcagctgattattgaacgtttgcagt

SEQ ID NO: 387 - DNA, 440 bp, Glycine max
gatcctctctgtcgacctgtagaacctcttgaatgctcttccacatcactgccaccagcatgtcccttctgaagcttaaggtatctgaatgtttttcaaaaaaataacaaacacattcaatgactagcattaaactgataggaaatattactaggtctgagagaaacaccagtttggctttggtaaactagatagtatgcgtataggattacatagtagcatgtaatttgagctagtatgctatattattagattgaaaaacttgtaattccattgttttacttgttttaaacttgggcatataaaaaagtggtttaattatttttcttatgtttttctgataaagaaatatattagagtatgacgaatgacacgagttcttttaatgaagaaacaaaaagtaataaataagagaaaccattttatttattttttcaatt

SEQ ID NO: 388 - DNA, 485 bp, Glycine max
aagcttgcatgcctgcagtttctttttatttcatatgcctaatattttaattaatatttcaactttaattgaaaaaataaataaaatggtttctcttatttattactttttgtttcttcattaaaagatctcgtgtcattcgtcattctctaatatatttctttatcagaaaaacatatagaaaaataattaaaccacttttttatatgcccaagtttaaaacaagtaaaacaatggaattacaagtttttcaatctaataatataacatactagctcaaattacatgctacgatgtaatcctatacgcatactatctagtttaccaaagccaaactggtgtttgtctcagacatactaatatttcctatcagtttaatgctagttattgaatgtgtttgttatttttttgaaaaacattcagataccttaagcttcagaagggacatgctggtggcagtgatgtggaagagcattcaagagatt

SEQ ID NO: 389 - DNA, 476 bp, Glycine max
ttccatatatatcggtgttttctttccccctcattaataatccagttaactaattagcacctatgcttgcaattgagtgcattttttttctgaattttctcaaaatgtctactcaatcaggaaaatcatcaaatgggccagaaaaagattactctttaataggtgacacaacaaatcgcttatttggaatctttaatgccattcccatcattgccaacacttatggtagcggaatagttccagaaattcaggttagaaacaatcaaatgtattcactctaatatatagaacttgttaatgctacacgccatcaaagtattttaacttctaattagaaaaatacacatttttattacaggcaaagttagcacccccggtagaagggaaaatgctcaaaggactgtgtttgttatgttgtagttgcattgagtttctttagcgtagctatctctggcttgtgggcatttggatatcaa

SEQ ID NO: 390 - DNA, 408 bp, Glycine max
gatgtttctggtaataaattagaaggtgagattcctcagaccctttacaacttgacaaacctggaatctcttaacctacaccataaccagcttaatggaagcattcccccaagcctaggaaacctatcaaggatccagtatctagatctgtcacataattcactttctggcccaatccttccttcccttggaaatttaaataacttgacacattttgatctctcattcaataatctctctggacgcattcctgatgttgcaaccatacagcattttggtgcatcttcattttccaataatccttttctctgtggtcctcctttggacaccccttgcaacggagctagatcgtcttcagctcctgggaaagctaaagttctaagcacctcagtaattgttgcaattgtt

SEQ ID NO: 391 - DNA, 452 bp, Glycine max
actcacccatattagcctgctgcacaggcaggttgtaagcctgcgcctgtctcgcagtcacatagtaaacctgtggatgctggggatgttgctgggaaggatatacaggataatatgcaggaatagcagggttatggtgaataaagtgtgtgccatgaataaactgttgctgctgttgcggtagtgtctgctggtgctggtgatgttgctgttcaaattgctgttgcggttgttgtgactgcaactgctggtgctgttcaaattgttgttgcaacaaatatccagggtcctgtacatgttgctgcatctggatccgaccgtgcggatcagacacattaagctttggatccacagggttactgggaacccttgtagtcccggattgaatctgaacttgttcttgataaacagcaggtttcgaacgcgagattgcattcgcaagactactatca

SEQ ID NO: 392 - DNA, 458 bp, Glycine max
aggattgtacatttgattggctttattggccccaagcacgtcagccttactcccctgatacggttgattatatcaaatctctggatgccgagaaagacatagagcttctgaaatatttcgggtgggatgtcccggttgagtgtgcacgaacactccgaatctccacaatgttattgaagaaaggggttgagagaggtctcactccttatgacattggaagcattatgtgtagggaaaatttgaacaaagaatctgtcatcgaggagattatttgtgaagcccaagaatcattgctacctggcatggaggaatctgtgtttcttgaatctgtctcccagatcatggattcccgccttgataagctttcaaaatagactctctttgattcatagttatataataacaataatatatatttggatgtattgagtgaatactatagtccatatttggatgga

SEQ ID NO: 393 - DNA, 545 bp, Glycine max
aaaactatctcctattcctttgtcgctatggctattcacaggaaaacataagattaatgtctaagactaacttcagttgcgaaaggaacaccactgaagatcccatctcctacatcaactacccatcaatctccatcaaaagtaattaatagacatcaagcagggagcaaagagcaatcagaaaaacagttaccaacatgagatctctcaatgccacgtatactgcaatggtgcacagtgcacacacctgggtgatcagatgtcaaggccatccccagtaaaccagcttttactataggtgtcaaagcatgtcatcctatgatgtcctttccatgggaaagagggccatggtggatacatttttgggtctcttaacacggattgatatactcctctaagttgaactcactttagaacgtcaagtaatccaagtcattgttgagaaaatcaaccactcatattccaacacatgcatgatttgttatgcaagatacgtaacatcaacttaggattttcccaccaaggaactgagattacttccttca

SEQ ID NO: 394 - DNA, 909 bp, Glycine max
caccaaatcatgttttagattatcaatttgggccgtgaaggcagttatttggcctgaagcctcactctctttttcgtgaagcttttcctgtaaagtggataactctgactctttctcaactaatgttttctccagtgcagtaattgttccatgcaatcccaaaatttcctctctcagttcggtgttctcacggtctttagctctcatctgctcttcaatttcacccttccggttgtttgtagaatccagctccatcttcagcttttcacactgctgttctaattcatgtttctcattctgcacagacaccaaatcatgtttgagattatcaatttggacagtgaaggaagttatttggcctgaagcctcgctctctttttcatgaagcttttcctgtaaagtggataactctgcctctttctcggctattgttttctccagcacagtaattgttccctgcaatcccaaattttcctctctcagcccagagttctcatgctctttagctctcatttgttcttcaacttcactcttccggttctgtatggaatccacctccaacttcagcttttcacactgctgttctaattcctgtttctcctgatgcagggaagccagatcatgttcaagattcttaatttgttcactggatacctttattttagctgaaaccacttgctccgcattaataaatttatcctggagaactaagaaatgtgattctctatctgttgatattttctctatttctgctattttttcgtgtagctccagcattcccttactcatgtgactgatttcatggcttttaccccttatttgctcttcagcttcactggttttaatcctttatagggggcaatcccttcaatcccagggtcccctttagcttcaacggggtataaattt

SEQ ID NO: 395 - DNA, 982 bp, Glycine max
ttgcatgcctgcagaccagttaagcaaaaactcagaaaaatattaaaaaaaatgcacgaaaaaacgaaaattaaagtgagtagttacaatattgcaagtatcgtaagtacaaacgaatcggaggaggaaaaaagaaagaaaatagaaaaagtgtgagagtgagagaatcatgctatgagtattatactttgggatatgcttccaaaaattccgccactgttaagcccttttggctacgatgttgctcattttgacttgggtttctagtcgaaacaagaatcatacaaactattagtacataaaataaatcaaagaaattaattaaactcggcttcttaaaacatgtttagtaaaaaaaataacaataattatcatttataaagatttcaatttcaaaggtatgaaagaaaaataaaattaagaagcacattgccatactggagcgaatccttttcataaaattcttcaagagctttatttagattgcctccatgtttctgcagaagggaagaacatagcaaatgtagtccttttaagaggctgtggcattcgaattgaggtctgttttttcagtttatttcttaattgatacatttatgtttcaagcagtgaagtgatgcttaaaggaaaaaccaaactttgatacttcttaacccatttatgtattctgctacttaaaaggaaaacacatcaaatatatagcaatcatttaagaatcattagaaataaaataatataaacttgtatcttttgcagttgagtttcctatctttttagtatcacagtatgttgcttttttattttttaatattgttgactttcaaaaggaggcgactgtgaggttttgaatttggccacaatagtggtttttctgtaacttcagctctctctaaagactccctaaatacttggataaaaagttaaatggcagttggtctgttaattatatgctctgtctgagccaataagaataaactataat

SEQ ID NO: 396 - DNA, 397 bp, Glycine max
gcattaggattctctttctcgactcccccattagcatctagaatcacagtatctgttttctcctcattctcttctttttctaattcagtagtcagtaggggcccttgggatttttcagtgtccaccgcttcttcggcaactttctctgctggttcaatttcaagcttttgtgcttcttcaccttcaggcttttcagtaatcacattttcccctttcacatgactattcttaatttccgctgaatcattttctaatttattgttagtatcattcagatcagtttcttccatatctacgtctgacttcttggctttttcatcaatttgttcagttttatctccattctcaagttgctttcctccagaatcattgtttccttcattatcctcctcctcct

SEQ ID NO: 397 - DNA, 501 bp, Glycine max
aataattatcattgttagactgtcattatattgatggtacatgacatggtcttgattacattctatttgcaggaaacagatgttgagaaattgcagcagagggattacttaaatttgaaggtgtgtttatcttaatggatctaatgtcaattgctaatgttaaactatcagaagaactccctgaaaactaggagttctgtaaataccaccaagtttattaagataggagtttacaggatgcaagtcttttgcgtttccttgttgatgtgcggggtgctgatgttgatgatcgtcaggtatatctatacctaatccattatgcttacaaaataactatcctggctaacatttagttcctttcgataagtggtaaaactgcttgtttagacaatatgtttcacttcaggtagcttgtcaaagtaggcttttgtttactttttctctctctttacagttgagggatgatttaatgacgatgcttattgctggtcatgaaacaac

SEQ ID NO: 398 - DNA, 436 bp, Glycine max
aaatttttttttaatgtcttttagttgcattttgttctgtttcttttgttagtgcggttacaaaatattaattttttaattttgttgatttgaattcacagtcacctgagcttagcggtatatcatggtttaaactttctgctattcagcttggactagtggtatgacttcggaatcatagttgaaaaacttattacaatttcatggaaaatttattgtcatcattacattagaatctaactgctaacatcaaacataggttagtggttccctatatggggctcttcttggctcgcttgttgcatttgccatagctgatttccttggtaagtgttttgattacttatattatccagcagctgaagcttctttagaatgtttctttactaaatctattaagttggttaaaacactagggaggaagaaacaactcatt

SEQ ID NO: 399 - DNA, 461 bp, Glycine max
aggtttaagttgacccaagtactcttcatcaggtgaatgagtggacagtgtgtcctgaacagccataactttggtagcttgaagttgagtaggtagtgatgataggaaaacaagctgaggattttgaataaacttctcataatctggatcattctcttgagggatgagttttctcatgagggtagggcggttaggcacatatcctccaaaggggtattgtccaaagtttatggcagcatgttggcctgaagcaatccatatcattgtggtaagtataccggataggtcctctttggtatcgagtttaggccaccaaggttcattttttttgtcagagtgaccctttaacttgatttctctccaccatgcttggagctcaacatcagatgtgactgaatttggatcggagtagaagtgtgctacataagattctacccattcttttatggctgaccagatca

SEQ ID NO: 400 - DNA, 556 bp, Glycine max
gcttgcatgcctgcagagagcttaaaaaattttcctcgacttgcgacagcctcaaagcaccagatgcaaaagatgcaggaaatggaacagctaggaaatgttcaatgtctgccaactgatcaaaacacactcaataagctaatggctctgaatcctggattgaacaaccatataaacaactctcataatatggtaaatcgtggtgctttgagtgggtcagcccaagcagctttagcactgaacaactaccaaaatcttctcatgaggcaaaattcaacgaattctagccctggctcacttcagcgtgaagggtcctctttcaataattcaaaccagagtccctcttcagctttgcaaggagctagtcctgctttaatttcaggctcaatgcagaattcatctgttagtggtttcccaagtccccatctacccccacagcagcagcaacaccacctacaacagcgctcattaagttcaaatgctttactgcaacaaaatcattcacagggttcccaaggaaatcaagctctacagcagcagcagatgatccatcaac

SEQ ID NO: 401 - DNA, 564 bp, Glycine max
gatctgatccccattgatttggagattaacgccacttgtagaagacgtaatcaagagagaattagaaaatttttgcaggatttagaagcagcaacaattctagaggaagaaccttaatcttccgaggcatcttctagttttcctattgcaggacattctcatttagatcatatcgaagaccacatcatggttgaagagccaagaagagtcaccttggaagattattcaagttctaatgtgccacaatttttcaccagcattgttcaaccagaagttcaagcacaaaccattacatatccgccatcattgattcagctaatttagaataatccgtttcatggtttaccaaatgaagacccatatgcacacttagccacctacatagaaatatgcaatactattaggttggctggagtgcctgaagatgcaattcgattgagcttgttttcattttctttatcgggagaagctaagaggtggcttcattcatttaaaggaagtagtcttaagacatgggatgaggttttggagaaatttctcaagaaatattttcccgagtctaag

SEQ ID NO: 402 - DNA, 396 bp, Glycine max
tagttttaagcaacttgtaatgatttgtgtagatctctacaaaggtttcactttgcaaacctcaatcgtaaatccactatccataagcagcaatagccatgctctctgctgctcagagagtcggtccttggggcctttcacttcaacaagcttggcttcaccgctgtattctccatggaaacgccatagcagcaaatctggcattccactagaccagctccggtagtcttgagccagaagtttgcagagagatgccaaacaaattcccccaacacaagtaacaacagcatgaagctcatctaaaggatggcagtcccaattaactcctctacatgctgttccgatatgtgtttcccatgacttaataagaaactcctcagccatgccatcacatat

SEQ ID NO: 403 - DNA, 527 bp, Glycine max
atagactaacgagtacaggaggagacaggccaaaaatgcatgagcaaaccggttgctttgatcccaacacaatgggagaaagtgtaccctttctaaaggataactttcctcaaactctacctccttcatcacctatagttgttgtaggaaacaccaccacaaacagcatcaataatagtcttgaagagaatctcaggctttctgtggaggagctctcctataaccatcacaatccacaacaccaacaagatcatgtctccacttatgcaagtggagtaactgccacatctattgaaatcccacttccacagcatcttggtttgaacatgggaaactcctacatcaacaacaacaacaacatggataatcatttggtgcaagaggtcattgatgcatttccctatcagcagtccacttgggaccctgctactgttcaggaattacaagacatggcctatgctaatcacacagaacaacaacaacagcaacaacaaaatgaacaacaatttcagcaaattgagactcaa

SEQ ID NO: 404 - DNA, 478 bp, Glycine max
ttatggtatctgagtggcattcttactgtattcttctgtgggattgttatgtctcattatacttggcataatgtgactgagagctcgagaataactaccaagtatatcctctaaacaaatttcttcaagctaagctatatatggatctatttgggttgggggtagtaacactgtctaatttgatatattaaactacttgctgttacagacatgcttttgcaactctctcatttgttcttgaaacctttatcttcctttatgttggtatggatgccttggacattgaaaagtggaggtttgttagtgataggtgagtcctgcattctctcagagaccagtgaaaataatcattaaaaccttgcccctttttactcgtgaaagattgtaggatcatgtgtctcctagtcaacaaatggtttcctcagacttccttttacttgttatagaaaaacaatttgtgtaactcactcagtttctt

SEQ ID NO: 405 - DNA, 503 bp, Glycine max
cactgccacacacactattagagtgaatgtataaaaataactgattacaaacagttattgcagggcacttagacaactaactacgtttctttcactaacagaattctgttagttagttgttagttaacagaactcagttagttagttgttagttagtttgtgattagtttcaagggctagaggtttataaatacctcctttgtaactgcattaaaggttaactttttcagaatcaataatattattttttctttttttttctgttctcaatactttctcttattttctctgttctctcagttctctaaatctgatatagtattagagcttgtttctttgtaaaagctcttctcttcagtttatcgagttgcaccttcacatccatggcttctgcatctcaaggtttcaattcgcattcatttccggcaatgatagctgagaaattggatgattccaactatctacaccggcaacaacacgttgaaccagtcattaaatcgcat

SEQ ID NO: 406 - DNA, 396 bp, Glycine max
aagaataacgtttccaaagactgacaattctgcaatgtgtatttataattttgctatgtgaacatacaagccattctaaccagtttggtaataacccaatattaatttctcagtaagtgcacatgctctacattcctcatattgaaagtgatctccaccctcaactaaacttatccattccattccactttgttgatcagtggaaatggggaacagtctacgtgttgttctggaaaattatattgggagtgctccatttccttgccatctacagctccaaacatcatcattggcctttctgtgaatcatcgttctaacaagtggatgaagacaaacacgaccactgatgcatggggtggcgttactgacaccaaggtttacttgtatgggagtgga

SEQ ID NO: 407 - DNA, 387 bp, Glycine max
tcatagaagatctttttctataatcataagctcattgaaaatgataagaattggttttggaaacaaaatacataccaacatctcatggtctcccattatttcatctatcaactcctccagtggtttattagcactgttcggaacaagtgccgcaaatgcagctggttttagtcctgcataacataaactccaaactgtagtgaaatctgccaagactcagaaatattaagaaagaaagatttcttcatcttcaacagattctaagggcataattcaggatgtgatcatgtttttgttaccagtttcggggaaagaatctatgaacatcatcatctcctctccacttaaaccagataagaagcatatccgaggaagtgacttggctat

SEQ ID NO: 408 - DNA, 402 bp, Glycine max
aggctcaacaccaattacaaatttcttcgcctttgaatcaaaatatatcatttgtttatcaaccttaaccacatttactaaagccttcccagcagctaaaatccttttgacccgagcttttctttccttatcaccatcacttccaatggaatgcttccttgaaaaatccaagatggtttgtgcaggaagaagtggaataaatccccttaactcagagtcctcccacaaagcatgtcggttttcagtttccccttcctcgtacctgctcatgttattaaagcaagtctcctcttcatcatcatcaatagacataggcccaactgaaagcagcttattcaagaaggatacacaacgattccaaaattctgatctcaaatttgcctgattttcatccacatcatt

SEQ ID NO: 409 - DNA, 454 bp, Glycine max
ttttatttgtttaaacctatttgttttattataagaaacaaaaattttactttttattgtcaaaagctttactttaaaaataaatatagcttttatcttttttatattttatctttaaaacaaatatatatatatatatatatatatttatcttttttatattttatttttaaaacaaatacagcttttaatgcttttgtattttatctttaatgtgtgctaaaagtttcttactcccccctttcaagaattccttcttcacaaattaatcctcgctacaaatttatttttctgtttgatttttagtgcttgtctgttaactgtttccattaaacgatgacatatgagttaatttttaattattttaaaatatctgtgggggttttctttttttagctaaaaacccagaaagtgactgaccaaccatttaaaatatattcaacaattttctgag

SEQ ID NO: 410 - DNA, 483 bp, Glycine max
taccttcttccttcgaatcaaaacaatttaaacccttttttttcgaattaaaataaaataaaagttacgatcctcataagctttcagcatggcacgtaattgggtttgtttttcgtttgtttgtttgtttttcgtttgtttgtttgttttgtgaaacataaggaagccgaaggcgtcagtgaatcgacccccaacaccagatgtggtcgaaaatgtccctgaaagagaacccacgcttcaagagctcatcaacatcaaggtttcatcttttcttttttagttagtttcaagtttcacactttcacttgttactcttttgttggagttgttattatgggtcttgaaaggttagttttttatttttttatgttggttttcttgaatgcctgttcagttgatcgagactggagagaaggagcgcctcatggagctgttgagggaaaggcttgttgattgcggttggaaggatgaaatggaaactct

SEQ ID NO: 411 - DNA, 402 bp, Glycine max
aggagttctgagggattggaagggtgaatttattcttggcttttccgatgccttgctcgagtgttcttccgcgttagaggctgaattatgggccatcaagattggaatgcaaacagtagtggcaaggggatacagaaatttaattgtggagagtgattctctaaaagctattcagatcattaatgctcacaagggtgattttcttcgatcttctatccaacacatgactcggatggttgaccgaatttgttggaatcatgtatacagggaaactaattcggtagcagatggttttgctaaacatgggttatccttgtctcaagaccagagcatcagagtttttgaatctgctcctgatttcattgagtctcgtttgtatggagatagaattgggaaaatata

SEQ ID NO: 412 - DNA, 500 bp, Glycine max
aaatgtctaagtagttcacaatctctgcaaaaagatcccatccaccaaagttcatctaccactttggagttggagttgaacatttacataatgttatggtctattcttgaaatgggaaaataaaaggcactgaaatccactattgagtattgacatgttcatggtacagtagtgtatctgtcatgacaacagaatattttaatatctaatgactcgacttgtaacacaagtatagacacaccaaaacactaaagagcaatatagattctgttcttagggccatttcaattataatcttctaaacatatttatatattcatcaaattactaaataagattagtaacggtatcacaacatgcaccctggaaggagtgtgtgtgtgcacgaaggaatcatgaaaggaaatgcagcattaacctcttttgtgttatcatactggagtatcctttgtcttttatgtatttcaccgggcatattcatcaggatcaaatggcttaca

SEQ ID NO: 413 - DNA, 484 bp, Glycine max
ttgtatttatttgctccagtagccaaaattttgagaatgaatgagcctttgaaataccgataggttcactaatccaactccatcccgagccagaatcatccaaagagccaacctcttcttttaaagattcagttgtgaagcttgaaatcatagatgcagagttaatctgtcatatcataaataactataggatatgccacttcttgtactagaaaatgaaagaaaagatctaaactatagactatagatagattaatcacattatgcattccgaaaggaacttcattcgattgcatcatctattttgatcgcgaagttgataaggcaaacctttgcggtattaagcactacactcttgcagtctggtaaggtgctcacagaccacatgcgggcaagtgatatgaatttccattgaagcttacttttgcatcagttttggcaatgttggcaaggaaggcagcacttacagctcctatgttgtaaa

SEQ ID NO: 414 - DNA, 432 bp, Glycine max
tcttgcagctgcttctctggtttttagaagaagtgaccccacatattccaaaattttagtcaggagagccatcagggtaagccttatgttcattttttggtaattacttttacttggtgcaaattggtcccaactaaatcttaaagagtgtattttgtttctgagtgtaggttttccagtttgctgataagtacaggggatcctacagcaatgccttgaaaccttatgtgtgccccttctactgctcttactctggatatcaggtaaagtttcaacttgttcagtttagttagatgagacataatcattactcaaagtctttggtgaataatatggtaggatgagctgttgtggggtgctgcctggctgcacaaggctaccaagaatccaatgtacctaaactacatcaaagttaatggccagatccttggg

SEQ ID NO: 415 - DNA, 424 bp, Glycine max
acgcttacgctctctactttgttacaaaatcatcaccaccaacaatgtgtgttaaacaattggatatagaagtacagagcaatgcatgtgctgttccgaataactgtagggcatttaacccaaattgcatgaggcaaccatttcttcttattataaaatttttacttgctatcatgaagagcatgttggaaaaatgttaacgactagccaaaatcatgttgagtttcaatttcaaaagaaggtaaaaaggagaaaaatagcttccactatcaacgagaatgcgagtggaaaaaatgcaggttacaaatgtgtcaggaatttaattttctggatttgttagtatgggcgaagaataataattataataataatactataccctaaaataaagttaaaagagagtgattgattagaattaaaatcg

SEQ ID NO: 416 - DNA, 457 bp, Glycine max
tgttacttttcatctcagttgcattcattcttaactggaattataatgaaagaggcccttcattacaccactacatgatagaagttgttttggttctcagtcacatgtcatcattggacatgttcatacattttcgtctttgtgaatggagttgcatgtgttactcgatcggtggtcttcctcgtgtttatttttcctctattttttttctctctctctttctctttgctagcattgtaatctttgttacatttgttcactccaatttaagtgtatatgaatgtgtacaagttcaggtgacccactcttgcaagtgattcttgttatttatttttgtaatatatgtcccataaaagaatccatctaatgagtgtggttctcacttctcaggttgtgtttttattttttccatccatttgtgtttttattgtttttcaatctctcttacaattacaga

SEQ ID NO: 417 - DNA, 381 bp, Glycine max
ttgcattttcggatgctgtgtacttggttgatgcgattgaagggggagaggagcttagcatagcgtgtaagcttgcacttgagtctaattacatcacaaaagtgattcatgattgcaaacgggacagtgaggtctccgatttatttgattgcttgcttccttgcttgccctggtccctcttttgtatatgttgaaatttgtggaatgtttattcaaaggaaaaaaagtgtttgagagccttgacttgtggtcttggcattcaccattttgtctggccatttaaagcacttataaacttcttgttgtatactaggcattatactttcagtttggcatcaagttgaacaacgtagtggatacccaggtgagctttcttgttac

SEQ ID NO: 418 - DNA, 453 bp, Glycine max
atgtgctggtccttctaatgaaacacttggtactggacttggctcagacaccacattttgggaatgtttcactgaaatggaatttgactcaccgttcaatggctcaaattcttctgatgtcgaggaagtggttttgaattttgactctgtggtgtgtttgagtgaggaagattctgtctccaccggtctcgaaatctctcctgaagaagcatctttatcagacggctctacagcatctacatacacagaactaacactacttgttggttgttctgcatttggatttcgtacttccaggtccttcagtgactccatcactgcttccatgaacatctgaatagcatggataaatcaaacatgaataaaatccaaaatttgtcatctctaaatttatgtcatcgggtagttagattatatagaagtcatcaagttgactcactctttcttcctcct

SEQ ID NO: 419 - DNA, 389 bp, Glycine max
agttactcttcaccgttgagggttcccttcaaagtgggatttgtggacacaaccaacaagctcttcactcagacactacaaactggagatcgatctctttgtgtttccaaaggatgtcgtgcacttcctacacaatgcggatcctcagaagactgcattcgctatatctgcctttggaagtgctagtgctgggactgtatcaattcctagcactctctttaacaccaccattgatgacaatgtcttggctctggccttcaagactgatgttgccaccattcaaactctgaagaaaggctttgctcctaaagcatgatgataatgggtagaatcaattaactaattaccaccttttagcgtccgcatttgtgatattccctctgaaagtt

SEQ ID NO: 420 - DNA, 476 bp, Glycine max
gtcagaacccaaaggattggtcccttcatttttcattgtaggtggatcagatttcatcaaaagttgctaacaataataaaacagagttaaaagttcaagctcctggagctgtacaacaaaagcatgatatttaataacatgacagtaaactccaatttgatttttcattttttcctcacaattggttaatctcccaggtgaaaaaaaaaaaataggtaagaattttaacgttgcctcatcgtctgttttattatggtcatttcctctacaaaccttttgaatcaagcataaatcccatagaacctagtagaaatcatttcgctggaccagaaacaccttcgacctgccaaagagaattaaactttttcaatacgcactttacaattatatctgagcaatcatgaacatcagtttaagaataaaaactatttgcaactgaaaaatctctctctctctctccctctcctcaaattacc

SEQ ID NO: 421 - DNA, 914 bp, Glycine max
tgagctggagttgagaaggttcatagcttcaatttcttaagctgtttgagcattgatattactgtatctctagttcaaggaatacaatattttttattgaacggcagctaaaaatctatagtaggacactgacaggttgattatacagaaccaattctcaatcagaattcaaatatggaaataatacctcatttacaaattgctggttcccatagctggatggatcagtcatagtcttaactgccacctcttttccgtctttcattttcccatagtagactgatccaaagcttcctttgccaatattctttgaaaaattattagtagcttctttcaactctgagagtgtaatatagtaagcagtaccttcatccattatattcccattccgaccaaatgagtatccagttaaaggtttagtgctgctgcgtccagaaatacctgcagttatcactacaataaaatcattttgcaatagttttagcaattgtagtatataaatacaatcaacaattacttgtgactaagtttgtttttctagatatgagattgagtgatagaacttggtatgaatatgattcatgtgcatatgttcaatgccagagaatagaattcatccaaagaattagtttagttggttgaatcacacaagttattataaactttctcatatttttcttcgatttttacatattaaaaaaatcattgaatccttctctttttcattcctactctttttagttgcatcgatatcttttagggtatcaatcagagctttaatgttctatcaatgacaaaaaacttcgcttcaaattcaacccttcaccactcagacattctcaaatttagtagcaattagaatgaacaactcctttccatggaagcaacaacaatatccaccatcaaagttcaca

SEQ ID NO: 422 - DNA, 455 bp, Glycine max
ttatcatattgagtacctagttagtgtatctgaataatgatgccttatgttcttgttttgttttcatttagtagtgcagatgtttgtgatattccgttctgattgtttcttagtaagttcctttcatgtttttagttccttattgtactctgttttgcatattagtagaatattaggttcctattcacattcagaaactgcttttgaatcttcagcttttgcttgcaatccctttgagatctttccttcattattattataattataaattcatttttcagcatatttataaatgcggttggaatatataaattacgcttttaaataatacaaaacacgacatacttcagcatcatgtaagtttgtcaacccaaatattagttattgagattaacattattttgtatttcttagttgaaagcagattgaaggggagtaaaacaggaacagagcaa

SEQ ID NO: 423 - DNA, 465 bp, Glycine max
aagatactgaaaaggcaaacaaacagaatagaagaactaaattttagaatttgctaatcagtctgtatatacattgaagatcatagaaaaaaaggagctagtagcgaagtcatggaacaaaacccctcaatcaatctaaacagaaagggctaatgttagagagccttcgttatagatttctaaaacctgtcagtcacagaaaaacacacgctccatactttacctgctgcaactaaaagagtctgataaagcaaactaaaaagacctttttaacccgagatagaagagaaacaactctccgatcgaaggaagtgtgaggcacgaactccgtccacggacggaagagccccactcgagttcgatcggagaggcctgggagagtcgaggctcctccggagaacgcgtcccatggcgaagatggggtgctctgttttattattggtaaccgcagatgatctgaactct

SEQ ID NO: 424 - DNA, 479 bp, Glycine max
gcaagtgtcgttttacctactccacccagcccatgtatccccagcatgtggacaacatcatcagatccaacatccagaagtgcttttacttcttgcattcgtgactctagtccaactggataatccgcaacatgtaaaggaacacgattaatcttcttagagaccaactcaacaatcctctgaataaacttatattcgtattcttccctaatcaatcagagaaatttgtgagaagtcaaacaaaactagtcatcctccatatcttgatatttatgtatgttgttcaaggtaatatacttttttcatccctttaaatttcaacattatgtttaattattaatcttgtctctatattggtctacacttttctgttttgaccctatacgcaagaaaatgtatgctttagcccctagacaagcaaatttaattctccctccagtccttcttataagaaggaccgtatgatatatattttggtc

SEQ ID NO: 425 - DNA, 488 bp, Glycine max
gccaagcttgcatgcctgcagcagcaagtgtcgttttacctactccaccgagcccatgtatacccagcatgtggacaacatcatcagatccaacatccagaagcgcttttacttcttgtattcgtgactctagtccaactggataatccgcaacatgtaaaggagcacgattaatcttcttagagaccaactcaacaatcctctgaataaattcatattcgtattcttccctatttaatcagagaaatttatatcagagaaatttatgagaagtcaaacaaaacatgtcatctccatatcttgatatgtatgtatgttgttgaagataatcaaattttttcatccctttaggactcaacattatgtttaattattattcttgtctctatatttgtctacactttcctgaccctatacgcaagaaaatgtatgctttagctcctagacaagcaaatttaaaaaggacaggatgatatatattttggtcc

SEQ ID NO: 426 - DNA, 543 bp, Glycine max
cttgaatagggatcctacagcgatagatagaatccccataaaaatagttttattacttttttttggcaaatggttgaatgagtttgggtacactgttgaggatcctctattaacttgcaatatgatcaaagtagtgtaaataagtgattctcatctcatgagctaatttttaagattgaattagatctaattctcacctcatgttgtccgaccgataatggaaaggaaaaatagaaggaaaaaaaaatgatgagatcacgttaagcagaggaaagggattggtggaggattgaagatgttgaaggccaatcgattggagccacttgttgctattggataagtcgttgatgaagttctcaaagtattggcaagccccacaattgtatccgattttagcccttgtctccctgcatcgttcatcctcttttgagatgatcaaatcagaatgaaatagagtgaaacatgttacactattttttatggaaacattgtagctggaaattgcctccaacgatgaagaatgatgatctgcaggcatgcaag

SEQ ID NO: 427 - DNA, 412 bp, Glycine max
aaaatggtacctagggattatggggaatgccccaactattccagtccacgctaaggattcccaccataaggctagagatttggtgcaattgaaaaagagatgggctgcatcctcctgctgaattctgcaaaacgggcatgtgctgtcatttatctctatttgcctccttctcaaattagatttagtcggcaatcgatctttgatgagtctccaagcaaaaattgcagctttggatgggatttataatttccaaaggttctgcagtgcttcatccggatttgctcccactgaactttcttgtaacatgttatatgcactccttgtagagtagcaaccattaggctctgcttcccacttccaacaatctgctatatgtcgctggattgtaatctgacaaatttcttccaaaaaa

SEQ ID NO: 428 - DNA, 371 bp, Glycine max
aaaattgactatcaagtagtataagtattactcccaaaatccaaaatttcagagaaaatttacttcatctcacacaaaacccaccttgatcatttttttatctgcaagaaactcaatgctcccatcagaatcaccaccaccattctctgaagcagaaaagtaagccttggggcacctacactctattctgtatctcatgcagaagggaatccaccactttgcaaacttccaagcctccctcatggcactcaaggtgacagatgaacctccatcatcagaaacatacacatgaagcttctctggcgggtaatccagcgccatggctgatagcaaagtgttcataacatccaaagttggttccttagttgggt

SEQ ID NO: 429 - DNA, 438 bp, Glycine max
aagcaatttttattgtatgctttgaacaaacccatcaattcacagttttcctataccaagttaattctcttgccataccttgacatgacactttgactgtttgatatattggttggtgagacttgcataatcttgttttgttcatttgttgagagaattaaagatgcaaaaactcgaaaataagcatagaaagataaacaaaactgaccctgctttcttcatcctctgccaagctaagtaaagtcattagagatttgcttctcaaatgcgatccaatagttttggagttattactgagcacagtcactatcagctgcacaacaccagcattcctgattatgtatcttctagtggggtgctcttcagaaaccttaaaaacatgatccagagcacgctcaacatgatcaacagacaagggatcctcactcagatactgca

SEQ ID NO: 430 - DNA, 566 bp, Glycine max
gagataattattcgggtaattgccataggatctaccatccagcaaatgtgccgacaatgaaccatcatatgagctattgccatccatgcgactaaaaatcctttgctcttgcaaggtagcaagtgaaggtgatagcacagatgcatctttcccggtgaaccttgctcgtttagcctctggaatcttcatcttgttagatgaattgtttttatccacttttctcttgagcattgacttctcatcaatttttttattggtatcactaatatctttctccaagttggtaatcttattcttaagttgccacccaggcagaaattttacagggtcaatcttgtgaccttccaaacatttaactacagattgcaaagcagccaaatatttttcatgtgctaccttctgtgaaagatcaacaaatatcagcaatgctaatattcataacgaaaaaaacattactcaatgttaatatatattggctaacaagctaaaacataccagtgcactaggaaaatcacgtgcgtcttgtttggctttcttccaagtttcttcagacttctgcaggtcga

SEQ ID NO: 431 - DNA, 413 bp, Glycine max
acaaccatttgagctcctcattccttaatctctctatagaacttctaaaattggtttcccacgcatacaacttcaacaccttcatattcacaagagcctcagaacaagccttcaatctatcatcttgtgccaccataagtttgctttgaaacttgtgctgtaactttgcgagtggagtattgcaaagcacagtgattactatcaccaccaaggaggcaattgttgcccatccaacagcacgaaaaagtattactaatgagatacatagctgaaagcttgttgtccaagtctggtgaaaccaatagggaaattcaccaattctataagcatccacagtcacataattcattatctcaccactagagtgcatcaatctagcagaattggataacctcaattgttttctataaatg

SEQ ID NO: 432 - DNA, 423 bp, Glycine max
acattaataattgcataggacagtttggtccgaaatatgaatagcacaaggacaatcattaaattccatgagccccgccacacaggtctgaaacctttaggtgatagtgatgtgcatatggtgatacaaaagggatgggatggtgaattaggactgaaaaagataactaaatgctccaataacttctgctatttctatttatgttttgttactctctggagtagtttctagcctacttcctatataagattaacgctggtagtagtggaaccatcataacaattcagactgcttaatgcagtttatttctggcacaagaagaagcattagcgaaaaaataaaggcaagaagaaataacctcaagacaagggaaaaaggtttgaatgacacttacactagtccatgttcacagcacacatgggt

SEQ ID NO: 433 - DNA, 362 bp, Glycine max
agcatgaaatgcagtgtgatatgctgtaaattgtctaactacaaatcctccacgcctatgagcatattctgctgttggtaagttgtataactcctcatctgaaacacccatcatcacattctcagcattggcactgttggtttcaacagaagaccacatctttgatctctccacaaactcaataacctttttccacaaagaataataagtttaaacataactggacagttacagcatagacacatgccaaatcaaaaaatagatatgataagtacttttgcagcaaaatcatcaggaagaggttttttattcttgtgtgcaactataagcccagcatagcagaactcatttaatcccagacc

SEQ ID NO: 434 - DNA, 487 bp, Glycine max
actgcaataaaacttgcttcgaaatctccacacttgttataaaacaagcagccagcatacagtgtagagatccctataaatagattatgaaattcaaagcacatcatcttcaaaccacattgatatctaattaagttttcctattgcctcaaactttcagcctcatagataattacaatcatgtctccccccatctttaaagtactcacattgatcatatctgtttttgccatcatgcaaatatcaacagctggtgacccagatattcttactgacttcatagtcccacccaacaccatacctgatggcaacttcttcaccttcactggcttccgtgtcattttttcacccaacaacactgtctcagatttcaaagtgttgaaggcaaccaaggtagaatttccagcccttgatggacaaagtgtctcatatgcaatccttgagttcccaggtggcagcatcaacccaccacacacacaccctcgtt

SEQ ID NO: 435 - DNA, 517 bp, Glycine max
tgtggaccacgcgaagacggctggtttgaaggtatgattaaatggaattgggggaaggggtgtgtgaagaaaatctggatttagattaatgattttttcatattttttttaaaatcatatgggaatagaaaaatctataatgttcattgtaagtatcaagaatcaatagtcttaaaaggttaaagaacttaaatgtgtggatagaataaaggttcaagggattgaagtttaaactctgcttagtaacagaaccttagatacgttcaactgaaaaactgcttcatagcattttagcgagcaatcatctaaggcttgctgtcatttgagtgggatttgaacctatcacccttgatagtatcagataaatttgactttgaattgatgaattttgtagggattgagattgcatttagactactctggaacacatggttatggaactgattcaagttcagtaagttggaaatatgctaattcagaagcatgggcatcggcatacagtgccattgctgctgga

SEQ ID NO: 436 - DNA, 502 bp, Glycine max
accaagtcttgccgatcaaaatgtcattttggtgtttgttattgggggcattaatggactcgaggtgaaattctgattacctttgtttcctctccctttgtctgtgaataacaatatggacatggtattgccatgaaagttttataaacatgatgcatgctttacaaatgatgagacattggttgtcttttttctgtatacataaccttctgtgtttaatttaaaacacgctccttgatttctgtcactgtcacataggtgcgtgaagctcatgaggcattgggtgaaagtggaagacctgatatagagttgcttgttggtggaacaactctcctcacttccaatgacatgctcgacttactgttaggggactcgagttacatttaattcgttcatcaattagaaaaataggagatagaaattaaattgaattggttttcctgtacgttgtaactttaactgttgaataggcagttcaaatagagaaaataataactttttt

SEQ ID NO: 437 - DNA, 404 bp, Glycine max
gtgattttctttttccggaagttgtttgttttccacccatgttacctttgactgttgtcactgtacattattgatttcactgcaattatgcagttacatactagaatttattttatttccattgtttgtgaattgtgattatatttcctgctaattctaggagagaatcatgagcaataaacatataatctttttatattcttcaaaatttcttgctggtgtaggaactatataaatgtaaatcaaatcttgctgggttacctagtgcgatggatttatttactgtttggatgttatttattatttttctgtataataatcattccttacttgaaccctttgaacagattttgaagtgtccacaggaagccaaccaacatcaaacatttacaaaggcatcccat

SEQ ID NO: 438 - DNA, 379 bp, Glycine max
agctagggcagtggacaacaacggagcggacgtcacagtcattttccaacaatcgtcacggcagcttcagctctcgctcttcgtctcagttagtctctatgcctctacttcgatgtttatttgccttccccccgcttaatcttattaatctgaaagaggtgtcttttaaagtggggttatttatatgtttatgatggatttatggaattgatttaacaggacaactgggctgaaaaaccagagttttattgaaatgatgaagtctgcaagggatagtgcacagaatgaagtgctagaaagcgaggaaacattttttctcaagaaagaaccctcctcgaacacccaaagaggtaagttttaatattcccttcttgagaaa

SEQ ID NO: 439 - DNA, 480 bp, Glycine max
ttggcgcttccctcttcatttaaacccctccatcccccatatttagcctccaaaactgcaacccataaagtcccttggtgctgcataagattccacatccatttaccgagaagggccagattaaaagtctgtatatctttgatgcctagaccccctttgtgtttgggtaggcacactttctcccacgatatccaagcaatcttcttgttgtcatgtccccctccccgaagaaatctccgttgtaatttggttaatttgttgataactgattgtggtaccctgaaaaatgaaaagtaataaataggaatagatgtaagtactgattgaataagtgtcactctccccccaaaagagataaatctctgcttccacctagctagtcttctttcacatttttgaataatgggttcccacacacgagctcgcctcggattagcccctataggtatgccgagatagacaaaagcaagaaccagctga

SEQ ID NO: 440 - DNA, 518 bp, Glycine max
caactcccctatattctccatatttgcgtcccaaaatccacatgcaaacagacattacaaaaaatccaacaagttggattttgtaccttccaatcttgtcaatgaagtacactgtgcaccagtatccagggacagtggcaaacagagccacggtaaacattgctttggagagtagaaaaacctcctctatagcattcattcgggagtccttgggtacaagtccacttgcagggtaaaagtctttttgtgttagctgaagactgtagaaggcaatgtccaacaaaaaccaggtgctggttgttcctagcaggtgaagtccatgcttttcaagaaactttgaagagaagaatccataagaggggccaggtgtggcagcaaccctggcatttgattcttctaaaggtatatcattatcaagaactttggccatatcttcaacagctttcttgtgatctccttccactaaggcagtgtaccttgcagtttctggcattttcattcgccagtaataagttaag

SEQ ID NO: 441 - DNA, 555 bp, Glycine max
atattttcaataatgtagttgatttaacacatattattgatgtgcaaggaaagattcttgtataaacttagtttgtcgtagactgagccaacaaataataggcattgtcatcattcaaacataaaatagttgtttggcacaatttataaaaatcaagtgattaatgagatttacgtttgttagtagcttaattaatttacatcatatttatgaatccaaaatttctaaaatgtacaaacatcttattttataagcacctcataatttctctaataaaacaatccacatggtgagattaacggatactcattagtcattgggaccatgtatggagaaggttggctatatacgttgaagcctcgacaattgcttgtgatttgtgtcttatgtcctatatgctattttgtcactaatatattattaactaccttcaattccttggattcttaaaggtggaaaacattgatgagaaagctggttgccgaagaacatataaacacatcaaaaacagaaatgattcatacctattttcatggaactgcaggcatgcaagat

SEQ ID NO: 442 - DNA, 457 bp, Glycine max
tcttttgtcacaactgttcaagtcattaatcatttcacaaaatttgggatccgcgctggcatcaatttgaattccctcggcaatgtcatgaatgaacttgttcaccttctcattgctccacttgttttcatcgtgcaccttcaagactttggcacttttaagcagttctatgtcgtactcgcaacaaaccaaacctttaaataacaaagcatactgactgaattttttctcggtagctggggttcctgtctgctcccaagttttctcggcagatctggtctgctcccaagcaatgaaattccgccactgaagttcggtttcctcagtaacacacagagactggatttctagcactccctgctcgaatttttccttacagccaaacatgacacttacaggatccttttctaatttgctgctgcttcggttctttccataaaaggttttaatcttaacc

SEQ ID NO: 443 - DNA, 415 bp, Glycine max
agaactacttatgtaaaggattattttacaaaagtgaaatggtcaaaacaacattcagggggcaaatagacaaaactgatacaactggtatccacaaatagaagaattcacacaacagtacacagaggtagagagagaaaaaggaaagtaattatctattgattactgagaattcaagtgtctcagcactctcctccacaatgagtgtcccaaaaaactacctatgcaatatctactgcactgctatttataacaattaactcctagctacctaactgatccatgtgaccacttaactaattgacttgtggatcagttaggtttgctatcttcctaatccttctggaatacactttaggaatgggccccttattcctaacaaaagcatagcaagaaataaatcattaccatctat

SEQ ID NO: 444 - DNA, 430 bp, Glycine max
tccctctgtcacgacaacacacgcacaccctccttccatccgtggtgtattttcgtggccccagatactcccacacgcaaagaaattccacgcgagctctgctacatgcatcagactcaaggtttccctcaaagataaaaacatgattttcgttcatgaattcaaagatagtttacacatgtttggcaaaatgttatttttgaaagagtgtatatattagttcgcaaatttgcagtaaaatccacggtaaacagtagcatatatagactgtgttctatcacaacaaagttgtgtttttcttgttcagcatgatctccaaatgaatttcaacccttaaccagtttcatgagttgttaagtggtggattttgtttactttgtgttgttatctgtcctttttattattattgttattcaattcagatatgtat

SEQ ID NO: 445 - DNA, 724 bp, Glycine max
gctgcctgcagttgttaccccctttagctggatgaaccattctgatccactataggtgcataaatttcttagaattctagctgcattgacacggagcaatggatctttcaatgcttcagcgagcttttctagtactttcaactttaaaattcgatggcagttactcttgctttctaaagccagcattgcaagggcctcaccagcaacaatttttacatgtttctgattttctggtatgttgtgtttgaaaaatatgttgaacaattctttaagtactccacctgtaccccctattctttccgttgcatcctcttccaatgccagactggttaaaatttctatgcaaagtttctgtagaagaggatgcttctctccatgccttaaaatatctctaatattgctgatggtgaaaactatctccgaaatctctcttcgaagatgtttcccagtggtgccatctgtactagccagcatcttcaccagttgcagagatctcttcagtgtcagaacttgagatggagtaacattttcactcttgagcaaccactcttccgcacgtgtgaagtctatgatctttggaaggaggcccctagtgtttccaatctttccacagttgtcaaggtcacgtgcaagttttttcagtatgaggagtcccaagtggttaaatgtccagaacccgtaattttggtgatcaaataaaagtttattttcaccaatctcatca

SEQ ID NO: 446 - DNA, 408 bp, Glycine max
tttcaagcagtcacacattctcatttcacttcttttttttttttttttttttgtggctcccttgtatccaggtgccacagaaatgctaatttctgcaactaaatcaatcacatgttctacctaggagcagcaatagaaactttacctgcaatggaccaggacggactattgtgtatccaaggccagatcttcttaaggaatcttcaccagcctggagaattcaacattgacatgatcagacatgaccccgaaaataaaagggaacaaaagtagcaactttcagcaaggtaaaaaatcaaacaaataaatgaaaccaaccctcttggctttaagaacctgctcccgcctggaaggctcaattcctagtccagaacatgaaactaatacaaaatcggtttcttgcccagt

SEQ ID NO: 447 - DNA, 506 bp, Glycine max
tatattgaggcgcatgccatatgctttccttcgatcaaaagtcaagtagggatttacttcaataaaatgatagtggctaccaacctgaatttttcataactattaggcaatgtttgcttcaattcacttggaaaacctaacaagaaatcaatttgtttggatatttgaactcctaaaatttattattctgacaagtgtcaaaattgtaacaatatttggtctgacaagaaagaaactcaagcttctgatttgtgaaacagtagtacacaagagagatgaaaaaaattgtctacatttgcaacactttgaacttaaaaaggccaacagcatgcacatactcagattttagtctccagaggacccttaaaacaattgaaatcctcaaataatcaaccagtaaaaaccgtaacgaaaccagcacaaaccgaatagcagtcgttaacatcacttcattatttcatacgttacaataagttaagaaaaacagcttatcacactgcattcag

SEQ ID NO: 448 - DNA, 517 bp, Glycine max
tggattttggattgctataatggtaatatgcttatttaatatatactcaatctttggtggttggtcaacaaggggaaagttatagtagtagcaattgctattggatttgggttaccattggagactaatcatttacttgtctttgaaacaatcttgataatgtagttggtttctgaattaaaactagtgatattttctacctggtaattgttatggcatgtcaactgcctcctttattttgctgagcagcttaggggattgttatagcccatgactaaacataactccttctatagagtttgaagtctgttgcatatgaaggttctaaaattctatagtagcaatttttctctaatggactcgatccttctttggacttgagtatttatcaataattggatgtcctatctactatatacatggtgttaggcatctcatcatatatgctgctattgtgtgtgtgcacttacacatatttgaccctattgtggattgaaaaggatatgttattcattaa

SEQ ID NO: 449 - DNA, 510 bp, Glycine max
aaatgtctttcttgaatatacgggagcccattcaatgactactacatgcagatgcaataaaacagtctcttctaacagtgtactactcaactccgccatgcagaagatacttctgaatcaaaatcttcttcccaccacgtgcttgcctgtaatattacacaatgcaggcaaaagatttataactgaactacagtcaggccaaataagatttaagatatcataataaaccctctgtagcaggaaattgaatcaatgctcaaacaaacataatgagaatcagctcgatcatttgtataaatatgtaaaaaaggtgattacttgtgcatgtaagaataataaaattaagaataacagtacataaaacccacaagaagtttcacaaaaatcagtgtgtctgcccttagatcttattttgaatgcagacctaccttatagtacaaccattgatattttcatataaacaaatagaacaagagaaatagaacaaaatctgaagacccatggaaactt

SEQ ID NO: 450 - DNA, 496 bp, Glycine max
gctgaaagagaggaattaacaaaacaggtacaggacgttgaagacaaggtgcgttgcagagcagttgatgcaattccatcagggcaaggtgaagcaacggcacaggctgggactttagcagagttctatgaggcccaagctcgatggggaagggaaatatctcctgatgaacgtgagaagatgatggaagaagctgccaaagccaagactgctaagcttgtcagacaaattgaacataaaatatttatagtaagtatctacatattttatacagatattatatgcttgagatagtacttggtttatgatttatatcaccagaaagtcagacttggtttatagtgcattagtggatataataaaacttattagcattgttatagtagtccccagattggaattcttgattgattagaatataaattctgccagctttttttctccttaatttttgctgctgcatgtttgtctgcttgcagcaggctgtaatttattt

SEQ ID NO: 451 - DNA, 544 bp, Glycine max
attgccgaggcattcgggtatccaattcggttggcagagtcgtggaaggggaatgatccgtgtgatggttggaactatgttgtgtgtgctgccggaaagattattactgtcaatttcgagaaacagggtttgcagggtaccatctcccctgcatttgccaatttgactgacttgaggactttgtttctcaatggcaataatttgatcggttctatacctgatagtttgatcactttgcctcagcttcagactcttgatgtgtctgacaacaacctctctggattggttcctaagttcccaccaaaggtgaagttggtgactgcgggaaatgctttgcttgggaaaccccttagtcctggaggtggaccaagtggaactactccttctgggtcttcgaccggtggaagtggtggtgaatcctcaaagggtaattcttcggtgtcgccaggttggattgctggtatagttgttattgtgttgttttttattgcagtggtgttgtttgtgtcttggaagtgttttgtcaacaagctgcaggcatgca

SEQ ID NO: 452 - DNA, 408 bp, Glycine max
tcatccacttgttattaatcttgatcattttcaacaagtaccctcttgcaagcttcgtagcacatgaaagaaatcccagcagcaggaaccaattttaagcaacttagtcacaagcctctatacaagccaccaactccctccttttcaagtatactcacaagggcatgaagcaagttcctatattgtcttccatttagtgccccagcttgcatatgctcacaagccacctcaagtggaaatgttgcactgctcgaaattgcaccagcagctgatccaattagaagagtcatcacattcccaatctcttactttttgaaagctttcttgtaagcttttctaagtgtgtcataagcaaggtagtttgcggcagcataagggactacaccaattagactagaggtgaggcct

SEQ ID NO: 453 - DNA, 540 bp, Glycine max
agagagataaaggttttgagagagagttggaagcaatggcagacataaagcaccgcaacattgtgacacttcatggatattacactgcaccactctacaatcttctcatatatgagctaatgccccatggaagtttggattcctttttgcatggtatgtatttgtttctttctaacattacattctgagacttttggtaggagtcaaagggggaagaaatggaaggaaatcatgaacattttgatgcattatagtttttactattgactctcttttgttcacatttttgctctatccaagtattcctaattaaaaaattcaagactaggatgaaatggtgaacttcttttgttattcagcagcacatcaccaattttacaacatgtgattcattgatggaaatgcaatttttttgtgttatgtttcatgcttctggaattttgtcaatgataattgaactgagttttctaatagcaaagttgaaagtcatgcagggagatcaagggagaaggttttggattggccaaccagatatagaat

SEQ ID NO: 454 - DNA, 506 bp, Glycine max
tatcatcagttgatacaagagcatcacttactgtagtttcttcattatttgccttgccattattctcactggcaagtggaagagggtctatatatgtgtagggaagaactcattttttttttttactttttgaaaattttaaaatattgataagtttctttgtaagtaaaatagtgttgttattttttttttttttgtgacattctgagttgtgaatatggtccaaggtgactttgatctctgttgaagctggcttgtggtgcacaagggtataaaatcaggcttaagattttcatttttctcactgcattcttaatttatgctacaaatcactatggtcatatggtgcgaaacattgtcctggattgcttgactatcccttagttctacatttcaatgattttaaattatgaccgagtgattacccaaataatatacacgtttgtttattattaaataacattggtatgaaaacaacagctgaatattttctgcaggcatgcaag

SEQ ID NO: 455 - DNA, 474 bp, Glycine max
ggtttggtttatattgctgatattggagtttgtatctgcttatattataacttttttttggcttattgacttgatcagctgaaagatgaactttgcaaggagaatttacagcttgcaggtatttaatttcttttatttaatggtcggcctataattaaattgtagtagagcttctcaaactattgcctttactacagaggaaaatcttcaaaaggaacctcgtatcatggaacttaggaatcaagtaagaatacaatcctatgattagtatgcttttttcttttcaatttattgctgactactgactttttcttcttcctcccatggaaacagtgtagaataattcggacaactgagttagctgctgctaaggagaaactaaatgagcttgagaagcagaaagaagacatgttgaaattgaattccgcagcatcccttctccaaaggattcaaggtatgacttgtaattttagt

SEQ ID NO: 456 - DNA, 558 bp, Glycine max
aagcttgcatgcctgcagttggcttcagtacttcatgtgtctcctccttcttggtggactctggactgtatcctgaccaatagggcagaggaaacgggaacaccggagaataatatgcaggatataacattggataagatgactgtgtgttttctggctttgatggggcaggctctccatcatttgagtttgtggaatccatggattcgcactcttcgtcgaggggaggaggagctggcaaggggttattgccttctgtttcagtgggtaactgattagcagacaagaagtcttgctgtaccattgcagtgtcagctgcctgcaagtcacaacataaatacaagaaacctagaaaaatgagaaggttccaaggacaaagggcaagttacatatttataatattggaattcgaaaaagcatcacatgagaaaatgcaatatctccaaacttccaccctagaaccatgatttcatatacaatctaaacaaaaattattaatgcacagaaagccagtcaagataaaaaaaaattgtcaaatccactgcaggcatgcaagat

SEQ ID NO: 457 - DNA, 495 bp, Glycine max
ggagttatatttcttgttttaagagcaccaaacaaagaaactggattctccacacacgacaatcttgttgatgtttcctttgaaaaaatatctaacaagcgttcattttcataccaataggcagccatactgaactttcctctcagaattatactttccattttcataccatgggcagtcatttgtttggcaatggtggtaacttgctcttcctttgttccttcatcagattcttttgatggacatagggcatttgtaataagacagagacgtttctttcccttgtttgtcattccaaatttttttattaacatatccacgccaacaatgacaacatcaagaactaacatcaaagtcaaggtgatatgatcagggataaaaacaagaacaatttagtaattcctagcattcgaggtctaggaacctccagagaagaagctaagaaagggaagttttattttctgcttgcttcatcacgatacatcattcattctt

SEQ ID NO: 458 - DNA, 483 bp, Glycine max
aggctcttgaggtgataaggagtctgccatttgaacctgatgttatgagttggaagagtttattaggaggatgttggagccataggaatcttgagattgggatgattgctgctgacaacatctttcgcctggacccactagactctgctacttatgtgatcatgttcaacttgtatgctttggctgggaagtgggatgaagcagcacaatttagaaagatgatggctgaaaggaacttgaggaaggaagtcagttgcagctggattattgtgaagggtaaagtccaccgctttgtggtaggtgatagacaccaccctcaaacagaacaaatatactcaaaattaaaagaactcaatttttctttcaaaaagagcaaggagcgccttctcaatgaagaaaatgctctatgcgactttactgaacgaaaagagcagcttcttgatcatagtgagagactagctatagcctatggtctcatatgca

SEQ ID NO: 459 - DNA, 489 bp, Glycine max
aacatcattcgagggtttcatggattccaccggttcaaagcaggctgaaaagcaatgtggatgctgcattcttcaatgagatgaactacacaggctatggttcgtgtgttatagacaaccttggccaggtgattgtttcaagaacgtgtttgcctgtcatggaaggagaagcttttggtcttagcttggctgtcaagtttgcgatatcattattgggattgcaaaatgtggattttgaaacagataacaaagaagtggcagataagaggcttttgtctttgaatccaacttatgctgttggttttttgaggagacatagtatggagttgctcatgctttggctaagacatctccatccttcactagtcttcaagttttctatcaaactccctatttcattgctcatttaattaataatgaaatgccttgaatttgctttcgtcaaggaaaaaaaaaagagttgggtggtaaacaaactaaatttaaaac

SEQ ID NO: 460 - DNA, 532 bp, Glycine max
gctcaatcaagtacacccatcatccttcttctcttcacgcctagcactcaaatttgtagcgcatgctataactattaactaaccctctgtcccttcttgcaacaattgcaacctccttccttccactcttttcccatcatcattccacacctacctttctctctcccccatgttttaactttcttcaacactcactgacttttccactatctcttccttcttccattcacatcattttctcttccttcttcctccccctttttgttgttgttgttgttgtttatttatcaattatcaccatgcccctcaaacaattcaaccaaagcttgcaactttgacaaccctttggcctcttcttcttgttccccttaatgggtctctctccaattcccctcacaaagcctatctattctgatgtctgaatttcactttggttttcatatgttcccaaaggctacacctttgcgggtgtagaagtggataatttcagagtttttgggacaccccattttgaagaaagtgtgtgtgtgtg

SEQ ID NO: 461 - DNA, 528 bp, Glycine max
ctagagtcgacctgcagtgctcaatcaagtacacccattatcctccttctcttcacgcctagcactcaaatttgttgtggcgcatgctataactattaactaaccccctctcccttattgcaacaattgcaacctccttccttccaccatcataccacacctacctttctctctcccctgttttaactttcttcaacactctctgacttctccactttctcttcttccattcacatcatttctttctttcttccccttgttgtttatttatcaattatcaccatgcccctcaaacaattcaaccaaagtttgcaactttgataaccctttggcctcttcttcttgttccccttaatgggtctctctccaattcccctcacaaagcctatctattctggtgtctgaatttcactttggttttcatatgttcccacaggctacacatttggggttgtagaattggaaatttcagagtttttgggacaccccattttgaaaaaagtgtgtgtgtggctgcaggcatgcaag

SEQ ID NO: 462 - DNA, 456 bp, Glycine max
tttcaatttagattgaagacataatagccaatatgctctattatacatttataaactaacatttttgtgaatgatctcagggtagtaattctgaaacaaaattagagcccttttgctgagtgagttgagctccttggttccttgcattggtgtgttcctcaaatcaaaaacctgaagtacagagttcactcctccttccctaaagcaaagcttcttcacagccttttcaatcaattgaattctccacctcaaatacttgtcacatttgttatctgatccaaaggtcttcttatagacgcgcctgtctttgaaaatcccacaaacatggtaacacacaggacgaccttccctatctttactgcacaagaatcctgcattattatttccaaactcagcccccaaatcctcatcaatgatcctatcaacgttgttctcgcgccgccacacaagtgtctt

SEQ ID NO: 463 - DNA, 322 bp, Glycine max
aaaagaagagcctccacagaataacccatttcagagctttccacctctaagtcgttagagttgcaactctgaaaccatgaatccgcaatggtaggggcatcatcaacatgctccttaagagccttaatggactgattctgctggttcgatgctggaaaagttggagtgtagttggatgacttcttggcagctattaaaaattttgtaggaacaatttgatagtgtgtggatccaaaatcactgccataagaaagcttttctataatattaaagtaatggtatgatgaattcaagagtctctttcctcccctgagtccaatta

SEQ ID NO: 464 - DNA, 568 bp, Glycine max
gagcatttaggtacccaatcagaaaaggagggagacacagtgacaaaggctgataacagaggcacagaagcaactggacctgttacagtacaggagaatttaaatgtccagaaagctgcccagtggttccatgttgatcaatccacagaaagcaaagcaaagagtactaatgaaacttcttctatagtgaaagatgcagaaaggatgggaagagaaagagagtcggaaaaggatcatcttacacagacagaagaggagggggatagagaaagagaacgagaaaaagacatcgagaaagcaatgctggaggctgagagggaaagggaaagagaaaaggataggatggctgttgatagagcaactttagaggctcgtgatagggcatatgctgaatcttgtgaaagggctgcatttgaaagagcaactgtggaagcacggtacaaggcactggctgaggccagggaaagacttgagaaggcatgtgctgaggccagggataagtcaaacattgataaagaaactatagaggcaagactgaaagcagaacgcgctgctgtagaaagagcaa

SEQ ID NO: 465 - DNA, 458 bp, Glycine max
atcaccatcaccatgatcccaaccagtattatggtcacttttagagtcttataattcctttaattatccttgacattttttttttaattctttgatcaattaacgctctcataaattttctcatttgttattagttgtcttgaaaaatactaataacaaatatttttttatcatagagtaaggattcaataaaaaaattattgaaaaaccaacataaaatttgagtatttattaagaattaaaaatatatttagtcaatttataattatatatgttacatgaaaagtaattaggatcatgatatgatgatctgggatcatataataatttctccataataaaaattaacatataaagtcacgtgggacttcccttgagcaaatgttgataagagagttgaataccattgttaaggttgatgcccaaaatgttttgtctgaggagagtacagaggcaca

SEQ ID NO: 466 - DNA, 441 bp, Glycine max
ttattaattagagtgtgcatatagtaatatttggggggaaatagatcaaaccgcaatgagcaaactattcgtttatatcaaaaaaaaaaaaaaattgtaaatcttctggtgactgtgtggttgttaatttattatatcttgttactcttttaagctataaaagagtattgtaatttagatactttccaagttgattcagtggctcagttaaataaagatcacagtcgacattattttcatctgctggcctgttacaattttatgctacagcatgttaagactttataataaagaagccaacgaaggattttgtcacacgcgttccatggattttatttatttatattcccacttattttttgcttagctgaaaatataaagtgtcccgtcatgtctgtctgtcgggattcatcatcaatgtaaatttctgaatcccacgca

SEQ ID NO: 467 - DNA, 876 bp, Glycine max
aagatacaagcgcataccaggtgatgctgcaaaccactgaagtcccaaactctgggagagcattacagaatcacatcaccacctctccccccattgccacctacgttaaacacagacaccaaagtagcattgtcataacctccgttgcacagcatccacatttcttaacatcaatctcataatagtactcgtgatagcacatttcaaactgctcaacaattacattataaaaaataaaaaatgattgcaacaacaaatctgataccataaaacactaaattttttaaaaaaataataattaacgctaaacacctagtttcaaattgtggttgaagaccacaattacagctgcaatattacagttttgaaagtctctactacctaactgcaggtatattatcaacacatcaacatagagaagttacaattagaatttgttttattttttcttttgagatgacaatttagaaagttaactgtaacttacataggcaaggtatcacatcaaagttgattcctaaaaatcatgattcatgggaatgtgtaaaatatgtgcagagtgaattttaaaaaaatggaacaaaaggtatcacatcaaaatctattgaagactttctacaataaaaatgagcagaacagctatacttacataggcgatgacatgcggattaacgagtaacacatttgcttcattttcttaaccaaaattgcaatatagaatgtagtcatgtagataacatcatcaattagaaactaccataactatcctaagaaactggaaaattgttattgaagttacatcatgtgcaaggactaatgctaaaagttgtagaagcaaatgtctttactctttttgagtattcaaccacaatatct

SEQ ID NO: 468 - DNA, 410 bp, Glycine max
gtgctacatggatgacaattattgttccaaccagtatgacagcatatatttatctttattctcatggagaagtctcatatgctgcatcacaaccagtgtaatagatgcatccactcttattagttattattcttgtttgcttggctatcactcttttgaatttgagttcatgtttggtgacgcttatattttaagaaataatttttcaatagctttctcagaaatctagcaaaatattgaaaaaaaaaatgttttaaaataagctgaaccaaacatgcactttgtaatgtaatattttcattttttaataatgttttatttgatgcttagaagagaattatttaatgtaatattttcatttttttatgcctttgattaaagaattagtttttgatgaaccaatctaaggg

SEQ ID NO: 469 - DNA, 402 bp, Glycine max
tcttcggtttcgaagcgcatcctgaacctcattccagctgaataagaataatcaaggctctttaagaatctgtggataggtatgatgaactcagatgtactgaccctacaaagacagtggaatatcaaagacactgatcagatgccatactttgtaagaaggaaagaagaaaaaaaaaacaggtattacaaaaaaaaccatgaaaacttagaccacaatagtacatacatgtaaaatcatcaactgaagaaaaccatttcaagattcatacgttgtgctagaataaaagaacaatgtagtctaattctagatttattgtcatcaagaatctgtttgtttgaaaaagtaacccaactattggtacactcaagtattagcaataacaggagcaatagtcattgc

SEQ ID NO: 470 - DNA, 433 bp, Glycine max
atacagacaggccattccaataggccatagagggatcttggatattgatactatttatggcatccgaaaagctttccttccacaggtataatatacattgtcaaattgaacatgttacctatcatagataataactccttacgataatataaaaaaatagtattgaactccccaacattctccttttagtaataatgttcgttaatgttagcttcaccataattgtgtaccaattgttctagacaacttacctttgacttgaaactgtttagaattacattacaacaaaattgattcatttgtttgaactgatactttgtattctatatactaatactcattttcttgttgattccatcatgaaattaggggataaggaaatatactcccttaggacaaccaactgctcaacaagtgttgattgacaaaatat

SEQ ID NO: 471 - DNA, 447 bp, Glycine max
aacaaaaaatagtctccctaaacctagagacaaatagagaaacaaaaaatagtctttgtgatatagaattcatttcttcaagaattagaacaatatctaatgattgtgaaaaaatcaacatgaaacgagtaaggatatgtttgtataaacttctctcaagttaaaatcaacttaggcaattcagctttttataaaaactcatctaaactttcaaaaattcattttgccttctagttcatacatcttattctctacataattttatgctccaggtttcctccatcaaatattcccatcactaatttcatctcataaagagtaacactacacattaaagctagacaaacttaatagttaatactacgcataaaaattcttcaagaggctaattctatcttcagttatattgtggtaccagtagttgattactcactttaattggaagtt

SEQ ID NO: 472 - DNA, 455 bp, Glycine max
aactgtcatacttattactcttgccaaatccagcagtacctgttccatcgttgtaactgttacatgttgcaaagctaccagcattcccataacttccaccagcaaagccatttccagtatctgtaccatcactggcattcgccatggcaattccagggtgctgactaccggcaaaacactgccttccaccagcagcagcactaccatacctactgccactaccaaatccagcagaactgtcataattattattcttgccaaatccggcagcacctgttccatccttgtcagtgttactggttgcatagctaccagcattcccataacttccaccagcaaagccatttccagtacctgtaccatcactgccattcaccattccagggtgctgtttaccggcaaaactctggctgccaacagaggcagcactatcatacctactgctgctaccaaat

SEQ ID NO: 473 - DNA, 466 bp, Glycine max
aattgaatttggctcacaatgacttcggttctgtgattccttccaagtttggcttgctgaaaaatttgaggtacttgaatttgtcaaatgctggctttttggggcaaattccaattgagattggtcttctaacaaagatggctactcttgacttatctacttcgtttactttagagcatactctaaaacttgagaagccaaacataggagtgcttatgaagaacctcacagaaatcacagaactctacctagatggtgtaatggtatctgctactggaaaggagtggtctcatgcattatcttcaatgcaaaagcttcaagttttgagcatgtcatcctgtaacctctcaggaccaattgattcttcactgtcaaagcttaagtctctctcagtgattcaattgaatttgaacaatgtgtcaagtccagtaccagaatccttggcaaatctctcaaatttgaccac

SEQ ID NO: 474 - DNA, 375 bp, Glycine max
aggatatgagattttagaatctgaatgggatgctgtaatcttaattctcatgtcccaattcacaaaatagaaagaaaattgtatgcaattcagtccccataaattacatgtattcatctctggcttgctttagttttccaaaatagcaattccatttaagtttatttagggaatacattatatgtcttaatagattgaacttggtaaggtgttgggggtcgggggaggactttgctaagaaaggtgaaagaatagaaggttgaagaaaattcaagtcttatttaaaggatgtagcattagtttgaaaaataattataaagcatctctgtgtagaaatgtttagactctatacaaaggaaacaaaacttacttatg

SEQ ID NO: 475 - DNA, 462 bp, Glycine max
acgcactgtctacgttgattataataaccgatgcagaaagtctgaattctaacaagaaaatcttgcatttcgatccatatctgatcgaggcttgttctgatagcttcacgttctttgcctcttccgctttgtcattaattatgattatttaaataatcaaactatgagcacccttgttactaggagaggataaaatccatcaaagggaccttcttacactttcacaaagttccaaattaaagaattaagatgagcataaattaagaaaagcctcaataaaccctattatatgtaacagatctttgagccaccgtcaacaaagaatgaaagcctcaacaaccgtttgatcctccttgttgaggaccttgacaaccaggttgttggtcttcgccaccgaggcttccacaaaaagtttaccttatcaaggttgtcgaagaaatattttttttattgggagggcta

SEQ ID NO: 476 - DNA, 499 bp, Glycine max
agtgggcagataagaggtttcttaactaccatgtgtattttcagggaggagatattggacaaattgaaaaccttcttcctgtggtgttgttagcatccaggattttgggagatgttacaaattctgaagaagggcaagaaaaaggagataaaactagagtgagttcttctgagggccgggttgattactatatctgttcttccgtgaaaaatgcttttgaaaaggtaggtattagttaagaaacaataaaaaaggttgatatgttagaagcatgtatataacttatagtattttctgctttttaatttaaaagtaaaaagaaaatatcacaatgtctttgatgattgtagatgatggaagcagcaaatgccaaatctgccgagtctgaaacagagaaaaaaatcggtgaagttatacttcaattagctcaggagactgaatatttggcattgaaggagagacaaaattatagtccaatattgaagaaatggaacacaat

SEQ ID NO: 477 - DNA, 450 bp, Glycine max
gcgtgtttacatttgataattacctatgagaagaaaatggaaagacaaagaaccaagagtatgtctgtattcaataaggaataaacaatagggcttcatgcttctactgtttaattttttctataactttttatcatgtgagaggctgggtggatttatttatatgcaattttttaaagtgaagttacttgactgcaaataatttcttcacgttggttgaaaagtggaaacttgaaatcagagtttgattaattggatggcctagttatctataaataggaataatattgcaagcaatttgttgagcttctcagatgaaggtttcagtcaagcagattgaagcacttttatgcaaattttttgagaaactttattctagtgcagggaattatcaatttaatctgatatagtcactaaattgatagtatgtgtactcctttttttcaggac

SEQ ID NO: 478 - DNA, 470 bp, Glycine max
gccatcatcggccatgatggctctgtttgggctcaaagctcttcttttcctcaggcacgtaataactttcttttcattttatttgctcattctaccccggttccattcatagacctgcctataattatcatccaaccttgtttagagacaatttccatgtgaattttttcatctcggcaaaagctgttagttttatcttctagatttttttttatctagcatacatagatctattgtcattttttctttttttatttgacgtgtgatgatttttttttttttttgcatattgtttatttatacttcttttcataaccattgtaagaaaacttttatttccttctccttttaccctatcatataatttgacatgtaatataatgggttgtaaaaagcaaaatgaagtggatcaaatatatataacattgttactttttatcttgcgacgacatttttatctattacttcct

SEQ ID NO: 479 - DNA, 462 bp, Glycine max
aaaattataaactagtcaggaactatactcttccttgttttattttcactaatccttttctatacaaaagaactatgacacttaaattctcatatggtaattacagtagaataaaagatcgtaaataatatttctgaagctttgatttttactgaacaaaatggcgtcatgtaatccatgtacccacttcacttaataggataaggctttattgttgggtgttttgtaaacaaacaattcaagaatcatctcaacttttataggtatagacagctttgtgaccacaaacatcatcagagtggttgactttggtttgaaccgtttactagaatgcagccagtaatagtgtgcacgtttgattagctccatcggaatcaaaacacataaaatgttcatagcaggccacggttataaattagataaaaggggacaatctgttttgagtcatgtattatatgtaag

SEQ ID NO: 480 - DNA, 415 bp, Glycine max
tttggaagatcagatacagacttaaaaatgtccatttattttgcgggctggatttgtgttttaaaacatgggcttcatgagttgaatcttaaagggattggaccagttcatataccaatctctctgcaattttgaaaaaaactaccacaggggagtttcatagacctcaaaacaaggatctttgacttgaaaatctctagaatcatagtcttcaaaattaagaaaagttaaaatcagcgacatttcaaggactttgtagtcttgtacagaaaacaacgagcaacgagagtggttttagagtgaaaagtgattgaaccagcttgggatgtcgttcttgttatgtgtaacattggaagagatgcggcaacaatgtcctttcactggatttggtgctgcttcttcaattatcctcttt

SEQ ID NO: 481 - DNA, 490 bp, Glycine max
cttgcatgcctgcagtcattgggaacatcttctccgcgatcttgaccttctgcttcgcattaggtttaattcatctttcccttttattaatttttcattttcattcgttgcattttcgctccaacgcttgatctgcttctgtttacctcgtatcatgggtttggccttttttttttaatcgttcctttatttgtgtgtgtgtatattgttgtcattgtctggtgttgtacgatgttgtgtgctttcgattaagacagaaaatgtgtgtttttttataaataaataaaaagtgaaacttgaaacttggggtgggggtctgctatttgttcgttggattgttttgcttaggttgtcttatttgattattttcatattaaaaaacgaccgaagtttggttaatgcttttcttctattacctagtgttttaaacattaaagtgtggtgtgtgctttttttaaggacaatgagttctaatgtgttgtttttgtct

SEQ ID NO: 482 - DNA, 575 bp, Glycine max
taggaccagccaacctgagtcaatattcccaagaaacactaaatatcgttacctaaaggcatgaacagagatctcttgacaacactgcatttgtataatttacaatgataatttacaaaacaaatttttgggatccttgagtcaccactttgggaaaagttttatttaaccaagaccctgccccaaggaatgggtctctcaggtatgcttgtagagatacccggtcaaagactaaaaaatactaacttctaggagctctcagacaaagccaggcaaagatatgattgacactggattgtatagaaagtttccttggtgtattcataacatttaaaaatttatgatttgtttggcagaatggaaatgtgcaaaaagttgcaaaacacagaaaaaaaaaactccataattatattctaaaaatcaaataaactctgtatctctcaatttgttttctatccctgtatacaaaagcataacaaagaattaatttatccattactttattctcttttcttttccatctgtaaaactaaacatgttcattagcaaactatgtagtatacctcttttttgct

SEQ ID NO: 483 - DNA, 470 bp, Glycine max
acccctgacaccagtaaatatgtcagacataaaaatattagatatgaaaaaaaattaaaatcacatgaaaaatcattgggttagacacatattatagagaatttaatgataatacaccgcgggataaaattattattaatatgatttttaagataattttataaataaatatatcataactaatagtttgtaattagaaatataatttgataaaaaaggtggcgtgactctaccaagacaattcggtattatttgtaaaatcatgcctttaatcctctaaaaaacttaccctttgtaattgttcatagcataggtgaattatttttatacttagtttaggttaatagagaagttttggaggcttaacttttgggcactagttcaataggatgctgacaagctttaaataattctaagatagcaatagggggtcctctctttctcagatacatttcagacctatctatgag

SEQ ID NO: 484 - DNA, 448 bp, Glycine max
ttatgtcaacatttgtcggtcctgttggacatttattggattccgtggttctttctgaagatatggctgtctcttgatagatgatgttagatgtactaggctgttgtggaataccctcgaccttgttggccttatcctcttttctactcatgtcattatctggtgatctcttagttgaggataaagattgtcttgcttcactcaaattcccctgaggaattctaggacttgtttcatgcaataaagtgccattttccatacactgatcagaaactgtatccaacctgtcattcatagctgaaacactcatctgttggagcacatttagtgcagcatcagccttggggttcatccagtctacatggctaaagatctcttgaaccttcgcaaatgcttcaattggaagtccttccttctcctcaaagcatgaggtaccatccgcaataac

SEQ ID NO: 485 - DNA, 440 bp, Glycine max
ctttcagatgatacgttatgagggtgcaaagggtcctattttgaccatccatgaaggtgaagaacctcctgggttttggactgctctttcaggtgattctgacaaagaagaagaggtcatggtcatggaggaaccctctgaaggcatggaaagtgctgagctggttgattcggggactactggtccaagaaaagttgatgcatatgatttggattttgagattttccacaaggcacttgctggtggggttgttccacctttttccttgtctgatacaggattagaaacttgtcttcctgctagagaacaaggttgggcaagactgaggaggaagtttgctagtggattgctcacatcccccaaattgaactgtgatgctgattcagacccatgcaatgatcatcaacccagtgtagatgtggaggttgaaaaacaagatt

SEQ ID NO: 486 - DNA, 433 bp, Glycine max
gttggttttatagctgggcacactgtctgccctaacaatgctgaatatcttttggccacctacaggagcatttttacgtcatgtattggacaattcatttgacggttggattgcactttttttttgtcgtgatcttcgctttctctatcagcttcaaaggaattcaaactcttgctgggttagcttctggctcctttttaaaatcccttttgtgattatggatgggatcagcagacaagtgaggaagatcttaggattggttccctagtaacatagggtgcgtatcattgttggatccctccatctaagaacattatgttatcaatttaaaacatgaacttgtatttacatgttgaatgtggtaaccgcagcttaatgttgcctagacagcagccattgttattagtcatgaacgttggattctgtaattcct

SEQ ID NO: 487 - DNA, 425 bp, Glycine max
atagatgagttgcgaccatgtttgatttaattacttcggtcctctaatttatttttaaggttcaatttgattttcttatttttaaaaggttcagttaggtcctttattttttaaaatgggttcaatttggtcccacttaaactcattttttgaaattgttcgaagctgttggaagaaaatgggaccaacccaatttaaaaaataaaagacctaattgaaccttttaaaaataaagggaccatattgaagccaaaaaataaattagaggactaaaatagtaattaaacctatacttctggataacaaattgcatgctttctgttcattaaagttaaacaatacccgaagggtggtctatattttttttctgattattgacaaattgattagtgtttcagctggaattgaataatacatgtgttgaa

SEQ ID NO: 488 - DNA, 417 bp, Glycine max
acattttttctgggctggaatcccttgatgattttctcacccaggctgccactggtacaggtgagttactatattccttgtgatttaccaaattacatcaactctcttcatatcatttagctttcaagagcgtcacttgtattgtgccgctgcctttaaatctcactgttatggttgactggctcccagccaactgtaatttgtaagtatgtgagaccatgggtttctccagtagtgattggaaaaattttgtgtgtaggaaaaccagcccttcattcttttaatgggaagggtggagaggaaaattttgtcacacctgctcctagttccattaactcttttggggaatgtgatactacccaagttcaaaggtgtcccgagtatcatactcctcaagattcattaaccttcaatgaa

SEQ ID NO: 489 - DNA, 516 bp, Glycine max
gaaagaacaagtgtcatccttatatccagccctacgtagtagcatatgaaatttgcgaggctcaaaatgcatgtcatcctaattttttgttggaggcagtatgtggttagaactcacaaggagatagataggaatatttgctttattgaaggaaacagtgttgcaactttattatcagtggatctagctcatgcattatggataatgccgtgtgtttcctacatttctgatttcaccaattgtaaacttcacactatgtattattttttcttacactttataccttgtgggttttgcaaggtacgttgcagtggggaatgaaccattcttgtcaacctacaacggttccttcgaagccacaactcttccagctctccaaaacatccaggcagctctcacaaaatccggtttgagcaatcgtgtcaaagtcactgtccccttaaatgccgatgtataccaaagctcatccgaaaagccatcggatggcggtttcagacctgacatcaacaatgtgat

SEQ ID NO: 490 - DNA, 486 bp, Glycine max
tggctatgctggctttcatgtggtctcaagagctgcccttaacatgggcattagcaaacttgttttcccagtctaccgcaacattattgcttttctcctcctccttccttttgcctacttcttggaaaagtaattagtgccatgctacctcccctaacatatataactaatcaattaattaatcccattttataagaggatatatataaaattctgttaaaacttaaaactttccagttacaagcagctgtttgttttgcattgctcaacatttttttctcttgtccaggaaggagagacctgccattactttaaacttcctcttacagttctttcttctggcacttgtcgggtatgttgatttttttatatcacttccaattaattaggtttaggtgattgaaaagaaaagaaaaagtaaggaaaacaatatgtatatattactgttttttgtttttgtttttaagaaaaaagaaaaaaggtaga

SEQ ID NO: 491 - DNA, 417 bp, Glycine max
tttaagatgtttgaaacaattaaaaggaagccagaaattgatgcttatgacactactggtcggcagcttgatgacattcgtggtgatatagagcttagggaggtttgctttagttatcctactagacctgatgaactgatattcaatggattttctctttcaataccaagtggcactaccgcagctttggtaggagaaagtgggagtgggaaatccacagttgttagtttgatagagagattttatgatccacaggcaggtgaagttctcattgatggtatcaacctcagagaatttcaactgaaatggatcagacagaaaataggcctagtcagccaggaaccagttctctttacatgcagtattaaagagaatattgcctatggcaaggatggtgcaactgttgaagaaatcaga

SEQ ID NO: 492 - DNA, 421 bp, Glycine max
gatttcttcatgtgttgccccatccttaccataggctatattctctttaatgctgcaagcaaagagaactggttcctggctgacaaggctgattttttgtctgatccatttcaattgaaattctctgagattgattccgtcaatgagaacttcaccagcttgttgatcataaaatctctcaataaaactaataactgttgatttcccactcccactttgccctaccaaagctgctgtagtgccacttggtatcgaaattgaaaatccattgaatatcagttcatcaggtcttgaaggataactaaagcaaacctctctaagttctatatcgccgggaatatcatatggctgttgaccataaggctcataagcatcaatatctggtcgtctctttattgtttcaaacgttttaaaggcagcg

SEQ ID NO: 493 - DNA, 400 bp, Glycine max
aagcatactatgacatgcttgtgaagtatagagaggaattaacaaggcctattcaagaggctatggatttcatgcgaaggatagaaactcagctaaatatgctttgcaatggacccgtgcggatcttctctggtactttatttttttctctttatagaacacacacaagaggaggatcctattccccttaattaattctcattcttttattttaattcctctcttctctaccactttctcctcacagcatagcgtaacaacctccaacttttgttaccaaaaagtgttcaattattcataataattccacagaaaacgtattaattaatttaattattgattatgtaaagattcaactatgtgtaatacgtgccgggggcacaaaattttgaaccgagtt

SEQ ID NO: 494 - DNA, 418 bp, Glycine max
acaacctacaaaaaatatgaaaatttagcaaactccaaatattttcaacaatgccacaggaggacaactgacaaaacgcttccttagcggctctacggcgtgcttccagaagtgttgcattggtgaagagctcaatgagagctgtttcgagctccagttttccagaaacctataagtaaacgaccacggagaacagtataagaatattcgtgctgaagaacaatgttagataggcaaatgagttgtcaccccacctgatgaaccgacaaaggatttgatcgttgcatttccagtaccatgtgggagaaatgcccaatgtgacaacctgaaatcaactatgagttccaacctaaaataacatgttgaaatttgagaattgcattattcaacattcacctgtcaaaacagcacagccagc

SEQ ID NO: 495 - DNA, 322 bp, Glycine max
ggcactttatttcactttggagaaatctaaagtttgcatgcagcctcagttttgtttcactgtgtttctattagctagcctcgtgatgagcgtcaatggcttagacacagtagatattatagttttcgtgttaattttctttcctatacaagtatacaacaatagtgttaagactaaagatttctgaccaaaattttgatgatagtataactttatatgagattatttaaagtaatttaacaaagtcaccaagtgtaaaaaatcagaagacgcttgcagctaacaacaaatttaagcctaaagtctcgtactatataattat

SEQ ID NO: 496 - DNA, 455 bp, Glycine max
agaaaatgttcagttcatggtaatgattttcaagaattaagaatttggtccctcctaaacttttttgtgggctgtgacaaagtgacacttaatattgttgcaattgttttgtataactatacctatgagatgagatgatgagatcaaatacgtaaaatacaagtgaaattatttcatcaacgtaacaattaataaatattaattatggtcctgcttgactttaatagattggaaaccattttaaattaacgtgttgagtaattgtcctctctcgatcggggagtggacacttatttgatttttgggtggtaattaacacattgagttatttaaaagttgatcatcagtccattgattattaattgcattatatccatatcctatgattttcaattaacatttaatcaattattgggttggattgcacataaagatttaatacaattctatggact

SEQ ID NO: 497 - DNA, 393 bp, Glycine max
atgcatttcggggaatatacaaaaatagacccaaggatggggaatatactttgccattgatccatgtttatggattctccaaagcacgagatccagaatttgattttcacgaggtaggttgctgattttgtgtgtttatatttttgtagcgtctttgattaaactcttcactgatcacttttgtttttgacatttctattgggctattgtcatgtaaactttgttgtaaagagacaacatcttaataaagctcttatgatgtagagaataagaattgcgctgctagaagttgcggtcaacgtagacatgcgacgggtacgacttgttgctcctggaaaatggatgttgtgcgcatcgtttattctccctaaaagtgtagcatttgctgatact

SEQ ID NO: 498 - DNA, 403 bp, Glycine max
agaaataagtaaaaagtcagttaaggacttacgaagtagatccataatgaattcagaatattcctcattttgtccagcttacaagcatgacaaaaagacaggcacagacaattctttagaaggggatgcacaacagtagtcaaatagatttttccatcgtttataagtgtcattgtagttgctacttgctaacaagattgcaaactgatagtatgcaagaatttcaactgcgcaaaataatctgatgacatatcctttataattagaaacaactaacagttcatatactagaaagacagaagaaaaaatccaagagacaaaagttagtattttttttttcttttctgtaaagctttaaccaactacatcaatttctcaatacaaataagtgcaataaaaggta

SEQ ID NO: 499 - DNA, 500 bp, Glycine max
gaggttgagtgaatcacattatagagtgaagagttacggggataacaacacacgtttggaggattttagactgcttcctgagtatagaaatgctgaaaattcttgttttcctgcaagaatccaccaaagcaaccaagctaatagtgttgaagaacttcaaagattcactggaagagagtctatcagaaattcggactcaactttgtctggctgctccatctatgttgatccaggcatttcatctgaattgcgaaacaaggtgaagttatgtatctgagaacaaatacctagatattttgtaatcatactagctatatgtgaagtctttcacatgatacggagtctgttgaacaatagtcagtgtcagtttcttgttttggttaagctagtgtgtgattccagtgctcttggccaagacatttatttgctttgcattgtttgataggttattgagactgcttcaagagaaggtgctagtttggttgaacaatggtttgttg

SEQ ID NO: 500 - DNA, 577 bp, Glycine max
aaaccaaaatcaaaagctaaaacaataataaatgatttcaattgcaacacatctacagaaatgaaaaaattgagattgcaaagaatatatatagcaacgattctcatgcaagataaaatctacactcacattaagaagaataccaatacttcaaaaaaaagcagaaaaccagagccattaacacgcaaaattctctactgcaacaaaattttctagaaattcaaaaacagacaaataatctgcatttgaagatcagaaattggcaattgttatcagtcattgtgattcccaaacacggagcaatgaaaaactcatcatgtctctcaacttatagatgaattcgcaaaaattcataatgagagaaataaggcacaaggcaatttcaaaaagaaaaaattaactatcagagacttaatcacaggataaataccaaatgaagtaatccaaccttattgttgcttgagttcaagcagtgctgaaactgattctttgtcaaccttattgttgcttaaatgaagcaggggctgaaactgattctttgccagttatcaacttttgacagacggttgctcactgt

SEQ ID NO: 501 - DNA, 431 bp, Glycine max
taatcaataaagtagtaataaacaatgcgcaagttaggcattccatacatgaatagctaaatatgattataagcaacaatggaagagaacttgtcgttttattagtttaaatttcagtgcttttttagatgctttctccctcaaaactctgccagtttccattcttctattctccttctccacaccaactattccactccaaactcccatgacatgttctttttaaatttctatctatctaccatcacactacctgttagtaccttctgcatttttttttattaaaaaagttaccaaatgaagagaagggaaaaccatgattgcattgacgaaactaccccgagtgtcaaaatcgataatttaacttccttcctttcacttagactttatagtctagtgttgtattgaatattcaaattgacgacccaaca

SEQ ID NO: 502 - DNA, 845 bp, Glycine max
gagatttttagggatagtgccaattgccaaacactcagtctcaaacgcactgaagttctttttgggttgataataatgagacatcaaaacgatgtcatagaggtggtccaattttatttttttgtgtgcagagcccagtccgggtttgtaaaaccagccgggtcgccgggttccctcaaaaccggccaggtcatcctgggccacatgcatgaacggtccaatagcaaaatcggtttggttaggtcaccggattgctgttgaaccggtctgactggctggtttataacactgatttactgtggtgcatgaacgtaggaatagaataacttttgaataacttaggaagagagggtactgcaagatacttgtaatatgatagttgaaaaataagatttagtgtatttaaaaatttgttatataaaatatttaaaaaatgacatatctttcctttttagtcatagtagtcaatagcgctatactgctatagcaagataaccaagcaaagtcgccctgggtcgctttgggattcaaatagcagaactgccagagcggttttcaatatcgcacatagccagccaaaatagcagcttttcgcatgctatagcagcactaccatgatataggcttcaaacatagctgctgcactcggttgctggctgtatggtttctctttgaagatctattagcattatgacgcattcgtgacatgatctctggtaaataagtaatatttttaaagtattctgaataacaatgattttggaaataagatgtttgggttttgtttggagaacctatttatatctatgggcagctctagaatttggactcagtctataccctaa

SEQ ID NO: 503 - DNA, 687 bp, Glycine max
aagagtttatgtaaagaattctactgccaacatattttttactttcagggttaaaccatccctttgattcaccaaaaactacttctgttaccctctaaaccccttatcctactagcaatctcttcttacactagattttcaacccccagtgtcctcagaagggattctgataaatttctctaaatagttatccttcattcaatcctatattttgaagttagtttcatttattcattcgtattcatggcatgcacaaaaagaactaaaaccccatcatcctaggtagttcggatctctcttgtatgcgttggcaatccttgcaaacccttttgtccctatccctcacttgtgtttctgtcattgaaaagactaacatccaatttgttttacaatgaatttatgaaaaatgctagaaagctgaaaaaatatgcatcatattgtcagccaagaagcagaacttctcaatatacaactacaactatcttgacatggaaactaccaaattaaaatggtatttaaaccgtgctctatatttgagctgcatgttcaaggtaatgaactgatcaaggtttggcccagtaaaaccttttttgctcagactctgcaaaaaaactaaatggagacacattttctacacatggatttaatgtagtttgatatcttggaacaagaccaacttttaggagg

SEQ ID NO: 504 - DNA, 780 bp, Glycine max
  misc_feature (702)..(702): n is a, c, g, or t
  misc_feature (731)..(731): n is a, c, g, or t
accctcgtcgatgcaaacgccaagcacttttcaggcttttctcccttgcctccaccgcctctggttcaacctcaacctcagcctcagcctcagcaagaacaacagccacagcagcagcagcaagggatggttccgtcgcaagcgccgtcgtcgtttcagatgccgtcttcgcctgtgccgtttgggtgtttgaattcgcagctggcgtcctaccctctgctgtcgccggggcttctgttttccccaacttctggtcagttagggtttccgcagcttccgctttcgcccactgtgccggtccctagccctcgctggaagggaatttgagaggggtgaggtgagtttggtcacagacatgtcaatttagctcagctttttttagggttttttaaattttgttgttgttgttgttgttgtgttacctgtacatggtgctggtgctagggggaattcaatttgcggtggttggactcgaagtggtccgctgctgcttagtttaattctgtaaatgggatatcaaagacatcaaaaagggtacaattttgcattggttcttgccatgctgtttggggatatgcaaaaacaaaattagatgttatacaattatagtgggattattatcatcattatcattatgctgttttcaatataatcaaaatctttattgtcttcactggtggtcttctcttcttttaattatgnggaaaatgttcccaccatgttgataatgncatttatttctttggctgttgtgacactaactgatgattaatggccatt

SEQ ID NO: 505 - DNA, 766 bp, Glycine max
atccctcgatgctgatcaaggaggccattcatgtaattagctgtggatatgaagaaaagactttatggggaaaagaggtttggctttaaaatgataatgtttttgtacaaagtctttcaggttcttagtttcctattctctcttccaatgatatttttcttaatgtacttataccaattaaaatctcattctagatgcaaagtcttcactttttgaactcagttccttcgttggttaaataaaacatcgtcttgtctttccagattggttggatttatggttcagtcactgaggatatcttatcggggttcaagatgcaatgtcgaggatggaagtcaatatactgcatgcccttgaggcctgcattcaaagggtctgcacctatcaacttgtctgatagattgcaccaagtccttcgatgggcccttggatcaattgaaattttcctaagtaggcactgccccctctggtatggattttctggaggccgtctcaaatggctacaaagaatggcttatataaacaccattgtctaccctttcacatcccttcctctcattgcttactgttctctgcctgcatttgcctcctcacaggaaaatttatcataccaacggtaatttcctcatctttattttttgtttcaggatatatagttagagagagagtagttatcaattcagcttaatcagaatggattcccattgtcctacgaaacataaatgatttgtagcataacaaaagaaaatatttaagtttaactatt

SEQ ID NO: 506 - DNA, 889 bp, Glycine max
ttgcatgcctgcagctctctctagccagacagctccaaatttcctaactaaaacggaaaatttagcagtaagcatctgccatggtcttgaaattattgatagccaccatcatggtgcatcgttatcgaatctctcattgagatccaaagattccaggctaattattcctgtggaaaaagttgatgttcccgcccagacttttcttgatgataatgccaaaaaggaagattatgctatgcttacctgtaataactgtaaaagcagaatgcagcttgatgccaatgagattgccaatagctcaaatgtgcagctggtactgattgatcgcccggagtcaactgataaaccaaagaagcaaattcttaaagtaattgcaatgatctcagctgcattttctggtataacttacattcaatctattatttttcatttctttctattataatgcaggcagcagagaaggttttggcaggatcgataaggagagaaatggcactagaagagttctgtgcaaagcagacttctgatataatgcagctcaattgcttggtaagtttctgtatactgagaatcatctgtggtcattgttttgtgactattttcaatcatatttgcagttgcaaaagtacaggcaagagagggaatgcaatgccacaatagcacagataagagaagataaaattctacgccttcagagccatattgatggtgttttatccaccaaggagttcatggatgaagagcccgtgtcccttgcacatgaaaacaaggtagaaatgagttattttaaagttttctttttatgattactatctttcatggttatataggacttgcctgctatcaaaattcaacagcttttaaaggaggaccatgagcttcatttaaa

SEQ ID NO: 507 - DNA, 1458 bp, Glycine max
gacttgcatgcctgcagaggatatgtatttgctgttagtgtccacagagttcagcttcttcttcaggtattaagtgtaaaacgctttcaccaacagcaacagcaacaacagcaaaattcaaatcccgcaccagaggaattaagtcaatctgaaataagtgaaatatgtgactacttcagccgtcgggtggcttcagaaccctatgatgcttctcgtgttgcatcattcataactatgctcactttacctgtatcagtactgagagaattcttgaaattaattgcttggaaaaagggattatcgcaggcacaagttggagatgttgtttcagctcaaaagccacggattgaattatgtcttgaaaatcattctgggttgaatgtggatgagaactctgagagctcatctgcattcagaagcaacatccattatgaccgcctgcataattctgttgattttgcgcttactgttgttcttgattctgctcacatccctcatgtcaatgctgctggtggtgccgcatggttgccatactgtgtttcagtaagattgagatattcatttggtgaaagtaccaatgtatcatttattggcatgaatggtagccatggtggtagggcatgttggttgcgtgttgatgattgggaaaaatgcaaacagagggtggcacgaacggtggaggttaatgggaactcagccgcagatgtaagtcaaggtaggttgaaattagttgcagatagtgtgcaaagaaatctgcatatgtgcattcaagggctaagagatggtagtgggggtcacggccagctctggagcaacgtgattttgttaatagcacaaatcatatccatctatctctttattttgggttagtgctgtcaattttgcgttttagtttaccatgatatgaaatggtgcctcactcagtttaagcacgtccccaacatcctagcatgtctcttctgctcgtaggttatgcttatgcagttctattggagatgagctttgctgtaatggagagaagtgcacaggtgattacagataattttgatgaaaaaaaatacttttcatagccaagcttagatttgcgggcaccaattttagattactaaccaaatatataaaacgagtattcaacgtttctatcttcagatcattaactaggttgtacaatatctttgctgatagtgtagtatcatggtataacttcttgggtggtggctattgttattgtacagatgacatcaaatgaatagattagtaaaggaaatttgttacgctcgatctccatcgacaatgaacacttgcaagataaagaccttgccgtgtatttaattttgaattcatcttgtctttggcatgctgtctcaaccccggttgctttaatgtattctgtaataaccccatttgccagctgctccttaattgtgtaacgtgtatcgttttctgaccgttgaaaca

SEQ ID NO: 508 - DNA, 849 bp, Glycine max
ggttgcagttctatgtttctttaacctttatagaagggtaccccttcaataacagtttcctttcttgatattttcatttacagacttacattaccacaaaatgattatttcataagctaatttattaaaatattataatatttgtgatcgtcatacaatatttttatgctgcaacctgaaacttgaataacaagggtagatgtcttctagcgaagacccgctgccactcatgatactggacacttgctacagtgcaagtaaagaaggttgcatactagatcgagtttgaggggagaataattaaattctattttatacttttttatttattttatcgtctaatcaatctggaatctggatgataacacatttatggtcaagactcagtgccacgcatcatgatattggacattaccatgcaagcatgcaagtgagtttgcagcaggaatattcataaatcaatccaattcaatggaattttaaaatttatcttttcataacaagtaataaataactagagctttgaaattgtacatcgcaatggatagaagtagataacttcaaattctgataagttatgcatcttctaggaaaattccataggtaatatctgtgcaatgatgttaataatataactgaaactggggatgtaaactgtacatcgtaaacttcatatatacagcattaatagaaacagacaggttggctgagtgctttgcagtcttgaaacgtttccaataaccctcgccccaagcaaaatatttatttaattatttttttctaaatggggagttaaaattacaatgaggccagtagaagttttccaattcttaaaatcgccccctaaaa

SEQ ID NO: 509 - DNA, 730 bp, Glycine max
tactacgtgtacattctttggtccagtgaaagctgaaaagacaaatagcaaaatcatcagttatgagattggttctgctaccaaaatgtgtttaagagcagaaatggataaagcacaccattttcaataccagttattatagcagcaccaaatagccttgtgaacaaaagcatcgcaatgccacaagataacccaacaaaaagcaatacagatatgtgatgttgtacttcttctttgtcctacacaaactcgtgaaagagcagtatcagtcctgaaagcacaaagtggtggatatgcagattgaagtctacacaatcatgtagttttagtcaaatcaaatcataatagataaatcatcgcatcaccacaacatatttaaatattacagcattgaatgttaagctgtagtgtggatattaagttcctataaccaatctggctggctcattaccggctagtaaatgttataggttaaactattcatatgttcccaatagttgtcctcattctaggttttaattcccatgcgaacaaactacaagttttaatccctacacatgcataataaaagttgagctttggtccatagtgttaacaccagagaaaatttttcaatggtataaaactgcaacaaaaactttctggtggggataaaccactacaaaaaaattgtctaagaactaaaacctgctggtttctgatacagggaactaaaactaaaaagaaaaca

SEQ ID NO: 510 - DNA, 610 bp, Glycine max
tgcagacatattgctcatgccatcaaggtttgagccatgtggattgaaccaactctatgccatgaactatggaacagttcctgttgtgcatgctgttggtggactgagagatactgtgcagccttttgatccttttaatgagtcaggccttgggtggacatttgatagtgcagattaaggtaagttatcacatgcattagggaattgcttaaggacctatagggagtataagaagagcagggaagggcttcaaaggagaggaatgacacaagatcttagttgggacaatgctgctcagcagtatgaggaggtgcttcttgctgccaaataccaatggtgaacttttggcatttattccatctaagaagacttgtaaaatggagctgctaattcatgttgaatacttccagtgtactgattgttgtgttagggaaaagaactgtgcaagttgtttaaattttataggttacagttagagccttttttatgggaagtgggaaggccaaattttggtgctggattatgtaactgtaatatagttgacccttcgtgtcaatgtattaggatcataccaagtgttcaaccacttcaataatactttgccataata

SEQ ID NO: 511 - DNA, 699 bp, Glycine max
tttatgttacctgtgaaccatgcataatgtgtgcatctgctttatcaattttaggtatgctccttcaagtcttcagttgatcgatgtataacacttgcactctttatactgtcctttctaattcatttgtttgtgtattatttcaggtataaaggaagtattttatggctgttcaaatgataaatttggaggctgtggatcgatactgtcattgcatttaagtaacaccacaccgctcaataagtatgtctcttaactcagcaccatctatgcaagccttgtcttgatcttttttttattttttttttattttgttggttgcaagttatttactactattatttttactttgttagttaaattattgttacatcttgcaatcttttgaatggatgttttattgttgtcctttcttatgtttgttcgctacattcactaatgtatgtaaataaataattcttatttttcttctaattaatagtgaagttccacccggaaagtgtttcaaatgtactggacgtataatggcatcagaagctgttcttctctttcgaacattctatgagcaaggaaatcccaatggtaagttatttttatctgttctaacttgcacataaccttctaaagctttcagatattgttgatatggtggcccatattagtccatcgtaatagtacttatgctcttttaatttcttc

SEQ ID NO: 512 - DNA, 1394 bp, Glycine max
aaagtaaataaaacataaaaatgacaaactaaggaaaacattcagaaagaaagattgataaacaattctttgaactgaaattttaaccgtgtttaaaaattcatcaagatcttcagctgttttctttagttctccactgcgggagttctgaacttcttttgccatttctttgactgtatcctgaaggaaccttgcatactctattcttgccttgagtctccttttcaatgcttcctacacattgagcaactgagtcacccaaagaccctacaatgggcaatcaaatcccacatattcatggtaactgaaaaaataaaaaataatgcacactacagatagagacacaaaaatggtttctaatgaggatatttgttaccagtggctgccagagaacatagaacatatattggtgcaagctcacatacaattttcaaccaaagatgctgaatattagggtattttggaagtttggttttagaagagaagggaaggaagaacaaaatttttatttcaaaaaaaattctctaatttgataaaaaaaattaaaataaaagaaataaaatgatagattagcatcaatttaatatgttaatcttttgttttttataaacattatataactctcttaatttaaaaataaaatatttgtcctcccctcccttcccctccaaaacctaattcccaaacatacccttggtaaaaaaatggacattatgttgatattaatccttgggagctatactttacataggacattcaacacagggctaggacaagccttggcagttgcttagttatagaatttctatttcccttggtattagaatgaagaatccggctttttaaagtgagtgatttcagttgttgataagaaaattaacggttacgtgcacatgcatcacaaatcaaggatgtgttgaaatatacaccattgattttctcttcaacaattaaaaatacttaatttatccttactcactttggagaagccaaatcctagatggaatgggacaaaagattttaaacagtttattttgaactagcaaagataacagcaaacagccaaaaaattcttggcaattacctgttctttcatcttgtcttgaaatgttgatggcaacatgttagggaataacttcagaaacacaggcaggaggaactccataaagggaacaataatgaaaacagcaaaaggaactagcctaaagatatcggcagtagtccgcgtcagttgctgcctctcccttctggagagattcttcccacccgcaagcttcaacaacaacctggaactgatcctcacatcagcccacagcagcttagaacccaaccaataatgctgcaaggtcgacacaaattcccctttccagtgaaccagtttttttgcccagtcc

SEQ ID NO: 513 - DNA, 871 bp, Glycine max
tggcttaggcactatggaaactggaaagctactccattgttattctttcaaatcaggttttgggagatgtaactcggcttcaaatagcctagttcacttgtacagcaagtgtggtagcatgttcaatgcatgcagagctttcaaagatataactgagccagatacagtgtcatggaatgttttgatctctggattggcatcaaatggacatatatccgatgccctttctgcctttgatgacatgaggttagcgggagttaaacttgattctttcacattcttatcactaatttttgcttgcagccaaggtagtttattgaatctgggtcttgattatttctattccatggaaaaaacatatcatataacaccaaagttggatcaccatgtgtgtttagttgatctcctcagtagaggtggtcgcctagaggaagctatgggtgttattgaaacaatgcctttcaagccggattctgtaatttataaaaccttattaaacgcttgcaacgcacatggaaacgtgccaccggaagaagatatggcaaggagatgtattggtgaacttgatccatgtgatcctgcaatatacttgctgcttggaagcctttattacaatgcttgaccctcttgattcatggcaagactccaaactgaagaaaaaaaaagctaaaaaaaatccaagccctttggatggaggcaaaatacatttttttttctttgagaaaaagataggtaaaaagattttaaaacctagtttcttactgaaaaaataaggttctcccccaaaaaaatttttcccccacaaatccccataggtttttgacccttttccaaacaaaaaaattgggcccggtttttttttgatatttaa

SEQ ID NO: 514 - DNA, 860 bp, Glycine max
cttgcatgcctgcagatgtttatgagaaatgatggtaactacgagcagtgttttaaaaatcgacatgaatcagtcgatcgaaccgattcgactatgagccattgttgcagccggttcggtttgatcgttagattagatatgtcattctcctgctctgacgttagatcgaaaggaccagattttttttttttaaagctcctttgacacacacgattttaaagcttctttctcacatgtaactccaagtatagccaatagttgattaaaatttttaaatgttaaactgaaagatacacatagtcattttcaccccgaaccttgaagtgatactagcaaaattaccactaggctagctcactcatttagaatctatataaggaaaaatatatacagttgctttaattatttgaaccttattaaccattgtctttttaggacattagttaaagaataattaaagaaccaaaaggtaaaaacatttattatgaaaaacatatgctagcacaaaaataatcataaatagtataattgttcatctcttaataaaaatatttatatttgaagtttttaaaccagtatctttcaagtattagttaacattttgctaattattttatactatatattactttaatttggattgggtcatgtggtttaattagtgacctatcaatttgacttttgatgattcagtgtcttgaccagttaggagcttggacagggggcattttctggagggaggtgcataaggatcacccgtgctttggatctaaagaatgggcttaattgcccggggaaataataattgtttcaaaaaaaggaaggccagaatgggcccaacacctttggcttcatttccc

SEQ ID NO: 515 - DNA, 741 bp, Glycine max
  misc_feature (679)..(679): n is a, c, g, or t
tccaaatatggactatagtattcactcaatacatccaaatatatattattgttattatataactatgaatcagagggagtctattttgaaagcttatcaaggcgggaatccatgccagttagcaatgattcttgggcttcacagatagtctcctcgattagagattcctagttcaaattttccatacccataatgcttccaatgtcaaaaggagtgagacctctctcaacctctttcttcaatagcattgtagagatgcagagtgtttgtgcacactcaatcgggacatcccacttgtaatatttcagaagctctatgtctttctcggcatccagagatttgatataatcaactgtatcaggggagtaatgttgacgcgcttgcggccaataaagccaatcaaatgtgcaatcctcaaattgcagagagaataaggattgatttgagtccagacattccacaatataagagtcttaatagtttgtatcaatgcaatacccaacttcctatgacctagaaaagattatgttgcaacaaaatatgtgtatactccttgacctggtttttaaggaataattagatatttgaataatgatttgtaagaatcttgaaaatatataaaaacaaatacttgacgctaagttttcttttacattccactattcttccgagtggtcanaggcccaaagccgaagccccatgggtaatgccacggggaaaatttaaaattgccagggaaaa

SEQ ID NO: 516 - DNA, 851 bp, Glycine max
tgcatgcctgcagaatcaatataagaaatcagaactatcaaacactagcaacctttaaaaaataactagcagcacccatggtaaaagaaacatattcaaccagattttagacaatgatactgttacatttatgggaacctcattcattcctgttctgataacacattagaaaattaccagctctatatgacaattctacacacttgagtaacaagtcaacaatgcctacggtaaaggcagcatctccacaatcaggatcaaaatctttcacagacaatagaagaacttttatctgcatgggggaaaaataatcacaggattaatttcaaaaacataaactgaatactatgaacaatatggatcaacattagtgcaatattgttcaaaaatgatactgcaccaaagctgcatgcactaatttcataattggtaagtgacctcaagcatcatccaacacaatcaacaataagacatgattatttaataatttttctattttattaatatgtgacttgagcacgccacaacaatttcatgaactaaatgacaactttcagaacagtcttttgttaaacaaaagaaaatttcagtagtgttttatgactttatgatgattatgtaaagattgatagatttatgttaaaatatagtgttggacagttgattggtaaagatatctttctacaagttctaaactggttagttccatatttcacagcaaatgcacaactaattcaatataaataaggcgaatggccctgtcttctttttatgaatattcaaactgaacaggaaaacccaataaacccttcagaaccatatgggactgttcctttaaatccactaaccta

SEQ ID NO: 517 - DNA, 787 bp, Glycine max
acctcaactctcatgcactacagtcacagtggttcctttccccatccagcaatgtcctctttctatatttggactgagcattttcaggtctacttttttgtgccaccttttctttaccacatgcattcctaggttccacaattcaaaggtgtttgtgtgtgtatgtggcgggggtacaaccaaaccagtgagaaaaataacttgctccaaatgatgtggtgctcatagatctactgacagggatgtaacgtaaccaagagatcattcacatattttttccttgactaagagcaattgtcagatcccagtgttcttcctatttgttcatttgatactggatttccattcaacccatgtttcacccattgttcagaatcttagcatttgtcacaagctttggtagagaatatatgtgcttgatccccttttctatgcagccaccttggggcaactaaatatttgtagagtagttattatttaataaaggcttgggttatctcttgaaatgctgttgagagcgttgtagatgtgattgtattagatgtaatggatggttatgagatttatggtaatacagttacattttgggaggttgcaagtgcagatatgcctaaatttaggaaaaattgcaagtttggtatcataaccagtcccaagcctatgtaaaggaggggttatgttaggtcttcggaagtcaacataaaacttggcaatatacctaacatgagtcactcaaccgattttgctatggaggaccaccagagaaaagctaggagtagcagaaatg

SEQ ID NO: 518 - DNA, 839 bp, Glycine max
acgtatttccttttcgagccgagtaggatcttgagttgcttcagagccaagtactttcattaaattgctaatcttgacctttggttttggtggttctatgacaccctgtcttatcatctcctgtcgctctttctccttagctatacgtctttgtgtccggagtttcttctgctcttgcttagttagcttgagtggttgaggtggtgggggagcaggctcagcaggtggctcaactggacgaggatgctccacataaaaagtgattttttctattttcagtttatcttcgccaatggttccattatcaatgtcaccataatttcgacaatgcagaagtggcacatccctgttaaattcaaatagttaagtgaataaatatgtttacaaacaaaccatggtataacacaattattttgatcatattttctgcttctacttttcaactaattaaagaacaaaatacaagttcccgcaagacaggcaataccagattcaaaatagataatcacgtcaaattgttctttcattgtcactatgatttaccaactatcaatggggttttcacactttctggcggggaaggaggaggtgaattcattgcggaagcagaagcgaaaaaattgacaaagatcagaactaagctctgtataccataatagaacatgagagagagagagagagattaagagtgagggaagatattattattgaaccccagtactgaaagtttacatgctcagattatatagagctcaactaacataacagaactaaccgtgtaacaaactaactgtcagttagttaccacagctgtctacagctgtcagtgataacactaa

SEQ ID NO: 519 - DNA, 638 bp, Glycine max
cttgcatgcctgcaggaggtgatgatttattaattttacaaacaattatttaatagaaagttccctctgagtagaagcttataatttgtcaaggtgataggtttaccttgtaatttttcttctgcacatcaaagccaagaggttttgcagcttcctcaatcttgttgattatctcatccgcaggggattttgaggtgaatcttgtttcccttttaaatccctgtggtcagtgacataagaataaagcaaacatgtaactttagcaaggtctctcataatcatcaccaatttggcttgaaagaaagttctcatccaaattaagttcaagtttcaacaaaattaactattttttatctaacaaagaaactagtttatgtgtaaaaatttaatgtaactcatgttttccccatatttgaattctacatgttcatcagaataataaaaaactttagaaagcatcttatcatgtgaagctccttacctgctctgtatcaaacaagttttcaaggttcagtcctttggacatggaaattaactcaaatgcattcatggctgtaggctgctcttctttcttctctgtcacatggtgctcctgaatacacaggcaaaatcctttataagaccagattctagaacta

SEQ ID NO: 520 - DNA, 619 bp, Glycine max
tctgcctataattgcaaaaagaatctcagttatacagtataacaaataaaatgattatattgaagtctcaagttttctagtcaaatgaaaaaaacaccttgacagatttgttatttgtcaatattgttatacatgaatgacagtttcaagtacagaatgttgggatttaccagttttacctctaactcagagattgcctgctctctctgatgagcaaaaaacttcatcgactgaaacaatattaagcaaatcagtcttgaatggaaaatgaaacttgatcaatgaaaaatagtaaaggaattggatatgaatttcccaaaagaactaggggaacaatggatgcaaaagaaagcagtcacttactccaattctctgcatttcaagagatctccgcaaagcttctcttttggttagaagattttttgctaactttattgaaggccgtttatagttttttccacggtaaataataatagcatggccctcttttagtttatcaactgaaactaaaattccaccactttctgtctccagcacttttgcagtgttgatgacttgactgaatagtttctgcatcgtaattaccttcaccacttctctgtgtttccaatgctgatgt

SEQ ID NO: 521 - DNA, 1391 bp, Glycine max
tttgcatgcctgcagatattccaaaaatattcacaaatggataggataaatacttaagttgcaactgtgacacaagattgtggttctataaaactaaaatgtgccttggttcatgtttgtcggtttatctaaaatctttaaaaatatatgttagactttcaaataggacaaactaagtcttaaaaatgaatctacaataaaataaaacaaactcaagttttgtaaatctgagctaagttagattaaagtttagttaggtttacttaagtatttattttatattagtatttaatttaaaatttaaattttcccatttaggtttttaaccccaataattttgtcttttttccttacttacgtgacactcataatatgatattttttgttgacaactactttctaatgccagcaattatttgtcacgccagctatttttaggaatttttataaccgcatggatccattagaaaaaaaaatgatcatatgaattgaaagtacatttaagttaaaattattttttaattgagattactacaagtaaataataaattgaattttttaattagtgcaaaattaactattttttcttatagttaaatcagaaatatttttataagagatttttatatgaaagaaggtaattttggataaggacggctgtcttcggattaatttataaaataattaagaactaacatgaggttaatgtttaatcaaatgcatgaggttaatccttatcatgtagaggggttattgaccaacatggaagatggatgaacgataattaaatatttaaatagaatattgaaataaattcatttgtgaaaataaaaagatgtgtaaataggtcaattaaaaccatttccaaacgacaagtttcatataaaattcccagttgtgaagaaattaattattccattttttttttactttttaaacacagacaacatgtcgctattaaaatgttcctactattattgccatttatgaataaaaaaaatgtcatacaagaccagtcgatgttgatgctttagaggaaaattggctggtgaagtttacgttgatgggaatgatatatccatgacaaattctatataattggcgtgtgtgaattctcgtttaccaaaagatgcaattctcaagtttccacctctctccacgtatgtatctacttttggaaattaaaagtaaacattacagtatatcatcaatcacaatcatggggactacaaagaaatgaacaacaactagctgaaatatcatataacataagaaaatcaaaatgatacataaattgagtattttcctttattttttgtatacaagatacatgagagtgtttttatatgttatggtgtatatatatccatgtaacacctttacacatctct

SEQ ID NO: 522 - DNA, 849 bp, Glycine max
  misc_feature (689)..(689): n is a, c, g, or t
  misc_feature (692)..(692): n is a, c, g, or t
  misc_feature (694)..(694): n is a, c, g, or t
actcatttgggcagcaaaagagagagacagaaattgaactgaaaagggtatttcttaattcatataacatggttttctcatgaacaatttccagatatgctaactttgttgtccataatgttaaactttttttggttttacagatcaagaggctcaaagagaaatttagaatgatacatgagcagctaattcaaaatcaaaccatgtgaatatgtgagctgctggaactgctgagtataattttcaaatgaaaaaggcatgaggtttatagatttatgatttttcattttcctatattcgtgcttacataatggcttattgtagaagaaggatgactagatgttcattatgaggactctttgctgtagttaactgaatattttttcctcaaatagtctcaagtcagttcctgtgcttgtagaatagattgtgggttagaatttcttattattgaatgttacacatacaaatatctggttttcaagagtttcaagaataattttaagatatgcctacaagttaacagaagcaaattacattggatcagcacatattgagttgaatcagtaatcatggcatgtatgctgttgattctagccctaaactaggttgtgattatgaaagatttggactgaccaatatgtctgttatccacctcaaaatgaatagaacgtggtatataggggagnggntntctatatttatatatataaaaaaatcatggattatagaatcattaaatgagcaagatttgggattgctttccctgaatagagatatcattatccaaaaccatgtggttctttaatatgctttgctatttacaacatatcctatgaagtcacccca

SEQ ID NO: 523 - DNA, 939 bp, Glycine max
gaagtgctcatccaatggaaagatttacctgactttgaagccacatgggaatcggttgttgttatgaagcaacaatttcttgcatatcaccttaaggacaaggttgctctattggcggggagtattgttaagctacctgttaagcaagtgtatgaagggaggacccatggcaagtataagcagaagccagagcagctgccagaaccagggttaggtagctgattaagatcagttacagttagtagttagccttgtaactgtttaggacagttaaaggtagttagttagctagtctttagctataaatagagactaattgcctggaattactcattcttgggtaatcacggtggttggttagggaggctaggctctgatccctaatcatacgtttgtcccacaagattaataaaatgagagttttggctagttctatcacaagacaacaagtaaccattgaaaatgaccttatttaaaatggttaattgaaaattcggtttttgaatgataccccaagggtgtcaattgattcatgttattgacctttggagtgagatgagccctggcggtagttggtattattaagctaaaattaattctattataaaaatggtttaatatttgcaaaaaaaattatcacaccaagcttaatttggaagaactttaacattttattaacatttatggatttgttcattatggtaccaatatgcgacagttattgtatatttcttccaaataaaaaaattttatcccaaattacttttatgggtgggataaggcgaataaaacattatttgtctcctcatcccaaagatacaatgttctattagtgtcaatgggcacacttggccatcctggaaaaatcttaaattttttgcggctttacccaaaccctttgagaatgaaatacctataactttccaccttatataacat

SEQ ID NO: 524 - DNA, 830 bp, Glycine max
tgcatgcctgcagcttaattgcttgatgacaataatggagataactgctgctgctgaatccaatgctgatcttcgccgtgcagcatttaagaccaactctccggctgctaaatctgttgtggaacagctgttgaggataattaaagaggtggacagcccggcattgcaaattccagcaatgaaggccattggctcgttggctaggacgtttcccgctagagagacccgggtaattgaaccgttggtgacacagatgggtaatagaaacacagaagtagcagatgaggcagtggctgctctcgccaagtttgcttctccagataatttcctacatgtggagcattccaagacgatagttgaattcaatggaatcccggcactgatgagactgctaaggagtaatgaagttacacaaatgcatcatgggctaactcttctttgctaccttgcactgcatgctggcaacagtgagtccttggaacaagcaagggtgttgatagttctagagggtgcagacagaacagtccttcctcagcatataaaggaattggtctccatggcaataatccacctcaatttgtatcatgcaggaatgaattctcaaaggatatcatattttccttgactgcaaatttagcttgtttgtggaccctgcgtttttgtgggttcaacagtatagtgtcgagttagttgcatctggtcaactctttggggaataaggggggctttataggaacaaagcattacttaagaaaatacattagttcttcagcttagacagttttcttcttttttttctcccctcattaaaactaatcaaatgggttttg

SEQ ID NO: 525 - DNA, 748 bp, Glycine max
cttgcatgcctgcagcctggctctctttgcaggctaaacaacacagccacacatgaaacacaacatgtttaagaaacaacacacaacactaagtagttacaatttcataaaaaaaaaaggcttgaatatgttttccatacatgtaatatactcctttttcataaaaaattatttatttatttattttactaactaacattttcaaacttttattttttatgtctgttattagtctaagttcgttaaacgacgatgtgacactctattagtctgtcacaccatcacttaactaccatcacttaactgatgatttgacaatgtggccctttgttagcttgccatgtaatcactaaccaaactgagactaacagctgccaaaaacaaaaagtttgaaaatatcacgcaaaaaaaatttaggtagtaaactgaaaaaaagatatattataggtatgaaaaaaatatttatgccaaaaaaaaaaattaaggggtggtccaacatgcacatacaatatcagggtcagcaactgcatcattggcatcggaaacctgagaagcttgcttgtgaaaaaccgtcttcagtcgttttgagagctccactaaccattattcgaaaacctagcaagcagctaccacatttcctcagagtaagacaaagtcaccaccaaaattacacaacagcaaaagacaatgctcctataaaataggggcaggaaattcaacgaaggaaaaaaaaaaaagaaaaaagggg

SEQ ID NO: 526 - DNA, 910 bp, Glycine max
tttgcatgcctgcagattggtgcacacagtccatacatatggatccatcccatgaattagataaaagccatcaggaattttgtcgaagtataataggcatccattcacctggtgcatgttattaacaaaacaacatattaattgcatgcctaccaatgagtgacacaagtatatcaagatggagataattccagtttactccctgaattttacataaaattagagcaattcttttgggggggggacataattaagagaggaagggttttttcacctcttcaactttaactcacacatcaacttaacaaccatattttaacttcttccccccaaaaattataccctctgacagcaatttcctcttactggacaaagcacattcagtcacccacaatattgccaaaatatttaacacacattttcacaagttatccaaatccttaaaataatacattttccagtaaataagtatacaattatacatcacccacaataacaccaaaatatagaaaatacattttcaagatttacccgactccttaaaacagtacattttccaattaataagtagcaacaggaacatagtaagtattcagaacaagcaatgcaagctttgagaaacaccatttaaggaacatagtaacaggataatctgctcatctgggtagaatcacacaaaagtagtacaaatttacagtgaaaagccacaattcaagaagttagttttctgttgtcaaatgaaaaaatgagactagtactagttggtaacaagcatattacgtcatccttaaatattgcaaaatattcataacataattttcaagatagggctcacttccttaagaatactagtttcaagaaccattacatgtggaaacataataaggggacaattaataccacatgccca

SEQ ID NO: 527 - DNA, 838 bp, Glycine max
tgcatgcctgcagatacttcaaaaggtgttgtgtggcatctttgttgtatagcagaaactgatgctggcaaagatctgcaactggaatcccacttgtctgcaaacaaggacaaaacaagaatatccaatatctttaaatgatgtactagaaaaacccatctgggaaaaagacccttactttaatccttcacattatataaaccaatcattttagcccaccgtgaatttgctaaaacttcatttcaggtctatttggataaacttctcaacaagttaaaatcaacctatgcatttcaactttgataaaagctttatcatttgacttctccaaaagttgattttaacttttgcacaagttaattttaatttgttttaccttcttatcttctcctacaagtgcataatgagaccttagtcactgactttaaaaaatatcattcattgatcatcaatgttggtggaaagggagtgaaaaaggaataaaagtaaatggcattttccaaatccagggactaaacttaagtactgaaatgatggacaaatgtaatttcatcattttatggactaaattggatttacatttactcaataaacttgggagaagatttactttggacatccattcagtgacttctttaacaccacggtgcttggacagagcaacaacatatatttccattctgttgcaggtgctcagaacagctgcttcctcaatgtgattcagactacaaagctccgcaatggctcgaggccattctgctttctggtttggcaagcttttcacgcatttcaccagcgtactatgcacactcagtccaataacatgacgctgctcctt

SEQ ID NO: 528 - DNA, 829 bp, Glycine max
  misc_feature (709)..(709): n is a, c, g, or t
  misc_feature (722)..(722): n is a, c, g, or t
tgatagtcagtaactaactctttgttcttagctcaattttcagttaacacttcaaagtttaatttctatgtagtgtgaatgcaaaagtttacataatcaatcaattaaaaatcatcaaaagtttaccatattggattgtgtcatactacatacatacatgtgacatgtgattgaatgattatgtaaaatttacacattcagtacacactacacagattatttactcattttttttcttcacacatatttgtttttagtctttaaaaaacaaaatttgattcatgattcttgtcacgtccaaaccttttgtttttagagttttcgttatgaaaacgtaaaaaagcatttaaacaaaaccatttttctttttttgagacaactaaaccatgtttctattatgtggtttaacggtaggggtggttacgttttttccttttcccattgttgctccaaactatagtttaatctttttgctaattttaaaacgttggtttttgttttctttccttgacatgaggagttaaatacgatgatgagaattaaaattctagtctttttataatgtaaaaatatcaaatatagaaaagaatgttatgtcactaccggttctaacaatctaatgaacgctatctttgtttccatcctcgttatgggaatcaacatgtagtagtcactcttttttaactcatattctatactatttaatttntaaaatatatcanatatagaattgaactcactagttctttcccctttctttcttatgcttcgacataaagttattattgtctttattttgatgtaataattaaagaacttagaatcattt

SEQ ID NO: 529 - DNA, 598 bp, Glycine max
cttgcatgcctgcagttgactgcaatgtaaaggatttttttacttatgaccacatcaatttaaaatcatgtttgatatataaagaaatgatacgagatatttcaagaatcaaacctttggaggccttttcatgatatacatcattgtcctcaatgataggatgaatgagtcctcattgtaccgcaaagaactaatttcaccatattgtgaaccgttcaaatgtgcatatccaggttcattaaagaaaggctttgcaaccaagattagaccctgtatagagaccagaacctgtagaattgttgaaacacctgaaatccactgctcattctgatggccagtccaggtgttaagtagactaagacaaactttgccacaattatataaatttgggttgagcctaagccctccggaatggtagtggacgttctgcattgaaaaatggcccttgagttagaacaacaacaacaataaagtcttatcctactaggtaaggttggttacttggattacatgacatcattcgacacgattaaaaacgaaaaaataaattactcttcagttggacttgtgaaaaaaaaacagcggacatgaaaataat

SEQ ID NO: 530 - DNA, 1389 bp, Glycine max
agaagaatactgcatgaaatgatcttttatgctccatggatgggcacccttcaaatttatccaagacattgtttcccaccatataggttggatcttaatgcaatggataaaaatatgggatgcattctcctccacccttctgcaaaaggggcatgtcatatccaaaatctgcacttgtctagcccttaaattagattttgtaggtagtctgtcccacaacatcctccatgcgaaaaccgcaattttactaggaatcttgatcttccataggtcctcaaaacattcatgaaggttctcaacagctgcctcctcccaaaacgttgagtaagcactacgagtagagtagatacccgacgtgtctgctgcccaaacccaactatcagaaccttgagtatgtatagatttaccttcaacttcagaaagaaaagagatggctatttcaatttcactgtcaaacagctgtcttctccaactaaagttccattcccacccatagttactatacttccccaagagaccaatcagctggtgttgttgagcagaattcatgtaaagccgagggtacttttcagctaatgattggtcatgactaatccacctatcctcccaaaatcttaccttatccccagcgtgtaccttccaattaatttgctgatgtagagtcttgccatggtgtgactgatggataactttttttaaatccctccaccaaattgactgtaaacttgagcttccctcttcagttagacctctcccagcccccatatttagcctccaaaactgcaacccaaagagcccccatatttagcccccatatctatttctttgatgatgttggttctgtagaatggtttatgtttcaaatctattttgatattctatcctaatatacttcaaaacagtggcatacttattcactaatcactagagattgttatactataatttgtaagaactgttcaaaactttaaatatttatcctcctggttgtgttgactaaataagtgaagtaaatggtattgtgcttatgctggatgtttttcaaccctgaaatttagtttattttctttataccgaaaatttagcaaagatttcttgaactgattatctaatattatagggacctctctgaattgcccctatcttttaaaaagtagtgaggttgggaacataaagttactgtcaccacttaagctagatagctgctcactgatttataagaaaaaactcagaaatagccactagctagctaagttacgtaaccagaatatctttttggtttttttctgttttgaggttgaaagtacacaaactagtgtctgaaattccaaattaggagtaatgaattatcatataaaattagagaatgacgctatgatagcaataaat

SEQ ID NO: 531 - DNA, 1395 bp, Glycine max
tcttgcatgcctgcagaattaatatcgtgtgtatgtatatacatgcaagactagctaatttttttttttttttatattgaaaggagcaagacaaaagctagttgatggtgcaattaatatttcaggtaatttatactacaataaaacttcagaatctcactgaaaaggtagggcacactacagggtcattaattttgatgacaagctaattaaacaacaaaaattcatttgattacactgtagaaaaaaggcactgttccattaatacaagagaaaattgaggcatcgatctcatatttatacatttaactagcaaacaatcagataaattttacctacgctagatttaaattggatgcagttttgtagatgtttttagtattgttttttaattagaattggatcgagtttcgactcggtaatctgcttaatgaagatttttattaaaggttaatgtaaattagtaagataaaactctaattataggtagaggataataccaacaacacttgtaatcgttttaaattcatttggcgctagcacactctttttgcatggttaaactttttgtttgtagtaatcccaattcaactgtagtatatcataagacataaccccccaaattaagtgccaaacacccctccattcatcggctatcctactacttaaaaaaaaaaggtttttctgttattcccatgtctcgattgtatcgaagatcttcaaacgctgaaccaacaggtcaaatgcaaaataacttaatgaaaaaacaatggatatttcaaaccggattcaaaccttaattatatgtataggtactttaggaaattcaacgaacttaccttatgcttaaacggcacttgccctacctaatcctgattttcgttataacttatctgacaataaagttctccgtgtggcggaaaattgccaaagggtaatctctaggtaacttctttcacactgccaaactaagccatttccctggtatatacatgtttcccatttggtttctcaattcaaaaaaaaataattaaacctaattgaaaaaaacaataataatgatgacatcatttcttgaatatgcacatcccctctgcacctataaaaccaaatatcacgagcaattaacctatgctatacggtcctagttaacttagcttttccccaagagcatacacttgctaataactgctaactattctttgccttagaaaatatattcgctgtgccactgcattatgggaaggtcaccatgctgtgaagagaatgttggtgtaaagaaagggccatggacgccagaagaagatgagaagctgattgattatatcagcaaacacggccatggcagttggagaacacttccaaagcgtgcaggtctcaataggtgtggtaaga

SEQ ID NO: 532 - DNA, 780 bp, Glycine max
  misc_feature (741)..(741): n is a, c, g, or t
  misc_feature (765)..(765): n is a, c, g, or t
atacttgagttcaaacaagcatataggaatggcaagtttttactagagttcagaatattcaccttattatgagatctatctgttgcaatgatctctccttcgtccttcataagtattgcaattgcagttgttttccctcctggggcagcacacatatctagtatccgctcacccttttgtggatctgtagtataaaaaagaatctatataaagaaaattttttaaaacaaaaaaaaattacaaagagatgagaggataaggaatcctcaatccttcttaaaataagaagaatagtaaaacagcaatgaaaagggaaaaaccaatagagcaaagtaaacaattattatcattcagctttatcaatcacatgtcagaaaatctaaattactcagtagcggatgagaccatagcaagacctatccccgactaaaagggcatgttctgaggcccacatggttgccagaaaagcattatactacgatggttcaaatccaacttctctcagttgtgttttaatctggagtgcttgctgaggaatatagtaaaaaaatcatttactaccaaggaaaacaaatggccaacaataacattgcatggaaatcactccaaagtcagaaaataagaaatgagactccaatttatgtacctaaagcatgagcagcaataatacttggcaggttttgaagaaatatttctccctcaagcacatctggaaaacagaaaaagaaccataagacatcngcttttcacatgcttcaaaccacnaatactttaccaaat

SEQ ID NO: 533 - DNA, 749 bp, Glycine max
tggcgcaccagaatggggactgccgtccacagttccaatgatgacactttacagtccatatcattcaaattttgttggaccttcatatcatcatccaggagctgaatctattaatcagatgtggtcgacgaatgctcatcacttgcaggcgatccctaattataattatcctcatccttatagttatacctatgattataattatacagctcccgttgttcaccattaccatgtccctcctgcgccattgtttcataactctttggttcaaaattctgtgggagatgaaaataatggagcaactaccaatagtactgttgctacaatttcagatgaagctagagaggaaattctggtgaaatttcgaaactttaaacaatttgacgttgttgaagacgtttcagaccatcactttgttaatgccgactcttccatgcaacaggtagccttttaatgcaatttttttcttccagttttaatcttaattatttaggtttacatacagtcaatttatttcatgaacagcattcaaagaattgggctaaaagaatccagggagagtggaagtcattggagaaggatttaccaggtgagagttagttcgattagtattcatgtcataaattggctaaaatattttccttatctatccaactttttgtatttaattaaattgatttcttttacaagccaatggatttggactggatgaattggattcccaatttggcattaaatatgctaaaggg

SEQ ID NO: 534 - DNA, 1398 bp, Glycine max
agcttgcatgcctgcagcgctagtggaaacactctctgcaattgttttgatcgttctgttcttgttgcaaaagtttggcacatcccgtgttagtttcctcttttctccaataatgggtgcatggacgctgagtaccccacttgtaggaatttacagcatcatacaccattatcctagcatatttaaggctttatctccccactatatattccgtttcttttggagaaatggaaaatctggctggcttttacttggtggtactgtcctttgcattacaggtatgtatcttatctctttgtacatgatatactttgatggacataaaagtgatgaatttatctcagaaggaacccttagtttccctgtcaaatcatattataagtcctcgtgctatattctagtacttgcagtaggtgaagattatgggctagataatgttgctacatgagaattgtgcaaaagagaatcttggcacagttgttaggattgcactatttggcaagccaacattttgtatcatgtaatgaattgcaaatgggtacatgtatgaaacagtgcaattccatattgatactaattacacaattctcttcattaattttcttttcattttgcttttccttcagcaattgtcatcagagaaattgataagtcaaataagcttaaactgctaaatgaaaaggaatgctaccgaatgcactctacttgatcacttcatttatatgatatatttctaggtattttccattatgtcatgaatcttacaaattaatataatatacaattcataataagattcaataaatgtaaaactcatgattcaaaaatcagcttggtgattcaaaatttgaatcacgatttgataaccttagggagctactagaacatgtccaaacacttgatggtgggaagattctttagaagaacaagctagtttatttgttgttctgacttctaatataaatacattgatctcttagttttaaagtttgattactttcaaacggcatgggaagattcacctttctttaaatggatatgcttacatatcacagtacatgttttttctgtatgtgcttaatttcttctctttgacaggttctgaggcaatgtttgctgatcttggtcatttcaatcagaagtccattcaggtttaattttttggtctgtctttcaaggtcgtttttttttttccagctggttattatcttatcttcttttcttcttttgttattttggtaacagatagcttttctattcacaatctacccatctttagttctgacttatgcgggacagacagcatacctgatcaagcatcccaatgatcatgatgacggcttctacaaatttataccaacttcagtttactggcctatctttgtcattgccacttct

SEQ ID NO: 535 - DNA, 838 bp, Glycine max
  misc_feature (812)..(812): n is a, c, g, or t
agcactcaattagtagcaatcctctgctgacattggtttggaatatagtgaatattatagaaactgccgcaggggcaccaggtgcagaaaactctggtggtgaatgtctttctgctatggtatcttctcaattgaagatttgtttgttaaacacaaattttgggctgggagaatttgacataatatctgcattggatgattttgttgatatttggtggtctttgaggaggagaagagtgtccttgtatggacatgctgctcatggttacacacagtatctttcgtattcttcttcccctatttgccatagtcagatgcatggttctgaatacgaggctttgaaccaaaaaactggcagctacaccctgagggctacattgtatatattgcatatacttctcaattatggtgtggagttgaaagatactcttgaatctgctcttttggttgttcctttgttgccatggcaggttgcatgctagatggcttttactttaacttatttcagtttcaaggggaggatagtttactgaaatgttactgaaattgtctttgtaggaagttacgcctcaactgtttgcacgtgtaagttctcatcctgaactaatgattcggaagcaattggagggcttactgatcatgctggccaaacaatctccctgttctatagtgtacccgacactaagtgatgttaatgcttatgaagagaaaccttcacaagagcttcatcatgtgttgggctgcctggtaatatgaaaagtctgtgtgcatcttgtagcttatatatttctttaaaaccaatatcttcccanaccatgtggataattagtcatcaaaa

SEQ ID NO: 536 - DNA, 728 bp, Glycine max
aagatgccggaggaatcttaaaggatactatagctgatttcagttggtctttatactcttcctggaaccaagcttcatgaggagtctcaggttttcgagacgttgaagccaaacgacgctccaaagccacaactattggagccatcattgcagaatatcgagcagaatttatcttgttcttctcattctgactaagtgtgacattttctgcgattcttgcagcctcttctttcagcacatttattcgcctcatcacatctgcaacaaaatatagttaaccccatttctcttcacctaattatgcaataaaaagaaatgatgatatacatcccccaaacattaaaaaagagtaatcaattattcattgcaattcaataaaaatggatctcataatcaacaaaatgttgggaaaaaaaggtaagcaacctgtttgaagatcctgaagagtactgagccataattcctcccagagtacagtaacatttccaagttcgtttatcatcagctgaacatcctgaaccaatcgggggtaaagttctctctgcatgaaacaaataatttttaatcatcctatacactactttgaacaagcaagctaacaaaaggtcagtataaaagccataacaataataaatgtgggtcaaattaataagcacatcacgtgttttgataaatatgccaggtcaaactaatgagtacccatcaggattgttattatgctgaaaacc

SEQ ID NO: 537 - DNA, 630 bp, Glycine max
tttgatgcctgcagatatacatcaagaaactaagttcatctgctataaaaacctggggaataatgtgctgcattgcccaatccggtccaaattcttctgccaagcgtttgatgttattagcggctgcatcacggattgagtatacctacattggaaaaagtcaatatgatacatttactctaaataaaaatttaaaaaaaaaaaaaaaaacagaaaggcattgatcccgcccctccaaaataataataataaaaaaaaaaaagcatagccagcttcttgactaaatgagtttacaagatttttttataaccaacttagtctatgaaggattcaatttaaactttatgaattatgatactagggacctttattaaactttgagtggcattttctttttagtccttctacagcctaaaccaacaacaaaattgcaattgcatattaaactgaaaataactacaatttaacatttgttttaaattggtcttctagctctctaaaatcaattatcgtaacatgataaaaataaatttaaatgacattgttcgtttttttttactcatgtttacacaatttacatatgtaaaactaaatcaaaagtgcacgcaaatatgtgcattaatttatact

SEQ ID NO: 538 - DNA, 737 bp, Glycine max
agcaatctttgcttctattcctaaactcttgaaactgttcccatgtaaaagtaactcaactcttaaagagaggattgatgccccttttcgattttaaaaacatttttgtggtggttgcaggatgctacaattgagcaacttctgcctattttcctttctcttttgaaagacgagtttcctgatgtcaggctaaatattatcagcaagcttgatcaagtgaaccaggtttgtggcttaaaattgaatattccttcagattgaccatgtacatttcaaacattattatttttcatatgctccctctattgaagcttatgattacacatggattgcaggttattggtattgatttgttatctcagtctctgttgccagccatagtagaactagctgaggatcggcactggagagttcgacttgcaatcatagaatacatacccttattggcaagccagttgggtgttggtttttttgatgataagcttggagctctttgcatgcaatggctaaaggacaaggtttgtgaaacaactaaaatgatattcaaatttgttctactcttatttttgaagtctatgttatcaaaaacaagttattttatcttgtactaacatgttatataaaattcattaattattttaaattatttatttgggaaataacggttaatttatgcatgtttgaataaccttttttattaaaaaactttcccaaatatttaaaaagctttacccaaa

SEQ ID NO: 539 - DNA, 649 bp, Glycine max
tgcatgcctgcaggagcttgaatttcgtgaagaggacaagaaccgcaataagcaggtgaatatttcttgatttaacatttttaattatgcttcaactttcagatgtatcatatcatgtgtataatagtcacactagtaaggaaggtttcatcaggaatgtgttattgactgtatcacactcctggggtatgaaggctcaaatcatagcttttgctgggaaacttcatatagcaggcgttgatgaacttttctttcttttttgttaaacggtgatttcttgactatctgtgtggctagtcaacccctaaattcccatccatcaatttatatatttacttgctgttcagtgttatccttattaattttggatttttcagtggtcaacattctctaaattatcagatcttagcatgttcaagagtacttctgttcctggtttgtcatttaatagcttttctgacagattcaggcttcaattgcaaaagttgttcaacgacaatctgaagcactggttaagagacgtagagatacaccaggttcatttgtgacaagatcacagcgcaatcaacgaaatgttctctctaagagacaaaacccaagggatggataatcaaagatctgaaagaataatgaagaggaaaaagacaat

SEQ ID NO: 540 - DNA, 808 bp, Glycine max
ttgttcacagagatgtaaagccaagcaatgtccttatagatgaagatctccaaccaaagcttggcgattttggtcttgcaaggacttacgagcatggaattaatccacagacaacgaatgttgtgggaacactagggtacatggcccctgagctcacaaagactgggaaagcaagaacaagcacagatgtatatgggtacggcatactcattttggaggtagcatgtggaaggaagccaatagagccacagaaaaatcccgaggaactggtattggtagactgggttagagaactacatcaccaagggaaaatcagcagggctattgaccccagtttagatgagtatgacaaagatgaagctcggcttgtgcttagtcttgggttgttttgtgctcatcccaatcctgattacaggcctagtatgagacggattgtccagttccttctgggagaaaccagccttcctccgcttcctccggacattcactgtgaagatccaacagcaataagaaaatgcccaaacaactttgcagatgattcaggctcttcaagttctatggtgtcttcatcaaaatattgaagtcttacatgctttgatgaagtggtctcagctactgaagccactgggttgacttcatagatattgttgtgaatagcaaagcatattaaagaaccacattgttttggataatgatatctctactcaaggaaagcaattcccaaatcttggtcaattctatgaaatctatttaatccatggaaattttttaaattatgttttaaaaatttggaaaaacccccctttcc

SEQ ID NO: 541 - DNA, 798 bp, Glycine max
aatctaaaacctcggtctagtgtgttatggcaaatttcctcctcaggccaaaaaacaaaaaagatcaggcaagaaataggagtgctaaacggttaaaacgctaaccactaaccacacaccacagatatcaacatacacacaagtcaagttttcaaccaagttgaacaattggcgaagaatgacaaggctcatgaacaacaacaaaaaagaaaacacctttcaacaaaaagtgaaaactccacttcagaaactccacaaaaaaagccccaaaaatgagagagaaaacgccaattgaaaagagagagaaagagaaaaaccttcgaggacatggtcttcaggtccgagagaagaatccccacaaacatcacaaacaactcttccatggatttcaccagtccaagcactcacatccgaagcaaataacagcagcaacagaatcaaacccatcactgtcttctgcttctccatggttgagaattgagaaaaaaacaaccacaaaaaaaacgctacctttctcagagcactctgtttttgggtttataggtagttttcttataacgcccacagtgcattgatttttcaccgacacaatagctgcaatgttgaatcactgagtccaatgaccgagtcaccctagtagggactgaagtgtcattatgtaagatgtccaggggctaattggaaaataaaaaaatcatgacctatgtcctgtcccctataaataccaacccaaccctttgtatagtcgctatgcttcgccgtttctgaaagggttctgcggggcactggtcagatccc

SEQ ID NO: 542 - DNA, 1799 bp, Glycine max
catcttgcatgcctgcaggtggagtatagaatcaaaatgggagggcaagaaatatcaccactaaacgacaccggtttgttcaggaaatgggccggtgacgaagaagattatttaatcaaacaaaatccacagaataatgatctttcaagcaacacggatggtaagatgaacataaccgtgaatcctgattacgtggcacccaaggaactctacagaacagcgcgtaacatgggcacaaacgccactctgaacaaaatcagcaacctgacttgggagttcccggttgattctggcttcacttacgttctcaggctccacttttgcgagcttgaccccaatattaataaagatggtgacagggtgttcttcatttacatagcgagccagttggctgaggacaacgctgatgttatgcaatggagccacaatcagaaaggtctcgctgtgcagagaaactatgccgttttgatgccgaaggataatactcagaaaaaagttaatctctcgcttcagatgcatccttatgcaactaatgataaaacgacatacagcgacgcgttcttgaacggtctcgagatcttcaaaatcagtgaggctgggtcaaacaaccttgccggacctaacccggacccggttcagactccacacaacaacatacccgccccaaagggagaccgcagcagcaaaaccgcagcagcaacatacccggttcagagtccacacaacaacataccagtcctaacaggaaagatcagcagcgagagcagagggacaataattggcgtggtcgtgggggtggtatccggcgtcgttttgatcttgctcgtcgttttcttcgtctttttgtctgcgacttccaggtgtgctggactcttgttctcaatgaccaagtcaacaaagacgcataattcctccctaccgttggatctctgccgccgcttctcccttctggagatcttagatgccacacaaaacttcgacgacgtcctcattgtaggtgtcgggggatttggccaggtgtacaagggctacatcgatgacggttccacccctgtcgccatcaagcgccttaaaccgggttcacaacagggggctcacgagtttctgaatgaaattgagatgctctcacaactccgccatcggccacctcgtctctctcatcggctactccaacgataataaggaaatgatcctggtctatgatttcatgacacgtggtaacctccgtgaccatctctacaacaccgataacccaactctaccgtggaagcaacggttgcagatttgcatcggtgccgcgcgtgggctgcattatcttcacacaggcgccaagcacatgatcatccaccgcgacgttaaaacgacaaacatcttattggatgataaatgggtggccaaggtttcagacttcgggctttccagaattgggcccacgggcacgtccaagtcgcatgtcagcaccaatgtgaagggaagctttggatatttagacccagagtattataaacgttaccgtttgacagagaagtctgatgtgtactcttttggagtagtactgtttgagatactatgcgctcgaccgcctctgatccgtaatgcagagatggaacaggtgtcgcttgccaattgggccaggcgctgttatcaaaatgggaccatggcacagattgtggacccctcgttgaaggggactatcgcgcccgagtgcttcgagaagttttgtgagattgggatgagttgtttgttagaagatgggatgcacaggccgtcgataaacgatatcgtttcgctgcttgagt

SEQ ID NO: 543 - DNA, 558 bp, Glycine max
aagacagacatttgaacctaaacccacgtcaaaactgaaactgaaactcaacgaacccaaaaaaacacatgttttctctttcactcttaaactcttcccacacaaaaccgaaataattacccccataataattattctgggggcaatttggtttcttaatgcccatctgagttataaaaaaaatggagactccagttgaagtgaaacctactcgagtgtaagtacttggattggattcttcaaatttgttgaattaaattattttttctctgtcgtgtcttgtctttgaacgttagaatttaatgtatttttgctcaataacgtagcaacttgtatatctatgtatatttttatttttctccccctaatattcaatctcttcattgcagtgcatctggattcttagatgacttgtctgagacttgcaaggtgtgatctttctcccattctggcaacccctttgtaaaattcttttgaattttcaatagggttaggatttttaatttatcttaccgtaatttgtagtcaaataggagtttccttaccaacatgtcgttg

SEQ ID NO: 544 - DNA, 774 bp, Glycine max
ttccggcaaggcttctgttgtgttctgttctacatctgtcttttttctttgttttctgttcagtcacaatggcttcatctggccagccttagaggcttaagataatgatgatgatgatatttgaatggatttaatatttagtagttgttcttagcctagaggcttatactttgtttgatttgatttgatggttttgtttattgtaattcagtaattgacaatttgacttgctgtttgctgttttgattatgcaactttatattttaatcagaatgtcttatatttaggtgtttttactttatttttcagtggtttgattagagttctttttcattttgcagcctcatttttacattccaaaataactaactgtttacttagctagttgcaacatctgatagtattatttattttgtggtttgtgctttggtggggttttagttctcataatttgttctcttcataatggtcgatctaaatcctaggccgatgtaaaaattttcttgttagcagagaatttcttatcttagtttgtagatatttgatgctccatcatgagtatttctgtgactgctaatttatacagtgatttttttttatgtagtgttataacttcctttcaacctatttgtgaagtttactccctcttttgtaaaactaatactagtgacttggcaggtaaaattgttcttggctgacgattacccctcaataggggtcagaatcacaagaacatcttcaggcaaagacatcttcaatgttacattctaaaat

SEQ ID NO: 545 - DNA, 795 bp, Glycine max
atcaaggcagtgaaattcctagcaatttaccagcaggggtgtttattgatcaacaatatgtcattgcaccagaagacttgaacgagctactattttcatcagattcaaattttctcaagtcattggctgaagtacagagcaatacagaactcgaaataggaccttggaagtttgagaatgatgggaaaatcttcaaaagattagttacttacgtcaaggctcctagtaaacctgctgatctgtatgccactttgttatctcagactattaaacctgctgatctgaaggaccttagttccaataaggaacaagctttagcgtcattacatgcagaacctgaatcagattggaggcttgcagtgcagtattttggtaacttcacagtatttgcaacagttttcatggggttgtatgtgcttgttcacatttggttggctgcaccaagcacaattcaagggcttgagtttggtgggcttgacttgccagattcaattggtgaatttgttgtctgtgcagttttggttcttcaaggtgaatgcatgctgggtataatctcacgcttcataaaggccagagcacaaaagggtaatctcaagagtgttcagttacttcacacttaatgaatttggctttcctttttctccctgacttagtgttgcttttaatgaagtgactatgagtttgccactcttggcttttgattgtttagcgcccattaacttattttaatgcccatgcttttaattatattgactttttgggatttccatattaggtagggatcatgggatcaaa

SEQ ID NO: 546 - DNA, 908 bp, Glycine max
ttgcatttgcttaaaaagtgtctctcgctccatcaaggtgcataacttgtgaataatggcaccctgtatttcatgctatgtatagcataattctcataaaatgccattcagaatttgagtgcaggttatttcatgaatgaaaggattattgctcctttggttcggcttctatctgatctttctacttctgtccaagtaagtatcatatttacaatattcctaattcttgtatttaagttaaactgagtacttgctggctttctttccttgagcagtgcagaaaggaaactaccaatcaatcatgctataggattgaaatctaaactgtggaatctgagggttaaaaaatcaatttacatttataatttaaggttaatatgtgcaagctattctgatgataatagatcctattctcttacctgttcctgtattgattgtagattgtgcttgaacttgaattgttcagggattaggctttttgcttgactgctttgtggattaacttgattgagttctgattaacctgttattatttgcctaatgattaggaaggtgtagtagagttttttgtcataatttgaaagatttattcaataaggactctaacaatttctgtgatatctgtttccattttgtgtttgtatgttgaatcacccatcttataagtttcaatgttttatttttgaaattgtcaccatttattcactgatgcttgttgatagttttttcaaggctggattgagtcttttcaactatgctctcactgacattatttgaatagttcagtcctagtaaatataaatattgcaggttaacattgggatttaaaacaatggtatttgaagaaaattttgtaatttgatgccctgataagggtgaacctgccttaaaaagggaattttcttttt

SEQ ID NO: 547 - DNA, 729 bp, Glycine max
tacctagatatagaaatatatatgttcagattaataatataatattcacttccaaaaaaaagatacagaacatatgccaaaaattctagaagggacaaaactttcaccagaacacacctgaagattgaaaacgggttctggtttgaaatggattctgtcttgcatcaatctgtatttgtggactgaaatgtacctttttattgacagaatctagcttgcattgttaaacaaacatacagaaccattagtaaaaactaaagctatagatccttagttccaataattacttccagatgaacataaaagcaatgaggcctacttggcaaaatgtagtgcttatgatgtctgggaatgaaagctaacaattgctgctgccgtagaccttctttatcagtgtaaatttggcatgtaagaagtttctgctagtaagtaaatatgttatttcaactccaattgatttgtctattaaaacatatagggtcctgctcaatacactcatataaatgcctccaattacttaaaaagggaagcattaaataacttttgtgtattcattgaaataaatattttcatcctcattaaatactggaatacttttgtttccttaaccaatgtttcaaggacactcattacatttctctaaaccaaaatatctaaacaaagtttgtaattacctgatttatgggagcgaccttcaaatccataggttgagaccatcaaaatgtttgc

SEQ ID NO: 548 - DNA, 1530 bp, Glycine max
attcttcctggtatttgcgcacagctgatgctcatcaaacttcaatctgtcagcaaccttatttatgtttctgttaccactatttatggtagagggtgtaactggaaaatgtagaggatgaacaattgatgatggagaaagaggagttgtctgcatgggacctagagaagaagtcagatgattagaaggaaagcgaacttctgctgaatgattcacaaatggagtagtgaaattatttccccacagattttgaggaaaattttgactacttgaagcagaaaattgccgagaaaaggtccctggtagcatttcatctgttgagattgacaaccacgatggtgaacttctgtagggactatgaaaccaagatgttttggcctgttcattcacagttggctgcaagaaaggaaatccaaaggctgattttgtaacatggggatttgtgttcttgtcattcagctcaccattggttacatgagtcgagtgactaaaattgccaggagtaggtagtaccactgattgagagatcaatcctagaggtttagctccaggtataaactgctctgaaaagtcattggatgcaccattaaatactgaatacgaactagacttttgagtaatgggattgaaataagaactggcatttctgttgactccaagacttccattttgagatacatgattacctagccgatcaataaactgttgagagaatccagagtatgtactgctcatcaatatggtgccttgtgctgcttgattgctttgaatttttgctgattgcaatacattgtcagctgatatttgtaaaggtgaaccagatgcccaattcctgcttagaacttctttccaataaagaatgatctaaagcagcatattcagaataattccttcttctggattcctcatcaggccaaacatctcccgcaaattgttgcatctcttggctgcttctaccaattggaacatctttacccatcaacctcattgttggttggctggaacttggtgagatatgatgtgaatcttttttcagagaaaccaccccatttccattgtgattccagactcggtcacattgattctgttcaatgaatgagtttttcttacagttcaactctgaattaagtggcgggacatagtgaccggaacacatatctgaagaattaggtcggtggatatcttctctctctctagattgtaactcagtgacaggtaatcgggttggatgatgtggaaatggatcaagacaatcttttggaaatgtcttctgaacaacatgattttcattaatgcttaaattttcctggttattttgatggagaatattattaatgggtaagccactaaaagagccacgtaatgtacttgatgtatctgactggttcatccttaagtttccacttgaactgaaattgattagctcaccatgagaattgagtggcaaaccaaaaaaattcggatccaaacagctatttttgccacttcctttctcccagcctgtaatggggaatgagttatcaatcatat

SEQ ID NO: 549 - DNA, 804 bp, Glycine max
  misc_feature (765)..(765): n is a, c, g, or t
  misc_feature (786)..(787): n is a, c, g, or t
aagtctaactggagtatttccatctttcatacactctgctagtgcaggaccgacaatagtgcctagtgacataatggctgaaggatttgcctgtaatgttgcagaaatgtagaccatgtaaattttcaaccatattattctacaggtgatatcttggtcaaggcaagactgttcaagcgcataccttggcaacagcttttatagcagataatgctcttcttctaacttcactggagtcatcatgtgtggatgatactagcaatgaaagaacatctttgtaaagaagtgtgtcagaaggatccacctgagatctataaagaaggagccttcccaatgccttggttgaagtttcgcgaagagggaactgttttacagaaaaatttaataaaatcggacaatagcaatataacaagaaacttgttagacttcagaaataaacacaatgaattctgaaaaaattatagaaataatctggattttagaccagatttgagatcaaaattaaacaacaaagggttttcccagagcaagagtttccaccttcaaaacacaagaaataataatctgacaccttaattgccatctacaagtctcacaacctatatatatcactataactatcacatcacaacatataattgccaaattcgaaattaatacacaaataactcctcaattacttccaaatacagaattaaggtgcttaattcagaaacatggcctaccaaacctaattgagtattaacataccctctcatccttcanggtgtctctaaggcaatcaanncatagtgagaacaggga

SEQ ID NO: 550 - DNA, 727 bp, Glycine max
ttctagttattacttgcaagctgcatctctttggccttctagtgggaacccccatcatcaggtttttggcagtcctgcatccatttttattttttatggttgatttatattttttttacttatgtttcatagtttttatatttcattttaatgagtctgttttttcagcttgctttgttggcttcatattctggggatgagctggtggctatctatcgatattttcgtagtctggctgtagatagtccatttacaactgcaagagaaaacttgatagttgcatttgagaaggtaatgtgaccatgtccccatgggtttgctcttgttattgtttaagtaatttgtgttttattctttgttttgacttgttatccagcccttatctttatatcttgattgatgctttgcatacttaaagtattattatgaggatgagattcagtcattcttactcttagtgtttgatgcttaaaattaagtgcattaaaaaaatgagaggttataaatttaagatcagttgcaagttagtaaagccatgttatctgtacacatcttaggtggagttcatgcacgtattttgagtacttaataatattaatttggtgggttaaaaagctttaaagaaacatgctgtgaaagctagtctgtctatttgaccttggaccactttgggcttaaagaatatgtcattgaactcaattctatgattattttcatattgggggct

SEQ ID NO: 551 - DNA, 849 bp, Glycine max
agcttttgaatgccattctctatctcttgggtttatctctagctatctacattgttgagagtggtacaacatcattgcttagaatcatcaatgcacctttccatcacgagctctacttcgctgttgctaatcaaccttgcttgatgttctaattgatgcaatgtatacaaagcctttcaattacagccacttcatttgcagacatcaaattaaaaaagttatgctagaaggaaaaatagcaagcacaaggttggtttctgtattctcacactagggttagttgaagttgttaacaggtaaatttaacagtgatttagttagagatcctaaccaaattgaaagagtgggagaagtcagaaggtataaataggaggaaaactattgggttagattggatttggagtgttgttggttggaaaggagagatagtactcctggaggtctgtgagttactttttttccatgttcccacttgattctgcaatcatattgatttagattcgggcacaaaagtgattttcaacataagtccgattctttacttttctcttttgattcctattacagtcatggttgcttctggtctgtatatattagatttttaatgtaaaactacaccagggctaagaaatacaagcatctatatttcttctaatatttatattgatattctaaatcttaataaaattgaagatatatcatgtagcactttgattcctcaaaaagggattgcagcggcaatttgaatttataagtgtagacatcgaacattgttaaaaggtgcatgaagattattcaaggccaaaactttgcccagtttgcccacaacattgggaaaaaaaattggtc

SEQ ID NO: 552 - DNA, 876 bp, Glycine max
  misc_feature (762)..(762): n is a, c, g, or t
tgcatgcctgcagctgtgtgacttcccatgtgctgaatgagctgtttttgctggcaggaaatgtggtatagcctagggtattttagaattagtggattgccatcatcattccatttatccacccaaaaactgaccttatctctgcaccccgccctccaggctattcccttttgaaagaaattaacctcctgcgatgactggaaccgtgactttaagtcctgccaccacaaagattcattgctgcctcttcttttgtcatccatactcctccaactgccgtatcttgaatccaatactcgagcccaaagtttgccttggtggtgaaacagattccatcccctttttccaagcaaagctaaattgaagctcttgatgtccctgattcctaatccccctttttcctttgggaggcacattgtatcccacttgacccacacagtcttcttttgctcaaatcatcctccccataggaatcggcgttgtatactcaccagcttatccacaactctgttaggaaccttgaaaaatgaaaagaaataaataggaatggatactgactttataagagtcactctaccctcaaatgaaatgcgtctttgtttccattttgctagctttctctcacacttcttgatgataggatcccacaactcacaacgccttgggtttgcccctattgggatacccaagtatgtgaacggtatggacaacaatctgtagttcaagtattttgcagcaaccttcttccattggtccgacttnccgattgccccaaaactgctctttgtgaaataattttaggccctgataccaagttaaagcttctcaaaatgactttgattgcctcaacattttccattgatgccttaccgaaaa

SEQ ID NO: 553 - DNA, 860 bp, Glycine max
aaaatacatcacatagccttcaatttacgtacgaatcatgttgaaagcatttaacacaagaataacccacctcttttggttcagaaaaactctggagctctttctgaattaagttagccattgacttaatataaccttctcgttgataccaagagtttataatggaaacagggagcttagacaagtaggcatcttccctgacaattaaatgatgatatcagttgattaagaataatccttgaatcaccaaagagcattgacaaagtgccaataagcagtacctgaatatatgctcaagaacacggatgcttgatccagttgtggatatagaaaactggggataaaggggtagtaccacaagccttgttattctgtccctcttaatctgtcacgcaagacaagcttttgattttagactcaagcctaaggtgatacagtggagctcagaataaataatgtaattcatgattaattatcctgtgtgtgatttaattatgaaaggaggaaatggatgtatgatgggaataatgcagaaagacaatgttagaccaaaaagcaagagaacttacttgctgaattgcttcttcggtaaatgggtaccagtatcgcatcccaacgtagacatttgaagagatgccctttgcttccaaagccattttaattgcaagtgcctgctcatggacaacgaaccataaaagcttcattagttccagcacattaccaatacagagaaattttattgagtgtatcaagaaaagggccaaaaagattcatgttgcagaaagataaaggctccacaagcagataatgggaaaaccaaaaattaaactccacctggcatctgtatttttcgaaaggag

SEQ ID NO: 554 - DNA, 751 bp, Glycine max
aaacactggcttcggatttatcacttgtaagtagagtttgctaactaaaatgctttgtcactctttattttcaggttttgttctgatatccaaaatcctggctatgttgattgccattcaaattgtaataagtctacatctcaagcgtctttgtttttgtgttccgactccaacagtagaagaaatggtgtttttggtagaccactttgtgtgaacccctctggcaggagaaacctagttggtccagctttttattctctggagactagtgcttatgacgtggctgctttagaatctccttcccgtgttgcagaagaaaaagttggtgtgctgcttctcaatctaggaggaccagagacattgagtgacgtgcaaccttttctgtttaatctttttgcagatcctgtatgttagtttgtatttgtgctttttctactgttgatttttctttttcctgtttatgtaaattccattagcattagtacatgttcatatgatttgtatgctaatgtgtttcttgtattgacataggatatcattcgtcttccaaggttgtttcggtttctccagcgaccattggcaaaattgatttctgtacttcgggctcctaaatccaaggaagggtatgctgctattggtggtggctctcctttacgaaaaattacagatgaccaggtggagtttaaattttttggttttcccattatctgctttgtggagcttttatctttctgcaacatgaatctttttt

SEQ ID NO: 555 - DNA, 852 bp, Glycine max
cattcttacttcttatctgtttgtttgatcccgcactaaacttcttatatatatatatatatgatttatataaaatatgatcaacatgacaaaaaactaaatatgatcaaacatgacaataagatttatatattcatacaataataagtcttaaaataaagtactaacaggcatgatattccactattcaaaaaatctaagagaaaccaatataataaagaacctcacaaaaataggaaatggtaaatctatctaatcccttccccttcctcggtcatcatcattgaaaaattcagcttctaactctagttcattgaaaaatgaacggcatgtcccttttattatcataaattcatatcaacatgcattcataccatcataataaaaatgatgctaataacaacctcaactatcatatattaaactgactatactataaagaaaaattatcattacttattcagggtaaggaacccaagttacccattacccaatgcacataaaaaacaggggaaggaaccctttgcacatggacacgggttcaaacttcgaacccaacgcacatagaaacctggtgcgtctatgtgagttgcaacggcatggttcaacctggtgtgacgaactggtgcagtcgtgtgactgtgcaagttgcaacagcatggttcaacctggtgtgacgaactggtgcagtggtgcaactgtgcgagtcatgtgacggcatggtctggtgcaaggtctgcgagactgcgactacattgcgaaattgtgcaactacggtgcaagtttgtgatctgcttgcgaagacatggacagcacccgaccaccgcacttgtgaaaggaacaatgacggaa

SEQ ID NO: 556 - DNA, 1496 bp, Glycine max
agttaacatcagaagatggaaatgacagtcatcagaaggaaatgcgaaaaatcttttctcaacctgaagattgtccagaagcagttccttatcaattggttcaagattagtgccatcaacaatacggagttctaaatcattcccatcattggcttgtctccagttatcttcattatcatatccggcatgtgaaattggagagtatcctcttgctgatttacttgaatcaggtgtctcactctccttcacccggtttgtcactgagggtacccatattgccaatccaacagctccctaagggcaaggttcacacgacaaatatgagaacattaaatattagcaattttcactacaataaaaagatgcacaatttgcaagttaagggagatgggaaacctgaataaaacaagaaggttgaagttcaaaattaaagccacaagttctggttgatagaaaattctacatgcattacaaagccggagtagttgaaaaaaaagtattttctctgatttaaaatatctgccgtttcagataattacacaagaattaaaaaaatctataaaatagccttgattaatttaactgcatttgactaatttatcctttgctaaaatattcaaaacacccatcactccattaatgctccctctcattccatttagtaaagataccaatcaataccaccttcattttctaaaacaacagataaactgtaacaaaacaaacttcctaaagcaactgatattttgaaagagagaataatgcaatgaatttatgaattcaaaaccacattaaaaggctaatgcacttcacagacaatagatcatgtctaaccacactaagtttaagaaacatgcaagatcatttgagagcaattttagagggagcagcataaaaataaacaactgtcataaatcataaagaattgtagggttaaagttgttagcgtgaaaaagagagaaggttgcattaaaaagagagttgtttatataagcaattgttgcataccagaatggctacacatatacatatgaacttgaaaaaagagaaaactatgcaactcttctttcaatgcatggatataaatgttaatatactttgactttcaactccagatcaaaatacaacaaagccatggattcataaagaaacaatttctcttgccatggtgtaaatatcagacatatagaattatggataaccatcagtgacacaaaggaatcatggtcagagtaagccaatcatctttaacaattcagctaccaaaaagaaagatatttacaattaactcattttggtagtcataggaactactagaacagcagaaaactacacatgcaacaaacagtaattttccttttttttggtaagagaattctattgaaggattaccatgagtggaagcagtatcctataatcttttgtcagctcaaaaagaagtagaactgatgtcaaaggaacagaacaagcagatgctagtgtagcagccattccaa

SEQ ID NO: 557 - DNA, 788 bp, Glycine max
tgcatgcctgcagctttgagcttgtcaaacccttttgtaatgcaatatgaagatgatagcagcagagatttagagatggttgagaaatctagcttgggagacggtgagaaaggcattggtaaaaaagaaaagtcaaggaaaaagaaactaaaagaaacagctaaagttgcacgtgaaaaatttagagttgtcaccagtgatgccctaaccatagcttatgctttgcagtgttttgaacattcagggaaatcagctgaattctgtgatgacaatgcattgcatttcaaaaccatggatgaaatgtccaaacttcgacaacaactacttaaactggtcttttatcagagtgataaaggtggttttgaagaagagtattcatggattcatggaagtttagaggatgtagaacgtgcttggcaggcttcttcagaaaaatatcctctttctctggttgaggaaaggctcatctgtcaagcaatatgtgctggctgggcagatagggttgctaaacgtattacagcttcttctagggcctctgatggagagaaaacttctcatgctttaaagtatcaatcaagcatggttgatgaaagtgttttccttcatcgctggtcatcagcttccatagtaggccccgagtttttggtttacaatgaactgttagagaccaaaagaccaaacaaagaaaggataacaagtgccaagagagcatatatgcaccgagtaacaagtgtagagcccgcttgggttgtcgagaatgcaaagtcttcatgcctttttttttctcc

SEQ ID NO: 558 - DNA, 819 bp, Glycine max
  misc_feature (702)..(702): n is a, c, g, or t
catttttgcatgcctgcagatcccaaagagggggaagctgaactagaaacagagactaaggtgtaacagtgacattggtgtcagcagatagaggggctgactgaacagaattatttggatcagaaagagactgatcagagggtaaagaagtctgagcaggagaggactgatcagaagaggagttatcctgaatattattttgaacaggaggtataataggtgtggagggaaaattaaaatgagtaggggatgaagaaggttgactaagagatggagcagattcaaacaggtcagcataaggaaacttagactcatgaaaaagaacatcattagagatgaatagtttacctgaaggagagagacacttaaagcctttataggaagtggaataacccaaaaaaagacattcatgagatctgaagtccaattggtgactattgtaaggtctgggcaagggaaaacaagcaatccaaaagttttgagaaagttatagtctggtaatttgttgagaaaacttgatatggaatagtgaaatttaaggaaactgtaggtagtttatttatgagataaaaacagttataaggcaaaatcccaaaatttccgaggtaaagaagcatgatgcaacaaagtgaaaccaagttccacaacatgcctatgttttttttcaaccactccaatttgatgatgggtgtgagggcatantagtcagtgtttgatatcacagctggccaaaaatgtgccagggtctaaattcccctcccagtcagtttgaggcttttattttgtattacattgaactcacccgtgctttgatttttg

SEQ ID NO: 559 - DNA, 877 bp, Glycine max
  misc_feature (774)..(775): n is a, c, g, or t
  misc_feature (795)..(795): n is a, c, g, or t
  misc_feature (800)..(800): n is a, c, g, or t
  misc_feature (802)..(802): n is a, c, g, or t
ttgcatgcctgcagttaggatgtttttatccttaatcagaccctgtaaattattcaatcaatattatatatatatatatatatatatatatatattatgcagtggcctaatgaaagccaacttgagcaaagaataaaccattttttaacagataacatcttcagaaattagtcaatcaacatgttagtatttgaggaaaccatcttaattaggctgggagaagtactttgagcatgcaccctgtaaatgaaattgtgaacagaagaagctgacaatgtaggcactatgtcatagccatttatagtggaagtgataaagggcttcctgaattcggctaactccaatgtcatacacgcagctgcaaaaaaatacagttgtgaaaaaggataggtcagatcatatcagaacacatatataacctattgaattggatagatcagatcaatagaaaaattaaaactctagatgtaagttaaaaaagttagtataacatatataaccacatgcctggtccaaatgtgacacaagtacatgaagagaactgcttcatttctctaagcattgtcaacagtgcagcagtaccaccaccaagtgaatgccaaccgatctatagaaagattattataacaataaaaaaaggttcaaatataggttgagctacatgattgaataaaaagcatacagaaatttaatttataaaatattgaagcaagaatatgggcattaaagtaaaagagtactttataacatacattcactggaggccattaatcnnttttctcaaatatatgaatnatctncntggtactttttcttctacatttttttctcctcatctggctctacctccacacttattcaacccaaaaggtccttt

SEQ ID NO: 560 - DNA, 535 bp, Glycine max
aatattgcatcagatttcccaatgccaataagatcaattgtgactgtaaaagggtgctgtgctgtagcttgcctctacttttacaaatttgttgtcttcaactttgtcagatctttacaaaatcatcctgtcgattattctattgtactaatttgaaaattccaactcttgttaactgacttttattttccattctattgatgtttcattgaaaaaattgggaagtcccatgcattaattctaaattaagtgaagttacttattgtagatgattgcgaaaattaggcagaatcatgtgattctgattgtacgactataattaggatatgctattatttcctttcttagttacaacagttatagggattttggttcctgatttttagctctaaattagtgtacaaaatcagtcttgtaaccctatttatacacaccattgcacctttttcaaacaatagaaaaatacagttcatttttctatatggtatcagagctcgatctgatacttccctgaacccagtgccgggcctacaat

SEQ ID NO: 561 - DNA, 799 bp, Glycine max
atgttctacttcttctttgaatctcgaagcagtaagaatgatcctgttgtcatatggctgactggaggaccaggatgcagcagtgaactagctttgttttacgaaaatggtccttttcagcttaccaagaacttgtctcttgtgtggaatgactatggctgggacaaggtacgtagctattaattccccttgtccttttctcactttacttctcactcacatagtcacatataacaatcatgtgacaaatcctgtcaaattttttgtgcttcgctatgctcattccatgcagagtgtctacaaggaaaaaacacaaacaaacaaactgatattatgtatattcctgtctactcttatactatagactttaactagctcaaagaataaagttgatacactgcttgttttcttgttggcatcaatacggtgttttctcattttgtaggcatcaaatattatatttgtagaccaacccactgggacgggtttcagctatacttctgatgagagtgacattcgccatgatgaagagggtgttagcaatgatttgtatgacttcttgcaggtaattctatttgataactgataaaataaaagtatttcataataaaatcaaactcattcatttatgtatgttatataattactcatattgagtgggtaaacttgattcacctttggttagttattaaaaatgcaagatggtggacatactatctaaatttcaagttatatggtagaccctggccgtgtgcatcataagatccatttaatttacaataatgacaagcatttttaa

SEQ ID NO: 562 - DNA, 747 bp, Glycine max
atagaaatgcatatgagttctggtgctgagaaggtatttcttcagaaaaaaatgtcctaatatttctatgatctactcatggatggatgaccaaattaatgtagcctttggcctatattcttgacttgacttctgtgactttacattttagtatagtcagaggaggttaaatttgctgtgcccctactggacatgaatataaacaagatggtggcttgctgtccctggagatattcccagaggatatacttacaggtttcttttgtttatttctttaaatattcttttgaattttttcactcgctttcatacaaacaacttatgatatgttgaacctaggttgtatatcctgttggaagaaaatatatgtcagtgccttcagctcctcgcctgaagttagtatcttctcctgagctgaaagctgtattttccattgatgatgtcaagctacctccttggttggaccggatgtaagctttccaatttttttattattggggttggcccacaccgatgcatatacaagaatgagaatgtttttgataatatttttggttttatgaatgaaccggtttgccaaagggcttggcagaatatcttcccaatctaaaagaatattttgggaaacaaggtagctgacattatcggtaccgggggctgggggtttttttaataagttaatatgcactttctagcttaatggacattcttggttatggttaaacttataccaatgagataatatgc

SEQ ID NO: 563 - DNA, 1492 bp, Glycine max
ttgcatgcctgcaggcttgttttcatagacttttatggtctccaagtaacggccacattcctccaggctataacaacagtagaataaaattatataaaatcaatcaattagacaggtaagaggaatcttgccagatgctacaacatatattgaaattcacatgcatgctacattaatctcaagttcctttaaatggtacaaattctgctaaaccaaaagttccaaaagaaactacaataagcttttctcctttcaagatgtatattctataagtcacataaaaaatacggttgcattaacaatcttcatcaagttacaaccacagactttcatcattaacaagagatttgatcgtgtcatatgatattttctaatcagagtttgataagaaattcacaagagtgtaatagataatggaagcactctcatgctcctgagagttaaaatcatatcttcagtacacataattcacaagcagtaaaaagtaaagtcaattgcacctccatccacaaaggagtgtacagtcatgaagcatagctgtttttgtaacttcaagaagaggctttattacatcttcctgcaatcaataagaaaacaacagagaaatgtcactttgtgtagatagccgaacatgtatagttaaattataaatttgtagatagatcattggaaaacaaactaaaacagatgatatagaagttgaataagtgcttgaccacatcaacatggcataaaaccacacgaagcttgaaattcttctgcaactcccttattctatagtacaagtagtctggatgcaaaaagatgataccgaagattgcattaaaccatcaaccaaagtcaagtcgatgcataatataactacatttaccccagccagcagaacattaacaacttgtgagatatccaagtaaccacacatgggtaacaagaaatctagaaaaaacaagcagttccacaaacataatcaagtcgcaaggtatgaatattttctccaatcatgagattacatgtaattatcctacaaacatgccatagtaatactgtcagagcatgattactagatccagcgttgagtggtgatttgatatggattttcaacaattttttatccagccaaattttaactaacaaacttgaaatagaaaacactatttattcatgttgacaccgacgactgaataagcaagtttatacaaaaatgaccaaaaaacaaaagcacagagaaaataacctgagatagagagcacaggagctttggccaagcatgtagtcacaaacaacatcagcaaatgcccatctaacgttcctaatgtgttttagcaagggatttcccttctgcaaaataatacactaataatgattgtcatatatttgatgataactattttaaaacgaaaattgaagtgaaaatatgaatgatatggattggacctgtctgtggctgacaagaattgaattgcgattttgagaggaaggtattgttgacgaa

SEQ ID NO: 564 - DNA, 698 bp, Glycine max
atcttgcatgcctgcagcttataacagtcagttatggcgtgcccctttctcttgcagtatttgcagtatttattctcatttctcgcagaagttctctcttggtttctccctctagcaacaagaccctctggttgagtctccgagtcaccaagaagatgtttcatcttctccttagagaacaatgcctcatattcctcttccagagtcagtgtatcacgactgtataatattgtatccctaaaagtggtataagattgaggcaataaacacaacaaaataagccccaaatcctcttcgtcatatttgacttccatagtctccaaatcagcaacaatttccttaaaaactgataagtggttagacaaagagagaccttcagacatacgatgagaatagagatgtttcaaatgcaatttgttggtaagacttttaatcatacacaattgctctaatttcagccatagagcagcagcggacttcatcttcataacatcttgcagaatctgatttgacagatgaagatgaatttgactcgttgctttacgatccttacattgtttctcctctggcgtccaggacgaaggtatcttgccgaaaccctgtaaggcctcatccaaatccatctgtgcaagaacggcttgcatcttaacctgccttaacgaaatctggtgttgtaatccagcaacgaaatctcatat

SEQ ID NO: 565 - DNA, 708 bp, Glycine max
attaagtaagaacattaacatgatcaaataaaaatcataaaacaatatgtgaaccgatactgtaaaacgagcaacagaattaaaaggaaaaaaaattcaaagcatacattcattactgcatactacagtgaaaatagaaaaaatatataacaggaggataagacatctaccaaaataaaaaacaaaatgaagatgctataaaaattatatgaaagggaacagtaaaattttcccaagtggaatcacaaagtaagagagtgaatagtcctatcctggaaaacttgctatgccatgaaaaagttacttgaagatccaggaatataacctcaaacaccaaccactacagatgccaatgctcatgacagcaagcttaaacaacgccaacatggcattcaattgccatattgaaggatggtgactaatttaaacaaataataacaacaaaacaatgaaatcagtgagtgaagaactgagttgatactagaggagctggtctggtaaacttaatggtaatttcaccctgttcaaaaagatttctcaccatacaattttcaaaggagatcgaagtaaaacagaatttgtcaaaagtcaaaaccactttttatgtgtttttgtgcaggcttctgggttactattgctgaaaggcaattctacctaaacagaggagaaaaacactcaccaccttgccatttttaatgtgaaccatgc

SEQ ID NO: 566 - DNA, 513 bp, Glycine max
aatgttaacaagggtttaagagtaagtgcccaaaaccttcttttcacaacataaatacttgaaacatccacaagagaagtaaaaggggacatgggattaagagtgtgtttgagcttatgtatagcttatttagacttataacacaagtacttgtgcaagtgtttgggagagcttatgaaaaatagtttatgatatgtccataagctgttttcagtttatttcaataagctctacataataacttatgaaaacaacttacaacttatatgaaaatagttttaccctatttccttttcagttatagaaacaatttatacataagtgtttgtttgatttgactgatttcagcaaatatattgtaactgtattttcaaactggaaagggtagaattagaaatgcagaggccttgtgccttattatgcaaagaacaatttggaaggtacaaagtatgtaacgcatgacagtttgagaagggctcaacaaagtcattatgagttgcagtaaaactgata

SEQ ID NO: 567 - DNA, 750 bp, Glycine max
actaagtccttttactgagttttaagaaatttacgtcaaaattatggtcgagacttgaggcaacgatgtgaaagtactttccagagttttattaatgattgtagttgatatgtgggtcaatattttgttttgtttcttaaacatttgatagatagtctctgatgagagtttcagaagatatgctccgtacttctccctatttggttggactaattgtgatttgagtgtactactactacatttctctcgcttaattgtttttgttgttaacaagagctttaacataatcatacaggtttggcgtgtgaatggtcaggaaaagattcttcttccagccactgatcagtcaaaattttataatggagattgctacatctttcaatattcatatcctggagaagataaggaagagtatcttataggaacatgggttggaaagaatagtgttgaggtgaaatatctgtacagctttgttccacttctttttgcacatgtgtgtttataatgttttctttcatgcaaaaacaaaaaaaaaaagaaagctaaaaatctgactaaaaaatattcacctggtgctgaaaactatattagtgaatctcagctaatacatttcattacactgtacacaacattggcaactcttttgggaccagaaagtgttgaataaatgtgttagcctgcattccttacaagctttctttgttgaaattaggaagagagagctttagctctttcactagcaagcaaaat

SEQ ID NO: 568 - DNA, 1500 bp, Glycine max
ttagcttcgtggagtgtgacagaaaatattgaaggactggatgtggtggtatttggtgaacatgcaaagcaacagatataaatcaactttatcatatcctttttcctgtttgtaattgcattacagaagcagcacattactgtggacaatttctagtaatggttcatccaattcggacacgacttgtgcttgatattggtcttggtaacaaaattatctatttgcctttcaaaaaaaatataataattcgggagtcaacaagtcagagatgggttttgttctgaatcttctgatacatcttcagggctagttttaagtaaattcttttttctcatcataagcttgtaacataaataattaggtcactgtccaatctttcaagcatgcgtcatataatttaaacagacagtatttcattgctaaactcatgaaaaatgaattagaaaggtcacttacagagctaatactgggttgtctttttgcagcagagatttctggagaattcagaagcagaggatttgtagcagagtatgggttctgtcatagcaaacattagattatacaggtaagaatctcaattctcaatctactcttaaaatgactcaacgcagttataaaaatggtctagagttaatgaaaggaaacaaaaccctcacaacttagctaagaggaaatatttctagtaaagcatccaaagagcaaaaatcaactatcttgaactaaacaagtaaaatagcacattgtgcacacattaacatagaaaggccctgtgttatgaaaccataaaaggcagcatcggtctttaggaataagctttccaaatttaaggataacaaaactgcaacttcttcaatgtatgtgcgtcggcgatttaaaaatcaagcaaataaaaatgcaagacatcaggaaaagaaaagaagtaaaatgatctacacaagggaataaaaccttgtagttttgtgaagttttgtgaacttcttaaggtgacttggttctaatgctaaaaattcatatccaaagccttagatccttaaaacactagcttatgagtagtgacactcctttggcaagtgctcttaataatatagaccataaaataatcttataagattgtcattgaccctattagtatcaatactaagaaggcatcagcttaaattccttaaaagcatctaaatcatcccaatgaatagcatataaacatgatgcaggttatttggaattggaaacacttatttactgttccataaacaattcatcccctatcacacccagttctatctttaagcattcactgcctatgacaaaaaaaagaataatgcatcatatactttttttcacaatttgatgtgtaacaacacattcctttaacccaaaatggcattgtttcaatttgaacacttaaaaacatttcagtcttacaaaacaaactgaatgagacatttaaaaagtaggaaaatagaatatggtgcaacctaccattagctgatctgcaggatc

SEQ ID NO: 569 - DNA, 861 bp, Glycine max
aaagtggggaggtaagattactactcaagaacaagataaaaaaacaatcaaggagaatttttcacaaaaacaaggaaataccatctccatatgatgccattgtgagaggggaagaaatgagtttttgcgaaattgaagtgatatcctttgaggttacttcatccactgccttcaagaaatcctccacaggtttcctgagtagggaaaagacatcctttagctacaggcactagagcatttctagtaaaaaacaaatgcaagcaacaataggcaacatttaatacaaaaacttaacagttccccttttctgttctttccaatcaccattttaaaatggtgtcaattcatgctcagcatataacttccaattccgcatgaaccggaactggcaccaaagatggaatcttcaatctaaaagaatactatagcaatggccaagactagatctttctataggtgcaataacatgtccaatgctaattttattttttgagcaaaatcaaacatatttcaccatcatgtccccattcttatactcattgtagaacagcattgctatacaccaagatactaagagcatgtttggatttcagtttggtggctttcaacttcattttgggatcatcaaattatggctttggttgggtagccctccaaaagccaattctttttaccaaaccgtttttgcttctaaaacttcatttttggaaagcgggaagccaacctgaaaagggtctcctttggggaaacctttccggtttttaagttttggtgaaaatattatattcctatttttaacccttttagatgaacagcgggtacctaacctggggtggggtcggggttcaaagattaaattgg

SEQ ID NO: 570 - DNA, 807 bp, Glycine max
aaattactgatcctgttgtttttatgtatcatgttctcattctgagttctgactactgcatattggaatatcatttaaattgtctttaggtgcaaaagagaagggaactattggcaaatgaattacatgaaagattgttgaagagtgacgatgtgattcctatgaaggttgcagacttcataacagataaaatagaaaacatcagaaccaaacgaggtatcaattctaggttggtttctcagcatatggctttcacaataatgggagccacattctttggagatggcttcttggcttcgccaaaggctgcaatatatgaggaactgtttatgatgattgctaaagatgcttgcttttgggcctcctataatgtaactcctttttggagacatgaattttggaggtatcaatgcttatgcgcaaagttgaaatgcttaacacaagacatccttcaacattttagaaaaggctgcaaactatttggccaaactgaccaagatgtacgaaatgaaagttccaacaaagaaacgaagtcagcagatggtgcacaatgctgttctggtgatgacttccaagattactttttctttcgtgatcttaaggatcatcaagatggtaaagaagaaccttgtgggaacatcatgcgtgtgatatttcatggatgtcaaactacatctgctttaatcaccaatgtattgactaggcttgtcatgcatctgggaatacaggataaggtttcaatctgctcattctgtctccactgtatccaatttgtattgcactttattttaatcattttattttagt

SEQ ID NO: 571 - DNA, 591 bp, Glycine max
tttgcatgcctgcagctgtctacccttctaaaatatttgctcaaatattggtgatattaattttaacaatcacaatgtaagcctagacaccagaaactagaataaacagaagacaaaattagtaagcataattaatacacttctcaccaccccaaatcatcaggtgaataaattgtttcataaaagaatcaagcaatgatatcaacgcaaaatgagaagtcatctacagaaaagagggattcaaggagacggtgtgtgtgtgtgtgtgtaactttttaggatatgaggaggatttgtatgcaggagcaggatcataattgcaggaatgtattaggataatctaagactagaactaaacaaggtattctttcattcaacaagtttactatttaagtgcttccttcctcatggcttacaatttttagcagccaggctggcccagttcttgtacagcagagacaggaaccctcccaagaatatatgaattcataattttaaagtcaatagtctatctccttacattcttctgattttccttatttttttttataattactgtttacagtctgtttgcagcattaaacaaaatca

SEQ ID NO: 572 - DNA, 805 bp, Glycine max
catcttgcctgcctgcagttaaagcatcaacagaatatagttaataggaggaaggatcgtgcagcgaagagcacaacatcttataacagtctataaaatgaaaatgtattgatggtggcataccattagatgctgaactctgattgatgttgatactgctcccacccctgggaataccatatgatttcatagaagttgattcgccaccataaccaaaagcaatttgagaagctaacactgcatgcaataaatatgaactatgccattttagaaaacagaaagaatgatgctattcttgctttagtgaaaagggagtcatgtcaagcttcattctgagatctcttcatagacagaaagatactacgtatccaaatcatgctacttcgacattaattttaattaatgaagtgcaaggaacttgacatgtagagaacaaacatttgagagagtcaatgataactaattgattctccagtagtttggcatggcatgaaacatattctcaataaacattcctatcggtatcagagcagttatttgtagcaacttacttaaccaccaacaacaataatgaaaccgattgacagtaggtgcacacaacatatgacctatgacgaagagctatttaaggagtttaacagaacagaaatgtgagactgtgagagtaggcaatggagagcatataataataagagaggaataggaacaaaaaaattgatactaattgtagggtaaaacagagagtgagaaaaaactgacgctcaaaactgtattgttaccttttttttttttataagcaacttta

SEQ ID NO: 573 - DNA, 1389 bp, Glycine max
aacctcatcgttccatctaacattatatttgcgtttcctctcatctttctcttctctctttctttgttcctcctgtgaaaaggcaccataacacaacaatcagcgtgacataagtataaatgtctgaataattacatctcaaaagattgaattctccagaaaaaataatatacttcacactagagatgaaaatccataagccaaatcatgtcatctttgtttcaagaaattacatgcaatatttatatcttgaatctatggtgtcttgaccttggtaattaaggtcaacaaagttattggcacaaaaatataattaattcctgggggggtacaataagacacaaagaatgacacaaataccaaacatgatagactgatatttaccttcttgagtgattcagcaagcaatttttcatctagaactagatcatcggggacatcagtaccccatgtagcaagctttttctcctccacaggtgcaggatcatctgtataggttcatataaagaattagagattaataaatacatactaaatacaatcacagaaaattgtcaaagaaaagaaagtaataacagcaacgaaaaaggaaggaagtagggacacatcataggtttgggtgtatgttagtgtacgaacctgtagcagcctccttacgggcaatattagctttcataagatcacttgcagcctcagcagcctcaataccagcagcaccagtgcaatagctattgcgtattgtctgcttgcagcacttatagccccattgatgatccttccaccatgagccccaaacagtcgtgtggttgttaatgtaaacatcttcttcatacttgctcctggggagagctgcttcctgttggaaatatcagataaataactaaatctatcatcttaaaaaaacagcaataaccctaaagctgaattcataaggttgaaactaaaactcatggtaaaaccctaaaaatgttaacagatcatgtatgaaatcccactaccactacactaccaagaagcatatttaagatttatatacaaatgctgcaccataaagatttagaatgcatatcttacctggcccttaataattctacctgcacgatcatactcaacttgcctttcactttggcccagcagaagttctcttggaagtttgtcctcatcggccgcattgccatacttctcaataatggtttcctttgtttgatactttaacttctccttcatgaccttgaaattcttatagagtaattcagcttgggatggagctgcttgcatgtgaacatcttgtcccttgtcaaaggcttcccaagcatggatgtttagttccttgaattctaaagcttgcccactatttctatattggttatcaccctgcatggcaatgca

SEQ ID NO: 574 - DNA, 788 bp, Glycine max
atattattgttagtttgtcatggcattctgactgaaaagaatattcataagctaaaataaattcaaacttgagtgaccagagatctcaatcttaatatgggtgtgacagccggtcaaattaactttcatagtatataaaatttcagtctacatttatctaaatgcatgctaaatctcttggacatatgtcgctttctagtagcaattcctttgatagtttatttatcttctcacgtctccttttggatttgctttattttatcaggagttatagccctcgtgggagaagatctccaagacgacgtagcatttcacctccctggggtcgcaactacagcaggtcccctccatatcgtcctcgccgtgattcaccttatgccaatgcgtatgtttatgttcaactcagttgttctttactctgagagtgtgagttaaatgaatgacatcataacttagtacccatattaatttaaattcttatgatttctttttctttttacagagattaaaatcagaatgtgaacggagcaagtgctgaatagttgttaggatgttctctctgctatagtgtagttcctctaggattggttgagcataccacagacatgttagttatgttgatgtcatgacaatgggtattgttaagaacttggcttttgatggaactacatagggttgtagctggcaaaagggtgcgttggacactgttttgcattggctgtctctcttcagcttactgaaacctgagggtgcttcagtcttccctactttatatagcatgtatgtaa

SEQ ID NO: 575 - DNA, 829 bp, Glycine max
  misc_feature (696)..(696): n is a, c, g, or t
  misc_feature (717)..(717): n is a, c, g, or t
  misc_feature (738)..(738): n is a, c, g, or t
ttgcatgcctgcagatgggagacaaagtgacagatcccagtagctgaagatgacacaaaattccatacagaagcatgcaaaagttaatcagtcaaatgagaaagctgtggacacagatcacaaagagcagagcagcaagtggagaatgaaagacatttggcaagtactcatttggttaaatggaatcactctttctagtcccagtccttagagatcatagatcaacaggtgatttgccgaaggaggatacacaatacagtgtcctacacaaccaagatgatgaccattgctcccaaacggcaagcatatatcagagaccacggatgaaacaagtaacattctaatcaagatgcagacaattagaagcagcaaccatcaatatgaccatatagaatggtgtgaagcagacactatatgcagttactcgctaaataattcctaatttatcttaatttcatgaagatacagcaagccaatgactacattctatcatccacctttagactcctccaaatcctaagggggatgcatatgtagcattcctttcctgaacagtaagcaaaaaggtcatacacaaccaacttgttgacattgaacttttagtcaacttagatgcagaaacaagatgagacgattgagggggcatgaagcacataaaccagcaagacgtagtaagtggcaaaatggtgctgtttntggccggtaatcacacctcanaacaaggaaacgtgaacattntaggcacctttaatgcaaaatatattcaaattaccatagtggattagtaagactaaaaacaacatttacataactgcttattaagtagggg

SEQ ID NO: 576 - DNA, 798 bp, Glycine max
tggacatccatgtatggccccttttggacgaccagcatttaaagagggatcctcgcaaaagaaaaagaaaacacagttaaaagattatgctcacaaaagcacgtggaaaattggaatcagtcatccgaagtaatcataaaagattattctaccaatatcagtagtgagatattgcctaattcacacctaattccaaaacaaacaaaaacataggcagtttaagtacactatctgcatctaaatatgagtcctaataacaatgcagaacttgaacaagataagatcagcaagattccattccaattattgtaggttacccttacccaccacctaaggacatgtatagtatcttgattcttgtatttattattgaaattattactcaatataaaacaaacatcgacactgattttttaatgaacaaaatcattaaaacttattcatattgccatattctcattcatgcatttcatttcagaattcagattcaatattctgggtataaagtatcaatacaattaacttatggtgcagcaagagccattgtctgctctgggaccatagttatagaatctcatgattcacgattcgattcagctaactatcaatgtggatcattagatgaatctcaaagactttgaaccttaaatacatgaacgaataagtccaggttcgtatcattggtttaaaatccatgaacaacacattggaacttttacttacttttctttcaccaattttcatgaaataaattgaaaagtcaatatagctaaaactgttaaatggaaagggaatgaa

SEQ ID NO: 577 - DNA, 747 bp, Glycine max
atcttgcatgcctgcaggtattcatctctgtaatacattcatcttttttttcaacaataaattacttttcaacattggtgatttaaaatcactccatgtatagagaaaaggataaggcctacaaagagtgactattttggtaaacttgcaaccaatcatgtaggttagtttaaatactattaaaatatatttctaaaagattgcatcataaaccatcgaatgcatcaatctcaatggaaatgcataaatgatggattattacctttccaaatcatggtcatataagacagagttatcaccactggtacgatataatgaaagccccaggccacgaatcaatggagccaatggattctcattacaaactccatgtagcctgaaaagataatcaagaaagaactaatagtattaaaaagtcatcaacaagtattatgtattacaaaactctcttccagcatatgaagaacagctaactccttggaagaagaatagaaaattaaaaataaatattcaaacaaaaaagtcaataaatgaaagtggtaatgaccatattacattcctaacttcataccgaatcttaagcctcaatagtgtgagaagaaaaaagagagaattcactatgttctaagaaccaagcaaataactgcattttgagtaaccatccacaacttgagatggcatttaattttaaaagggataaaaagcttttggcaaggatttgaaaaaaaccaaagccaattaaaaaaa

SEQ ID NO: 578 - DNA, 966 bp, Glycine max
  misc_feature (743)..(743): n is a, c, g, or t
gattagactgtgtcctttcacccatgaaaattttggctgatagcctatataaatctaaccattcctctgtgtcctttcaatgcaaaataacggcaacgaccttggtatgaagaccattttgtaatggggctaaccccatgtcatttataaactcattctgttcattgttcaatgaacgaggcaataattatgtgatcgattttttacttttttttttaaaaaaaatgtctgctacataaaataaatatttatttttttaatagatctccaaatatacaagtaatgaaacaagggggatgaataatgcaaaaatatacatgtgctaaaacaagagcaagacaaagatctatacaaagaaatacaacaacaatgcctaaagatctatacaaagaaatttgaggaaagaaacaactatccacaaggtggcttcttccagacagttaactattgtcatgatattttgcaatgctgacccacagttcatacacaaatccaaagaataatgctttttatgatgagtgatgaattgtctggtttcttccaattgcatccactttgccaacgcagtttggaaaaacttttcctgataccaatgcaaccatagttcatactcccctttctgacccctcatctagtttcttccaactttctctagtttgccaatacatctggggaagtattttttatcaatattttgtgtagtttaacatctgattttattcgtcttctggagttgctcacanacatattaaatctgcatgtctccacactgttattataactatatacgaatcaaacatactgtcatacagaagcgcttgataatgctaagacagatttatctctcatatcattcttacttgaatgttgccaaacagtgcaacatatacatcggtacggactaaatcgctttcaaaagatatgggtagaccatatgctaagcaagttatattcatcttcacctgt

SEQ ID NO: 579 - DNA, 777 bp, Glycine max
gaaaatacgagaaatcctactaaacttagttccattggtaattgggttaaatgtcaggagattatagatagagccaatggaactatatgtggaaagtggcgcaggtaagtcacattacattgttgttttgaatgattttattagttattattttgagggatgatcttcttatttaagactttatctatgaaacaaaaaaaaaatgatatccttaaaatcaaagtttgcctagtagaagaaaggcatttgtgcaccatcacacacttttctacttatttccttttgtttaagttgccgctttcattcagatacagaagggagaaatgagtagtgtgtgagaaagagtctcttgttgattgtgcttaaattgtgttaattctagcaaatatttttctttggcagggctcctctttttgaagttcaaactgatgcctgggagtgcttttgtgctatccattgggatccatctcatgctgattgtgctgtacctcaggtgaaatacatttaactcttcagctttctcctttctgttgattgtcttgtcgtggatgtgttggtatttttgatgttgagttggaggactcaatttttatttttgtttgttttctacctacttgctcaacaaagcttcaacataaaatattatgttgaagaagtatttcattttaattctgtaacctcacgtctttcattttaacttatttatgattagagattttttttaaaccttgattgaatatggctagatctatatgctcttgcacacacaaaaattgt

SEQ ID NO: 580 - DNA, 882 bp, Glycine max
cagtttgcatgcctgcagcataaaaatgggaatgttggtggaataaaatccacaagatagaagtgttggtgggttgctttaacatggaccatctggtagcaaagaaataggatagtttttcaaaattaaaccttcaatggaagcaaagtgttggatgatgcagtactcctaatttggacatggctcaaatctatggagaaagattttgcactacactttaaccaatggtccactaatctaagagaaggtttgagtatttaggaagggattgtaggtgctggacatttgtaatattttatagtggactagctcagttccttgtaacaaccaaaggaaccagctgtctacctaatcctcatcatgtacttttagtaccactggtactcctcatatatataaatatatctatttttgctgagcaaaaaaaaaatcattttgtcataaacagactattctagaagcttaagttgttaggtgaaaacacatgaaaggttttatgtgacatctatggtgtgccctatcacagtatcacacaaccctttaccttgtcctgacatttaacttattaaatttggtagtaagaatggagagtggtaaggacttaactatagatgacgatggccacattgttatagagctccaatatcatgccataaacaagctattctaaaagcttaagctggtagcgaaaagacacatggatgggttttattttacattcattacccattttttatataccaaggaaaaaagccctttttgggtaaacctttggggaaaggctgttcctccaatttccatttttccccagttatcaaaacccttgtttcacaaatatgccgtcgctttgtttctattctcacaatatatagtttggggttt

SEQ ID NO: 581 - DNA, 1405 bp, Glycine max
atgcctgcagcaagtccatatacataaggatttccaggatgagcgtgcctgaatgttaaaacatgtaaccaatcacattgaaaaaaaatattgagataaaaattatattgaaaagaagaaatttcatttccaggagctccataccctataaaggtgatgtaaactgtaaatatggttatcatgaaatacactcaaactattatgcacaagcatgacaatagttggttcaactggtatggatcaaaatagaacaaataaaccaaaataaaagtttaagttcattaaaatttacaagtgataatttcaagagaaatttcaatagctgaaaacactaagaaacaagaacattatgcaaggtagatcaaaacagtaaaagaggtctagaaaagaaaaattcttcatccacacatttcctttttctttttcctttttcttgaatttggggctcggccaaactcaactccaaaagttgaggaatcacatcacaaggatgattcccacaagacataaattaattttttattttcttaataaagaagacataaagttaaaaaacaagaactcatttttccattaacaatcatgtaaatgttgcaaatacatacatattttattactgaaatatattaataaacaccaacagcagaaacagagcagtaaaatattaagacaacagaaaatgagagcctgagctcttacaagtgcgcccaccagagcctaagctcctaagagaaaaaattattctgtcaaatgactaaccaaaaatgactctcccaataactaagctgcctcctctaagaaaattgccagctcagcacccacactaattaagtctcccctcttccctcctccttttccttacgagtatagactttccagaccttgggcttcccattgttttagcccaataactgatccatatactgttccacctcactaattaaatgaggttcattattccatactctaccatctatcttaatataattgcccacataaaccaaatatatcaaaatattaatagaattagaagtagcagagagaaagttgtagaaagtgtgaggaaaatcaaagaaagtgaaagaagaattcagaatgagaactgaaactatagatctgaaaatgtaattttgttatttcagaaaatagatctcatccgtaaaaaacctaaatatatatagttattacatagattagctaactggttacagctaagcaataactatagacagatctaaattctaaagtaactgtacctaactgtaaaaacctaaatataataggtcaagttccgcaagctttgttctagcatgaagaatgggattatgagccagtgacacagtactgagattgtcacataggatagtagttgtaatgaattcaaccccaagttctgtgagaagag

SEQ ID NO: 582 - DNA, 792 bp, Glycine max
ttatgcaaaagcatcaaaagtattttgctgtatgtggtgctaatggacaattattgccttattttgttgctgtaagttctttacattaattggtcttctagaataactgcatgctttgaaattttatttgttaaatgacatgtaattttctcaggttgcaaatggagcaattgatgagactacagtgaggaaaggaaatgaagctgtgctctggtattcttatctcaacttcttatcgtgtcatatatagtttattgaaagagagttgctatgatacccagtttcttcttgggtattggtgtccttgatgtgttgtgaaacatttattagtgtttggttatacttgatggcttctggtaaggacaaactctccttgatgtttaagctataattgaagatgcattaatggtttgcctttctaacacagtgctctttaggcttgaggatgagaaaatacacaatcccactctagtttgtgctgaaattaacttcatttaaaagaatgggagcaacaagaattaaactcatgactactttggtcacaaaggctctaatcccgtgttaagaaccaaccaacccaaaagcttaagctattagctgacctttgaatagatttatgtcttttgtgaactccaaacatttattgtgagaaatgagaaacagcaacgaccatttttgaaacaaggtattgatacctggggaaaatgggaattggagctaaagccttaccaaaagttacccatattgctttttctttggtcattagaaatgtgtattgatgtaatataaaac

SEQ ID NO: 583 - DNA, 684 bp, Glycine max
aggattttgagcagatagaagtggtcaagtgagctccgtgatactcactggaaatgttccctcatttccttcaagcagctcttatgtattgtatgtccacagagcaaaacagtggcatcattcacagattcaaacaaatactgtaatcaccaaatttggtaaacttgtgtcaatttcagcgattcaacaaattggtaatagtcacggtgctgaaataggaaattggtataatgttacctcaaaacaaatggggcaatcgtgatgtattgctccttccacgcaagggtgactgtttttcagctgagttgagtagcaacaacctgtgcaaagaaatcatgaaagcatgatcagtaggtaaatcattttaaacccttgatatttagtattcattaaaaaatataggatatgaagaatattacttaccacatgtgtggcagtggaagaaattttcacatcctccagttctgtattaaaacatatgagaatcaatcagtctaaatgactaaatcttgatataaaatacagttaatctaagaaagcaaagtacactaaagaaatattgtaacatgatatattggttttgaattctttgacgtgaaaactatgaaataaaattggcatgtatatttttaatatattagatataaattttataaatttggatagcatgatcacttaaacgtt

SEQ ID NO: 584 - DNA, 841 bp, Glycine max
  misc_feature (768)..(768): n is a, c, g, or t
atcttgcatgcctgcagaacttgcaagacgcacactgcatgaacaggggtgtgcaaacgggtctgatccctatccgcattggaatctgtgtctggttcagttcgggacgagtcatgagtgggtgtgggttcaaagtttgtttaggatggatttacacaaaaccgtggagacttgaacccgcttgacttaggagttaggatgcttgcaacttctatcaaaccatgtgagaagcccaatcacacggcccataccaaaacagcttagagtaagggactaaacctaatttcaccaatcacacacccctagcattataagtgtggtttcgctcttgcgttatccgaagtttaggaaataaaataccatccttgataattatttgttttcttccctgtaattaaaaaaaaaaaaaaagatgacatgattgcacattacgccgtccaataatttttccatatctcgtagctccttgtcataggtgtggccacaatatatacgtcaatgttgggtgtattacataatttttttgtggttatagtaagagacaaataccataagtatggttgaatgtaaatgtaaagttttattagggttaagttaaacaatcttcatattaaaaaataattagacgtaatcctagggagtatttctacgcaaacccaaaataaaccttttagttgaaaattggatttccgccttttatttaccggtggacacctttttttgcgaggaaaacgggggggtataggcgtaagatcggccttttttcanaaaatattttcttccttatccaagtaggaggcaccttaaatcttttaacattggttccgggcgtattaaattt

SEQ ID NO: 585 - DNA, 1683 bp, Glycine max
  misc_feature (709)..(709): n is a, c, g, or t
  misc_feature (717)..(717): n is a, c, g, or t
cttgcatgcctgcagctgtgaaagattggaggtactaattttaaatgttttattcttttataactgtttttaattgagaatatatgaggttaattgacaggtatgaactcttcttgcattccaatatgcactgttgagcccaaacttgcactaaacagttaaaagcctagacagaaaactatggcagtatatatttgaaatcctttattttcaacatatgaagtttggactgtttcctttattgaaactcactacacttttttttcttaattatttccttttatcgtttgattaaatatctcaattatttactttaagttttgtcttttttcttgaactgatcagaaacacagtgcaatttatatttatatttttatttctgtcttcttataagttctaaacccaattctaaaggggagaatctacaaccgaaccaaatgattaaactcaacaacaagaaaagaaaagtaaataaaaaaaaggagaaaaaaagagagattgtttgacaagtctacctatccattcctaagttacttttcatataaagatgtgataatatttgactttcaccttctcgatggctcatggaccatgtgttattagtggctagtgcgcatgaattgtattcttaagtccaattacataaattagtggctagtgcgcatcaattctgtgctctaaatgtttgatacatcccaaaaaataattntaaccagngaactaaaaactaaacatgggagaatgtgagagatcattgcattcagcagcaattcttttcttgctgaaatagttgaaagaaaacaatattctataggacctatacaatagccttgactatataatcagaaatagcttactttaatacattttcagcatttaaatttctgttttttctaccttaggaggtttgtctgggcatatgtagagaagaccagtgaaagtccaagctaagagagtagataaaatgtaaggtagctctatcactggaagtactgaggtaaatagagaccaacaaaaaacataggcaaaatcattaaggatttagagatcaatggtgtctatgaacatgattcacaataatagtacaatatatgtaacattcaacatgcctctacataaagaagatacatattaacgataaatatgtgcacatcataccaattggataaggctcctctaaagtatgtttgtcatcaaagcaagcaatggtgtgtccaaccttaatttaatttaaagtgaattgtaatcttaacatactaaataaattacaaggataaactcataaaaacacccttactaatcactctagagacaatcccacttaacttggagccattttgataccaattaagctgcaagaataagagacaggtcatattactgcagcaggaacaagagattcatcttgtattaacactaatgagtatttattttaatttcaggttcctatatcaatatccttttgggatgagtaggtggctaccttaccctctggttgacttggtatctaagttaccaacaccactagttttaatttcaggatggtgatattaacactaatgagtatttattttaatttcaggttcctataaattctactggtttgatcagatatagctggtgccaccccttttttggtaaaattattgcccatgtcatgaatatgataatatacagctcact

SEQ ID NO: 586 - DNA, 742 bp, Glycine max
agggatggaaacactttcttctacaaaacaggaagacatggttgatgtaaatttaaaacccaccgtgaattcatcccaggcagagcagcaaggaggaggttgctcttgctaaagaaaggctattcataacaagccaatataagtgtttcagtaagcacggtcatggaattggctactaaacggaaagatgcagctgaggtagacatgctttcataccaatgctcgtcagtgtttagttgggggagaggggtttgcagtaatagttttttatgtaagataaaaaaaaaatggtattcatctgtttcattttatagttagtccctttatgtaagaatgcacttgcaggttatatacttgtataaaaatttatttgctggatgacgtgaaggaggcatcaccgatttttaacttactactagttaagataaaaggatttaaactggagctttgttggaagtattttcggatgacttttttggtccttttttatttctttattcagcttacttatttatctttttaaaaagtatcaagtttgataatttttttttgttcaatttgacttttcagtctatttaagattaatgtttttaataatttaaaatttaacttttttattcaattttctctcctttccctccccttcattttaacaaaaaaaaaatcattcttaaataattaacaatgttaagcctcaaatgaaatttgaaggataaattgaaaaaaaaaatatataataaat

SEQ ID NO: 587 - DNA, 856 bp, Glycine max
atttgggcatttgcaaaccaaagccagagtggtttccttgggcgggcagagttttacaatgcccttaagcttgttactgttgcacagagtaagcgggaactaactcccgaaatggtaaaagcagcattgtatggcccggcttcatctaagattcctgctcctcagattaatttcattgccacagtatctgcaccacagattagccctgctagtcctttatcccaacaaaatcttggaccaaggggggcagctccaaatttgagcgctaaccagcaaaccctcccttctcagggaaatcagtttccgaggcctccagcttctaatctaccacctgctgttgccactcaaggaatggctctccctgaaacccctggcatttccagttatggcaaggttggtggaactccagaagtaacttcctctccagtagcagttagaggaactagtcccccatcaatggaggaggggtttgggtttggatcaaatgtggcacggccacctggcacatatcctgcctcccccataaagtattccgatcaaatggttaaggattctaaaccagtggatacttctgttaacggtaattcttctgattcattttttggaggagatttgttctcagctagctcatttcagcccaagcaagcttcttctccacaaggattttcttctggcacttcagcactttcttcagctattgttcctgtatctggaggaaaccagcattctactaggactagcccccctgattctttgcagctctcacttgcagtccagcctgttggtgcacagcttcagcaagccccacccgtggtaaaacaggaccagcatgcctcagtccagacacataatatgg

SEQ ID NO: 588 - DNA, 1531 bp, Glycine max
tagatcagtttgtagaatcacaagaaagtatatgactagatggacaaggatagaagactaatataacttctttaggtagaacgcgggtctccaaaacccgatgtcgtaggttcaaatcctacagagcatgatgattaaaatcctacagaacgtgattcttgcattgttcgaatgataattacactgaaataattgaacattaaaaagtcggaatttaatccttgtagattaggattaaaacaaaaaaaataggaattttgcaatatgggtatcattttgatgtttattaatatataataaataatagtatggaggaagcacacagaaaataatttttgactgtatgactattttacaatggagtgggataataattttgtatagaatggcatcaggtctaaaataatgataatggagttttgtaatcctttaattctttgatcttctttgtgaatgttaatttgatatttgatatataagtaaatcttttgatcatgcctagcagttgatgggtataggcgatgtgaaaaatggatgcggaatgacattgtagactcaaaagaatccaagacaacatcatggttcaagcggtttataggacgtaagcagaagccagaagtgacctggccatttccttttgcagagggtagaatgtttgtccttactttacgtgctggtgttgatggataccatattaatgttggggggcgccatatgacttcatttccatatcgaacagtaagtttaattgagacatgatagatgatttcatcttatgtttccactgaatatcttgattgagtaaaattgtgtgattagcttattcatgaatcatgataaatgttattcatagcttgataccagtcaatcaccggagcaatcaaggtggtaattaggagataactagaaactaagttacagcctaatcatcagcaacaaacttgtggcctaattaccagctaattggcataatacatagttgactatatattctagcataaatagtaatatttaatattctaacagacttcagaaacatatgaatttcatgattgtgaattcctcttgcatttatgtgggttctataaacagagaattttggtctatggtgtgccctcagccatattataatttatactgatggtgatatccctcttaccatttgtcaaagggccacccttggcttaaacttcaaggataattggaattaattgctgtattctataatgcatgctgctttggttacgaattttgtccagctgatttttcttttccacattatcatcagggctttacacttgaagatgctacaggattggtagtcaaaggggaccttgatgttcattcagtttttgctacttctctccctacttcacatccaagtttctctcctcaaagagtactggaaatgtcggagacctggaaagccagtgctctacctaaacatgctgttaaactttttattggagttctttctgcctcaaatcactttgcagaacgtatggcagttcgtaaaacatggatgcaagca

SEQ ID NO: 589 - DNA, 727 bp, Glycine max
ttctggaaatggtgcagttcaacaaaaacaatttattgaacctgatcaaaagaccaaagtggctcaatttgaagaagataatacagtatttcataattaactggtgggctacatgtttgatgcagaataaaaggagatatcaaaagtttctttgttattttctaacaagaaattatgtataacactataactgacaggaacactggtcttggaacatgaagatacttgcttcgacaggcaattcaagcattaggcaataaaaccctgaatcattggtcatctggggatggagcaacagcaggtgctggggaaggtacacttccttgattagtatttgaaagtccaaatttcttgatgagttcatttgcaattagctcattagcactgtctgtggggtggtactcatcccaaaagacatatttgcttctatctttgcacagacttgatgcaggtacacatgtaagggcgggtcgaatattccaaaaggaacaacagggcgagtctgcgttttggaatcctgcaaagcaaacgtagttacgatataaataactctcagcagtcagcagacaagctagagcaattattaattttctgttaatgcatgatatgtagccaattcttcagaaagtaacatacacaatgtgtgaaatcctaagttcattctttttaagtgtttcacatacacaacgagttatgttccatttaagataattgctaatggtggcat

SEQ ID NO: 590 - DNA, 873 bp, Glycine max
actaaaattgcactatttgagggaaattaatggaaaaacaaaacactttataacatttgcatgatgaagattaatgcattaccactgtgacaattgagttaatgttcacaagtgtcttttagtgcattaccactggtgcggctgcattaaccataggttcagttaatgtctggatgcatttcgaaatacacaaaaaaaaaaagtcacaaatttaacaattaatatttatttgggttcgttaaaaaaattactcaaacacttttttagatcatacttaaccagtggttgttacaatcgtcagctggatgtggtggttgccaaaacaaatgttgcaacctattgtattgtcatcattaaccgtgtaactcacaaacatcaatgggtccttagacatcaaatatgccaaatatttcaaggcaccgctaacatcagatgcatgctcccttctttgcctagcaagttgattatggacatcttttttcaaataaccaaccttgtgatatcccccatcctggtttgcctatgaagcatacattaaaggaggtcgaatgccaacttttccaaaattttcattttgcataatatcgctttttgtcagttttctatgggaaggtattatgggcccaatagaacttattaagccaccttatggatcgtgaatcaaaatccaatttgacttaccatacccaaccaatgccctaacttacctttggccacatgtgaaaccctgaacaccattggaacccaaaacttttacaacccttgggtttaatttttttaaaaattcaatggcttccctaagttttcaagaaatttaaaaccctcttggcctgggccttaaaacccccgcccttttgaccaaaacaaaatttt

SEQ ID NO: 591 - DNA, 457 bp, Glycine max
accaaacctctctccagcccttttatacactagcaattgtttgtgaacttcaactacaaaatcatcatcttcactaagcttatcaatacatttgtagaggccatccaccacttcattatcactgtcaatgtttggattggtgtaaaagaactttggatttagataataacccgctgcatgcaaagggtggtgaagttggcaatcccatcttttatcaatgattgcaaggatatccttatacttcccttcattgttattgaaagctctttgaattgcttctttggccctatccattgcttcataaatgaaacccattgcaggttttttttcattatccaccaaccttcaacacacttaccaagaggccccatagcctttaaagcataaacagcatcattccaaaatgatggcataagaaccacattctgtgcttgcttccccttggggctctttagct

SEQ ID NO: 592 - DNA, 833 bp, Glycine max
aagaaactgtgaagaatactgctgatgctagccctgatgaggaggaagaacccttatcaactagggtaaattcatcagaagctggtctttcctcttcagaaagctcacactctggagatttgctgttggatccacttgttctgctatgctgcgagaattcattgcgcttgttctctgcaaaatctttgatacaggttcttgagttcattatcacttcacaatttgcattcacatcgtaagtctgtgtgcaaatgaatttgacatatatggtatactctttacagggacataagagaccaattaaaaaagtgaaacattctaaatcttgttattggactacaatttttaagaaagatggcaaagtttatgggcttttatcattgcttcagactggaacatttgaaatcaggtgaaagtgctagattttttttttttttcgtttctgaagggttgggggtttattttcaataagacattatggattctagcaaaataaagtctctttttaatactaaattcttggtgttctcccttattttgcatttggctttgaacaggtctttaccagatttggaattggttgcagaaagctctttattgtcaattttaagatggaattataaagtgaatatggataaaaccatgtgttctgatgattatggagagatagtgctggtacaatactctctagaactttcaaattgtcagggattccatttctctggattatgtaaaaacatattttagtatttctggccaaaaaacattcaagtaagttcaaagtataaatttttggtcttcacaagcaccctctatattcataacttacagct

SEQ ID NO: 593 - DNA, 709 bp, Glycine max
cttgcatgcctgcagcctcaacaaggcaaaagtaggttctcaacaatggagaaaagctcaagagtctttgcttagtttggagaagagaaatgctgcttctgtggatactatagttaggtaggttttgtattccttaataagatgaaaacagttgaaagacaatacattttgtcaacctttttttttttttttttttaacttttgctatgtatggccaggggaggaatggaagctaatcatgccctacgtgcccgattctccagtgctgtatcaactacacttgaagatgccggaacagcaaacaaggatattaactcatccattgattgtcagtattgtgttatatctatgcatcatcattgttgtctaggtaggtaataccatgaatgtcatctgacaagttaaaacaaaatgcagattcgttgcaacttgatcatgaagcttgtgggaatctgaactctatgatcattccgtgctgtggtgatttgagagaactgaaggggtggtcattaccacagtattgtagagataaccgaaaatgcagggaaatgtcttctcaacgaatacatggtaagaaagagacttacttaaaggcaccaactatgtacaaaatatttactgggttaccggattctagttttttatgttatttaaataaaataccatgacatacaggtcgaccaaccatcttgttcaacacccaggaaag

SEQ ID NO: 594 - DNA, 826 bp, Glycine max
taggtgtggctaacccaagtgcacaaggacaagcaacaacctgcatcaataaacaagtattgaaggctcaaaataggctcattttctcttttcaattagggaaaataagaaagagaaagagcagcagggcagtgtatcaaaattaattttgccttccaattccctaaataaaaggaatcaattacttggacaaagatagtgcttggccgtgctttttcttttcctttttcattttaaaagttactttaaagtttaaatttaaaataatactttcaaaaataaagctaaaactgtttggtaattgttaaaagaggaaaaaaagagggataattgagtaaaaaccgtgtatcagtgcacaacggatgcatgcttacataggttaattacgttaattagacataaatagaagatattttgtttcccctaaatcaaagattatgttcctatagaccgctattaataatagaatcagaagattatattatgattttcaacagtaattttatatttttttagcttaactcaaacttcaataccaaaaacacttgccaagcactccgaattcatccacaaatgaagatcaacccaaaagttcaacatcccatgcactctgaactaatttgctctctacctaaatctctgacatccctatttggtaactggtaccaaaaatggttgatccactaaaccacacacaattgtttctttatccccttccctcctttcttatcaagagaaagcaaccacccagaataccagatacctaaaacattttgctaaaattggcagtaccaaaacattgtgatatatgtaaacatttggcact

SEQ ID NO: 595 - DNA, 591 bp, Glycine max
ctcgctaccctgggatgctctaccatcgacctgcagtttgtgaatctgacaaggcagccatcaaagaagatgacaatgcttcagagtatcctgcatcccgaaccgtattcaacactaccggtataggctgttgaaccacatggccagccataaaacccgaaaaacccggcatcacactattctgttgttgtggctgctgctgctgctgcactgaagtgagctggtattgcatccaatgggcatgctgtaatgtgttatgttgggaatcaacccctgacatggccatagcaccatcctcattaggaaagggttcggtagacacaccagccttcaccaagaaatcctccagggtcatctcaccaagtgtaggctgtctttccttaccaacactcttgttttgttgcatatctctccaaacctcatcaatagttttcttgctaagatccccactcaatgttaggctcccttgttctggattcaaagatgagccagcagaaaccacctgaccaccaccatgatgcatgtacgcatccgttccagattcaacagtccacacactcttgagaagctcatcaagattcatgcttccta

SEQ ID NO: 596 - DNA, 1511 bp, Glycine max
ttctcctgcccctcaacagcctgctattagtagcactccaccaccaccccgaccaccagctggtgccaaacctggcccacccctaccactactgccagcactagctggtgccagacctggtcctcctccaccacctccagcctcagttggtgccaaacctggtcctcctccaccaccacccccaggaccagctggtgccaaacctggtccacctcctccaccacccccagctggtgccaaacctggttctcgtccaccaccacctcctcctatgagtggtgtggctcctcctcgacctccgcccccgtttggttcaaaggtgcaacgtcccttagctagtggatcaaaagctacagttgaagctggagtagaaggtgaagctgatgctcccaaagccaagctaaagcccttcttctgggataaggttcaagcaaacccagatcaatcaatggtttggaatcaaatcaaatcaggatcattccagtaaggaagaaattccaaatctcttttgtttatcaaaaatatctatcgttagtattatcaaatgatatacatttaacaggtttaacgaagagatgatagagacgctttttggctataatgccgtggataagaacaatggtcaaaaacagaaacagtcttcctcccaagatccttcaccactgtttatccagatcattgacaaaaagaaagcacaaaatttattggattctgttgcgagcattgaatgtgacaatggaagaagtttgtgatgcactttatgaaggtgctttctcgatccttcaattttcctcaaagattgctgataacttcaataataatattaggttcttctaggaaaacgcattatctatgacagatttgtggttgccctaaaaaattgtagacttacagtataatatggactctttcaaactatcgtcatgtctttgctgttgaggggatagattgctgtggtgttgttgataggtttgaatgctgtttaaaattatttttgatcataatgtttaaaaaccggggaagatagattgtggtagtcctgtcctggctatgctgttgagatgattatttctgtaaccagtggattgattgctttgaactttacttgattgatcatgatgaaatttatttatcaggaatgataatatattgaagtttaaaagagaaattgtttagttgtcttgttccacttgtatgaaagacttacaatctggttttgactgattacatcaggacatgagcttcccccggaattccttcaaaccttgctgaagatggcaccgacatcagatgaagaacttaagcttagactttttagtggtgatctatctcaacttggacctgctgaccgtttcctgaaagccatggttgacattccatttgcatttaagcgaatggaatttctgcttttcatgggctcacttaaagaggagcttgcaaccattatggagtcttttgccattttagaggtatgcatcatacatgcagctgcagatcgactaaagaggatc

SEQ ID NO: 597 - DNA, 770 bp, Glycine max
agcggcccctagctgctactgggtctgccctagattatataacttttgaggctgttgtggtgctaatgctgtttttagcgtgtgaataaattgaaatatgaaacatattattctaattttaaaaagaagttggaattttcagtagtttagtgacagggtttttaacagaaagagtacaaaaacacgattctggtagataaatttcgctaccagcccttacagccaaggctctcctctgagataacttcaccgcatacaattagataattgttacataactgcctcattagtcaattaaataatactgcatgagtgcataactcccctattattaattctttccttcttaattgctgcataggtgcataattgccctaccatgtatctgtcctattattaattctggcctgctattttgttttatttctccaagagtaaataagccacggttttggtttattgtctgcacaatccatagcttgactcatatcttgactttgggttgtaacatttagctgtgtggactactgactctattacgaaacatataattcaattatttttggttatgagactaaaaaacatactacaatttgggccctctgtagtctggattttgttgataaacaagacagacacagatacatacagacagacatggattactgaatcattgatcttgctctttctgaaatgaggagatttcatttgggttgctatttgctacatatttttttaatgttccccaaaaatattgttaaattggtggg

SEQ ID NO: 598 - DNA, 945 bp, Glycine max
ttataaaaataaataaataaataaaatattgagacaaacttcatctcacttggagcttggttttaccttctaaacatgtttattaaggaaaaacatcacagatagatatatcaaataaaagaaatcaggggttgcttcaagatgccaaaaaggatgtatttgaaaagtgcaagaggattttcttgaaatttttaaattcaagctagtattgcgtgtaactttgacaaaatgttgataaattaaggattatcataataaactcaaaactatgttcacatgctgatgatagtaacatcaaaagctgtcccatctaattctttaaggaattattgtgttgaagtccttcccttgaagcaggaatttcctttaggttgtctataatttgcagtgaactatctatgattcagtatacaaaatttaaatattcgagatgtatccctatttcgagaaaaatcataatcacaaaaaacatgcagcatccataagatattaataatgacaaatcagcagtgaatacatgaatcatcttggaatcattttattttccctgccaatcagaatccaccaggaaataaacaaaaaacctgccccaaaaatacatagcattgattccatctggtttcgggctactgaatttccaatgaaaagccaaggacttcccctctcattaactccaaaaactttttgggaacaaaatgggggggggtccccttgaaaggcttcccttccccaatttcataattcttatcaggccctccaatacccttggcattctggccttgggtcaaaccagggaccaatattctgtgtttaacggcccaaaggatcattatccaatttcccctggccattcacgccctcaaaatcagcatgagcaacacccatcttcgacattctcactgcattctccacctattgtcacaaaatagtgatgcctattttaga

SEQ ID NO: 599 - DNA, 838 bp, Glycine max
ttaataagtacgaaccatcgcgtaaaggcttgattggtggggttatcctgtttgattttatctcttctagctcggtaatcagagagttcaatcctgaatctttccccagacaaagctcatttggcggttttcctgcatgttataaccataaacattaagaaagaaaaatcgaaacatgttgccagctcattccaaatatacttcttgcttccttgcaattttactgattttaaggtttatagtaaattttatgacataagccttcatatgataagaattattaaataagcacttaattaagttgtttatccaaacacatactcatatatacacagagaacataatttcttttctgcttccagatcattattattcaatattttatttttgtaattaatttctgagataaatggaagtctttaattcataaaagttaacaccggacatagcttaaaaggaaaaaaaacaaactacatgagcaaaatatgtatacaacggacaagatattctaactatcataatgagatcaagggccaaggggttacaattaaaatgcaagggataataatgaatttaaattcaaatgacatgcacagaactaaatagtagtacggactatacggattgaaaaataaatttttgaattagtcaaggactaacctttagcaaaagatggattgaccttgtgaaaagccattttgtcccatgttcctaagttggtctcctttccaacaattattggccaagtccccttcgtttcaatttaaactttccccttggagaaaggattgaactttccctttcagggttggggccctaactttcctacctaaaaggg

SEQ ID NO: 600 - DNA, 750 bp, Glycine max
aaattaataagtacgaaccatcgcgtaaaggcttgattggtggggttatcctgtttgattttatctcttctagctcggtaatcagagagttcaatcctgaatcttgccccggacaaagctcacttggcggttttcctgcatggtataaccataaacatctgagaaagaaaaatcaaaacctgttggcagctcattccagatatactacttgctttctagtgctaggagtcagtttatggatttttgttgtgatttattctcaattatttccagattcctagcttccttttgtctcttgcaattttactgattttaaggtttatggtcaattttatgacataggctttcatatgataagaatttattaaataaacacttaattaagttgtttatccaaacacatactacatatatacacagagaacagagtttctttctgcttccggatcattattattcaatattttatttttgcaattaatttctgacataaatggaagtctttttaattcataaaagttaaactggacataagcttaaaaggcaaaaataaactaaatgagaaaaatatgtaaacaatggacaagatattctaactatcataatgagatcaagggccaaggggttacaactaaaatgcaagggataataataaatttaaattcaaatgacatgcacagaactaaaatagtactacggactatacggattgaaaaagaaacttttgattaggcaacgactaacctttac

SEQ ID NO: 601 - DNA, 687 bp, Glycine max
tgtctaaaactccaattgcaggtaattcattagatttccatcaaacttgataaagtgaagaaaaaaataccttaatttaaagcaaaaacaaatttgtaaataaaattcacctttgcacgataagtagtatgatttggttcgattgatccaatccaagaggggtcaatgtttttcgaattgacatgttatttccaggggtggaaagctcataggccatcataaacaaattcaattgaagagttaatacactggtatcataagaaacccatcctatttatgttgtacctcaagtcctcaacctttatcttaatttcccttcgttactgcacagatgcatgatagtaagaatatgctagtcattgtaacactttgatattgaaggagcaacatgtactgcatcaagtgtattcatgattcatgaatatgaagtatccagtattacaatatgtgaaaccatttacatacagaaacatttccacttccatgaaggatgtaaggccttctgttatgatccatatccatgaattggaagaatgggaagagtacacagtcttgattatttaagacattaacaaacttaaacagcattaattattcaagaattggatcatgaagcatgaatttagaacatcaattattagaagaaaaaaaatggtgcataccttttgaaaacataataattctgac

SEQ ID NO: 602 - DNA, 835 bp, Glycine max
atctcctttttcacttttatgggatcatctacccatgatccatctatgagtaatcctctgattgcatcctttgtgcgtctagcattcatcaacaagtggaagtagcgtgtgttacaatccccttccttaatccaccttatccttgccttttgtctcatcaaggattcgtgagattgtgccaccgaccatagctcctagtttcttacgagtcatcatttcatgagaggacagctgcctactgctgcttgcatcttccaatctgcttaaatctgcttcgattctttgtactctcttcaatgaatctccaaactgctccttgttccacaccttcattgcctccttcagctttttaatttttaccttgagtgcaaagcctccccagcctgttggttgtgtgtttgaccaacactgtttaaccttctgttcaaaagatttttctttcagccagcaatcaaacaccctaaatggttttggcccccaatcagtgatttttagcccttagcaaaattgggcaatgatctgagaaatttctgtccaaggtgaagctggtgctgtctgggccattatggtagccaattattgaactctaatatggaaatcttacacttggtttgtacaggattgtaagaaaaaaaggatttctttggttatgggaaatttctttattattggagccctacctttggttgtccaaaagaattgcaaaaaaatgctagggcaatacgccggatacaaaatccattatcctatgttgtttgagagggaaaataacacatttatttgtggggtccaaaaacacttctctggcccctccctaaattaaagaatgggccgt

SEQ ID NO: 603 - DNA, 759 bp, Glycine max
  misc_feature (703)..(703): n is a, c, g, or t
acaaaggtccagaaattcgcacaaacatattgtggaccctgaagaaaaaattaaattactagtcaattaacagggaatcatcatctcataacattaaaaataataataaaattgcataacactaattattaagttaattcctctagataaatgttatgtgtccaaacccatactattaaaaacatctcttacacacagatttaaccacacagctatagcctcttcctcgagataatacactctctttctggtcagcatcgttatcatccatcagatgcctcttaaacccctgtaattccctcttccaacatgactaagaaatcagttatatatcccaatctctgacagcaatagtagtaccggcagcaacaatgactgcaaagctgtcattgctcccttggaggggaccaaagactcctaatgctcaagcgtcacccctgctgctcagacaaccatcaaaccccacacaaacaccaaacaaaaaaagaaaacagcaagttacagcactaccgctgctgccaccaacaaaacctaataaaagagcaatttgtggctctaattgtaccacgacctccagcagcgttgcagatcaacaatcacgctttaagaagtgcagcattactgatcaacacggtacaagaaatggagcatgccaccctgtcgaagacacttttctctcaaccatatggtggaaggaaatggngcactccccttctgtttgtgtcacttttctcttaaccattatattggaaggaaagt

SEQ ID NO: 604 - DNA, 733 bp, Glycine max
tttgtagaaattgagtcttgagccatcagctcagctttgcatttagcaaaatttatgagtaagcatcaggcaagaatttaattagcatatgccctgaataatttgatcgcaaaactttaaagagtcttccaagaagaacactgatcaaagcagagtacgggttcaagaaatccctccttctatcatcttctctctcaatttagaggcttcattaagatcacctattctacagtaaccagtgattagtatattataggtaacaacattgggaactaagcctttttgaggaagtttatggaaaagtctctgtgctctatccatatttcctactttgcacaacccatttattaacgcattataagtagtaatatttgggataagacctctttccaccatctcatcccttaagttgaaagcaccacccacatcaccagcagctgaacaggcatgaattagggcaccatatgtgaaattatctggaagaaaccctctagacaacaaaattgacagaacacttcttgcttcatcaatcttcccagacttacaaagaccatagatagctatgttgtacacaatattgttgggaagagaattgcatatatcactcttatcaagagagtctgcaattctctgagcttctagacttatgaaatcatttttgacagacttatctgaacatttatgaactgtaagaagatcaaaatccaccatcttgtctaggatcacagtagct

SEQ ID NO: 605 - DNA, 822 bp, Glycine max
aaaaccaaacacaaagtgtaccatatcaaattctattcacacaatgaaggaaagaaatgaatttagaaaaacaaaaagagtgatagaatgataatgaatgtgctaagacagttgcactcacatcaaataaaacagtgtttttgttagcataacgatcattcctatcgaggctgtcaaacctcagtggaaactgtacaaaggcaatgccattcccaagttgtatgtccatgaagaaacacatggcctctcgcacgactttgctgttatttacataatgattgcaatccaagtttagcacaaaaggagcattgcttaacactgctgatacacgaagctggaaacacagcagcaacatttaggccaaaaaagaaagcttgttttagcttcctgtcatgagaatgagaaaatgtaatctgagaaattatggtgcttgaaatgcttaccatggcattgattgcgccagctttgttgtggtgttggaatgcaggccttttctcacgagatgtgtagacaagacaaggaagttcattacctacattgtgaggaagaaggacttggatcatactaggatggtctttggagttgtttcctggccatggggtctcatctttcatagtccacccttttgggggaactcttatggatttagccacaaagtgcattttattcttcaccttaaaattccctcatattcttttctggcaagcaaagtgcccaacaagcaatggaaactaagtttaaaataaaaaattttaattggtaaaaataaaaaatttatgccctgctatttaactttttttttaaattaaggacctgttattt

SEQ ID NO: 606 - DNA, 834 bp, Glycine max
gtaatccaaatggagctagttttcatttgcatataacttccaagagcaagacttggcacaaagtaaccaatattagaaaataacttgggctatcataataattgagtcatacaaagttcatgatactattgtttctttattcatgactactcataattcttaagaatagaacggtattgacagattgattctgcattttataagagttggaatataaattattgctaaatgtctagaacttgcaatgcaggtttgaaccagagaacaagcccaatatgctttctccaatagatatcattgtcactactgtggatccaatcaaggaacctcctctagttacagccaacactgttctttcaatcttggccctggattaccctgctgacaaaatctcatgctatgtttctgatgatggagcttccatgctcacctttgaagctcttcaagaaactgctgagttttccagaaagtgggtacctttctgcaaaaaattttctgtagaacctagagcaccagaaaagtacttctctgagaagatagattttctaaaagataagcttcaatccacttatgtgaaagaacgccggactatgaaggttagcattaatcctcctaaagttaatgccttcttttaaagcagactaatttgaaattctggtctccatacttgacacccattactttttaatttgggcccttcttgaaaaaaataattatattttagtctttacaagaaaatatgataatgaaattatctctccccttaaaaagaatgatgactagtctaatgcttgtcatactcatacatggtctttgtttaatcacatgctaaag

SEQ ID NO: 607 - DNA, 1534 bp, Glycine max
  misc_feature (668)..(668): n is a, c, g, or t
  misc_feature (844)..(844): n is a, c, g, or t
agtgctttcacagaggacatgcaatataataagtaaagaaaaaatcaataaatattttgccattctaggagcaattattatgcacctctattatttttccttcttggcccagaacttgggccctattaacagtcggcaagattgtggcttctactgttccactttcttttatgagttatgttttctttgtcgttgatgtgattctgaattccacttcacatcatagtgccacatttgttttgtttctactaaaataatataactcttatttaatggtacgtgttcctttcaccaaacttgagcataaagaattaaagatgccaccaattgcctctcgtgtttcctgagccacaagttcatgtaaacaaacgaattgaggagcaaagtgaagacctaaaaatgtctcattccatgtataatgtgtcctatactgtaattttgttaaggggaatctgaacctttattgtgcaacacgtgacgtatgattatatcatatatgcttcaactgttgtaggtggcaatccctgtggtgagtggcgactagccagagaaaagtataatattactttttgaggatgccaaatgataatgatcaataatattattaatagggaacacagggttctttggaggcatgaaatttctcggggatttaaaaaaactataantattagtataagaaatttttggagcgaataacccaaaaggccataagcataaaatcagctagatattacgttcttcaaggccaaattccttggtaattatgcgattcgtaattaggactcccatcaaaggaccgaaaattcttatgtgaaaatgataacatgatagtaggaagcgnaggattcagtagaggactaaagtttctcatggattttttttgaaaaaaaaggtgtactacttgttttcatataagacatgagcgaataatgaaaaggtcatacatcatatataatatcagctacatattactttcttcaaggtaaattccttcgtatatgcgattcgtaactaagctcacatcacatctaagaccgaaaaattcttttgtacgatgggttcaacaggcaacagcaaacatatctctgatttacttttctgaaattacgtaaatattacaacttcgggttaattagtgttctttatgactttatcgaacccaaaaaactgtaaaatttataaaaacacaagccctttctctgtaattgtaaacaagcaaacatgcattagcaacccaattccctgtaaacataaagttttgaccttctagtcacaggatcaggaaatcaggataacagttcggtagcctaatttctttgcaaggcaaaatcatgtatatatttttactttttacaatctgctactgtcccatttctggtagaaatgaaggaatcgatttaaatgtgtaaacctctactctacttcctttcctattgacactttctaagaacttttccaataagatgaacatgtgatagatgagagaactcgggcggaatgtagagactgctaccctgcaggcatgcaagat

SEQ ID NO: 608 - DNA, 717 bp, Glycine max
aagtttcaatttttgttcagaagatgcttatcatcaggtttttgaacaggtatcaccagaaggcaccaacaaattggatagcacttaccacggcattcttattctttgtgattcttttattagtgggttatattttatatggtgctggaaatcacattgtcaaagtagaggatgattttcatcaaatggaggaattaaaagtccgagcagaagcagctgatgttgccaagtcacaggtgcttttcctggcatactgttagcacggttcattagttcctttgattactcaccgatcactaaaactggtttttcttttaatgtcagtttctagctactgtctctcatgaaatcagaacacccatgaatggcattctaggtaacttcaagattctctctctctctctctctctcctctaaaaagtaacacattcttgcataccttctactttctcattagtgatgctatcattaaaatccattttgctgtaggaatgcttggtctgcttctaaagacagaattgagttcaactcaacgagattatgcccagactgctcaagcatgtgggaaggctctgatagccttaataaatgaggtacttgaccgggctaaaattgaaactggcaagttagaacttgaagcagttcatttgacaattcgtccatacttgagatggcccttctcttttttctgaaaatccaggaacaaagtttataggt

SEQ ID NO: 609 - DNA, 1489 bp, Glycine max
gaatcaatctggctcaaggtgttcaggaacttcactctaaagggatcttcattctgaaccttaaaccttttaatgttcttctcaatggtaatgatcaagcaattttgggagatgttggtattcctagccttttgcttggctcatcattcataagctcagacatggctaagaggtttggaactcccaattacatggctccagagcaatgggaaccagaggtcagaggtcctatatcttttgaaacagattcttggggattcggttgcaccattgtcgaaatgttgaccggtaatcaaccttggtatggatgtcctgttggcagaatataccagtctgttgttgaaaagcatgaaaaacccaatattccaagtggccttccttcttcagttgagaatgtcctcagtggatgctttgagtatgatttgaggaatcgccctttaatggtagatattctgagtgtctttcaaaggtgtgtatatatttttataatatttttcttgaaattttctgactgtaagcttttgcataatttcataaagttgtaattctcttgggtctggcacattttatttagtttcattcctttagtgaggtttatctatgagaagatccgctataaggagcatatgcttttatgaggggatctaatcttgacctataagtgagtggtcaaggctagctcctcttacactcccactagatacaactgattctatcatcttgagtaagtgggccaggctcacagattcttttcatcatgaaagttattttccataattttccttacactgtatttcagactttgaatatttgttgctcatcatcaaatgatggtcctgaacatcatcatcatgtttgttgctcataaactttgaatgtgaagttgtttgggaactccgtacatgataacacaaccattttttctggtatttcaaactcatgtagtaacacagcttgaggttcagcttatatgaaagtattaagttgaactgtttccttgtgatataatgtgttcagacttcagagctagttattaaatttaataaatttttcaaaagcttctgatttgtctttttgctggactctccagtaatgtgattctacatttttgttggcacacatggcattgcagtgtgaatgatatgaccatctggcatgtatttgatatgttattctgtctatatttgttcccaaaatatagtaccaagagaaaggccaacagtgtgaaagctataatatgttttggtctagagcttatgttcaaattattattatatttgtggctacaggtgtggctcttagttttttcttttgtctacacagacaaattaacatgtttgctccacatttgagttgacattatagtcattaaaagtacactaataggcattttgatggagaatttctatgattagtctaagtttatgggtagatttccatgaactttatgaacatcttctgcagggcgaatctagagaatcgcgggtca

SEQ ID NO: 610 - DNA, 579 bp, Glycine max
cttgcatgcctgcagattctggtgacgatgaatccacattgattgctccaatcctttcggcatagagaccgagatttttactgtaagattgagctacaagaacctccatgccacgtgccacaaacagtctcacagaagctgcatcttcatcaaggcttccactagcaaacccctaaaattaatgaggagttcatcatgttgctaaataggttccaggtctctataaagattaatagtgtgtgtttggattagatttaatttttatagaatcaactccaattccacgttgaaactcatagcaaaaaatagttgcttccactttttcaatttttcaccatgattttatgggtcaatcaattctggtagctatccaaacacactttaagtcataattcttaatatgctaatggtttttaatataggctagccagaaaattctcatttacccaaagattggtacctggtaagcaacatcaaaaaagggaatgtggtttttttcttgaattacatcagctattttttcccactgttcaggtgttggatcgataccagtagggttatgagcacatccatgaagta

SEQ ID NO: 611 - DNA, 583 bp, Glycine max
tgacaataaccctgttgctaattctgccatgcataatcaattttcgggaccaagcaacttgcagatgcagatgaatcatatgaattcagttaacgagtatggtaggtcatcctcagcgccaagacatattcataggactccggtagctgttcaggccctcccagttcaatctcaggcattgggaccacaggaaaattcaataactaatttgaatagttccttgctacctagcaattcctctgctgctcctcatatttctttgtccaaccctgcctctgtagatactttgaatgccatactaagtgatacggaaagacaacaacatttttctcgaactccagtgaatccgcctcaggtctcaggtgtaaattcacctgcatttcagcatcacactgcaacccaggtttggtttgttagtagtatattattactctgtaccgtagtgacaacctgctgttctatgttatgttgttccttaactttcagtgttgatatcttgtggtaccttaacataaaagagatgtgctgaacttacattgtgtaaaaaattggttccaaaataacaataatcatcccattaggt

SEQ ID NO: 612 - DNA, 845 bp, Glycine max
tgcatgcctgcagcttgctgccaaactttgctacatttggtatgattcagacagaagagaatcatgttagcttctgtactatgtagaattgtatggttattagtgggttttgtcaagagttaacagtgaactgcaaaatggagtgtttagagggatgcattgtatataatatttacgtaacaagtgtggcttcccagttttcagccatcatgatatcagcttaagtgacataggcgcaaaacaatactgatttcatgctaatgatcagattttcctcgtgcagtggacaatgctaaaaagactgatcccaaagctcaggccttgaagactgctatggctgtgattgtgaaatcaggatgccaagtgtttaagaaaaaaactaaatggaccaggacattactgtgacatcgattacatttggcaggccaaagacattgctgtaaatttgaaactgtttgggatattgctgtaaattttggactgatattgaacgtttgattctgaaactgttttggacagatattgctgtaaatttcggcctttgaggaaaaatgttttgttgctgcaactgttttttgattctgaaatattgttgatattgctgtaaattcttaaactgtgttgtggcttgtttacgttgtgtattgatcaggtttgagaaaaaaacataatgaatcaaagaaatttgtcaatacatgccaaaaacatttgcgaatgcagtaagtctgggtaaatcatggtttcataaccaccacgttagtaactgtgtaaatggcagggactagaacacactaaatttgttttgtacaaggattaaaaacttacaaggggtcaaaaattctaaa

SEQ ID NO: 613 - DNA, 744 bp, Glycine max
atatgaagagaaaaaaaagtaaaatgttaaatatctatggaacataatgatccaatagattatcttaacatactcttgcgtagaagtccggaggtgagaatttatcaaagtgtgtatgtttgaaatcatgaaaccatccttcccccatatatatagtcacctaaataagggtaagaaaagtatgagctttgttaggacctagattctagactacagacacttggaaaggaacataattcaaatctccatgcagtaaagtttttaccttcaaggttgtcttcacaggcaaatgagctttaggatcaaagacctcattatttggaccaacctttaatagaaaatctggttttttaacataaccgcatccgccattggctttgaacattccctgcatcaaccaaagagatctaccatacccctgtcatggaatggaaccatggaaactgattagtcgaacatctttcatgatctcagtatcattagtcaataatagactgcattatgttacatgcgtgtgtagctaaagtcattgacaataacatttcatccttaaaaattttgagttcggcaagtttctctcacccctcaagaaatcaaatacaaaaatgaaatagaacaataggggtggaagaagtagaaacctgcatgttaaatgcaaccatctgagctccatgcatccacccaatcaatgggttataatttgtcgaagtaatgcgagtaccttttggatacactctcagtata

SEQ ID NO: 614 - DNA, 798 bp, Glycine max
aaaaacatgaataagtgataacaattatatgaatatggttggcaatgtatgcaaattaaaagtgagattgaattgaatagtgaatagtaatatatacacacatggccaccaaactcagtagtaatccagtgtggtcttggctgtacgttgtagaaaaagtcgcaccaagaggctcttgcttcgtatgaccactcatattctgggaatatgctctccttattgcttccacctacgggcattatcatctccgtacaagcctgcaccatgcacaaaactacatctcctcattaataacaaattaataaactacattttataatttatatactatatggtcctatattattggagtctccaacataggttacgtctctattaaaccaaaataagaaaagctctgttgtctttgactatagaaagtggtagaaattaaaaaaaaataaaaaaaatcagcagatggacaagtttgatgcctgaatcagtgaatgtgacagtactgaagcaattaaaaagagtccaaaaactagaaaatataatgaccggggttgtcgacaagaatgcaatatcaatgttgccttaattttgaaatgaaacacgcctaaaacatatgatagaaaaacgatacgaagtcattttctatgtagtattcaggctactataatagtaagactactgaaaattgttgttaatatatagataatgcaactatacaagttgattcaagagattttgtcaaacaagggatgttgcaaataattataatattgaagttgttgaaaaatgtaaacgtttaaaagc

SEQ ID NO: 615 - DNA, 778 bp, Glycine max
tgcatgcctgcagttagaataacaaaatgtgttagtaaactcaaactgtattattttcattcatcttcgtcatactaattttttttttatatcttacatttacatcgtcagcgatggtcatgatccgattgaatatcttattgcaaacatataatgaagatacgcatgtttctccaccttcagttcctgacaaatgaaataaaaattaagagtgtcaatgaacataagtaatatgtgacaagcgcaataaattggtaaatttttgtcccagcggaaagggaaaagaattcaggaagttgtttataccgcaagcttctatggcctgcttgcatggtgggatcaacttgttgatactgtcatattcagcctttttaattagtcccctgtctaatgcgtagtctgtatacgcctggtactgaatttcaggattggttaacccattaccaatagcaaatccctgtttattatatgggatcaaatgaatcattacaatgaagaaaaaaagcaattaattaacctttcatagttatactataaattatgagatagtacgaagacctttagatttatatgaattccttcttttgctttgtttccttggtgaaccctggatgcaagagctggaatgtagtgtccagcatatgactctccagtaatataaaagtcattcttagtgaactgagggtgctccttgaaaaatgcctgtcattattgtaaaattaaaatggatcttatgatgcacaaacggcggagtctaacatataactttgaaaattta

SEQ ID NO: 616 - DNA, 523 bp, Glycine max
aagcaagcgataacgcagtgctgaaataaatgattccaccagctttgaatgttgtccagtgtattcaagacacaattttaagtcttcaattgccggagagcttccaatattggtggagagaaaggaaaataaattatcagaagatgtcacatgaacaaacgagccacaatctagcaaagaattaatttgttatgacaactcaaatggcactagtgcttaatgttggagtttgagagttattcaagaccaaggttaaagcatgcaactgtgacaagaaagaggtgataattcaaattgaagcttcattgttcagacaaacagaaacaacatttccagaagaacatgataaagcctagaataattgtcaatctctctgctatggctggaagctatatccctgaacatgtttcagtcaagggtgttgatctagcccttcaatttgctaagacataaaatagggtaattaattttctaacagaaaacttggaagaaaaacagagaattaaaaacaaagtacctctca

SEQ ID NO: 617 - DNA, 574 bp, Glycine max
aatgtctctaaccaaatcaaacaacaaaacatccaaggtgcaaaaaataacaaagttctatgaagaatgaaagcctttcctgaccttggctaagaagcagaaccatatcactgtcaataaccgaagttattcgatgcgcaatggtaataactgtagagtcagaaaaatgttgcctaagagtttgctgaatcaaattatccgtagctgtgtcgactgatgcagtggcttcatcaaggaccaaaatcttgctttttttaagcagcaccctaccaaggcacaccaactgcctctgacccatactccaattctcaccattctcactaactacaacatcaacttccacattagcaataaattcaaaattagatttactatatatttatattttcaataaggttcaaggacaaacctgtggagtcaagctttccgtctttctttctaacttcatctccaagttgacacttatccagtgcctatttaaaagaatgaaaatgagtgaacacaatacaaatttgaagaacagttgaaagtataagctttttggacagaacctagtgtctacaaataaaatctg

SEQ ID NO: 618 - DNA, 824 bp, Glycine max
cttgcatgcctgcagtataaagatatgagttagtattttgccctgagaatgttgtttccagtgtttagttctgagaatgtccggtttggaatatgcaatgtggaacaattaagtacacactttggtggctgatgcttagaaagtattctagtttgcctgagtcctagtattgctttaagtgattttggatcacatgtatctaaatataaaatgtattacattgtgatttatcttttgcggttgagatgaagtgcttaatactggattgtaatctgcattttgcggttgagatagaattgccttccggaagttatattctgaaaagaggaatgtaaataaattccagaaggtgagaggatattttaggtaaacaaatttgaaaggaaagtgtataagtagaaagagggagtggaaatagcaatttccaaaaaaaaatctaaacaaataattgtaattttattaagccacatagaaatggggttgtttaatctcatatttagttggggttagttaagcaaaccctaaaataaattcttaaatgtcaacagttaatttttttaataactgttataattttaaattaactttatcctccagacaagtaaacataacacgcaataatgaactcaacaaaaaaaaaaaaacacgccataatgattaaaaaaaaaaaaacataacacgccattcattataaaaaaaaaaaaaagctcaatccaattaatgctacccattctcactcggcttacagattaacgttgaaaattagttattagtcgttatgacaaatttcattttccgggtaacgtaattaggttggactattt

SEQ ID NO: 619 - DNA, 528 bp, Glycine max
accctcctgctttctctccaggtactcatttcattcaactctctctctttctctcatcatttggatccttaatctttgttaaattattggtttttagctatgaatatgattcttttcctttctggattctcacaactaaactactgaagcaggggaggaacagcatcacatgaataagaaagtggtaatagccatcgtcgtagccaccactgcacttgctgcactcattttcactttcttatgcttctggatttatcatcataccaagtatccaacaaaatccaaatccaaaaatgttcaaagtccaggtatgtatttatttatttatttatttatattttccaatgttccatttatcatattcctgtttttttttttttgtttttgtttttctttttcaagaagcagctggcttcgatatcaaattcattctagattcttgaatttgattattatttttttccttgtttcgctttttttgaatgcgaagatgcagagaaggggatcaccttagcaccgtttttgaat

SEQ ID NO: 620 - DNA, 848 bp, Glycine max
tgcatgcctgcagcaaatcatttactacgggtagatggttctggaggggatgacgcggacaaagttgcaattagtgatatctttgaggttgtgccagttctttactggtccaaaatatgcctctattcctgaagaagtatatctaacacccttctctgctttgtgcataggttacctccaatcagagtaaaagtggtccactggtgttgttcattaaagatatagagaaggcaatggttgggaactatgaagttttgaaaaataaatttgaaagcttgccaccaaatgttgtggtaattggctctcatactctgcttgacaatcggaaggagaaggtactgtcccattattagattgtggtgatcttatgcttggaggaatgtttttgctgctgtatttactgactgcatgattatgtttccagacccaacctggtggccttctgtttaccaagtttgggagcaatcagacagcactacttgatcttgcttttccggtataagaaccactgtcattgctcttcttaccttggtttaaagcttgtgcatttctagcatggaagttacagttcttgtctttttctgtaccttcacactattcatagctttttctaaattattggtaatattgctatatgtacattgtagcttggttgcttctggtttcttgagttaaaatattaatcccctactatttgttctcttttttaggataacttttggtagaccggcatggatcgagccaaaagaaaccccctaaaggtaatgaagcaacctgggtcggcttttttcccaaaccaaatggccaattacaactggccttaaggtttgaaggttaaaatttaactt

SEQ ID NO: 621 - DNA, 955 bp, Glycine max
aaggtttgggatgattttaggtggtgccctcctggctttaagcattttaagtctgaaatcatacaaaaaaggacgcacctctcctctcgctttgaagggccaagctggtaagatcatatgctttttatataacagaagatactacatctaaaggaattgcaaaaataaatgtttttggatttgctttctatctgtgattttttttttttttttgggtgagatccttggtatttaaagttacatacattaaatcccaaccaattcaagttaacctgcgctgggcggacccatctaagggggcaaaactctcccaatgcctacttttttccatccacaaaacttaaatacaagattatttgttttgattagtttttgttcacaatatttaaatactaaataaattgtagccaaatatattataattaaaaaagaaacaaagcattctttacactttttcaaatgatgacattatgtttccaatccatctttaatatttaacacaacatcaagtcatcaaactttaccaccgaccacatggattaaccgatacaggtttgttccaacttttttttttttgacacggcgggtttttaaactttaaataaattagcttttggagcgaccaaggcactaccatggtcagcttattggtggaaaattacctccatgcggaggctagaaaagacttaatttgtgtttaaccttcattaaccttggagacccctcattgccccaatattgaaacagctcaggtaaatctggtcctctcaccagcgccagaacaaaatgatattttggcgtggaccctcttccttaccctgcaaaaaacacgaagtacaccctatctcctacctatgttagaccacattccagacaactcctgggatggagcctcacttatgggcttaaataatcctcatctaatctcttggcaagcgcttcaattctatgcgca

SEQ ID NO: 622 - DNA, 813 bp, Glycine max
aatgccaaagtcatagggaatgcttatagtttataaaaaataattaaaaaaaaaattattgctgccgctgaagagttaaaccaatgggttgcaacagaaatgctcttttggtgctgaacaataattgaaaatcaatgtttcgaaattcatccattccaattaacgacagttaagcttcctggtatctaagaagggttaacttctcaattaatctcttttgtctgcgtttgttcatcttaagtttgatccgttgtgagttcagcagcatttgttgttcagtgtaacagaacctctttattagttataaacttcatcgttgaagattggtggtttggcctcattcaaaacttctaagtagccgaaaacacttgtattaatagatattttgcagaaaatggatgttcattaggcctttatcttttttcattttaatttacttttaaataatattgaaatctcatgcaaatcatgagcatttatagtaaggcaaatgactcagtttttaaacaaataaatgggaagtattgatcttggacaaaagaaaatgatcatgggaagttacaattaagtattgagcagatatgttgatatttttgttatatttaggataagttaaggtgggctaggtgcaattacgaaaattaaatttcagatgaagtttaatttgggtgatactctggcttttacactgatttaatattttgttgatctgtatctactagtcaatatttgattaaagaatgggataccagcttttgatgatatagaaaattcatgaaataatatgcaataaacaatgcaagccagcctttg

SEQ ID NO: 623 - DNA, 865 bp, Glycine max
cagcttgcatgcctgcagtttgattcctatcagatccatgcaaacaactggatcatttgactgaacatttgcctcaaatccaagctaaaatttgatatcagaaaatgctagaagagacattatagaaaattagattgaatttaaccacttaagaaaattacttaaatgctgtataaactttctccttctgctcactgcaagaaaagatcacaaaactaccttatggattaacaatattaaagcatgtcatgtagataaacagaatcgtcaagccactaagtaacatatcactacatatgacagtaaaattaagcccaactcaataaacagccaaacctttaaatctgtctgcaatgcagaagaaactttccatgccttctgtacttcattgaagagcagaacacactgatcatttgcaactttaagtgcttgcttaagtctcagatcgtcttgtttcagatattggatttctttttccttctcatataactccttacgtgcatcatttgcctataaaaaccatcacaacttaaatctgaaagatatgtagtaaatttgtaatctttaagtcagttgaaattaccacctttttttaaggagacagaaaactgagtaaaattgaacttccaatgaacacagagagattatatatgaaaaaatttaacaaagtcagagcaatttctcagttagaccacaaaagaatcaatcttacatatacaagtaactttgtataaaactagaaaacactgtttgaaatttgaattgagtaaaaggagcggctcaatgccaaaatcaacattatatccatataatatttatcatacataatatgcatgagcaatattttaactgtttcccataaaat

SEQ ID NO: 624 - DNA, 756 bp, Glycine max
aagaaactaccctctctttatttccattcacttcatatatgctctgagtggtatctagaaaatgaattgcatgatttaaagtaggagggttgtaacatgatgcaaatgagaaaattaattgttttttttttttgttttgataagattaatttccatttattgcatatggtggaatgtctacttctcaaatgctctttctccaatctaaaaagaaactgaactttcattttcttctgtctgtcaggaactcatcattagaaacaatggaatggagcaggcaagtctggttacattaacacttttgtgaatcatccctgccattgtgaagacttgtctctatgactaacaaagcatgtggtccgcaataattgcaggtcgttggtgaggcagggtcaggagatatagttggagaaataggagttctatgttacaggccacagatgtttacaattcgaaccaaacgattgagccaaattctgcgcttgaaccgtactacatttataaatcttgttcattcaaatattggagatggggcaatagttatgaacaattttctccaggttatatgagcaatgatgacttgtgtattttccagaatgattcttattgctagctagttacattttaaattcattcacacaagaatttgcacacaacacacatccttttcaatttggaagtttctggaataacatttttttttcattacctaataactttggtgaacatggtgctaataccttttgaatttcgcaa

SEQ ID NO: 625 - DNA, 1532 bp, Glycine max
cttgcatgcctgcagtctcaccacatatttcacatgacctgtggttaataaagtagccaatatcaatcatttatttgatagtggattatagagtaaattacactaacatctcctaaagtttcatgaaattacacaaatgtctggtacctttatttatttcctacactaacctccccttagttattttaaaatatacgctaacacccccttatacattacatttaacccccttagctttttaaaaatatacactaacacccctttaattatttaaaaaacattacattgggctcccataaagggaggttagtgtaaatgtaaaaagaataggagaagtttgtgtaatttactctagattataaaacactaggcatcacatgacattgagaagggaccatttttcaaaaatggcactaaaaaataaaactataacattgttttatggagacttatcacaataataatatctttctaaactcaagaataagctttcatgtgataagctcttattgttgataaagctgaagacccagacaaaccctctatgtaacatacaagaattaggattgacatggaccagttatactagattgtaatacaatggttctcacttgacaatgagatgggactcctttagaaaaaaggatactcagaattattcaatgaaaatttagttcacatttctgttcaaggaagaagggattgatgaatgtgtccccgtgatatctaataaaaatgatcaattttgccatatataaaattcattttgtggaaataaaagtaaaaacttcattttctagtccatgccccatatgtcatctgaacagagaaaaatcagatccaaaagatcttcaccaagacagttacaagagcactttctcaaatatcaaggatagccgacaccaatatcacaatcaaatgcaataatttgctagtttacaaactaggacttgacagaatcatatggatgtcaattaagctcaactcacaaacactaggagcaaattgctaatcatgtttatgtctaacccataatcttacatcctaaacgaggaaaatccactggcagtcggacgcatttgtccaactcactccttaactataggaattccaaataggctgatggctactgatatgcactgtacagctatgtctgagtgcagtaatgatgctagctgttctccaactagagatgtaccgatccaaggcaaatagcagtgtgctacactaactagttccctaatggcaatgacaagcaaagtcaatgcaacgagcttgacctcaaattaattatcaaggaaaaatcaagcataagcccaggcatgaatctaaaaaggattttaaaagctaaaaatgatattggaaaattctgttctggtctaagagcacaatcaacacatttataaggatgccactgacctcaaaagattttaaaagacaagtcatggaaaggcaaaatgataaaacccatccaatattattgttgaaatgataaaatgttccatatgatcaaggtaactgcaggcatgcaa

SEQ ID NO: 626 - DNA, 834 bp, Glycine max
aatagtattatctatgtataatccactaaccgtggaatataactagtttatacaagctctaaagttcaaatctcactccctttattacacaaaaaactatatatatgtatatgtatacagtacatcacacagtagtcatcaaacgccaattgatgaacaacaatcaaatcaataattcgccaaaataattttgactatccctttgcgtactagctccacataaccatacccgtggacatcaacaacataaccatccaatgaaaccttcctgtgaagattgaggctgagctatctggagaaaataccaaaacagacacgcttcagaattcacatttctagaaacttgtctgtttttatcttttactttttaaatattaatatcacttaaatatatttttacctctaataaatactaattttttaattcattttctattatatttttattttacattgtgtctctaataaaataataattttatttttaacctttaatattttattttagtccctaataaatttgtaaattttgaatttattttttaataaattaacaatttttttctaatcccaattaattacaaatgaaaaaaatttattagtaacagacataaaattcattaatttatcgaaaactaaaaataaggatcaatattattttaatatataaactcaatggaaaataaattttttttttttgggagataaacataaaaattaaatatttaattaaacattacaaattattatttaaggtctattaaattattatttaaaaccatatattaaccttttgctttaatgggtctcaatttggggggaaccccaaagaaa

SEQ ID NO: 627 - DNA, 1408 bp, Glycine max
ttgcatgcctgcagtctttggttggccaaagcccggatttggttgtttttctgtctctagttgagagatgttggcaggatctttgtgaccaaatgttgatgatccgtggtatagccttgtttctggataggacatatgtgaagcaaacagcaaatgtccggtcattatgggacatgggcttacaacttttccgcaaacatctttcattgtctccggaagtagaacacaaaactgttacaggtcttctacgaatgattgaaagtgaaaggtaagtccattttttgcaattcaattttgtacctttatatgcatgcagcttgtagttttaaagctccacactttcatccatgtatacatgggtgccgtgggatggggggtttgttggctcttctctttgcttttattttatttttattttttttatgtttgtgcttccattccttttcaaaattcatttttgtatttaatgaaatgcatacacactgaatagtgaatatacttgccaatagtgaatatcattctccaaactacaattactaatttgttttctattcaagctcaggactaaacacattctcttcctttatattttttcagatttttgcagttaatttaatgaggaagaatattaatcaggcatgttttgcttgtggaactagctattcaaatctgcatataattcctgggacagggagtgggctgtttaaattttaggttagcaaaatgtccctagggtgactattctttatgctttttattcccaaaagcaagggataatcacttgcacatgaaaagggtaggattggagaggtctagaggggttagaatgcaattctttatgctatttatttcctctcttaaatctattgcaacttttgcatgtggaatatgcaaacatttgggttttagttaacatctttgatgttttacatccattgcataaaatataaggcttcattttctgattccaattatagtttctctctcagtataggaaagttagctggcagatccatctgtgttgtgccttagatttttcacttatattgttttgcttttcagaaaaggtgaagcagtggatagaactcttctaaaccatcttttgaagatgtttactgctctgggaatttatgcagaaagctttgagaagccattccttgaatgcacatctgaattttatgctgctgaaggcgtgaaatacatgcagcaatcagatgttccagattacttgaagcatgtggaggtgttttcttttccttaacccattgtattttatcatattggcttcagttattttggtgattctttaataaatggattgtgtcattcaatttcagttttatctgacactctgactgtaaaagttatctttctttgtctatctttcccttgtccacattgtatactc

SEQ ID NO: 628 - DNA, 1426 bp, Glycine max
agctttccatgattgttgagccttgctttgacctgtgtcagagggtcaacagcaaaagaccctcctactgtaaaagtgttctcatttgttgagaactttctagtgatctctgcaactgcggcactcttcttcaatagatccagatgatggaggtatgatgctttaatgctgtcacccttgtcaccactgattgggaagtacatgttcagaatcaattggttagctttcaaaatgattgtgattactagataatttggaacacatctcttatgggtaaaagaagcttacaggattactgaagcagaagaatcgggtctcgtgacactaattccagcagtgtattttgtaaaaccaccagatgaagtgtcatagcctgcctcagcacccaaagcaatggttggggtaccaactgtggcagaaacatcaatgacaggggattgcttcagtgcaacagctgttgttaaggtagcatggtcatggaagtattgaacctctaactgtcaaaaacaaatcagataaattttcagaaacaatgtccagcagttagtttagttgaatttcccaaccagaagatgcatgtttatgtaccttgccagaattataatcaggcagcttaaatgaagcaatagtcttggtggatggaagaacgtcattgaatgtgagggttgtggagatctgggggaaaaaaaggactatgtaaataagatgatttactcaagaaaatatactattataacctcaaaagacaaagtaacccacagttgatgcggtgtccagtttaacatcaataatagtgttcttatacttgtacagtgctgccacatccccagtggagagtcctcctttcttgacagatgttgaagtgagggcctgaaaggagaaaaagcaagtcatattgaaatgaacattatgcatcttttgctcctagcaagtgaccatgtgcgctgtcgcacatacacagcattacaaaagcaaccatgacaaccaaaaattatattagcaagtcaagaattaaaaatgaacataaacataaaaatgtaaatagatacccttcccatatataaatatatataagctttcacttagatgtaaggcatcagcttcaacatgaacccactacaatatgacattaagaataaattcatattcatgctcagtatgttattgttgattatgaaaagtttgtgttcagaatactaaaaaaggtataacaataaaataaatgaattatttaacttaaacactaattgcattcagatacaacccaacttggcattgaatctatgtcctctatcagcctatccagatatcaccataccttcacccaagtggtcaatcttacattatctcagtcttaattatatacttttagtcacttagatatacagaaataaaattccaaccatcatactatttctatcaacct

SEQ ID NO: 629 - DNA, 824 bp, Glycine max
aaaacttccgagcactttgcacaggtgagcttgtttcttctgcttctatgcattgttattttcatataatcgaataacttctttcaatccttgtataagggtttcttcttcagctattttacagaaataagtgaataaatagattctttcaatgtaagaactgatgagtaacatttggcctgtaattagactgctgtacgtatgagaacaaattgattacagatgtattaggacatagttgagttcttagagacaaggtggattatgttttattcacttgtttcttttcacttatgtttgagttgtatacttgtattgacatttcctcctccctttcttaataacattagatgatgatatcactattcactgcttgaatttataaggtgcctatgttcatcttacaaattgaaatatattatatttacttgatacttaattttacatttttactcttgtttggtccaaattattaggggaaaagggaactggtaaaagtggcaagcctctccattacaaaggtagctcattccatagaattattcctagctttatgcttcaaggaggtgattttacacaaggaaatggaatgggtggagaatcaatttacggagagaagtttgctgatgagaacttcaagttaaagcatactggaccaggtgatattcttttttttccccttcctttttattgttatagtgttggcaaaacatttaattcaaatgaatctatgatgggaataaaatctttttattattttatttatgaacaggacttctatcattggcaaatgctggtcctaataccaatggttcacaattttt

SEQ ID NO: 630 - DNA, 773 bp, Glycine max
aatgaaaaatgaactgtaagaggttgagaaggaaaggtaaaaagagaattattgctggtgaatgttacacagaagcaacaattaccatgctctaagcccgaaaagcctacaaaagcataggatcgaagttgctgtataatatcttgcccacttctcagtggcactgtacagtatttccacatgtcctccacagaaggaatgaataatcagaacctaccactttgtagaatgcaatcctttgtttcacataagcacagcaaccacttagcaccagcaaatgcatatacgtcaaatagcacaaacaatctgccttcctctgtatggtttgaaaatcttaagatccatttacggccatctctggggaggattttggtgaaaccaatgtatgttcctcaccacccaactgtccattatctgaagtgccgtacaacccatcagaaaaatttctataggcggcagtctctttctctacatggttcacttcagccgttgcattgctattctcacagaaatttctagaaacatttgactcctctttattgtcttctctacaaggaccagtatgaacattgactgaaggtttcttaccaggcagcacagtctggctcaatgttgaacacaaggaagcaaaaacactatcttttgattttgagttttttgacaacttctttgcaagctcagggttctcagaaggcaattttcttttctgcctgagagactccattatcccttcatcctcttcagaagcttctggccctctttgggggtggcct

SEQ ID NO: 631 - DNA, 796 bp, Glycine max
taaatgtttgggaattgctgagcactagatcatactatgcttgtttttgtaaccaccaccagtttaatggcttaaaaatgtttcattgtttttatcttccattttgattttctgacaattttcggaggattaagcttttagacttctaggtgggagttgatgaatcattataatgtgaatgctattttgcttttgtctgtttttgtccagatggtgtcaatgttttatatgaatacacctacctttgttctctgttaacacctctgtatttggggacttctttcttacctggttgtaggttttcatgtgttgtgggtgagggctttcatagtcatagaaatgagagaatctgcttggggcaaaaacattgttagtgaagactagaacaagcagtgaacaattcttagtggtttaaaaaaaatgaaatggttggggatgcatattcttagtcttttgatgaattagtccacatgtgcagaagagagggcagtgttagctttccgtttatcttttgttcaagtcacttcctattcttaatgtttgagaaaaattattttaaattattttattttctctttgctatctatgagctaatgaattttttgcagcatggcagaaatttattccataagtgaactacatctatgtcatttgtttcccgctgttgcagcaaattttagtacaatagattagactatcttctgttactggatatgaaattatgaattatttttattattatcatcattctttagcatcttttaatataactactgggtatttggtaggtagtact

SEQ ID NO: 632 - DNA, 865 bp, Glycine max
  misc_feature (756)..(756): n is a, c, g, or t
  misc_feature (835)..(835): n is a, c, g, or t
  misc_feature (843)..(843): n is a, c, g, or t
gccttagaatccacagtggaactaatccgaataaagcttgcatggtatagctccgagcttcttggcattgctgcccccgttttccgttcaccgtctaatgaggatgctcctccatgcacacaggcttcttcagaccattgatcgtgctgcggttgtggacactatcaaacaagactttgaaagatcctattttgtcacaggttttccaacacccatctgcttaatttctctgggtctattccaatttctttcctttcattcataagagagataaattaaatttgatgcatcatgaatgataggttttatcaatagaattatagatttgtttttataggtcaggggtgataagaacaaattttaacacaactctgtttcacatttgaattctcaacacgtttgattggcaaatctttaacctcatgaaatcttaagcctgtgtgataagcacaaattttactgagattataagtgattgtcgcttatgttggcatgcaaattaagaatatttttttagcaagtgaaggtctatttggttgcagggctggcctaaagaaaattttgagggataattttttactttacccgtgtttggtatgcgagacagtgagaaattatgaaaaaaagggtggatggaaaggtaaaataaattttaaaaatggtgagaacctattatactattgtcacatatttttggtcatctttctatctctctaacttattttctgtttcttttcaatcaaatacatttaattntcacttttttcttacctatttttacttttttttttatttccattcactggtattctcttctctctaacatctctatcanacataccntaatgagaaagtttgcatttga

SEQ ID NO: 633 - DNA, 946 bp, Glycine max
ggatcctttatagtcgacctgcagcaggatacaaactaacgtgacaacagtcgaccaaactagtcttggaattcaaagatgaaaataataaaccaagccaacaaacattttaaaatgtacagtaactctagaagacatttcctaaatgttgacccccacgcattaatttttatacttcatatatgcatccctcgtgtcttgcttgtatatggttttgacaaggctagctttgcccatagctatgtgcaggtacgaaactaaaaaacgcttgaaaatcataaaccacattttgattaaacttgtggtgcagcggggggagagggagtggtactagcagcaggctcaattctacgcagcatgaaccctactcccctgcttgaaccatcttcatcatcatggtatgcataagcaaacccaccatgcctcgtcaaatccatccccgcagtctcatcatccctcgaaattctcaacagtttcatcttatgaagcccatagaacaacggcgccatggtcgccgtaacccacccgcacaccaccaatatctgaatcacctgcgccgccagcagcctccctccgccacccatcaaagccccgaacggccttccaccacggtaaatctcctccacgtactctttcttcgcaaacaatcccgtgaagaaaaccccccacgctccgcacccgccgtgaagctgcgccgcctccaacggatcatcgtactctaccttcgcggcaagcttattaagcccaatcaaaacccacgccgccacaaacccacacacaatcgcggcccacggttccacaacggcacagcccgatgtaatggcagcgaacccgccaagcaggccgttacacacgtcaatcacgttccagtggcccagccaataaccgcttgctgaacaacgtcgtcagaaccgcagtgcctcccagcccatgtcgtcgtgacagc

SEQ ID NO: 634 - DNA, 593 bp, Glycine max
tttgcatgcctgcagccagtagggaaattgctctgatttataagttttgaattgttttctctttcacctttttcctctcctatttactattgcttgatttttaaattcattaaacaaaattgactagttgaaagatgacaattttatggcacaattagtttttttcttttcgaacctgtgagtagggatttatgcgatcaacagaagttctattaaggttcaaggggaagtttatctcataataagtgcaagtcacttttaatttttgtaggtccttccaaaagataaaggggaagttagcagatgaagtcatctttttttttttttaaaggttatttgttttagtaagctttgatatattggggtgacaaattttgtgattggggtgaagataggatgtatctgtcgaatgagaaattctgatttcgttcttgtgttgtactatctggcaggacgacaagagaaaaatggttgcatctgcttttggggaagaccatgctggcgcgtctggaactcgccttacagtagatgatctgaagtatcttttcatggtgtagactctagaccactccttgcttggtcttcccatgatg

SEQ ID NO: 635 - DNA, 766 bp, Glycine max
agtcgacctgcagttgttgaggtggtaaatgaatctgtggaatcttctacacgctcatctaatggaagactgttcacctggggtgatggagataaaagccaacttggacatgctgatagggaacctagactagttcctgagtgtgtaaatgcattgagtactgaaaacatttgccgagtggcttgtggccacagtcttacaattgctttgacaacgtcaggacttgtatatacaatgggaagtacagcatatggacaacttggctgtcctgcatctgatgggaaagtccctacatgtgttggagataaaatttctgatagttttgtagaagatattgcctgtggttcatatcatgttgcagtcctgacttccaaggcagaggtttacacatggggaaagggtttgaatgggcaattaggtcatggagacagtgatcacaggaataaacctgcacttgttgagttcttaaaagataaacaagtgaaaagtgttttttgtggttcaaactttactgctgttgtatgtcttcataaatggataccaagtgttgatcattctacttgtgttggatgtcgcaatttatttaatttcagaagaaaacgtcataattgttacaactgtggacttgtattttgcaaatcatgcaccagcaagaaatctataaaagcttccctttgctccaggtgcaacaagccgtatagagtctgtgatgactgttatcttaaacttaagaagctgccgtggatcagacccctgggcaactcta

SEQ ID NO: 636 - DNA, 797 bp, Glycine max
ttcttgcatgcctgcagaagtaactgttcccacaatatctaatattctagttctagatgaaaatatttttttcccatagcaagcaaagtatggatttgtcatttttcagagacgaagaactctcaacaaacatgtttatagtaacttcattgcaaaactcaacaaatagatttttggaaccttaatataataaaattcaacagtcttctttaattttattctgctcttaccttctcataggatcatatagaatttaaccctacaagctctcaaaaaacaatccattattatgctccttatccaataaaacaaaaccatagagtgattctcaaaatgaagattgacaaaggcaaaaagttacaatcaataatcttaaattatctacttacttattcctcggggagcaaatactttgaatgctgaatcaatagcttctttataattatcttcatcttgtgcaaccatcccagccttaagaagctcctacattgttcaaatccaaagctaatcatataactagaacagcagtaggataaaaaggctaaatgattaaacaacaaaccttgaactcctttttttcttctctggtcaatggaagcctaccgccatggcttttggcccactcatcagccatcttgacaagaatgacaacatacggtatgtgtttatgagccacaggatcttgcacgttcaagtcaatatcatctgcaaatctgtggatgcatacacatgcaatgaaaaaattaaagtgaaccggagaaagacatgtctatggtgtatgatctcaagcttatagc

SEQ ID NO: 637 - DNA, 778 bp, Glycine max
gcatagtaggcacaggtgcaaaaatgtaagcaacaacactcaactgggattaggccaagttatatgcataaagttaaaaaaatcaatcactcaatatgatggaagaacttatctagaacaaccacaggaaaaatacctttttctagatgacactctttgcctactagataagataactattatgataagactatatcaatctaacctaaccccagtatttagaagagacctaataaatgagagatcttaatttttcttaactacatattgaacattgcttacaactaaatctccaataaattcatgtaaacacatacatgtatacatacataaacaattttctcatgaccatatgtgcatggagtgatggatatacaaagacactgtacaggtctctacacatttatcacatgtatgatctgcctctctccacacatcctgtcatgtgaaacactagaaagagaggattcaaatccataggggatgtgttaagtgagagcactggaatatcctaaggtgagtgagcagagaaaatcccaaacactggattttgcatgactaatcaagattgaaagacagagacaaacacactatagtttgggtgccactagtgtaagaagtaaaaactgaaatgtgctcttcaaattagcaaagtaaatccgcattcacctacgaagtcccacatatgattgacatatttgtgagttacaatactggccttaattgatgagaatactttttccaaatttcttgcaaaggcccttagcataaacatcct

SEQ ID NO: 638 - DNA, 837 bp, Glycine max
cctatgacttgcatgcctgcagtacaatgaaagttttaactatgcaaagactatatggagttcctcttactgacctagactccataagttcattagtttctaatccagaaaccagccttataactgctctcaatgtgtggtatgactccgaaattatattttgcagttaacatcctttacttctccttttaacaagaactgtgtatctcggtataaaatgttgcaggtttggaagtttgcttgcatgtgaatcttttcatgcagatgtacatgcaggaaatctgtggcttctacgtgatggccgtattgggtttcttgacttcggtatgcttgattatctttgtgcatatttatagatatggttttaactttttgttgtgcatttgtcatatgttaatgttctaatgtttcaaaaaagtctatacattttatttgaaatttaggtttttttacatgtttctttcagtcagtttatttttttgctaagcttatttcagggtatcatcttgcaaactctaatcactgttgttttgctttattcttttacgagctcagacaccatttcttttctaaaaactaaatgttttacagtattcagttatatgtatgagattttgtgaatctaaattctattaaaaaaattcgatctacaggaattgttggtcgtatatcccctaaaacatgggctgctatgggaagtcttctttagatcaattgccattgaagattatgactcaatggcatcttccttaactgaaatgggtgctacaaaccaagatgttgatgctaaggcctttgcaagagatttggaaaaagtattctcatcaataaggcaag

SEQ ID NO: 639 - DNA, 729 bp, Glycine max
ataattgaagtggtagtagtaacttcaagttaactgtagcataatagaattaaagtaggtaattttatttttgcttttgtgcctcccttaatcctcacctattgcagaatccaaagcaacttgaaatctctgttcccaacctaagaatgtttgactttgacctgcatccgagggatgttaaaaaatattggagcagtgtgaggtgaaattatacattgagtaaaaatgaaaaagttaaatatcatataagtaaagagaaaatctataaatctgagccttaagattttagattaaaatgtgatgttaaattattttatgtgattatccacgactcattagtgtaaatctccccgtccttccactcaattccccaacaaaaaaaaatataacatcccgaatatgtccccaaaatatacatttaagtatgtttggatattttttttcataaattaaaattaactttttcaaaaattaatttttaatttatacataaattaattttaatttatagtgaagtttattgttttctctcctataaatacttataagaagttaacatactcttactacattgtatgagtcccacttgattagaataaaacgatttatatgttctgctcaaattataagccttttgcactcttagctaatttaataaaatagttctttaggaattgaaccctttctctttataccaagtttataaccaaatgggatattttgcccttt

SEQ ID NO: 640 - DNA, 900 bp, Glycine max
aatattctcacaagagtacaccatagatgctttactccacttattggatattgcaatgaaggcaccagaacagcactcatctatgaatacatgaccaacggagacctagctgagaagctatcaggttttaaatatgtttatatgtagtgcaaaagttttatttcatgcgctttttgtagggattggtgcatatttaaattaagtaattttagcctttaaataaattgagttattttaaacttaatttttttttctattagaaatttttgagagatttttttttgaaaaaaataaagtaatatttcttctgattaataaactctaaacaagcatgcactaattaatattgtgtccaaaatattagtaattcattttatatactactttttgtccattataattgtcttcggttgaccaagaatatatattttaaccgtagatatgaatatccatgttataataactataacttaagcacgagaggaaatcctaacctaaaagtatagtgaaaaaagtcttttagcttaagtatcatattaagctttttattctatttaatatgagaatcatgacattgtatgtcacctcctttattaatagctaactttcgtgtgacaacttcatgctatatatcaacttgaaccttacggtagcctagctttttccctaaatgacttcggttacatatcaatattttttatatttcactttaatctagcctatatatagcctatttattgtgtcaagaaaaagatagcctttttataattcaactttttaatggaaaatatcaatttgttaataacttggagttttaagaaaaggaatcaaacccaaaagactaatttatttaaattagcttaaaaggcaaaaaggcttataatttggagcagaacatat

SEQ ID NO: 641 - DNA, 849 bp, Glycine max
gtgtgacattaagttgcagatgcgtgtccatctccagcggatgtgtattcaaacacacctgtagagtgtactagtaagtgtttgggtaggtgtgtgcgttaaacaaaaaacaaattaattttcgtagtgataactaataggtaagctccaaaggaccgctttaatgctttcgcataaaacccgtgcattgaattggctaacggccaaaccaaacacgcttgtaatacaatcattcaaaaagcattcaaatgcctaagctgcatggtatgacattatgttgcagatggcgtccatctccagtggacgtgcattcaaacacacgtgtagagtgtagtagcaagtgtttgggtaggtgtgtgcattaaacaaaaaaaatcaatttaatggtgatagctaagctccaaaggaccgctttaatgtttttgcgtgaaatccacacactgaattggctaacggccaaatgaaacacgcgcataatatagtgattcaaaaagcattcaaatgcctaagctgcgccatatgacattaagttgcggatgtgatcattacagtgcagcggcattaatataaagttgcaggctaaaagaaacaaaacctggaataatatttgcaggcaaaattactagccttgtacaagaatttcaaccttgtatgactgaatgggatgttgccactagcaaaaacatgaatccaaaaggcaagcagtgttatattacaaaatatgtacacccgaaacaaacacacgcaattataattcaaccagtcaattattttccccttcaaggcttggaagggcatcaacaggggatagccagccacatccctcatagggaagggccctgatctacc

SEQ ID NO: 642 - DNA, 796 bp, Glycine max
accggtggcaattcagaggagtgaatactgggagataaaggcttaatatgattaatacatgacgggttaaatattaggaggttgtactattttttttgtcaaatgtatgttagaaaatagaggactgcacgcttctttttcatgtaatgtcttgagttagagctatagtttccaagaaattcatctgaaatgtttaccacatgcctttggacatatttgatttctatttttactgttgattgcaagtctaggaatagaaaattaaaataacctcatctattccaaagattttgatacaaccattataacaacagccaatagaatcaaccacaaaattagtcaaactgaagaaccacagaaacatattcatactacatgtccatatatgaaatggaaaggttctaaaaccacttacttgatttaacataaatccatataagccaagcatgacagaggaggaagtcccttacgataaggcaaaactaaactttgaacataattagtggaatccaaccaaagtgcttggttgggaattttagcacactccatgctgttatctctctggtgataggagaacacccaactacttgattctgagggctcaaatggcgcccggaactgagcaacgaacagattgaactctctgaacgaaattatcagtttcattaactccaccaactacttgatgttcgatgaggcacaggagacacagttgttctatgattgttgcttcatggatgcttcgaacggaataccacttaatcaacctcacaatgacatgccacatgttgatgta

SEQ ID NO: 643 - DNA, 856 bp, Glycine max
actagcacatctgaaaaaaaaaactcaatttctttaactatttatcccttttaattattgtgtcttatctatatcttttttttagggggtcttatctctatctttaaattaattttaagatttttttaatatcaataacctcatatcataatttaaattattctaaaatataatttatatatttaaatatttatttattataaattttaattatataaagataaacatttatcctgtaaaaataacctaaatttctagttacaataatattttaaaaataatttaaaatagatagttaacgattatgatgcatggcgtgaataacttcttacatcatgttatatttttattacatgtaaatatttcgtgtatttcatcaatatttatattcaagttcaattttaaaaaaatacatattaagacaagttaagagattaaatttttttaaaataagtaaatagcgtacaattatttccgtaaaatttaaagcatatattaaatgataaattaataaatggtaacagttttttacttatggagtgtaaatctaacatcctccccattatgagaaatgctttttatataagtattttttaagaagtaaaaaaatataattttctaaacaatcatactaacaaataaaaaatttatgtgttttactaaaataaaaatttatttcaatcaataaatttaaataagtgaccctatttttgaaatgaccccgtttacttacttaaatggttaagttacctcgggtcccatcaccaatcgggttaagaacacggatttttcttttgaataccttttggctgaaggggccccttttcttggggccggccggggttttgcccattta

SEQ ID NO: 644 - DNA, 862 bp, Glycine max
ttgcatgcctgcagctacgctttttagcttctaaatatatgcataaatcacatcaaaaggttgctaccagatgtcaagtcattagaccgccaattttgaacgaagtataacatcatgccaacttttgggcacagaacatgggatttgggcaattttagatgcataatttagcatgcagggacaacgtatttatttgggacaaagacaacaaatttcatgactatagatccatacacgaagccaatggcaaaacaacgtggatggggtgacaatactatcactagttttcgttctgttcttttcccacgtatacattaacacaataaaatcaatccaggcttctccaaactctcattaacatgaacgataaaaataatgacattaaataagaaaatatcgcaggtatcaacgttcacaactaggaatcatagaatggtatattggcaaataaaacaaaatttccaacattaagctatatcgctcaaacttatgctttacttaaattaaaaaaaaaaaacctaatgttcaacaaaccaaaagctcctgcatgtttttatgatctccatagcagtatctttcccccatctcatgaatccaaagaacagttatgaccttccccgaaacttcatttaggtgaccaaaaacaacattcccaagagcaaaaatgatgcatttgagaagagcatatttttgagacagatgaaattccagcatgaaactcgtgcataaatgggttgagggaaaatgagcttgttctctttaaagcttttttagaggatggaaacaaaaccaacttgaaatatacaattttcccgactgataacagcaacccaaaagttatgacacggtgggttgtattcct

SEQ ID NO: 645 - DNA, 847 bp, Glycine max
atggccaaatggtggctgtgctcaactaggtagccagtatgttggtctgaaggcaaattttgatgcatttgacaaactatcaattaatgatagttatttcaagtctgagtgaacagggaatttacttcctaaaagactccgatagtgaacagttgcataatcaattttggtttctttaagcaatgaggatagttgttaattctttgtaacactccttgtaatgacaagatggggagaagtagtggaccctgttatttttattgggtctcgggaattgtacaggctataagagttggctggagatcatcttggtgcagacatctatatgggaatgcattgggttgatacgcatcatggtggtccacattgatgatatatgcatgtttaaagtttttacagtcgctgattacatacatcgtaattgctcttgaataagatcaattttgtacagacgatcaagcttttctatttttaatgcatcttgagggatcaatgtatatagcaagaataatgttaccctatattaatgaagaagatcgtcgaccttgactagtattgttgagtcaatcctcctgtttagtatttgttgaagctgctgaattttaaggtgaccttagtttttttttatttctttatgtggcaattaattgcagaagatggtgacttcggattatgtttaaacgaataagaaagcattgaaaaggcggcaagttcaataattttattggttcagttgcacaggttgaagtggcgaaatgaatcaaatgattattacagtagcaaagtgaaacccgattcttattcagtaatgatactttatgtaatatgtcaatatatatatgtctac

SEQ ID NO: 646 - DNA, 558 bp, Glycine max
aaaaaaaaaggagcagtaactccattggtcaatttttatatcaaaatagttagccaaacaaatgcaaaaagataggaaaacttccaaaatatgagaccatagttcgagtttggaagaagtgttgaacaagaatagaatgggtatcaaaacacagggatagtctgacgttgccttcataaattatacaaatgtttttcctgctatggataaaagccagaaaaattaatcataacttacctcagagcggacatcaataagtgcagcatttgcgtcctcagccaaaagctcgaaagctgatttaggggacaaatttcctgagtaacctccatatgtccacaaccaataaaaggccctgcatatctatgcaatctattacagagagcgtttgtgatggaaattttattcttcaatagacaaataacaaaattttacttttgaggaaggagaaattcacataccataatgtggctgaagagcctacaagaacaacaaatggaatgattgggtcatttggatccaagccaagactcttctccaatgaatagacagccatgtata

SEQ ID NO: 647 - DNA, 693 bp, Glycine max
aaacatctttttttaaaggcatataaccggttgtaagaaggaaataatgaaatatcaacaaggagacaactttgcaaatgcaaatggacaaaaaaaactcacaggcctgatgaggctatttttgtaaaacggaatccaaggcaacgttatctccctgtgtagctttctacttagttatgcatggaaagctataaagttgtggggcacataattttttttggaaatttgcctgataaattagcttaaccaaacacacatatttttcatctttccacttttgtccttgcctttctctttcaaattcaaaactaatatataagcatctaaatttttatgttcaatcttacaaaaatgcttaatggcatgaatatcaattttaaatcacagttcttgtcactctccgaacaaaataacaaagctttgcttacagaaatacttaatggcatgaatatgaattacgtgggaagaattataacttctgttcgcattaaagaaaaatgttcacacccttaaatatctacagacttagaaagaaccaaaacctataagattataatggctaaaaaaaagtaagctcttaaactaaataaaatatggactaagtgtgtgtaactatttgttgctcctcacaaaataatgcattggaacgcgacggatttgaacagtaaaacaaacacacccttaagagtaggg

SEQ ID NO: 648 - DNA, 847 bp, Glycine max
  misc_feature (770)..(770): n is a, c, g, or t
  misc_feature (782)..(782): n is a, c, g, or t
  misc_feature (784)..(784): n is a, c, g, or t
cttgcatgcctgcagtagtgatgtagcaaaagtaaccagtaaagcaattcagatgaaagctatatagcgatttcataaatatcaaaagcttcatatatatggaaagcatgacttttattgtccagtaaacaaattatgttataaactccacctcatgaagttttccaaattctgatgaatgccctagactatatgattcctctaagacaacagcaccaacatattgttatcatcataaaataacttcagacatcaaattttaaaaaaagcaaaatccacatcagcaattacattaaaacaaagtgtaaatcacaagcaatcatataacattcttcaatttcaaacggatattttgaagaaccaactctcccaaaagcataagttgttatgtatcagtaacaacgaaaacaaccaagtcttttccctctagatgagggcagctacaaggatcaaacaatgcgataatgttctatcataaatcgtatctatagacaaactttgacctctaaatccttcttgatgatttcgcctacatctcctttctttgtctcctctacccctagcgattgggtttgataggtatcaagtaaagatagaaataaggaatgaaagtactgtattatttacatattcaggtctggaattaaggaccagatcctaggatatagtactgtttacattataaataaacaaggaagacaacaacaagagaaactcttcttaggcactttgagaggcataaactctccccagggatcctaaaccacctncttccacctttntncactcataccgctattctgttatcacactttttccattcatcccccttatctctgcactacac

SEQ ID NO: 649 - DNA, 727 bp, Glycine max
ataacagtaataaaaaatgtttattataccaagcagaaaatatagctgatcatctagaccataaaagaaaacaatacaagtttcaaaattacaatttatgatgcccttgtacaatcttggaccaggctcctctaaagtgagaggaaatcttaatcattgaatagatgaatggttcagattattacatcatcattactatttttattaaaaattcaaaaactgaaagagaaaaaaaattattctccctgtcaactgtcaagtatgaggaacctcattgtcgaccctcttaggttagaatcatttatttgatgcaatgtgggatgctgtaaagttcatgtacaaagaatccattgacatttgcctgtttttggaagtacattgccctcagccacattcacaaggttgtctagaccaaaagagataaatctccaataaagatcccatcgacaatccagtcataaatatcaaaagacgaatttgtgagtcaatttttcaggaaactggggacatagatcattaactttttttagtttataagattttcaattaaaaataaatagcgagattaattgatcaacgttgctaatggctaagattttcaatacgagctattagtgagattttcaaaatgagccattcatatatttaatggctaagattgctcaatttacattgtaaagggagaaaactcactgtaaaggagctggatcctacaatcatatggggc

SEQ ID NO: 650 - DNA, 714 bp, Glycine max
aaggtgatgtaattgcttatcgattgattgagttaacagcatcttggactccggaactttcctcctttagggtgcatatcaactatcaagtctgcttttggattacattattaaaaaaaattgcatcagaagttcaatacgaattacatctatgtccttgcaggttgggaaaatatctcggtatgatgctaaatcaaataggatttggctggaaccagttttagaatacccatttgattttaagaaaaaaatagatgaggatgcatcttctgtacagtatgatccatccccttatcaggaggatggttctttagaggtaaagtatgtccactatggtaaacaatatataagtggtgcctggtttatgttaatccaacaagttgataaattgcagttatatatgacaactaatctccagacatcttgtgctggtgcatttatgtatttattattatcttaatctagatcatgacgaattgttaaagccttaactttaattgaatgtccaaaaaacttttctttctaataaaaatagcatgctgctgcttatttgcatgaaaatgacattgttttccttctacagatagagtatacattgctggccgatgttcgaatggttaaagcatggcattcctgatttgaaaagtgatgctttggttaatccaacaaaagctactaatgatattacccaatgaaaaaacttggcggcaaaag

SEQ ID NO: 651 - DNA, 645 bp, Glycine max
tttcttagtcctttaggagtttgtttccacaaaagataaatgctttttacttccaaacttgattgattatttcttaacaatgttcttaaaaagaaaatcttttaatgatcttgggaatcaaatatgaaactatttttattgacttgagaaagcaagggttattagtagttattaaagatacagtgagtaataagagctgaaatcctcaagatacagataacaattttgtgaaatggacacagaagcattagtcctaactgataaacaaaaattatatcacttcatagtttctaacaagagaagaaaattgtaatatgaagaaaccttattagccacatcctctaaattgtgacccagctttctaagagcctcagcataaggacctgagagctgtaaattcccaattgcatttagcaatgccctacccttcacaattaggaaaaaaatagtaattaatattagtaatcatttggaataaaaatgatctctgtcgcaataaagaaaactcaatatgaacctgtagatactccatagacatataataagcttgcttacgatcatcctttcatagtaagcatttgggggcattccactttatgatgagggaatcccgaaccctctctcgcgctgcaaaaacaccctatt

SEQ ID NO: 652 - DNA, 833 bp, Glycine max
tttgcatgcctgcagccaaacctatggtagccagctgaaacagaaaaaagttgtgtgcttaatgaagtgatgaagcagtctccaataaaagagcttgtgtggctatgcaatatcctcacctggctcttgtcaccccattcaccaaaaaaggtgatagaaaatgcctgtagaatagagatgataaaggggattaaacttaacccagttcagtgttcagctacattctgtatagagatacaatggttaataatttattacctgtaaaaagataggagaaaaaaactgagataaaaatgaccgtttatgcttttttgtggcatcatcatcctgggaaataaaacgcataatatatacagtattagaacaacaaaaataaagcatccttgaattctgttttagtataatatcataatcaactagagactggaaataagttacttaattctcatccagctgttaaattgggagtcatccaattgtaaattttactattgcagctttgcctacaagatattaagtccttatccaattactaaatatttataaagcaatttatttgcaatctagttatcaagaatctctctcttggtttctgttgtagtagttgtaagaattttccaaggatctcataaccacttgacaatcataagaagtaaacaaaatatgttctattgaaaaacatatagaaggtgtttggggaagctaatgtaggtttgtaaaatggcttgtaacctcctataagctttgtttagtttaatttaagtaagtttcaagaaaaagctctctttagcttatttcagtaagcttacaatcaactttatgataactatcgt

SEQ ID NO: 653 - DNA, 761 bp, Glycine max
atgtgagtattctactcagctaagtgagattagagtgtggaagttagtagtccgcagctaactgttagaagcttgttctaggagtctcataaacttgctctgcaagtcttagatacttgctttgcaagtctcctatgtctataaaatttagtgtaactgaaactgcctgggaaagaaattagatctcacagttccacaaattttgttttctctctctttctatttctctttcattctattttggtatctagagcttgatggtcctacaatggccaaatctcctcctccttcttctgctactccttccttctcttcatcttctgctttcccacactcaatctttgaggagctcactgatttgaacttcttgctgtggaggcaacaagtagaaccagcgatcaaaacacatcaactacaccgatatctggtgtgtccgaatattcctcttcaatatgcaagtgaagctgatcaggattcaggcactgtcaatcctacatacattgtgtgggagatactagatcaaatgctcctcacatagcttcaatcaactctttctagctcgattctgttgcaccttctaggatcagttcactcctttcaagtatgcgagaaaattcacaatcacttttagaagctaactcgagcaaaagctcgtcaacttcacacaaagttgcggtctactacactttataacaagaccgtcttggaatttctgttgcgcatcaaagctttgggtgatgtgctaacttctggccggccga

SEQ ID NO: 654 - DNA, 738 bp, Glycine max
cttgcatgcctgcagaatggcttaataaatggcagggtagaagatggcaggctagacaggatcctagtatctcacaattaatgggaactgcaaacacaatatgctaagaggacttcttgtcgatgtttgttggatagaagatcccaacaggatcaaagaagaggcccgtcaagacttcttgttgatggttgttggatagaagatcccgacaggatcaaagaagaggtccatcagttctttaggaagagatttgaggaaagtgaggaggtgaggccgaggctagatggggtaatttttcaggtaattgcacaaaatcaaaatgatttcctgatagatcgttttcatgagaaggaagtaaaagatgcatcatagaaacaatctgattttccaaggaagtcctttcaacccctataaagtcatggatcatgccatttaccttctttggtcctggttcaaggctatagataaagattttaataccagcttcatccactggtcttccaatatttcgaagtcctttggatagttttgatgggtttccttaatctcatgttttaggatgggctttttggagggcagcactctggtgctatgtatgtatctctagtaccactggtactagttttttttttaattaatgatatatatcttttgcctttccaaaaaaaaagaaatgcagtgtgggaatgtgggagagataaatgccccaaaaccggatggaattaaactttcaaattt

SEQ ID NO: 655 - DNA, 1343 bp, Glycine max
cttgcatgcctgcagaaaattataaaattcataaaacgcttctacagaaaattcaaaaagattgatttgctatatatcctatacacttggacattttagtcgaaacctctatggatagagactttaaggacacaatattatgaaaaatattcagctcaaatattataaaatgttaaaaaacaatgcatctcaatatttttttgaaaggtgtacttttaacatgtttatgaattgtactttcttggctaatgagtgttttccctggttaatgttatggattgtactttgtaggtgtactgatatattttttttcattaaatactaatgttgattattcaattttagaacagtgtacgcatagtatatgactgttattgataaggtatttgttatcgataaggtgcagttaatataagcagagaaagaaactaaaaggttaactacatgattaagcttaagtgatgaaatggataatcccttaaaagtcatccatgatttgtatatttggtgctttgcaaaaacaatcatttaagttcgtcttcaaaatctagtaacagattacttaaccattcttttagatcactacaaatatagtatttgtttttttagaaggaaaaaattgggtctgtggcatcttaatttttgtgatcacatttttggttctagtgatactaacttcttagttcttacaatgtatgtatattttttctttttacaaatgtcactcttctcagctggattcatggtttgaaaactctttcctcataatgtcaacaggtggctccctataatacattttactcccaattggaaaagcatatgaatgaagttggaattgtgcccacagttaaccgatgggatgagcctctagcattgggcatggttgatccccatgattcattatctcatccagcaggtgtctctgatgttcaagctgagtctgctacacgggtggaccctgatcagttcactgattttgtggtatgaatgtttctttaacattgacttgtaaggaaagtaaaatagtggatatatgtgtgcacacatgtgtatgcgccagtagatggtatctttaacattcatatatgctttttctctgtctgtattgttgtcatgcagattccaaactggtttggaggagagtccactggggctacaaaaggcaacccattcacgttaccagatgcctatatggtatctcagcataaaaatgtatgtgtggtattaattgatttgtatattaattaacgattggatttccaaatcttttggtgatcaaattttcaaaaaactttattttaagcgaaatatgttttaactacaatgaaattgtatcttcttct

SEQ ID NO: 656 - DNA, 777 bp, Glycine max
  misc_feature (735)..(735): n is a, c, g, or t
agaagattaaacttcattcaaatgaaaatatatttcacctaaaatacagctttttacagtttgatcaccaaaaaattggaaatccagtcattaatatatattactcaattgattccgtacatacatttttatgctgagatgccatataagcatctggtaacgtgaatggattgtcttttttaaacccagtggactcttctacaagccagcttggaatctgtgtgccaacagcatggaccaaaaacaaagcatgtgactagataaagaaagaaatatgaaaccttgaacattcttcatcccagaaaatttaccaaacaagataccagccaatagtgaacataatgaagtccattaaatgtgactaattaaaagtaaatatctccattttccctataagtcagtataagaataaagtccttaccacaaaattagtgaactgatcagggtccaccagtgtagcagactcagtttgaacatcagagacaccagctggatgagataatgaatcatggggatcaaccatgcccaatgctaggggttcattccatcggttcactgagggcacaattctaacttcattcatatgctcctccaattgggcataaaatgtattatagggagccacctgttaacattgtgagggagaaaattctcatgcaatgaatccagataagaagagtaaggatacattataagaagctagtactactagaagaagcagaagtgtgaacgaanaagtagaccttttgttagaggccacagaccaaataccatttt

SEQ ID NO: 657 - DNA, 902 bp, Glycine max
cagcttgcatgcctgcagttgaaatcctcttatcaagagggtttgtggtgcatcttaggtgactttaattcgataagataccaacatgagagagtgagctcttctcagtctgagggcaactcttctagtatggctgaattcaactcatggatttcagatatggccttagaggaggtcagatccttaggcagaaacttcacctggtacaggcctaatgggagtgctatgagcaagctggataggttcttcttatctgacaattggctggagcaatggcctgatactactcagtttgtgctggatagagatttttcagatcactgtcctatccttttgagatccaaaatcattgattgggggcctaagcctttcaagattatggattggtggattcaagacaagggtttccaggatatggtgtctctcaagtggaacaattatcatcctaatggctggggaggatatgctctcaagcaaaaggtgaaattcatcaaagactgcattagacagtggagcttttccaatggggttatcactgctaagaagattctggatctaaagaaagaactgaatgccttggaggctggtattattgatagaattctgtcaccagctgaagtggaacttaagaaatcccttcaagagcagctgtggtatgcagctaattcttatgaatccatgttgcggaaaaaggctagaacgaagtggctaaaagaaggggataaaaactctgcttactttcatagaatgatcaatcacagaaagagacacaatgccatccaaagtctgatcatagatgggatgtgggtcccagagccctatagaggtaaaaatgaagcttttaatcattttaaagaaggatttgctgaacagaaatttaacaggccaaccttggagggggt

SEQ ID NO: 658 - DNA, 779 bp, Glycine max
aaccacagaaaagaaacgaaatggtgagagataaaattgggaaggagatataccatcataagttaacatattcaaaataagtaatcactgctaagttttataatgcaaaagcaactatacctgaacactgcatagggaatattactgtagtctggcttgattgtttgcccaccaaatacagttttctgcaaaacaaatatgttaaacaacaacaaataatatcatcattagaccaatcaactgcaaactcctccctacccagtacataaataggtattcttatccactaaatatctgaatacttacagcaaagtacgatgcttccatcaaggccaccggagttagattcattcggtttgtgacatcacccacagcccatatgctaggtatgcttgtgcgggaatactcatccacctaaacacaaaggatcacagaacatttagaactgagtcataatcattctctagctcttaaacaattgttcaaatcaatatccagtcattgacgaaagcatataagatgatataacctaaaaaccaatttgcttcagacattgtattcccactcacttgggaattgataagagaatgcttcattatacaaatattttgcctaaaggtatgttgggaataaaaaatatttaatgtatagatttgatttaggatttgatttatagctattggaaaaaacccaagtcccacattggctagagataaggccaagatagaagatataagtgggggacaacatttatcctatgagttaccttttgggcttga

SEQ ID NO: 659 - DNA, 752 bp, Glycine max
actttgtaggcagattttgttgaaaatattccattagtgtctggcttccaccaaaggatctctgctggattgttgaatgagagcagaatcgatctcagctaggaaatcagctgccacttgaatttcatgatcaaaaaagtcccttctccatgataacttccattcccacctaccttccacataatctcccatagaattgattggtgaattctgctgtttactgatcaaatataattggggatattttccttggagattacaatttccctccatccatttatccttccagaaactgatactggacccccttcctaccctccatattaaattatcaataaagcagtccttgtgatgctgctgaaatatgctcttcaagtcctgccaccattgggaagtgaagttcctccttgtaccagaaatcaactccttccacccaccatacttagagattaagattctagcccacggttggtcatgattattagccagatgccacccccatttgccaagtaaagcttcattaaatagagataggtctttaatccctaaaccccctttgttcttaggaagacaaactttgcccacttcacccaaggaattttgttggcctcttggtgtcctccccacagaaggatagaaggtagataggtaaggctgagaggacagaattataaggggtgattctgcccccatagacagaattctttgcttccctgttgcaagtttaacttcaaacctcgttacatggggct

SEQ ID NO: 660 - DNA, 806 bp, Glycine max
agcacaaaatttactttttgacccatatgctaaaaataattcattttaatctccaatcaaacatttttaaattccttttggtccctaacattacacaaactttattttttcatcctatgtgtactaaattttatttaaaggattaacctctctcaacatatgttttatcatatgcttgaatcaataatcaaattatgatgatatatttaaatgataagattatctactatgaatcatatgacatcttatttggttgtttaaatattatgctcccaaaaaataggtgctaaacatatataataaatcatatattttctaatatcttattattatcttttcttaccttagaagatttaaatagtttatcacgccccaaacaataaaaataaaataaaaatcctttattatcatgcacatgcagtggccataacacttggtccgatgaattaattaaagttggcttgcgtgctcggggatttctataagagccccgacaagtttggcaaaactgggaaacaaatggagcagtgtccgatcacaattaattcaagttgaggaccatgctcgtaaatatattctcatatgttattatgttatgttatgtgtttttgttgacatgacacgagtagttttttatttttttccgttctctgctttttgttcaaactccaaagggtctttctttcatcttccttcctttctcttccatttctataaaataatttagccaacttttttttcttttcttccccctttttttcaccggttcttggttctattcttagggacaaaggggaccccaagcc

SEQ ID NO: 661 - DNA, 780 bp, Glycine max
acataaattgcgagtatacaacttcgattttccacaatttattctgtccctttccctttcctattctcttattccctcacctccctcttgcaagtcgaacctctcattggaccaaaacacacacacacacacacatggcattttgaatgtttaaaaagttatgtcgctgtatgtaaaagcgctccatgcatggatgttggaactttaaacccagctaaagaataatgctactttcgatggcttgcactaacaaatgtatcgatatacagctacaactctggctcaatattagtttaatagcaaatttaaacaacaatggcgcaaggtgttaggggtgctgttgtgttagtagcaccactgtagctaaaagcctgcccagtgagaggtttctgtttaattgcactaatttccaattttaccaagtgactatacaaaagaatacacacaatggaaccaaaaactaggcaaacgtctcacaggccgatcataaataaaggagaaaaatcaaattcaacaggtaaattatcccggttatgtgaagtggaagtcaaaacagccgattccttcttgaggaaacctttcaatttctgtcagtcagcaagcataagagaataacttaataagctcagcgacaaaattaaaaaaccaagatcccccctaggtactttgcttaactttgttaaactggggcatcagaatgaattctctcgtacaagcgatgaatgagtggagatttaaacctggggggttccctcttcaggactgcaatcacatccttta

SEQ ID NO: 662 - DNA, 833 bp, Glycine max
  misc_feature (641)..(641): n is a, c, g, or t
tccttggattgttattatcatcaaactaattacaatggtggtggtcagcttctcactgatgtcactcaatgtgggtttgttgttcattccaaccctaacacaacaaactcacatcacaacaacatgtgcttggatgagagtctcttcatctctagaaagagtactactcctcatgctcctatcaactaccttgattccgatcatgtctatctctctcacttgcttaatggaactgctggttcatcattttgctataataattatggggttcacaaccagaacaacatggagttgcagctggggaatcaagattgttttgaggaaagagggagatggatatggtagagtctggtttgttatactcagtttttgcattagcaattataagaagaatattctgcacttaggatgtttttgttgatggctttttatattgtggtggactttggaataaacaatatgttggtcgctggcttaaattttttagttttatatcttgtctacatgtttccttattttttctgtgaaaataccaaataaaattccattaggtattcccccctccccaaaaaaaatccattaggtacgtatataacgtcatatatatcttgcatgaaaagaaacaaattctactatgttangggtgttgtatgtggaaccctattttttttagcagaccaagatcctacaaccttcctatgcccctttgggaacagtgagaaaataatatttttttgactgaaactgtgttacctcatttcattaatgatcaaaattgtaataccagtaggaattctaacaaaatctctagacgcaactttacttgaaagctt

SEQ ID NO: 663 - DNA, 691 bp, Glycine max
ttgcatgcctgcaggtagggctcctaattctaagaggctgaatttagaaactgtaggtgttgagcttgacaacactggagcaataaaggttcacatttctctgctttaatcacctgattccatgaaatctaataagaaaaaagttattctcatttcagcatctggatgataggtggatccattgtgattctataatactagattgtggtattcatagctggttatatagatacaaacatagactgttttctattggaataccaacctgcaaatgccataatttggttaccatgttgattggtgtgccaatttattggagaactcctgagaaattgtaaagtataaatgaatttgtatatctaatcccttccaagtagaagttaaagcacttatatgtttacgtgccttgtgaaaaggtgaaggaaagtactaccttgtaaaataggagaaacagagggataattgagagaaaaccatgtgtcagagtacaaggtggatgcttgtttatatagactgatagtaatgattacacgtaatcagaggagactaagtttcccctcaatcagatatgtttcctattcttagaatgtggatttgggcctaactgaatccgaaaagttagctcatagggtaaaggttggccccctcacttatatattctatcttgtcctgatttgtagccaatgtggga

SEQ ID NO: 664 - DNA, 1371 bp, Glycine max
ttgtatatttgctgaacttcttcttcgtcgaccttttttgcaggtaaaaaagatttacatgattgatattctgaagtagatgggctttgacatcaagtgtggtccatttattgggacatgttatccatttaactttatcaactagttgaaattaattttttgcagtctgaaaatcctaaaccattcaaagttgttttaactgagcttgaattagctctgaagcaataggctatggtatttttatgcatggatgacggtttattgggcttccatttattcccactctatattttgtgaatagctggttttaatataatttccaagatttaaaagtaattcattgcattggctgcttttcttcatttttattttatacttacattattaagcatgtttcttatggttttttcatcagtttgttattatcacttggtagggtacaagtgacattgatcaattaggaaagattttttctgcatttggcattccaacagctcctcagtggcctgatatggtatacctgcctgattatgtggaataccaatatgttcctgccccccctctgcattccttatttccgatggcaactgatgatgctctagatctgttgtcaaagatgtttacatatgatccaaaaactagaatttcagtgcagcaggcactagagcataggtacctgccttcagcatcccattaatacaccaatatttattttttctccatgattaatctctcctcttccactttaggtacttttcttctgctcctctgccttcggatccagacaagctccctagacctgctcccaagagggaatctaggacttctgatttcaatttacaggagggtcctactgtattatcacctccaaggaagtctaggagagtgatgccaggacgtgatgggtttgaaggaagttctctgcaagcagataaggttgatgccagttttggtgatttcaactgatgataatacaggcaagaatgaatcagctccaatgtctgtagaattttctatctttggtttaaaacctccaaatagacctacaattaacaggtacaacagtattggttgtctaatcaattcaaagtggcctaatagtttgtaattttaactgagtcaaacataaaattatccagctgagttcattggcattggaagaaaaataagccaggcttatattgttaggatatttttctagtgaagttgctgattagaaactattgtaatatgctataacacgatatgctgtaatgtgctaaacataatatgttgtaattcccaagtagtggaagaatgtgccagttgtttgttatcttttagtttctacaagtaaatgatgttaattaaccttagttccttgtttttgtt

SEQ ID NO: 665 - DNA, 552 bp, Glycine max
tctgagcttagctttgacccaagacctgagattaggaagagtgccttggaagtcctgtttgaaaccttacgtaaccatgggcatctcttttcactacctttatgggaaagagtatttgagtctatcctatttcctatattcgattatgttcggcattctattgatccttcagggagtagttcaccgatcaatgaagtagaggctgatggtgagcttgatcaagatgcttggctttacgaaacatgcacattggctctccaattggttgtagatctttttgttaacttttatgacactgtcaatccacttttaagaaaggtgctgatgctcctggttagctttataaagcgccctcatcaaagccttgctggcattggtattgctgcttttgttcgtttgatgagtaatgctggggagctgttttctgatgaaaagtggttagaagtggttttctcattaaaagaagtagcaaatgcaacacttcctaactttctgtttgttgaaagtgaggactttactaaaaatcaggaacatgcttcaccagctgaagat

SEQ ID NO: 666 - DNA, 844 bp, Glycine max
atatctgctgtggacattggatttagctattgactttataatctaatgtccataccttatatgatttcattaatatataactcttgctgcttcttttttttttaatcatatgattcagtgtttgattatttttatttttgtgacttaggttgccaatgatccatctggaaaagcgatcaatgcactcgagcagcatattaaaaaccttttgtgtccatccactcccttgttcttcaataccctttatgaccccttcagagaaggtgcagattttgttcgtggataccctttcagtcttcgtgaaggtgtgccaactgctatctcccatggactttggctcaacatcccagactatgatgctcctacacagcttgtgaagcctctcgagagaaacactaggtgtgtacaatataacataacaaattaacactctttatgaaccttctagctaaccaaatttactaagttatagaccaattcaaatttgattatgactattgcctttgtgtacaaggtatgtggacgctgttctgaccataccaaagggcactttattccccatgtgtggaatgaacttggcattcgaccgtgatctcattggaccagcaatgtactttggtctcatgggagatggtcaaccaattggacgctacgatgatatgtgggctggctggtgctgcaagggtccatttcttttgccttattttcactataacatcaatataatcttattgaaacagtaatacatatttgttaatgcttaaattgaataatactggttttttagttctctaaaaaggtggtaaaataagccatatttcttctaatgaacagacttgttttg

SEQ ID NO: 667 - DNA, 758 bp, Glycine max
ctggtgggtatgcagctggtggtcctggtgcaggggctccaattatgggagtggctccttttgtgggtgcttatggggggtataagggtgatactggtgactggtcacgctctttgtatcctgccccaagggatgaagcatctatgagagagttttcagttcggtttgtctgtcctactgggaacattggtggtgtgataggaaagggtggtgccataataaatcaaatcaggcaggattctggggcaaccatcaaagttgatagttcagctactgaaggagatgactgtttgataatcatttcaatgaaagaggtgaaatattgatgatcaagtgtggtatggatatgtgattttttttgcagttctgatggtttttaaattgtgtttatgcagttttttgaggattctttctctccaactatagaagctgctgtgcgattgcaacctcggtgcagtgagaaagtggaaagagattcagggattgtctctttcactacccgtcttctggtgccaacctcccgaattggttgccttattggtaaaggagggacaattgtaactgaaatgaggaggcttacaaaagccaacattcgcatcctgtcaaaggataatcttcctaaaattgcatctgaagatgatgaaatggtgcaggtaagggtacctcttgaagattgattgagtaatcttgttttctgtgttatcagaagttgcagtttcctataatttctaaactatgttggcttttattttgaccct

SEQ ID NO: 668 - DNA, 1533 bp, Glycine max
atgtccttatttacctgttcaagtgtcgcttgtcttttggtcgttttgttttcttatttggaagagaaaacacaatggaacctacttgctcgttttttgtaaatttttttgatgaatttgcagttaaatgcctgtatttatttgtatatttactattgttattttttatgtctaatgaagcatctatggataataagatgagtggttgatgacctattaagatcccacatcagctgagtatatgaccaaattgtcctttataataacttgggtgatccttcatcttgaactagttttgtaggttgagttaggtttagtccattttcatctaatacaaacttttgaaagaggtttcatcttcctttgttgttatcaatgttgttaaaatagccactatagtggcgctattgcattgcagaatttcttggatccacaattgctactctgtccactattgtgaacgagtggttgcgacagtcatccttcatctttttatcatctttgacgagtctccatccaattgaactttgagttaatattatgttattttttatgcattttatttttatttgcatacaacttaattttttatacatatataattgataatatcatacacttcaattgctatgcgacttctgctattggcctacaattttatacacaatatgatatagcagattattggctttccaccattttccgatgatctgcaatttataacactggttgtcataagactaataatctggggaaggttcacctcttctggtgaatgactgcctctagtctctatagcatttaattcaagagtatcatagtattttatttatatagcacttttcaaagggttcacctcttctgtttgctgcttatagtcccaaaactaacagttagcaaattaggtggcttagttctaagttcttttacaattctgactatttgctccttttagcaccacaatcggctagttagatggctaggctctcagagtattttagttttatcaataagatgctaaaggcatgtcttgcatgaactacaaatgctccgacccttttggtgctgtgtgccttttcatgcctttgagtacactgtgatgggattttagggaaaataatataaaaagaggagagaatcagcactctgcataaatggcaggatagtttttacattttgcaggggtggtataatttttttttgttccattattggcatttctttggctttcataacatgtatatttttttcaaattttaacttatccatttttccttgaggttgtggatggggccctgccagaaaagtggtctcccgatgaagtgcaggcactattttgaagtagtttttctcaacattatttgttggtgattgtataatatgattaattgcaatactggagaggctactgaagcctaaagggatgtaatatagactaaaaggcttgattgctctaataaaaatatcatatgtttgcatcacgagtaatgacatgacatgattttttggattccatcccctgctgacttgatt

SEQ ID NO: 669 - DNA, 786 bp, Glycine max
gacacccttgtatgcctgcagcaaacaataaagggtatgctaggaaggaggtttttgtggcaggaacaacaaatgatgcagcttatgttctggctaattgttggaggagcttggacacaaggtcttgtagagcttgtcttgagaatgcatcttcttcgatattggggtgcttgccctggtcagaagggagagcattgaacactggatgcttcatgaggtactcagacacagattttcttaacaaggaacaggaaaatggaagttcaggaggtaaatgaattgcatttttattcttcgctgtcattgagtgttatggttattttgtaaggatccagcttttagcattgtgaaaaatttagacctaatagtatgagttcattttgctgacttgtgcaggtaatgtactggtgatagtggttgcagtagtcagttcagtgattgttttggtggttggaatagctattgtggtttatatccgcaaacacagatatattcaaatgaaacgaagaggtaaatgaccatcttatatattttaatgtaaaatgtcagacacagaagtcatatgagtcctagttacaaagcagaataacttggtaattgtttatacaatgtatttatatcatagtctacatctcatattcctctcagtcatatttaataaaatgtggaaccatcattgtattatagcacaaaatttttttcgacaaagttccttatctcaattgtcattctgctttctaggttcaaatgatgcagaaaaagtagccaagaacctttcccacaata

SEQ ID NO: 670 - DNA, 569 bp, Glycine max
taggaccacgttgatctgctcctcaaagcaaattctgcataagatcttctcctgatagatttaccgttcaatttgaagtgttagattctgatacacttgacaggcattcaagcacaaacaatgaaccaaaataacctacaaactaataacaagaatgtttgtacaagattatgtaaactagttttaatagtaaaagggttgcaaaatgccaaaaataatccaatcaaagttgagaatgctacattttgaagtctttcatactcctcctggctaaattttgtaacgtgtgtctgctcacccagtgcagcttgtagtctccaaatctgtgagttacaagggtgattattgaaatgtatttaaaaggttaaacctgctcgagtaattggtttaactaaagtaatcttaaataaggaaaccatatcgtattaaatcatgtggtagctacatattttgatataaggaaacatctttaccttctcaaccagatctgttttaggcatttttcttcaccgtctcgggggtgaaagtattatacctaaataggtaaatcaatcacatataattagaga

SEQ ID NO: 671 - DNA, 795 bp, Glycine max
ttctgcctgccgatatcggcagccatattatgaaaattccattcattggtttccaaatacttctttttatgcatttagaggtaggataattgctaacaaaaatgctgtcattatgttctcagagtttgtaggtttcctcaattttttttaattttctttcctctattttttttcatttaaattttagggaacaccatccagtgcaaaaaatctgccacactgggtcattatttccccactatttttgttgcaaggagctggggttttatttgcagcttatagattaatagagaagatagttcttttactctacattggagatattcctgaaagatactcagctatagcatcaaaatcccgtgagtgctttgggttctttcgatgtgggtcaaggtatcagtttagatgtgattggctagaaaaaggaatttgtcttcagtagattctctactgaacttagaaaaacttctcaagtttctgaactgacatggactgtttgtcattgcctgcactttccctcttaacaggttgcttggttggtggtcaatagatgaaggaagtagagaggaagaagctagacttttttgtgctgggagtcctgggtcagtactccaccctacattatggctctttatattgcatatctttaatgtcattagccattttcccccatgcttgagagctttttaaatcctggaaacctggctatcactttcgtatccttctcttggaatccccagttgtgtagtgcaatgattatttttcttcttctaaatttaacaaagttttctatgt

SEQ ID NO: 672 - DNA, 748 bp, Glycine max
agtcaatgaaaccttcaattcaaccatgctcatctctacgaaccccaccaaaaccagaatggcctgggttccctagagaactaccatctgaattgactttattgattcaatgacaatttttatctttaaagaaaaaacttctaaaacaaaattttaaaatatacttcattttgatcaaagtataataggcagataaccatagatccaaggaatgagagatccattgaaacttactcattgattatataatcaataggctagtttgtttaaacttatttattgaaaataaatatttattttattaaaagtagtttttatttttttgatttgtctaaactaggtctagttaaaaaataattttctatttattttaagaaacaaatcatatttgttttttaaaaagtatttttttgaaaaacatttattttaaaattatttttaagtttacccaaactggtccaatatctcaaaaaaaaattgttattaaattttttatatttgaggggctagcattttaaaagaaagaaaatttggattcaattagcaaaaaaaaatggccaagatgtgatatgattgataaacaattttatttcttaaacatatcataagttcgatctcaggatgtatatgaaaaaaaaattgttagaaaaaaaaataacaaaaacaaaagctggcatttaatagtattactttgacttagactaacactaatccaaccccccacccggccccccaaataaataaaaat

SEQ ID NO: 673 - DNA, 816 bp, Glycine max
aaatggattgatcatacacctgcataatccagtgtgtgcaaagttagaaaagtatacgtttatcaagtgaactttatgtgttgccattgattacaagagttaaaaagtactccacacaacacaacatcacgaggagactgctcccttctcaattactaaggtgctgtgtatcatagaaaccaaaaataattattacaatgttaagtatcaacctagatggaactagatgtctggaagccagggtacaaatttacttccctcctaatttccttttcttttatcacgtgcattcttctaattcttaagcattgcaaaaaaggtaatccgaacattctaagttctagcttcttatgacatttgcaaaatttattcttagctacattaacacaagctaaaattaatatattgaaatctgctgctagcttaaacactagatacaaataactagagttagcacaattggaatgcagaagtttggcatccttcatacctccctctcattgcacattggaatttgaaccagaaccatgggataattgcttgcagatccttcaacatcatcactcttgaacggatccccttcaatccttggcttaaccttcctgtatttgatccaaaagcaccccaagcaaaggagcatgcgatccacagactggataggaaacaaaacaacacaaaacttggaaagtgcctgtatagggaagagcaatgtactcggcacgaaacgttagcccaagcacataagcccaagtgggagcaggcccctccaaaatcagagggaccaggaaatgtgcaaaagggggtccccaaatgccc

SEQ ID NO: 674 - DNA, 810 bp, Glycine max
tgcatgcctgcagataccttccctcataatgtgactttcccatgttagatgccttctagatttccttgaaagtacaaaagagcctcactcaattcacgttcttggcttttatgtgctgcattttgttaaatgctgagccttccatccaataaggccaacctcgaatcttgagcagtgttttacatgagtttccagatctgagtctttttctctttagtctttaccatgatgtgtgctacaaaagattgatgaagttgttggtgtcttgatttgagtccttccttccttgctcagtgtatacttataattatatatgcactctcactcacacacatacagtaacatacttgtgttgttctgtgtgtgaagtgtgaaatctgtgtccaattcaccatagtgtggaaatggctccaaggttgtacttttccaattggtggaccaaggatacactgaagggaacaccagtggtggtgaaaatggagaaccccactttctctgttgtggagatcaatggtgctgatgctgcattcaggccagtggagaaaagccgcggcaagaatgccaaacaagtcacgtgggtgttgcttctcagggctcaccgtgctgttggctgtgtcacttggcttgccactgttctttgggcgttgctcggagccattaagaagaggttgattcatggacaaagtgtgtctgtggagagtgagagtgacaagttggaaaagggcaagttgctggttaaaggcattagaggggtccttgtgactttcctggcgggtttgggctttgaggtggtgcttactttcaggttgg

SEQ ID NO: 675 - DNA, 863 bp, Glycine max
tgtgaaaaatataaatatcctctttacaagaacaagtcttcaagtaacactttaaagcaaataacatgtacctgatctgttatttccattcccatatagtttactccaattgtctctcctgctttgctaaagacaggttctacgtatatcaagaatgtctttgacccaaataattctgtctcaaaagtaatttctttttttgcaggcaaccctttttccattacttccctcttgaaatcttgagattccttaacaccggatcctgtgaaaatttcaacatctgtttttcctatgatgtcctgaaaaaaaatagttgagttttaagaatcaagatatctcagtgtactactttgcaataactcatgaataagaaaaaagtttctaatttaaagaactttcttctggagtatgtgcagattttgatgtaaaaaaattgtaagacaaaaattttaatgaaacctaatcatatgccctggcaataagaacttcaacagcaataatcattacctcctcttgtaaactcggaaaatgattgtagataaagcgatagcgcaactctttgtcctggaagaaaagtatcagagtcagtcctttgcagattgaaagatcccttacaatggcaaacatgtatgtagctttcaaatgatgaaccattaaaacttcattaagaaggtttgtcaagttggacaaaaaccgacctgtgtaaaaagaaacatgtctgcattccaaatttgagattttataataggggacagtccttattacgttagttttaaagggggcaagtcctattaagttaatgttgcccaccccgccccccacacaaacaatattatagcggggccggcttatttacttaaaaa

SEQ ID NO: 676 - DNA, 560 bp, Glycine max
tactatgccatgatttgaacatgaataacactgtatcttatatcaatgtcaattcaccgagataatcaccattagttgaaactaaatactctctccgtctctaaatactttttaactaattcacaccctttaagaaagttggttaatatagttagtaacattaattttgttaacaatttgtattattttgccaaaattacccttaagtttattgggactcataatctctctttctacttaattgctttcacacctaattaattaatgtgtgctaatcttcttatccaatccttataagagagataatgtatttatattttaaatatatagcatttattgtaaattattaaagggtacttgggtcaaaaaataattaatacaaaagacaacttgaaaagagtcttatatttaggggcagagggagtattgttttaggctagtaagaaccaaggacactgtacatttgttaagagatccaattatctaattacatattaggaaaggggaaaaaaacctgtcatcagcccagtaggaggtgtgatcaagagaaggaagaacaa

SEQ ID NO: 677 - DNA, 933 bp, Glycine max
ttgcatgcctgcagcagaaaatatgtccactgttagattaaaaagaatgaaagatactaaaagctggggaaagtcatttagaataatttacaaagaattataatattcttaagtttaagttatagttctaatctaacatatttatacgattttctagattttaatattttctttttacaaaaagcatgccccctgcaaattttggctctagctctgccaccatgagcatagacaaaaaaataaaaatgaacaagggatttctcatcaatacaatgaaaattcagtgaagaaacctgataggattatggatctaattgggcccaataaggctctaggtttacttctttcagcctacacctaacttgcagggaactaacatgtatacataaaaataaaagggagaattagtgagagaagagagaaaacaaatctcagatctgtctaccttcaaagagggacagtgatcatgttagtattggcagtaggtaccaggtccacaggacctgtgagtgcaagccacacaagtatgacagaattgtttgtccagaatattgcctagttcccaaagccttgagttaattatggttgccctgaattgtttgtccaaatatgcacacattgcatacccttgaaacattttatcaccaagactaataatggtgagatttttgttaaagtgatggtaagactacacaggtttcattgatctgtgatacatgatagaaaatccttcctttcctaatggatttctgggaggggctgatgatctgttttgaataccaagcagagaaaaatgttaaaaataggtattttctatcatcttagatttcacattggattagaagtctcttcagttcacaaccgtgtaagggaaaggcctacaggggttgttgcccctactaccaaatcacccatttttcatgtttcccactg

SEQ ID NO: 678 - DNA, 805 bp, Glycine max
acccggggaatcctctaggatcgacctgcagatggtccttcaggtggagtgacatcaaaggatatgggaatcaattatctggcactacatgatttgtttcaaatgtctaatgaaaggaaggacatcataagctatgatatttatgtgcaaatggttgagatttacaatgaacaagttagagacttacttgcagaggacaaaacagacaacaaatatccttttcatagggtcaaacattttcacactactcataagagattaggaagagaaagttttatttctagtctgttgatcttaatatttgcaaataatttatctccttaactaacctcaaattagaaatccggagctgcaatgatgacgggttgagccttcctgatgctagattgcatttggtgaagtctccaactgatgttctgaccctcatgaaacttggtgaggttaatcgtgccgtcagttcgacttcaatgaacaataggagtagtcgatctcacaggtgaaattctgcttttcaggagttctgctaactgaattttcttatataaagtagttgggtttattttaggcactgatagggctgctcaatgtgtctcagtgtacttactgtgcatgttaatggtaaagatacatctgggagctccattcgcagctgcttgcacttagtagacctagctggaagtgaacgagttgacaagtctgaagttacaggggaaagactaaaggaagcacaatttattaacaagtctctttcctgtttgggagatgtgatcacaggccctgggcttaaaagaattctcacatccct

SEQ ID NO: 679 - DNA, 770 bp, Glycine max
tttctttggattttatttcagattcactttgcatgttcatactcactgcacctcccactgttataaatttattactttttttttaattctaaataatatgttttcttgagtcaaatgatcaaatggaactccatttttctgaccttacgtcttgcttttgacgattatgctttgtggtggacgtgaggaaaatacacagtttctctggagaaattgttttcagatcctgggggattggggtctttagatttttttatatataaaatgaatttttgtatggactatatggtatttgttagttaaaattaatggctatgtatgatcgagtcaatatctaggaccaggaaacgattgctattttactgtgcaatcggaattaaccaaatctagtgtttcttatatattcatttcattattatttttttttttgcagttatattctattctatataaggggaagctcaacttcttcctccttgtcgcatacatagatacatgggttcggcaccagaagtgttggctcacagaagttgtggaaagctcattgggactcggttcctacagtacttgaatggaggtcctctctccttcaaaacccaccaagccatcgttctgattgtaacattttttgcttatgctagttaccatgccaccagaaaaaccactagtattgtaaagagtgtccttgatccccaatcatcagctataggcttgaccttctttccgtttaggcccaaccaatttcaccgagtaaaatggatccaagacac

SEQ ID NO: 680 - DNA, 1415 bp, Glycine max
cttgcatgcctgcagaaccagtttaagaaaaatacctgtagggcttctaggtatactgtacagtgcttctcttaaaatagtacagtaatagacaggaagtggagagaacaattacaccaacaccagatccccttctgctgcttcttgttcctgttgttctggcagccatccttcccgatatgggagaagtattctccttatttcttctgcactaagtgtctcatactctaataatgcatttgccagcacatgtaatgccttctcatgctgaaaaaatgtcagaagttactagtgttacaaatttccatatgcaagactagcagatctatatcattgctcaaggtgataacttttattaatcaatgtcattcagattaaaaaaaaaaagttgctcttggttctaattttcctataggtcaaggtcaatgatccaccagcctaaagaaagccataaagctgtaactagcaccattcaatccttcttttcagggtaaaataattattgattccatttgacacttgttcattttgatttaaaaaccaaccatacattcacatcaagagcatttggtcttgtccactaacagtgaactaaatatgctcttttaagtataagactcactggagacaagtacataaatgaatctcagagagagaaagaaaattcacaacagaatttgaggataaaggtgataagactcaacccagatgagattcagttacacctcagcttatataggtagttacagttgggactgtcaactgactatagttagttagctaactaactacaagagcagaaaactatagttaagcctatacacaaagacttaagaaaagaaagaactctatcaagtaagtatactcctatagtacaagactcattagtcagacctaacagtgaactaacttgtgttaattttataaactaatatgctcttttaagtataaaacttcttaactgacattctcgattttttaggaaaagcatagatagtaatagcttgtgttccttcaaatatgtccaccattaacattaaatcatgataaataaattaataaagataacctaaaaaatgcaagaagttacagaatgtaatataaaagaagttagaagcttgaagagtttatagccatccagatccgaacagattggcagcattcctctattgatttgtttttttttactagccttgtatttttcacttgtgtcaaagggaatttgttattctccaaacctttttataacttcttctcttgatgaaactattcttttaaaacgctcagacaaacccaaaagagaaagaaaaaggtttccactttaaagaaaaaatttacagacaataatttaatcagacaaacctttttcaaaagggctttcacgcgatcatatgcttctctaaggagtttcacaa

SEQ ID NO: 681 - DNA, 882 bp, Glycine max
ttttggttactctcaatctcatctccatattgttctaagatctatcaaggttggatatggaaattcaggagtaacaggctaggtttgtacgagcactgtttaaatattgcagccttccatcatcattatcgtggcaaggggctatgaaaattgtacagctgtgtaacaaattgtacatattaaaatcctgttaaattatgtaattttctaacattgacatcttgcacaaagcaaatgtaatgaattccttttgctttgcctttcagtgtaatgagattcttagttacttgctataatttataaaaaggttgttgtctaatccttaaaaatctcaaagcagcactgataagtcaatttttcttttaaaaaaaattccaaatcagttagactgatcaatttttaatagccgattttcaatgtactctaaacagaaccaatctttgagtgatttatttttacttcataaattacgtcacattcaacacggcctattaaacagaaccaatctttgagtgataaatgatttattgatttaaaatttgttcaattttttttttccattccacgcaaagatttgccccttgttgtcacgtatcaaaattctagcatcataataaatatatttgattagtgtctaatggttccatgaaaagccaaattagagaagtcagttggcaaataaaattcaaagggttgcatttgcatatcaatccccaaacaatcatcataatcacgattactattacgattatttgacaccctcaccatgtaaggatatatattttttttttgaagaaggaccactttttaaaagaataagaattaagccattaaatggctaataaatttaatccctaattttgggcttcttttagaaccccc

SEQ ID NO: 682 - DNA, 801 bp, Glycine max
aacaaaatgcacaaaatgtcaaaatagaaaagaaatatcagaaaaggatgccttgttggaaagctgcctcaattttgatcacccatagtgccttaagtgcggcctatcagagatggttgtcaatatctcggaaaggactacctacaaagagactaaccaaaaatgttggagtgaaacatcgtagtgtgcagccaccggaacatcagttattaggggtttgagatcccacataaatagtgcttataaagcttgaatgatcctcactatacaagttggttttgttgagttagactgtaagcccaaattttaagatagtaatagtggcagagcctatcctaaatccattgtcgagccatatgtattaccatgccctaggcctatagccccaagcataagggtgtgtgatggaaagcccctttaattgcggcccgacttaattgtgaccttatcagagttggttgccaatgtcttggaaagagatacatatgaagcggttgagaagcggttgagaggagcatcgtatgcatagccaacaagatgtcgactcttgggggagttgaaacctacaccaacttaagataaggccaaagtagtgcttataaagcttgggcaatcttcaccatacaagccgggtttgtaaagttgaattaggtcctaagccccaaggtcttaaacatgaaatgaaacatattatcacttaattaaccaggccgtgattacaaaaaaatgtattatctaaaataactttcacctgagttgtgaatttgaaaacccacttacccaaccagcatggagcgaaaa

SEQ ID NO: 683 - DNA, 801 bp, Glycine max
aaaaaaaaaaaaatcggcagactcatgaaaatgaagctttcaactacacatcatttatggtaaattaaaataagtaacaagcatagctacaaggcataactataaatgacataaatgacctagactgaatgacgtgcacaataaccctaatcccacatctaccatgttagcttcacaaagatccatttgcgttttacaaggaaatcatatgtgcaacatggcacacctaagcctagtatatgacaaaaaagaaaagcactagtttttactgacttctagattattattttaggatcattgaatttacaagtatgcattggaagtcacccaaagggcatctaatgcaaactaatggctgggtcagctattgaggctatcaggtgtttcgaatatccttcaggttaaaatcagtatgttactttatccctgttatattctttttgtttgctgatgataaaaatagatcatttcgaacacagtgaaggccttgacgattgcaatttgcaacacatcaagaccctaaaaggaattattttaacatgagatgaagaaatgcatgataggaatgcaactataatgaattcacaggcatacctcaaaagatggatatttcaggtcgcattcaacagtttcatcctgttttttctgcaaaataagaaaacatcattaaaaagaaattagtgtttgttttataagcacaagatcatctgacaatgatacaaaaaaagtttaaatacatttttagtccttgcaatttagcgttttttttttcttttttggcttggcattttttttttgttt

SEQ ID NO: 684 - DNA, 805 bp, Glycine max
  misc_feature (757)..(757): n is a, c, g, or t
  misc_feature (785)..(785): n is a, c, g, or t
actccaattttgagcaaagatcagctaaggctagaaatatcccttcaagacgtttgggatgtaaagcacaattttgcaagtgactgttgaacttatcaatagcatttgcctcaaatgctaacttctgcaaatcttctttttctgcaactaaacttgaaaaggcaaaggaagcactgtctccaacttgaccagattcatcaaggagctcaagtaaaatatgtatcaatttggctttgattcctatgtcttgcagatagcaagaagatgaattctttacacaaatcaggcacaagcaggctaataacctagtccgagaatatctatccttggttaattcaattaccgaactcaaaactcttccattttgaaggtccacaaatttatagacaacttctggattgtttttaagaattgcagcaagagactctaaactagaatctcgttggcttagagaaccatcaagaaggctaataagtgtttctaaagcaccagcacagcataacatattttgttcatctcttttctcacaagaatgaataacaatgcttgcacctagtccagtaagattttcattcccactttttaatagtgaaagaagaaattgcatgtcttgttctttaaaaaagtcatactttggagctagatttgattgataaatcattcgtaaagagcgtgcagcagcatccacaacctgaaatccaaggtaggcaggtctattaaatggcattgggaaaaaaatacaggcatatctcatatnagtatatcacgataataattaatgtatnatgggttaaagggatagtat

SEQ ID NO: 685 - DNA, 1515 bp, Glycine max
tatttggaatcagaggaataattgtgtgttcaaccaaattcaatttgatgaggatgttgctgaggaatattctattgtttttaaatcctggttttggtctttaaacaaggtggggggcttctagtattcaccatatgaatggacatctcaaccgttgctgtgcttaagaatgatgatggtgtcaaattaactctattggattgggttgtgatgttatttcctctgtctctagttataagatttcttttaattttttttttatcattttttataatatatttttattttatttttagatgtataatttttttttaaacactcttaattattttctttttaaaaattaataaaaaataattgagtggataaagagataagaaaataataatataaataattaatatatttaatgtgaataattaaattaattatttttcttaaaaaatataaattaattaaaaaaatcttataattaaggaccaaaagaagtattaaacaacttgtgtaggaaacaatttgcatggaactatggcaggggagacgttatcatacagctgtgggaagtttcgtgaatggaagcatttaatgcagtagtgctatgatacaattaatgctgggaaagtgggaacatacaaggaggcatgggagatccaatagcttcggatttatgcagggaatattaaccgaatattatgaagttataaatgcttttttgagtacctggtggttatttaatatgcagtgcttagatttggtataaccatcggtggtaaaggatactagatacttctccctttggtatatctagtttctcttttatgggcctatgggtatctgttgtaagggtatgtcttatacctgacccttttggccgatcaaaaaaagaatgagctacatattttgaaaatgatacatcaacatgccatactcttatctctcaaagaattaatgtatggctattcctatgcgtgatttaattcagtatataacaaaaacttgaaaccgtcaaagggttgccatatgtggtggtggccaaactgattgaatgagacttgtcaatgaacaaaatgtgttgagtttgaccaatgaagccctatgtttccttattatatcattattattttaattttcaaattcttgtcatttgtcaacatattatcatatacatttttataactaacaagtttttataccggtccgtgaattttgaatttaaattctctgcattcacacaagcatgcagtcgtgaatctggaccatatgatgaagatcaaatggttcattagtattttgaaggtattttttaccttgattttactaaaatgatatatgcatcttttaatgaagatcatacgattcttatcatcttaatgcgcgaatgtgtcattttaaggactgtagggaatcaggatgcgtgaattttcttataggaagtgtaattggagctctctgaagtgcccctcttcaacaatgacagctgcaggccgactgtacagcatcgccgctgttacaaga

SEQ ID NO: 686 - DNA, 865 bp, Glycine max
  misc_feature (813)..(813): n is a, c, g, or t
gccccttgcagtgaagagcctcaagacattgctccaatcaagttcatggaaagaaacagaccttttatcactcataccagctgcaacagtggcttcactactgattgatatagtcgaattcacggaaaaaatagcagattcagttaataatcttgcaaccctcacacattttgaagttgtagatacagataaatcctcaacaaaagcgcaacaaccatcacaatcatctccacactgtgaatgtgttgaaccgggtcccaagactgatagcctccaactcgttattctaattgaggactcagcgctagctgtgtcagatagtgaaaaatcgaacagagtttgacaattgatagacgtaaaggattgtaataatattatatatcattgcttcaacctatgcacaacaaaaaaataatattgtattacaccatattattgagtattcggaaggcatacccttatgttgtctagaccgtgaggggtatcataagtacattaataatgtcaaatttgtatttctgagtcaatttcaattgattagtgaggatcatttgtcattttagttttcttgtgtggctctaacatcatgttaaggtattttttgtactctgaatcggaaaatgttaaagactctccattttaatttattgttttgtccaaatctccttttgcttagaacagacaatattaacaagtgcaaatgaagaaccaaagtatcaccagtttaaatttgagttagttatcaccaaacactaggattaactgggtataaaatgttctagtttaactgatgatttcgagtttacattccanagtttgtattacaagttgtctatggtagttttagttgactctagtacaaact

SEQ ID NO: 687 - DNA, 709 bp, Glycine max
ttattgtattctatatcaaatcagacctgaatcttatagcattggagattttgatatacttgtactcaataaattatgtcaaattcatctacaagcctttattttattgacttatctattttaatgccatacacaggtcatattatttggacaaaagtatatttttggtaattttaatgccatacacaggtcaccttaataatctgcaaaataaatgcttgtattaaatgctagcatttttttattatcaaaatacaacctttttttatctgaatcaaagacatataggaggatttataacaactcacgcatcatgtttaacaaactcaacaaaacctcagtaaaaaaaaaaaaattaaaaatcactttgttccatagtcattttaaaccaaaatcatcttttcaaaattaagtttacatacacttgtccagacacaaactaaaggccaaatgcaaacaattattttcagtaaaccaagatctgcacacaaaattgaccacacagattctcgacagtttcttagcaagaaaattaaaattcaaactagaaatgtgacagaagggacaaaatgattattaatatggtaaataaagttcatcatccttcttatgttgggtgaactggaaaattcaatcccagcgccactctaattgggaccccaaaatttgcaacaaagactaaattcccaatgtctagaaacaattcttt

SEQ ID NO: 688 - DNA, 583 bp, Glycine max
cttgcatgcctgcagctcatgtgaaacttttgcacttagtcacacatcatcatcagacttccttgtagatatagcatggttgcttaaggacaccacttcagaaaattttgacagagtgatgacagcttcacaaattcaaagatattgccatttgttggattttctgatatgcaatgattcaacaattattttgggaaaaatattaccaaatttgataatcttgacagagagcgtggaatccaacaatgttgtaattaataggacaagtgatgttgacataacgcaactcctgaatcacatacataatgctagtaatgtcatatgtcagaaacatcagcaaagtagaagtataattgtgcactctgaaatggaaggctttaaacttgctcagggctgctcccaagataacatgctatcagttgcaattaacagccaggttaggactattaattttctttcctagttttctccctgatgatgatgaaatatgaacacattttgaaattttgaagttttagagttacatgctttataactttattttactttattggcattttcttgcccacttaatggaaaataa

SEQ ID NO: 689 - DNA, 766 bp, Glycine max
agtttcttcgcctcttcttctactcaacttcataccaaaactttgatcgcaccaatgcctatttctcagtcagatttggcccatacacatacaccctccttcaagatttcaatgcttccctcaatgctgatgtttataacgaccctgcccaaccggacatcttgttcagagagtattgcatcaacatcagagaaggtgagaggctcgacataaccttcattccaaccatcacagtccagcatcaagattcgtacgctttcatcaatggaatagagattgtttcaatgcccccttttctctactacaccaatcctgacgacgtcgacatcacttggctgcctcaacccgttggcctcaatacgaacccgttccccattgaaaacaactatgctatggagacaaagtatcggttaagagttggagaccaagaaatccctgcctcacaggacacgggtatgctcaggagctgggatgtggataacaaatatgtaacgactcaaagtgtactatctctagatattgactctggaattaagctgagattcacaaagactcctaactacacggcaccagacacagtgtaccgatccctaagaatatgggaagtaatggcaccgtcaacatggggttcaacctcacatggcaacttcccgttgattcaggcttcacctacttgctaagattacacttttgccagcttgacccgaatattagccttcctggtgaccagagcttctcatctacgttcaggatcagttggttgaaa

SEQ ID NO: 690 - DNA, 821 bp, Glycine max
  misc_feature (726)..(726): n is a, c, g, or t
acatgaaacgcatttaaccgagtatgttaccagtattcattcattctgtccttatacgacttgctgcgaatcctttgttcctttataaaatgaatcgtcatttaattgaaatattggggcctaatgctaaatttttagggttttataatccacattcttcgggttcgggcaagaagagagagaagacgcaattttgaccctcaatttcacagacctttaatcattcacgcgattcttcttggtaactccgccttcctcaatccataatctgcttttataatttatttatttagtttttattttgattttggcttgctgcaagctaatttacgctcttcagttcaatattccccgttcatttgttgcagaaatctggttttggggcaatctccgtatttcgatattctgggtatgtatcaaaactgcacctttttcccttgtatattgttttgaaatgcttcttagttttaatgactatactgagcttttacttcagttttttctgtttttctgcacgccttttatgttatttttcacctttgaggtctctttgaaatttatgtttatgtcgatttgtgcaatgattattggcaaaaaatcaaaaacaaaaatgacttcaattcctcatgtttcagcctgtgcttattagagagagtaggaaaggtgaagaggggctgaaaatggaatgcatggaatgaattttcattgagatggagtatggaacanagcattatgctttcctcttacttgggaggaatgaacattatttttgggaaactcatattagaataacctgcccctaatttacacttttttgggag

SEQ ID NO: 691 - DNA, 807 bp, Glycine max
cagtttgcatgcctgccagttggtgttatcatttttgcagtatggggtgttggtccattattgtttcagacaaggaaattactttttcaggttatattgcagatactctatttttcatccttgcattagctgattcaatgtaattaatacctaagtttgatattgcagaggagtgatagtagttggaagagaagtaccacttactatataataagttcttaccttcagccattactgttatggactggagcaatacttatttgcaggtttctctgttatgacaataactttaacagattctgaatacgttatatttttctttgttgtgcctattctcctgtactgaattgttaacaaattgcagagcattggagccattaatcctaccttcagaaactagccaggttgttaaggaacgacttttgaattttgtaagatcattatcaacagtactggccttcgcctattgtttgtcaaggtgcacctattttctcgtattcatttgatctcttgaaactgatgaataatttggtcacctaattatgcacctaagcacttaagttctttgggcttttcttcctcttttaggagaaaacttgtctgattttcttttgttatgacaaattgtgataccttacatttttattgtctcatggctttttattttgctttatgatggaaccattcaactataatttcgtcaagattatcattttttgtagcccgcctgaatacctcaagcctgattttgggggtcaaacttaaaaatgccttacctaaggttttttttccattaaactaatttgt

SEQ ID NO: 692 - DNA, 899 bp, Glycine max
aacccatttctgggtagagaagcccagcaattccatgaacagtgaaaaggcagctatccataccgcagagtaaacagctttgccagcaaattggaatcccatctaacaatgacagacaatttactatgtcattgaatttgaaccataactaataacaaaacaatacgcccaaatccaattttttacaattatcatcttcaattggcattgcagttgccaagctactggtcttccataaatgatatatcatctaaatacatgcacacccatgatgaattgttttagcctatgtacatagaaaaagatatagccatcatatattcaaaagttctcagttctacatattcttctgtagatagaagtttagcacattgataatcttcagaatgtgtaaaacaaattgatagggagaaatgctaaatccaaaagctgaaaaattttgcatcattatatagctgggcaactatattgcccaactaatgtcactggctgactgattgaaaaatcaagtttcaatagagtcataataataatagcaattaaatttatgacagccaacaggtaaaaacataaatggaattgacaatatatttatcatgtttaaacttcatacaactataatatcagctgtctattaaaaaaagaaaagatacagacatttctcgtctcacttgcatcagtactctctgctaagaatttctgcgcttgctgaattacactgcacaacaatattgcacaattagtttatggaagataaacttattaagcctttaaagtttgagcccaaaatcagaccggaagactcaagcttgctacaaaaaatgataattttgaacaaaatattagttgaatgggttcctaataaagcaaattaaagccttgagaacaataaaatgtaa

SEQ ID NO: 693 - DNA, 879 bp, Glycine max
acctttgtgcctgcagagatgaagcaactagacgtagtttctgcaaccagcgaaatcccatatccaggagagctgcaacagcaaatgaatgaattacattttaatacaatatagctttcacttttctaccaaatatatttccaaaactcaaattaaatattcaacaatttccactgaatgaaaggaatcatactttcccgcctctggacctgatctgtgatcagagaaaatgtgcacatcagaaaccagcggattgatgattccacgggcagatttaatcatgctatattcaaactgaacagacactcttgttgaaaaagtagttcctctaattttcctcacaaaaccctcatcaatccaactaaccgcctgtttgaaagaacatacatataaggcattgaaaattttaaattaaccatcaaatcaaattatcaaaaatttagaaacttaccgttagattctgaacaactggaacagacaaaacaacttcaccaccaccattgggaggtaatccacgactctctactttaagctccaagtcttcaaatggaactccaaagcgcttcaatataggtaaagtagttgacttgaaggtatcaatagatggatctttagaatcatttttaattcctgataaacaatatttccaaacagttttaatttaaagttttcaacccacccacaatattctttcgttttttctatataaagaaggaaaattgtataaaatagggaaagttagaaattaccaattaccttataacctctttgaagccctaaataagtaaaaggggggccttgtttttggcccaaaaccaaaaccataaacccacaaatggaggttggctttcccagaaaaaaataaaccccaattgggaa

SEQ ID NO: 694 - DNA, 755 bp, Glycine max
aatgtaatggcacactcattttccctttgagattcccagagatataatgtgacaaagcttcgtgtgtgttgaagaagaaaatttgtatcaatcattcagagacaaagcaaggtatgcttgagacaaacctgaggaactggtggtgagcaggtaaaggtttacaacaattaaatgagagaatcaagtgagtgtaaatcatcattcatcagttaccatttcctgagtttagtagttactcgcattgtaatccttggcttatagcatttccctctctcaaacgccaaaacccggttttaattatcgtcattatttggcggttcgataacgaaccgggcgagggggtgggccatctcggatatggtcacctttaacggctccgtgacgccgcttgctcttctcgccgacggccgtctatggtgatcggatggactcccacggtgtttgtcgatcgaaaaggacgtcctcgggatcgtggcctgtgggccctacatcaaaatcaagagcctcgtggagacccgagacggatgcttcatcagcagttcccctgcaaggctcgttagaaacgacgtcgtctttatgccctcctccgaggaattccccccaggctctggtgccaaaagcttggtgaattcattgaattttctcggtaaaataaatttcaccttctctcgttaagagtaattttgagctctcttatgtgacattaaatgcaggtcgtccctaagagtttggtgggtttttgttaaatccgtttg

SEQ ID NO: 695 - DNA, 701 bp, Glycine max
cagagaaaattaaaataggtaaccaccatatgattaagaaaagagaattatgttcatgcatgcacagtcatgagcaaacaagcacaagagtgagagaggtaccaaatgtaataaagacagtccttgcttgtccctgtaatttgcatccacaccctgcacattttagaatccatgaatactacattccaaaaaaaaaaaaaagaaacctataaaggtgcatgtctaatttgaaaggggcaaacctcattaagaagtttcttaacagcagcaatgtcaccattttttattgattctcttaaaccctgaaaggtcacaatcagttccacatatatgattttcaacacctaagatcattttgcacaatgcatataagtaattgtttaaagttaaacaacaaaaacatttacctctccagtaacttcataatcaatctggggcctgtctgaggtaccattagttacatgaccaacgttaaacatagaactgtaaattttgcaacataaactatcaattaattacatcataaagcatgcaagagcaaaattaagttatgaattagtgaacagtttatgagcttagacataatgggactcatgattactttataagtatacaatatcttaaaaaaaaatgtcagcatactaaatataccaaattttgcacatgaagatactgtatcacctcacttcatttctcatatt

SEQ ID NO: 696 - DNA, 1454 bp, Glycine max
atccgctctcggtaccttgggatcctgtagtatcctacctgcagttaggacatgctgttttagatgatcttctaattccttcttattctttcactggggacacattatttgatgtagatacggtgcagcgaatcatgatgaattaccttcaatctgaaaaggaagatcattcaccatataatgcagatgatgagtatttttctcctcctcaaagtgatgtttattgggttggaaagttgatggagaattaccttgctgagatagccactgacagaaatttagctgtttcaaaattcatcactgttgctgaactaattcctgaccaatcaagagaaacagaagatgggatgtatagagccatagacatctatcttaaggtgaggttctaaaactaatactctcactagtgctaataatagaaactgattttctcctactgatataacttttattaaatccaactcaaccattgatattatctgcatgtgtaacaaattatggatgtgttttctgttagtacaggaacttacaatcacattttagtattttgcaaaacaacattagatttctgtcttctacaaagcacatacactaaggcttcaccacattggctttagattttgatttagttgatttgccagggttatctaacttactccaagtaaaaatgagattaaacaaccccacagaagataattagttaattaagaaaattgtatcaatcatcttaaagtacataattaattctcagttatctactataggctgtttaacctcatttggggtaacactgaaacaacattgaacatacaatagtattgtcattgaattcaaggatttaactctaatattcttcttatgtaaaatatttacacgcgagttcatcatgaatactgctgacaaagtagaaatttaaaactctcaggctcatcctattctaagtgatatggagaaaaagaaagtgtgtagcgtgatggactgccagaagttatcacgagaggcgtgtgcacacgctgctcaaaacgacaggcttccagttcaaatggttgttcaagttctctactacgaacagcaacgccttcgcgattccatggatagcagtgcaggctgggattctcctaacttccttgacaaggtaaattcatctcccaacgagctctccatcttgcgaagagaaaaccaagacctgaaactagagatagtgaaactgaaaatgagactaaaagagtttgagagaacttcaattagatcagcatcaagtagtcctgtgatttatgcttcacgctctgctgataagcctcctctgcctagaaagtcattcattaactctgtgtccaaaaagcttggtcgtctttctcctttttcacgtggcgatgctgccactatacctcccaaaggtcgcgtaaaacctgataagaatcgacgccattccatatcctaagaataagatcgtt

SEQ ID NO: 697 - DNA, 533 bp, Glycine max
ttgcatgcctgcagcttcaagttgtcacgagtttgagttgctgctcagaatggggaaaacgacatattagaggctgaagggaagctggagcttcaggcaacgccttcttctctctactctctcctccactcccattctcatcgaggacattcgcgccgacgagacatggcctggtctccgaaaccacgaaatttcactccttcgactcttcgaaaccgtctgcgacgattgccacgtcgaaatcaacgaaaccggtaaccattttcttaattattaatcatgtttagctgtttttttttttatcgacaaatgtttgttgttagttagttttatattagaatgttagcgagaggattcgaacccacgacctggggtgttcagacttcagaaaaactaaacttgatgaactgaactagactaaactatatatatataaaaaaaaaaaaaaaactaaactatttttagtaaaaactgaattgaattatttttctagttcagttttaataaaactatataattttaagagttcatgc

SEQ ID NO: 698 - DNA, 658 bp, Glycine max
atacgggttgaagcatgaggtatcttgtatattatagcaaacataaggcaaagctcagaagttttacagtattaaaaaaataacttaaattcgagtttcacaatttattttgaaatcataacattgatagactaaacccagaaccttaattttaagacatcaaatcaagcacaatttatgatcattccataaagttgtcctaatcatgcactaaatgtcagtgcagaaataacaagcaataactgaatagttcacataatgggattgaaaattgaaagaaaccgaccaaaaaaaaaaaaataccaatctcctgttaatggatgtcgactcatagaagggacataatgtgtgggagccagatcatggcctttatactgacgtaagtcctcatcagagcagctgagaagtctagtgatatttccaggctgtccacttctacggaaactgtgcataagtcctacagtctgccaatcaaagtacggggtgcattccgtggaaaaaatggtatggattttgggatgtggctttccagcaccatcatcgacatgttcttctttgatatcctccatcatttgtaaagtagcaggattcacatattttggctgagttaggtctgcctaagctttgcttttcaaaaagctcaagtatttaaaccatg

SEQ ID NO: 699 - DNA, 805 bp, Glycine max
aattgtggatacgtcagactcccatgcgggcagcataaggttttcagatcgttatattggtctcattgattttacaagcatggttctttggtgccttgaggtattacccccactaagttacacttagacaccttctatttatctattcttccccccacccaaatatggcacggcattctcattttttacgtggtattttcaaggaatttgataagataaaaaatgataccatggaaaatcatctcatggatttagagaacgatggccttttctccatcctggatcaggttcctcagattgggctaaccaaggtttctcgtattttctttttgtgacctttctttacttagtcataattcctagcaaaccataacaaaaatttgtgtttgaattttgcattgatgtaggatattaggaatgagtctcattataaagcatgctgatgcaaaactgtccagttgaacacattgctaattttgagttactactacaatattaccaggttagcgagttggccaagtcattcctctgggaaccatttttcccagtaaacatggatgacacggttttgcatgctttgctacttctctctaagcatcgggtgcacgttttgccggtcatacaggaacctcaagctggactcatcggttatgttacacaggtatctgctgagttaagcacaggttttgaacaatgaattgaaacaatgtatcttgttttaaatatgcttagtctttctgctagaatgcagtagtccagcaccttcttcaatcagtgaactaggagtggtttgatagcattgcag

SEQ ID NO: 700 - DNA, 759 bp, Glycine max
  misc_feature (694)..(694): n is a, c, g, or t
cttgcatgcctgcagaattatatctcttagtgtgagcaaccctgtaacttgctcattatcattgatcagaaagctgaaactgctattagtctcagtcgtatgctccattatttgcttgagcgtttcagtttccttgttggcaacgggcaagtccattctgggtatgaagctgtttttcagacggagacttcctgctgtgagtaaagccccatggtcatgttcaatggcttgttcagttactactttgtcagtctctatgtgaatgaattctttcacagttaaaatcctgctatggcatagaaacaagcaattttgtcatattggttacatcaatactgttgcctacattggcccgttagcttattttctaaaggcgaaaggcaaagagaggacatgttttgaacttacgatctatttcttaggaggtcattattctttacaagattataaacgtcgccgttccttacattacccacgagcttcttagtttgtcgatctacaacagcaactgcacaagtttggttttgccagagcaaatctaaagcatttgcaacagtttggtccccatatacacaactaggattttcttggctttcaaatctgtggaaggataagaaaggggtgaaaaagcaacacacaagattgccaattcacttttgaataagtggcagatggatgtatcatgtatgcacantaaggagtgtgagagttgaataccggaaatctgatatgttcttatctgcaatgctttcaaaccac

SEQ ID NO: 701 - DNA, 817 bp, Glycine max
acctctacagtctacctgcagttataacaacaataaccaaaaaccaaatcagttgctttgaacattatggcctactcatcaatatagaaagcttcattggaaagaaactaactttttggttttagtaaaaaaatttgataattatatcaattataattatatttctgtcattaattgtatttattaatggataatattgtttattaaacttgttatattacaacatatttaatttggttttatttttaacattgattattgtatgttatgagtattgagtaatgagtaatggcatttataagtgaaatttaaattttaatattatcagatcatgaatattaagagggcgagccctggtgcaacagtaaagttgccctttgtgaccagttgatttcaggttctggaaatagccataaatactatgttttgttttgtttaatatcgcttgacatattatattaaaaattaaaataaaatttgttaactattacaggttccttggttatatcattaaaccttaaagttgccttcaccagtttaataaccagtcctattttaaaaaccttgcacttgcatataatataagggactgaagtaagatgctgcttgcattttagtagataataatcatgactgaaaaccttaacacgtttggttgcagtgggaagtagactgcaaacataggtgaaatttggttgctgttacaggggtgatagaaagcaattttctatctacagaaaataccctgaagattactattaaggctttaaagactaagagaatagataaacctgggatttttattactcctgaaaaa

SEQ ID NO: 702 - DNA, 846 bp, Glycine max
aagtggtgcagtaggctttgcaaaatcagctataaattctaacaccttggcaccaacagaattgacctgaaccagaagacattttaagtaaatgactagaaggtaccagttatgttttttatagcttacaacaaaaaaaatttctaagatgacttttgaacatattaaatttaattttaaaatataataaaatatttagtacattttgtttaacttgtcaataaaaattgagaaaatgacacaacaaatgagcaaaacaaacaaaataccagaaatataacgtggttaaggaacaacatttaaaaccaacttaaaatttcttaaagtaaaatcaatacagttaacaatgatgtaatggtatcctaaatattttctttaacacactaatgagctacaagaaaacaatctaagatagaatgaaagaaactaaaacctcatctttagcatggaaggaatgcacaaatcattatgcaaagggaaaaataatcaatctctcttatcaggataaacaaaaaggttgcattaaaaaattaaattgttacaaaaagatatctgtacaaaaactttgcatcagcttatggcctctaacagagacttctacagttctacttataagttgtcataataaaaaaaagagtcagccaacaatttaattcggattgtaaaaaaaaaccaaagaaatttttaaagttaaattaaggtaagatttcaaaattttttaaacaaaaaaattcaaaaaatttaggggtttagccaatttttgcaaccaagggcccaaattgccttttcaatggaaaatttaccctcccttcaaggggtaaacttggccccaagcaaccaggaaag

SEQ ID NO: 703 - DNA, 703 bp, Glycine max
aacagacactgccccagataagttctcaatgctgttgtttgagaaggatacaaacaaaagtgaagtgaggttggcatagttttcagggacagaaccagttaaaccattcctagcaaggcttaaaactttcaattctcggcaataggacagggaagttggaaggggtccaatgaaatgattagtagcaaggtcaagtgtttgaagattagacaagccagtgaaattaagaccaattggccctgacaaggaattatttctaagatcaagcaccctaagcttagagcataaagccaaggtggaaggcaagggtccagaaaatgaattggcatgtgcttgtaattcttctagctgcaaaaggttcccaaacacatttgggaattccccagaaaacctgttcccagaaaccaccaaagtttttaggttagagagcttacttagatgcttggttaactggccagataaattgttggcacagactgtgagttcctccaaggctgacattgaatacaaggaatctggaagagagccagcaaatgcattggaatccaaatgcagcctttggagagaagtggcgcagttgtccaagccttcaagaccaccatcaaaatgatttacagacaaatcaagggtgtgaagatccttggggggccctgcaaaattgtgaactgaatttgccagtgaatgaaattgttactcacatttg

SEQ ID NO: 704 - DNA, 792 bp, Glycine max
tgcctgcacctaagatgcagaatcctatgtgaagctgtaagcagaagaaatgaagatgattagatttcttacagtttttaagcatagcttatgcacattaaaaagtacaatccatttaccagataaaacatgaaaaaccatccaaatttcaaagcactttcattcctgcaaaaaagaacagcatattcaagatcaacagtaagaccaaatttttttttttttgctcagcaaaaataaatattatatattaattgagtaccagaggtactaaattacagatattggattgcccgtgccaatggttccaaagcagactaaaatggagtcgggagtggaaccacagtcgggctaccccagatttgagcaagctagaattagtctaaatattactgttacatgaaccctgctgtaatgttactagaccattggttaaaatgcatggaaaaatccttctctaaattccgcaaccatgtccaaagtaagaagactgcatcatccatgagtttgttgctgtcaaaaacatcattggagaatatcagcttatttcattgctgccaaatagtccacgtgacagctatccaccaccaccacttccatcttttagccctcaatccatcagccatggctagtccatgttgtaggaaatgcatgcatagttgcctattgttctcatgaatgcttcaaagcataaggcagaatttttctgtacttgatgtctctcataataaattgtcaacaacaatgtctcagaatttaattgtggaaaagctgccttatttgtggttacatccc

SEQ ID NO: 705 - DNA, 595 bp, Glycine max
cgggggatcttataaagtcgacctgcagttaaaatgcagaatcctatgtgaagctgtaagcagaagaaatcaagatgattagatttcttacagttttttgaagcagagcttatgcacattataaagtacaatctatttaccagataaaacaggaaaaaccatccaaatttcaaagcactttcattcctgaaaaaaagagcagcatattcaagatcaacagtaaggcaaaataaaaagatgaaaatatgcatgcatatttgcctattgttctcatgaatgcttcaatgtataaagcaaaattttctgtagggactggatgtcttataaaaaattgtcaacaacaatgtctcacacttggatgaataccccattattgaattaaaaagaaagacgggaaaataaatggaagaaaaagtttaactgcgttaaatttattgttggaaagctgccttaattatggttacccctagcccgccttaattaggacttagcagagttggtgagttggttccagtgtctcgaaaaaggttacctatggagggaatgactagaaaggttgagtgaaatgtcgtagagtgtagccgccagatcattg

SEQ ID NO: 706 - DNA, 536 bp, Glycine max
atgactggtattatgatcttagtgtttttcgatttatgtgtaaaagttaatttaaaagaaaagtttcttaattatcttttaattgaaatcaatgacaaaaactttacaccttatattggaaagtagcaattggaaatcttttttctatttccaattttttttaaaaataaaacattaaaaaaattaagccttgaagagagaagtgagatactctaaataactagttttgtctgaatgactgattgaaaccattaacctggatgcttggaactaatatgttttgttgagtaagataatggcctgataagtacattctctatttatttgttcgtagcatgatctcatttttgattagttatggtctcaataaatgtatctatcaggattcatgagtgatctgtaagtcatgtaattttatacccaaaatcaatgcaaatatgagatggttcactgtcattgataaatagttctattatgcaggattagtgttgtgccttttttggaatgttatagctgtactgctgcttggattaagg

SEQ ID NO: 707 - DNA, 1109 bp, Glycine max
gacttgcatgcctgcagcactaatctttttagtttcatatcacccatttcttttgaataattaacttagatatagttaaaatataattttggtgcttcattcttttttttcaatttagtttcttcactttttaaaaaataacacttttgatttattaaactaagttcatctttttattaatttatcacatcaatttagctagcatgacaaattatgagaaacgttatgctttaaatgtgtgtttgctatattagtcaaaattaatactgtttttggcatttagaaaataaaacatgaagtgcatgtctcagcacatttttattttaatttctctaactagtaagtttgaagtatgacgtcattatttttaagtgcaaataatacttatagaaagagacacaatgacctgctggatgtggagcatgagggtttcgtctgtgagcttcttgccagcttcatcagtcacgtggaacactgcattttgtaataaagaaaaaaaaacccacacgacatggatcagaaccgagccattaacgtttgcagatgatgatagtgcgatagttatggggtttggtgttatatgattcatgcatagctcatatatacatgatataaaaactaataaggtatttaataattacaccatttcggtggatttggaaaattgtagaaagctggagaatataaaagggactcaagagggagacactgaccgtccatacaccatccaccatcagaggaaatgtatgattttggaaatgatgaggtcaagatctgtcaacacttggaccatcttcaataatatgccctttctggtttgcactatcaacctgcttttcacaacacaccatttatggaattaatctttaagtttttaagaatgaaactagaattttatatcgaccgctagacttagagtggttagacttttaaccgagcctacatttttttggtgggcgagcggttgccgattggagccgtttgtatctattccaacattacttctaattttctctactaacgcactttgtgcaaataagtggaacctttactccctgaaaaaaatgttttagattttggttaaaaccaatttcttcccccccgcagcc

SEQ ID NO: 708 - DNA, 821 bp, Glycine max
cttgcatgcctgcagatactgtgaaaaatcttatctccatagtgaacagaaacaaatgtaaggattcattttgttaatgagttttttttttttaagttgttcttgaacacaatcttacctcctctttagctgcttttctatgtatatgactgaagctcccaaacaggacaaacaattagtggtggattttacttctagttggttctttccagagatacaaatgttatgaattaattttttctttgccttctgcttgggcatttcaattatagcctgtgtctagcacatacgtataccatcaaatattacttgtattttgctatatgtggataaattgaaaaaaattggataaaaagagtgaatagttttggacttgtatcttttcatttcatgatgatttgcagttacaaactttggatggtccggaaagtggaacataaagaacattgactatttttttcaagattatttattgggtccctaaacctgaccatattaacagtattcccactatatgtgtgcgtgcatttggatgcatgaagaaagttcattatgtggattcttaaaatgtatggtcatgtttcaattgtgaaattggcgagaatgaatgttattgtcatcctagaaaaagatacttgattttatgttcttaaaataattttgtgattagttgatataactgtatctaggagtgacggtagggaggttcttttatattacattctcatgccatattttctatccgatacaaatgagtgacactgtcagcaatatttcctttcctatgcacaaattattgtgtttgaactgcgtggaactgg

SEQ ID NO: 709 - DNA, 843 bp, Glycine max
  misc_feature (722)..(722): n is a, c, g, or t
cttgcatgcctgcagaatcaatcacaagtactaaaattgacaattagtcaatgaaagagtaatgaaaccaaataacctaaatgtggcatgacaacttccaagccttttcttttctttttttcgccctcgattaactaaagtgaatcagttaatactgtagccgcttgagcatgtgttataggttcaaaatatcctaccaagtctataatgtgttagcgatgtaatataataaccattcacgtgtctttgcctaacaacttcaacttttaggatggttggttcataacatagtaacaaaacttctattaccaaggggcctagagtttgatcattgcttgtatatattcttctaataaaaagttgaatttcagtacaaggtaaatagacctatgaatcattcgtacttcaaatgcaatggctcttgttaaaactgtaatctaaaaatcatatacgtatcttcacctaacagcttaagtttttggaaaaattggttagtcacaaaatataccaaaaagaattgaaacaacttcagaaggaccatagtgagcatttagtcttgtttcattgacgcacatgccataattaaggacaatgtgtagcatacaaatattcaagagttaactgaccctctcaagttatgtagcactgatgtaaagtttattggtgactaacaaaagaaccctccttcatgccaatcaagggtgaacatgcgaacaaacagncatatatttgttgtttattgattctgtaactccacctaacacatgatatgtagaatgcactgtcccgaacaggtttttaaagtctcaactggtcatctcattgggaaaaactccatgaaaa

SEQ ID NO: 710 - DNA, 834 bp, Glycine max
aggcttccgagctcgtctctgaggaagatagctcaacttgtggatgtcaaacattgtggtaaatattgttggaattttgtaattcaataattaatgtggaataatatttgaagacaactataatatttatttatcatactttattttatgtgatgaaattaagttaactcgttagactactattaaataagatgatatatgcttaaatgaatagatgtctcggatcgattaggagataatgagaactaaacctattaggtttcccaagatatcgaaccatcatacataatttctttctctatatgaagagttatgaaggtttgaggaataaagaaactctgattattctttttttcggattgaaatgtaaattgctgttgcagttgtgatcacattgtgataattaatacgcattgtgcgctgttacttgaaattgaaaatgcagtaacgtggctaggtaattggtagtgttagtggttgtggaaatccacgaaactgcaatgcaatataattgcaaatgtggacagtgatttaaaagttgtgaaattggaatttttgccatgaattgtctgaaaatatgtttggacctcagagaatcgtttcttgaatttttcattaagatgttattccattcattgtatcctagtgcagctagttagtggaatctttacttaatatttaggattgaaataatttaattggaaaaatcatatgaattaatccttttcagttttttgttttgatggattcttgtgtaaaacccggagagtattgttgttcgcaaggtgaacccggaaatggtggtactttatattggatggagagtatgcttaa

SEQ ID NO: 711 - DNA, 615 bp, Glycine max
cttgcatgcctgcagagggaggttgagaatctactttactcaaagtcccattttcctgggataatctttgatctgcctcatcctgtttagaaaagtaggtgtcaaactaagaagcaaaaagatgaaccaatatatggttcaagatgctataatgttgaccaaaatgatgtagtgaaaaagatacacgaagtggagggatcaactaaccgcattgctactcatgctgggcacctttacaaggcttagttggccaacaggtggagttccattagcatgactttggcctgttacaaccaaagcatttgatgtttgggattgctgctgagctcgtaactttatagcacttagttccgctgtatcgacttcagtgtcttcagcctttttgatcaatgcagactgaatttgaaaaagagtataaatccatgagtgctataccatagattatcgaagtgattatgcaaatttcaaataagttgtctctgaatcaatattgcaagaaaacctgtcgttcagggaatttaggcatttcggccaatatatccattagagctgcaccttttctactcaatgcaaaatattcacagaatcttgctggatttcgaattcaatgagctt

SEQ ID NO: 712 - DNA, 859 bp, Glycine max
aaccctgaataaacagtgaaaataacaacagataattagcagaaatgatataccaattaaaaattgtaacaaaaggattgaaacctagaaatataatcttcagctaaacaataaataatccggagccattgttaaggacaaatttgagatagaatacaaaaatgtgtcaattggtcaaatctcaaactcaggtcaaaagacatagatttaaatacaatatttgtatcacgtaggcttggtccctcagcacctttcatgccacagccaagacaaggggcaaaaaagaaatggaagatctatcgaccaactagttgaaatttcttgtcaaaagaaacctagaaattttacttccactgaagaaactaaatgagtaattttgactcaattgtacttagtgacatcatttacaactgaatatccactaggaccatcaccttaaatgaacaaacacaaatatctctttactcctttcctttgataagttcttttaggccctccattcattattaaagaactttaaagtcatttgtctttcgtttctattcttttaccaaagaattttccccaccaaatgaccagaaaacccaagatagcaatgaaaaaaggcacttacagcccattcaaaacagacatgttgtaaaaaacaacacagaaagagattaggggaggaaaaaggaatcaaggaacacaatagaaatatggaacccaccaactttttgcatggttgaccttaaaaaaaatggcttggcataataaaaaagggtcaaggcctttccaaaatttcttaattggggcaaaaaaccggcttcaaagttcaattcttttggtcccttttttaagtaaaaagcaatttttgggg

SEQ ID NO: 713 - DNA, 754 bp, Glycine max
tgaaaaatgaaaaggagggtctttctatggttttgttggaagaggccatgcacttgtttgcatatcgccaacaggtgcgtttgcttgagcttcaagttttccgcttgcaacaatcccttttgctgcgtcaacaaccagagggagatggccatgatgaagaaactactggtgttgcatgggttctggccttggttctttcgttgggaattggagttaccactgctcttgcttgcagatactatctgtgaatagccactctgctgtgattggaatttggaaccgttttgagacacagaagacgatctgcatatacaattttttgctttatatttatttagacacaaatataactgtaacctagttcgtgctaatcgacttgtaatcaattctctcttccggctcatttaatggataaatacaaccgtattgaactgcttttgaacacataatgtagagcttgcatagcagaaaagtcacaacctatatacaccgtgcaacttatattagaattagatatacaagtaagaagcagaactgctgtgatatatatacattagtttaagaaagctgtacaatttgctacttccatgtacagtgttattatataccgctaggcttaattacaagtctcagaaaaatggtacgccaaatggcaatttatatggggtaagtgtatagttcttaaatggtcataacagtcattactagtactaaagaattttaaacaaccccgcagaactgctttccgcacttg

SEQ ID NO: 714 - DNA, 735 bp, Glycine max
atggtcaagggaaaagatcaattttctaaccattatacatcatcttttgatggaaatgcatgcttattgattgatgaggcgcggcaggaaaaggctaatagtcatatgcagcctgttggtggaccaaagctctctagcacaagcaagaaaagaacaagagttggtaacaaccaaaagtcaaggccaagagatagacagctgatcatggacaggatgaaggagttaagagaacttgtcccggaaggtggtagggtaagtttttatgtttcaggaaaagaagttaattatttgatttcccttttgtacttggtgaaattttttaactttggttttatgatgtacagtgtagcattgacaacctcttggaacggaccataaagcacatgctgtacttgagaaagataacaagccaggctgagaaactgaaacgaattgccaatcgggcggtaaggctcgccatgtttctggaaagtttaaatttaatacaaatgttatctcctagactaggaaacttgttttgttttgacctataacaacttttggttgctaattgcaatccgttgtgcacaaaagcttcaatttgtcctttaagccaaggcatttgataatgggtaacaaatgacaagaaaaggaaatgcaaagaaaaaatgtattaagtgtatttagaagagcttatttacaacttatttgaacttattttatgacataagcacttgtgttaaaacagtttaacct

SEQ ID NO: 715 - DNA, 624 bp, Glycine max
  misc_feature (613)..(613): n is a, c, g, or t
agaaagatcttcacaagaaatacaaacaaagagatgacatagagaaacagattagacctgaatgggagcaaggaaggaagaggtcgagaatagatgatgccacctatgaagagagagacagtaaacctgctctttatttgcctgggccaataccaagaacacctttgcacaaggagctcggagtgtttttagaggaggaacaaaggtcatccgaagttgacttatctgcaaacgaagaagagcaaaagcaggaagaaaaagaagagaagatgaaaatgccagataataatgacctagaagagaagcttgaagagcataccaaatcaagtgttgcattggatgaagaaaactcaattgagcaaagacttcagaagctcaaaatcagcgaaggcaagaggagttatggcatttcattctcaggtcttcataagacagcaactgaggaagatgaagaaaccagaaagcaacgtggaagagggaatgtggagaagtggcttcaaatgcttttagagaatggtcaacaacaagaaagaactgatccactagaaacaagtgaaaatgcttcttgtggaactgaagaaaaaattaatcccacaacctgaaatcaagaagntccccacaaaa

SEQ ID NO: 716 - DNA, 825 bp, Glycine max
  misc_feature (766)..(766): n is a, c, g, or t
tgctttttcttttgcatttctctttaaagggtcactgccctcatcctcttttccccttttttttctccactttcttcttcatctctctcctttcctttccatgtttcattattatattatttctctttctgggttttgttggtttggtgtttttcttatgaaaagtctttgtctttctggggtgtctggttttggaaattatgtctgtgttctttttgaagtgttttaagtttctcgaggtgaagattcttatggtcttattattatttttttgttgaaaaatttgatgttgaaggacacgagagtcatggagttcattcgtgtcacaaatgtggatggccatttccaaatccacatccgagtgccaagcacaggcgtgctcacaagaagatctgtggaaccattgaaggttacaaacggtctgcctccgagggacaaccccatttgaatggctcagatgatgaacatgtttctgatgatgatcacaaaacaccaggtgaatttccttcttatatgtagtgctttaactttaatactgagaaatactaggagatgaagtaaatctaactaacttcgatgctgagaaatactagaaaatgaagtaaatctaactgatcttgacttagtgagattaattttaattacttttctatatgtatagacttttaaaattagtactacattccaaaacagaaggtttgctgatttgttgctatttattaggtttgggtgtgtcaggtccaaaatccttggagacaggcaacantgagaagggccaatgaaggaatggagaaaattaattagatcagagatgaggtgttttcg

SEQ ID NO: 717 - DNA, 833 bp, Glycine max
agcaaaatgtgctggttgtttttttatgtcagtctcattctcaaaataaaaacataaccaccaccaccaccaccctttttttctctctgtgtgtgaagagattctattgctatgcatgcaaagagagaaaaaaaaatggctttggcagaactacgacaatggagactgtaaaaaatttttggggcaaagtgtggttgactggggattttatgaatccacatgcaatctcattcactctactaggattcacagaagcatgtgggcacgtttgcataatattcatatgcgggcttccacatattcaaaacacatgtctccacgtgcacacgcacttttatctaaagccctcttgtaaagtttaatttaaaattgtcatttataaaattcttttttgcaacatactatacggtcattaaggataaatccaggacattttgttttttaaaaataaaaataaaactgattaaatttatttaaaagttttttttaatgttatggtgattagagtagttcaatatctcattaaaatttcgaatactttgatttttatatattgtgattttgtaaataaaaatattatattaagtgagatttttaaagtaatttttataaaaataaataaacttataatacatattaatatgtgattgaatgataatataaaaaaaaaaatattgtggatggattttaagttaagagtttcataggtgaagggttccggtgaggaatggattttgaggaaggaatgaaccatggcaaccgggggaaggattttgaaaggttgagggtaacgaaggtggcattaatgggggggaatttgtaattccgtttgc

SEQ ID NO: 718 - DNA, 887 bp, Glycine max
acccggccatcctctatagtctacctgcagaaccatcttttttagatttagattccaattctacctagcatgcaagaattggagcactgtaaaccattctcatctgtaatggttttgttgtggagtttctcttataaagcccattttgttattggtatttttgaggtatattgaatcaatggtaaaatgatggcacatgaagttgtctcaaatatcaaattaaatgctttgaaaaaagaagatggggatgttaaattcaggcttctctgcttctcccttctatacttgtttggtgaactagtagtgagtaaatgattgcgatcatgtgatattgctattgctgtatatacctcctataatgatggattgtattgtgtgcatcagtttatttaataaatttaggaatctttatatgcctttgttttttatactattttctgttcacaatctatctatgcgtatcaattacaggaatcaatcagaaattctgctgattgtatgctgttaagtgctccagattcattggtagtgtcaataaccaaaaatcgtgttgacggtgatgaggaagctagcacagctggtgttttgagtactcctcgtcaaagtcatgccaatagctttggaattaatggccttgatatgctcaaattcacgtataaggtcattctttagttaatttattgtgcctttctaactgaattcctatttaagaatatgagcttccttacaaaaaattataaatggatattggaaatttggaattggcaggtcccctttggcctcttgaactattgcaatacagaggcatttagaagttcaccagtgtctgcctgctttgggatttttcctttttgcttggatttaatctttatcatcaatatgagggg

SEQ ID NO: 719 - DNA, 737 bp, Glycine max
  misc_feature (606)..(606): n is a, c, g, or t
aagccactttcattagttcgcttcaatgctgtagactgactaaattccttgaggtccatgctaccagcaatgcttggacacaatgccagctcacacttttgaattgaattcacacctccatccttggcatggttgttagacttacaaaaataatctttattatcggattgttgcagatagctaacattcccattaacaagaatgtcatattctcgactagcatgagaagttgacgatttatctgttacttgtgtcttatcattcattagtggcaacttcaaaaattttgacaagttacctctccgttcggcaagggaagttgatgatttcttcaacggtagagaggctgactgagaccagggatgtgataacttgaccccaaggacatctgtactgttagacactgttttaggagtagaatatgatgtgattgacaaattagaaaaattagacaaacatgaagatacaggaatagaagtcaaaactatggaggaagaatctggggacacttctgacaaagactttgaatgagggctagaatcagaagaaatggaatctggagaaacataagacggcgaagaggatgattggaattaacccaaaggnaaatggggaaaatggggggaaaaaccccccggcatgaggggaacccccaaaggggggggggggatatttgtgggaaaaaatttggggaaaaaaatttttggggggggggggaaaagggggaaacaccccca

SEQ ID NO: 720 - DNA, 815 bp, Glycine max
aaaagaaaagcatgatcttaaataacaaataagcaaaggatactaaccatgactcaaactcttcaagggatgcaaaaatatcaggcaaaatgaagttcaacagagaccatagttcagccaagttattctgaagaggagttccagttaaaagaagcttgttttcaacatttatgaatttcaatgccttcactaatttgcattgtgagtttttgagtctgtgtccctttaaatgagaaaaatctagttagaacaacagaagcatacagattacagactattaattagagcattactgagtaaatacattgaactaaacagaaactttttgcacattcaagtaagcgaatttatttacctcatcaacaacaatatatttccaattgtatgacctgaaatatttcttggcatcatttaaagcaatctcataagaagttatgactatgggaaattccgggccaattgttctagtaggcatatgtttcctccggatctcatctctctgtttcttgtcaccatggtagataacagcagggagtgatggtgcaaacctatttacatttattaaaactaatgatcaccaaaatataaaagcatgcataataattattatataataattaagcagccaacatcttcaacaaatcattttcctatctacctagaaatctcgttcacccagtttgagagggttgattgaggagcaattatcatgtattgcccatccagaccttttcttttagaagggaaagaatccattgttggattgcttcccaggaccattgatcagaggatccatcatcttttgcccaggaatc

SEQ ID NO: 721 - DNA, 908 bp, Glycine max
tcttgatcactaaaagtaccctcagccatatgtttgtctaacaaagcatcctagtttgccaacaggtaaaaaaagaaaataaaatgagtgatattgttaaacaaagcacaatgggatatagtgaaaatcaactctgcaagtagaacattgtgcgcaatttttcaaaatctaccattaatcatagttctacatagaaaaaacaaacaattatatttataccacatttaccaatatgtggacagtgaggggaaaaaaacaatagaacggtaaaaaagttctttcaacatgcaccttggccacaaatatatctcgacaccattgagcaacagcctcatctgtatctggcagttccttcatcaaatgcctcttgatatgaacatgcacctgtggaaagaatatcacagatcctcttcatgaagttaacaaaattaaatcataaagtaaacataatagagcttggtggtgaagggagaagggaggggggggagaggtcgtcttgggtttgaatcctctccactaacaaactaacaactaacatttgtcaataaaaaaattaaatcattatgtttcattttgttatctgaagaaagctatctcctttatttttcttttttctgactatattttttagcatgcttctactgaactaatgaaaaaaaaaatatcattattctccccactttctatttggtagcagagctctggtgcataccagaaccatgggggaaacaggtgtgacaggagcccatcatggctcaaattcttctgaagagccaggggtccatcattttctaccacttaactcaacaagcttggagatgaatggtcccggtcaatcaaacaagaatctgggtttccattgcattttaagtatttcattaaaattggaaagggcaaaaaaattattt

SEQ ID NO: 722 - DNA, 830 bp, Glycine max
ttgtggacaaatctgtgaaaggaaaaggtatacatactttcataagaagagatacataaaaatttcaggtaaatattattgataaattcatatatgatagaacagtaaaaaatatttaacatacccaaactaggccttttcttttaaaactcagaaggctagcttcaccaccagaaataggaaataagtttgcaattggtttgagaacaaaaccagatggccgagacggtacctacaatgatcagatagcttagctattgataactatttgtctatttccattcaaaaccacagggtttaaaagtgtcagcattaaaaaaattctactgtattaactgggattacaagtcaaaagttagcagtggaataccccaaaagcagacatgaataagcaaaaaattagagaacagagagatgccatataaattaagttgttcttaaaagagagagatgtgattcagtaactaacatgaaattaaatatgaaactgcaattgctaggcacttgatgtatgaaaaagaaacagaaagccatcactcagttaactttgacagttggcaagtcacatacatgtagaggttgaagggaaattgatggaagatgcttgaaaagcctcattccaagaaacatttctaattgcttttgacgagagctatccacaactgcattcttatatcttctttgcaaagtgattttcacattttgtgcagcagaaaactgtttaaactttcctcccgtatcttcattgaaatgctaagtatttggctgtgcattgctttggattcagtgtaaagagtagcatgaatatccccagcagtaggaaaaggcag

SEQ ID NO: 723 - DNA, 792 bp, Glycine max
aaacttaaacaaaggctaaaatcttggagtaaagaaaagagtgggggtcaggccagcaaggtgaagatcactcagcagaagctgaatgaactggagaattctattacagctcaacctactgcacagcaggcccaagatcttaagcaactccaatctgatctttgggagcaaacttttcttctagaatctatgctgcgccaaaaatctagatgtaaatggctcaaggagggggatagtaattctgcttatttccataaaatcatcaactctagtagaagaaggaatattttaagggggatgcaaattaatgggggctgggttgataaccctatagctattaaggaagctgttcttcagcattttaaaagcagatttgcagacccgtgtctgtctggtcccaatttagatggagtatctttcaaggctttgactattctgcaaagtgagaggctggtggaaccttttaaggaggatgagattactaaagcagtgtgggcctgtggtagtgataagagcccagggcccgatgggctaaatttctgctttatcaaacatttctgggaggttctgaaacctgactttctcaggtttttttcagaattctatgttaatgcagctattcccaagggcctcaattcttcattcattgccctcattcctaagaccaaagacccttaactcatttactgatttcagacctatatccttaataggaggattttccaaaattatttgctaaagtcttaagctattaggcttagcaagggttttgaatcaccttaattggtgaaa

SEQ ID NO: 724 - DNA, 788 bp, Glycine max
gaatagtctccatatgtcgatccctctcactcaaaaactttgttgagttgtactcttctgcatctaagagttcttcagagtatgtcctctgaagttttgacttcgatcgttctttcatgattcttaagctctcttcttcccctcttagtatatctaacacctgcatccaatcaggaaaaaaacataaacattaaaagcttttgtttatttatttattttcttggccaaaatcaaacacaggatcaaagattaatcaattttgcagctgttattcctatacatgttagggtcatttgtagagaaatgaatacataaggggcatgcctggctcataaccggtcgctgaattgaggactggtctacacagagagaagctgttaaggttacaagcttcatctgctcttcatcataagcatcagccaaaactggatccacaagctctttgatgttatttgcagttagcaaaggttttgcctgcaataattgttttgtaaaagggtagattaaaattagactttaattttctatgcactgttagtgtaaatatcttctcactgtcgaccaattagaatttataatagttagtataaaagtaacaaacttatcttatatgtcaatcctattagatgacatggtagaaatcctttatcctatctatttttaatattaaacattttccttgtcaagatgattaatatacatttagtatttggtttgggcaaaggcacacatacccacatcaccagatttttttgggagctatccaaagctgtcgaccagtaatgagc

SEQ ID NO: 725 - DNA, 802 bp, Glycine max
  misc_feature (782)..(782): n is a, c, g, or t
aaataatactaccttttatttttatttataccattcaaattagtagtaattgtttcttttgtattaattatttccaactaaaatatccataaataaattgtactaacaattgattataagaaagatgattattaaggataatgataattttaaaaatataaatttaaaatatttaattctatcaattaaattaattattattttaatcataataaattagataatcaaatcttataaataattagcgtcagcttgactgccattgatttgtgagtaggaaagtaaaaaagttagcatggaccgtgatagtgtctaccactttgaggattgaagtaattatttaatgaaattaaaataagcccaacaacaacaattaagataaactttaatactattatatattatagaaattgagttatacttaaactggattttacagataagaatgagaagcataaaaatgggaaggaaggaagtagatattaaagcagaaacgtcagcagtgatgaaaacatagcccctctgacgcacagaatgacgaagacaaaaagcggattcctttcctatataatataataatagacaatgagcaccgtgcaatcagcaaccaaaatgactcaagcccagattcaaccagttaaacttggaacccaaggctttgaggtactattaactacattacttgctcttattttgataattgatacaattaatctcattctaagtttcaaaattgggattccggatgtatgggccttactggagcgtacaatgaccctctncaagaacagatgcatatctg

SEQ ID NO: 726 - DNA, 869 bp, Glycine max
caaattcgtaactttaaatttactaactttaattatttgaaactcttatatatattttccaaaaaaattatttttttaacagttttataaatagcccttgactctcaaaataattgagatcaaataattaaattgaatttactaatttaattatttttttataaatactttcttgaaattaaaaatattatgggttaaattaataatttaaatttacttattttaattatttatactgatcataaatgctgagttgaaattcaaacttaaaaaaaatattgtgaatgctttcttgaaattgagaatagttaggattaaataattatattcaaattgacaatttgaattatctaaaaatcattgtaatgttttcataaaatttaaactcttaaaaatattttagatactttttaaaatctgagaataataacgtgtgaattagtaaatttaaattaaatgattttaattatttgaaaattgttataaacttttaaaatatggtataaatgtttaattgaaattcagaatatttaaaattaaatagttaaatcatatttattaactttcattgtctgaaaattgttaaaaatgcatttcttaaaaattgttttatcagacaataaacgtgatatctgatcaaattaaattaacattaaataatattatatagactttcaatcacttaagtatgtattattaaattaacattttttttcatttcatttacgtaatttttgttttcaattatttttttacatgatattaaattaatgatttttcataaaaagtaaattataatgaaaataatggaaaagtatttttttggataaaattcttttattggtaatttcattttggatttttttatt

SEQ ID NO: 727 - DNA, 930 bp, Glycine max
ccctcttttgccgcatattgtgatgttttactaactattattgatttcatcttactttataaaaagtattacaaacagtaaatttgatatcacttttcaatggatatcaataatttcattcgaataaataattttaagtaattagtaaaaaaataaacgttttttgtacagtagtatttttgtaaaaatacatgtatagtgacttgagataaaggcagaaagggtgtaaattgcttttagaaagaaaaaaaaaagtatgtgtacataacagtttgaaggattatgcggtacctgaattgaacgagcattgaatttatgattagcttagttgaatttgaaccctcaagcactagtattaaattttaggaaacttgaatgttgttggattttggacgtatatgacattggtaagtggtaatggctcctctgagtctgaaacgtgttcgcaaatcagcatgcgaaatggacaaaaaaacacatccaaaaaacggcacaacagacagtttacttgtaacaaagctatgctttcgaaaaataaaatgcaataaataaaaacacccagaccttccatgcgctacatttgacctttattcttttatattaaccttaatcactcgtaattatccgatttcatgagtttatttaactgaagcagttgcagaatattaataattttgacataaaaaatagcagtaatcggtgattagaaagtgaatagagcggttggggggaagttgaaaagaattgaatgctgccggcctaccatttcatttgcggttgcccaggtgagaaccctcctttttctgtgggaaaaaaaagaaaaaggcaaaattataactctggtttcccaatttttgccccatccccttaaaggaccctttaaatttgaaaatataaggaagggccgttgtttggaaccctttaaaaaaa

SEQ ID NO: 728 - DNA, 1537 bp, Glycine max
tttttgtttctcatttttttttggtttttgactaatcctgtttctttcaggaccataagttattcttaattgatatgctccactactgtctttttcttataaaacttttatatttaaaaaatatttccttcccatttgtttcctgttacgtcaagcatgtggggtgcttggtataatggtaatctggaaaatgattgggaaacagtgttgcaataaagttgcagtagcagcacaggtggatgaaatggcatgctttttagaatacaataattggttatgatgtggcactgatgttgacactagtactcagcaaataagtcactgagctgatgttttggttgagtggttgaggagtcagatgttgacaagttgattaggatggttatggcaacataatgatagataatgatgagtagtagtttaagaagtttactggcgtgttaggacagtggtgaaagtcatgactaaaatgccattgcagttaaaataagcataacatattgaaggggatgaatagtacgatggctagtcagtaatgatactcattcacaaaattcagtttggaattaggaagcatttagtttgatcggaaaatgaatatgctattgccttagtatgtttattgggaaatagaatatgtttgtctctgaagaaaaatatgcttccattttcttgaatagaaacttattaatcaaaaataagaaaaacaattaagccctgtattactagatgggggttgccctatatgggatcaatggacatcattgggctctacaaatcaaattttatataggttttcctctacagttttaattggattatgttccatttaatccacttttttaactaaagcctctattaatagtcttcttctcatatgattgtgtgtcctctccactccaactctctttctgagacattcgatcctaaacttatcttctctctgttgtgtctccttgtgatactttttatctctcttcttttttaggtaaaatgttgcagataatttgtcatataatcagaaaattatctacaatgctgtcattgcaatacataacatataagttcactattattgtactggcctctgggccctatgaatttttggtgataggtccaaatgactttaaccttgtctaactgtgatatgaaaccatggattccattggctttttccaatgtagaaaatagaaattcaataaggcagcatgcacccctgatagggactctgttgaggttttgaggaagtagctttgtactgtgctaccgtttaactgtatgtagactacttgtatagatgggaccaagtaggatttgggatgctgtggatttgtgcttttgctgttagattacttgtccaacaatagattttttgcttgtctttttaaaggatatagaaacctacaggtccagcgttaagtatctgttttgccatcacttgcagtttggcaaagatattacttacaagttacatgattcacttttttaaaataatataaataactagagaatttgtgggtgttgaattcttatttgt

SEQ ID NO: 729 - DNA, 713 bp, Glycine max
  misc_feature (666)..(666): n is a, c, g, or t
acaatagagaatttagtggcatctctcccttcagaatctcagaagttacctttggaagataaatccaatgttgcgacaaatacaaaaagaccagcaccatcaacagggggatgtagaattgatggatatgtgcgtgtcaagaaggtatactcctgtatgggtaaaattaaccttctactgtaatgtagaaaaaactccagtgctttcttgttttcagtgtgaggatgaactaagattcacgttgctctggaaataactgatatgtttggttcctaccttgtttttaaattgtcttttgcttttaatagaagctttagttgttgatatcaaaataacagaaataaattgaataggggatatgacctcatattatgctgaaatttaagctattttgctctctgtaggttcctggaaacttgatcatctcagctagatccaatgcccattcctttgatgcttctcaaatgaacatgtcacatgtcataaaccatttatcttttggaaggaaagtatcacttagggtcatgagtgatgtgaagcgcttgataccttacgttggtagcagccatgacaggctgaatggtcgatcatttatcaatacacatgatttaagagcaaatgttactggaagttaatgtttaaccataaaaaacctcttaacttagntaacctttttttaatttgaagaaatggtgaactttttttattgggtt

SEQ ID NO: 730 - DNA, 782 bp, Glycine max
agcatcctttgttaataagttagaaggggatggacgctttactgctgccattgcattgtatgttttctcttatctatatattgagatattaactgctacttgtcatttcttgttccttgatattattattattattattattattattattactattattttttttgttatagacaatgcataaatgatcttttaactgaattctcaggtctggaaaaaatgagatattaactgctacttgtcatttcttgttccttgatattattattattattattattattattattattactattattttttttgttatagacaatgaataaatgatcttttaactgaattctcaggtctggaaaaaatatgggtttaagcagtgcaagtgacatatcacttcttctgcttgcactaacatgtattgctgcaattgctaaacttggtccgtcaagagtttcttgttcgcaattcttttcaatgatcacagagatatccggtagtttgatggacatgatggttggtttgattcctgtaagtcaagcatataattctataaaaaatattggtctgcacagagaatttcttgtacattttggtcctcgggctgcctcatgtagagcaaaagagaagtggggttcacaagaggttgttttctgggtaaatcttgctcagaaacagctacagcaagctattgataaggaaaaaaatatggtccaggattgacaacatctgaaagtattgaggttagttatgttctatttgaaaaaggcatggttttgacattt

SEQ ID NO: 731 - DNA, 832 bp, Glycine max
agtgaagagaaaattgtacatcagaagttggaatagaatcaaaacattactcacagtcactagcaatatcaatccatttacagagaaagagaaattttacaatataccaaaaatagtgcttaatttctctaaaataagcaccaaatatcttgatctgtgactattatcattttggcaattttgttacacactatccaattctcaggtttaagttacacatggctcaatatttagggacaaaagagtggtttggccaaaacaaaagatattacacagatatggaatatccattagaattttagtttcgatagtaagcacatctaatttctgatagctaatcaacatacacacacattgactttcttcaaaaaaatcttttgcagcagtcttcaatttccaatagtgacttatgaggacagggtgctactaaagcatatagactgattcatcagcctacccattgcaaagcaaggaagaagaaaagtctaagttttctatgttcgtaaactgtttgacatagctaattacatcaaagatatgaaaaatatatgttagcaatcaaatcaaaagaatcaacaaacatttaaatttcaaatgaatgcataacttttttatagaacatggaagaatcgcatgaacaaacatctttagtagacatgtaaagaattcgaatagctgacactaaaagcatgacttcattcattcaacagaaggataaaaaccggcaatatcagccaatcacattgacagaacaatcattgccgaatagcgaccccaaaagcatgattttattcctttaacagaaggagaaaaaccccccatattacccaat

SEQ ID NO: 732 - DNA, 791 bp, Glycine max
cttgcagacatcctcacgtgtccatgagtgatcttatcttcactgttggtcaaggtcgtaattgtaatttatggcttaaagatcccactgttggtaatgttttgtgcaagttgagccacatagaggtagactttcctcttttatcttttgaaacttaaaatgaactgagtaactaatggtccatctgctttccagctttattatgacggaatagtcatttctaaaaaaaaactattttaaatgtttgattaaagatattattgaaaagaattaatttttgttcggttatggtagatgcttcctaaaaatatccccactgaagaaatttacagttgagcatttctatgtctttcaatattacttaccggttgttatttggactctgtacagcgtggaggctcatctgttgcattacttgaaatcacagggggcaaaggttctattcaagttaatggcaagacatatcgaaagaatgcccgtctgattttaagtggaggtgatgaggtggtctttggttcttctggcaagcatgcttatgtatcctttacatatggttcacagggaagactttatctgtttccccttttagttcctgtttctctttccttcttttttttgcaagcatatgtggtcacttttacatattttcaaggatattagctagtcatgtgttctgggtattcattataaattggctttttatttttccatttcctaaaatttctttttattggagctatttatggggttcctttaaatatttggaattcaagatcttttcaggcttgctc

SEQ ID NO: 733 - DNA, 789 bp, Glycine max
accagataacaatattcgtggagacactgatgagaggtcagaagcatattttccaaagcccatgcacttcaaatgaataaatgtagaagcaatcaaaacgctctttgttgtatcactgtataatacaaaacatcataagcaagtagccataaattaactcttatctatctcaacccagcaaaatagcagcaaagaatatcaacatagctacagttcacatgtagttcaggcagcataatcaagagataaaacaataacaagtagtggtattcaccttagataatatgggaaagtttcaaaagagacatcaatattcttagatttgagaattctctgttctaaactgtccctaaatgcttgtcgcctggttgatgccaatattgttggggtatcaacatctttaaggagctctcttaattcccttcgctcctccaatatcttggtaatgccacaacttaaatcaagttcaggacatgaaccagcaagcaagcgcagtaatggcctcaattcatatgtagcagcagtaaccttcctaacatcggcatccacattgatgtcgacttctgctgtgtcaagactaggattttcattaacaggtttgtcagcagagcaaacttcagatgctacatcattggtggcatccttcatttcactgattggcatatcatcctcgttgccagaaggtagtgatgaaatgtcagagttctgttgcaattctttccagtttagccaggagtgaaaggagagataaatctttaggaagattagataaggaggccaatatcgatg

SEQ ID NO: 734 - DNA, 788 bp, Glycine max
cttgcatgcctgcaggtgtcagtaagttttttttcttaaaagaaatatcctatattacttgtgaccaccaatgtcaaccatcatagcaagtaccaaaagttttaaaacaattatagatggtatcggtgtgagcagccttattccttacaagtaaatatgtaaactacacagtttattaaatgcatagtttaagaaaattacattttatcccacatgattcatgggaaaatatccatgctcaatctactggtagaataagaactgaacatgcagggaccatgcagtcttgagataggtgatgacttgacaaaatcaaaagaaggtgtttattcatatgaaatatatgagtggaaaaatgcttgcctctttctatgaattggctgctcggtaagagatccattaagtggaatactttttcactagccccaactgattgcatcaaattggatatattgtctcccacccaccaggtagaataaattaaccattcactgtataatataaacttggtaagtttctcggctgtgatatgacctgctagaatagacattcctccaaatagcacagcaataacctatgagatttaatgtttcaataaaagcacaagtcaaaaataaaggtttaactaaacttcaaaaaaaattattgattacaaattccaagcaaaattttttttccaagagtaaggttatttgatttaaaggggggaaaaaaaaggaaagggaaagaggatttaattggaacatttggatttaaaaattttccctggaatttttttggaaaacccc

SEQ ID NO: 735 - DNA, 931 bp, Glycine max
aaccggaacatatatattagttagttacgttacttacacttgatttgattaaaaaattagaaatgaataaggtgataggtaggatgcacttgcctccatggtagatcttgtgcgagaagccagtcaccttctttgtccagataagccagttcatagttgtttgattgttgaatattacattttccaaacatgtccatcaaggtttgcttgagcgtgtgaaatgattggtgcatgctgagatcaaccttccgtgcaattcccacaccctccatcttcaccttcacgtaaacactatgatgacgatgatcagcaaccgataccatgtgattattattattattattccctacaacctcgtccacacgaagtttcttcctccaatgatagtttactggtggccaacccactacagactcctcctcctcatcatccctaaatattaattaaacaacaataatagcgagttaaacacaaatattaacataacgaaatgaagaagagaagtagaagctagggcctagaagtacgtacttggtgatgttagagcattgactgtggtgatcatcatcatggtggtggtggtggtggtttggggttagagggaggagagacagagtaggaagcataacatggtcggtgagggtgctttctggtggtgctgaatggtccatcatgaggagttgggagaaggtaccttttttatgataggtgggattgattgggagagcgagagccagttgaagctccatctgaggccagccaaaaaatagtatgaagcaatgtggttgttgggaatatagtatgggtttgggaaaaaaatagaaagaggcttaaagaggtgggtatgaaggttttaagtagtttttttgagaaaggagaattgtattagggtccggcgggtttgggacaaggggtgggggacaaggcttag

SEQ ID NO: 736 - DNA, 728 bp, Glycine max
cttgcatgcctgcagatttttaactgtgaattttgtcctggtggtatgtctgaaaattaaaaaaaaattccttatagatgaagagtttggtcggggctctttacctgacttgaatcaagatcctttttcaagcattagtgtttctagtggagaagattatgcttctgattcatctgatggtggcaagacttcgtccaaaaggggaaagacactgctgtccagagggaaaagaaaaagtttcaacacagaatatggggatccgagtgatgtggttagagtggcggagtacaaagaagatgatgctcaatttgcaatgtttcagcaactatcagttccctctgtttctaagggtactaagaagaggaaatattcaagaaaaggaagaaaaggagattcaaagccagtattgttgtggaatgcatgggaagaggagcaagagaaatggattgatcggcatatgttagaagatgttgactcagatcatcagagtgaggtaatgaatgaaactgctgaggcgccctctgatctgactatgcctttacttagatatcaaaaagaatggttagcctggggtttgaaacaggaaagttctgcgagtaaaggtggaatacttgcagatgaaatgggaatggggaagactgttcaagccaattgctcttgtccttgccaaacgtgaatttgaacaaagttgtgaaccagatcaatccataccatgttctttcagcctg

SEQ ID NO: 737 - DNA, 814 bp, Glycine max
agacaggaaaggatcctgatacctccaaagaatttcctcataaaacccaaaaaatgatccctaacagactccccataccttttaagtattcccccgaacaacttcctaaaatttaggataacacagtaacaaacatccaagataatcagacacttagaattacaaagtaaagataacaacttccttaatagatgaaatattcctaaatctgttgcttcttattcctatttcctcctagagtagacattccaaaccttgggcctcctactttgccttgcttgttgggctctatcacaattcatcaatcttttgtctcccttgagagttgttttctaagttgagattaacgggctttgtgaaaacctatggaaatatttaattttaattgctgtggagggttattggaccatcttatattgatattatccttatttaatttatgctaataacttatgtgtagtttgtatgtacaataggaataggggaatataataaggttaaaacttgaaatggagtgttttagcctctatacctaggactgatggactgccagattctgaacaggcagctggaaaattgttgttatgctgtttgatttcaaacacttatgattcctggtgttattattagttacagaatttgtaagatatttttgaaccctttcctgaaaaaccatgctattccaaatggattgacctattttgcaactggcttgaagggaaaatattggcatttaatcatggttcaagggcccccttatttcaaattcaagggatgggccccttcatgtggaattttttttaggatataattc

SEQ ID NO: 738 - DNA, 821 bp, Glycine max
agcttgcatgcctgcagtagactgaatagaataagtgaacctattttatatttagcaacttaacaaattttcctaatatgaacacatattgtgcagaagatgcatacctttgagaagaagacagctaaccatccagtaatgcaaaatcccgttgaaatcctcatagcctgtttgtcaaggaaagtacacacggttcaaaatgtatagttttcttgtgtgaacacattatatacagcacaagcaattaaaagctgaaagtaatgttagaataacttcaacatagacttcatttattaggaatttattagatttgacatacccctttgcggccaatgaaatctgtaatccggccgctggttatagccccaagcatagcaccaatggtcactaatgaaccaaacatggaaaactaccaatccccaaaaattaaaaaaaaaaaatcagaagagaaatactactattatataaatgtgagtgagaagggaaaactagaatactaacctcagcaagagatagactgagatcttcccttatagccgcttgagtgggcgatgaatagcccacctgcgaaaataattaataacttcaacttaacatagaaaaggtgaaaacaaacacatgcagtgaactgtattttcagaatgcttctttctcaagccatagataccaagtttttcgcttttttcttttcttattttcacttttccataggtttgtcactgaaaacatacaaaacagcatagactgtgaagcaattataatgttcatgtgcttaaggatacttacacaatttccaaatgtgaaagacccacaaacggaac

SEQ ID NO: 739 - DNA, 858 bp, Glycine max
gcatgcctgcagtttcaccttcagttttcaacctccgcggagaaaaatatttcaggcatgtcagcaaattgtatctgtcaaatcttatgttgttatgttatgcaatcaatatctattaatcatttgatttccttttatttcatcagaaaccttgatattattaacttagggttaactaaaaatttagtcttaaactttttagaaatttgatttcgtctttaaattttgttttgattggtcaaggtttatcaattttttccattaaggtttgtaatctcttaaactttttgtttgaccggataagtttctaaacttttagaaatttcagttcttaatctctgaacaaaagtttgagtcaattatttttatatatttaataagatttcaaggattaaaaactgatttttaaaaaacaaattgagactaaaaaccttaatgaaaaaaacttgaaggacattgatcactcaagcaaaagttaagaaaccttgatccgtcaaatagaattttagaaactaaaaatcaaatttaaaaaaaattaagaactaaaaacttaattaactttattaacttattatatatgattataatgatctaactgtgcagagataaacaaaagtgtcctgctccagattttagcccttatataccaataggtgttgatttatttgcgtggtccccggaaggtaaatcacattgctcagcatctagaacttccttctgtcaaagaacatgagaaagtaccctccctccttattgttaatatacaggttcactctccatctcaaaccacatactttctccttctgaatttgacaacttcaccctgtaacaatgttttaattgaagttttttctggtt

SEQ ID NO: 740 - DNA, 658 bp, Glycine max
tgaagacatcctctcaagaaggtctatggtgtgtagtaggtgatttcaactctataaggcaccaagatgagagagtgagtgcagctcagtttgtgggtcctgacccgagcatttctgaattcaattcttggatttcagagatggcattagaggaggttaggtccattggaaggaaattcacttggttcagacccaatggcagtgccatgagcagattggacaggttcctcttatctgatgagtggtttctgcaatggccagattcaactcagtttgtgcttgatagggatttttctgatcactgccctattctcttgaagtcaaagaacattgattgggggccaaaaccttttaaggttatggattggtggttgaaggacaaggggttccagcagctagtggagcagaaatggggcaattaccaccctcctggttggggaggctttgtcctgaatcacaaaataaaacaccttaagcagagtattaagagctggagtttgacaaatggggaagctaatgctagaaaagtccagaatattaaaaaggagctgaatgatttggaaactggcttaattgatagagctccatctgaggaggaattgattctaaaaaatcctttcaaggtcaattgggggatgcagcttatgcttatgaatct

SEQ ID NO: 741 - DNA, 838 bp, Glycine max
cagctttatgcctgcagaaataatttctagtttctacaaaaaatgttaaaattttgcactagcattagaaatatgtgggttagtattttaaaatcctgactactaaagcatcttctctgttgccatttctcttttgcttagtgatctttttgtctttccacattatttctaggtttttaactgttgattctttctgatcaatgttcagatcataacaggttcggaggatgggacgacacgaatttggggtatcattcatttttcagctcaagtcactaaagttgaacaaactacattaatcatatttttctttttatgaattaattgattattgaaatatattggtatagagttattgggtacttacgtttctgtggcttatttaccacatttactagattgcaaaagtggaaagtgtacgcaagtgattgatccagcaagagatttgaaattaaagggatctgcttcttgggttggctgtgttgctttagatgcaagtgagagctggttggtaagagcatatctcgtattttataatttccttgccacttcccttcatatttttgctctacaaatgctaatttgataaaagaaatatgaatattcagagtcagacaaaatgttgatcgcttctgggcataactacagatgcagttggtgtgatgttatgagaactaactgtggtggaatgtgccacccgttttgctgttttccagcctccatgtttaagcccttgttttccctttggtcttctgatcttctctagtttagagtaacaaatattatattgtatgatgcaatatattggagacaaatttttaacctataattaattaaa

SEQ ID NO: 742 - DNA, 784 bp, Glycine max
  misc_feature (692)..(692): n is a, c, g, or t
gacgttccgtggcccaactgacacccatcttgatagccttgtgggtcaagccttgtttggagatggtgcagctgctgtcattgttggatcagaccccttaccagttgaaaagtctttgtttcagcttgtttggactgcacagacaatccttccagacagtgaaggggctattgatggccaccttcgagaagttggactcactttccatctcctcaaggatgttcctggactcatctctaagaatatcgaaaaggccttagttgaagccttccaacccttgggaatctctgattacaactctatcttctggattgcacaccctggtggaccggcaattttagaccaagtcgaggctaagttaggcttgaagcctgaaaaaatggaagctactagacatgtgctcagcgagtatggtaatatgtcaagtgcatgtgtgttattcatcttggatcagatgaggaagaagtctatagaaaatggacttggcacaactggtgaaggccttgattggggtgtgctctttggttttggccctggactcactgttgagacggttgtgctccgcagtgtcagtgtctaatcagtaatcatattttgtcaagacaacaaatctttcttttttcatatgtattggtggctgatcaaggcttattctgtcttttgattttttttccctgccctgccttcatcanatgcttctttttgtataccaataaataagaacttgttttactattaattcattttaagcttacacacaagtaatctatatttgcagttgcaa

SEQ ID NO: 743 - DNA, 801 bp, Glycine max
actgtaatcagaaccattagttttatccatgtacagaagcattctgtaacgcaatggtccctcaaataaatatacctactctactatccatcccctattctattattaatactattagcccacaaacaccccactctctcttctactgttacatatacaatacaaatatatatattttttttctgaattcttgacactttgttgatatttctttcagtaaagagtttttcatcattatttaattacaaattattttataccatcagtttattgatattggtaagagtcatgttatgaggtgcccccaggataatcaagttaaagaattaaaaaaatattttttattgtaaaagtataggaaaacacaagaaaaatcagacacttgaaagaaattacaaactgtataatttacacatttcaataaaaaaaattctctcgtttcttagtaagttgtctaagaacatagattaacattttcctttttataaaatttattttcatattaataataaatattttttattaatggtatatttcttttactttgataagatataatcattaaattttatttcctcttggtatatgaaatgtttgtttttaaataaattgtaaagttattataaattttctatgacattattttaaatactcacagattacaaatactcgattaatatttccttttttttttctttatggggaaaaattaaaacaatgttataataaaatttataataacttacctaatttatttaatcaactaagttataatccctttagtttcattttttctctttt

SEQ ID NO: 744 - DNA, 731 bp, Glycine max
atttaatcatgtactcagtaaatttctatataagacacacccaaaagaaatttccagtaaaaatatgcagcatatgaaatttaatttgacaaacatttgaaaaaaaaaaaagtcattagaaataagaagaaatagaatacatgagaagaaaagacatcctcattagcagaagcacaaaaaaagaaacagaaaaatcaaacaaacaagtcagaaacaataaaggtctccaatctcttcatgcattatttgctagagacaacctcttaaagagaccttttaccaagcactagagaggtcaaatggaaagttctgtcccaaaacagagttgtttgttagttgaaaagcctccttgccactccaagaacagcctaaatagcacattaatatagaactattccatcatctgttgtacaaaaccccagaagttgagtttagtaaactgatccagatggatcaagctataggacagcatcacctaaaatatgcctagaaagagcaagttttgtagcctgtaggtctcctaatttgcagcaaatcattagaatatgattttattgacatctgctaatgaaaatgaaaggcttaatcttggagggaaatacagaaggagcatttcactttattttttagagggagggagagtgaagggtttatatgaatattcactagggctatcaagagtccacactcgtctattggaggtagaggacaaatgaaagattctaatgttg

SEQ ID NO: 745 - DNA, 998 bp, Glycine max
tgcatgcctgcagctaatttgccatccaatttaaacaagaaaaatgacacaatacacgctcatttctggataaagaaggcggaaaagaagaaagagaggaagaaaaaacctaaaaaaatgtgataattaaagtgatatgctcgaaagagaaggagatgaaatattatacaggtatatgaatataattttgtgtaaaaaaattgttactaattttaatgctaaagatgctgcttgatgaatcattataaaaaatacataaaaatacacgataattcttatatagtatcatggtattttaaaatgtgtacaatgtattttaaatgttaaaatcagagaattcaactacacatcaacccgggtttgtactcccaagaaaaaatatttattagggttgtttggcacagccatttttgtgcacgtgttgcttataccttttcaactcaaatattcatatttaatggatagaaaattcataaactaagctggcataattgttggtattttactttattgattatacacggaaagtggtagacagagcctattaaactatatgtataattaactaaaagaaacccaagatgatgatcaatatgcataaaagcctaagatggatcccgcgcccctaacaaagacaaatgggtgttcccaactcatgaaaaatggggtgaaaaatttttccaaaaaccctgttgacccaaataatcccccgaaaaaagcttcataaatgcccttgtttcgaaaataggtaaggggagggcaaaagtaagcgtttctttttaagaataaaaagaaccgtttataagatgaaaattcaggaaatgtgtgcatatgtgtaccattcgcaatttccaagttaagagggaaatgtcctggttgagcccacggatttttcaaggtcctaaaaaccctcttttataatagatttgagaacaaaagagctcgtctgttatttgctaaataaaaactgagagtgatctggtgtggaatattacgtg

SEQ ID NO: 746 - DNA, 867 bp, Glycine max
  misc_feature (783)..(783): n is a, c, g, or t
gcttgcagcaaaatgcaagaatcatagaataacatatattgataataagcccaaggcttcatatgtaagctaaacatcaacaaacaagtaaatgaaatcatttgcatgctaccacaaaaacataaaccttccatggaatccttattagtatattacctgaccccaacaaaaaagtcagcacttcaaataaaataaaaccagtaaaagcagaaatgaaagatgtaagcaatcagctatgatcatgatggccatctttcaatcctcttctccttgggttttgtatgaaaaaggggaaggggattaatagcattcaataaggacctctatttgaccaaagaattattaatccacaggagatttgtaagaagctatgtttccctacttcccagcactttcttattcccttcattattctccaatctgaatgatactaccaaaaccatgaattcttaatttactcctttccacaatgactataaccttactctatcatgtatgaaaaggctttaaaaaaaaaaaaaaaaacacaagtcaattcacagagatgaaggaacacaaagtaaaatcccttataggaaaccacaaaaacctatggagaaaacacagtaaacttaaccatcacaactgccccaagactctcccaggaaattccatgcacaaaaacacctgcaacaaaagcgaaaatctaatactaaaataaccccaaaacacactaaggtgactacaattcttcaaaatgaccaaaacgtatctagatggcacaacttgtagaaactaaagcanaatatctagatgggtgagagaaaaaaagaaaggcagcacatcttaattccttactgattcaccactgagaatcatgtaagtttg

SEQ ID NO: 747 - DNA, 837 bp, Glycine max
aatcgattagtgattgtgaagatgcggagagacaacggtgatagctaagataggtatttagttaccattgcatattctactctatcattttcctcttcgttcataacacaatcaagttaatgaatgaattattctcctacgttcgaagcagaggacatgcttaataggttaaacagacgcttcttttgcaccgttgctccacgcccttggctttttgtggggctgggcaaccctggcgagaagttcaaaggaaccagacacaatgtacctttccttttacttctgcttctgcttctgtttgcagtttgttccaagttttagttatcaacatcaaattgcatagaaagtgttctgtattgtaaggggggcatagttagttttgaattagcaattttgtggtgaaatatgaaaatatttatttatttatttttggtctgagtcaggttggctttgagatgattgatgcatttgctgagtcacaggggattcctatggacactgtccattccaaagccatttctggaaaaggtttgtctgctgctctctgtttctcttttgatgtttcttgtaattcatgaattttattaggcaaggtggtggtttgttacaggttttgttggtgaagttcctgtttttcttgcaaagcctcaaacttacatgaatctcagtggtgaatcagtaaggaattaagatgtgctgcctttttctttttttctctcaaccatctagatattttgctttagtttctacaagttggtgccatttaaaataccgttttggtcatttttgaaaaaattgtagtccacctttaatgtggttttgggggttattttaagc

SEQ ID NO: 748 - DNA, 847 bp, Glycine max
  misc_feature (701)..(701): n is a, c, g, or t
gacacccatgcgagttggctgtgcactagtcctttgactagtcttggtgaacactacaatgttgacgtcactgccatgccacttgtttgctgctgagagacatgatggaaaactctgatacctatagataataaccttgggataagtggataaccacaccacaaaagctatctgttgtaattggaaagcccaaagctttataaacctcatactagaatcttatattttcaatgcaagacttaagtctcataccttgcaattggatcctaacagggtgtcagatctacccacatctgaacatctttttaccttgaaggcgctgccatcagatctcccattgtctgtcaagtttgttgtctctcctctttctccatgctctgaaattttcttggagaatccaatcatataaaacaaagttggtattattcaagggtatataaaattcattttacaagatcatttggtttctcatacttacggaaactgttgttgaattcaatttcctgtattttaaggaatatgtgctttgtcatttaccattattgcactggtgatattattcctgcacgttcttaatgagaattcgtgtgtgcttttgtgtacgtttatcaaatgcctgcctctttgtgtgtacctttctcctgacaaatgcatgggtgttaaatggatataaggccctcataagatcccaaggaattggntgctggccttcatcccctggtggttctggatggccgaatttacttggatgaaagttggttcaagtaaggccaccaaaacttttttgaataaattttattttttggcttaaaataaaagagattattttttttgggtttggatggaa

SEQ ID NO: 749 - DNA, 774 bp, Glycine max
agtcgatctgcagactaaccactcttaactttgatgaattctaaaaaataaacaatgatgccaggaccaatttttcaatccactataataataataataataataataataataataataataataataatacaaggccatctggttgatcatactatattaagtgtaatacaaggccctaattcttcctgacccgaaattcttggaaaacttgagcatgttatattaacactgataatgacactactaaaagctgagtgtcacgggattgttaaccattttaactttatgataaactctaataacaacattaagaatgctaccatatcagaattttcaggccttttgcatgatactacagctagtgcaatcaaatacaagacaaatttatcccctagttcttctagatctaaaatgtatcgaaaaattatgaatattatattaacacagaatgacatttctaagaggaagattttaatcatatcaatacaaaatataattaattgcattgttgaataagcattgtgcggatttgacactcacctgccccaaaactaacagagatcagcttgccttctttaaacagaaactctttcagaccagtaacttgtatcctctcaagtacctctaaccatatctcttcaatttctttatggtttttacccaaaatctgcctctcgctcatcctaatcttatcagtggtttgtgaatgaacatgttgaggagtaaaaccagacacgctatgtcgtttttttctcagaaccaaaaacccct

SEQ ID NO: 750 - DNA, 853 bp, Glycine max
cagcttgcatgcctgcagaaaccaataaagttatgtaaatagctcttctttttatctaatcttttaacttctgttgggaagtgttaaagaccctcagtccagggttgttaatggaatgtattgaatccattgattgcctgaattaattgaaatgtgtaaacttcttgtaaagtcggaaaaaatactgttcagaagcagctgaatccttgtaagtgatcattgattactaataatttatgattattggttaacaacattttttgttagaaaacacgcattagtccattaatcacacgataaacatttttactgaataactaactcattagtaatttatgtagagactagggtagtgttttgtaaacgagttatatcaagacacaacataatatatgggctttattttatgtttaactcattttaaaactaaaataaaacacgatctatgaattttaaaaggagacatttttgtttctccaaaaaggatgaatcaaataaaatagaatagagtcactctattatttagaaatgagaaaaatacaaaaaataaaataaaatcgtataggtacatctttgtcgatctctctgatgattctccgagtgcaacagtacaaagtgcatctcaattgtgccctactttcaatttgcattgttttacttggggtaccaagtaaggtggcattgcccttggtgctcaagtaattgattaggccttggaataaagcatttatttttcctttatgctcttgcctattattccaaaataataaaaatcttttgatttttccctaaaaaaaaaaaacccgcactaactttggttacgttagcttggtaaaatacttactcttgaaac

SEQ ID NO: 751 - DNA, 811 bp, Glycine max
actgaccaatgccaagtagctggtcattgggaacagaaacagttacacggattcctgtgttggcaagtgcaagaagtaacgctcggtcagcatcatagagtctgacatgttggatactttgagccttcagaagagaaactatctctgttgaacctggcatgtcagatatatctgaaccaatgttgacaccaataaaagcatctgttgaaaaaaaaaaaggagcctatgaatgaaggactttcattttaacacaagagacttagtggaattgagttatttacaagaaaaatgaggtataaaccctcaatctcattgtaaggcaaatcaagtagatcaaataaatgtagtatatattcagaaaaaggatattaacaatctaaaagaaatcttcagaaacaaaataagagcactatcggaacattaatcagagatgcagaagtaaaatttatgttttagcattctttaccaccatgtgcatacccttttctaggtcctagatttctctagaaaaaactcagaacacattgaggatgtttcatatgataatcagtgacaactccacatggacacgggggttaccatgtgttcccacaacagaaatttgaagcgtgacgtgtaaacaaacggttggttttcccatgggcccctaaagggtcaagaactcttccctgggtaatggcctacccaaacggacaagccggggttttaaggaaaaaaacttatcccctaagggttgagtttaaaaggccccccgcgtttccaaggggaaaattcccaaagggggggtgtttttttatacaaaggccccccc

SEQ ID NO: 752 - DNA, 827 bp, Glycine max
gaattggtcacccagggctccagtttcttggtcatcctaatggcatgacccatggttctgatctgaagaagaattcatctcaaagtccccgttccatatttggtacaaggaatggacacttctgtgaggtatgatttttcttactacttcaatatcaatataatataaccattagaagttttacagctcttcggtattgtaattgaggattattgactgaatgtcatatacacgtaataactcaagttaaaactgcaacctgtactgcacaatgatctccaatatcccattgctcagttatgccattacctgttttaatcatctttgtgaaaatgacatcaatcatctaatcattaagttatagatagtgacaaactataatcatagcaacacgttgtttatgatttcatattatggaaatttttagtaatatttcaaaggcctgcccgtgcaaagacacatgcatattatatgggttgataccacccaaattgaactttgaaacaaattatgctcattgttgtattgacccatgctatgtataacagtatagatctgtatagagatggcttggataaaacatttttcctgtaaacctacatggtgaaattagcttttacaatgtctgtatgagcaaagagttttaaaaggtgttatgcttctactctaaaagtgaaaaaagcagacaatttaaaggtgcttaagttttaaaccttactttaatgcttattcaaaccctggaaaagttttcccagcctttccccaacaaatgaaaatgggaggggtggcaaccaaaaagggggatcccctttatggtttcaaaaaac

SEQ ID NO: 753 - DNA, 1366 bp, Glycine max
  misc_feature (895)..(895): n is a, c, g, or t
  misc_feature (1161)..(1176): n is a, c, g, or t
  misc_feature (1179)..(1181): n is a, c, g, or t
  misc_feature (1216)..(1216): n is a, c, g, or t
  misc_feature (1219)..(1219): n is a, c, g, or t
  misc_feature (1222)..(1223): n is a, c, g, or t
  misc_feature (1236)..(1236): n is a, c, g, or t
  misc_feature (1253)..(1253): n is a, c, g, or t
  misc_feature (1261)..(1261): n is a, c, g, or t
  misc_feature (1264)..(1267): n is a, c, g, or t
  misc_feature (1269)..(1269): n is a, c, g, or t
  misc_feature (1272)..(1272): n is a, c, g, or t
  misc_feature (1282)..(1282): n is a, c, g, or t
  misc_feature (1313)..(1313): n is a, c, g, or t
  misc_feature (1326)..(1326): n is a, c, g, or t
  misc_feature (1342)..(1342): n is a, c, g, or t
ttttcttgtttcagtcatccatggcaggtttgtactgtgtcaggaaacatttatgtaatgctgcttcataggaatgccactttcaaaatataattggaacttgaccccgaggcacacatgcacatgtcataaaggcacagaaagaaaattatgcgtgaaattgaaaacactttacagggactcaagttatgcattttgtagttttacctagatattgagacatctccttcacgttcaggcatgatataattgctcagatatattatgcaaaaagacttgctgagaagcttcatccagtggctagaatggtagatcttcatggaggtcatttagtaagtcatgagcggtctgaagaggtataatttgcatatatgtaatatatgcttgataattcgagttaatagcacacaggcaatttgcatcctgtactttgcctctcaggatgcatcactggttatggactaaagcatttcacaaattcaggttaatcaagcactatttgacttgatcaaggcatcaaaagtgaatatgagcccacatgattggactaatttgccaaagaaagagtcttgtaagtattccccattgaatgttttagattttcttgcacttggcaattcagcatgagctcacactactcatgccatgactgttttctgtagcttggtgggctgccaatgcgtggtaataatctctaagctccaagcagagacatacccacgttggtggataaggggcagtgtccccactcaaatttactactaccatacatgatttgctattttttacctgagcctaagaaggttttccccgaaacaaggttcctgggtaaattccaatttttactaaccacagccaattcctgtcttcaggagtccaccctactcctcccttntcagtagcaactagcaaaacccaatttcattcattagtgttaactgataattggttctgtacatggtcagatgatttatttatcacccaacagccccaagtcttcccaaagcacagggacatgtttcatcagtgcataaccagtcctagatggacttactggtgaattcttaagagaagaactagctctgatacacagcaaaacaaaaatgatagtcaaattaccattgttttccatgaaaaacttgcaagagatatctctacttnnnnnnnnnnnnnnnnttnnnaggcacgctcgcctaaaggccccccccctttaggnttntanntttaatatatatnttagatttgtttttggntttttatnatnnnntnatngttttgtatnatatgtttctttatttgaaatataatacatntattaattttaantgcttgcaggcccatnttaagtaagtgtttattggaacgt

SEQ ID NO: 754 - DNA, 737 bp, Glycine max
  misc_feature (665)..(665): n is a, c, g, or t
agggattgaacatttggagctttggggtgatgctgtgaaatggggctctgaatttaggttgaattcctcggaggaatgttgcatggcttgtaagcgaatgtgtagcggtgatggaggaccttgtatgtgtaattcctgggtgtattgtggagatagagaggcttgtggacctagatttggtgaggtactgtttcttttattttattttgccactacaagatttaattttatcttgtgtgtcatgtgatttaggacattcagcagtgttgattggttcaggcaaatatttatggcttcacatgtaatgcttatttatcactattgtgtatttttcattggttatactccccattgtgagatctagcttgagattcaatttgtatgataattgtaccctaggggagaccccaatggttgtgaattgggttcttcatcttggaggtccgattttcttttaagcctatgagcctaaaaccaacctttcttattctcggaatcttatgatgatgctttcaattttcgcctacttgcgattgggtttttatatctttatgttgggtttattgaattcttttttttttaacgatctggttattgaatacttgatacatggtgaactcttagagattgccacaaagatctatttggatggatataaatctagntggcttaatgcctctgctttactggatgtactcatgaaggggtatgaattatgtcttgatggggaagtttgg

SEQ ID NO: 755 - DNA, 844 bp, Glycine max
catctaccttgtttctcatccaataacaaaagcttttatatagtgtattccataacattatatttttacaatttggtgcatttggttggagtgtaactctagtattcttgaggaggtttcattgacaacacttgctttatgatagattaggcgttcattttctatctggtgtttaggacatggcatatttaataatgggatttccctagtagatattttgagtgactggacagctttgttgcattggtgttctctattttctttgttgctttttgtttgtttttttgcagaggagaattcctcatcctcctttttcttctttctagtttttccctgtgttgcaatgaatttctttttaattataaaagaaaatacttataaaacccaaacaaaataatttgatagagatacatatcccaaattggtatatgcagtatatgtcaattggagaactaactacaataaattatattcctacctcttccttatcaaagacaaacccagaagtccacataactagatctccggagtctcgtcgatcaggatttaaggcatccttttgtttttttaaccaacactgaaacaaaagcaggaaataatattaagatcaagtacatctaaaattttatgcataaaaacaggaatattccatccttatacaattgtacatttgaagcataataaactacaccagcttaaagagtggatctttacaatgaagtactattacgcccaaccaaacttcccaatcaagacataaatcttaccccattcttggataccatccaattaaagccgagccttaagccactagaattatttccttccaataaaacttttgggc

SEQ ID NO: 756 - DNA, 1477 bp, Glycine max
aataaatgatttctatcccaatcccctgtatctcctttacagctctatttttccttcctcaaatgcaatatatctaagaatatgtttctatgaatagacaagacatttactccaaatattagtgtaaatgtgttttcaagataaagcacagttcacaactttacgcaaataatatgtagctgttttcagtgtcagtacataatctaacaagaattttgacgtgattttatgtatccatagagatcaaagttagatggaaaggaatacaaataaagaaaaaaaaaaggaaatacaatgaaactatatgattgttatatgaattgagaatttaaaaaatactcacactaagaaacagactggagatgaagagccgaaatatggttgagatctcctcaacgtctttagaagccattcttgtataagggcttctaacatgtaatttaaactttccattgcttccctcctggattgcatcaactacggatctagaactgagaacttcaggatcaaacagaacatccaattcacctgaaaccttgtcaaaatgaaactgccttactccttttgtgctgctaagaatgccttctaaaacttgtgtgtcgatcagactgtacacaccaaccacccctaaaattattttatcctgctcattgctttctataaatgaaccatcaaaaccagaatcttcaattgggttgactatatcatctttactaattacactgggatcatattcaacttcacctgataaagtagccaaagctacaacagcccttttgacccctggaagattttcttaaaataccttcaacagaatttacacatgctgcacatgtcatacctccaattgtgaactgtcccaccagggtttcatgtgcaactgtactggattcaggtaatatgtctgcttcaaacccagcatcttcaattgcattttttatgtcttcatcctggaatatgacagatttgaacacataactcaatatctatcaaatacaagcttccagtactatttcacacaaatcactcaagaaacattatgtttttattcaattaatatacgaatatagctggctcatcatcacttaacatgcatcagtgtaacaataatattgcatacttcagtagtagcagaaccagatggttgaaggaatcctgccttactgaccaaattatgatatctcaccacaaaagcaataatatgcacaaagtgaatgagttaaatgagaggaagatagatatcagttaaagttttaggaatataaattatcatgagtcatcgatataggaatgtacatgcagtagaaaaaagctgtgagaagaaacttcacatcaattttactcaacatcataacagaaaacattacacaggaataacctgtaagtctgtaaccgaagagcccgaaaaaccgtgatttcatatcaaaataaaacacacacacacacacaaaaaaatccactgcaggcatgcaaactg

SEQ ID NO: 757 - DNA, 867 bp, Glycine max
aagctgaaatttatgtttcagattgtgatccttataaaggaagtgtacagtattatgaaagactgagtaagagatatgatgctcgtaatatggatatacgtgctggtgagaattcaaaccgaaaagctttggttcccattgtatgcattaacttgcttcgaaatggggaaggaaagtcagagtcccttttggttcaacatttcgaggagtctataaactttattagatcaactgggaagcttccgaatactcgggtccatttgataaactatgactggcatgccagtgtgaaattaaaaggtgaacagatgacaattgaagggttatggaaacttctaaaagcacccactctatctataggtatatctgaaggggattacttgccttcacgacaacgaataaatgattgtcaaggtgaagttatctacaatgatgattttgaaggtgcattctgtttaagaacaaatcaaaatgggattgtacgttttaactgtgctgattctcttgataggaccaatgctgctagtttttttggttgcctccaagtattcacagagcaatgtagacggctggggatatcacttgatagtgatctggcatttggttatcaatcgatgaataataattatggtggatatactgctccactgccacctgggtgggagaagcgttctgatgccgtgacaggaaaaacatattatatttgatcataataccagaaccaccaccatggatgcatccatgtcctgataaaccatggaagagatttgatttgacatttgaggagtttcaagaagatcaacccacattttggtcttccctgtatatctaaaactagacttgacccttttttcccaacctttggct

SEQ ID NO: 758 - DNA, 804 bp, Glycine max
  misc_feature (665)..(665): n is a, c, g, or t
gtaactgacacctcctttgtcactgcttggacagtcaatgagtataaagctcttgatagttcctttaccctacaaggaacaaagtaaggaatttttacattatttgaaccataatggaatataatcttaataacttaaatttatttgttgagccattatgtaaaaattatctgtagggaataatttgcttattgttagtttgctgcacctgccttatcagtcttcctcccgagacttctactatagatgtcccaaagccaaatactggctttgtgaactcagccattatgttgatgttgaaatcccttgtttcagtgagggagctggtccttagtaccacattgggtttcataggatctatataaaaaaattagctattagtttagagttaaagttactaagagaagtgattattaaaaggttaaattaatccatagatcttgaactatttgaggatttctaattaggtcttcaaactaaacacatttgtaattattgatcttgtaatttactaaattgagtctcaagaatttttaaaacggccacaaattctcattttctgacggtttcaagctgccatacacaaagttaagggatccaattacacttttttacaacatcaaggattcaattacaaatattttagttttaaggacacaattaanattttcaaatagttttaacaacctactgattaatttaaccttattaatatcataagcacagatgatagcataccataaaggaatgtgatcggagcaacaggagagacaggagtgcctgtctttccaagtatggatgcag

SEQ ID NO: 759 - DNA, 867 bp, Glycine max
  misc_feature (733)..(733): n is a, c, g, or t
  misc_feature (810)..(810): n is a, c, g, or t
agcttgcatgcctgcaggatgaggggaatcgcaatcgcctcaggaattcaagttatcaaacaaaatgagaggcagaaagagttccaacttcaaatagatagctcaatgaaattaattgtagttctgctgtatttcatttttggtttacctttgtatcttcggaagcattacaattttatttgaaatgtaaaattttgtttttccatgtgctggacctttagacacattgttttgattcaggaaaagaatgaaaaatatctatagttagccaatatccctttctctccataattaagaaccaaagctgccacaccacaccatagtcaccttgcattcaccttcttaataccctcatttgaccttgctaaaagcttaccattagagagaacctttatccataaaacccctactcctctaacagttatgcctccattttcgactaagcttctgtcgcaatttctcacatccaactataacttgtcacaaaactatagtacgaccaccataatttgcccgggctcttgtaaatcgtccacaccatcaccacattgttctatttagtattcatagaacctttatcccgcataaacaaccgcacagttcccccttatgttgtgccgaaatccataaccaccatgaaactcctgaaaatgtacttttgatgtaataggtaaatcacacatttacgcattcttttaaaatggtgtgggtgggtgatgattggatgattcanaaagtgcgggtttcactctgatttacccgaaataaatgaatcattcagactttcacttaacgattctaatttaagtngaacgtataattttttttattgtaggaaatctaaatctaagctccccacgtgtaacc

SEQ ID NO: 760 - DNA, 823 bp, Glycine max
cctgcccagacttctcagcagcaatacagaaaatttgactaaacgtctaaacgaagaagatttcttaaagtaatactaatattctaagatatactacgtagtaaagaaaaatggtgtcaataatactaaattaatcattaagctgccgcagcaattattaaactaacataaattaaaatataatgaagaacgtgattcatgtaaccgacaaaactctctaggacaaaacctagaagttaaaagaacgatgacagtgataacgaccaaatgaatatcaaatgcagcattctcactcacataaatcattaaaattgagattaaaaaagataaataatgaagattgaagagtacgctgcaatgtgatcacacaattaattatgatatatcattatattattaaattataaattgaaccaccaagcaaagcaagccacacaagccaagccaacaaaaatggctcagaagaatgagaaccaaaagtagtgcacaaagtttatctcaaaagctagagataaaaataaagaaatacatataagcataaacatcactaagatagaaaaataggtaatattcacaatgtacaggtggaagaatattgtatgttgaggtgtcaacaggaccaatgagttttggatataaagccatcaactggggacttcactctgaccaccatgataggaactccaataagcaaaagccaattgatacgtgcatatcacaaaactactcttaaacacacacacccccccaaaaaaaatccctctatcacccaaacttcaccctaatttcctcaaactcaaaggcccctattagtcccccagcc

SEQ ID NO: 761 - DNA, 845 bp, Glycine max
ccagtttgcatgcctgcagatttatagtactcaatttttcgattttgtcagaaggaaataagttgcgtttgatagtttcagaaacacgtttgtaacctgtaaggccaacatttctcaggattttaattcctctagtccttgcttgtgcatgtatctttgcatgaattggaatataatgactacttaacatttctcaggatttgtattgactacatttatcaaacaattgatacgtttaatcagggtgcactatgcaccaaaggcagaacgaaatttgaattcaagcatttcaaagattcaacataacattgagaggcagcttaatctaaaagcctccgttagtatggaaaaggaagagcttaattctagctcatctctccttccacgacactaatgggatttatagaaaacataaaagaaggttacaaagtttcaattaagatgaaacaatctcaaagttatgatcccatcttccaggtcacagcaaaacttttacctacagggatattcaaacccttcaaccctaccatcaatattttctctccatctccctaccaatacaagtatttatgttcagttgtgctaacttgcgcatttgagatactcattggtggttctccatctatctcaattttaggtagtgctccatttcggttcaatcccaacacatttatcgtgtcaataacccaacctttatctaaagcaaacttgccctcttggactcttaaccaactttcactgctccatctaaaaaattatttcgttatattttcacctcagtattattaagagatatgcctagtccaacaataatgactcaaagttggggaaccatttacattgca

SEQ ID NO: 762 - DNA, 790 bp, Glycine max
atatactgtacctggtgatgaggcagaagggtttaagtatttcttcagggtgtcaaagactacttttgaatacatatgttcccttgtgagggaggatctcatatcaaggcctccatcagggctcatcaacatagagggaagacttcttagtgttgagaagcaggttgcaattgcccttagaaggttggcatctggtgagtctcaggtctcagttggagccgcctttggggttgggcagtcaacagtttctcaggtgacttggagattcatagaggcgctggaggaacgcgccaagcatcatctcaattggccggatttcaataggatgcaggaaatcaagcttggttttgaggcatcctatggattgcctaattgctgtggagccatcgatgcaacgcatatcatgatgacccttccggctgtccaaacctcagatgattggtgtgatcaagagaagaactacagcatgttgttgcagggaattgttgatcatgaaatgagatttattgatatcatgacaggcttgcctgggggcatgtcagtttccagattgttgaagtgttcggcatttttcaagctatcggagaatggagagcgtttaaatggaaatgtgaaagcttttggtggagatgttataagagagtatgtggttggtgggtgcagctatcctcttcttccgtggcttatgactccttatgaaactaatggggctaatggcatatcagtttcacagtctattttcatcacaaacatggagctgcaaagctacttgctgtgagggcattctcac

SEQ ID NO: 763 - DNA, 806 bp, Glycine max
aacaacagcagttgatgataatgccaagccattcccaatgacaatagcagcagggccagcttgaccacaaatataatgagccaccaagccaacaactacagcagtcaccaaaacctgcattttttccatacatgctaagaattgttgactcgggcattactagcatataaataaaatagcctaagtgaacaacaataacaaggatggaagatggagttttcccatcacctgagcagagcctaatccaaagacatatttcttcattgaactaagcctttcaacagagagctataaaaatacagttcagagtttcagtttatttcttactacaaaaatgatcaaagctaaggcagaacaagatcttataggaagctccacctccaggccaatattgaataacaggaaaacaactccaaactcggctattgcttttgttccatgaacatgacgaatgatggagagaccataaggcccaatcaagataccagcagccaagtagccaagaacaggactgcctaaacattgttgcaggtagatgacttgtcagacaatcaatttgatctagttatgatttaaaataaatcctgtatcccaaaacataattcagatgatgattggaagcctgtgacaagataaacacttacttctttatattcaattcaagtagccaaattttcttcagcattgcacttcattattatcataatcaactaataatgcattatcatatatcaactacaaaggtgcatggaaataatggactaaaaacagagttatcataacaaattatgagcctagatttaagt

SEQ ID NO: 764 - DNA, 1421 bp, Glycine max
agctggtcagcttatcatcatcgcatctgtttgtatattgtagaacttttctttcttttctttgttttcttaagtcctactaataaatgttctaagagcattggttaaagaattagtgaatagaattgtttaattgaaaatcaaaataaattgcattctaaattgttttgcagatgatactttcttttgagcttccatttgctttaattccactccttaacttcagcagcagcagtaccaagatggaacctcacaagaattccatgattgtgagttgtctttttccctcgcctatagaagcatactgttttagttgtggttaaaagaaggattgatttttatcccagtatataatagtggccactagccattagcaagaatagagatattcttaactaaagattgaaaaacaatgtgacataattttggtgcaggtcattgtcatcccatggatactaagcttgaggatgattggtatcaatgtgtactacctctgtactgccttcgtgggttggttaattcataacaatctaccaaaggtggcaaatgtgttcattgggatcatagtgtttcctctaatggcagtttatgctgtcgcaataatttacctagccttcagaaaagacactgttcagacgcatattgagacaaagaacgaaccagcaatgcaaacccacacggaaagggggtttacggctaatggtcaattagagttgagtcaagttacctacagagaagatttggctgatatccctccacctcaataggaggatatggtctacaatatgcatccttatgagcatgaatcgtcacattcctttcaagtcattctaatagagttaggagattttgctttatttaaaatttgacattttgaataagttctagatggtgtttttgttattgttacaaattttatcttttatgttatgcttctattagttaattagttaatgtaattccgaataattttggtgacaaatgagattgtttaggaatttcacattaagtttaagctcgtaaataagcattaaaatattaaaacttgcggagaattctcctcgagttgtcacccatgtgcttgctgtgcgtactaggtacaaaactattatgtatatgttatggcgaattttataagaaaaccagttcagtgtaaccccacgatcgattcaactgctcttgaaaattttccataatcaaaccccaatagtaagtagctttatcattttctacataataacggaagtcatgagtgaaggtaagatcgtacggtttgtactcattacatccattttccgagtaagtgaattgtgttccactctttctgttctttctcccccgcctcgagtttcatgtttttaggcaaactttgggcatccatgacacaaactgcaggttgtatataaaggatcccccgggag

SEQ ID NO: 765 - DNA, 759 bp, Glycine max
attttaagtttgatcacaacacaagagaattcaagtgaaggacaagaggcagaaattttaatgtataaataatataaggaaaagaggatggaaaagaagaatggagagaaagttaaccacacataaaagagaactcattcattgtaaattgttgcagtgaatgacacatcaaacaaaataaaattatgatatacctctgttaatccaaccatgctaagttcaggatgagtgaaacaagcagctgggatgcttaaatgattgagcacgtgatcttttccagtgacttgttcaaccactgttagacaattttttcatcaactgatattgctgcataaactaaattttggaaaagttacatcagttaccacttacctgaaattccttgtgcactggcagcatgagcaagcatcatcttgccatttgcatcaccaatacaatataaatgaggcacctatcattccacatcctatgtcagtaacaataagtcagggagggataattattgcatgagaaattgagacaaaccagcttgccattcgcatcaattactcgcatgtgctcatccactggaacaaaaccacgctgtgttaccacatcaatctgtaggtaaaagttaccaaaaatatacaattacttcctttggagaaaatctcctaatcctaaagcacatctctgtcggaattgcttacattctccaatccaagaccttgtgtgaacggagcccttccagttgctattagtgcagcatccacctgtaac

SEQ ID NO: 766 - DNA, 687 bp, Glycine max
cccgggaatcttctaaagccaccctgcagatgaccttccgtttgaattgaaattcccatacacattggaggtcagctactgataaaagagtaggaaattaaaacatgtgtgtccaatgtggcttcaacaccccactttctctcaagtctcaacagaagagtggtatcgtaacttccacctccctccatctagtctaattgctttatatatgaattacctgtgatcaaaatttagcaggtataagataacaaggagccaacaaaatataataggctaaattacaatcttggttcccctagttttccaaatccatcattttaatctccttgatttttaattgtaacatttaatcccctattttataaattgatgattttggtcctctcgttgattattaactaataattatgattattaagatattaaattaattataaattgaataaaaattattaatcattaatttttttttgataaaagactattaaccctaacatagagttgctacccgtggagtcgaagatgtgtttgcatagaagaggagaagaacaatgttgtggagaattaagattaatatttttattaaactttttaataattaatgattttaaattaatttataatcaacttaataactcaattaatcaaaattatttgttaataatctatccagaggatcaaaatcat

SEQ ID NO: 767 - DNA, 833 bp, Glycine max
ctgcctgcactggttcagggtagattcaatggtccatctcaatcaacgttaccaaacagtttacatttttctcttaacatttcaaccaaaaagattaaaaaaaaaaatccttcaaaaatataaaaaattaaaataaaactttttaaaatttaatataaaaaaattaatgatatactcatttgtattaactaaaaagttaaattgaagtttaaaaaaattaaaaaaatttaaattaccttattaaatcacaattattcgatagaattaattctttaaataactaaaaaataaatgacatttaaaagaataataaaaaaattaaatatatattttgagaataaaaatagattaaaatataaaaacattaaaaatgaactgaaatgatttggtggagcaaaacaaccaaaagtatataacatttaccaaaaacgaaaacaaacgcaggcttttattttgtagcggactgtagtaacttagttacttactggtatgcaatgcatggccccctgagaagaaatgcaacattgctcgccacaaatggcatcatcagccgtgatttctttcgatcagaacccgaaagctatgctgaactcattgatatgtacgctcgcgatcgagcgttgcacgctggcaagaagcttcacgcgcacctagacccaacgggttcgctcgtgaaacgcggttgctttcaacctcgctttctatacacatgctgggggcaacttttccacgcgcgggaaactgttggacaaaattccccccacaaatggttggccggttggattgctttaattggggtcctgcgcctcgcttgagggtttatacgaaacacc

SEQ ID NO: 768 - DNA, 896 bp, Glycine max
aatattgctcaaaaacgtgagagcagacataaagaaaaccattaattcacctatcaaaagggttccgtccactgagaagttccaacatgacgactccaaagctgtagacatcacttttcaaagtacactgaccagacaaggcaacttcaggtgcatcatatccagatccaacattatgattcaatatctgaatgtgagaccaagagttagaacaataattttattgggtttggtgtcactaggtaaaaggaaaagctgcatttgttaagaacatgatcaatattcattctgaagaggaaaataactacaatatacatccaaatccaaaggaaatggaatatgtcagacaaaatacagatcttctttcccatataggtaaattacacagtatattgtggatttgaaccctctgacacatcgcacatggtttaccttgttagatttagaagcttgtccaaaaaagaacatttcctaatcaattaacccaaagagccaactatgctcttctattattctgtgataaataatagctgaactgattcatttctacaaattacggcattcataatatgaaagttattcatgtagtcaccttcatatggtcatgaagaccactaaaatatatttggaagcatccatgacaaacaggaaattcaaattgacaaattgataatgatcagcatagcataaatatatgtagaaaactagcaacagaaacaacaaaaccatgttggccacacataatacgatcaactataaaaacataaatttcacaacattaatgtttccagaattttttgtaaaagtcacctggtcggcaatttggaatataacttgcccatccactatctgaaagatgaggaataagttctgtattaagtaatatgttggctgac

SEQ ID NO: 769 - DNA, 739 bp, Glycine max
ttgcatacaatacggtctgccaactaacaacaatataattttaacagtaaattgtatgaaaagaagcgttattatctataatcataatttcttttgtttggtacttgggatggtgaacaatggtctctcatgttgtgtagcagttgattcaattttctgcttggttttcaggaggactgcaactaataacatccgaaagatggataataagaataagccttcaaatatttttgcctataatatactgaaatcaggacatgcagcctgaattgctgatgatggttcggtaatttgttcatatgtaccaaaaagatgatagtttcggtaatttgttcatatataccaaaatactgcggataggtgacacaacagatgtaggcttgtttcttaaagtccattgttggaccttaacaatgccattgtgggacccaacgcactgcatctcatggctctatgggaccatgacctcgtgcttgagctctctcctcctctactccaacaatcctcctgcgacagcttggccttctttgcttttaatgcctcgttaattttgtcccacacgtttactttccccattttctgtaaagaaattccacatgttcagtgcatcaaaatgttttcatttttctatagaccatacactccaagaatcgtaaagtgtacattacctttagcagtgatatgacctctttctggatgggcaacttcccacagtagtttgatcacccgcgagtttctc

SEQ ID NO: 770 - DNA, 790 bp, Glycine max
aaaatattcggtaattgattcaattgtagaataatagatagaaagcgaaaaagaaaatgcggaaaaagaagaagaagaagaagtaacctttggcaacgtattggatttctccgggaggagagttgaggaggaaccatttcgcgatctccactttctgcttatcgctgagctctgattcttcctcttcttcggccatgtctcaatacagaggagaagacgcgattttatttaaaatgagaaatggaatgaagatctcgctcgtctcgtctcgtcttttctgaagagaaggcttctttgcaaatcaggcccgtgggctccacaatgggcccaacctcgtctaataatcatacttaatacatcgttgtgtagtgtgtggcgttagtgtgtgatctgtaaagtagtatactagaggccatggcgcccggtttcagctcaaatcattttgctcgacaatcacgctcaacactatagattacattgccggtacaataaaaattgctaaataaggtcaaatgatatccaaatgcctaacaatgttcctgctccccaatttgctgttctatcattgactattagataaacaaatcaattgatccgtgagggaataggttttagataatgttggtgattgtttttaattaatgctttctttgtttgatgcgtcaatttaacactagatgtacaaattttacacatacaaagtagcaactcattcaaaatactataagttttttattgggaaaagataaacagaaatttaataaagctaaaccctctaaatatcaattag

SEQ ID NO: 771 - DNA, 1396 bp, Glycine max
atgttgactgacaaatagggtagaatagcaagataggtaaatagataaataaatatcattctgttgatttctagaatcggtaactagtatcagcttgacttctggtatcacttgattggaatatctaagagcttttgatttataatgtgatgcctattccatgtggttcgaaactagtggaaggagcttctatcctttctccacattcaggccaaacttctaagaagaaaaggaccatcgttttgtggacttcatgaaacacaccgtctcccgtctcccacaatgtactccaaacatgaaccggggatggccagataaaactaaaataaaataaagggggtgtgttaggtaatgaagattaaagcatgtaagtgatcatgaattaaggatatcactttttttatagcccccaccctccatcggaaagaaaaaaaataaaaatgggaacctatgtcatgtgagtgcagctataaatattgggtacgacacaatacgatatatacatataatatatttttaaatatgtatattaaataaaatgtaattctatttataaattatttgtattttattgattgaagttttggttatatttttttatttttcttaattcaacttatatttatattggtttatgggtatcatcgtcatgttgatagtctttaatttcctgaaaattcattcactagaataatagtaattttatttaaataaaaatgctatacactgataaaaaaaatgttacatactatataagaaatatatttagtgaggtgaaatgagtaaatttttttgatatggttaggggtggaactctgttttcttgggttcttgcactagaacccgatgccggcatttactgaagcttgagtcagcaaatctcagttgaacattactctcacatcaaagcagtcaacagactcaacatcaccctcaaatctgaaattgaataatctctatctttcttttatattggtcaacaattgatttgagtaaaggtcactcatgttgaaatgtcagctaatttatgatattccaccattaattattagcctaaaccgtctactttctttgagtctttctttcgagtttttggtggttaaattttgttccagcaactactcttctccctcatctgggtgggcattgcatggcataatgttatttaacaaatattaaagaatacaatttcttttaagagagatagaagagcttgaggaacagaataattcaactcaacgaggggaataaatttcattaatattataagttcatacacggcaacaatttagttgatgtcttttttacaaaatccaaatacagcagtcttctaatgtaggattctctattataatatataagatgagcacagattgccacaagctgcaggcatgca

SEQ ID NO: 772 - DNA, 1776 bp, Glycine max
  misc_feature (1147)..(1147): n is a, c, g, or t
  misc_feature (1375)..(1375): n is a, c, g, or t
aaatgaagttgatggtgaatatgaagggtctcactcaactgggttgggagaaatgcagtttaccttacaaaaatttgtagtaaaaaatcccagttctattcttccttgttttgtaataattttcagctaacatgttttgtaggtgtaaattgtcattattcttttatctttgtgaggcgtgtcatggcaaaatatagaatacatagtgctgcttgccatttttcttttttctactttgatgagatcgagcttgctggtactggcattattaacataaatcaagtgagtttttttaacaaattatagagtaacttgactatgagttccgcgaaagaagattaggatgatacataaactaactaaaagtctgaaataacaaaaatgaaccagttgtcattggatcatcacctccaagcacaagaggtaataagaacttgattcatccaaccaagacatagagccccatctctctcttctagagtgtaatgtccttggtagctttgctgaagattttttattgaacaagtaacaaaggagttcaatggatatggtgtgaatccggccatagtgaaacgtgatctccacttcttcagaagctcatggcgttcaactctttctgccccttcacatgctattaagttgacaacttctcgagccaaacaatgctgctccacattaatcctctctttgtgctcccttggaagaacagtatcgattgattcaaaaacagccaagtagtagttcattgtctcaacgaagcgctgcaagaacggcgcattgatggtgctaaatacctgctcacccagagacaccaccttaagagacagctgcttagctaatctcaacaatcggccccgacgactgagactgtccacactttcctctgtcactatcagtcttctctacagtcaaaattccccctcacaggcttcatactggaccacgttacaaggatcccgccatgcttcttaactccgagaagagcaaccaatcattcaatactattaccaccgaaacttcacacgaaggacactccactcttaccacctgccgctgtcctcctcacatgtgtttctcgccttccaatataccaatttcatttgaccattcgacacacttcgactttccatgagacgtttcatacctnacagtcttcacatagcctagaagttctcgcagtcatcatcatctaacacgcacacacatgctacatgtcattctctctcatgactatctgctacactcatacctctttggctgctggcaatgtcactacgcactcactcccatagaatcctcattgcggcttagtactatgctgctcagatatactggtcgctccatgtaacgagtagcgcatcactcagcatatgantatcatactgcgcatcattgatgacaactaatccagtatccgcacaccacggacggtcgtagcctcatcactgctcgcatacatatacatccattaactatgggcagatctgatctcactatctatgcatgatgatcccattatcgtctcacatatcaacgatcatacgtagacactatcatactatcgcctatgttaacttaccgtccgtacacttcatctccagctgcatgtggcaaactacgtctctcacttgcacgtgcttatacgctaccatgcctctacttcgtctacttagctatattgtcgtcgccgacttctaacgcttagttcatccacgcatctacgagtctctcgcgtaccaacatacactactcatactactaagtacttctctcact

SEQ ID NO: 773 - DNA, 824 bp, Glycine max
aaataaataataggggaaatggatagtgttaaatgaaaaatgataatttaagcagtgatcaaaatacaggatttcacaagatattgttgaaaaacactaaactacttggaagcagaaaaaagacaaatatgcaaaaacctaggcccccgcgtgcacaatttatatctgaaagtaaggcgcatgtggttggcctggctaatatcgaatgcagttgcatagtaactagtttgcataatttaaggcaaacaatatttctcagaaatataagagtttgaattcacagataggtacgttaagatttttgtaatgacttatactctgcatgcacaacagcaggtaattactaacttaactaataataataacactacattaaagttgtcaacaacatgcatagggcatctagggatgcttgctggtgacgtgttgtatgaacacctcttctagatatcaggattgctataatttatgatagacatacaacggacaaagaccttgtccattcatatccaatacatgcaaggcacaatacttactattcactacatcactcctacattttaaattgaatttcagtatcaaatattttgaatacattttcatatatttaaacatgtctaacaagtgacaaatcctagctgtttcatacttcccatatccatattatgttttatataaaatttaatactcatcaatatattgttatgctgcgtcatgtcttgtatttttcccatatatgccgtgttctgaatacttggatcttttgtatattcatgcactctaacaaacacaacaatattgtgtgtgcaagagcatatagatct

SEQ ID NO: 774 - DNA, 949 bp, Glycine max
  misc_feature (914)..(914): n is a, c, g, or t
gcaatataatcatcaaaatcaaatccaatagtcatcttagacaaatggcagaaacatactaacaagcaaaagactgaaactggatcctaaaaaatgcaggttgagataaagtactataatgcagcaacatttacaatacaaatcttttgtaagattagcaagagataatcacaacaacaacaacaataaatgacaaacaaaaattggattgacaggcagggttgcgaaaatccaatctgaaagagaaaaggcaacatacctcttagaatggataatgtgagaagcctaactcacccccaaaagctagctcaaggggtgagggttgcccctcaaatggttgatgtttgtcaccacaaagcgagggctaacagaagcgtggtcccaagatcagaactgactctaataccatcttagagtgtgtactgtgagaggtctaactcaaccccaaaagctagctcaaggggtgaggttgcccctcacttatatattctaatgtgagattacttttagccgatatgggacttcgattattttcaacaataccctcaaggcaaataggtaggctagcctctcgtatgcgggtcatatgaacatagcccgctgaagaaagggccttgacccgtcaacgccgaataccacactcgtcaaggctttgcagcataaatgagcttgatcaaccactttattctgaatttccacatattcaggacccaccaaattggatttaaaacttggtcccacattaattaaccttttcatattaaccaatcctcccaatcttaaggaaggtatcatcaaacctccaaaaaaaccttttttttaacttataaatcctaaacccgggaacctgggttaaagaatttatttggggcctttggcccttggcactctttataaataaaacaacctaaaanaggggccccctacaaaccacaactttttaaaaccc

SEQ ID NO: 775 - DNA, 711 bp, Glycine max
cttgcatgcctgcagtctttactgttccgagttctttaagaattaaagtatacgatagggtgaaatttaggtccatatgacgagtcatgtattatcaattcagcatattgacaatgaacacctgtgatattcgactttgatcttcaaatactgaaacagagaaaaatattgctttaagtttgttgttgaattactaaaggcttcttctgaaaaggaatagaatctaatggatttgagatgagaaaatactttgttgttttttgtgacgggggaagtaaggtgtccgctaaagattcaatatgacaatattttgaatcacgtttagttgtcatagtataaaaaatacttttgaatttctctgcattaaagataatcaaatattctatgcaacttgtctgcaagtatttattccatcatagtttgtactcttacatggtggaatcattgcaagaatctggttagttaggcaaaaaaaaaaaaaaaaaaggaagagaagaaaaaagaagagagaaaagaaatcagtaagatgttcgagagaaattatgacctgatcatccatgtacaatacttacaactgtagcagtttactctttgtagtttaattaaacatataatttgacattaacaacggcttaattaatgatattagcaataactagtggaaagaaatggaatgttgggcttgtctgtccacatttttttataatgggg

SEQ ID NO: 776 - DNA, 884 bp, Glycine max
tcaagtgtgcttataattgggagagttgtatcaaaggatgtcataattacaatacatcagattttgctaatgcagaaaacaaatgatgaaaggaataagttgtttaggaaagccaggttagcaaatatttcatttcatatcacacctgcaaacccattaatgatggttgactcagtattctctcagccacttcctccgcactgcttcccctcatgtttgcagtaacctgtcaagtctagcattagaaaatggaattaaaataaaggcagacactggtggagttaggggggattggaaattataaactatgcaccgtgaactgcccaatggccctgagatgtgcttccaatctctcaagcatctcatgtgttgtttcaagtactcctttccgttggatcactgatttcctgcttgtaataaagacagcctgaagagcattcaattgtcagagtgagacagaaccccacaatgcatgatacagagcaggtttcccatgcctactatttttttatttaattgaaaaaccaacaaatcatgatagtcaaggtcagaaaagttaacaattgataacctggctttccaaaacaactccacctttgatttccttcaagttgttttctctcagtgtggttccactacttacaaggtccaagatagcatcggctatccccatctaaaaagagaaaagacaaacaattacttagataaatcataaatatcacatccaggcatccagcatatatggccgcagcatctctaaaatgaacaagcagcaatcaatacttcaattcaggtgcaaaagaccttgaaaatcatatgcaaaggaataaaatgggaaaagtttatgtctggggaaggaaatataattttctacaaaaaagttt

SEQ ID NO: 777 - DNA, 792 bp, Glycine max
cttgcatgcctgcagcttagctcctcttcttctttttctctactgacccacaagaaaggacttccacaatctaataacgcaagtgcaagttcttccatttgcttcttcgacaacacgcaaaaactaccaaatgagacataaaccaccgacatctctggctttgagtccaaccattcaccacaatcattcgaggggcggaagatgtcaccgccaaatgaagtatcagtggggtctttcccgtccaagaaggccgagggaatcaacggcccgatggggatcatgttgaaattgtcaacggccctcaaagcctcatgttccaacgcttcaaaggtgttgacaagtattctgggctttgcttgcatgtcaagatcatgaagttgctcttcaaacattgaaaccgcgagagagtcaatagtagggtttgaacccaatagaaatgaaggtaggtcccgtggtgcaagcaataacggcaatcctggcagttcaatggaactcgaggggtctttgattttgcctttgatgtagtcaccgtgttcgtgaaagtagcagtagaatatgtcgagtatggtggctggttgagtccaaagcaacgccgtcgggaggtgaaacccacgggctgcccgagctgcccaaggaaggagcacggtgtggactaaacaagtgaaaggatgaccctcttgcgcgttggaggcgatgagattggtgacgaattctgagccgcgacgcttgaaactcggagcttggagggcgtaatcggtgggaggtgtaaccgtcgtcgtacccgtcgggaaa

SEQ ID NO: 778 - DNA, 669 bp, Glycine max
atgggttccgagattaaatgtgaatcgctggatattttatgtgatgtccttcataaatttgggaatctaatggcagctgatcatgaactattattaagttccttgctttctcagttgagttctaatcaagctagtgtgcgcaagaagactgtggcatgcattggtaaaacaaatttaaatttgcattctttgattttccatggaaaaattgtttattacttattagtggagaattggtgttgctttttgcagttttgagtgttgtcattttttccttcttcaccttggttgaatcctattgtagtaaatttgttcagaacaaaatcttacttgatttttacaatctgtggtttttctatattctgattttaacccctttgatttttgaaaagtcacttagattttcttggtaactgggatttggggtaactctgaccatgaatgttgagttgataaagaaaaaactggctcagagactaaattattaaatccttcatgtattctatattgaaaattctctgaaaagtgaatgtttgctggcatggtacaacttatcttaaaatagaaaatggcatatagttgatgctttttgaaatggttgagccaattctatttattttaaaccaaattcattagaaaaataagaacaccgagaaaactgatgatggg

SEQ ID NO: 779 - DNA, 830 bp, Glycine max
tacttggtggacaccagctgcaaattttatggaggatatacagagtttggaagtacaaatgcagcaacaagacttagacttggggaggggattcaagtgggaagtattcagcgggaaatgcttatatgcttcccaatagagtcttgtcatctatgactcaggatgaagtgtttaaagcaatatggaaattaaaaatgccaagtaaagtctcaatctttgcttggagattaatacaagacagattgcctacaaggaacaatttacgaagatgtgtggaaataaatgatgctagctgcccattttgcagaaatcatgaggaggaaatattgtgggggcattctcagaaatcccgaaaaaccatttccttcaactttcttattgtaattctgatggttttaggggtaaaagatggcagagttggtggattgccctcacttggtgtatttggcattataggaataggattgtattcctaaatgaaagtttcaatggtcataaattgatgaaggatgccttattcttctgctggacctggtttaaaaacctggaaaaaggatttgatatcccatttcactcttggtctaacagtattagggatgctttttgtaatcaggggaggaatagtatataaactttacagatcctgtgtgtgggtggttacctagtttacagccagagctttggttccctaatacttgttctgtatactggattagttaaccacagttctgctccggttgatgctaggctgtatgtaaatcagtaccacttggactgctttctctattatttataatacatatctattttggcccgatcaaaaaaaaaaa

SEQ ID NO: 780 - DNA, 825 bp, Glycine max
tagtatttaaattattcaattgatctaaatatgctttgcaacatcaagttcgtgatgttccaatgcaatcctggataaattttttataagaaagatctcttattccacaaaatttcggacaaccaattaaaattgtagttatcacaaaaactaaaaaaaaaaagtaaaaatacatcaatcctctctctcttataacacaaaaccattgtcactttgctctttttaccacgaaaacaaattatatatattagagaaaaaaatagaaatataaaaacctataatattttaattcttaaataaaaataatttgcaaagttacatgaagatttttttatgtgtcaaactaaagttgttagactaagttttcaaggctagtggaccatggtgtcgcgactaactaaaatagcaacggaatcagtgaataaaaagcaggagttactcttaaagtttgttaactcacaaaattttgagaaaaccattattaaaaaagagtttaccaaaattataacagttttgaaagttagtttatttgatacattcatttaaaaataattaccttaaattgtcatgtaaattatttataaatgttaaaaatattttgttactttaaaatacaacgaaataaaataaaataaaaataaagggaaaatggttatttcatcaagctaattaaattacaaataatagttttgactttacgaggataaataattcttctacaaaagagtaggaattagttgttaaaatcgtttaactaaattttactcaaaacaatttagggttttttcattattatttggaaaggtagaactaccaattccacag

SEQ ID NO: 781 - DNA, 1369 bp, Glycine max
cttgaagttggtgttgagaacgcgtctatcagattgaagggcttggaagaccaacattgtgttctgttggacaattgcaacgtagaagataatgcctgcaacccaaatggggatcactctcagcaagcatttcagctcttccacttgctgcatgctgcaaagactccaaggatctgatgcagacccgtctgggtttatgccatcttgtggggttataattgcagctttgtccagtaacctgtgaatgtgaacattcaacattttaaaacctgttattttcatgaactcatgaatataacatgaaaggagaaactattatatgcttcaacattattatggcctccatcaatctccacgacacacataataaatcttcgttttaactctttattttataaattgaaaatcttgatgatatattatgtgaatattggttgggatcatgaacaagtgataattttagattatataataattttttaagaaaataatattttagaaaaaaaaatgctaacaacatattatgtgaaatactcttttgaacatactttttaagacattttttaatatgttctctattattgatttaacttaattgaaaatcaccaaaaattaactagtttcattaatgatgattttatggtttttaataagttttaagaaggatggattagaaaatgtatatcattattctggtcttgacaataaatgttagacactaaaaagagcatttcaactaacaagtttaattacgtacttatttaataagcttgtcacgtgagagctttaaacatgagttgaactgtgaagcttaaattaaagaagcttgttttgacaagttataagaacaccatgatacttccatatgcttaaagaggttttgtgtaagctattaatttcaaagcctctgaataaatatgtaccaaaaaataaatccctctaaataaatggtgatggttacctgaactgagacgtatgaggaagcttggagttaatagactggggagaaatataggtaaagagcgaatccaatggatattctgatagattcagtcttcttttctttacagccacaactatagcttgagctatacttgttagtggagctggaccagttgctttaacttttacgtaataattgcttcccatgtagtagagtgtgcaagagactaacatcaaagccgcaggaattcccaaccctattgcccagctcacgtttgactgtatgtagacaattagtgacaaagacaccatctgagcaaatgtgaaggtaaagaagtaccaattgaagaagctattgattcccttctttccagactcagtgttggggttgaactgatcaactccaaatgctaagttacaaggtcta

SEQ ID NO: 782 - DNA, 776 bp, Glycine max
aacacattttgaaataaaactcttaaggccttatctaggagaaatttggtgtcatgaattcagcttgattggaaaaacatttattcacttactatgtcccaactattctctttgtgtttccttcttgctgatctacaccgaaaattctagccgtgccaaactctgaaattttggggttcaactcactgtcaagtaaaacattacttgctttgagatctttgtggataatccttagtctagaatcctgatgaagaaagagaaggcccttggcaattccacatataatgttgaagtgctttgaccagtccagtgatccacttctttgctcatctaccagatttccatcacataaaaaaatcaatttgattatatgcagttaaaaaatgttctaatgtggaaagcagttaagtgctactcaaatcatgaaactagtctaaaccatttaaaatacaattcattccttgtattgtatccataccaaaaataaatgagtccaagctaccattaagcatgtactcataaaccaacattttttcctctccttcaaggcaacatccaagaagctttacaagattgcggtgttgaattttgcaaacaattttacttcgttcttgaatttggtcaatccttgtcctgagcttgctgaaagcctattcacagtaatttcttgcccgtctgttagacttccatgaaaattttaattttcaaattgatcatttgaaagaaatcaagaagtgttcattttattcctcaattcttaatgccataataatcta

SEQ ID NO: 783 - DNA, 737 bp, Glycine max
gctggaatactaataatacttggttggtgttatagaaagaaatcacgttgcagtgtcaaaggtaaaattcacatttttgttcccgttctcataaagaaaaatttctttgtatcgctttattaatgtttgtagtattgtattagatgaatgcatgttatttgacaaccatacaatgatttgaacaacaaaaaccatagaagtaaatagtgtacaggttccactgtaactaatttggttcaccttctttggtcaacaactgcatgctaaataagaagtttgttgaattcagtttgaaataacaggacaaaaagttttatggatgttgaaaagtcatgacagacacttgttctgaattctttcttcaatggaggctatttatgattgcagccaatttatataaatcatattctgcgtaggaattttttgttttttcagttttgtctggataatgtgttggaaaagataaatcaaaatgaacttttaatttattatcccaaaattaacttagttaaaactgaaacactttttcatgtgtgtagtttctacttggaggtactagctctcttgtttccttaattatttttttgcatttgagggagggaaagtggaataactcatagtaggatataggaaattttcattttatcaaaagatgaaaatctagtcctttcaaaaaattgaaagaaatgtgctgaaatgtttatcacaatctgaaacacctacttaatctatttcaa

SEQ ID NO: 784 - DNA, 848 bp, Glycine max
cttatttggatcttcaatttcttcagagaatctgatttctgtgtctggggtaggttgcggcactaatttcctgtggcttgttctgtttatattttcgaagaaagcaattgcatattttaagttctttataacattattttgtatgatgtttgcatgtctgatgattcacattgtgctagaagatcgacataattattagctgaaggacatggattttgaattgcagttttggcttattcttatcataagtgattttcactttgacttttttaattatacggatcaaaagtttttttctgataatagtgtggtgccttgatatataagttcacaaaattgctgtctatatgccattttgtgaatcattggaagtcaacactgcatctattccttcaagtggcctcctatgtggggtcttctacccaagctgtgtgccacttttttttgcaacattaactaatcttcagttcagttggttgtgtttttttgtgacatcatttctggtaattctgtaatagaggacctcttctttttctccattcctgtttgccctgacattctaaaatctcaaattatcaggttgttccggcaaaggttgtggaggaacttcttaaagcttgcaaaagtggtaattttgatttggcaaacaaggaagtcaacaatttcattgcagagggatatccagcttctcagatgcttactcaggtcttgattttgcctgtttctgtttcactgggcctgtttcatttagacttcactatattactactttgagactttctttattttttctagtaattggagtcccttggtgaaacaacgacttttttgttgacactaaccagatt

SEQ ID NO: 785 - DNA, 822 bp, Glycine max
cgatactctacagtcgacctgcagcaatgcgtccaacacctcacctgtgtgagtataaccattgtaaccaattgctccgaggaaatttgtttttttttattaccatttttccatgttttttctttaaaaaatactactatataagtaacataatgttaacaattaatgatattatgatccgaatttgattgattgtgttaaaatgttttacactttgattatgttttaatcaaattcttgtaaaaagagtttgattctcatagtgtaaaagcgttaaattatgtcaccatgttatcttactaatgtagaaagggtctgagatggcataagatgggatctgagatcttattaatgtagtggggggaaaagtgtaaaaaataattgaaagaatatctaagaaacgaatgataaggtggaccgcgtggatcgctaatcacggaggtcatcttttgattaatttttccggaagaattctatattttcagaagaaaaatattgaatagacactcaatatactaacatataaatattttatgtgataagaaaaaaaatatattaagagtattaatgaaatgtttaaaatatatacgtgtacaagtaatcaagtatcactactttttttggaataagctgaagaataataacaattgtaaattgagatttttattaaattataataaagtatttgtatgtataaaatattacactagaatttacccaaaaaaaaatcataaaaaatattgcttataaaatattattcgcaatatataactattgctattggtaatagaagtttttaattacatttatctgaggtaattt

SEQ ID NO: 786 - DNA, 855 bp, Glycine max
tagaattacaggtctggagaagtatctgaagactgtagattcggtgcgggattggattctgtttcatatatacttttttaacaacataagttaatttttcatatagttttttatttaattttataaatattttgaataaaaccaaaaatatatgtaagtcgttcgtacataagacgcgttaaacgtcagtacttaataataataatatagtgtaagaaactcaactggggaagtgcataaaaaaataaaagtataaatacaagaaaaatgaactaagaaagtgtgtacttatgtgctaattagcaagatcgttggaacaaaaagccaaattgactggtactttctcgttaatttcttcaattttcattgtttcgttaaatactagtggcatgtccgtcaaaagtcaaaagccacatattgatgaaattgtgttgttagaataattaattaattacttgcagagcaaatctcctccacaatttttctttttttctctacccaagagacttcctttcaactcagatactctttgattctcttcaggaaaacatcaactaattaaaatctaattttgtctttgatactctttgtccgcggaattcaccacccccaccttctcaatttgtttgctttctgctttcttacctcttttttctcagatttcatttggttgatcctttcttcaattcttcttctgggtttgtagttgtttttttatctgacttgtgtttctaaaatccatgaaccgtatgtgatttccagtgtctttttctttttccagattcccagagagaaaaaagaaaaaatccttttgtttgtgtgagactgtaaggatcaattggttgagttctccta

SEQ ID NO: 787 - DNA, 656 bp, Glycine max
agcaacttaatatgctttccagtcaaacaaacatagtgtgcaaatctgagacatgttttttttttttaaaaaaaaaaacatttcttcaaggggaagaaagaaaagaaacatatatataataaatatataaatataaatatctagaaaagcaaaggcacaaatcctactgtggtcccctacataacgcaataacatcacaccttttgcaaaagaaaatcaccccagccacaaaaacactgatgatctttatcaacaacaagtctctctctctctctctcttggccgtatgcaccagctcataataataactagaaaaaaaacatcattcatctgccaaggataaaggagactacataagtacaaatataattttttttataggtaagcatgaaatggaatatattaaaaagggtgtgataatgagagtagggaagaagaagcaggatcatcaccggtttggattctggagttggaagcaagatctagccaggaatctgttgttgtgttctttggtgggccactccccaaagaaacggtgaaggggtctctgacctggtgttggctaagttctttctctttgctaggccctggtgattgaagtctgttcctaaaacaaaacaaggatgttgtttgttaaaaacgcgctcttgctgctt

SEQ ID NO: 788 - DNA, 744 bp, Glycine max
aaaaaacggatgtcaaacagaaaaaaaaaggagaaaaaaaaacaaaaaaaaggcaccactgtccgtggtccacaatattcgtcttcgtcgtcatgctgccatgcatcatgctgccgttcgtcaccgccgttcatggtgctgctggtcactgcgacgctgctgggtgcggttgctggtcgctgcttcgcggggtcatgctgctgccggtcgtcgctgctggtagtggtggctgctgggtgcgggtgctggttcgctgctgttctgtttctgttcgtggctgctgcgcttttcaaaatatattatcgggtagggttgggtcaggtcagcccaacacctactgcgaaaaaacaaaaaaggccactattctgcctttcccgctattccaccatgacccgccatggcgccaccattagcaacccgccacaccaccgctattcggtggcgttttttcaaaattccgccacgcttttccgccatggccgccatttgataacactgggcaaaacatattcatatttaaggtcacttgcatctcccttgcccttgaatttgctttcaacaaggttatgtattggtttctctctagttctctgcctatgattgtttcagtgtggtatctgatccaatgacagaactgggctgctattgtattgctatcttccttctttcctttgttcttttttttacaattgttattattattattaaatttttcctgcctgtctgtatcatctgcctggtgta

SEQ ID NO: 789 - DNA, 793 bp, Glycine max
ataatcaacaatatcacaacaaccttatttatgcgataaaggaaaatcctaaaggatcgacatgaatcatattttattgataataagtagccaaaaaacacaagatactacaccttattcagaaaaaaaaaaactcaaatcctctccacttagatttatatttgtcttcatattttctgtacgttccatctttaaacttcttatttatattaagagaaaataggttatgtacaatcaattataacattatataataaattgttaattttttaaaattatatttataatattttatgattaaatgatcatatgaaattattttaatttatacttgcatatcattaaactcttaatatatcaacagcattacaaaaaaaaaaaaagaaacctgttatttatccattattaaacagcaaaagcagagattcatatggctgaaataggaagttcaataaagatcgaccaaatatataggtagtaacaaacagcagaaaggagcagccccctaaatgccactggcttttgtagtgcatgtggttggttagttgatattacattacattatcgacaacaactactcatgctgaacttcattaaatcaatttcaccttggaccataccctatggcaacacaatttattgcatcacatctctctctctctctctctcacacacacacacactgcatgaatctttagtatttaagaaccacagcacccacccgagactttcattctcttctcgacaactgcatttgcattggcaataaccatccatggatgacctaacccca

SEQ ID NO: 790 - DNA, 1382 bp, Glycine max
tttgcatgcctgcagatgacagataagcctgtaatgaagctcaaacaagtcagaactaaagcaaaagaaagattgattatatgatgcaatttccaaagaatggaggaaaaaagaaaaaaatgagaagataggcaagatgatgctatatcttgcattttcattatacctctcgtttagtcacgtcaatatcttctacaggatctgtagaagctgtgttaacgcgttcatgcgggtaaactgggagaccttcatcgtcttcagcttctccctctttcgcatcctcctgtatggtaagagattctatcctgctgctcaaagaaccctcctcatcacttgtctcagggtttgatttgggggtaactgaactcgcttcacatcataacaatccagagaagaaaaataacattctgtatcagttcatattctaatactaataataacagcataaaatatcaacgcactcatctactgcgtacctttttgtgaccgaggaatcaaattttctcgtgctgatgttagttcaaaactagaagtaagatgagctatggctgaagatttagttgccaattttgctgtatcctgtgccatagattttgggtaaagttttctaatcatcggaggtggagttgaaaggttccttgcatttgagctctcaaaattagctgctagtgcattaaaggccggagatctgcccctcacacgaacacgatcaggactgacagacatgctacgggaacgctgggatttatctggggcaccactagaccttcccccataagttactgatgctcttcgtttgtgtttctgataatgtaccaaatattcaataaccaagcaggtagcacaaatacaaacaaaatattaacattaaggtgcttaaggtggagcaaattaatagatgaagtacattaaaattatcagtgagtgagacacttgttggttaaagcactttgttatatctacatctattgccaactcaaacccatacccctatgattatgaaggatcagcacaaggttcgcttcattgaattcaacagttttctcttcagtcaacccagaccagttcattttatctcactcataaccattatcaaagatagataaaacgtaagatgtaaaaacaataaggaaattcagactaatagagtttaatgtggtcattcctcactcttaagaaaacagttattctatgaaggaagcaaagaaaatattacttacaaccataagtggtgtacccccatttttcacgattgcaagcttcctttgaaatgagtttcctagcatctaccaaaaacaaggaattattagtagccaaaagtataagactttcttttttaacagactatttgaatacatatatatacatacataaaaaaactt

SEQ ID NO: 791 - DNA, 839 bp, Glycine max
agcttgcatgcctgcagtgaagttacaacttttgacccatgattgttgagccttttttccagtgggtgcctcctttttggtttacttactctgatggttttctatatttatgtaacagtttatttaggagaactttcttacaaaaagcagatactgtatgttgctttgagtgtgtcaactgaattaaaatcaatctaaagctttctttcttcctggtgatatgagtgtttatagatagtaaaatattttagctttctgttttctacttcgtgcatgatgatctatggaagattgggtccaatctatgactgatattgagtcacttctattagctaggagttagtagatataaggtggatttgatggtcatgggagaaagaaagatgagaatgatcacgagtttgatttatccagcttaaaaaaattaacattctaatacattaacattttctaataataaaaaaaagattaattaagtttagttatcaacttttttatattctaatttttactccctcaaaatttatttgatcttttagtcctttcttaattttctgttagtatttttagtctcttactttttttttcctatttctaatccttcatttatttttactcaaaattagttcaaaatatataaaaataagagattaaagatggacaaaacaaattcttatcttaagcattaaagataaatgagagactaaaagtaaacaaaaaaagttgagggaactaaaaatactcagaaaattaaccaaaactaaaatttgttaaaaaaacttttgaatgattaaaaattaagatctaaaaaagttgaccttaaaaaaaaccttctttta

SEQ ID NO: 792 - DNA, 749 bp, Glycine max
ctcctcagcattgttacaatcactagaaaacgatcctaaaaaggatttggagcaaataattcaagaatgttatgatgcaaccttgtcaccatggcatggatggatttcgtcagctgctttcagagtaataaccatttgttcaatcaattttatgcttttgatggattttacaggctaacctatatgtttcactttcactttcacctcagcttgtctggtccagggcaatttatttattaacttttttacctcatgaaatcctgtgttttatataaaacttgcccagtttagcatagtgaccaaaattgtgcaattggttcttgctgaactaacagaaatagtacttcaggtggctaaaaaactagtgccagatagtaaaactttgatggatctcctcaaggaaaaagatgaaaactgtgaaaccctaaaggagaaaatgcagatcttggtttccttgcttgtgccatttcttgaggatgttcattgtattcttgtaagcttaattttatgcttcctaacataaaatcaatccatcatgctcattcaatttcctgtcatcttaccttatgaatattaattttgcagaaaatttataacttggacaggattaaatcaacctgaagatagaagaactgatatacagctttgtgtagtactgtagacacagctatgtagtgtatattttggcttccttcccccgctgttttcatgtaaatagtttgtataaaaaaaaattgcgtcaacacagc

SEQ ID NO: 793 - DNA, 765 bp, Glycine max
  misc_feature (727)..(727): n is a, c, g, or t
aaacggacctttgggagtgtgtcactgtttatctttcgccatttcttttgtcatttatgctaccatggcatccatgactgcgagcatggtgggggcaaaataaaaggggtttttgaacattttattgacttcttggtccttgcaaagagtaggaaaaaagggtggaatttaacagtaatattgtaattagataaaattgatgacttgttttaagcaattttgctagttgtatatatattttaattatggcaagtactaacttggaaataaaagattttctattgcaccacgcttcttattaacggttctttggactagattaaaattttaaagcatcacatggatatgttccatgcaccatggtcccatctaattcaatgttatcgctagttgtacttgtgggttgccagaagtaatgacaggagtcttctggcctagtggactccgaactatacactgcttctccttttattaattgaatatctagctgcaccaacggtcgaagaattttctcttggcttaataaaaaagagagagagactaattagtgtgtgagaaaaagtagttaagcaacgcagaaattgtttgtggtttgtggttcattaacaaggtaacgtagagggggaattaaatgagaaatgaaatattgctaactttttccgctcacagtccaaggctatgtatataggcttagatccctcagtctcgatgaagagaccaacatatngagcatgggtcactgggccatctatattggcatggacc

SEQ ID NO: 794 - DNA, 798 bp, Glycine max
acaacccagatgaacgcattggcattagagaagctgttcgtcaactaaaagctgctagggactctctttcgaatcagtctgatgagagtcctacacttactagtactagagatacctagtcttacgtccatgtttcagcaaagtgaactgtgtagagataggaaagagtcagagagagttggcaccgtacgatcctttacactttgcagccatgtttgacaaataagcgcaaagaatatataatataataatacttttgttgaccatgtaatgatcaaatactttactattttaggccaatgaatcgctctagtcatgtatggtagaaattgagatgtatttctgccgccaacctttaaataggctattaataacagagaaatataaggaggagtgtgcttaaaagagtgtgattaagagtgtgacccatttttggtccatgaaaaaaagcaacaattgatatccaacacatttataattggttatgcataataaacaagttatttattttactctcaaattgctctagaggtgcatgatccctacagtttaaaggtgaataaagatggaacaacagttatttaacaaagcatataagaattcagaattatcactaatcacttgcagtgtccttgttaacaaacttggattgggtgtcgttttaagtgcatacccggacaaaaaataaccccatcctcacatattttggtggtctggggatggccaacccagaacctaccacggacccttaattaaagttaagtggtaagcccccaaatttaaattaaattattacca

SEQ ID NO: 795 - DNA, 927 bp, Glycine max
cagcttgcatgcctgcagcctcaagttgaagtgaagagttttcctgctgaacaaattaaacctcttgctactaatcacccgggaacctttatagctgctggagctccgtctggtgacatttacttgtgggaggtaaatttttattcatttatttgttaataattatgcatcaagaagagagagagagagagagacagagctattttttcaatataggttaatctagaccgatgagtgagcaattcactttggagcatagttgtgaaacccggtccgatcattgatccaatcgagatagtgggtcagtagtccaaccggtgggtcagtaattagtccgattggacctagtatatattaaaaattcaaaattacatatgtatctattatatataagtatataattaacattatttgagtaacaaaagttcatacatattccaaaatccaaaataacaattgataataatgagacattaagacaacgtcgtagaggtggtccattttttttaaatttttttataaaaccggccgagtcggactggtccaaccgggatttggtacctaaccggccgggtttgaccgggtcatctcaggtccattgcatgaccgatccaatagtggaaccagtccggtaaggccactaagttccgggttaaacccagtcccaccgtaccgggtggggcaaaaccaggattataccacctattgtctttatgaggagttcacggttcagctcatatttcgattgagagacatacatcttcagttgatcaacggacaattgacctttacgagccacacactttaaggtttccatcagggtgagattcaacaaatcattacgatttacaacacgattggtggttcatactctaatttttgccaagtggatattacgaatggatcccacttttatacgtggctccg

SEQ ID NO: 796 - DNA, 1415 bp, Glycine max
aacccctttcacagttgagaataagaactgtattaacatccctccatactacatccgcctgtgatatattttaatgagtaatattttttttaataattgaaaacaaattctttttatcaaaaactaaaataaagagggaaaaggcataaccatccgctcctcatcccacactgcatgatttcaaaatcacaataataatctttcattgtcgcacctcatcacagcttgagcacatcattgtcgcaacctaaatatgtctcacatcatcgtcacatattgttgtagcctaagaacaactcaaacactacaagaaaaattattatttccaacgaaaaatatttcatcagaaacatttaaattattgatagaatttatcaaaagaataaatttcgtaaaaaattttgaaaattttgtatagaaatttttgaattattgatggaatttaccgatggacaatttttccatcagaaagttaaaattacggatggaattttatccatagattaatttctggagaaaatctaaatatttccaacggattttaccaaaggaataggaatctgtcgaaaaatcaaaatttcccaaaacaaaacaacctaaccctagccgagacaatcactttggtttcttcgcttaccactgttcgtattctcctcccccatttttggctttcttgattacaagaattgcacctcttccgtctcaatcattcactggctccgttgcgcagatgtcaccatcgcggcctctgaccctcatttgtgtgtccttcttcacgtcctctgagcgtcattcgtgcgtcctttgagccttattcacgcgtcctctgtcgagcccacatgcaggtacgcattgttctagaatttttgtttttgtgttttgttttaaggagagacgaaagaagggagaaaaacaaactaaaacgacattgtcgggaatcatatctgatggcggtgaacagttgtcgtagagaaagggggctcaatctaatgcagagggtgtaggataaaactgtagaaattagatgaatatagtggttcttaaaaatggtccatcgtggaagacatgcactactggtccatactagaagcattcattttttattggacagtaaaactgatattaagttggatggagtggatgatgtggggacgcatcatctaaagaagtggtatttggtgaacataaggatagtgtagagttgtgtcattatctatggagggtagagacgtatgggtatagccacgcctatgttcaaatgttgggagctgttgtatttatctattcttctaagttctaaacccaatttccaaggggagaatctgcaactgaaccaaatgattaaactcaaaaacaagaaaagaaaagtaaagaataaaaaggaaaaaaaaagaaagagattttgttttacaagt

SEQ ID NO: 797 - DNA, 805 bp, Glycine max
attattgtaaaagaaaaaggaatcttcaccaacgtgtcatcaccatcagccaaagccaaactgagactgttgtttgaggtagctcctttggggttcttgattgaaaaagctggaggttacagcagtgatggtcatcagtctgtgctagacaaagtcatcagtaacattgatgacagaactcaagttgcttatgggtccaagaatgagataatccggtttgaagaaaccctgtatggtaaatccaggctcaagggtggtgtagctgttggagcagctgcttaatctgttaaacctgcaattcattgtctatttttatctgcttttagaaaaagatatatgctatcttcagacaagtacctgcaatttagtcacatttctgtttatcactataataacaaggtaaattatgttggtatggctgattggatctggacaaaaataaaaaaactaaaagaaaagttactgtccttaatagaaaacaacatggtcataatatttaaagggtctataaatatagattacaattcaatagtacataccagcataaatgcaaaatgatgaaatcttctttcaaaattatactgtgatatagtattacctacatatattttatgcataacaactaatatatacaactattaagttaaaggtctacgaaacagtacaaaaactggcacgtgttttgtcacaagttctagcaaaaaccaggcccgaaacattagcctgagtcttgtcacaagttctagcaaaagggattatatattaacatgggccctgatattgtaaacaggttctagcaaaaaac

SEQ ID NO: 798 - DNA, 785 bp, Glycine max
  misc_feature (688)..(688): n is a, c, g, or t
aaacttgcttcattgcatgtaactttattaaaagtgacagagaactccttcatcttttcacttattccatctccatcagaagatatatcatgagctgtcattgcttctttggctagggacaagacaaagtcatgaatttgagaagttgcgacttctaaatccgaagtcatctgcacatattctataggttgctgggacgaaataatttctttttctgcatttgagccagcagcatcttcagtattaccctgctcatcacacgtagtatcagaaggcttgacatcatggggaatggcagatacagagttctggatggaagtgcagcatgcctcttcaagaacgtgtttaatatccttcaggatcttctctatgtcagcacccttagccgtggactcaaaaactgatgatattcttgattgaagctctgctagcgacaagccagctggaacatcagattggggatcaggtgctgacaattcctcagcagaagaaacctcactaggcaatggatttggctcactattatcttgggtgttagagggaacatctttctcagtactgacctctgatacatcattggtcacagtttcatttgccatattgtttgaagtaactgacactccactgaaatcataggataaccgagccaatatctccacctccagatagcatacattattccaacttntagtggcatagactgctcattctcagagtttatcttaggcattggatactcaagatagtgtgtgaccagatcgacacttcacatatattcatctaac

SEQ ID NO: 799 - DNA, 1446 bp, Glycine max
aacaagtagataatgattcctcaccagcaatttcaacttcagtgggagcaaattctgttttagataatgactctcggccaggtcaagcaccagcacccactccagcagttcttgtccaacctgataacactcatcccatgtatactagagccaaggctggtgtagttaaacccaagttgcagcctactcttcgtttagctcatgctgagcccagatctacaaagtctgctctttctaatccaacatggctggcagctacgaaaactgagtatgaggccataatgtaaaatggtacttggtctcacactgctcttccttccaataggtcccctgtgggttggaaatgggtttttcaagtcaaagaaaatcctgatggcactgtcagtaaatacaaagccagactagtggctaaaggctttgaccagcaacctggttatgactacaatgagacattgtctcctgtaatcaaaccagttactgtcagaatgcttccttctcttgctgtcactgacaagtggagtcttcagcagttagatgtcaataatgcttttctcaatggtgttcttgaagaggagtacatgagtcagcccctgaatttgaagatcccaacaaacagctattgagtaagttgcataaggcaatttatgggcctaaacaagctcctagagcttggtttgataaactaaagggccactcttcttttcgtttcagttcaggtccagcaagtgtgataccctcccttttttctttacactgattccaaaaaatactgttatctacatgcttgtgtatgtagatgacattattgtcacgggaacaatcctatattcatcaagtccttagtaaccaaactcaacactgagttctcacttaaagacctggggaatcttgactatttcctgggaattgaagtcagacctcagtccaatggtgctcttattctgactcagtctaggtacattagagatttattgggaaaaaaaaaaatggatgaggccaatcctatttcttctccaatggttggaggcttcaagttaactaagtcagggtatgagcctttgcctgaccccactctagacaggtttattgtgggagccttgcagtatgcaaccatcactcgacctgaaatcagtttcactgttaacaaagtctgccagtacatgtcagatccaactgagcagcattgggcagcagtaaaacgaattctcaggtatctagctggtaccatcaactttggttggaagattctccctccttctactggacctccctttacagttaatgcttactgtgatgatgacaacagaaggtcaacttctggtgcagccatcatttttggctcaaatttagtttcttggtggtcaaagaaacagtctgttgttgcaaggtccagtacagaggctgaatattgcagtctagccttagccactgcaggcatgcaaactg

SEQ ID NO: 800 - DNA, 835 bp, Glycine max
aaaacaatgcagctttttgttttcaatttttatggaaccacctttcttgttatttacggtatggttattattatggggattgtattggagttaggagccacccctgctcctgctcctgcacctgcaccattgctgcctccatcggaagcaaatgctatactcaatagtggatggtggaatctatcacagttagattcacacaatatctgttcatggtatggtatatcttgcaacgtcgctggaagcataactagcatcggatgtccattttatacactgtggattcgattagagacactaaacctctctattttcaagaatttagaatggcttgaggtctcaggctgtggactacaagggactataccacctgatattggtaatctccataaactcactcatctctgtttgtcctataattctatttatggtcaaatacctcctgcactggcaaatcttacccaattaaagagcctaaccctttctaacaacaattttcaaggccccattcctggtgagttgttgtttctaaaaaatcttactatgttagatttgtcctataatttacttgatggtgaaatacctcctgcactcgcaaatcttacccaattaaagagactaaccctttctaacaacaaatttcaaggtctcattcctcggaagttggtggttctaaaaaaactcactggcttaaatttgtcctataaattttcttcaatgggcaaatacctttctgcacctagcaaaatttttccccaatttaaagagccttaacccttttctaacaacaatttttcaaggccctaattctctgggaagtggtggtttttaaaaa

SEQ ID NO: 801 - DNA, 687 bp, Glycine max
atataagtgagactattattattaagaaggtggcccgcaaggtatgtcaacattattcatgaccttgccatccaattgtaaatgattaaatttccctggtctggatgtggatttttgtgtccatgctgtttacctgtagttacatggtgtagagatctttaacattgacctcagataaaatatcaacaaaccttttatgcacatatttcctgtgtatctaactagctaattagccactttttggatccaatttaatggaattttatttctgctaagtgttctcaaaattgacaaatggataaataattaagaaaatctagaaacaaagaatgcgtctaggaaatgttgattggtccccccccgcccccctctttttaatctaggttagaggttttatagaatttgaaagtggaaaccatttgctttattttaattaggtgtaactacttgagttggatgagaggaaaccttaatgtccgatttttgaaatggggaattcttattggattggatcctatctttagtggttgaatgactagttttaggatcaatgatttatcttatttttatttttttcttaaactgcctagctatctcttttatgcacaattaacccaaaagttgtgtatactgtatagtgactattggctatttgaaattcagatgttgaatttcttttttgttttt

SEQ ID NO: 802 - DNA, 710 bp, Glycine max
agcttgcatgcctgcagcggataggcctgctttggcagcatctttgactttctcagcagataggaggattgaccctccctcatgttgaccacatgaaccaagtacttttgacatgtcctctgaattcaaaaggaaaaaaaataaaaaataaaaagcatttcccaaagaattacacactgggtattaccactttaccagacaatggggatataattacacatcagtaactgaaaaatacaaccataactcactatttttctgatttgaatttgcaacctctccatcatggccaccatctctattatgtatactttctgaatttgtccttcacatgcaaataaaaaaacctaattatatgaataatgcaataaggctggctgttggtgcagaaggagaataaaattattgggcaaagagaaagtgaaaagcacaatagcaaacaactaaatatcttgtgcttgttaaaaagtgaaagggaataactatgaatagctatgagaaaaaactttaactaagaaatgacaatcactctgacactcaccgattatcattttccactgcttctatatgtgcccgcgctcccagaattattttccctgacaattgaagcctaaaacctgccattgagccacaaaaattggaagtcttacttctttggggcccaacaaacacttagaaggccttacaaaaaagggccaacccccttttaa

SEQ ID NO: 803 - DNA, 749 bp, Glycine max
cttacctgcaatcatcttttctgcaagtaaatccacaccctcttcaattcattcttcctctttggcactttcttttcaatagcaacgctaatttaacctaattttattttgaattcagctcgtgcgttttcaagtccatgaaatcagcctctgcttgtcctgtctgtaaaattcctttcactcgtcgaggtacgtctcatcctctcgctttctcgtataataaccctaattctgcactacacttcaaaatcgaattcaaaatgtagaggttcgccctgctcctcacatggacaacttggtcagcatatataaaaacatggaagctgcttcaggagttaatatatttgaaacccagaatgcacctgttactaacttatctggtgagtgattgcgattgcgactttgattttcatacatccgttagtacgagattatgcatggcttgctttcaattggggaacctgccattctgaatggactgtacatttttttttttataaaaaaacttatgcttaaagttatattgcagatggagaaaagcaatgtgaagttgatgctaactctggcaagatggaagctggtggaactcatacaggtcgtccgcgggagaagaaaacccggaagaagaaggagtctaagaagacggttcaggcccaccatggaaagcttaaggttcttgatttttgcaaaaccctttcttttttccaaccaaaaaaaaaaagggtaaccaaggtggcccgcaaaaaaat

SEQ ID NO: 804 - DNA, 773 bp, Glycine max
gcatgcctgcagcttgacacattttatggacgcataggaacctacctgggggctgtgtatgtacggtgattccatatcagaatttttgtggcctggttctgatgtttgagctgataggtaactgtaagaggcttttttaacaacattatattttgtgtttatctttttcctttgtctatcatttattatatttcaaatttaaatttatttctttttcttttctttcgtttaattgtatattttattgtacaattattatttctgtttgggaatttcttaggactaatgtaattcaacattctccctttcctttttttatatatatttgttattatccaaaatacctttttatttatacttcccataattatccaaatgcttaaataagtttttaggtcctataagttaacactttttctatttttggtccttataagtttattttttttactttagttcttgtaatttgaggcttttctaagtttgatctgtgtaagtttttttttattcattttgtaattattgtaagtttatgttttttccgttttagtcccttttagattttaatttttcatttataatcttcataatcttgcacttaccaatactagaagtgaaaaaatgcaaacatacaaggaccgaaaataaataaaatatcttataaagattaaaattaaaaaagtacaaacttacatagattaaaaataaaaccttatccaaactctggccctttgcattgttactgacgaaaggaacaatgaaacaaccggagc

SEQ ID NO: 805 - DNA, 825 bp, Glycine max
atattcgtcacaagtaattagcggcggtttttgaaaacctctggtatcgagaatattttgcagagatctttttgtagagattttaaacctacgctaactgtgaaaattttttaaaggaagttttaaacctacgctaaatatggaggtttattggaagagatttttatacctacactaaatatggaggtttttttgtaggaagttttaaaactatgctaaatgcggaacgtcaaataaaagattttatatattaaaaaaaagtataaggtatgccatttacaaatacaaaacagaggatatttcctcgccaatcacaggatccaaatgatggttattgggtatttgagaatttgatgacccaaatacttcataaccactaagaaaggccaatgttattcatatacctccctaaattattaaacataccttcctttcctttttttatatttgttattattcaaaatgtccttttattcatatcttccttaattattgaagatgttgggatggggatatcgtgatatagatttggactgtgtgactgaacttggctaaaatctatgacaattcaacacacctcccaattcttttttataattgttattatccaaaatgcgcttttattcatacctcccctaactattcaagatgtttggggtgggggtatatcgtgatatagatatggactgcgactgaacttggctaaaatatatggcacaaagctctgcaaaggatggattggtaacaaaatctgatcattacaaaacaaactacgtttgggagaactattttcatacctatgatagccctagctttttgatcatc

SEQ ID NO: 806 - DNA, 580 bp, Glycine max
gcgtgcctgcaggtaaaaatttatgctattaacgaagaagatgttaatggcaggtacgtttgttattcagacatatcatgcaaaatataacttgcttagcagcttcacagaacccaatagggcatgaataatatttccgtttaactggttaccttaccagcagacgcaaaaaacctcatgttagaccacaaccaacacatgtggccagaatcaataagcatagtaattttactaacagagaaaatttttaaccatgttcagtgtggcaaatatatgcttatggggtacagtaaataatgataactatgctaccaaagtttcatgcattgggggaggataaatgaagggaattgtttgagattattttaaggagatacaaataagagatctctagttaacataacaaaatccttcaattaatgagcatttactttttttgagctctccacttcggagtattttgtaagctaaattactttatacactttctggtgcttgtcaaaattgaattttaacatttattagaagagcagaaatttataaaaacatgtcatatttgtttttttattaaatcctttat

SEQ ID NO: 807 - DNA, 809 bp, Glycine max
gtcgacctgcagaaagagagattgaattaccagatttttttattttttttttgctcagcaaaaaacttttctgaaagggggttctctgactgtgtttttttattactggtagatattgagacattgttatatgggaccatttttcaggatccatcagtctcttcttcacagtgcacttgttattgtgaaaattttgtttctgaagataaagtatttacctgtcttgttattttgtgttgaagaccaactttactaaaaatgttgtttggtatagtaaatcccgttaacagttttgtatctctattatgttctctcatacaagagcctttttggcttgaaggccaataatcaattatcccaaaagtttgagttattaggtagaatttgcaaatgaacggtttatccattgatttctttttaactactcttactccataagcattttgctttcttttttttctctttccccagttcgttgattatttcagctaagtagaatgtcttaaaaatatcagttgtgactattttgatgcactctttgaagaaacacaccaaattttaggttgcaatttggcaaatttgcactttttactaccctgcattctagtgaagcataacatgtaaagctgtttttcgaatgtgaggcaagcagtagacataccttggagttaattcttttccaatccatgcctaatgcattttcagttttctaaaatcaaattccataaagtcagtctgattgcatttaggttgtggtaatatattagtattagtaggtttttaggttttatgggtaccttattttttaa

SEQ ID NO: 808 - DNA, 836 bp, Glycine max
  misc_feature (269)..(270): n is a, c, g, or t
tgcatgcctgcagtgttcgtaatctttattagtgttctccgccgtgaatgaaactcctcctatcgcctgatgaatttttaaggtttaatttttttaattctagcaatttagtatttttttatttttcatccttgcaagattattcttttatttttagtctttacaaattctgtttaatttgttttcgtccttcaaaccgtctaaataatacttttttcaattgttcaaaaggatatttaaagtgttttaaggaaaaaaataaaataaanntattttttatataagcagtcttacagtaatcccgtatatcctacggccaagatgattttcccactcggctctcccacaacagactactccggttaaggaattctgttggtctttattggagtgtagttagatagtaactagtagtttctctattcagcacagtactataaatattaccattgtagtagaatttagtaagtgaatgaaatacattttctaaagtttcatttatctgtcaattgcaatagtcttaatgtattatagactatagttgtatccttgtatggtacttttggagtgtttaaaactattgaggtgatttatgagcagaattctgattggaggtgtagattggtggaatactggatcgtgggggtggaggtcacacgttgggacagcagtttatttatatagattcgtgctgaattgtatttggtacttttcactctttgtatttaattaccatacatcacaggatgagtagagggaatgcattatgctatcaagaagttggctagttgggacttgggaaagggttgttgttttgggggtatgttgctttatga

SEQ ID NO: 809 - DNA, 747 bp, Glycine max
aaggtctctctctctctctctctctctctctcctgaatcctaatcctttctttcctttgtccacaactcattcaagtgctcttgtttccaaccccatatggatttcattcactatttcacacagaaaactattagcgaccgaatttagtgacaaaaagttgcttttttgttactaatgattgtgtcacaaaatttttaggaccagttttcttctgtttcatttcctgttttcactcttaatttacaaaatggccatctgtttttcaacatgtttcctgtttgctaaaaagttgtttttcattgtttgctaaaaatatacttgaaaacaagaacatattgaaaagttttgtaaattaaaagtgaaaacaggaataaacgcgttcttagtgacaatttttttaaaatttaaatataaattgtttcgttacaaatatttttttttctttatagtgattacttgatgtatatgataaaatcacacttttttcttctttcaattagttgattttagaatcttagaagcttataatgatccaaaacttttggaataataatgttgtgctggaaattaaaatggtttggttggttattgaataatagtggtagcagaagtggtggggacgtactttttgatatttgcagggtgtgcttcagtggtggggaaccctgacaaggacaaagtgggcacacaaccctgggatttcaattgtttgggggctcactggtatgggtttggcttacctctgt

SEQ ID NO: 810 - DNA, 665 bp, Glycine max
aaagatcaacaatcctcaagtcctttggtaggcctttaataatttcttggaaacaagacgaaaatctaaggaatagtcttaacttttaagcattgatatttgatatactttaaccagtgctctcttcgcaaactcagggaaatacaaactcaaaagacataagaaagaacctgagtagttccatgaggcaaacaacagaatacaacatccaaatcagaaaagttggcatcctttattgcaatcaaatctggcaagtcctgcaaacatggattaagttcaaattatgtaatttacataacaatgcaccgacatgcatatttcataatcacgccatgaggattgctcaagaaaatgatgattgagaataacaacaacctccataatcatcaaccaaaagatatgtaaatttcacttagaagaagcaaaacaagatagcacacccaaacccaagtgctcaaatgtgggaatacagaagagattggctgcccagcttttcctatcagcagtcatcagtgcaatcccaaactgtggatgatttgccaacagttgcagaacctaaccaaaaaagtattacaatatcacaacacagaaacactagatcaaaactgacagtgacatcaacttgcttacctcggaatagtgtttgcttaacttttaaagaaatg

SEQ ID NO: 811 - DNA, 1473 bp, Glycine max
aagcatctcttccccattccatttcattgctattcttcttgctaagtagactggtggttggtgcatttcaaatcatggttttctgaaaagcaaagcttgctaaacactgctactatgttttaagcattcttatgtcactctcttctttttattttattttatttttatctgaaggtgggaaagccattacattagaatcttacgagggttactatgtgtcaagtattcttgtgccatgccattctctttgaagcttataattaatgtgcgtgctttcacattattattggcttatttcattgttatggcagcagataacaacaatttctttgcatatcttattggtagcaaggacaccctcaactaaaatttagaaaagaaaaataaaaatacaagtgattaaccaaagacattacttaattagggtaaatatatcttacattacatgtagaaccacgtgtaaagattccctgccagagtgtagcgaaatgcaagcatgaatttgggggctctatccagctagaagaggaatatccttgaactattagagagttgttttatacagtagaaggaacaaaggaacttgtttgagtgggtttgtaatcgtggaggcaattagctagtcttgagtgtggatgacgttggaaggatactacttactagactatgttgctcccactaagacagtatttccccaaatacatttctttaagttaatgggattgtgcatgcaggggtgacttttggtgcataccaaatttaaagacgcccattactgagggggttgaagaatactactttagtgggtgggtgggttactgctagcaactatactatactgtggagtttttaacaattttgaggcagacccgggccttgcaactctcacgggcaaacatgatcaatggcctgctgagattgtcttgcgtggattaaaaatacatggtttctaaaagcatgaatgagagaatccatttttaataaaccaaataaggatctttcatgataatccttcataatcttgaattttatcagtttcagtaggtagaccataagatacaattcaagcaaaagttcttaaattcattgagatatcaaataacaaattatcatgcttacatattcaccatttgagtttccaccaacaattattctaataattacatgtgcaatttgacctatcgacgaaatatgcaatacatttcattcttgtttgggtaatggtaatagcaatgagattcactataagaaactcgctaatttgaccttgcaactctctcattaatccctttgcatagcgtttttcctcattttctagtatttagtgttggtgcatgtcctcttggtttaataaaagttgttctagtgcttagtgttagttttatcgcttcaagcgccaagactgaattttccaatacttcctttctcttttaaaaaataatgactaaggtaaatgtagggttttaaatgaat

SEQ ID NO: 812 - DNA, 742 bp, Glycine max
agaagttgggctgcctcatttgcctagttgaccatccctccaataatcccaaactgacttttggcatagttgatctttaatccagaagccaattcaaagcctcgaagcaaagccttcaaaacaagaacattctcccaatcagcctctcccacaaaagctgtgtcgtcagcatattgcaaaatattagtgggttcctttttctttccaaccatgtagcttctatatagatttttctgcactgcttccctcatcaatcctgtgatgccttcaccaactatgttaaatagcaatggggctaaaggatccccttgcctcaagcccctagtagggacaagctcctttgtggggctgccattaactagaactgatatggttgttgttgtgagacatgcagaaatccattgtctccactttggacagaatcccattctttgcaacatatagtcaagaaaagaccatgagactgagtcataagccttttcgaagtccaccttgaagaccataactggcttcttacttctgcaagcttcctcaatcacctcattgaggattaatatgccatgcaggatgtgtctatctttgatgaaggctgtctgtctctcatcaataagagcagatataacaagcctcaatctatttgctagtaacttggctatgaccttgtacatacagccaatcaaggagaatggtctgtaatcatcaaacgactgagggtgattaatttttgggaattagagccagg

SEQ ID NO: 813 - DNA, 586 bp, Glycine max
aattcgaggatgatcctgatctgtatgttctcaagccaataaagtatgtgggcattgaagtgtggcaggtgtgtgtcaatatatacatacacattatgtttttcttctttattgattggaagagcatttagaagtgcttgttttagtttatgaaagtggcttatgaccttcactaagctcctcttagcttatttcaaagttaaactcttgaataagctctcatttaataagaaattattgaataagtgcttgattaaattgtttactcgaacatgccctcggtagtaattgcctacaaaaactagctgtacttgaatatttagctattatcaaatatttaagtgtgacaatgttaaattttgaatttttaggtgaaggcaggttcagtttacgacaatatcttaatttgtgatgacccacagtatgcaaagcaagttgtggatgaatatatggctagcaacagagaggtgagcgtttactttcagactttgtatcttttatttagtttgtaggcactaggaatcatagtatctgcattctcattatgtgtaaaatctcaggctgaaaaagaagcttttgaagaagc

SEQ ID NO: 814 - DNA, 732 bp, Glycine max
gcatgcctgcagtggaaattcagtgcagtgaagagtcctacgatttgaccaattctacatggggatatcaggtccgctttcctcttgtattatgatgagtttttatataattaaatattatgtatgtgttttcctcgtggaactaaaccatattattctcaagaacatttaattactgcaaatctgttaggttgtatagatttaattggacagtaggacattggtgtcatgtacgtacgttattacaggttggattactgggagagcaattagaaatatacgaagaaaaaagtaacagttctattcaatggagtccactagggaatacttgcaatcaaacactcacttggtataaggtagttgctgtttatgcgatccaaatggcaccatttttctttacctgaaattaatatagagtgatgatcatactgtagacggcatttgattcacccaagggtgatgagcctgttgcgttgaaccttgagtccatgggaaaaggtcaagcttgggtgaatggggaaagcattggtcgttattggatctcgttccatgattccaaaggccagccttcacaaacgctgtaagttacatgaaactcaattctgaaattctatcttcacaaaactcaattctgtaaagtagcttttgcgtgctaatgatggtttttatttttattacattcataggtatcacgtgccttgggcgttcctcaaaaacattggaaacattttg

SEQ ID NO: 815 - DNA, 1450 bp, Glycine max
catcttgcatgcctgcagtatatcatatcaagagagacgaatagcataagagacaaaatgtagcatggattgatatatttaagaacagaacagattaaaaaggaaactgtcacacaattataaaatgcgtaaataaaccaaccttaatattatgaaaaagtttatgattggaaataatggggtagttgctgtagctgccacgctgaaatctgttattccaccagcgaggaacaagtatatcaatggcattggggatgttgggtccaaacatatccctgagcactgccatagcttctctcaaggtctcttcatcagcttgagcttccacacgtttcgattcctcattagtcaatgtcaccactaacatattggacccaggatacgcgttctccatgtgctgtcaacaaatcaacaaatcagtagataaactaaaaagattttgatgaatgacccaagaaactagacaacttttctgattctgaataaagatttggatttcaatcattttcacttatcatacaagttcagatccaaaatcaatgcatcgttgcataggtttttagtattgacaagaatagaactaatatcctgtacaaaaattcaatagtccaaggaattagatttttaatcctccatcgtagaatactcttctatagtttgacatatgttatgttacctaatattctatatgaataagaaaccaatcatagctagtgtagacagtagttcccattaccaaactcaaacaaatgactccaagggaataccaacatcgtagaaagataatgaaccatttaatattaattaaccgtaacaaagaaaaaccattgctacaattaatatgatcataataagacaaatggaaataattgaagcaaaagtatttatacacctaatccaccttgcgtaaatcaggggaggggagggataatagcaaagctatttttccatatcaaacaaaagattcgttattatcaattaagtctagtatgttgaattacgacaagaataatagatgatattgaaagctagttttaaataaatccattatgaagttcagccgataattgactcaaatctggagattactaatgggatccgcattaggattctagtacattttacagggattgttattttacaaatatttaatgtttaaccagagtagtgtttaaccacaggaagggggtaaaaacaaaagacataatttaagctattttattgtaaatcaagataaaccacaagttaattgatagctagagattaagatgaaccatgtgacccacatgcacaacacaaaaattataacaaggtattatttaaatcctcagaatgccaaccattatctttggtttatactttaaatcatccaaaagcaagatacgtatgctcaatcgggttggtccctaaggttaggtaagtgactagtacgttcattggaaataaattg

SEQ ID NO: 816 - DNA, 841 bp, Glycine max
tctcaggcatcttaatttggtgaaatgtcagaaatgaaactgatattaaagcagagaaaatatgtgtgggaaactgttgatgataatatataatagttctccttgtttatagtagtaaagaaatcacacacaatattacaagacacaagacacgaagaaagagagcaaacttggtacaaaagtacgctttgttatggggagaaatggggtatttatagaaatgaaacttcgaaagttgaaagggatttagatatatgccaagaaaagctcatttaattatgttgtttaaaatttaagaattctttcataaaactattgtttaagaataattaatgggaaaattggataatagtagtatttaaaatttagttaataagttggttttatttttataaaagaaatagttatattacttttattaaatgaaattatattccttttccgttttgccatttgaatgctatatatgcgagtaatttacttatattattttttattgataaatgttaataattaatttgttgtcagtgcaagtaaaaattttatgttagaagaaatcaaatcaatctattttgtaatttttacgcttagatagattatctattagtcttcaaccttattagttggtatcacttttagccaaatatcgaccattaacttaataaaaaatagaatcttttattttcatcatttttttctttaacaaaagattattttaatgattttttttaaaattattgttggtaaaaaatttatattaaactcttttgcaaaccaaaatttaaaaaggaagaaaaaacccccaaaaattcgtttgaaaggaagggaaattttaaccttt

SEQ ID NO: 817 - DNA, 947 bp, Glycine max
aaaggaaacatatacctacatattcaagaaataaaataagatagtaacatgcaactagagataatataacattagtattcaaattaacatctcatgaaaataaacctaagaataatattactcaatgtgtgtttagtcaggcaaagaaggttcttgcctattttctatgaacctctaataggaaaggtgaaaaaaaaaggcaaacactgacatccccatatcaagtggcagtacacctggtcttcatatgcttctcactaccaaacacttgtatgtatgacattcattttgcctactcgctctttattatagcaatgtttcgttagtaattattagtatgcgggacacgattttgttttcattctgtcactttttcttattctttttttggtgggtaaatgtgtttgattctcaaagtttatgttgttgttggacgttggtattgttcaggggtttggaaaggtgagaaagcaacgagatgggaagctacttgtcaagggttcaagcaagagtttgaacctaacttcatcgcaaaatgaggttcgtgttgatgtgcttggagctagtggctacaagggttcttgagtaaactacatggcaccaaccttcctgagtgtgcttcaatcataaaaggtgtctattttacattaagatttgattcaattttatccatgggattaacaattaaatctatgtaatatccttctcatccgggttatatacccttataatctttttggcataaaaatcctaattaagaaagccgatactcctgccatattgaaactccttcaatgttaaagtggggagttagcccttatgattacctcttattttttaaaataacaactctttcggtcacggttatccctctctatccagtctgtaagaatgaatatttgtacgctccctggcaacccaccgttcccactataaaacgccctctt

SEQ ID NO: 818 - DNA, 811 bp, Glycine max
cccaactaacagatgttggcgcccaattttgaattaaacttatccttggtttacgtgcatatatatgtctgcatgaggtccccccctttaatagtattccagataatttgtgacgccccctccatctacgtaggacccacacactagacataaaatatgtcttagcataattgtgaaatgtatgagccataaaatctgaagttaacttgttcactcttataatttatttcggttcctcttctgatcattaacaccaagtctaggctgttccattaataattcacatatagttcattttaaacaaatatcaccagcatcctcatgagtcatgaattggaaataatgcagtttcaacacatgcaatccgtgttgtattggttatgtgatcagtggccagagttcagtagatctcgttacagtgcacaagttttccaagaaagaaacaatcatgtgctagctactcacatttgcaagtgcaataacttaatgtttaaccatacaatttaggacagaggtgggtggaggacttaaactctggcaattaagtgtacgatagtgacctcacagtaccggaaacgcaatgcatccatcttatcttgatatcaaattaattagtcctcatttctcatttctcatttctcagtgcccacctgactgtagaatggggaccatgcatgtctttcttacaaataaagaaggatttctccttcacaatgcttagggacctatggcagttaacccgggtttggtattatgagcaagaagttctgaaaattttctcagtgacccaaagggattttttggtggtggt

SEQ ID NO: 819 - DNA, 653 bp, Glycine max
ccacttttgcatgcctgcagagccatatatgttttcatcaagccacagatagaattggtattttgaccaatttgtcaacttgtataaggtcttatttaggagaaaatattaaagtaaaatcaattaaacttctcccataagttaaaattatgcatctcaactatggagaagttagatgagagtttctactaagttgatttgagaaactcaattcatttaatcttcttgttttcttttctacaagtggcaatgaaaaagctaatttaaatatgacctaaacacagtacacaaatcagcagcagaagaaagtagtactaaaataaaataacttgcatctttgcaataatcctaacacacatgctgcacatggattctcaaaaaggtactaactaacaaaggtattaacgaattaacaaatgttatgaaaaatactgtaaacatctgcttagacttgtgcattctcaaaattataaagcatgatggattaaagcaggactaaaagcaaatgggtgctataggtatcattacccctcctctccaaaaaaacccaacaaataataaaaataattaaaaattaatcaagaaaaaactgctagtaaaaccaatcaaacaatgcagtttacctcaatttgggttctcgcaactgttcagtt

SEQ ID NO: 820 - DNA, 793 bp, Glycine max
atcctcatggaggttcatgcaaccccactgagtttgtgaatcatggtatactacattgcttttatttttctggtatttcattacattaacatatgaaaaaatttaaagaaaaaataaattatatggctttgcaaatcacctattggttgaatttgtttaagacaaaattagttaacccatgggttcattattgggcgaaccattctgtgtctggcaaaatgtacctgatgcatgttgagataatatatgaaatgtggtttgagtgtagttgtgactcaatccaactttcacctactgtctcactttattgaggtgacttggttgctacttgctacctttttgagagatttgattcctacatgacacattgttatatttgattttcaaaaaaatctttttctaggattgaagatcacagttcatgtaattttctttttggtcatgtgacgttcatatgtttttaactttgtaggtggtcacctctttatttgtttgccactgatatagtaatatatgcttttctccaatctttctgatctaacatggataggatatctgttgttttatcactgaataagctttgtggatatttttagtcattttttcattgtctccccatttatatgttggtgactgtctatctctacctatattaaagtgtagtatgtgagattttggaagaagtgatgatggtgcaatcatttcttattttactttgaaattgaaagtctacttatcaaaattggccaagtcacatggaccaaaaagaaaattactgagctgtgattaaatt

SEQ ID NO: 821 - DNA, 885 bp, Glycine max
  misc_feature (749)..(749): n is a, c, g, or t
  misc_feature (820)..(821): n is a, c, g, or t
  misc_feature (833)..(833): n is a, c, g, or t
tgcatgcctgcagcaacaccggtcatggctgtggcagtgagagtgatcatgttgatggagtttagaagaagggagttccagttgtttctttgttcgccaatgtttctgtgcatttcaattctgtcagctacttcatctagaactgcgtagagttgaacaatggccttattagatttcttgctactgctagggctgaataaatctgggtgtatatgagtggtgaccgcattcttttttaatgggcttgtttgtatagaagcattaaattcctcaacgagcagctttcttgttggtactttaggaacagaataagtcactcgtgaaggtttagggagatggatagaggcgttgaattttcttagagaagaggaaaaggaagatgtggtttgtaaagaagccatgagagattaattaactgaagggtctctctagtctttgtgtgttttgtggtgaggagatcaaatcgggggctggaagggatttgaaagatatgagaatgagaatgaagggtagctagggtggtgggcgtttatatagggaatgggaaaggaacaagtcagggaaggaaaatgttgactattctacaaccaaaaatatttataaaatagacttggccttgggggaccctttccagctctaagactttcttaagttccaaatttcaacatctaggcccttgtgcgaccaagtaaagccattaacgccatcaatatggggaacgtcaaactctcttgtacgtacttaattcncataggcggataaatctgctgctttcgtttactggttctccacttctttcactaatttgatttataaccgnncataaattttgncttgatcaagcttttatcttctttttttttttaaaaaaaaaaactggctgag

SEQ ID NO: 822 - DNA, 811 bp, Glycine max
aggaagggcaaattgaagcagcaaaagaaactcatataatggatcaggatggatcaatccaagacgaacaacacctttcactacacctataccaattgctggcaagacaatacatctaaccatcgtaaccccaataatgagtggaagttgctttcctagtccattcaaacctgaacaatgcaaccagttttgtcaccatattttttcaaatcacaacttctaaattcaactcaaccctaattgagaatttcattttttgttttatttacctttgataagatttgctccaaccaacaaagtcattactggaatgcatgcatacctgcaaattggggaaaataaaagtgtgcgatcatctaattaatgtaccttcaattttaatttcacttaataactaaacttaggtgcaagggacacttaccccaccatgattaccgagtcctcaaccacacggagagtagcattatcaccaactaatagtttccgaaattgagggactacaccaattattaaaccaataatctacatgcaaagaaggaaaagagaaagcatctttgttaggaactaacaaggttgttttttagaacttaattatcataagtaacacatgactaagttatttttagtcaagtcttgaatttgaaatgatttaagataaaatttacatctaatttctaaagtatttttagcatcattctttaattagaattggaatctcgatcacttcaataatttgtatgataaaaggttacattagaagtcaacataaattatcgacctcaaattgcaattttaattgagaaatactaaa

SEQ ID NO: 823 - DNA, 773 bp, Glycine max
atggataattcatccagcggctcaagtaaccagttgctccaaaagtcagatgcaagggttcaaaatctgaaaccagagacaaggattcaaaaatctgacgatcgattgtttacacttgctgctattgggcttactatagcaattgtggttcttttgctgaagaagttcattaaatctacagaatatggtgctgttttcatggatgaatcttagatgaattatttgctcgtgttagcttcaatatcaagattcttagcccaggtatagtcgataggaaaatttagaacttctctgatattttatgatctttgaattgtacgattggcttgtaattatggtaatataaatatatactacagctatgagttcgtgagcaagggtctactatgtggtaggtacagttacaatgccttattgtttgcttatgacccctgatttatgtatacaaaccgaaagtactcatcattgacaaaaaggtcggataaacaacttcgtggcttatatttttaatagttgagtagcattattgatagttgcttatacaagcatattctataaattctcaattgttccaaacttccaatgatatttgcaagttacttaactttaagaaccaacttaaagttcaagtctattggagatgctcttatggttatagagtgagaagaaacagttaacatcccaacagaaaaatttagaggcatatttttcttttcttttggcctttgtagaacttagactttcattgtacgtgaaattagaaaagctgaaat

SEQ ID NO: 824 - DNA, 700 bp, Glycine max
tatagtcgatctgcagaagttttgaaaccattgacgggaccaaagtattataccaagatatgttttagcaatagaagttttggcttggatgctgcccgtgttgctgaacccattctattatcagttaaggatcaattgaaagaggtggatctttcagatttcattgctggaagaccagaagcagaggctcttgaagtgatgactatattttcttctgcactggaaggtagtgttttgaggtatctgaacctgtcaaataatgccatgggtgaaaaaggggttagagcttttcggtcactcctaaaatcacaaactagcttggaggagctttatttgatgaatgatggtatatcagaggaagctgcaaaagcagtttctgaattgcttccttccactgagaagcttagggttcttcatttccataacaacatgactggggatgaaggggcaattgctattgctgaaattgtgaaacattccccagctttggaagattttcggtgctcatcaaccagagtaggctctgatggtggagttgcccttgctgaagcacttggggcttgtaaacatttgaggaagcttgacttgcgtgacaacatgtttggagaagaagctggagttgctctaagtaaagttatacctgcatttacagatcttacaaagatatacctcagttatttgaacctggaagatgatggtg

SEQ ID NO: 825 - DNA, 732 bp, Glycine max
ttgatattttctcctaccacatccttgattgtaactttttctattacaggtagagcatttgggtcataagcatcatccggatgctccccatataaaccagtgaaccaaatagcaatatctacattagccaagctcacgttagagacatagatatttctaacataaccacccctgccaggagaagtctttattctgattccattatatgaatcatagaattgaatatcttctgcatgaacttcagatacaccaccagacatctcacttccaatagcaatcccacttgtttgagttttaccaactagcctgtggatgataatgtttgtgcttgggcgaccgtatgcaatgccatactcatcccacccgctcttgatggcaatcagatcatcaccagtgcttatataacagtcttcaatgcatacgttgtcagaagaatctggacacatggtaaaggaatgtgtgtgagaatctaataaatcttaattttgaggatgttaatactgtttaaggggtacattgctctaaagctaggaaattacctttgccatgatgcacaattgcataaatttagatattcagtcttcatttagcccaaatgaattttttttctttaaaacactttatgaaaaaggcttgataccgccaccaaagtccaaaactttttaagttaaaggaaaatatttggtaattgtcaattacacaatagttggtatgataatatgacattcaggg

SEQ ID NO: 826 - DNA, 773 bp, Glycine max
tttccaaagtagaagaccactctgagcatagttttcttattcttactaggcagtggtctcttttagttaatcaattgccataaaatgcaaggattgtattttaacttctaaatttggttaacttgggtttgaattttttgcactgggattaagtcctacaaattttttgatagtctaatgagctcagacattgcaatttcaattatgatatgtttatactacttgttacagaaccctgaagattggccagttgttgatcctctaccgtcgtatgggagaggaagagaattgccaggtggaaggcataagagcctcatttatgggcacaatctgactgatgttatcataacaggtcagtaacattcaacaaaattatcattttctcaatacatattggtatattgaagctatcaatgtttcactgaaggtaataatggaactatcgatggtcaagggagtatctggtggaacaggtttatgaacagaactctggattatacacgtccccatttggtagaattgatgaattcaacaggggttctcatttcaaatttaaccttcttgaattctccattttggacaatccatcctgtatattgcagggtttgtcccccactgaaagattgagtttatatattattccttgttttccgtagttcaagtacttccattgccttttaaaaaactgggccaataaaggagctttcatgagtagggggagatttgagactgtttttatggatgaacagccaagttacagttcaaaatgtcag

SEQ ID NO: 827 - DNA, 819 bp, Glycine max
gatcctctatagtcgactctgcagcactattaacatatattcttagagaacaaaaagagttatcttcaagcacctgtgtcacatttgccccaggcatgtaattatactaacttcacaactgaagttattattgaattgagtaatgaacattactagttgttcaaattacattgaattacctttcatttgatgatggtcaaatatgttggtgtttgaaatgagctggagctattgttataatcattaatcagtttgggctgtgatatgagatttcaaatttctcagtcaatcactattgttttgacatacaagcatgagatttatatatctatttagtgtgatatgtattgtaatttatgtgagaattaattattttgttacgagtaggaatgcctaattaatttgacataatagttgcaaaattaaagttgaatatctattttctttcttcgaataaacttgaagaagatatgagtgaagtaagaatacctattttatcattatacattttgcttatggaattttctttacagcgttgaaatttctctaatattggagtcttgcctatgttgtaatcattactgctaagacatttcattgttgtcatttttgcagctgcttgtatgacatgggagttaggtgaatcagggaagcacttcatcactaccattataaatggttacgacttggtacccacattatcagcttcctttgttgatgatctccgatctgaggtgattagttaagtcctcccagatgattttggcaaatatcatcattgttaaattaagttgggttctaatgttaatttgttagggc

SEQ ID NO: 828 - DNA, 768 bp, Glycine max
ttgcatgcctgcagtgtttgagagtacttagataagtaattggttacatttcaaaatactccaaacaagtagatatttatatcgtaagaccttttatatgtactgcttcttgcttaaactgggaaatggaaatcgaatttatttatgtgtaaaagctctttacaatatatggtacaaaatattgaaattcttacaatgaactcttaaataactcggacaatatatactctccattacaactcaagatgtaccaaactgcaccttaaataattcagccactatttatgataaatattttcaagcatatcacatctcacacatgtgagaattatagtggaaaaatagtagtatattaaagcaatttatcttgtcacgctcatatgaaatgattagattcataaagaaaaaccaaacatttagccctgacatattgtaaaataaaattcaaaaagtaattagccgactgaaatagagaatctgcccaaaaatataaagcaaaagtgttatttaactacttcactgtcaagtactcacagtattggtcaatttaattaaatttcccaggattggcagcatcaatgatggggatatttagtcatggggaaaaaaaagaaaagggcacatacactcagctttcctggaagttactgcaaatatgcaaatctgcccatgcggatcacattgcaatttatacattttctatattacagtagtatctttaaattatttagaggattcaataatatatagaattatcatagaatactt

SEQ ID NO: 829 - DNA, 853 bp, Glycine max
cccgagaaccttttaaagtcaacctgcagttggagaggtaattgcatgtttatagatgaaaatagtttctttaaattaacatttgatgtgtttgagctttttgacttttcctcagattggtgtggacaaaggatcacacggaaagaagattgatttttctgagcaggtattagcttgttatgttatttttgtgggctattattggggggtgtgtgagtgaaagattaaatttggactgtataatcatacacaagtgattaagatttaatgtgatgtgattacttataaagtcacatgactttttaagattaaattttaactgtccatgtttggttatacaatccaaatttaatcttctcactctcactctcatataagatactttcctctcatatgatgtgtcctctctctctatatatgcagttctgcatgcaatttctgtgttggaattatggggttttaggtgttgagggagagagtagggagaataatattctcttgtgtattgtgttgtattacaatatgatgctattgttcatgaaacctaactcaatatgcctttttatactattaactaatcataatcttaactaataaggaaacaattcataagatattaggaaattatggaaactaagaaaataggaaaactagttgtaagagataatctctagcataccttaaagtattctatgataaatctatatattatttggatacttttaataatttaaaagatacttcctgcattatggaaaatgtgttaaaatcactggtgatccccattagccgatttggctattttgccagtaacttcccagaaagcctgagtgggtggtgcccttttcctttt

SEQ ID NO: 830 - DNA, 802 bp, Glycine max
  misc_feature (640)..(640): n is a, c, g, or t
tgcaccgggaaccatctattctacctttttaaatggaatgtcatttgtggaaggatgggaacaaaacttttatatttccaaatggagcatgcaccagttggtacatatcagttatttttgtcttctggatttgtgttttgaatttgtttatctatagtttcctaatacaaaactttatatttgtgttttgagtttgtttcctaactgtctcagcaatttacccttacctttcagtgaaggcaactgacaactagtgcagatagattaagtgtttattcaccagtctgaagaaatagaaaactactgatgacaagatcttccctaaaccaaagtcaaaaacttaaattgcttaactaattgtcacacttcacaattatgcttttgaaccctatggttataccagaagaaaaaagaattcagtgacataatacaaaataataaaaaatagttttgactgctattattcatagttttataaaaagttattttattattggattacactttcatcttgtaagatcttttaatatagactacatgatttggattttccagtgtatgtattgttggatggtgtgttctctatttctattgtttgggctacttccctgtgttttgattatttaaagaataatcttgngttttttttttgtatgcatgcatcctttttttattcatggtggtctctctctctctccctccccttcaattttttggattttaaaaattttgatattggagaattggttatttgaacttgtttcaatgtcccagcttgatggatgttcatcaatatacgaac

SEQ ID NO: 831 - DNA, 769 bp, Glycine max
aaattctatgggtgcagtctctccttcaagaacttaaatgcagacttctcactcccacaattctctgtgacaacctcagtaccgttacccttgctcataaccctgtgctgcataataggaccaagcacatggaattggatatattctttgtgagggaaaaagtgctctccaagaatctcattgtgaagcatgttccagcccaagatcaatgggcagacttactaactaagcctctctcagcagtgaaatttctccctctgcatgacaaactgcgtgtgatcaacaaactcaatctgcttgatgcaccctcagtttctaagggggaataatagagtgaatagggtaaatagttagtaagtgagttatgccagctggattctattagtttgttacgttgttatgcaatagtttgttgctactctatataagagcattgtattcattatttcagataagatcaatatatgagaaatagactttactctctctctttctcttttatgatattctatcagttcaaatatgtacaaaatgtcttcgaatatcttttgtgtatcttagaagatttcagaatatctttttatctttagagtatattatggaatcaattagttacttaatgcttaatagaggaaacaatagtagacattggttcctaattttattatgtttccttattttttacaccttaatttatcaggggtagtagtcgtatcacgtatggtattatcaggcttgggcttggactaatagtattgcactagtattt

SEQ ID NO: 832 - DNA, 1446 bp, Glycine max
tttgacaccttgcatgcctgcagagcgagatggtgaagtggagcatacacggaagaaactccatggtgcaggtgaacgacgatgttatgtgcttagggtttgttgatggaggtgagaatccgaggaaccctattgtgattggagggtatcaattggaggatgtgttggtgcagattgattttgatacttccatggtgggattcagtccttcgcttctgacgaagcatgctacttgctctcatttcaaaccctagttttctgatgaatcgtgatgattatagtttattattatccataccacatagtttttctttagattaagaagagttttgaggagtttaacacgttctgtaataacccttttattttttttttctttcttttttgctctcctgcggtattatctgtataaactgcttaagtggcctatgttaaatggcgatggcatttttgatggcatttttatttgaaattgaaatacttctccagtaaggaaaatttggttgagttatgacttgtgacttgtgagtattgccccatttgatgtaagcatatgattgactgattttgtttttgtttaattttaattggtgggtgtgattgataagaaacgcattttattgtggaatgatcatagtgggaaaagcatatccgtttataagggacggtaaagatacaagatacaaatccagctcatagcacacagtttttctcccgaaacaaacaaaagatgtggcgcacagaatatctttttattccttcaagatgctctctagcgatacataaattaattacccatacttttattttttcccccataaaatgaagcttctggactatttttcttcgctgctatagtcaattcaaataatcttaagaatgcaagtcttcaaagtacagcgactcataatctgtggcatgggcttttgtatatattttaagcttattgcgcttcataattcaaatttcaattataaaatccataaaaaaacaattttaatttttttttatgtatgacgtcggactataattaagtgcatcatcactctcaatttttttgtttgagaatatgcatcactcttgtattaataatcctaagtttgaaaaaatttgacgcgaaacaaaaattagtggacgcttgcgttggtaaacgctatcaaagtcgctccttttaacagtgacttgtccccatcccttgtcagtcacattattagaaagagaggtttaaggattttgtttacatgaataaaaatttatgacatagacatataatgaaaattaaattttaaaaagatagagattaacttaaaaaatgatcacaaagacaaaaatatttattcactcaaagaaaatttaacattatgaaactggtgaatccgtatttctttatgttgccagagttctcttcctccaactaggcaacactgcaggtcgactctacagggt

SEQ ID NO: 833 - DNA, 676 bp, Glycine max
acattccttcacctgtcacacaccaataaaaagtcatgtatgatgtaccacagaatcagtacatgactacggcaacttttgataaaggagcacacaaaagaaagaaggcatgacagaaaaagtacaccatgcatcttaatgaccaaaaagtcctctatttgacaatgaataaatactatgaagatgaagttagtatggaaaagggaagaagttaattaaataccaaaaagaaattccaaacaacatcacatgacatatcattttaatagaatataattggatgtgcatagtgcaacattaaataattctaagaatcagagaaattgagagaaaaactgataatctgaaattccatattaaagttctgattctctaaaactgagaacagtatttatagggtacaacgaatgtgatgcagttactatctgcctacaacagaaaatacaactggcagtaactaaaccagcacagcaggcaaacagctgacagctaatacaactacaatatactgtacacagaagagaaataaaccataaacatatatgtactctgtcaaacttagttaaaacatccaagaaaaatgtaaagtctcttgagggtaacatagattcaaaacctgcataatccctccagcactttcctattatagttttcagggtaaacaagtttgtatttg

SEQ ID NO: 834 - DNA, 1542 bp, Glycine max
cacggggatccctctatagtttacctgcagaaacttctccaacaaaccttgttgagcacaaggaaacctactagtacaacaaaagtagctcagaaaggtaatttttcacatactttaaacacctccaaaggaaaaagaagatcctggattatagactctagagcttcagatcacatgactggagacataactgtttttgacaactattctccatgtcatgaacactctacagttcggatagcagacgatacactctcaaaagttgttggtaaaggttcagttgtgattttagaagatatcactttaaattttgtactttatgtacccaaacttgactgcaacttgctgttcatcagcaaattgataaatgatttgaactgtgtcactaaattttcccataatgtgtgtgtttttcagattttgaggtcgggaaagacgattggcagtgctgaagaatgtgatgggctctatcttcttcaggttaaagattccaataagaaacccgaagctaattcatgtatagtgatcccttcaaaaagtgaagagtctgtaatgttgtggcactatagattaggccacctaaattttatgtatttgaaaaaaatgttcccatcattattcaataaaagactaagaaattttcattgtgaaacttgtcaattatccaagcatactaggagcacttaccccccacaaccttacaaaccttcctaaccattctcgctaattcatagtgatgtattgggaccatcaagagccagcaatattatcggctctagatggtttttgacgttcatcgatgaccacacaagagtcacatgggtgtttcttatgaaggaaaagtcagaagtaggacaaatattagagatttttcatacaatggtgcaaacacaattccagaccaacattaaggtattgagaatagataatggtcgtgaatactataattccatgctgaatttctacctacagaaaaatggaattgtgcatcagagttcatgtgtagacactccacaacagaatggagtggcggagaggaaaaatagacacctactggaagtgacgagatcactgatgttggccacaaatgtaccaaaacaattttggggagaagttgtattgtccgcaacctatctcataaacagagtgccttctagtgtccttaatttcaacacccctcacacagtccttcagaccacctacccaaccaacaaaagcctcacctcaattcccttgaaagtgtttggttgttcatattttgttcacaacctagacccacaccgtagtaaacttgatcccaactccatcaaaagcatattcctaggatactcacctcaccaaaaggggtaaaagtgctactctcccacaaccagaaaattctatcatacaatggatgtgacatttttcgagcatcggccttactatcccaaagttggcattcaaggggagaagatgccagttttgactgacatgacagaattccaacttttagacttagaaaaggatgagatggctgcacctttggagactacagaaactgct

SEQ ID NO: 835 - DNA, 770 bp, Glycine max
actgccttttaccttattatgttctaaaatgcttccttatagatgaaaccataaatagaacatactcaattctttgatcctgcaatccttttgatttaataaggaatcctttagatttaaaaatttaactataaaacatcttgatcccattgatttgattattcaattgatttaattatacatttgattagttgtaccaaattaaaaaaattaaaaaatctgcttaaatgtcttcgatttcttcatcactgaaagtctaagaaggccatgtatgatttctgttatctatgtctttctatcatctgattcacatagctactactctgaatgatttgaagtcactgtttcattatatttgccaaacctcaacattcgttaaggctaaagtcaatggtttatgggatactattctttgtcctatttgcattcactttgagtttagcttttctactctcaaagtgtctatcaaaaagtcaaacaaaaaatgttccaaaagggtctctgggataccctatcatcagagagacacttagttttctcaaagcacagagacaagataagggttctgtttggttggaagaacggatatctaagtatggccctatcttcaaaacctccttaatggggttccctacagtctttgtaattggacaagaaggaaacaagtttgtccttggttcaccagatgatttgctttcttctaagaaaccccttaccctcaccctgcgaaagatacttggaaggagaatgcctttttggcttggatatac

SEQ ID NO: 836 - DNA, 809 bp, Glycine max
acaaacatatcatttatcacttttacattcgtttggtccattatttcatatgacaaacagtaaacatacaatttctgaaaatttaggcctatagatgttctatactttacaatacttggtagctattcatatgtgtatatattgtctacatcactggccaataagatgttctcaacaactatttttcatttgttgcagggttaacgtacagagtgattgatcatatgttgatttggtaggtgaatacatttttacaagtgttcgttattttggacttgctgaattttaaaggagactctactgaaatttctataaatttgaaagtacagtctggaaatcattttgccaagtatgtttgtgatgcttaagcttgcctggctaaaatgtgtataagttggtataacttgtaacagctcagttttggggccataacacattgtcaagaaagggagttgtgagaggagatgggagttaacaatcaatgactagagtcaagaaataagcaaatactcccttgaatcttgactagattcatgaaaagaatgataaaaatttataccttcttaggtattcgggtaagcgccgatgactcatccattgctcaacatcacggctttctaagttgcatttctagcctcctgtggagaaggaagaaaataaatcaagtgtgttacaacaccgaacacattaccacttgaccatcaaagtttgcttaaaactagcagtattagataaattctacctgcgtccaagacctgatagaagttctgtatgttccatgagagtgcaaaagaatagcccatccacat

SEQ ID NO: 837 - DNA, 821 bp, Glycine max
agcagttataagttcatatgggtaacaaaacttgctgcaactttaaaggcagggacaagtgaacactgacttccaaataatatcatgcagatgttgttttatgttagatttcagcttaaaattaattgacaccaaattaagttgtccaatagatattgactggaaaaaacatcctattggaacttacaagctcaattgttttggtgctgtctgatgaattttctgaccttggtgtcagtttctcaattttacaactactgtctgtctttttgtagtctccatttattgggagacattgctgctattttgagctgtttagccccttagtctaaggagtgagaaaaaaatggtgctgtctaacactcagcagtgaactttaaaggtgcttatatggtggtatctttagatatcatcagttcatatcatccagactctttgaaatctgcttgtgctaggaaaattgagccttgtttttcagtgcaatcgagaggctgcacttgtggaggtgcatattcattggatttcgattcagagtgtgttaaaaactcaacaccttatggaggtttaaaatcatcaaaatctgtttcatagcatttaaacgttttgaattacatattttctggcggcattgaactgctaaaaaacgagccaccactaaaagtaataaaataataaaaaaattatgacacatcattatttaacaatcaaaataaaagcaagactaaaaacttaaaagaaatattggtgatatttgtataaagtttctatttgtaataaaaagtaaagtattcataaaaatttttttagaatatttattaaaa

SEQ ID NO: 838 - DNA, 783 bp, Glycine max
cttgcatgcctgcagcccttctatctgcatctttgaggaaggcttgaatgctttctagttcatctttgatgtctgaaaagtctttgtggatgcctcttaacagctttgcttcgtcctttaggatttcgtaaacttctcctaaggcaaaagatactgctgtttctgccatttcactcttatctcctattgctactctgcaattatgctgttttcatgtatccagcataagcatttcagaaggtatggtgtttttttttttttttttctgccttttttctttctttgcttactctatttgtgaatgctgccaaggaaaattaatctcaaaagtcaatgaaaagatacatatattataattatgccttctgcataaaggtataattattctttcctctgtttgggcccctggttttctggccgaagttttgggtttcatattgatattttagcaataaattcaacaattccttaatttttataaattaatgattttagttttttttagattattaattaataattgtaatatgtagaattattaagttaattataatttaattaaaaataattaattattaaaaaataaattatgtttttagtctttaaattttttagatttctgatttagtttctaaacttttcgttaaatgctcaaagtcttacaacttttttttattatatattctaataaaattttatgattactttactttttattacaaatagaaactttatacaaatatcaacaatatttctctaagttttatccttgctttattttga

SEQ ID NO: 839 - DNA, 931 bp, Glycine max
aatgtactgttagagtttcatttaataaataagatttaaatcaaattttaaaaaatattttactttaaattaaaaaattgtaaatattttactttaaattaaaaattgtatgagacctatatgtaactttttttaaataaatgtgatatttttgttttataaaaactaaaaataaatatttttttgttggtaggcttaaacttatttttttaccttggaccgatcctgattttaggtaacatgaaattgttttgtaaattaaattatttacttcaaatgtatttgtctgcggagtaatgtctccattttttgctagggttggagggatatttttagaaggggatttaacctggttatgtatcttgcaatgcgtgccgatgatcattgaggcatgagcttcgccagtgaaaaatgattgtctttaaagctcacaagtctgggccatacttatgatttagagggggagttgctattggcactattcatctgggtgtcttttaatcgtatcctgaaattatctttttgatggaaatataatgtgccttttaatcgtatcctgaaattattcttttgatggaaatataatgaaaatatgtttatattgcttaaatgagaagtgaaaaaattaaaatataaataaaaatataattttgtcgtaaaaagtatataaatgaagatcacatttttttaggataacttttttatttgtaatagaattatatttttattattgagtgagaggtgaaaaattaaaaaaatgaaaggatttattattatttttgatccaatatgtttggcttgtttcactttgatactaaattttaaaagttcatttttttattttttttataaagattatggtaactcttaaatttaaaattatttcttaccgttattttatgaaacattaattgagtgctaagcttgaggc

SEQ ID NO: 840 - DNA, 709 bp, Glycine max
ttgcatgcctgcagcactttgtaggcataatttgttgaaaaaactccattagtgtctggcttccaccaaaggaaatctctgctggattggtgaatgtgaacataatcgatctcaactaggaaatcagctgccaattgaatttcatgataaaaaaaattccttctccatgataacttccattcccacctaccctccacaaaatctcccatagaattgattgatgaattctgctgtttacttattaaatataactggggatattttccttggagagtacaattgtcctccatccatttatgcttccagaaattgatgctggacccccttcccactctccattttaaattatcagttaagcattcattgtgatgctgctggaagatactcttcaaatcctgccaccattgggaagtgaaattcctccttccaccacaaatcaactccttccacccaccatacttagagattaaaattctagaccaaggctggtcttgattgttagccagctgccacccccatttgccaagtaaagccgcattaaataaagataagtctttaatccctagaccccctttgttcttaggaagacaaactttgtcccacttcaccccaagaatcttgctggcctcttggtgactttcccacagaaaatttctcttggaagagacaattttttgcaccacttttttgggaatcctaaagaaggata

SEQ ID NO: 841 - DNA, 853 bp, Glycine max
  misc_feature (181)..(181): n is a, c, g, or t
  misc_feature (791)..(791): n is a, c, g, or t
atgatttccatcagtacactattgtctggacagactctcagatcatgtgagtctctatctctatctacatttactatatttggttctgttttgcatgttataaacttgactattatatctacatcttctctgttatggtaacttttttcatcattcttatttgttatgttattatactacnccccttattcttattttgcatgtcagtaagtagtaatttgatagattttgttgttttgattggtgatgttttattaaaaaaaaaagccatccaattttcttgttcccttactaaatcccctgtttgatgaaaaaaatcctttttttttcccctcctgtaatagtatttgtattgtgtatgtgatgctttggtttcttggttattgagaatgaataaaaccagatactaagataaccaatacttcaatgctatatatccttttagcactcagaacaccattttgtctacctaaattcataaggctgtaactaacatggttccttgtatggatttttgttttttttattcaactatgctaatttctacttttgaatgtcacttgtttgcttattttcacaattgtgttcttgtttatccatgttcagattttatgtggacaatgttcctattagagaagtgactcgaacagaatctatgggaggggatttcccttctaagccaatgactttgtatgcaacaatatgggatgcatctgattgggctaccaatgggggcaaatacagggttaactacaagtatgcaccctatgtgctgaattctctgaccttgntctgcaccgttgtgccagggatcccattgaacagcacgtgcccaatgtgaccatgctcctca

SEQ ID NO: 842 - DNA, 737 bp, Glycine max
atgatttccatcagtacactattgtctggacagactctcagatcatgtgagtctctatctctatctacatatactatatttggttctattttgcatgttatacacttgactattgtatctacatcttctctgttatagtaacttttttccgtcattcttatttgttatgttactttactattacctcttattctcattttgcatgtcagtaatttgatagattttattgttttcattggtgatgttatattcaaaaaatttcctctagttttcttgttccctttacctaaatcccctgttggatcaaacaacctgttttccccccctcctgtaatggtattttgtattatatgtgatgctttggctacttggttatggataatgaataaaaccagatactaaggtaactaatattttcaattttaaatggtatatatccttttagcactcagaataatttgttttgtctacctaaactcataaggctgtaaccaaatatgttccttgcatggatttttgtttttcttattcaactatgctaatttctacttttggatgtcacttgttgcttacttattttcataattgcgttcttgtttatccatgtgcagattttatgtggacaatgttcctattagagaagtgacgcgaacagaatctatgggaggagatttcccttctaagccaatgactttgtatgcaacaatatgggatgcatctgattgggctaccaatgg

SEQ ID NO: 843 - DNA, 627 bp, Glycine max
aacacttcattcttcagcttgaccttggattctcattaagattgattaaataactgtcatgtccaagtccaactgaaaatttgaccacataaactatcagacaggtgggtgtattagtatatggacaattgtggacgagagaaaattaaaaaaattaggttgcaccaacattttatatgctcgattagcagttaaaagaaataattttcatacctaacatttattagataactgatgctaaataatttattgaaacactgaggtgtggtctaaatacaaaaatcaacggattcaatttgtaaaccataagacatgaatgacaaaaacaaaatacatgggagaacctaaaggtatgaactatacacataccccaccccaccaccagcaataataaccaccatatcaaaactatcatcatatccaagaattctatgcccctcctctctatacaccaaagttaaaaggaaaaataaaaatataaaccccaggtaatgaaactaaatcaaggatgaatggaaccctcttaaaatgaagcagcagcttctgtctggcttcctctgctgcgacggtgtcgttttccatggtgacggcggccgctttcaaacgtgacgggatcgaaccttctca

SEQ ID NO: 844 - DNA, 545 bp, Glycine max
taaaaacgacgaatgtgttgtggaatagtagtggacactcttgtccatttgaaaacctcgtgccaaatctgaaatgataagttacaatgcaagaaaagataatttgcactttcccattacaaaagtagcaagacacatgataatttggaatgccaataccccttttctgaagttgttcacaagtagacaacctatccaacaaaagcctccaagagaagattaagacctgagaagggacctcgctcttccaaaagaagaggggaatcaacgaggaggacaacaaattattgcttgagttatagcaagacagcagatactcgtaggctgaagaagctgtaaaaaccttacctggctccaaattccaggaccaagaatcacgtacgctgggttgaataaccacaccaccagtatcccgaatcagattacccaagagggtcttcttctaaacaaagagggatgataaaccagtatttgggggatatttgatatgaattttaacttgtttttggatgtgtttgacttaatttactgccaaatctcatggg

SEQ ID NO: 845 - DNA, 921 bp, Glycine max
tgcatgcctgcagttgattcactttgctaaatttaacctcatcttttttttacaatgaatctgaaccagcccaatttttgaacccagggaggatgcatctcatcactagagatgtttgcagcagagttttgactgactttcacctacaattaattttgctgttttggtgtggaaattttgataaaacttttgtttctaatttccacaaaaaaaattatatgcccttattcagtatagaacttccgggttattttctgggctagaaagttggaatgaatggtaccactgttttgccagtattaacaatattatatattatttgttttcccttttatcccttcttataaatttttgttagatggctcgaccaacaaaagcatacaacttaaagcattttgagtatgaaaacaaatcaaggatcccttggatggtacttggtgagcgggaagtaaaagtgcaattgaaacacctcgagggcagtaatacatgtaaacattcctaggcaaaacttttggagcaactgcggagacggttgtacccatgagaggttttacaaatacaaaacattttatgtttcatattcatttgcaaagtttatttcttttgctgacaattgttattttttctttcaaattggaattgtgacaatagaaaattactaccgttgggaaaaaaaaatttggatgcctttcaagtttaatcaatacccccatttaatggttaatttttaaaatgaaataagtttttaacctttttaattttttggacggttgttattattccacaagcccttaaaagttggtttctccctggatgttgccaatttgggttcttaccgttggacccactgaagaaaaccttaagaggtttttttttttttccttcaaccctgggcatctgggcgggaaaaaacctcccctt

SEQ ID NO: 846 - DNA, 719 bp, Glycine max
gagagggaaattaatgaacttttaagcatatatatcctggaatcaggttcactgactgctacaactaagtgctgtcataactgcgtatagattccttaaatttgtgtggaaaagagttgtataattgttatgaagtagtttcgggaaatacataacttcgtaatttctagaatccttgaggggaaaaattgagcgcgtgagctaataagcacatcatacctttaaaaggagaaaaatcaaacaaaaatggcccatgcaggtctcgaacctgcgaccttcgcgttattagcacgacgctctaaccaactgagctaataggtcaatttatgattaaaatagaaaagtttaataaagtaatatgtaaaaatttcgagaataagacccccccacatggaagctcttgtaatgcagctccgaaaaagaatttcttagactagttttttttagactttttgtcgctacagcaccactcgaccattttcatgtaaattttctttcagttactcattgtagtaaaggcatttagatttattctttttctgtacaaaatgtttggagggttgatataaatatattatctttcactatattggcactggcttaatttgttaaaaatcattttttcataattggcttggcaccttttgggaatacccataattccttaatgggaaatcctcaagggtttggggtaccccccttttggggaaacccaaaat

SEQ ID NO: 847 - DNA, 741 bp, Glycine max
tgcctgcagcggaacaaaaaggagaagaaaaatattcttgtattagtcattactgcattataaattaattcttcacttaactgactacaaacaaatcatttttaagtgtatacatctcaatccggggttgatgagaagaaataactgcaatgttctatcgaacctgcattatttaccaaatttttcccacttggttgagtaaaacttttgcaatgaaaaaaaaaggataatatattgcgattccatataaagcaacagtcagcccaacaagggatgaggtgaacagcttatttattgggaaaaatccaagtcccacatcagatatagatagtgtcaagataaagtatataagtggaaggcaaccttcatcccatgagctagcttttagggttgagttaggctaaacccacattctaagatggtatcagaacctatcttagattcattaaacgaggtcacccatcatgaaccttaagcacgaattattaccttggatagaagataaaaggtccaagttaaaacagcagctgatgtttcatgtccagcaatgagcatggtcattaagtcatcacgaagttgcttacttgacacctacaaagagtcattatttcatactttgctctcacatccagatttttttttatcaagtaaaataatttgagacacagttaacatacatcatctcctgacgccaacaagaagtgtagaatacttggatcttgctcattcatgtactcccat

SEQ ID NO: 848 - DNA, 850 bp, Glycine max
tgtctacaggttgctttgtatccttgttttgtgtatatgcaatcttggcacatttgtgcggtatattctcctctaataacgagccagcttatatggaaacagtctaccccgttttcaggtttcttcacattgttccaacttgaacacatttctcacattatatctttatttagacacccttaaattgttacattaattccaaatattaataagggtaacattgagataaaaaattctactaggtagattacaaaatcctatatatcttttttaacttgcctttataattataaaccatgaaattaaatgaacttaaactaaacagattgtaaaaactcccctgaaaatttaatttgcagaattttagacaaaaatgactatgttattggtgcactaataatggttacaatgattttgtgcagtgtgtttacattgttaagcctgcacttgtttatgtatggatgcaacctgttcatgtggaagaatacaagaatcaattataatttcatatttgaattctcaccaagcacagcactgaagcacagagatgcgtttctgatgagcactaccttaatgacaactgtgattggggcaatggtcatacatctgcttctaagggctgcaaacttttctcctacggaaattgatgccattcctggaattcttcttctggttagtctaataactattgcttttcctagttattttataagataaactagcttaatttgcttgaaatttgggaaagtaatttataaacctttatactgattatgaaaatcgattttcagtttttcgtagtattgctcatttgcccatttgaccttttttatcgccccacaccttactg

SEQ ID NO: 849 - DNA, 771 bp, Glycine max
tcagtaactgccctacaaaagcgtgctctattgcaaacaaaaattaaggattgtgaccgagatcaataaaatgtattgcaatcactgcaactagggagatgaaaatgggaaatatacagatacaaaatacaataggcatatcctacatgctaaaatcctttaaagatcaagactcgaatctgaactactatcatgaagcactggagttggcctacaatttaaaatcagttaaagaactccgtacactaggttccttttagtataatatttgtctctaaagcaatttcatggtagaaatcagttattaaagaatatatttccactcaatattatgcattatggttcttcaatatgggacttacatttctggatcaatttgaaggataaaggcagatatagcaaagataagatggaatcatggaagattgcaagttaaaatgcatgcgtgtatgcaataaaaaatgacacgtgatattataacttcagaactgctaatttgggacagacatctagcaaagcacttgaagtaatacacctcatgctgagtgatactgtgaaatggaaaatataaaggatactgaatcgatgcttcgttttggtcggcagatccatttatatcttttctcttctttgatgagggggattgctttgaattttgtttccgtttatttttatgttgaataacaattgttctaaaagactggaaccagtcatgaaagatgataagaactccatgctcttgagccagaaatacctgtaaataagaaaaaa

SEQ ID NO: 850 - DNA, 756 bp, Glycine max
tgcatgcctgcagtcccaaacagatagaataaataaaggaagagagactaaaaacatggatttaggacctatattcaatttctgtagaggaatttttgagcttgtaactggctttgtatgggcaataatgacagcagcacagacatcgggcatcaaacaccacggatagaaacttccaattcctgcactctcctagccaaatcatgcttgccacagttcttcaatccatcagtaaccatgtcaaaacaccgcgaaatggggaccaaccccatctctgtcatttcaaagatataattcgcggcctcaacaaacttgccagcgcgaccagacatggtaatcagcatagtataaagaggccgattaggaggatgagccttggccttcatatccccaaagaagcaaaaagcatcatcaaactggcccctcctacacaaagccttaataacgggcgcatacaagctcggaaagggcttgtggccatcctcaatgaaattattcaacaacctaaatgcctcatcaaccatcccactctttgaaaccgcgggaacaagaatcttataagtgttaacatcaggagccatccccaaagcacacacttcatgataaagaccaacacagaactgaacgtcctctttagaaactgtctccaccacagcattgaaggttccaacatcaggaacactcccttgcttgatcatgttcctcaccatttcctttggcggattcacgtagccggcattgagcaggccttcgact

SEQ ID NO: 851 - DNA, 793 bp, Glycine max
cttgcatgcctgcagtttttcggtcctcctctatatgttataaaatactcagtagaatattttttccaattttagtactaatctgattcttattttaaagtttaagttaaaagtgtgatttgatcaatttttattctaaggtctattataaaatgtcacatatattaattttttcacaaaaatattcttttaaagttagtcctaaaagcacgtcatgacaagagaaacgtaactcattagtaggtgtttgcttttctggtggaaagtcccccaacaccccttaaatcaaaaactctaaatttttatcttttacaaaatatgtatgagaatttctatcttttataaaatgcgcataataatgtgtgtctgtcgaacctaatattaatctaaacatagtcaacgtttaatatcaaattaaggcaaattaatgttatttttcctaaaaaatttctaacttttcagtaaatgaggtggcctttcacttgagtgtatattaattagaaaaatggaggtggcatttccttgttgattttggcgttgcttaacatcttctcttttcttttatgtatgggaatggtaatagaagttgtatgtccataaaacctgctcgggtagcttcttctagttcagtatggtggagggaccgatatttaaatttgttcattagaaaatgttaaatcacgttcctacctaacttggttttggcccaaaagtattggccagcaacagttttaacaaattggggaaaccaaggtctaggttttcttggcatccaccatctgggtttaaatgg

SEQ ID NO: 852 - DNA, 879 bp, Glycine max
ttagcctacaaacctacggattaagcgcgtgaagtcagcgagttttaagggtcatgcacaaaaatttgttataatttctcggataaacttagaaatctgcatgttacgaatttttttaacttttttttttcaaaaatatgttttaagaattatttgaacgcacaatgttgtagcaaattaaactaatatattaattatattataaaataattaatatcgttatatataatcttaaaatttttaatatatatttaatagatatgtaaaattaataataaatttgatgataattaattttaatctaataattaatttatttgcacatatgaatttttataaaacctgtaatttttatttaaaatttatatatataaaaaatatatattagatgaaaatcaattttaagtttttgcttttaattccataaacaaaaaaatgactgaagtattaattaggatattaaaaacatcaggagctaaactaagaccagtcaatttattaattaggatattaaaaagatgagaaaataaacataaaaattaaatatttattaaaaataaaaaatatatttaagtttactatttttatttttatgtggtgggatctatgtgccagtggggaacgaatcttttttagtccacgctatatttgtcatccttatttattctctttttaaacgtttcatactttgcagcatccattcttgttcttcttcttttcttttggatcaaggtaggaactttttttcatttctggaaatttcttttctttctattttggacctttttcttcggatttttgggtttcaaattcggtaaaattggaaatttttttaattttccccccggattttttgaatatttttaaagggttttcccc

SEQ ID NO: 853 - DNA, 953 bp, Glycine max
  misc_feature (707)..(707): n is a, c, g, or t
cagcttgcatgcctgcagcgcctttgcatctctgcccacgaagaaatacaacatttcaccacaaatcaacgttacacacaattaatttaaaaaaaaaaaatgagattgcaaagtatgtgtggtaaatcacaacaacccaacctttccctgcgctgttcaggggtcaatccatcatctttctgcttgcctttagcaccagttctagcctgagccctttcgcgatcacgatccctctggctaccgcgtgcgctttagagttaattgaaaacaataacaaacaaaacggcttaacaaaccaaaccacgaataccccgtctgtattgtggcaaaggaaacaaaatttgaaaagaaaaggacaaaaaaaggtaaaattattaaaattgtgttattcttgtgtttgtttccatggatccaaactgaatgaaactattaattgcggtaaaaccaaaaagatctacaacaaatgggggtagcggagggtgaaatgtgatttatttttttcctcgaattttctaacagaaagtcaaccctatccctaaattaacgacaatttgtgaaaaattagcagtaaaatttcaacggatcaaaggatatgagtcattatcgtagatcgattattcgagaacgaaacgagcccggagacgaggggaaaccctaaaatatcaaaatcgggggaaataaaaaatacaattaacgaattgaaacanaaatcggggaaaagaacacatttgaagaaagaaataaccgaatggaaaaaggttctacctgttccaaggaaagaagagaaccagaatggatgctgcaaaaatgaaaacgttgaaaagaaaataaataaggttgaccatttaccgggacttaaaaaaattgttccccatggacatagacccccccataaaattaagatagagaactaaattttttttaatttaaaaaaaataaatttataggtattt

SEQ ID NO: 854 - DNA, 913 bp, Glycine max
atcttgcatgcctgcagtgagaaacaggggctttgaaatgagtttcaagtttcaaccctgcacccaataaatattcagaggcaaaatttggtcattacagatttccagtaagaggttttttacatattgtgaaaagttaattagaaagagtggtggcttaaggacagaaggattgttcacgttgggattgaccaaatgtgacaacatttgcttaaatttattcaatcagccaggtaacatgaaatccagaacaattgaatctgtcaactgcatttactttcagattgaattaacagaatcaacctgacatgaactctgtacatctccggcaatgggaaaatcaatttacagattaatcatttcccccctcagaaaaaaaaaaattgtctaagccaaataacccattttcaagcgacatcatcatcaatgttatcatcaccagaaggaatctgtcttatctctgataatgaaagcggcctgggctttgctgagcttgactcaacaagtccttcagaagataaattcaatgcagcagttccagatgaagatcctaacaaatgcctgcttggggcatcagctgaaggcgatgcggtgatattgtaagagaaaatttccattgggtggtcaaacttgcaacttgggccaaatttgcatatgccttaacgagaatagaagacacacaagggttctcctggactaaatgggacactgcctctttcagattggcacttaatttaattcaccaccccacaaggaccattcttaccgggaaaaagaaaaaaaaaccccaccaaatattttgaaaaaacctttttaatttttctcccaatttacccccaaaccaaattaaaccttttttacaacattttatttcactttcacccgaaggggaaaagaaagaaccattccaaaa

SEQ ID NO: 855 - DNA, 759 bp, Glycine max
agggagaacatatttcctgagagacctggtcaacctgaatgccaattctacgtgaagacaggagattgtaagtttggagcagtctgtcagttccaccacccgcgagagaggctaattcctgctcctgactgtgtcttgagtcccataggccttcctttacgtcttgtaagttggggttcttgctatggagttctatctacctagttggtttttcataggcttaaatttattattctgaatttatacttcattacagttctcacatcactggttttgagtttggtgagaatttgaacaagatttactctccttagtttttgttgctgctcatatgatatgttacattacctcttacttgaatttggactccctccttttttttttccggtaacaccttgttaggaaatggcatctcctgttctacagagaatgttctatacatggcataaatcatagtacatagcaatgatgcatgtggcattacaatgatgcttgaacccttgaatgtggacataaaaaaaattgtagttttaagtttaaccataatttgaagctgacctaagttggaatcgtttgaagcatttatatagacatgagagatgatgcagccaatagtaatcagtttgaagtatttatttgttatattattttaagcagactatgatcactaacagtattagagtttctccctatcgttcttgatttatcatatcattcacaaagtatggaaaatggtgtgattttcatattatttctttt

SEQ ID NO: 856 - DNA, 904 bp, Glycine max
tgatctttcctgtgctaagctaaaaaccttttgctctagtttctagtaccctagttatatgatcttgagcaattactactgcttcttacaagagatatagttattgaatattcttttacacattctgatgctacatcacttgcatgccaatttggaatgcgttacgtgttgatctattcaattttatcatttgtatacttggctggctgttctgcccttactttttttgccaccatttctgcatgataagtatcattatgagatcaatgtcattcttccagggagatcgaactaaaaaggtgggagttgttgacagcgaatatgtttttcaccagggaatacaaactctgggggggagtggtcacagaatgacaaaggtatatgccttctcctttcctaatgttggaattcattttgtatccgttagcttccttaatgtgtaccgtgtcactgcaagtcaaaatatagcctaagtgctccaacatggtattattcaatattcagtagctgtaacttgaagatactcttacatgcgctaccactcctactttacagaatcaaatttcttatgaccctaaacataaaaacaaccattggttggtacttatcattttggtatgtacaaaatagtgttccttttgccttatattcatttgtctgggccaatttggtggtttaatataccacaataaagccgggtcggtggttttttgttccaaaatggataaaattttctttcgaacttacctcccaagttaccatttttttttacagttttgaaaaaatagacttaagattttttttctttaataaaacttttattcttcgaaaaaacatttttttatgcaagagacctccaaaccataatggtgggaaatgttggtggcatatcaaaaaaaaacac

SEQ ID NO: 857 - DNA, 870 bp, Glycine max
caacatttccaatcatgagataccagccattaagattgcaaatttagaacatacttttaaccaccatatatagcctcccctcattttttgttatatagcttatatatgttgtctgttgatctaaaaggcaataaaacaaagcaaatttatgagttttcccctgtaggatggtattattatggtatcaaaatcactagtacaaaataacaagagaaacagaaaactatgaagcagacactaacacagtctgatcattatttttcttttataaaaccattaaaaagctgttccattttgacaggtgagggttgtgcatttctgcatattctattctaatatgggaactctcctgtttatattcccagaattaccagtcaaatgcaaatgtcaacaaatctcaactttacagtgcttttaatatattaatatgttaaaacagattaatgaacctttttttgtaaagatgaaatgcaacaatatctttttaactcaaagatagcatcagtcaaatccctatgttcaaaacatttgcactcttcaagccttctaaaattatttcaatcatagatggatgtttattatagccataaccacaaacagtcaactataagtgacaaaattatcattctaatccacaaacaagcagcatcatgatattaatatacagggatggaccaaggtttggaggcttgagggagggggggaagggggagttcagtatatacccattaaatttcatagaaaaaaaatcataaattgtgccataataataaaatacatctaatagaaaatatatttaaatagaacataaactaaacattttttttaaactcaagattacaaatgtcaaaagtcagtttctcgtattac

SEQ ID NO: 858 - DNA, 766 bp, Glycine max
tgaacctcctgaatctcatccacctgattcaacttcttatcattggacaagccacccaatgcagaagatatttcactacttgaactcccttctggcagccctttctcctcccccacttcctcctccattatctccacctccctcatccgtcctccaactagatgcctcaactctgaatcaattctagactcgtcgccatctgatccaaagctttgccttgatggcgactgatcggaactctgcatgtcacacacattctcataaagctgttcaatggagggctcaactacctcatcacccccaaaattagcaccatcatcaccctggcctctttgcggactcacggaaccacccctcggggacttaaccagattcaagggttccttagaggtggaatcatggtccccattcatctcattactcccaccttcatcatgatgaaccccgtttgtaacaattcccggcatattcaattctttcaggaacaaaaacccctgcaacaaccaaaatcaaacatatggtccacaaaatcaacaccccccacaaacagatccaacaaaaaggaacttatccaaacaaacacacaagaaagaaaaaaaaaatcagaacgcacgtgtctaactctaaccgttttatcattcaagaccaaccaagacacaatgataaaaacacatacctctaaaacccacaattagcaagaagtcaaaaatttcttaaaccatggaatcttccccataacttcggggccaggaaaaccccgaaaaac

SEQ ID NO: 859 - DNA, 884 bp, Glycine max
tgcatgcctgcagctcctggcccgtcatgcttcggagatcctgaaagatttgttgcagaattctcgagcctacagaacacaaggacatcattcaggttcatggccttcaaacacaaagtttgttgaatgataagaaacaaccacatcttttatgattgcattctaaaattaaaccttgctgagtgacttggatggaatactagaggcaacacaaggcttccattgaatatcaacggatactatgaacaaaatgcaggaaagtttacaatggtcgtggtttcaattaaaaaatgaaacatttttctcagtcaacagtagtcagatctataaattaaatataaaaagacaggaagaagaaaaaagaagaaaaatatagcatatttgaagcaagcaaagagagtggagaagttttatgcaactataatactgatatatctataccagaaatttgaggaacgctgaatgatctaaaaagagaatcggtagaacaccagaaaataagcaaatattattaatgaaagtagaaaggagagcctgagctcttacaaggaaccaccagaaaactatttctcagccaacaataaccaaaataacaaaccaccttctctctacactccccctccccaaataaccatgctgcatggcctaacaaacttgccaactcagaaattgtaaataatgtggcaccaataggagggagtgcaagaaaaatgctcttcacaaaagctattttaacaaatccaaagttttcacaacttgtagcattttcctattactatatttgaagaattttaataattaattctacatattttcaagtagcatagatgtttatctccatcaaaatatcaacatatcaccatcagagcaatgatcagttactt

SEQ ID NO: 860 - DNA, 768 bp, Glycine max
gtatttgtcggttccaagagcaatgctaatcttagtaatgatgtgaagatgaagcttcatggttatcaccgaattgctactcagggtccttgccatgaacctcagccaatggctctgaagttctctgctcgagcaaagtggtagttgattaatgattgccctgcttatttatctccaaatacttagaaaaagaaaaaaattataaccatttccctctacctctagttttggtttgagttgcttagagttacagttacttcattagattctttgatgtagttaactggatcattctttttgtgtaaggattgcatggcgacagcttgggattatgagtccagaggaagctatggagcaatatatcagccttctatcagaaaacattcctgattggattgtagaaaatccttatgtaagtatatctaaaaatactattcggttactcacccttttctaaataagataagatatatattttatttgatctctttttggtcagttgtgctttaacttgatgaacaagagaaattttatcctttttctcaattgtcctgtctggactggaaggaagcctatgccttccctgattcccaatttacccctctgtgtggtggagggatgatttatttctttattaaatctattagatagagcctttgaagctttatattaatttatcccgagaataaaattttgtattaacggatgcctactaatgggggggaaacttttaaaattttccttttttatttacccgggataaatggc

SEQ ID NO: 861 - DNA, 822 bp, Glycine max
tcgacctgcaggaaaattatcccaatgacaacagatcaaaattaaaattgtaaaacaattactaacagaataatcagtaaaaaaatggcattatgcagcaaagaattccaccccattcagataagaaatccaacctctatttcagacatgtagttctcattttgtttattcttagatttcgagacatcagacagatcacacatttgcctgaaatagaaaacaatatggaaaaatagtgttaaccatcactaaaataatacagcatggttaagggcatacagttgcacacagatgaaggactaaaacatggtctcataagatcctttcagctgctttcacataaaacatggatcaacttgcaccttactgacataaaggataaggaaattcatcaaataacacaaaaaagataattatcaagtttcaaattccaagaacacaaacataagtaggtacacatcatgtcaaactgtatttttcgcatgttaaaatatcaggagtttaagaatgtggatttgggcctaactcaaccccaaaagctagctcatagggtgaggattgtcccccacttatataccctatcctaaaaggatttcagaaatgaaaagagagaaatgctcaaacttcagaaatggactttttgatattaactaactcctactgaattctgttacatctctagtatttatacaagagctaagcaaatgttgtaactaacagtggaaactactaactaacctaaaagttagtagaggttatctatcataactaacatagctaactatagttataacagaacaggagtaattcaacttatatttt

SEQ ID NO: 862 - DNA, 838 bp, Glycine max
ttctttactccaactataaattttctgacttcaaaggggcataatgttcaaatactttgcttatctattggtgaatagctttgcacaatctgtttttgtcttataaattatagaagttttggtatatatgtgtttatgttcatcttttcagctttttgtatgttagtttagtctcattttttttttattaattttaattgtagttttctttattcccattctgtagctgaattttctttttaagttggcatctttctaaattaagctagttcagttactgtcttgaaaaagaatttaatttttagctattttcagtgtatagattattacattattattgaataatgtctccacttcatatacattcacacattggcaatgctattaagttaaaatagataatatgtaaaaagaagttcaatattattgctcagatgataattgacttaatgttataatcaaaccactagcttgggctacacaactcaggttatttcatgctatcagctttcattgtttacatttaataggaattttctttttctttcctataattctattcatgtatatagaagaaagaaatatagactggggaagaatggacctagcagagtagagggatcactttggggaatgggtgagaaggagaaggaagattctgtgattgggagaataagacagaatgactgagaaatagtaaggaggggggatcgaaagattgtgaggagtctgttatgggggaggttggtattaagaattgagagaaaatatgagggttggctgggggagtttcctggtgtctgggaccccattattccctctgttctgttttcttgac

SEQ ID NO: 863 - DNA, 791 bp, Glycine max
atctggatgattgacaatcttcacttgttgcatcggaacctgcgtacacaattttcaatgtcaaaaaaacaatacccctcttaaattttggtcagatactgtcatctttaacttatgtctagaacattatcaaggaaagtctacctaggtttctctagaaatttatgttctaagattggaaaggtatgaccactaagtgatctaaggaaaaataaaataaaaaattaaacacttccccgacaggagccatgtttaatatgtatagagaagctctgatattatgtttgaaaccacaactattttatgccattttgtaaatcaccttgagggctacacaagcctgaaaaagctcttgttttctgatatttcctttgccatctgcatcacctacagaaaaataataaaaattaaaaactatccaatggactgaaacacaaacttcgaagctttggttttgtgacattgaaaatcttatagctaacattctaagatagatttcttgccctaaatctctaaaattaaaaataaatattccatttaaagatcgttaaggactgcaatacatatataataataatgcaaaatggagaattgctaaaaaggaactcaaaggtaatcctctgaatttatgagaaacaaggaatacagagatgtacaagaaaacagaaacagagtaataatggggtcccagacaccaggaaactccccccagccaaccctcataattttctctcaattcttataccaacctcccccataacagactcctcacaatctttcgatcccccctt

SEQ ID NO: 864 - DNA, 700 bp, Glycine max
  misc_feature (607)..(607): n is a, c, g, or t
aaaaatcctcaaatgaaaaaaagtattctacttatatcaatgtcagtaatttgaatggaacacatcttccttcaaagaggttcttatcaggagctaatcaaacggaagttttacgcgaggaagttgagagtgctgtcactgtgatatgccaggaccacataatggaacaaaaaagcaaaaacattgcattagagcttactgggataaaatgtctccaaatcaggacaagggagcagccacctccgtcagttgtaggttcttcaagtgtctatgtgatgttcagaccagataaaaaactctatgttggagaggtaaatctcaacttttagtatgttttcataatttgaattaatctacatacatctgtatatataatatatttataataaatacacataaatgtaattgctgattctatgcctaatcagttactaattagggattctaccactaattccaacaattttatttctttcattatattggagtgatagtacaaagcaagacaaaaaaacatgacacaacgtagacaaaatttacttatatttaatgttgattattgaataagacaaaggggtagagatccctaattaatacaggaataaantataatgccaacgcattttgtttccaattctatcaattagtagatacatatgagtcaacaccagtgggacgcctaagctaaagtactgtttag

SEQ ID NO: 865 - DNA, 1401 bp, Glycine max
cttgcatgcctgcagccaccgaacttcacatgcagtatctgtgagtgctctatactcagcttcacttgaacttcttgaaactgtaggttgcttcttagacttccatgaaatcaaagaaggaccaagaaatacacaataaccagtgatagattttctggtatccggacaagctgcccagtccgaatcactaaaggccgtgagcttaagaccattagtggaagagaagaaaagacctttccctggacaacccttgatatacctaagtatatgaagtgctgcataataatgactttgatgaggagaatcaaggtattggctgaacatcgctatgctgagtgaaaattaaaataaagggcaatctggtttattgccattggtctgccaaagttagtgcggtaaatcaacatggaaattagttacataactatctgggttttaaagaacaatgtattagcattcgacggcctttatgaattgttatcacaaatatcattgctcacattgttaatatctcacttagtaaaatttatacagaccaaaacccgttacaatgttttattacaaagcaatccacaaacatggcagacaacgaatagaagaagaatctctacaatcattggacttcaatcaatccctcgcaacaactttttattgtaaaaccagagttattattttgttttgaaatctaaaaggagaaaaactcagcaaactgaaactctcaactctagattttggtgttcttgcaaagtgactactatttggcgtagcacaaggtgcactttctcagtagtcagtacctatctccacgtggctacagtcaaagcaagcaacgaaaaaacatagtcagatccaataaacaataatgttactaattaagtgatatgaagactacacacacacatatactattaaacaataaacatgtttactcttaatgattattcttgttcatctctagtattaaatttttatgatgaaaacttgtggtatgagagatggtaagtactcacgtcatatgcaacaagtgatctgcaataattagtgttagtgagcactgtacttgcagagccacattcactgtctttgagtgaaactgcggatctatcaagcttgattgaccaaggataatggtagttatgggcagtggcacccatatgtgaagatgatctttgcatcctcactggccttgggacatttcttccctcaactgaagctcttcgccggctcggttgcctctcgaatgaatctggtctttgttttggtgcactgtgtgatctgactttggcccttgatgattcagtgttagccatgtaatttgggaacaaagggtagtcataggacatagattctgcataagctggcctagggaaagcaaaatggtgctttgaatcttctgttctt

SEQ ID NO: 866 - DNA, 837 bp, Glycine max
tgcatgcctgcagacccaagacatactctttcactatgataatcaattctttcacttcatcgacctctctccttgactcaacaacaatcaaaggaatggtatgaagaatattgacaaaagtgcgaagagcatcagtaaatttcccagcagttgttgacttgtaaccaactttgagtttttcatctaattgagacaatctgaaaggaagtgctggtgggcctctcacatttggactagatgactcagtccaacctctttcaacagcaattgatacaactggagcggatgaaaaggcacgcagataggaatgactgccagtatgtagatctaggaacatggatttcaagggggcaaagttccttatcccgagttgcctgttcagtaatcttattgcagtatcaaaattgccagcagctacatgatcagctgcaagagatgatctctgaatccatatctggctaactgccatcccaggtgctggggccacaaaaactgaagatcgtgaactgacagaaacttttggtgtgtcagcttcagggggaagctctaaatcttccagctcccatccaccttcttcgtcatcatcttctgccacttctacaccatccaaaattgcagcaacatcttcattttgtaacccatctacatcaaccatgtcaagctcctcgacccagtcaccatcagcagcctcatactcttcatcatcagcatcacgatctgtattggtaaaatcaccttaatattctcgcatgaccctaagaggggccaatcaccacccacactacagtgatggtgcatcaaaagagatgacttttcctcagccagatggacatatcc

SEQ ID NO: 867 - DNA, 791 bp, Glycine max
  misc_feature (648)..(648): n is a, c, g, or t
tatgagggaggctgtattgtcattcctattcgtttattgcatctcctctataacttttttctcatcttcctaagatgtcctttattaaatagttgagtcagacaaatgatctactgccactcctatgatcatccaaatttctaattaatatttgttttatttttaaaaaatataaaaatgacttcctaattacatgattagtttttcctttttaattcaatgttcgtcaaggccaacaaacaaaactaaactctacaatacaagtgttttcaatgtgtaaactttatgatcctgttggaaagtggaaactgaaatgtcttatggcccttgcttgtgaatctttttaaaattatttgcaaaacaattttatcctttcttttttttccgtttcttctagacaagctcaatgagaaccttcatttttctatctgttttctgttcttcctaaatcatatgctgaccaattgcatccatatcatcctctgcttctgtcttaaccttccaacttatttactgctagccactaacaacctgtcaattcatgtctttagacaaatataacaagtttcccaacatctttatttcaattgctgcttcatgaaactttagcactacttagttggaatatgtcacctttcttggtgtcgntttgtcctagcagtaactatcagaatccattccagaatcccatttaattaaactcgcgtacatagcaaactatcttttatatgaaaggatataaggtaaatgctacaaaacactgcttttatagctgctgcttatttctttgg

SEQ ID NO: 868 - DNA, 760 bp, Glycine max
agtatcttgccggaaggactccaaaattctacggttttcattatctacagaaggttgtagataaaatctaggacatgattctaccacagaatcctttctttcccgcactgtccttaatataagtgtcttcaagaagttcattacttgaactgcatacatcaatgcagatatagggtctgccatctgcaatcagaaagaccaaatactttcattgactcgaacctactatcagatggaacaactatcacattggcatctttatttactcttggaaaaacacagcatagtaaagacttcactaaaggtaaaaatattgtcaagacaagtagtgcagaaaagatttcccgagaaaagaaaacaattggatttcaaaagatttccatatgcaatttagtaaagtagaaaatgaaaatatatagcacttgtatggtacatcttttcttccttgcagtcacttgagaatgaaaaaatatggaaacacacctgagtcatgtttggtgcaaaaaccatggcaatgttacgcgcattcatcttattaacatgctcatgtaggacaacatcagccatcagattgatggtccagtccaagagtgaagcttcagtatgaggtagatgtctcactagttcagaacattcatcctcagtctggcattgcattacctgctcgggtgataatgaatctagaatgcctgtaggaagttccctaaaccaagccttgaaaaatgcaagattatcaaaaagtttctaataacatgcattt

SEQ ID NO: 869 - DNA, 580 bp, Glycine max
taagagatagttgcataaattttacatgtttttttttttgttattttgtattgtttctttggttctgagaaggtgaagaagagtatgcatgtgctgatgatgacttgctttacttgtatgcatgcatgttttgacttgcttggtggtggatgagtgagtgagtgtgtgagagagtgggttaagtgtgttctgtttctatctaaaagttgaatacttgggtggattttctgaattcctcacagaatttggttttgtgaggtttatatttcagcatcatttggaatttgatcgagaaatgaatgtctgaaagcatgtactagttaacttactgtggaaaatatagttttctcaatctcaatttagtcaattttttttccttcggtcttgtgttgggtatttgtggcgttccttttttttcatttgatttgttctgctcttgtatctatacttaacttgatatcacttcatagttttgcagcagcagttttgatgtgtgattcaattgttcaatatacggtaagattcgaggttcatttggggtgccatgttggaattagtaatttgttgttggcatcaatct

SEQ ID NO: 870 - DNA, 709 bp, Glycine max
aaataggagttcccttgcagcccaaaacaccctgcatgaacttcatgttgttttggaccgaagggagccccttcttcttcactttcaccatcttcagtctgcaactgcgattttcatattttcaaatatggaatcataatactttataatttccccatctcctttttcatgtagcaaattccatcacaaagggatgttttaacgaccataatattcacttcagaacattttcgaagagacttgtttttctttacttgctcatggacaggtaaccgttcaaacttttatttcgttctttagttttattattttagtgaggaatgctagcaagacacttttctcctagcacacttttatcattaatttaattttattgaaaagtaccaaatcatgagagatgatcaaataagttgtgagaatcataaacttttataattttcaaaaaaatttcaaataatcagagagagagtgcattcataagattgtgttaaagaatgtctaacatttttctattttatattccgatatgttatcattttcacccctacatcctttcactctttagtgaacttacttgtacatgagtagcataaccaaacctatttttaaaggatctttcttttatctgcccatggatcaatgtttttcattctggaccccattgcttatttgaaccaacgctgtagtgctgcttacgttacactggaca

SEQ ID NO: 871 - DNA, 1408 bp, Glycine max
taatccagtggtgaacctaagtaaagaaaccatagcccagaagaaaagccatttataatagagatgagaatctcatagtcatcgcattttgcagtaacattaatcaaaaccatatcaccaatgctgtttttttcatgaagtacaaggtagtttcctacaccaagtgcaactaataatgccatcatgatccactgtaaaatcttttgttaagattttttcataactgtttactactagaagttcatctattaccattctacatttagcatgtccacaaagtaggtgtattctacttggagcaacacgtacacaggtattttgcatatacactgatcaaatggaggctcctttttaaaaagaagaatgcctattttagatggtatattgaatcacagtaatcaaaataggcagtaaaatcctaaacccaatatctatggcacacaaaagaagcatgttaaaacattactcagaattgcttatataaattaaaatagtggagaacgagatccagaaatttaatctcaaacaacccccaagaatcaactcctagtacaatcagtatctatctttgaatcttccatttccatgaacaaggagaaaagcaattgaaaaaaagtatcacgtattataatttaatacctgaaaaattaatcatgacaattggtaaacaaagtacttataaggaaacagtacttacaaagaaatgttgaagaacactgtgaaagtggtgtgcttaaacagaacccccttgggggaatagactttcctttgtaagggtaaaacaaagacagatatccagtcacagtggatgcaacaagaaatgctgtagaaagataccccaatgcaacagttggatcagctgggtacttgcaggtgacagagacaccatccaaaccaggcacgggtgttcctgccgcaggctgtaacaaaacaatgaaaaatatttttatgtctgtgtatgtgcatgcacgcacacaataacagagtcaatatcaccgattaatgcagaataacaggtaagagaatcaacaacactcttcaaaaagaaatcatattgaacctacaaaagaacaatcaccattcacacaacgtacacaagaaattaatagatgcagtggatcatgtaatattatgaatacgtttgatcatctcttatatgaaatgcacttgacaagccaaaaaagatataataattcttaattgttctccaatcaaaattgaagatttaacttggtaatctatgtagacctttaatgcaaacctttactatggagattatcgagtaaaaccgcaattctaattggtgaaactaattggggaacaacacaaaaacacctaaaaaattctgagcatgattgagttcggcacgcgttccaagactaatctaattgaccaacgcaaaagtaac

SEQ ID NO: 872 - DNA, 798 bp, Glycine max
  misc_feature (727)..(727): n is a, c, g, or t
cttgaaactactaccattgcctcctccaactaccacacactcttctagaaagcacactcatgaagaaacaaggattagaaagaagaattcaatacaaagtgttttccaaagggatcctttctttgctgcactggttgaatgctcaaaggatgatagtgaagaaacaagtagaaatttgtggaatggagctaaggtgccaaggagtgttagtgatcgttttgggtttattagcctctatgcttcttgcaagagaacttgtgctgtttctgaatctttagtctaccttccaagctcaagaagaagcacctgcgaacatgttagtcccaggtccctctaagcttgtgatgatgatgcatgcctagctgtcaatgtacttgtgttcatgttgttataagaaaaacccagaaagaggtatttctttccctcttttcttaaaatttttaaaccttgatctgtttttagtttctaaaatatggtatgtgaggacaaagtatgtctttggaaacccaagttattgtaatatgttaatacaagtataggaagtagtgcttgtctccttttgttcagagatcactgatgactgatatttttctaatattttttttatcattttggttttttgtttttttggcatcaaacacctaaatctctaaatacaatatacgctctttgctgtatttcatgtgacaaccacacattatgagtgaaacttacatgatcccatgcngaaaaacatgtaccggccacagtgtggaaagagactgccaaattattgatttgactttttttttttttaat

SEQ ID NO: 873 - DNA, 810 bp, Glycine max
acttgcatgcctgcaggaaaggggaattttaaaagaagcaaacttggataggaaaatcccctcatctttaaaagaaaccaccgttaaaggtagtgagtccaaggcaatgaggaaatatcagaatgcgaagcgagtgagttcagttccattgtgaatcccaatttttacctctcaatattaacattgaatatataaaattttgcttttttgttgtacttttcctttcagacaagtgaaacttgttccacaaaaagtgaacaagtcactgataattatagcagctgtgatgagaaatcaaaacaaacaacacaagaaaacaaatctgtaagttcatgcacagaatatactatcacctattgctgcttagagaatattttagagccagaggctgaaacttcccaaaacgttatgtaggggagcattaaaagtatcaactccaactgcaaggtgcaacgtaaattatctgctacaacacctcatagaaatcctcctggtcctaaacttcagaaagccattgatcaggatgacaatttcaaaagaaaatcgcaaatgatgcaacgtaaaattgtaaggcctcggaggtaagtaataatcagattgcaacacacgtgtttacattgagtatgtttgattataatataatggaagtgcctattgcacagtgctttgccaaggaagaaagaaaaagctgtccttgcaacaaaacttagtgttattattgaaaagccatcagatattgtgaagcccaaggaaaacaaaggcacgtaaaaatgacgcagcttcttcacctacaagtacaggtttcggtca

SEQ ID NO: 874 - DNA, 1357 bp, Glycine max
ataatgattgaaagtattgttaatctcttatttatctacttccacctaccttactttttaattcttgcttaaaatatatttttttgtttaattgctcatttggtccctatagctacaaaaactttcccttttagtccctacgcaccattttgaattcattaaagtccttgccgtagggactaagatggattaaaatgataagtgtaaggactaaaaggaataaaaatggtattgcaggcactaaaagggaatgtttttaagtataggggccaagaaattttttttgtaattataaggtctaaatgagtaattaaactttttcttttttatcatatgcatatttgaatttgaataaaactgagtggttttatcatatgcatatttgaatttgaataaaactgagtggtatgtatcctcagaaagtaatttgaaagaacactcaagtagcaagggaaaagaaaatgtttcggttatcttttttggcagtaattaggagcttttattttattattattattataataataataattttattgtaaaatcatctatgttcccattgggcatttcagacatgaattaacaactatcactttgctaatattattacactcgtgataaacttatgtattcatgcttgcttgcttgaatattttttagctgtccctttaatattgttcctgatacaatttcttgaccattgatgtcttgtactcttacaatcttactctttcttgcagaatctgttggtggcttggataaacttgaggataactctcagcaaaagcctagttctttcagctctgattgccatcaagatggtaggcatgcgtgtgttatggaagacatttttctattcttatattcaatatctagaaacccattttcttattaatgttgcaggagaatgtggtccaactgagagaaaggtctctcctgataaactttatcgagctgccttattgaagaatcgatttgctgatactatcttgaaagctcgagagaagacactgacaaaggtaaaagacacatatttgagctacatggcaccgactctgcttattattattgttctgatccttgtttgaaattggtatgtgattttgttaaatttaatttgactgaggtcagggtgagaagggtgatcctgagaaattgcgccagcagagggaaaagctagagatcgagcgacagaaaggtgatttgggtgttctacccatgtatcacagcccatgtcggctgttaaatgttaactaacctatttgttgatctgattcattgttgagcagaaagggcaaggctacaagcagaggcaaaggctgctgaggatgctcggaagcgggcagacgcagaagct

SEQ ID NO: 875 - DNA, 789 bp, Glycine max
tttgcaaatcatctggcaaacttctgaaggtattcttcttgagttgctctgaatccttagttttatatttggtagtcatttcacgataggttcattgttgaggctgatgatcagctccactaatttattctggctctcctctattcggccaagacttgatatgcttcctgtaagcatatcttccatgtatgggatgactatcggtagtcaaaaccaatattgaactaaatcaacacctgtgggtggacactggacccaaacaagataggttgtacttatagcacctattgtaaaaagctggtagtatcttggcattaggtggtctgggcatgtggggaagacttgtagaagtcccattaaggagagcaaatcagatggagggttgttcaataatttttgctctggtatcacttttgttgttgttgaagctttttgctctggtaagacagggtagtggacttctgtgtgacttacttataatggttgtttcagggtggtgagcctgacctgatgactgcggcaaagatgatacttcatgactggcagaggggccgaattcccttttttggttcccctcctagggttgaggacttgtccgaggaacctaatgttaatggtggtgacttagatgattcagttgatgggcaatgaggcttctgctgctatgaagctatcgcagatgttctttcatacagcagcaaacagtgtacctgttcaaaatgatttattatatgagaagagttgaagggggaagctgctgacccattttcaacactaatgcaaacgaag

SEQ ID NO: 876 - DNA, 754 bp, Glycine max
acgtacacaggataatgtcagcattataattgctgatttagggtacgtatcttctcatgtatatatttatgattttggactttggtatttaagtcctgattattggccagacctttgtgtagaacagaactgggggtagcatatagtaaaattcacaatctagttatggaaattctttccatcctcaaagcatttacaagtttagtaaaatgtggtctaaagttgaacctgttgcataagtgctattttttttttatcagtgacaaaaaaatcaattcttgttgtccaaatatgatttttttttcatccactgattgtactgtgtcttcttttgagtgattgcaggaggacagactggaagaatgcgccactggagcgacaaaatactatacttgagctggtccaagctcttgcaaccattggaattgtgtccattggaatctggttttcatcacagctttctttatagattcaaaaaataccagtcatgtacataaaacagatatataattctgaacttctagcctgtataatcttaattgtacatgcctcacatcttagaatctacttggtttaaggcacaaaaaatggtaacaattaaattattttgaaggaataaatttattctgggttttaaaatcaatatttggtttggccggtttgcccaatagaacacggcccttttcccatttaatttgaaagcccccttccttgaacaattaaaatcctttttttttaaaagacaccttgaaac

SEQ ID NO: 877 - DNA, 872 bp, Glycine max
agatatggccaacctggaaaaaagatgataatacaaaaaatagcaaagctgacaaacaagtagcactacaggagtgaaagatcaaaagggtgagggagaaagagagataagagggaaaaaaaagcaggcaagaaacctggttggatccatggactgtgcaaggcttatacacctaggagcttttctccccttattaagttcccatccaactgcactaggcacagtgtctttccaccctataattactctttccaagttagaaacccaataaacaaattaaaagagatatcaacaagcagttactggttacacaactaatgcagctctaccttgtggaactgttatcagtgcttcaccaacaagggacaacctcatatctgcaaaaccacggttctctctgtagcagaaaaattgaacagagttgagattccacctcgcagaaataagtgctaagaagttgcgaagaggccatccaggattatttggtagatgacatgggtcataaaatccaaaaaggatctgccaatagaatctggtaaatttcataaaaggacatatatagtttcacattcaaaaagcaatttcataaggactgcatttaattatggattaattacacttgtgatccttctagtctggactgtctgcgatttggtcccctaattttcttcagctaatcagctaaaataaggaaattggcccctcttaattaatcttcctaaattttaattttattttacccaaatttacagtgaaaattaatttttttttcaaatttataccaacattattcctccaacataaaataaaaaacctcttaccccttccctctgaactcttttttaggccccccctttattaaaaacattacc

SEQ ID NO: 878 - DNA, 855 bp, Glycine max
gcatgcctgcagcttgtaacgagtggcgtagctcaaaatcaaaaacaggtatagatctcttaatttcctttcctcaaacatctggagcaatctcattagtccgttctgttgttttctcttaacttggcttgcgttgcctaataattaagaatatgtggcagatgtcccgttttttttagtcactatagatccaaactcacgtgctactgttaggcttctgaaggactgggaagcatgtcagagcaatgctcacaaggtctcttactttactttaactctggttataataattaaaggtttaattgaatttctggtcgttctggtttagacttcgagtcttcgagtgattttagtcccccaagtttttttcgagctaatcaagccccttgaattttcaaattaagcaaatttagtctctccgttgattttcttctatttaataaccccaaattattatttttatcctaatagttggtgatttatgatggatttgagatatggaatgattttaaagtttagaagaaatttagtggaaacttgataaaatttaaggaattctataagatgtaagattagagttttgaagaggatttttttttatttttaatgttttggatggaatttaatgttttggttgataaagttttgtgtaaaaaaataatttaattggattcaaccttgtaaaaaaaaatttgagctattaaaatggaaaaatttttaaagaatttcttagggaaggaaataaaaaatttgatggaagggggaacccaaaattttcccttaaaaattttaaaagctttgaaattaggctctccaaagaaaaaaaaattggaaggggacccaacaaaatcccca

SEQ ID NO: 879 - DNA, 1426 bp, Glycine max
ctgatcttgagccaaacatccctataaggttatcatatcggccactggcagcaattgaaccagcctgagtgtctctttaacaagctttcaggggacttgtcagtctttgtcaccacagccaacgtcctgagctcagttttctcaacactttgagacatcccgatggactcacaagtagtaaaatcaacactagcagagagaacagtcaataaaatacttgcttccggctttatatactccatgatcatatccttaatctgatcataaatattcttaggttgtccatgaactggaacctgaattatacaaggaagatcaaccggataaagatcaggaacaccattcttcttctccaacaatgtcaaagggttgttggaaatccctttgccatggcaagcaagctcttctgtggcagcagtggcagcacttatggcctgagaaatgtgtgcttcatctattgaaatggtctggccatagaactccaagacaagctctagggtgatttcctcatgtccaaaggcaccctagtgcaagtaccttggccacgtggtagtttaatagcagccaaagattcaagaacactggatttacttgaagattgatcgccaataacatcaatgaaaggaagctgaatcacatgagaaccatggaagacatttcctcagcagcgaatttcttgtcctcacccttgtaattgaccacaatcataggtttgtcaggaggaccagggaaaacccttatatagccataactgcctatcactccgaatggaggcagcggaaaatctccttccacacaaacgcttagcattgaagatggtgttgatggggttgatggtgacgtagtacttggcggcgccaccgatcaaacgttcggtgaaagcaaagtaagatgccgagcttctattacgctgatcagtggcgatgatttcgacatggtggtgctgccacaccttgacgcaagagtaggtggtgccggaattgattccgaccatggggggcagattcggcatgggtgcgtccggtggagtgagtgatttgggagaagatggagttggttggagggcagataaccagtcaaggatgacatcaagcttagcggcaatctccagagacttggcggtcatggtggaaatgttctgggtgaggtgggacagtgcctcttcaaggcagtccatggtggtctcgtgactgttgtgagcgggcatggtcgaaggcaggggttccaacagggaaaacgacgaagggtggtgaaatggaagggatgggacctgtggggggtagaataagtgcagatgtgggtggtggtggatggctgggcggataggctgccaccgacagaggtggggatcagtcatgcttccagcaggttaccggcaggtcggaccaattgataggacacagaaatggagctgcaggcatgcaaa

SEQ ID NO: 880 - DNA, 1780 bp, Glycine max
cagtttgcatgcctgcagaaaccggtcttctatcaaaactaacacatttgaatctgtcttggaatgatcttcattcacagatgcctccagaatttggcctccttcagaacctggcagttttggatcttcgcaatagtgccttgcacggttcaattccagcagatatatgtgactcaggcaatttagctgtcctccaacttgatggaaattcatttgaagggaatattccgtccgagattggaaattgtagctctctttacttgctgtatgcatcctatttctcaagctctagtgtcatttcttttaacacatctttttggaatatatactaattcctatctattttatgcaggagtttgtctcacaataatttgactggttcaattccaaagtccatgtcaaagctaaacaagctcaaaatcctcaagctggaattcaatgaactaagtggagagataccaatggagcttggaatgcttcagagtcttcttgctgtaaacatatcatacaacaggctcacaggaaggcttcctacaagtagcatatttcaaaacttggacaaaagttcattggagggaaacctgggtctttgctcacccttgttgaagggtccatgtaagatgaatgtccccaaaccactagtgcttgacccaaatgcctataacaaccaaataagtcctcaaaggcaaagaaacgaatcatccgagtctggccaggtccatcgccacaggttccttagtgtatctgctattgtagcaatatctgcatcctttgtcattgttttaggagtgattgctgttagcctacttaatgtttctgtaaggagaaggctaacatttgtggataatgctttggaaagcatgtgctcaagctcctcaagatcaggaagtccagccacaggaaagcttatcctgttcgattcccattcctcacctgattggatcagcaatcctgagtccttgctcaacaaggcatctgagattggagaaggagtctttggaacactctacaaggttccattgggatcacaaggtagaatggtagcaatcaagaagcttatatcctcaaacataatccaatatccagaagactttgatagggaagttagaatcctagggaaagcaaggcacccaaatctaattgcattgaaaggatactattggactcctcaattacagcttttagtaactgagtttgccccaaatggtagcttgcaagccaagctacatgaaaggcttccttcaagtcctcctctttcttgggctataaggttcaaaatcttgcttggaacagcaaaggggcttgctcatttgcaccactctttccgtccaccgatcatccactacaacataaagccaagtaacattttgcttgacgaaaattacaacgccaagatctcagattttgggttggctcggcttctgacaaagctggaccggcatgtgatgagcaacaggttccagagtgcactaggatatgtggcaccagaattagcatgccagagcttaagggtcaatgagaaatgtgatgtgtatggttttggggtgatgatccttgagctggtgacaggtaggagaccagtggagtatggagaagacaatgtgctgatactgaatgaccatgtgagggtgctgcttgagcaagggaatgtgttggagtgtgtggatcaaagcatgagtgagtatcctgaagatgaggtattgcctgttctgaagctagcaatggtatgcacctctcaaattccttctagcaggcctactatggctgaagtggtgcaaat

SEQ ID NO: 881 - DNA, 685 bp, Glycine max
agtttgcatgcctgcagccaagctctcgtggatttggtggtgttgttcgggtaaatttttcataattttatattaaattcttatgtttcttgatgtgttttgcaccaaattcacctattttgggcataacagacacccaccattgcctgttcctgctgtctgtgaaagtcagctgctttacagctgatgccgtgggctgttgtagctctgtcaaactcatggcctcttaaaaaaaacataccccagtgtcataaggctcttcactatgcgaaagtatgggagagggtcattgtatgtagccttgtccttgctgatgcaaggaggttgcttccgaattcaaacccatgaccaactggttaggcacaactttactgttattccaggactcgccctctagccaaaatgaccttaacaaaaaatagtctctagctaaatgaattgtgtcaatggtgttattttaaaggttaaacaaatgtgtatagtccatcagagacaaaagagtttacacactaaaactgatagcataaattgtcacaggctgctattatggatatacaagttgttccccatggttttcttacatgcggtggggatggaattgtaaagctggtacggctggaaaataacttgcttggccatggaattgagttatgatacttctgagatcctttgggttgatgacaaa

SEQ ID NO: 882 - DNA, 815 bp, Glycine max
  misc_feature (779)..(779): n is a, c, g, or t
ataagcccacatctcggatgcagtcttgaagggtcgaagattgagaacaatggtgggatcaacagagtcagaggcgataatccaggccatgaccagagcatccttaacaacccacttggcatgctcttccttgtgggtggctttgttaggagtggggttgctgccatcaatatgaccccacagatctttaccggtgacaaatatctcgagttgaaatgcccaggatgagtaattcttgccattgaggtggaccattaagacatcatacttttcagaagacatgaggctaagaaaaaaaattggtcacgtggaaccaatttcagactaggaatgagctgaagaacaaccaagaaagaacttgatctggaataggaaaacagacttggataagaattgcaaaaggacagagacttataggctaggctagactaggatcgtgacccagtttgataccatgtcaaactaagaaaagtgcagggtaaaaagtgtcttttcctctgtgtattcccctataaatattgcttattacaaataaatacaagctgattttcagccctgtaaattagcaaaactaccgtaattccctatactgcatctgttatattctaattaaggaaagaatcacagatttgctgtacaaataggcttttagatgggtttaaatattcagccgtattatgctgcaattagaacattttccttttcgattgacaaacattgctatagagctggaataaccaccagcctaagaaatttatggcaagcaaagaaaagcagtncgaccttcttagaaccactttgggagcttaaaccat

SEQ ID NO: 883 - DNA, 576 bp, Glycine max
  misc_feature (531)..(531): n is a, c, g, or t
tgaaccgtaattaagtagctaggagtttattttacctaattaataataatatgactagtggggtgataaaaaaaaattaaactgaccgaagagcgtacaccacaagaaaattgttgatttggaccaaaaaaaaatgttgaagaggattattattattattcccagtgggttggttgttcatttgtttatatatttatttttgggtgtacatcatttgtttgtatattgctatttgctacacttactcctccgtgcgtggtgcctttttagccgccagcaggcaatgacgcagaacttttcatcatcttcaatttaattaatcacgttgggttgagtttcagtagttttggatttaatttccttaaataaaatcttaaaatttgaattttatagattaaaaaaatataattaaaaaaattctattaaaaataaacagtcacattttccaataaaaattagtcataaataaaatagatacatttcacatcaatatcaagatcattgtgttttcaaattttatatacaatttgnttttctattggtttcttttatgtatcatttgactctaagatatct

SEQ ID NO: 884 - DNA, 824 bp, Glycine max
cactggccttgttattgctggggcatcattggttgcagtgaatgttactggaaatgccatttatgatcccataggttctattgtagttggcaacttacttggaatggtaaagaggattcagaagacagcaaaaattccccaggcatttgaagtggtatctattttattttaattccattctgaattaaccatgcaggtagccatatttcttatccagagaaaccggcatgctttgattggtagagccatggatgaccatgatatggagaaagtacttcagtttttgaaaaaagacccggtacaagctttttgctagtttctatggaaatcacataataatttttttgtcattcatttgactaaggtgaatttttgctttaggttgtagattccctctatgattgcaaaagtgaagttattgggcctggattcttcagatttaaggcagaaataggttcctttctcatctttgttacagaattcagataatgaattatgcatgatggtgttaagctgatcattcttaatgaaacagattttaatggagaaatggtggtgcaaaattatcttaaaaggactggtcgtgaagagtgggcaagacaggtagatacgcattataatgttcatgtaaaacctctgataatatgctgctatgttctgctgctgttattagaattattcacctactgctgcttttgattacatgctagcaatgcattgcacttggttaaaatatgtgcgtttggaatttggctttaccctacatgaaaattaatctaggggccttgggtctcatttaaaaaaaaaaagctacccctcgcttt

SEQ ID NO: 885 - DNA, 1381 bp, Glycine max
actttccttcaatttttttattgcaattagtattatcttcataaacaaaatggttcgtttactctctttcctctctgtctggttggtctgtgttctgtgtcagaatttcaaataaccatgatttttagattctgatttcttgccttttgtttttcatttttcctttcaggttcttcaaactgttaaattcaaattccccatacttctctcactaattcactatatagtgagctggctcttaatggctgtactaaatgcattttctttacttcctgcatctccctcaaaatcaactaagctatctgctttatttactcttggatttgttatgtctctatctactggccttgctaatgtcagcttgaagtataataggtaacacaactatgatatttttatttgaagtattttgttttgtactctgaacttaatttctatatcttcagcattggcttctatcagatggcaaagattgcagtaacaccttcaatagttatggcagaatttgtattgtacaagaagaaagtttcttggcccaaggtaaatgcattaactttggcaggggcatgtacatttgatgaggataaaaaagagagtgttccggggcttgtagaaataagagttttttttactatttgatttgaaatatgtgcacatttttgttctatgaactcttgtaagcatcttcacttttaacctagaataacattcaggtagctaatcccatcctttcattatgaagtgaagtgctttaccaaactataaagcatgtctattcactattgaatgccctcctgtgtcctgacacctctattgctcctatatgtttgtggaagataactgaatgcttcagtagatttaaagtgatatctcatgacattataagtgcttctgaggacatgtgaatgcagctcaaaattttagttggataaaaaagtctagtaactaggactattggtttttgagatttatcattttgtatgagtttgtgatctttaacatcatgccagttgaaaaccattgattaaattagttaacctatatactctagccacattgatgtgtgtattctatgtttcagaagtaaatggtgagactaccatcagtagtatgtcaaaatggtttctacataattgactcaagatttcagaattttcatacctatcttgtttttattattgttgttattattaaaatgcttactactatgagttgaattgaaacttttcaggctttagcattaacagtggtatctattggtgttgctgtggctacagtgacggatttgcagttccatttctttggtgcctgtgtagcattagcatggattgtacctagtgctgtaaacaaaatcctctggtccagactgcaggcatgcaag

SEQ ID NO: 886 - DNA, 1451 bp, Glycine max
atcttgcatgcctgcagaccaatataaatgaattatcttgcatacgaagaatttgggagagaaaggattaatccaagaaaaaaactcttgaggtgaagcctaccagcacaactccatctaaggcctttggaatccgggaagcaaatattaaaagttccatggcatcttccacaaaatgttcaggcatggtagaaaattccattgggcaagttggtggtagaggcatctttaatccacccaccaagccaaccaaccaaacaatcatcaagcggtagaaggaaagcgcattttgaataagtgtgttatcctaaggaaacaatgtgaagccagtaattcaaaatgagaatattaaaaatttgaaactttataagctagaaagaacgcttaaaagtaacaagaacatgtctaaatcaaatgattgatgaatcaagtatcaaatttcagtgaacatttaatttagaagaacataatctttgtaaggtagaaaagatatgcttcattgcttatcctcttgagagatcaatttaatgaatattgtctttactatgaaactaagaaaagacagacattagcaaccgtgttatgttgtaaccatatcagatgtcaggcactagatggagacttcaaatactttagttgcatcttcataatttttttacttttttataccaacactgattggaataccacaataattagataaaatttagcattgtattgcatttataatgactcatgatagttataaaacatgaattctctctggtgatttacaattttatattatgttaatttatacgttgtatgtatacaattatctatgtcgcgtcttataatatttaaaattttctatatcacaatgtatgtgtacgtgtaatattgtatccatgttccatcatatcagtgcttcctagccaacaaataaaaatcactttaagctccatcaatccccaaatttcacataagaaaaataagaaaagggtcactactgtaagaaaacgtagaaagagaaccacatttgtgacaacatacaaataaataacaccatacacattatttatatatagcataggtctacgtcatcctgtagtacaaggtttagtacaagagtacagctggagaatactacattttgcagtacgctgtacactccccctcaaagaagagcatataaatcatgtgtgcagcttgttataaaagtagctaattcgagaatccttgagtccttgacagatttcagtaaataatatgctagaaggtcattcaagttgatgaaactagtagaattataacaaagcaaaaatcttctctctatataaagtgacaacaatctattagtgcttggttctcccactacaacaaaaaaaagactgatctggagataatatgttaggccatttgattgtcatctgttttactagacagcaggaaaagagaagtcaaggccaaac

SEQ ID NO: 887 - DNA, 855 bp, Glycine max
agactattacgctgggatgagtaaaaaacataagttaggattgaagcatattggcttttttattactaagtttttattgtcatggaaaaatgtttgatttgaaagcacaactttgttcataatttcaaaagctaaaaacagagttttagaaaatagaaatcaaacacaccccactcactttaatagaactgctcaaatcaatgcacgagacattgatagtaggctattaatttagatgtgtagcataataaagaaattttgttatatattctgaaggtgaacctccaagaaagaactcttggctggcgtaaccctagttttatacacacaagtttcctgaaagaactttggcaaaatttgaggtattcattgttggtaaatctttgtgttttaatttaaaatttataaatatatattaattcaattttacaaaataaaatatttattttagattttcttaagattttgttttaatgagtcaactagtttgttagatttgttttgacaactgtaggttaatttacagcggtcatattttcaacgatcatactttatttgttgtgcttaaggtgacctgtgcctatatattctctttcctcatttctaaaaaagatgacagaactattttctcccaaaattttctatatcttctcttataaaataatttatttcttgagagtaagagcattggtgttcataaggtacggggatcctttcactgcacacgatcgggaaccatggggtggtcgatcttgggagaggagcgcaatcagatttttacccgggccgtgggggcgttttttttttaggtacggttatgcgtttacccaggctttattttttttcctaattttt

SEQ ID NO: 888 - DNA, 876 bp, Glycine max
ttttggtggaaacctatgaaaatggagaaagtgtatcacattatgtagatgagcttcaaggacatgaaaggattaaaagtgctcttgctcacattggtactaatgcacttttgaagatgcttctggtaaaatgtctttcatttactgttttttttttcttttttgtttatatatcttgtagtttgttaagattacatattattctgttatttatgattagatagtaattagtgattgtcttttttactcattattagattgatcctatgtaatcaataccgatcatatttgctcattataaacaaaggcttagtgtggtcatccaagatacacaacatacagtaaacactgttttatatagttgatgctagaaacattttttaggcttatttttagcattggtttgttatttgtcatgaagggataatcatgattgattactgatatgtcctgaaatgtaggtgtgtgtgtgtgtgtttgtgtgtgtgtgtgagagagagagatcaggagactctagacttagtgggggcaagtatttattttttactttaccaagagtatttgatcaaactgaaatttatttgtaatgttaatgtccttatatttgtctagtataatataatataataatatttaatatccaactactgttgttaacttgttattagaggataaattaatttttgtcctatacattattccatactattaaaattgttgaaatattcacttttttggtaatttttggaaaattatgaatctctccaattccctaagggggttatgggcccacggccccacttgataagctggtccttaggacccataattaattctgaaaatttcaacctgtatttctttttattcccggaatga

SEQ ID NO: 889 - DNA, 901 bp, Glycine max
tgtccgaccatctcggtgagcaacagctttgaaaaattccaataaatttacccgatcactgccagagagttcagcagtcatgcctacgtcaaggaaaattacatgcggctttgatttgaaaagtcgtttgtgaggcttgctccgtacaaggatatttccaggatgcatgtctgcatgaatgaagttgtccacctgaaacaagacatctcaatatctttgaaggtaaaactttttggtgttatagttcaaagctattcaaagatcccaggcttctttgctttcataatacaatataggatgtaaacatcgagggtaaattaccctttgtttcccataatttaacattctcagtttttccatttaaaacattctttttttaaaaaaaaaacgctgatgtttgagtcagtgagaaatattaatttctgtcaacaattttaggctcgttaaccaccgttagactcaaccaaaactttagagggattagtgaacaaaaaaagtttagaagggttgttgagagtgtgttaaagtacaaggggagaaaagtgtaataaaatagtaaatcaaacaagaacagtcaaaaagcaaaaattgcagataaaagaagataatttattacacataaaattgaaatgagtactattgatagccaactctcccaaaagcttaaattgttagcagggatatcaattggcagcagtacatggtgggagcagccatcagcccgccccagaacatggatataagtgcattttcatttgcaggtgtcatggctgttttccgcaacccaaaacccactggttttgcagcacaatagcgctgctaaccgaagatatctaaaatctcatttttgccctcagctggcattgttttgaggattttttagggcttggggcccgaaatt

SEQ ID NO: 890 - DNA, 674 bp, Glycine max
attttccattaatccttatgaacaagtaggcaattagcaacatactatcaaacacactcttttttgaacacatcatctctcattggttaaaatttattgaaaattataaaaaaactgggaatctcacatcttatttaatgactctctctcatgatattatagtttccaataaatttcagccaatgatggagtgtgtgttaaaaggagtgtagcactccttgaaagacaaatcatgccaatgctggcatagaattataatcagaagataagttgcagaaacttatggtcagtacaaacaagctcttgatagcaagacaaaagaatacttacatcgtcttgatcaatttccttgacaatttcatcgatatggacatcatccaaaccaaaatccttacaagcctgttgtatctcgtcaatggttatgtaaccacttccatctttgtcaaaataggagaaagcggacaccaggttttcctctctctccagcttatttaagtggactgtagcagcaatgaattcaccatagtctattgtcccactatttatcaatatctgcctgtaacatgcaagattataaatctttgttcatagtttaaaaattgaaagcaaaacagtacaaataacaaaaatggattaatcccaatacataaacaaaatatcttactgcattcata

SEQ ID NO: 891 - DNA, 765 bp, Glycine max
aagctgctaacaagcagcacatggagggtgttaaaaaaattgctaaattagaggcagaatgccaaagattacgtggtctagtgcggaaaaagttgcctggtcctgctgcacttgcacaaatgaagctagaagttgaaagtcttggtcgagaatatggagaaacacgattaaggaagtctcctgtcaaaccttctagttctcacatgtccacattgcctgggttctcccttgataatgcacagaaattccacaaagataatgaatttcttacagagcgtttattggcaatggaagaagagacaaagatgctgaaagaagctttggcaaaacgtaacagtgagttgcaggcttcaaggagtagttttgctaaaactttgagcaaacttcaaattttggaagcacaagttcagacaagtaatcagcagaagggatctcctcaatccatcatccatataaatcatgaaagcatttacagtcaaaatgcaagcaatgcaccaagcttcatctccttgtctgaagatggaaatgatgatgtgggaagttgtgcggagtcttggtctacagcaattatctctgagttatcccaattccctaaagaaaaaaatactgaagaattgagcaaatctgatgccactaaaaagttggaactaatggatgactttctggaggtggagaaaattggctcggttatcaaatgatttcagtggagtttcagtttacttcaaaacaatattggcaaatgaaaactgtggaccaaatgattgt

SEQ ID NO: 892 - DNA, 829 bp, Glycine max
aattcctgccaatttctgtatctaatttggaatactttggacttgaggataaccttctagcatccagtttggtaggcggtacattccaagacttcttaccagcagattcagagcaggtagcactctgctcacagaaattgtatctggaagacttcagtactttttcaatcttttcagaaccacttctactcaaacgatcgtttggttttagcgcagaaaagtccagatccttttgactattgaatgtcccaacaacagacagcacaagatcctgtgaattctgtgaaattgaaggttgaggtaatggcactgatttgtcaatagaccttacaaaaccaccagtcatcataagatcatgacctggtgacgggcaggaacctctaagtaactttatcataccatgaatgttactttcttgtttgctgaggcaggaattgccatctttaactgtattcctaccacttccattgttacaatcagaggctttgcttaaatctgttagttgagcatgtgtaattggttgtctatgatcacagaagtcaactcctttgccactgcccaaggtgctatcaagcttcaacaattcacgggtacatctggcctggctagaacttctagaatctggtaatctctcatcatacacactttttccagcttccttgctctgatactctcgtttatttgcttcattgatgccacaacttgcatttgcaaaacagggttggttgactatctcgaatgactcattcaaattattaggcagagggccatcttccttcgctacagaaggactagcaacattcaagagtcgatttctgggatgagcttt

SEQ ID NO: 893 - DNA, 820 bp, Glycine max
aattgtgatgagaactgtgaggaatatagtgaatactgggcgaacaattgtgtgcacgatccatcagcctagcatagacatatttgaatcctttgatgaggtattctctttagcagagggcttttcaatcattcattttaaacatagatattttggagttgtacttatgatcaaaataggcaacatatgtctctctctcatggagcaacttactcttctgttgacattgttatatagttaaactctaatttctttctattttgtttgtgtacatgtaacatatgcccgtagctgttgtatattccagttttcctgatcctgtctataatgaaatgattggtggtttcgaagagagcatcatatattatctttctatttgaatttctctttcaacacttgctttctcttcactagtctgatgaaatcccaacttttacagcttctgtttatgaaaaggggaggagagctcatttatgctggtccacttggccctaaatcttgtgaacttattagttatttcgaggtcagttgatgcaagattagctttcactgaacaagtggtatatggtcgaatggtgataaagcaatcctcaattattcaaaaaatcaattatctatgtaggcaatcgaaggagttccaaagatcaggtctggatataaccctgctacgtggatgctggaggctacttcttcagttgaaagaaacagactgggagtgggactttgcagaaatctaccgaaaatcaagtttatatcatatgtatattttttggcgataaatttggacatgattttttatttatattaacatacaatgttt

SEQ ID NO: 894 - DNA, 581 bp, Glycine max
atgcttgataacggaataaacctctaaacattcattcccttactgatattgtctttttaaaatatgaattatgcttcgttttcaattttttccctctatccccatctcagggcctgtttttgctttcttttctttccaggttgagctgttcactgcatctattgtaccagttgcaagatttgatctagaattgttttaccatctcttcccattgtctatctcaattttaatattgaaatgtgatctttagtttcaaagatccaattcccatcccaaagaagcaaggggtgaggtgcgtggataactatggtaggtgaccctttggattaattttggatatgctttgataccatcttatgaatgtaggtttggacctaactcaaccccaaaagcaagatcaggaggtgagggttgtccctcacttgtatactctaacttggttttatttgcagccgatgtgggacttgggtttttccgaatagatagcagggattcaagaaaattaaataacaatttccccaaactcaacaaatacacaatttaaaaggcattaatagaacttacatcattgaattctcttg

SEQ ID NO: 895 - DNA, 857 bp, Glycine max
atgatatagttaattaagagatggagttaattttaaacttgagccttggagacaaacattggaagcaaatagttttcacttgagtagaagtaagacgtagtatatgcattgtaaattcagcaagaacctagaggaaagtgacttggaggtgaaaattggagatgtcacaccatatgtttctaagtttaagtatttgggattaatattacaaaatgatggggaaataaatgatgtcatggtggttaaaatggtaaagggtgccagagattatttgtgatctgaaatacaagtacaaagagaagttttattgcattgggatctgaccaactaaactatactctggcagtgttatattgggctttaaaaggatgagaagaaaataagagtagcaaaaatgagtatgttaagataaatatctgacctcacaagaaggcacaggataaaaaataattgtatatgagaagatattggtgtgacactaaaggaatcaaaaagaattgcagagaactgaagtgaggtgaaattgttgattgtattcaacccaagagaaagaagattgcacctcatttatatagacagttactcaactgtaactgttaactaacctgagttagttagtaacagctgtcacacagctgtcttaacagattaactaactaactatagactaactactaactgtagtttagcctttacagatcagttaaaacaaaaagaaaagtagaccaagtaattatactccttataccccccgcagcttcatgaggggttggcagaatgcttttcgaccactctgagcttgttctgtatgtgtaaattagaggaagagagcctttgtagatatcactcttgataac

SEQ ID NO: 896 - DNA, 683 bp, Glycine max
cttgcatgcctgcagaatttacaagacctcatcatcaactcaaaaacctcccatctaatatttggaatctctatgtcccttgcctccttctcctgccatgcaataaaacacatttttacgccactcatattaactatcactttctgcttcaaattaaaatgcaagttttaacagttacgtacttaatatttaaattcaccattcaaatcaacagccaaaatcataggtgataaataatatacctcatgaaatcaagtggagtcaataaaggagttctttttatggccaacatacttttttttcccctaataatgtaatggaattaaaaaaattgcttcttgtggcctgtgtattcattggagggactttagaggtggggaggaaggagaaagatgatttattggtgaagctcaatataaactcaccctgtaaccaccatcaaacattgcacgaaatgcatctgatgatgcaagaagacaaattctatgagcataaaatcgtttgcctgcaatgaagaacaaagatcacccagttaacttcacatgccaactgaagctacaacaccacatttcagggaaggtagttttcaaggaacagtttaatgaatgaaacaatgtggacaaaaagcatcaacctttaaccaaaaatgtaacgtcagacaacgtaacattggttaccgactg

SEQ ID NO: 897 - DNA, 1419 bp, Glycine max
tcaacaggggatcattttccagtttttttattcttcctttccataatgcaaaaaaaccaagggttaatggatttactgctaaaacctgaacccaaataatgttccattaactatttctggccatcactattttcccactttaacttaattgttaatgacttactgctatagctgaacatataatgttacagactacagagcgagttctaggattccctatgaatttctctgtacaactatgtaatactttttacgatcaataaaaaattaagaaattatccaattccccagtgcacagaaacagtgttgcacattaagaggacaagagtgagccttttcaaatccttttagttagagttataataacatcaagcttgatttttataatgaaacttcaatcagatcgtagaaataaaatccctagttctaaacaagaaacttcttgaaaagtgcaagttaggtctaatgtaaaaatatgtatgctgcacttttcacccagcctctgcccaagccttggaagggaaaaaaggaatatgaaattaagaaaataaaatgaatgtaaaaataaatattttgaaactcaacttaatttattgctataaacatccacccacataattttaaggaacaattggggagtacacgtaccaactcagtgggtaataagtcagactcaatgaataatctctttgataagtcaactttggcaaaactttcagctagagcatgcaaattcaaggacaaaaatgatgcctgcatgaaaacccaattcaggacaagtaaggcaatactgaaaatgaagttgaaatacaacatctagcaatataatcaagatatgaaaatcttgcaaaggcaaatcatgataagaatgctgcaaaaaatcatgcagatcgacaacaattctatgaaaccaaaattgaaaactgatcaaacataactttgttgcctataaaagtttcatgattttacctggccatggacagggcttttctttcaacctctagctcatattgtaaacggccaatctcactgttttcaacttttgcatgttccccaagcttgctaatcctcatgccttaactttgaaaaaaccaccattttcgattcaatagcagcttgctccttagtcaatgcaaggttatcttcttctctctcagctcttaacctttccaacttaagtcttgcctcctaatccattcttttaacagcactgatctttttcctctttatgaaaaagctcttgctcaaaacttgcattggataattctttttctaccttgaagctacctaaaggcacttattccgccagcaaaccaaccatttttaagccaataagaaattctggctttcaaatgcctttgcgaagggggcttttcacttaaacttatttttcaaaaagacatttttcccagttatcca

SEQ ID NO: 898 - DNA, 624 bp, Glycine max
aatttcctgagcaagagatttaactgaaagctccacatcctcaagcagttcgccaaggaaggggattgtttcagctatgaacactagatattcttctttcaagttctccacaaaatatttaacaattctgaggcccaatattttagctcgcaatttttcactccgtgtctgcatcaaaacctgcaaaaaaccagataaagaagccagaaagatattcagttgcttaggaatacaagtatttgcggggaacaaacatatagcattcaagagctatacatattactgaatacccaaaactataacaacaaactaatgggctaaagttcaacacataaatgaggcatggatgactacaaaggaccaaagctaacatattatgaaatggggaatgcaagagtacaggagcaaattcagatctttaaagattattgactgaagggtaggtcaaacccgcagggatacaaagcatcaattgacattattactaaagtttgatcaaaaaatggcataaaagctacagtctatttacatttaaaccctataaagcctgataaacatagccaaaaaaggtaaaactctaacatggctggaaaccctggttccggataaactttttcaataagc

SEQ ID NO: 899 - DNA, 829 bp, Glycine max
acggtaaccttttgaggattggactttttgcatctattggtttatttcctggttgatttctaaagtgcagttacctctgaagaagttggacatttaatcataatttgtcatattttttttattaattctgattttgatgtggttacctagcaaacagcacaacttttttatttcctgttggcacttttcctgctgattttttatggtaatatcttactcatatgagacatacactgctggtttgtaattatttctgaagaatattattgatgtgtatctatgagcaaggtggtagctgtaagaatttaaaaaactcctttttatgacagctaatttgaaatttttttgtttaaatgcagaatgataaccaaccattagtacctgtacataattcgcatgtgtttgctctttcccaaatctgcccaaacaacttgaatggaagtgttttgacgtaagttctatttgatttgatttgatttttatgtgtgttgggtggtggttagcattgaagttttaaagttatgaatactattgcattaatactggctattctcatttagccacaactaggcttaccttgaaattttcacattctggttgtacattattgttttgtatggcacaatcacaagtatcttaaccatttttgagttctggtgaaggccacttgatctttgtgatacaaatcaaacaggcccagatgtcttgtcccttgggtatcaaagctctcatgctggggggtgacccaatggcaaacataaaatctgtgtcaatcggggctgcttcaccgtggcgaaattatcaatttgatacccttgggggatggggc

SEQ ID NO: 900 - DNA, 840 bp, Glycine max
atagatagaagctcagcatgtgatggaggatgaagctgtttaagaacaactttaggcaaccgagtatgatccatgcactaagccaaatggattggcacataatctaattataaaatattagctatttgacttttatagtcactgtcgctggtcatcaatgagatgattgattattaatgttgaggatagaacaaaagcaattctacacgaattacatagtatttatcaaaatgctgttgagcttatttatgtctgtagagtgtagatcaagtactatcaaataagtacttattcaagttacttgttgccttatttggaaataagtgattccttaaaaatcatcccaccacaagagagttgcttcttatacaatattgcatcctactccgagcttcagatcagacaatcaaatgctttgtttgttaaggaattcaatgatgagctggttcaccttctcaggaaattgttcatgcaccaaatggcttccttctggaatatatatgatttccaagtctggcacaaaatgtttcactgcgccacttcggatgtagtcctccattccaaaacacttgaagacatagtctttctcacccatgatcagcagtgccggaactgtgattttaggatcacttatgccactatccactccaagagtcctgtgtggatcattaactgagataatattactgaagtaccctagactagaaaactattttagagcattgaaacagaagacttaaacttaagaaacctggtttaaggaaaatgtcatgtcatgtctcatataaaagaaccttagatacaattatttagaataagatttcaattcttgagaataac

SEQ ID NO: 901 - DNA, 782 bp, Glycine max
tgaacaaggaagaggatgagaagatgaggacaaatgctgcaaatgttgctgctcgtgctgcttatgggggagatgacatgatgtcaaaatggcaacttatggctgagcaagccaagcagaaacgtgaagggggggtggatgtgtcatctggttctcaaccagctaaagatgtgaaccgcaaatctttatcaacatctggaagaagtacaaaggataatcaggaaggggagaaaaaaggttcatctacttttatagcaagttcaggtgagttttctttaagctttttttttcctgttatttccattgtaaaattattcaattgcaagatagaaatcaattttagttattcacgatccaaatgctgtttcttaatatatgtggataaaacaaattaagatagaatagaaggaagtggaatctgtcattgtcagaaagctcattcatatagaatgaaaaaactagtgcatatgttttgcctgatattctatacttagttgaaaatgttttgataaatatctagagattgtacagtatcctactctttccagtttccacttctttgaactgaatgattccccgaccttgccattgtcctgttgttactaaatgattaatgttgccaacaaaatggcttcaagtaacgttatgttgcagagatgctatgttggttattggtttgaatcaagtaaattggtgcttttttttttatttgtttgtgcatcatttcattgctgttttgctcctttgattcttcccaacaagggctagaaaaccttgggaag

SEQ ID NO: 902 - DNA, 915 bp, Glycine max
tgattatggttttcacacaggactgataattttttctggtctaaagaggaagttacccgatgactcgagcaaaagtgatgatatggattccaatgacatgattttttcaaactgtaaaagaagtcgagctcacgatgcagaggatttggaggacaatccaccagggaatacagcatatgattgtatggaaaccagtagacaaaatagtccattgtgttcatctatgtccccatgtgcagttgaaggttgtctgtctaaggggtttgcaggactactcaacttgttcctatgtgtagtttggtagggagagaagggcttccttttgatgaagctcccctcttatagttaaagaaatacatagaaggttcttttgctagttgatatctgttgatgtattcattttgaatgggctacaattacatgatcctagtttctcattaatattattcgtggcgttgtaatttttaacatcatcctggtgagtgttaaataactatccattgcctttgataaaatgaatagaaatgttgtgttttgcttctatgggaaatttgatccataattcccattgtttcaatatgtatacttgaaattgaaaactaaggacatatggtgaaccagtatattaaattttagaactttgattgaattttaaaaaaaattattcccgggtttaccttatgaaaaagaaaaaatggaaaaactgtaaatggattttatttattggtatttatttattttactgggctctttctaacaacaacttttagggacataaatctaagtaccaaattaccttcccttatttttttaaggccctgaacaacctctgaataaataaaagaaattttttttgcccaaattttttgaaccctcattaaaaaaaaaaatgtaaatgagactggaaaaataaaa

SEQ ID NO: 903 - DNA, 553 bp, Glycine max
aggaattggtgattcagagtgggtaaggaatactcatacgaggaattacgaggaagagcagattaaccatattagttacctcctcaggaaaaaatgaccctcgggctttctttatgttctctgccctgctccacaaagaatgcaggattccatgattaggacttcatgtcactgtttgtatttcatcctatatagtattttttttatcatatcctatttagctataaatgcatgcatgtagactatcttatataaaatacaagacccgcagaatcccaattacagtctaagtgtatttcatctcaaaattaaactgcaatgaagaatatgaatgtcatgcaaagaacatacaaatagatatattaaacttctatatggaaaggatactacggatattgcaaaaattcaacaccaatcaacaaggaccccttccagatctccataatatgtattacttacaaagcatgtttatgccagagtttaaaaaaaggttcttgacccttttctgacaccttaatcttttaggccaaggatctgttatacatcagaatta

SEQ ID NO: 904 - DNA, 808 bp, Glycine max
aaacaaagacaatgactttagtaaatttgcattgaattaatttcattgatgaaatctggtaggtgatatgctgctcattactgttgtctcaagtgttgatcaaacttccagagaagaggatatttgttttgtcaatgttattatgctcactaaatgctataaacaccataagacatgtcattttcatttttgagccaagtgccatcttaatattggttttctgtagatatgagtgtgtattcataatatatttgcctttaaaaaaaaaaaacagtattcttaataatgatttcatggacttcagtcctaagagattgtgtgaagctgatttcaaatgattattttctgtctacccacatgaaagtgactcagttcctctttccattacagatgaacctgattgcaaaactgaataacccatatattgtggactacaaagatgcttgggtggagaaggtacagacatttttttcttcttaattttaaatttcagtcattcatttatatagagatgaaaaaataagtttgaattttattagacatatcagcttattctgatgtttagcacacttcataggcatgtttctgatattttatattttgtaggaggaccacatatgcattataaccggctattgtgaaggaggtgacatgtaagtaaagcaattcctgttagtaacccctggttcttttcttgcataaaattaaaggattctgaagctttatgggttttctcaaattaaatgtccgggaaggaaaaagggaaaatatttttattataattattgttcccatttccaaatttggt

SEQ ID NO: 905 - DNA, 730 bp, Glycine max
cttgtagagaatttcctcatacctctccacaggagaggtgttttattttctctcattcgtattaatggaatttttgggactagtcttgttctttagtttggttggttggcaataacttattatcattgattatatttgtttcttgtgtgatttattcattgctgtaggattttgcgggatcgggcactttataaagtgacgtcagactttgttgatgcagctattaatggcgctattggagtgattagtggttgcattcctccaataaacccaactgaccctgaatgctttcacatgttagtgggtcttttaaatcctgaaactttattttcttgaaattctgaatagttattcctgcattctaatagtatattattttaaaatgttttaaagtaatgtctagaggaagttgcatgttacatttttcttctttggggtagggggtagggaaatagggagcggaagataattgttccttggcccagaaatattactagtgaaaagcatattcatataatttgttggtacctttgatattgcctctttactcacatgagttttcctttgtacttggaatgccttttggctcattgctgtaatttatgtgaaggtatgtgcacaacaatatattctttaattttgctattgatgctgaccttgagaagctgtcaaagaagcgtgtggatgctaattcaaaaacttggagctcaagccattcgcaaaggtcttc

SEQ ID NO: 906 - DNA, 851 bp, Glycine max
tatgagattgcaaagcatatataaatttgactggtaaaggcaaaaataatacaaaacacaatatttgaacgtatatttaacattcactagtgcatttaaaagcaatgaccttttgttagctgtggagtcaaacagggaggcaagattcaagccagccagactcaataaaaacttgttataatgattcacattacatgaagacatatatacttattaatcaatatagacacaatgagaaatgctagatacacacttcaaaacactattattaattgaaattcatgtgagactcattgaatgtgttgggtcccactccctatttagaggatcctactatcaagttagttgatttcacactaacttcataaacaatgtgttgtattaaagacgatgttgtaagttgttgccattatgagataacaagacagaatagtgacgattacgaaattggagaacaaacctcagttttccattaggcaactgatcagcatcatattttgcagttagaagctcagccatctctcccagtgcaacctaaaaatacagcaaataaagaatggagaatcaaagatgacatattgcacggtaaacaagttaatataaatcaaacttcttgaagatgcggatcaataataaacatattgcaagcctataaacttctaaatggaatcttgcagacaatactcattatatttcagcaacatatgaaaaacagtgcaaaattctccaacttgcgctgttataattatctataacaatgtttgacatgcaacaccatttgggtgaaattgataattgggaatttcaatcctcattccagggagcacagcttattagtaatgcaacatatt

SEQ ID NO: 907 - DNA, 724 bp, Glycine max
gcttgcatgcctgcagcttccaaatctgtagttatctgcacatattctttgggttgctgggatgaaattacttccttttcaagatttaagccagcatcttcaggattatccttcctatcacatgtagtgtcagaaggatgggcatccacagagtggtggatggtagtgtcatgtgaatcttcaagcacatgtttaatatcatccacaatcttccctatgtcagcatccttagctaaggactcaaaaaccagtaatattcttgatctaagttctgttaataacaagccactaacgtcagtttgagaatctggtgctgacatcaaagcatcagaagacacttcatttggcaattgatctgaattgccatttttttcagacagaccttctttgccagtacagacttctgataaatcatcagccacaaagtcagttgtcttattgtttgaagaaactgaaatagtggcatctacattggaatcatttgacaaacgagccaacttctccacctccagaaagtcatccattagttccaacttgttagtgacttcagatttatttgattcctcattgcacttttctctaagaaattgggatagcccagagactattgctgttgcccaagattcagcacaactttctgcatcgtcatttccatcttcagacatggagatcaaacttggggcactgcttgaattttgattataaatacgttcatgagttaact

SEQ ID NO: 908 - DNA, 879 bp, Glycine max
tgggaaaaggctgaagctgaagctttggcattgaagaaccatctagaatctgtcactcttttaaaactcactgctgaggatcgcgcaacgcatttagatggtgctcttaaagagtgtatgcgacaaatacgaaacctgaaggaagaacatgagcataaaatacaggaagttgctctctcaaaaaccatgcaattagacaagattaagggggagctggaggcaaagatagtgaactttgaacaggaacttcttaggtctgctgctgaaaatgggaccctgtcaaggtcattgcaggaacgctcgaacatgctaatcaaattaagcgaagagaagggtcatgccgagggtgaaattgagcttcttaagggcaacatagaagcatgtgaaagggaaattaattcacttaaatatgaacttcatgttgtttctaaagagcttgaaattcgcaatgaagaaaaaaatatgagtatgaggtctgctgaagctgctaacaagcagcatatggagggtgtaaaaaaaattaccaagttagaggctgagtgccaaagattacgtggtcttgtgaggaaaaagttacctggtcctgctgcacttgcacagatgaagctagaagtcgaaagccttggccgagattttggagaaagtcgattaaggaagtcccctgtgaagcctgctacccctaatttggctccattacctgatttctccctggagaatgtacagaaattccagaaggacaatgaatttcttccggagcgtttattagccatggaagaagaaacgaagatgctgaaagaagctttggctaaacgtaacagtgaggtgcaggccctcaagagtatgtgtgctaaaacacttgacaaaacttcaaagttggga

SEQ ID NO: 909 - DNA, 855 bp, Glycine max
attgaaagagtctacagtacattgttagctttaatgatgagaaggttagaaaataaaaatcttgtttgcatctagtagctaaacgattctatttgcaattaaaagcttccatcaagggctaattaaagcccaaattagatagatccagagccaacaagcccaattgggctacattattagccttgatcttgggcttcagctgtttagcccttgtcattagttgagttgaccccaaaaaaattaaaattcaccgtcaccgattgattattctcatcgccgcgctcttcaaagcttgaaccgagatacgatttttttttaaagcgtttaggcgaattcagcgagagtgggttaacttttgtactttgtttgttattaattgcgacgtggaaaattgaaagtgaacgtttccgatggtgtcgtggaacaggttgcggctgggaatggacggtgacggcgaggagttgacggcgcaggagaccgctttgtatgaccgtcaaattagggtttggggagctgatgctcaaagaaggttccttcttcttttacttttttaaattctgatttttcttatgcgcgatttgatttgcttttggtactttactattggaacctaattgaattctgctaattttttgtgcttcgttatatctaatctaataatagttaaaagaactactttacatagcattttaatgagacttttttgggtccagattaaacaaatctcatgttcttaatctatggaatgaaagggactggtacttgagggaatcctaaaacttgtctctctcctgggatctaaaatttgactttgggcaacaaaaaaagagaaaaagaaaggggtgccccccccca

SEQ ID NO: 910 - DNA, 846 bp, Glycine max
caacagcataaaatgctacacgttttgatagctttctgcattttccattagccagtttctacagcaaaagagtaaaggccaagaagaatgttacaagacaatttacagtatcagaaaggtgtagagtaatttagaacacagtgactatgtaaaccctcagaaatgcacacacacacacaagttttccacattactttggccgaaagcgtgcaacaactgacgacaacaacatcaaacttgctgaggaattcaacatcaaaacttgacaaatcacctgaggccaagacaaacaacagaaaagaacaaccacaaaacataatgtcaagagccacatgaaaccaatgcataagcagaaaccaaacatataagggaacaggttcaacaaaaacctttctcaacggaaacatgaaccatagggttgaagtctttaagtgaattacaacaaagctctgcaagggtctttccactatacacattctcatcgggagggatgagaaagttggaggaaagcatttcctccgtggcagcccggtcatctactaaagtcagactacctactccagccagaacaatattcttgcaaaactaaccaacagcaggaaactcaaattcctcacacattattacaacaacatattggggggggggggaacccatttttttactcttttttgtttgccaaagtcaaatttgagataccagagagagacaagttctaggattacctcagctacagttccttttattccatagactaaagacatgagaattgcttaatctgggacaccaaaaaagtctcattaaaaatgcttttgtaaaggagtttttttaaaacttattattaga

SEQ ID NO: 911 - DNA, 1341 bp, Glycine max
attttagcattcataactaaaattccttatgagtatatcaaatacacagtttagtactgtataatgacggtgtctgattattcaccatgtttcttgttaattgataaactatccagtttcctttcataactgtaagtaaaattcacaagttttttttttatatagggtgcattagacagatatactagctttagactacagagctgcaatgaagttttatcaaactaacatttatggaacaggtggaacatttgctctttattccttgctttgccgacatgcaaagataaaaaccattcctaaccagcatcgaactgatgaagagctaacgacgtatagtcggtctacctttcatgaaaggtcatttgctgcaaaaaccaaaagatggttagaggaacaagaatctgcgaagagagccattcttattcttgtccttgttggcacctgcatggttattggagacgggattcttaccccggctatatccggtatgccttctttctcaatctgatattgttcccattttcttaaaaatatttccataaatttcaacttgcttgctgtttaccaaagtaagttatctatcaatgcatgtgcttacatattatgtgtgcatatttgtgctgatttaccaaactgtgaaagatagttacaaattcattttacgggatgataaaaaagtaatatccataaaaatcaatatacataaagaaagtaacttctaaatcacaacattaaacaaacataaattgataaattatagcataataagttataagatccaaatagacaaatgcaatacataacaaaacacacaattcataacacaacaactgtgaatgaacaatcccaatcactgaaatcagagatgagagaacaaattaaatcccaaagactgagcatgagactgtgagaagtggtagactagagtgagagtgaccttcagtttgcacattgctgcatccaaagggaggcacaatcgatggcacaggtggcgacaatcttgggtggtggtggcagcgtggagtgaagatctggaggttgtaagcgaataagacatctggcagtgatggatgaagaaatttgcaaatggggtagggaagggctttgcgaatgagaagaaagggactctggaactgggtcatacagacccaacctggttttttcagcctgctctgtcttgctgaggattgacgatctcacaattgcacgtgtaagatcacaatcccactctgaacttacccaccggcgatccaggcacgattcagctcgcctgggtgtattcaactcgtaggatgtacaatcctgtgaggtaaatcacgattttaataacaatgctgc

SEQ ID NO: 912 - DNA, 770 bp, Glycine max
cttgcatgcctgcagcatctgctgctgcattatacttggtttgaatatcacaaaggtatcaatactttacatgatagcaaaatattaatgatacactttttttaacgtacttcttttaatacaatatttttttttgagaatttcattaaataatacatgaattttattaaatagtgataagattgaaatcattagtgaaattgtacatgaatctcaaattaataaaaaatatttttgttctatatcattattatgcccacttcaacttatataattaaacaaaacaaacatgttgactaaaaaattattaaacctaaaacttaagcttccccacttcaatccaattctcttcatcactcgagaactttcttgtcaggagcttatattgacaggggcggagctatgttgggtttagaccccaatttttttaaaattctctttggttcatatttaattttttatatataaataaaaagataaaaagctttatcaaaatttatgaaataggatgactaatatgattaattgtgtattttattttgaaaataattaacgtcacatgaaattttaagtggttttaatttaaaaaaaaatcttacaatgataataacaaaaaataattatttggtaaaagaaacaaatattattaataatatctatatcaatgctgataagaaaatacctatatctataatgatgcatgtattcaaaaccaaaattaaaatttaatatgaataataccttatattttaataaaactttatttatta

SEQ ID NO: 913 - DNA, 790 bp, Glycine max
aaagttcattactatcacttatttagttataaatgtaatatttgagagaatgaataattgtgttatatttacattactatcacatataatatttatatacatgaattacacaatctcaatacctaaagtttagggactagaatgagctatctaaggaaactagcaaagaaccaaggcaaacaatgaaatctgatcagtatctctaatatctgctaatatctgtcaatatctcaacagtagctttctccataaattaccttgtttggcatcatttccagaagtgaatcatcctagatccatttaacttgacactcttgggcaacttactagagtgaattagggaacatactctatacggtagcatagagctagatcatgccaatcaaccccaacaatgaggggcttaagggtgggttcacaacaatgactaaccaagaataggcagggaatgcataaaaaatttataaaaaaaaaattcattgtaccatcaattgctactgtgttgtttgtaaatcaatataatattgtatatcttattgaaacaaatttatatctaagttcagagaacttaccagtgagagaaattaaatgagattccaattgaaaaggaaagggacctatactttgttgagatttctatcaaccatccaataaacaaaccaagagcaccaatcacaattacaagaataacattggaagacctgcacaattcagcatagataaatatgaaaaatacttaaacacctttagtggttggttggctgtgcctaaattgctagtctactagttc

SEQ ID NO: 914 - DNA, 815 bp, Glycine max
acacactaagcaacctttccaatcatagtggcatccaagtatatacttacatattattgattccagtaaaattaacttaaatattcaaattttatagcaatgaaaaaaattattaagataagagatatcactaaacatataatcagttgagttttttaataaagattaattctcaataaaattattgaatattttgtaccaataacattaggtttaggtttctttcagtgagtcttatgctttgaactagcagctttcaatcaagatacgtgaaggaaaccaaaatcttgtcttaggatggatacacagctggactagtcctgttacttccatagcttacgctgaaaatgggtccaccaagtgtcttcaacttaaaggggttacatcattggtttgtccaattgatgattgagcaaatcttgggctttttttactttgtgatcctatgtgtgtgtttattttctttctgtaacctttttcatcctgcctatcatgacaaagactaaaactttggttggaataattgtacagggacatgggtgaaagcatgaaagcttaatttcaccaaatcgataattcaatgtggaagatcttgaagtatcttggatgaatgggatccaccaccacaaccctagctatagcactttcgtgtaaggcttcagcgcctactttttactttatcaaacgattaattaaccaatcaaaaaactatttaaacaactgatgaaggttgatgtatgactttttcgtagtaccaatggggactgactttaatttaaggtaccttctaagcaaaaggttatgaaaatacccaa

SEQ ID NO: 915 - DNA, 567 bp, Glycine max
agctaaaggtaatttgttcccatgaagaagaggatgatgagaaaagaagagagccatggacctatcacaacaaagataagaattgtattgctacttttctctcgttttggtttggattccctgaggcttgagcaatgttttcactgtgataaaatctaagtatgtaacaattaaaatttgtattaagtgattgacctattcattaactatacctaaagaaaattaatcaaacaacaatataaacacaatctatttaattgttagttccttgctgataaaaaaatatttatttaaataaatgtaaaactttcgttgacccctgtttgaattagtttggtgaaaattatctatgtaaaggattgataaatcaacaaatttgattataagaaaaagaaaaaatatagctttcacttcattgtgcacttcaatatcaaaggtaattgtttgggaatgaattttcttacacttttttttgtttttttaacacaccctttttatattctgaaaattaatttatggatagaacaattgcaaaatcttatttccaaaatacagaagtctgaagtt

SEQ ID NO: 916 - DNA, 636 bp, Glycine max
tgcatgcctgcagggaacaccttcactagaatggctagggtcattgtggctgcttgtaggaaatcaaaagttcctgttcctagtgactctaaagaactatatgagcttgacaaggaagggtatgcaaagaaagggagctacagaattgaccacactccaacattaaagtacaaatttctatcctacctttctcctttatggataaattattacatggtcgtgaccaatctccacatgacatcttatttcatttttcaattcgtaaaaagaaattaataaaatgtgattgaacatgtggtctcagattatgtaataatttctccacttgacgatcctagttttacaatgaaatttatgttcctaataaaaaccatacatatatgtgcaggttccttgataaggcctgtgtgaaaacagattcaaacactagtccatggatgctgtgtactgttactcaagtagaggagacaaaacaaatgataaggatgattccaatcttggttgctacatttgtgcctagcacaatgatggctcagataaataccctttttgtgaagcaaggtactactctagacagacaccttggaagcttccaaaattcccccagccaagtttggctgcctttgttaccggggt

SEQ ID NO: 917 - DNA, 766 bp, Glycine max
aagatgcagtagaggacacagaacatccattctgtgaaaacctcttggaacctgtgcatgtcaaaaaaacataaccttagcacttgctataaacaaatttagtgcatgaataaaagatgcatcccttccaaaattacattcaaaataaaaaatataggggtgaaatacaatcttagtccttatactttcaatgaaacttgattttagtccccgaattttaactatcatcaatttggtccttaaacttcataaaatcgttgatttccatccctcttcacggtaaaaacattagtgagaaaggacaaaaatcactacttttttaatattcaagaaccaaattgattatagttgaaatacaattaaagattaataccatttttttttattaaaaatacacgaactaaaaacatattttaaccaatatatataaagagaatccttttccataagtgtgttaagcactcaaaaatacatttagaacgattatccaaacatgcacttagagcaacaaattagtatagtagtatattgctacctcaacaatgaaacaagcccaactgttgctggaacggttttccaagatccctttcaagatggtgacatcaagctttcggatcacctgagcaatctccaagaaaagtccatgctcattgcatatcatctattacaaaagtggcaagcagttcaataaatgcaatttttggatgatattctttgttttattttgagagtcaagtagcatggagaagaataagcatacctctat

SEQ ID NO: 918 - DNA, 824 bp, Glycine max
  misc_feature (814)..(814): n is a, c, g, or t
gagtataaacccctccatgtgggtaaattgctgcataaggaggcccataaggtggcatcataggctggaagaaatagttagcaagttactcatccctgtcatctacgatgcatacaaaaacatgccaaaagaaaaggcaatcatagagcatacaaatgattgcacagaggtactactacctgtggtggtccccacatgtatgggtgaggagcgtgaccagaagccacagctgagttgtagtatggtggcatggtgactcttggcccataatatgcctgaagatatagcagacattttaaattataatacagtcactattcactacactagagaccaaacacacttgaaaacttgctgggtgaaccaatttgaaagggataaaattaatagttttataccatcgaatcaatgtttttttttttacagattgagcaatccagggacaaagcacatctcatcctagatattaccccaactgattgccaaatccagtagcaattcagtgcataatttcagtctgacattgattaggggtacatattgataacaactcacaaaacacagaataggtaatacaatgcaccacaggaatgacactctaatatttatattctgagaggataaacaataattcacaagagggaatataagaagctttcatcagttcattgcttcatccacaaaaaagaaaatggaaatacactaagtatttttaaataaaaaatagctggtgtcgtcccagaaagaagtactacagatcacttgactttgagcatggaagaaataagacatgaggataatggttctactgttngtaaataaaa

SEQ ID NO: 919 - DNA, 811 bp, Glycine max
  misc_feature (760)..(760): n is a, c, g, or t
atgtttaaccctccagtaatttatcaagtattaatttgaaattgctggactcgcctttcccctttgctagtgtgttacatgtataagttatctacgtcagtaaaaagtttataattagtaaagattatgttatgctggttaccaagattatatataggaccatgtgtagattttggatggcataaatcctggtttatgaattttgtcttgaccaatgtaatattttcttgccgataacaattaacaagctgacatggctcctgttaatgcagttgagacatttttcaagaagtagcaaagctccttctacaatatttgacttggtgctttccttttggatcttacaatgggaaacagtgaggaagagaaatctaccaagactgaaaagccttcttcacctgtaacagtggtgagctcataagaatgtatctgggtgttgagacatttgtaagaagcttgaattttaatgctattgtaactgtgaacaggatcaagccaatcagaccaaccagaccaatattcatgtctatcctgattgggcagccatgcaggttacctaccttttgccttgaattactctgtctgttgttgactgaaatattcattctagttacttgttagctagcttcaatgtaaactaatgctctcaaatcttagttgttaagatgtactactgtcactcgatcaattactgtcatgtcaatgattggggtgaaatcctcctgttaataatcactgacattattggattgtctactangtacttcactctctttgaggattgtttattaacgattgctatttacaaaca

SEQ ID NO: 920 - DNA, 838 bp, Glycine max
acaactgtatcatcagaagaattgaaggtgacattgtattgtctagtatgcccaaatgtatttgctttgtactctcaatcaatgatcgatttctactgtgttggttaacaagaacatttaaagatttctcatatgctccctgaaatacttcaaatgctcttggagtataaatatcacttgcatgcttcaacaaaaccacattacccattagccttggcaaacacctgctcattttcctcactagcttctatttctttataacgctgctcatctactaccctttcaaaatgcttaaaaaattgaagcacatcaaggtcgtgatttagataacttctaaatttgtgagacaaaatctcacctaaatgaaagcctttgatgtccacaaaaaatgtattctgaccaaagacaacagcccatttctctctttctctataaatccatctcagccattcattttgctggaggttatacttctccagcatagcctcccaagcacgagtaaattcttcatccttgggatcataaatacttctccttagatcgtttgcaaaagattcagcatccttaacgacatggctgaggtatttcaaaagtgttctcatacaactgccacacacatgtacaatgggtttgtgtcagataaaaccgtattgactgcttcaataattacagcttcttgttctgtgagaatggcgctttggcttttagccagactttgcattattgaaaagttttggaatagccaattaaatggattcagtagaatcatcatacagaaaagcagcagcaaagattaatactttgttgggaagggttaacccctaaaaactgtacaaat

SEQ ID NO: 921 - DNA, 631 bp, Glycine max
acataaaaaggaagggtcagcaaaggtaaaggttgctttaagcacatggggtacaagtataaagggctagaattgcattatgctattgttatgcatgacatgagtcaaacaaatggtaactggcattcggtatgttttgttgcaatttgcgaaggctggcatgtatattaggactaggagacatggctccgtaaggagatacaattatctaagtaaaaattaaagaaatggattcaaatacctatattacccctttgttaatattgatacggatgttaaataattgttatgcaaacttgaataattaaaaatgtagagatatcatataccaaaggtatcatttaccggttgtgacttttttactagaaaagatctttaacagttatacagtaaatttttacttttttttaaccctacgctctatgcctctatctctccaatttctctctactttctctatactccaatccactctcttttctcttcttattcttttggtttaaaagaaagaatttaaattattaatatgtttctatgcagctaaaatctgctatcgctaatctacactaatccttgtacaactacacaacaccaaggctgctgctgatctatagctttataataacttggt

SEQ ID NO: 922 - DNA, 592 bp, Glycine max
  misc_feature (577)..(577): n is a, c, g, or t
cattctccttcttgcagagaatgtttaagtctccaaattcagttcagaacaaggctaggacccaattacttaataagcaacggttgttatctgaggttggtttccttgccatataaagatcattaagtcttattttcctgtttaaaatgcttggttaatggttaagaatggggtactttgaatactatatgaaatttagacaactatgataatttttgcttgtgccatgtgaataacacgggttgccttcctcagtcctcaccttggagtgagctaaggctccctctcaatttcaatgtggaggctttttgaggcgagacattcttgtgaactgagccaataagagcattcaatctgtttgacaaaatcttctagggagggatttcaaactaattttctcaatctttttgtctagactgtttattacacgtgcaactaaaaattttctttacacagtcgagtgtcaatagttattggtgttttctcggtggtttccaaatttggtcgtagttgcaaatacggctgttagtataatcatgctttgccatttatgtagtgatcttaaaaatattatggngttaccataatagtc

SEQ ID NO: 923 - DNA, 849 bp, Glycine max
cttgctgcctgcagggatatgtaacaagtgacccacatgccacacatccatcgggaatagagtatgttttcttgaaactgtaaccagtacttcaacacccaagagaatggctgacccaggatcaggggtactggcaacttttccagatgccaagttatcataaaaaataggcagactctgtaaatgtacaataatgttgaaaacagaagctacaaaactctgacagtgtcttttaatcatcttcaagcctttccgaccttaaaaaggagaagaaagtcgtcattgaataattataatacgtatgcattgtcctattcaacattttgcattgatttgatcaaacatgtaatatgttgatagaatagtagcgaacaatcaaatgtaatcagtctcaatttgataatccaagtacttgtcaatttaggtttgcttaaggattatcacataggaaatgtggccagcataatatggagtaacagacaatgttatgattcccaaaaaataatgtcaagataacgttacatatcagtgagtatttatgacaaaattacaagtcaagttaatttatgaagggcctgagtctctcagctttgtttttgaaagcaacataaggacaaagcatgttacccattatcccacaaatgaatgtcataagcaaaagtgtgtagagttttttctgaataaaaactaataaaactgtaacaacttttttagttaatatttattgcaatttccaaaatactggaagtgaatcagaatataataatgatgtactgactttaagtacgactaaaagggataccaaaagaaaaagatgtaattttgcagattttaaatactgatgaaatg

SEQ ID NO: 924 - DNA, 842 bp, Glycine max
atttcaggggaagcctcgaacttgtggtgcgtgttgatggtgctttcgagttcggtgaattcctctggggttagacccagcacaggatcatatgcttctgaagccataattattactacgtatttttctttctttctttctttcttatgatttggttgagatgaatagtgaacatcaaatccaagaacacgcttgctgatgtgactcttatttatctttcttccaaggctaccatgccatcactcgttactcttttcttttagacagatatgccctccacattttctttttatctttttaaaatggcttggttattaatttggtatctaaattgtttaaaattaggagtgttcaataattttattaattttttaaaaattaaaaaaataatattaaataataaaaagatgcaattagaatatcatttaattacatttcacgcatcatataattacaaataaagtaatttaaaatatattatgataaagatagtattagagatcccatattaattacaaatttatagtgaaataattaaatgaataatttatttatgtcatttaaaaatgtatgaaagtcattaacaatggtatatatgtggctaaaataaattttggctccttatctatatttttgttcaaattgagtctcttgagtataaaatgctttaatttgggccccttataaaaaattttggtagaccaaaatggatacttgtataaagctatttttactaacttgggtggaacttaactaatccattgcagattgtgaggagatatcaactcagccctaatttacccccctttaagattaaaaattggtgggaggaacacatttgg

SEQ ID NO: 925 - DNA, 1451 bp, Glycine max
attcattattccaagcaaggccaattattcaagtcgaaagtccagaccatgcacaaggaaattcttcaaagtccctggctttgtgagcttattgccttacacattaacttaagggaaacgaaagccaagccaagggaggcatctgcactgttttatggatgttatctcacattcaacgatggaaaaccatcactcacttgtgagctctttgattccgtcaaaattgattttgacttgacctgctctataagttacttggtttcacttgttggaagaattactcatatatgtgcattaaaccaatttttgtatgttttcatttgaattgaatgcatatactgaggctgtctatttgaagattactgctgctcagatgcaagtagaatctaatcaatttaatggttgtgcgtcggaattttgaactgaatgtttccaccaaaaagcatgcttacttacaaactatcttcttattatatggtttcaaatattttaggtgtgccaatggttttcagaatccaaacctccattgacagaatccaaacctccattgacgtctaagtttgttaatagctctaaagcacttgactttggttttggatcacattgacagtatcaccttggtttcttcaatatagatatacttttttctatgtgaaagcatctctcatatagttatgcagttcttcaccttttttgccacttaattttcatatgactcttccacgacaggacttagggcagcaaatcctaaagaaaaatgtcctctatgccgagaggtaagctacccaatgtagtaagcattaagccttcccacaacttattttcaacgggaatgtacgcacaaaagtgttccttctgatcacatccataacttcttttattcattacatatgataaatttcgattctttgtaaaataaccctttacttggcaatagagctaatgaatggtcattgaccttattcctgaggttatacacttatacttaattatgatgcaaaattacaatgccaaaagcccaaaacaactgctaaaatttaataaccataccagctgctcgcgagactagttctgttctcagcttcatttagccttcaatttaatgaccacagtgcattgtatgtaaaatttgctaaagattcgttaaggcttaatagttgactcttacattgaatctctagatctgcaataatctaagtagcccttctggcttcagcaattcttcaactttttttttttttttaatatcgtgactattgataaattgcagtttagaggattaaatgttcgcttattttaggcatttcaatgctgaccaactatatttgattagttcttctcttctagaaagagtggggcagctaagaacgggctaatgcattatttatttacttgtttattgaatttgaacctgttagaagggtcggcaacttacactttttatattgttg

SEQ ID NO: 926 - DNA, 653 bp, Glycine max
attaggtttatccccctattgattagtcagaaaggaaattaataatgaaccaatgctgtacgacttcataatatctccatggctcatggaagttcatgtttcaatttttataaaaactgactggagatgattgagtaagcataaactgttttaaaaagttagcttacatgaaattctattatatgaagtatactcattactcgggaaggttactgaagatgcatgcgaaaagcagtcaaaagaagagtaaatctcccttcttgaaaaatatataggatgaacaagacgtagtgtggtcctagcgttagcatctcttcggttcagaggaacttgattttctatcaattgtagtatggtctcctaaataaatgctagagttaggtggttgactgccacctcatatgcataactaggggtttatcttgtcccaacagcgaattcagcataggtaaaaattcttacttattgccaaataagcatatagccatacactctaggagttttatgcacaattccccatgccaaaatcatcaaggggctacatgaaacaatcttactgcaaaagcatgctgcatggccatatcaaactcattcttttaagtaacaaaattagaggaataaaaaaatttttcttaaattaaggagcaaactgc

SEQ ID NO: 927 - DNA, 787 bp, Glycine max
aggtaacttcacatataagtcaaggttaaacaaatgcctgagactagattccacccgtataatggggagtatctggttggaaaagaaagtgtagtcattccagaatctagattgaagctcagctcaaatgctaaagagcacatgagatggtcattctctctggtattcccacctttctttaccgcgtcaagaggaaggttgccacctcgtccaaggcccacctttcttgtaaatactgtccacttacagttgcacttgtatgctgcctttcagtagatgtattttcgctcttggctcttttccaataaatggaccattagaaatggggaatataaattcactcaagtttcttagcggaactaagccaattagttatcccagactgtaggaggttacaaagatactggtttatcacccccataaaagaagattgggttacaactcaatttcagaggagaaaaaataaagttgctcacctccagcagatcagcttgaagaaaagcagcattatggtgatcgaagtttccagaagaaaacaagacctgtacataatccccaaaaaggaagttatcaattttaattgtaattttttcctttatacacatgaactttctatcaagatttagacattcagccaattatcaatggttttttgaaagcccatttctatccattaaatgcattttaaaataagtcaaaacattttatgggaaagggagaagaaaggaagaaccatcagggcacatttattggttctacaggtaatgttcaaaaggggaacctcaaa

SEQ ID NO: 928 - DNA, 766 bp, Glycine max
tgcatgcctgcagtaatatcccattttctaggaattgtcagcacaatgcatgaacgttgtagttcatcattggaggtattcttgtaatttgaccgattataactgaatatcgataatgttaaactactttcttttctgcgttaggttttttgggttaactagttttgagaatattatttttggttgttacttgttatcacaagtagatattacatcatgaatcatattatttgttaaattgatatgtttagttttgatgtccaacaaacagttttctttgataagaattatgaaagttacttgatggacatcttctcaatattttaatattcatcccttttcttttgtttgtttagatgctgttatttaatttattcattcatttgcagattaatgaaatagaatagaaatggatttttcgtatttgtatgtttgtgatcaatgcatttcataaggaaaccataatataaagtccaacaacattttttttgtcttgctgttagaaaaataatcagctcttggttttatttatattatgctgaagagcttcttgattttattgttagaatttatactttcaacacaacaaaaagataatcttggacaggcacatgcctccacacatatccaaagaaaaggtggggaagaggaaatagggcctgtggcagagacatacttcacaagactttgttgggtgatatgtgttgagagaaacttgtttataaaatgtgcatacattactggttctgtattatttggatgtatg

SEQ ID NO: 929 - DNA, 760 bp, Glycine max
acagtgtccgtaactcttgatcacgagctgctagtagatgggcaaggtcaacctgtaatataagcaatttttattaccaagaaaagtgagaaactaatatttactgacaccaacatccaagcctaggatttttgacaagtcaagctagttcatgagttttttatggtttacctgcacatctttataattgtgtaaatgttaattggttatattagaattcaagcctagttcctagtaatttatcctaaaaaaacttaagagaaacagaaatcaagcttgcctcaggccattgattcaagaattatgtaaagttaaatttgagacccacaggcaatgaggcataaaaaaacaaaaactattttcggatcacagtggaggtaccaaaaaggaatttaatagtaagtactaagtaccattaaacctataatagaaaagacctttcattgcaaggtatataatttctgatgagaagcccaagatattttacctgcaacttccttatgttacatgatcatattagcaattttgttctgatttctagcaatgcaaattggtagacatcctcaaaacgtgattcatgttgtaacaccagtaaaatttctttccaagtgaaaagaactatatttgttgtgtttatagttggtgtgaggaaggggggagggggggatgcaaagaactgtcttttagcagggatgattttgaatgcaaattgaataaagtgcataatggttttgacatgatactctggtttacatctcgg

SEQ ID NO: 930 - DNA, 799 bp, Glycine max
atcattatggtagttgaagcagtatgtgccggctgttttatgagtcttttcattggtaagtttaatagtttatttttggtggggcggaggggcagatgcagctacaaatttcatttatgatatggatgaataaaactggaaaaatgtattgcattctactaaagtacccttttaatttaaagtaaatatggacatgttttgcttaaattcaccacttttataattataagatctcttcttagtatatagtaatagttttaccttcctttctaactacatttttggtgcaagcaggttacatacaccagtacaattcattaaactcacatcctgatgttctgaagtccttatactcaccactacaaccatcaagttctctggagggtctaaggcaaacattttgtaatttagtttcttttctaatttacttcataacataatatccatgtttgattttcaaacccaaaaataggaagaaaaaaaaaactgttcagcaaactagtatttctgaatgcaagatgagctaccctttatgcatgtcatttataagatcacattatctgtaaatacaaatcaaactgtgggttcttggattatcttgatgcaataggtaccatgatggtaggctctctgatcagcaaatggctttgctgcaatatcagcgtgaaatcttcattttttgagtgaggaggtatacaaagatttgaagcattcgtaacggttgattatatagccagctttaaatgatcatacagtgtagacattcactagtgataattattaattagtttccttcaca

SEQ ID NO: 931 - DNA, 514 bp, Glycine max
ctgcagacatttattataaagcattttgttaatatcgataagtcacaacctctgttgctaaccctaacatgcacagctgacaacacagtttaatttcaaactccatttaaagggtaatcacaggatttcatctttggcgctcttgaaactttagggattaaagagatggaaaagagagggaacacaagggaagtataatttactagagattctggatggatataaaacagaccgctcatcaaccacttcaatgtatttatactcaaactcaaactacctctgaaaaaacatttatcgttctattttggatgaacaaaataactaaaccaagaatggtaacgctgtactaggatcccacctattggagtcttgcagaaagggtagagatgtgtgacgcaatcttactaccacaagtggaaagactgtttgcaagattttaatgcattaactacaagtcacaagtaagctattaagaaaattgctattattataattcatattcgtatttctcaaa

SEQ ID NO: 932 - DNA, 874 bp, Glycine max
tgcatgcattctgaaaatcattcacaaggaatacgttggcatcttcttctgatctaaaatgcagcacaacatgaaatgaaagagagatatttagaatttaaaatatgtatatattcagcatgcaaataagattataataacaaatttacaagaaaaaaatgatagaaatgtgctgcaaatataatattattattcttgatgcaataaacatgatcaagaatctcgaagtgtaaatgttctattggaatcatgccagcaataaagagtgatcttgatgcacataaaagaggaaaagactagtgtatatctgtaaatagtctcagtctgcatgcataaaacataggcatgatgatgattctccatcatttcaaaaacactgtgcttataaggaagtcatgaatgtgacacacacctgataacttgctcaaaactaagaatggtcaagtcttgcacataatacatggtgatgtcataaaaatcattttgctgacaatcaaataatgcccaattgtaggttcatcaatttcatacacagaacacagtgtaacaaaaacaccatttataaatccacagaaacaaaagcagtggcaacaactagctacaaaagattggttattgcattattaaatgaaaaaaaataaaaattgtaagggcatgcaatctggggctaacctcacaagaagaacatgttgctttattgtagcaaggaattctttgactcctccactataaaaatataatggaggatgagcaagtcctgcaaaattttattcacacaagattgaattgtagaacacagaatttaaggtatagactgagtcaaatatctagagctgccatagatataaatagtgtctcccaacaaacacaaaca

SEQ ID NO: 933 - DNA, 570 bp, Glycine max
atttctgtgtcctctatcattgtgtgcaagttatatacatgccattaatatacaacagtattaatgttagccaaattcgtgtcaatgcattatgttctggccttctgagcttttgctcagttgatattgtcatatgaagatttttgaaattatgtagtttaatacatgcttacatgtgtccagaactatagtttccgtgtgcttacatttaagccaatttattattactggtatatttgtagtctgtgtaatcattgattttttaaactataatctcaagggagagagctcgtaagaagaaagaagaggaagagaagagaatggagagagaaagagaaaaggtatattgcagattcatccatttgattctcgcttatttcttgtgactttcattactgatatacacatgtatttaaaatctttacattatggaagggtttcatacttggtgctttgcctcacctggtcaaaggttgaatttcagagcaagatagagtgagcttgatagtgacattgcaagcccaaatgactcttccgaggggcatgttagagatataaaatcatttatga

SEQ ID NO: 934 - DNA, 673 bp, Glycine max
ttctttgttttcagttaagccttcattgctctctggttcaaatatatatgcttattgccaatttcaaagtctagtgtatcacaattttgttgttttaaggtttggataatctggtttatatgtgtttttcttttgcaaatgagatctttatatgttctcagcagctcttccctgttctggttttccttcattggctagaacttttccttttttgatattgtttttgttttttagtttcaatctcttgaattataaattattgatgtctgtatagcatgctccttctctctttacttttttttttaatcttattttctgttccatctcctgtgcaatggttccttttgcagctaactggtgaaacagtgggagaagtaaaagctgtagctgatatgcaccaaaggaaggcagagatggctaagcattcagatgcctttattgccttaccaggttagcatgaaactgagaatacttggttgcattagaaaaagtagaaacatcaaaggtgcttgaagctttctagttttatcatgtaccattgaccattttattcttttgagaataattagttgaatataaaattcctattgatctccctgtgcaattttcttattcagcattcaacaaactgggttttcacttttttaaaacattttaaaaaggttacttaccc

SEQ ID NO: 935 - DNA, 665 bp, Glycine max
taccctggatccactagagccgacctgcagtatgtgtgttagtttgagaatatggatgacatgtatttgccctttccttggtgtgaataggtgggattctgaaggcccctttaagccattgcatgtgatgaatccaactagacttgctttcatccgttctgcactttgtcggcatttcaagtaagcctgctctttcatttagtccttgttacctccatttttgagtctcgggtgtttattcttgaaactactttggtagaatgtgcaaggctttgtgctatgttataatttgattcctttttcttttcttctttttttttgcatggaattagtggatttaaaacataatctggttgtactgtgccagattccaagccactatcttttatgcagtctcattaaaccaataacatttgtgtttgctacacacacatggtaggaatttggtttaataccccttgaattaaatataatcgtataaggatgtgtaagaagatgactctgatgaagtatctgttaataaaaagtgttaactgaattattttttgacacaaaccaaatgaagaaacaagaagaaaaacaataggagaaatggtattaccgttgacaatgggtttatatttttggtttggctctaacgggggtctattcaactaataattaaa

SEQ ID NO: 936 - DNA, 892 bp, Glycine max
atttaggacagattctaatcacaaattggcacatctgaagtgttttcagtctcttccgatgaccaatgatgatctaaatttaccacaaaaaatagtgttggaacttcaaaggataaaaaaaataaaactgacagatacgaggccttaaaaatatgaataactaccaaatgtcaaaatcctcttcactacaacaatatcaacaaagtcttatctttaagtgatgttgcctacatggatcacataacaccattcggctctcagttaataccgagtcaaatttaaacactatccacacacccttttagttttgatgcatagtgaaatcctcccgtatttagttaaattaactatttagcagcagaatgcaaagaatatacatgcaaagctattgagtatcaaaatggtaaaggggaccaacgattaaacgctcatacagccaaggatgtaaagtgcagtgcagtgcagtgcctagctatgctctaaatggggtgagcattttcacaaaaatgccagtaagagatcactaggttggcaagagaagtagctatacagtaggcaaaaaaaaactgaacaaaagaatcctcagctgcaagtaaacatacacgcattttcactggtgtaccaaaaataaaacagctgaattgcaccacattcatcactaagtacagtaaaagaaaattttccctcactattttccttccttcctttgggtgaaagggaaggagggttttactaccattttttgggaaagtatggcttcctttctactgggggttttccaaaattttggatctcaccggcatattgaccaagatcctattattttgaagaggaaagggaaaaattcggttcattcgtccagaaaggagagtttgttaggaaaaatttggat

SEQ ID NO: 937 - DNA, 712 bp, Glycine max
acagtatattagaaaaaaataaatttataatagatgagaggttaaacaaatggacataatatatgtaatcctaatcctaaaataatgccacagaatggtcaatgaccatacatgggaaaacacttggccagcaaaactttacagagacaatatttcattttgtcgttagctagcatagaatatactcttcaaatgtgcaagtaaaatcgtcatgtttgttctcagtttcatattatctaatatgaagaaacaacaaggcacattctaagaggacgaaaatgaattggttcacactagtgtaaatttttttttaagcaagagcaaaacagtagtgaaatgcatcctaaccaggttagcaccccaagcaataccaagctctgcatcacaccaagaatatattaaaatagaagaaccaattacaaaagcatggggggacaagggccaaacccatgaagagaaaactacctgaatctataactgggaatacccattctattcctagaaaaatcaccagaaagaaaagtaggaataagatcccaccacaaaaaaccctgtatgtaagcaccgtaagaggctacctatgtgcacaagtgttgccctcacaataaatgtgacccactacaaaatgcaaacttttcagcaaactatataaaaattttcatctattcctaatatcccaaggaacaatgttatcagaagaaaacactttaac

SEQ ID NO: 938 - DNA, 657 bp, Glycine max
aacgtccagaaaagttgaagctacccccatctcactttcgaacagattacgcctccaagagaagttccattcccagccataatcagagaaataccccatgtcttccacaacatgaaatctttgggaaggaatttgataaagctctggaaattgctctttaaggggagcccctccgtcaacccaagaatcttcccagaaaaaaatttggtctcccctacccaccttccaacagaaatgcttggagacatcctccatttccgggtgctggttaacaagccttaaatcagaccaccactgggaaaagtatttctttgatggcccctggtccaagcctctccatccgttatacttggaaaataaaatcctgcaccaaagctggtctgattgattaaacatcagccacttccatttaattaacaaagcattattaagtgccttgatgtctttaattcccaagcctcccatatctctagaggcacagactttactccaagctatccaaggaattttcttcccttcacagctgccaccccagagaaaattcctttggattgcagttagcctattaatcactgctgaaggggccctgaaaaaggacaaataaaacaaatgcacagctgtgaggacagctttaattagagtaattctgcccgccat

SEQ ID NO: 939 - DNA, 783 bp, Glycine max
atccgaaatgcacaataaatctccttgtgaatatcatgacttcaagtctttccaaatgtctattactttgtccatccataagatactttgtctgattgaagctgaaactgaatgaacaagccatgaaattaccatattgttgcatctcttccatgcaagatgtaggggattggtaatcaaaggttgcggaagtgttccatcacgtactcaagtgcaaatataggggatctactccatgaattgtaatttgttggatcgagaacaggtgaaacaagtgcaattgttggattctcacttggatgtagataataggaactatgaacatttagggattgatcaatttcagagatggtgaatcaaggtttaggaatatcaaaatcgaagagcaaagaacaatggataaaggaatcagagtaaagcagcagagctcttctaataccataatgaaactgtattgattcatgatgaagaaagaagaagaaagctttgcagagaagaaagtatacacagagttcagagaagtgtttgatcttagattgataaaatgctttcttacaaaaagtgttattctttacatgtatttataaagctaaaatataactaactaattataattaactgtaactaactaaacaattaatgacagctcagctataactaacaaaactaacactcttacttgaaactataactgaaaaatgatattctgtcaacagaaattatacttcagagttagactactctaattcccaaagcctgttttgtcgttggctttttcttttt

SEQ ID NO: 940 - DNA, 906 bp, Glycine max
atattgccatggtcttgtaatttttgtcagattgtttgtttatctcgatatcatctccatcaatcaatcctcttagcatttgaactctctttgacaacttgcttatttgattctatagtcttgtttcccttgccaaaaagaaaaaaaacgtttatggacaattgtaatttatattttgtatcctccatccgatgggatagaattcgttacaactgttgttgtaagcacgaattactactttcaatcaacttcaccggtaaaagtttgaattgaatataatagttcatttaggattttccaagccaacagcagcaacaagtatccaagacctcaatattacaagttataatttcatatattctttgatatattgagcatgatgtatattgcatgcacagtaatctagaattagatagttgaattattcatttagtcaatatccttttcttctctctgttaaatggactgttctagaattaatgcataatatttttatgctatgtgagaggattgattttgaggaattttattccaggggaaaaagagatgcagtttgcaggttcaatagtttcaactttcaggcaatagaaagagttctttttacacggtttgagttgagaatccagtatagactttccgctatggcagcaggattggaactcatacccataggtacaattttgacagggggtaactaaccaagtctttgaagacggctcatgccagcatctgaatgtttcttaattgggtaaaggaagcctttccaaggccccttttctgacaccattttattttgaatatttggaacccaatggcttctaagggaaattttccagggtttccaagaaatttggaattgaactctttcaaagccccgcaagggggtttggctcttgggagactctc

SEQ ID NO: 941 - DNA, 652 bp, Glycine max
aaaagcagaatatctccactggatggttggtaagtttaagaatatttattttattttatccttatttattaggagtgtaataaagtcggaatcggtccattttaaagctcaaagaaatagaataaggatgacttagggtttgtgttttggtaagaaattcaaatcgaatcaactcgaccttaattagattggtttgaatcaggtgataaaaaatattatcatattctgaagaaaaaaaaaatccaatataaaagataaataaataatggcatttcatagctaaaactaaagaaaataaaaaagagaactgcacttgttaaaaatgacacacatacataagagaaatctagcatgtttggtttagattcatttccaacataattgattaaaaaattacgttagaagtaaaataacaaatagttgtttcaatttttttatggtgtcatcataattttatgtactaaaattaattttcatttattatccaaatacacactatattaaagagtctagaattacttaattaaaatctcatctaaagacttatttatgatgctagttatcaagtatctttgagatttgatggtctacaaaatcaagagatttacatcttttgaaggatattgtgtaaaatgaaaaaataaatcagcaa

SEQ ID NO: 942 - DNA, 563 bp, Glycine max
gcaaaacaaattctaagcatttgctttttctctagtagctacgtacgtattaattgtatgattgttgaattaaattcatataaattcgtaaatatatatatatattaccggtagagcccacctctcaagagacacaatgaccattacaatgttgataaagtattggaaatatttatgaacaaattgtaggcaggcatgaaattattctaataatatgttatgcaagcacataatactggtagaatttttattcgattacatttatatatgactaatatttaaattaagtttactaatttagatatattaatttctttaaatatttttaaatctatttatgaaactttgtcattaagtaaacttttaaatgaatttttaagttagactagaaattaaaaaaaagaagttaattaagaccttaaaaattatattaaattaaaaaggctgaattcttaaatttaaaaaaaaaatttaagctttacaaaacttaacctaatctggtttattttcgagatgatttaattcacacagtcacattcttcaacatattctcactacaatgg

SEQ ID NO: 943 - DNA, 685 bp, Glycine max
tgcatgcctgcagctagcgattcctggtccatcttttgcaccagaataatctaataaggttcttgagtggctgattaatttttacaacgtttgatgctaatttatcttataagccatactttagactgaaatttagtaagctccatgtgactaaaccacatgattgtgcttgatgtcagttgctattaagtattttaacttaaataagatgtaggtagaagttactgagcataatacagcatatgcaaaccatgactttcagtaccatgtctagtgataattgctctgaaaaccttggtcctagcacgtggaacttgttccctggcacacaataagagcgcactcatctttgctcttattactaaatcatgactctttaatctttataactttccaaaaacttggcgtgacagccttaactcaaagttgtatcctttactttcattttcttagttgtcagtacaagtataagtgtgtatttgatttaacgttagattaaacaacacacattctcatgtatattttgtgaaaactagaaattcataattttttattcaatggtcgtttgggaattttccaacagtaaacagaacacatactaagtgtataactctcctattagactgattttttttaattaattacctttcctgaaacgagtcaaaacaaaagtaaaggccccaga

SEQ ID NO: 944 - DNA, 687 bp, Glycine max
atgcctgcacctgcattgttctggagctaccataccctttctgtgaacccttcaaaaggatgcgagattttgttccttcattgaaacttttgatagatccttgtctgctgtccaaggaaagtcttgggagttccttgggctttgtagcagatttgaatgtatcttgtgtgtccctcccatcgtaggagagtcttggtgaatcccaagcaaccgtaactcctgtattgacagattttgagggctccaaaggcctgggagagtccatgtatttcaagatacgacccttcctttcctctttagctacagtttttactgacaatccatgaacatctctatgcattgagtctttgacaatatcatagaaatcaaggggttggtggccttggttgccttgcttcattgctgcttctgaattagtgttttctggaattttcatttgactgattgatggtggctctatctgaattgttctattaaactcgagggacgacatgctagatgaacgagatgatgaagtcactgaagttcctgatgattctgtggagaattgttgattctctcttgtgagcttcacattttttgcctgcaatcaactcacattcttcactgtttctaattctaccaaggtttctctaatgattaaactttttatacagttatcttaccgttgccttatgagttggatta

SEQ ID NO: 945 - DNA, 653 bp, Glycine max
agattgatacacacacatatatatatatattctctcttcctctactatgtgaaagcccaacatcatccagttttatgcaatttttctgcttttgtatctctttgctccattcaaggtcatggacattctcttctgttttcacatgcatacacatataatacatgtaatgtaacacacataagcatgatgaaatttgcatgaccaagtctaaagcaagttctagtcaatgcactagtgttattaaattgtcatcctcattagcatcttctctgcccagaaggccaatttctacttatatttcaaattatttgtacccctaaaagagaaggtctttagtttcttctacattctttgtgagagggaaaatggtggttaaataacggagcccttgttgtgaactctgaatagttaaaagggtatcaacaaaaaaaagaatgtctaaaaaggttttgacatcaatgaaggatgaaaatccagatttgcagaagcaaattgggtgcatcagtgggttttttcagctgtttgaccgccacagtttcctcacgggccaaagcaatagcagccacaatcagaacataccaactaataaaggtaatctgcaataaatttggtattggtatgtatgcattttgatgatgatttggtaaaaaaat

SEQ ID NO: 946 - DNA, 672 bp, Glycine max
agaggaaacattacagttgttagtgtcaagcaattccatattggatgaagattctatcaggaacggtgttggggatcgtagaggtgaaaacttgataccttctaagagcaaggaaatcactgtggatatggattcagatgtttcttccatgttggcgaagggtgacaattgcaacttgactcctgatgctagtagcctgtcaaggctaggtggcaatcttatggggactgaccgtccatctaatgccacactttatgagactggtttgctacctgaaagggttcagcctgattgttgcagagaagaaacattaccgtcaagctattccgagaatggtgtgctaccatctgaagatggcaaatcaaaagaggcgagagttgactctgggttgagtgtgcctgtgaaagatctagtagacaataccgtcactctaggttcattggcaccatctactgccgcaacttatgagattggtttggcacctgaaagcattcaggctgattacctcagagagaaagggaattccatattggatgaagaagacttaattaggattagtgttgggcatgatagtagtggtgaaacattgttaccttctaagaaaataggaatcatggtgggcatggattcagatgtttttgccctgttggcttaaggccaaaactggaacct

SEQ ID NO: 947 - DNA, 745 bp, Glycine max
ataatccgcaccccataagtacatagatctaggatctaagaaagtatgacaatccttacgttcatgaggattaaactgaaattttcaaatcaaaactagactcttaaatgatttagctttcccctccttgttgggtttggaccttatacctctctctacactatcacacaataaaaatagagaatgatgtttgttctgatttattttgtgactctagcagattctttaaagtagcttccacgtcaccacaccttaagttctgaatgctctttatcaaagatatcaaccatcaatactcaatagacatatgaagattgaccttgtatgcctcattaccattcaccacttaataggtctactcagtccaaaatgacagaccaaatagcatcttaaattgtctgtggagcataatactcgtgataataattgatctaggacctaagcagatttaaaccaccaccttctccaccctccttccccccaaatgccgcctgcacaagaaaaaaataggagaaagggggctgttcaactgtgaggctagcagcagaatatgagcacaatttgaacatcatcactcacacaaaacattcaagagccagtttgagaagaaagcaacacaaataacagcatgacatccccaggccatgcagtgcatatacatactaagctgcctcgaaaaaacagaaacttcagatttccattaaagactaacattcatgattttatttctcagaagccacgtgtc

SEQ ID NO: 948 - DNA, 812 bp, Glycine max
gcagacccttgcatcaaccgcactatgtggcattatccattcagtcttaggagggcagcccctcctcatactaggcgtagccgagccaacagttctgatgtatacattcctgtatgacttcgcaaaaggtagaaaggatttggggcacaaactattcctgccttggactggatggtatctctttatttccttgagtggttagttatttattaaaaggaaattactgttgaattgaaccaattttctccaccttttgatttttagggtgtgtgtttggaccgccgtgttgctcttcttgctggccattcttggtgcatgctccataatcaacagattcacacgccttgcaggtgaactatttggtctgctaatagcaatgctctttatgcagcaggctataagggtgagtatgcaccaaacatgaacaatttttcttaagtaaaatgaaaattggagatatttggatcatatataggtgtcctttatttacaattaccaaaataaaaactcctgtttaataatgtcagtaatctctttcttaaagggactagtggaagagtttggtgtgccccagtcccagagagaaggtaccaatcagattgcactccaatcctcttggctgtttggcaatggaatgtttgctttggttttgtcatttggcctgctgtttactgcacttagaagccgtaaggctagatcctggcgatatggggcaggtattggttatacttctgaatcctgatgttaagtttcaccaaggaattttatacattacaagatatactaaaggttgttatgacttagaaaaacaa

SEQ ID NO: 949 - DNA, 686 bp, Glycine max
tgcctgcagatcgttctttggtacattgctattgcatttgttttttcttctatatttgtaacttctttcaggatgaatgattaatcaataaagttctctcttatgctggttgtttactgattattctttaataatgtggtatagtgtttttaaatctaggtcaggtctatggtccgacagttttctacttctattttaactcctggagctgatgatagtgcatttccatctgatttattgtccaaaaagactctggcaacatctgagcgtactataggtatgaaggatactttgtggcattttgtacattaatataccagtgcttcattttgctgattttgatttttatttctgaaaggagattaatcaactgcctgcctggcgtgaattccaatgtggtttagattattgagatatgagataatttttttgttgtccattttgtatgatctagactaatatcttccatgtcaatgtttttattctcctttagggtttagggttcttgtttagttaatacttcttggcagtcttctgatggtaggttgaagatgcataattttctccaatgatcgtctgcaattgactgaatgcatttctatgtatgttacatgtcagaagactcagaacttactgtatgcttttatctatgggcatgtttacgcttaaaattaaaattagataca

SEQ ID NO: 950 - DNA, 566 bp, Glycine max
ctgcacattccctgttgtcaggtagcttaacaagtccctctaatatctgcatccattcacaacaaaaacaaacaaaagaaaacggaaaagaaaagatgttgctagcttcacatgatgcacaagaagataaaaaaacacattgtcaaaacgttatgatacaaaacccaaaaggggtgggaaaaaatggaaccttggtgtgcttggcatggagctccttagagacggaggcttttccgctcatgtttgcaaaaccttcaccgcgtttcttgctgttgagtcaaagcgaaggaagagcaaagaaagaaagtaagtgggtggagaaaatatggttcaaaagagggtcttgaattttcaacttgttcgttgatttgtttttgtttttgttttgtggttccgcaagttcaaagggaaacactgttggggatggaactgacacgagaaaaacacggatattccgttcatccttgtatgctaaaatcgtcacttactaggtttggtgattgattatttattttcaagtcaacatgggtgggttatacaaaaacaacaacgacttgcaaaaagtc

SEQ ID NO: 951 - DNA, 619 bp, Glycine max
gaagtactttggaacctttcaaaccactgcctaggggcctgttttagcccatagagagccctgttcattctgtagccaagagttttatcctgtgaaaagaaaccaggaggttgttgcatgtgaatggtttcatgaagaaggccattgaggaatgcattgttgacatctagttgatgtaaactccaatgatgactgagagctaatacgagaatgagtctaatagtggtaggtttaaccacaagagaaaaggtctcattaaaatcaaacccctgcacttgatgaaagccttttgccaccaatctggccttgtacctgttaatgaagccatcaggattctccttgacccgaaatatccatttgcagccgatggcttggcgaccaggagggagaggaacaagagtcaaaggcttgttattaagtaaagcattacactcagcttgcacagcagtctgccagttaggatcctgtaatgcctgtatgacagatttaggctctgtgtgtgtgaggaataatgagggatgcagtctggtttggacaataccagacttagccctgatctgcatagggtgagaattttaaggaacaagaaaatggaagggtgacttaaaagaagaatctg

SEQ ID NO: 952 - DNA, 663 bp, Glycine max
gttagaccgagttatgcatcggcacctggtacttttcctgttcaaactggtgcagctcctccaatgccgtcctatgcgccagcatcagctatgcctgttgcttcctcacctcatgcacaaagcagccccatggctcataatgcaaatccaatgggaattgctcagctcggggttccacccaatgtaaatttacagtccagtggtgcttcactttcagcgcctggttcctcacctctcatgcaaaccagtcaggctgctcaaggattgcttcagccaaatgcaagacctggtggtgcttcaccttcaggtcaacattattatggttagaaagtcggttttactttttacattacatgaatgaaaggaaaatggttttggaggaggaaagagtgataatattattactaatttgttattcggttggaaattttatcatcatcatcattattgttttttgaatgatgaaaatttaatttgcaaagaaagcttggaaatcgtttatattattcccctactatttttatgttcctttcctatttgctttggaattctatttttcattaaatattcacgtaggtaaaatagaggtgtagatttgaaacatctttctatgctgaaggttaccatgaaaaaataactaaaaagaatttattattttatttt

SEQ ID NO: 953 - DNA, 666 bp, Glycine max
actcactgtcctccatttaactcctcaacaactggtcagtcatcttggtaaaattacatacactccccaatcacccatctccaatggacacagtcatcatgaactaaaactatctctgctgaccagttctgatcgaatggtttcacgcccccaaaatcaatgtgattcttgatttatgttttcacatgttttagtttttgaaaaagaattaggtcagttttttttaaggtttaatggcaaaatcttgctcattcgccctcctatacagcaatgctgatgcttccaccctgtttttataagggagggggaaagaagcagcacgggtcaaatccaagaagaagaaaaaaagaggataaataaaaatgtaaattatgagatactcaccagccaggatggacaacaaatcttccgttgttaagagcccaattcacctgctcgagaaaaaggaaagaaaaagtagcacttgtcaggcttcaaattcaatgcacaagaacacagtctgccacaactaccatagaaatgaagattttacagcattttgttcgtggtgggaataagcaaagaagagaagttggagaaaaaacagagaaaaaggaagggctcccttctaattgataaaagggaaatggtcttttattaattgatgtccgtaaatatgccatagac

SEQ ID NO: 954 - DNA, 572 bp, Glycine max
atcattactctgacgctccttcacaacaaggatttgattcatggcctccatattttccaaattatctactttttcttgcaattcatcattcatctcttctgttttattctgaacagctgcatcatcttcatctccaagatgcttcataacttgcaatttcccttttaactcttcaatttccatttccaacttttgtttggcatctagctgtttttccaactgaagtatcttgttataggcctcctctttctctcgctgaaaattttgaagtttacaccaataagatgtattcacaatgtataagaatgaagtgataaaaagcaatcttttcataaccaagacactaaatagtaaataagaggcaaaccttttgctcttcaacaagccttaagacactctcatgggctatcttttgttcctttgaagccaataggagtgactcattcctcagatctttctaggaagacaaatattatgtaagaatcctataaaggcacatcataaatgctattgttttcaaagtctgcaagcaccttaagcaaggcagtgtggaagctataaatgttttcaag

SEQ ID NO: 955 - DNA, 664 bp, Glycine max
caaatatgttcagcacaccagagggcaaaaggtctttaaaacaaccttcatccacaattgggacaaagggtagttctcttggcaacgaaaaaaatattgacatgctcctcggatccatcactcaagcacggtgtgttatgcttgtgataacagttatagttattggcctttcaatggtggaatgttcatttatatcactcaacagggagaacttcaggtcaaatgacacaaaacatggaaggaaactggtaggtgattccctcacagattccagcaaattaatgaggaatgcaggagttttgcttggtagtaaagatgatcttaaaagttgtagcaataccaggtaatatatatgttcctggacttctgtaaaactagaagcttcttgcttttaccgtcacttttttccacaaacttcataaatgatatttttgcagaagttggattattacttccatgtaatgaatgcgactgtttttcctaatcatgatcagggagggcattgtttctgatgtctcaccatgttcaggaaaattggctgggaataagcaatcattttttgatgaagtaaataaaagcaagaccacatttctagaaattggcatttcaactgaagatgttagtatgctgaggtaaggcagcttctgttgagtgttggctttgt

SEQ ID NO: 956 - DNA, 777 bp, Glycine max
  misc_feature (697)..(697): n is a, c, g, or t
  misc_feature (751)..(751): n is a, c, g, or t
acctgcttttactaggagaagactgggagatgcactttaggggcctcaacaatgtaaaatcagcatcagaagcctgtggaattgagtcttttagatgttcaaagaatttctgtaagatgattcgtttgaacacaaaggtaccatatattcatattagagtaataaagttatgaagttatttttatgttcttcattttcttttcttttttttctttgaagaaacaaaaaaattcatccagctatgtgaatggatgtggaccgagggttcaaggggaagaattatgcaccaaaagtacttagcaggagacaggaatgacgacgtttgcagatatgactttattaaaaaaaataaaggtgacaagtataggtcttggatggtgagtgtcaaatcatttgagaaatgattttttccttcaatcttcaaaaggtaaaagtctttggaaatttcaaacctcaatagttttcctcttcaaaaatggggttgaggacttctgattgtcactgctgtcaatagaatggtcattctttgatgttgtaataccccatttgtccatgctttggccagagcttactagggagtttgtttctttttggtgtaaagcagttgttagaaccctgttagctccaaagctcctgagataacaaaattcatttaaacagtctctgcatgaaattaaagagaaaaacagaagaaggnagtattacacttggcaccagacctttgaagttttttaagctttgaaggggcagnaagtgatcttgcaatttttaaaagaa

SEQ ID NO: 957 - DNA, 781 bp, Glycine max
actacagttaagcaacaacaataaaatcctttattccactagatgaagttggctacataagtttaagaccaaattatttaccataagattcctcttaacaacttctcccaatgtccttcctggtctctcacttcctatttccatatgactaaaaaccatgctgtctactctactcattgctgcttccaatgacctatgtatgtgtccaaatcattttaactggttttctgtcatttttttttttctcaatcagagctacaccaatatctccttgtttttcttgtgtggccatatcatcttaacattctcatttctaccttcttccccccgccccccctcttattctgcctttaaagcccaacattcacaaccctaaaattagacaaatataaaaaataaaagatacaaaccccactcacccttatcagaattattttctttggaatgctggtgagatttcttgtccttccttttctccttcttttcccttttccgcttcttcctttcctcatcctctaccgttctctgcctcttgcttctcttctcatctgtcaattaaccccacaatcattaacaaactataataataacaataacggctcgcacacacaaacatacacagaaaaatgggtaaaaaatccaattttttttcttcttctccatcttcttcactattttgcaaaacccatgaatcaaatttgttccaccccaaacctagttggttttgctagaggaaatgaatacttcccttggaggtgagactgttcatttcatcctccag

SEQ ID NO: 958 - DNA, 669 bp, Glycine max
tgcagctagaggaatatcatatcttcaccatgattgcatccctcacattatccacagagacataaagtcaagtaacatattgttggatcaaaatatggatgcccgagtttctgattttggattagcaacgttgatgcaaccaaataaaactcatgtctcaacaattgtggctggaacttttggatacttggcacctggtatagacacaacctggttaaacacacagtttttacatttcacactacttatgttcaaattgatgactgtgtttgcatgcagaatattttgatacaggaagagcaacactgaaaggggatgtttacagctttggagttgttttgctggagcttttaactgggaaaaaacccagtgatgaagcatttatggaagaggggactatgcttgtcacatgggtaagacaggaattcttgaagatttacttctatgattatattcatcaaacaagtttgaaatcaatatgggaatggcctatatattacttaaatttcaatcaagtaggatggttagtttgagctcaatcattgtgaaattgctattgaaagccacagtaaagcacatcatttatttatatttgaaaataagttatatggagattaagatcatcaaaactagtaaaacactgaaaacaaaactatgaagcattgacca

SEQ ID NO: 959 - DNA, 669 bp, Glycine max
  misc_feature (148)..(149): n is a, c, g, or t
tttgtatctagatcaatctgtcacccttgaattgaatgcttggaaagggcaatcaaaagatgctattcaagggaattcttccttgttcgagaccattttccaatgtaacaactttatattcagttttttatttctacaatgctctcannaaagagtcatgctcacagtgaataatttgataaacatatatacctttatatgattgcagcttcctttgagaaatcattgcaaattattctagtcagagatgttgatggtaaaactttttgggatgccttaagtgatgccatatcaccaagaattccacaacccacaactacagatgaaactgctttgacaactttccgtggtgtctttctagatcgccctcttaagaaaggagctatcataattttgacttggttgaacccctccagattgcttgtaagtctacttccatatttttattgtgaaattttcttcagacagatgagatcattgatatctatttcccctcctttttaccttttttatctaaaattttccaactaaattcgttgagatttcaggtttctgtctcctcaaatgggtttccatctactgtggatgctacaatcgaatctgcaaacgtggcttcggctctttttaatgtattccttggagatagtcctgtttctccctccttgaaag

SEQ ID NO: 960 - DNA, 632 bp, Glycine max
atgtatgattacatacactaatcagattcttctacacaatatatgcaaaaattataatccgcataatttattatccaatggatcaaaaaatctaaaactcatagcctgctcttcttttctttccccttctgaacccaaatcttaacaagcatttgtcattgtttatcccacaggtcaagacagactaactggcttcacattattctctccccagtgagtgacgtataaatctagctaaaaaacctgaacactatagatgccacagaactgcacacatccctcccttgcccctatattcgcttttgggttgtttttttcttagcttctctccggttgtgctcggctaatgagagtttcaaggggttgttgttgtcttattcaatatgcaaagggattggcttccctactgcattcctagcatccttgtttctttagttttcattttctttaatttactttaatttttttcattgcttatggataccatatcctgttatatgcatataccaaaataaatgtagtcaacagttcagtcccagaagacaggtctttcatggaatctgatgaattagcagaatttattcatcaaaattaaaacaaaatataactagagatgtttgatggcaatcaat

SEQ ID NO: 961 - DNA, 691 bp, Glycine max
aatttctgttgctgttattggtgtaatacttggctggccattctcaatcttggctttccttccagtgacactatattctctatctagaaaattcaaacaggcatttattgctgcggctgtcacatcaattcttcttcttgtaagtcagactacccccccccccccctctcattgaccttctctggcctataaattatgtctataccatctaatattgtatataatgtatagttttggttgcatcctgttttgttattaaatttcatatttcatatcctttacaatggcagcatattttaattttgtttacaggcattgtcaatagttatggacttttactactatggaaaatggacttcatctgtcttgaatcttttaatatataatgtagctggaggcggtgaaagccatctgtatgggactgaagggcctctttattatctgaggaatggatttaacaatttcaacttttgttttgttcttgctctgctgttcttggggattttgcctattgcaaagaagaaatatgcaccagacctactgattgtgatatcacctatatatatttggctggggtttatgtctttgcagccccccaaagaagaaaggtttggctgaatttttacctggtcttctgttacaaatttaaatttagtcatatgatgttatttgaaacaaacacttgcacaag

SEQ ID NO: 962 - DNA, 689 bp, Glycine max
  misc_feature (10)..(10): n is a, c, g, or t
tcgacaaggnaaagtacaagcatcaacatcatggagctgtcaaatcaatgttagtcactagtcagttgccttccaacaaaaatttataaagagcaaaagtacaagcagtcaagcacctatatatgtaattaaagaggacatacatattgcttgtctgatgccatgtttttattgttgaaatatggtggtgctgatgcagtcccccctagggtagaattaaatgggatgggaagaagacctcggaatccatcgtcaatccatcgaacttgtcccacataatctgggatgaaaaatgatgatggaaagcgatgccattcacttccaacacaaagtacagaatctgcaacacaaaggaacatgcaaatttaggcagcacagcagccttagtttctttaaataccctatgacacattgtcaggaacccataaacagcttctcagttttcagagatggttgagaaaaacagaaagaaaaggagagcatgctttggcagtgtttactaaatttcaaatgaagaagtagaacctaaggagaacattctcctttcaagtgtttcccctttcacaacggttctttaccctttctacaacagagcaaatgctcagtttccaaacagaatgctctacccccatatcctattaaaactaattccctatccctacacctttaatcactgaactattccaaat

SEQ ID NO: 963 - DNA, 686 bp, Glycine max
agttcgtcacaacatttccatattctattaagatattatcacccagccaaaacaaatggctacatgccaaccaccttcgatcctaccgacgctctaacactagaagagaccgagaattggtacattgcaggaatgcaatattcttcagtaagcaaagataactccttagcagaagtgattggtacttgagtctgtatcgcaaaaatcaggttgaaacaacacgtctatatacatattgaaccaccgaactttgatcttcattctcaggatcacttgtcaagcaaagcaaatctgtcaaatccaatcgacactcaaggcctctaagatagtgtcccaaaagcatgcacctttaggaaaggtgtcagtaagaaaacgttagttttgtttcttcagaacatcagcatcaataaacactacaatgataaataactgcaagcattccaaaataattctttatccccttttataccatacattcaagtaatcggttgactgccagaagcatcattctcaggatcacttgtcaaggaaagcaaatctgtcaaatccaatcgacactcaagacctctaagatagtgtcccaaaagcatgcacctttaagaaggtgtcagtaggaaaacgtagttttgttcttcagacatcagcatcaataacactcatgataaatatgcagcttccaatatttt

SEQ ID NO: 964 - DNA, 680 bp, Glycine max
acagtcgagtatccacgaatgcttaaaatttcatccaattcttcgtgcatcgtcatattcatctttttgtaattatagccagatgagaaaagtaattatatccacgaatgctttttttgttagtgaacatttttgagaaaagtaaaaatgttattgatagtttgtgagtgaaaagtaagttaactaactagaaaccaagtaactaactatcaaactaataactttcctgattacgtatatttctaatagccctctgtaagttggaacggtatgttttcaccttatagcttggaatgggtaatatcaaagaagtgcaatcaaattattaaaatacaagtttcaaatatgagaataatcatccaagctaattgacaatatacttaaccactttctagaaccatttcgtgttagtaaatatttattttataatttaaaatttataaaaatatattacttatattaattttatttttataaaataaaatatttgttgtaaaatctcttaggtaaaactagaatttttatcttttaggattttgcatttagtgggtcaattttttttacgtgtaaatcaaggatatattttttttaacattacaaggaacttttggttggtacatttttttttcaagtctttaaacggttactaaattggggaggtttattttaaaatttttatg

SEQ ID NO: 965 - DNA, 657 bp, Glycine max
cttattaattataatactgtcttctaacgccacgaaacttcatttggtaagcacttttttttttttctcaatagtaataatattaaattaaatgtgcaggcctgaagagatcagggaaaagttgcaggttaagatggctaaactacttgcgtcccgatgttcgtcgtggaaatataacactccaagaacagataacgattctggaactccactctcgctggggcaataggtaattaattggaacatgttaatgtatgatttgtgagttagtggataagatggaatataaaaacaagctaaatccgcaagatcgaccacgtacgttaacaataatatatatgttataggtggtcgaaaattgctcggcatcttccaggtagaacagacaacgaaataaagaattattggaggacccgagtgattaagcaagcaaggaacctcaagtgtgacgtggacagtaaacagttccaagatgccttgcgttacgtctggatgccccgtttgatagagcggactcacccttcactaccaataccatcggaaactcacggcccggcccatattgacccaaatccaaccgctccggcccaacacgagttgcatggttctggttcgggctcgggtccctctgccttggaagatgtcttatcaggagcg

SEQ ID NO: 966 - DNA, 760 bp, Glycine max
  misc_feature (744)..(744): n is a, c, g, or t
gtgcgctacaaggcaaatccaacgtccattcacagccttcccaatggatttccaaacatacccttagtttgtcacttgaaaggttttacttaggatgtgttgtggaaactgaaactgaacatgaatgttattctcttaattttgtgtgcacaaagattgtgaaaagcgtaggaatactgagaattaaaatgtggctattgaatgatgttgatttcgatttcaattttctttctctattgtttcaatggtgtcagtgactagcaatgacatgcacgggataacccactcatgcttccagaggatcacctgtttttcagtttatctatgaaacatgaattattcatatatgtaaccatggaatttgttgggcataatttggttatctgcctgtgatgcattatcctgcacaccacaaatcacattcacatgtatacattttattgggtttgtttaatagttgtttgcaataatatccactttttgcttaactgctgtaaaggattttatgtagtatttggtagacgagttagaatgacagggaacatagcatgtggattctattctgcttggtgcattttaaaactacaatggtttcattaaagagtgtggaaccccagagaatagatcataacagaatcagtcaattaacttaaaaagttgtgcatattggtttcatttaagagtgggggaccccagagaatggttctaacagatcaggcccttggatttctgtcctggccccgnccacaccaaaggctgc

SEQ ID NO: 967 - DNA, 664 bp, Glycine max
tgcctgcaggtaatctgtaaatcatgcacaattaggcctaaatagttataaccatatagatagcttgtgtaatgtctgagagaaaacataactcatagtttttttttattgacaaatgttagttgttagtttttgttagtggagaattttaacccgcgacctctcccccttcccttctcccttaaccattccaccaaccttatatctccaaacagagcttataacttatagtataaggaaacttacatgggaaaagcaaatgaatgagtactgcttatgctatcattagagtgatgagaggcactgctagatgttgttgcaggagcagcatatggtgatgggcctacatcacaggaacaagtagtctcttgaggatcattttcttgtcttttgcctgaacctgatggactgtgtgagttagcaatctcagatctacacatgattgtgtcagcaacttgtacacaatctgaacaacttggaaactccactctgctgccaattgtacccaaaaatgaatttatttgccaattcttgaaagatcttgaaaattctgcttcctttgttaatgcctatgaattgtaaaagacaaaatggttcagcaaaattccggggtaacattttcattcaaggatgacaattaacttggccctcatagtcactggtt

SEQ ID NO: 968 - DNA, 778 bp, Glycine max
tttttgtttgcctttttttcttttctttttttttttcaacataggatgcaaattttaccaagaacattgatgattttgtgtttgattcaacttattttggagaaataataactttctttttacaagcttcctaatagaattttgaagagaaaaaaatacaatgactttgtgggagataaactttcccaaacttttgcaaaaattggatgtttttctatggagaatatcttattatgtgcacagtagtccttgccctcttttttatctcatcaccttttcctattaaaaaaatgctaccctaataacgtaaaaattccccttttacttattttgtatgtcccactattttgttagtgattgattgcgggtacttgccatttgcttttttttcttttcaattgatctctttgcaggatgttggcacaatttgtgaacagttacctgctctaaggacaatcaacttatctaacaatttaatgtcaccatataaatcgaagcttctgctactgaaaaacatccaagttggtggtctaaataatactggggtagattgggagcaggttccctctatcttttctcaacttgtgcttcaagaataaatttccctaatgtataaatatggggtggctaaatattttctttttaattgggcaggttgagcttgcttagacatcattggccaactattgaagagcttcctgtgttggggaacaagtttaggcacaaaacgggggtggcgggctttggtccggctggtcggctaaaatggtcaaaactt

SEQ ID NO: 969 - DNA, 563 bp, Glycine max
acttgtttttgaatagatgatggtgctatttggtagaatatttctgtgaaatagatcctcatttattgcctggttttaatcaacagttgggactaccctggagtggtctactttgcatattcagtatatttctatagaaaattctgcatgtgcacattgttgtataattgactccttgcatgcttgtattcttcccattgtatttcttgtgattgtatgcacaattggatactgctgactggtggcaagtagtaatatgtacatttgggtgtggaaattggtaggcataagtgaaacttcctttcttatttcataagatggagatcaagtaaaagtgaaaggtatccataaggcactagggtgtttgaatagggaaggcataaaaaaatgcttacctgtctgaagttaagagttgaaagataaaaagaagactgtaaaatgtgtctattttagtataatttgctatgtaaatgatgacctcaatcataacatttatattggttattgaaattaaataactaagatgttttagactagactagactaccaggtgatacatcatg

SEQ ID NO: 970 - DNA, 807 bp, Glycine max
  misc_feature (681)..(681): n is a, c, g, or t
gttacaacgtgagtttaggaaccattctttgttgtttctctggaagccatgatatcttttgaatatcttagttttgattataaaaaatatatagttatagatattttggcttgtgttcacattgaatctaaaatttgttttatatatagtataaggttcttaatttttggagttaatgtcctttttcgtatatgatttattgctaattttttgttaaagaaatcagtgaagtgaaattaaacaaacaataaggaaacatttcttaaggccccttaatgcgtgatgccctcaaggtattatttttttttgtgagctgaaagggagaattccagttcctattaaactcaaatttcaaccattatcattgacttagacctttaataatcacttgttaatctcataaaatagcaaaaaacaaagaaacttcaaagtctctattgcctaactgtttcttagtcctgatgtgtccccaagtgacgtttggtaatttaattgaccacaacttaattttattgaagtctatactatattgcgctattctaaatctgagcacttttgctaattttgcactaagagatttttttttttctgccaaagaagaatttctttggattttttttagattgaagaaaaaaccctctttctgttggggaaaaacccctgccaaaaaaattcccgttnagggggtgtcttttctcacacattgttggaaaaccctaaaaggtttgtttgcctttttccctttccccgtgagccccgccttttttaaaaacttggggttaaaccttcccaaaaaaaaaacccccg

SEQ ID NO: 971 - DNA, 910 bp, Glycine max
actaaaactacctcaactgttatagatgtggtcatttcacttaaatactgctttagcaaatgtccatagcaattgttcagtgtcaatgctgctactgcaccagctattgtgttccatttcttcaaaattggactataattttgtctctctttcaatgccaaatattcagtttcctgagctaattgaagcataacttcacctatttctttctttgtttcagactcagcagatttggcatttgctgcttccatcatctacagtcattaggcaacaaagacattatgatattttctttttacttttaaattaaaaagcagaaaatactataagtttgacaccattagggattaaaaagcagaaaatactacaagcagaaaactctacaagttatatacatgcttctaacgtatcaaccttttggattgtttcttaacaaatacctaccttttcaaaagcatttttcaaggaagaacagatatagtcatcaatccggccctcagaggaattcgctctagttttttctcctttttcttgcctttcttcagaatttgtaacatctcccaaaatcttggatgctaataacaccacaggggagaaggttttcaatttgtccaatatcaccctccctcgaaatacctctgggagttaaagaaaccttttatctgcccccttcttggcgggaactgaggacacatttcaatatcttcaaaataaccaggactccccttctctttcttaaactcatttgcgccctccatttataatgtttggaaggcaaaaaagggaggtttaatttcccatttctcatttgtggaacatcccctgaaaacacttgtgtgggctttttccacggggcctttttttaaaagaatgtcctttttaaaaaagtatcactctcaaacatgcggga

SEQ ID NO: 972 - DNA, 628 bp, Glycine max
agaaaaggcaggctgacttagatgcacatgcttttaacgaagagaagaaagtgttaaaggtttggcctataaaaaatcatcctttgtaacttgtcctctaaaaccatgcaaatgtgctttgtatttgtagcttttttggtttattgatgaatgatgagctttgaaatctttatttttacttgaaactttgttcatgttaggaaaaatatgaaaagaagttgaaagatgcagctgccagagaacttatgctcgctgaggaggctgcaatgttggacagggtaacaagcttttggtcttctctttttaatttttattcaatttaacatatttttgcctgttggtttttatcttaaatacatgggttggaataatgagtacagaagacattgggagaggttggtctcttatcaaaacaaagaataattcttgtttaagtggtgatggccaatgggtttgttgttcagtgaatatacatttaactcaatcatagttatttactcttgattcagaaaaatagtttggattaaacttgaagctatactattatattctgagtttgactcaataatggtcacacaaaaataatcagaatccaatttgagctccgtctttcaaaattatttagtag

SEQ ID NO: 973 - DNA, 833 bp, Glycine max
agtgatctattctgttatgagcaatagtgctctatgcgtaattctgttagtcctatagtgctctctattagtgccttagagattctgttattagcttttgtcttgtagcaaaagcatatgactatatatattggaggtgtattaacagaaggatatgcaaaaaatgataaggaaattcctccccccactgtcttaagcttcttcctccctctgtattctgtattccggaggcttgtcttggtcctcgaattccaatgcttaacattattattcaagttatatggtgtttgacaaatcatgtataattcgagttccatagcaatggagagatgcatcaaccaaaccaacatttcctctctttccctcgaaattggttagcaattcagttgcatcgtgctaatcctttagacaattatggaacattgcaagttttacactgctcattttcttgacatctgccatggttcatgctcttcttggttcattccttgcaagagtcacaaaagcaaaccataagcttccaccaagaccatccggttttcccatcatagggaacctccttgaattgggtgaaaagcctcacaagtcattggcaaagcttgctaagattcatggcccaataatgaggcctaaagctgggacaaataacaactgttgttgtgtcttcagcacaaatggccaaagagggcttctaaccaatgaccagttcttgtctaaccgaaccattgcacaatctgtgtcaattctcaaccatgaacaatacagccttgcctttatgcccaatttacctccttggaggggactcagaaaaatattgcaccactcattatttg

SEQ ID NO: 974 - DNA, 887 bp, Glycine max
  misc_feature (860)..(860): n is a, c, g, or t
atacgaatatcgcaccttcggtacccgggggagtcctctggatcgacctgcaggtagttaaaggttgatcatgagaagttattacttatttgctcccaacctgtgtctgagggaacttgacataattaccgcttgtttttatttttcttttccattttagaaacttctcagtagcattcaagaatgcccttctagaacttttttgtttcacagtttttgaacttttggcctactttattttggatgaagctaacatcaattactaattactatattcatgtcctatatgtcatggttacagaaatttcagaagtgtgaatatgcaaaaacaaagttgtttaaaactgaaggccgtggatggggtcttttggctgatgaggatattaaggtaatcatataatgaatttccatgaaatttggaaaagaaaagggaaatttaatgaatgtgattgcattttctgttttgttatgggtatggctaattatttagtcattcctttagttcagtagtgccatacttcaatttatttatttcatacaggcaggacaatttgtcattgaatactgtggagaagtaatatcatggaaagaagccaaacgtagatcccaggcttatgaaaatcaaggtcatatgtcaattaattcaatgtttctatctgactggtatttaattttgcgtttttgataaactcttgtttgctttgcaggtcttaaagatgcatttatcattttccttaatgtgtctgaatctattgatgcaaccaggaaaggaagccctgctagatttataaatcattcctggtaatcactttcaacaaaatatgaaaaataataaattgaacctgctatatgcaaattanaaagttttcttttttgtctttttgtta

SEQ ID NO: 975 - DNA, 1295 bp, Glycine max
gcctgcagtcaatgttgcaaacacccttaaacccactccagcagcagcagcaacagaggcaacagcagctgcctgtaccacaaaacctgtcacaaccacagcagcaacagccccaaatgcctcaacagagagcacaacagccacaacaacagcaacagcagtcgtgtcaacagaccatcatgagtaacgggacagttgcttctaaccagattccaaatcagtgtgtacaacaaccagtaacatactcacaacttcagcaacaacaattactctcaggaagtatcccaccccaacaaagttttcaatcacccaataagaatgcattgttgatgacatccttaccacaagactcacagtttcagcaacaaatagaccagcaagctagtctcttacagaggcagcagcagcagcagacacagttgcaatcatctccgttgcagttattgcaacaaagcttgtcacagagggcatcacagcaaccacaaatgactcaaatgtcacagcaaaacagctcagaccaacaaccacagttacagatgctacagaaattgcagcagcaacaacagcagcagcagcagcaacaacaacagaaacccctttccacttctagcccacttttgcagtctcagcttctacagcagcaaaatactcatcaacaaaaccagcaatttccgcagctgcctctatcacagggtcatcagcctcaacagcttggcaacaatgctttctcaatggagaagcttctcaatggcaacaactactcttcttcatctctgatgcaaacacagcagctttcggtgaaccaaccccataatacacagaaatcactaactaatactagagctccctctactcttacagatggagatgccccatcatgctcaacttcaccatctactaataactgccagatatctccgaatctgatgaaaagaaatcaacaagtatcagccacattaggaggaccttcggtagttgaacccaccaatcatctgatgcaggagcttcatagcaagtctgagatgcagatcaaacatgaattgcccagtgtaagaggaactgatcagctgaagttcaaagggactgttgctgatcagatggaagcttcttctggaacatcttactgtattgatcctaataatatccaccagaactttccactccccaacttctgcatggatggggatgtccaatcacacccaaagaaataaattttccatttgcccttaaatcttggatgggattaacaccctgatacttttgcttttaaggaagcttatggattctttaaaaag

SEQ ID NO: 976 - DNA, 655 bp, Glycine max
tgtaatttaataattgaccagtactacgaaatatgtaaccgtgtaattatttctcataaaaaaaataataaattaacaaactttcgagtctatatattctgccaattgtgataacttcttatcatccatcaaaacctaaagaaacaaatctcagccaattctaaactttttgtttggtgttacagccattggaatcgcttgcaaaaaacaaattgacttttaaaagtaaggtatcatcagaaaaaaaaaaaagggttaagatgtgtttgatttgtgttaaatttgaacgtagagctttttgttgcgttgcaccgatgcgctgctataaaggcttaaaacattacttcattgggccgcaattgaggaagatgacggcaggacttgaagctggtctttgataagaattgtaacaaccgaagaaaagaaaagtaaagggaaaaacacacaataaaaagaaaagaaaagaaaagaaaaaacacaaaataaaaagaagaattacgtaaaatgtaaaaaagaccatgtttttttttttataaaaaaaaaaaagctggttgcatgggtctgaatctcaagacatgaaaaaacaggaccaaagcaagacatgtagatccaaatttattagacagcaaaagagaaatttaccagccctggggat

SEQ ID NO: 977 - DNA, 1426 bp, Glycine max
cgcatgcataggcatgctagatggttggtgcagtatcatagtggttcatgataaagggatagatggagatgccccaaacttcactttcttgtcagcactgcttgtggctaaaaccaaaacttgttcattttctgccaaaaggccccacaccaataataagcaagccaacaaaattacatgctggttagcataccttataggcatcataatatataatcacaactaagaacaatgtcattttaaatcaaattcattgtatgttatctaaattattttgtaatatcttctaacactgattagcaaacaagatacaagaaacagatttggcaataatggaaatttcttgagaacaataaattaggcaaaagaaccaaaagcaatggagtcagagtagcagcttacccattggaatgggtttaggagcccatgaaatgcatgaaatgtcacctgcaagtgaagaaaataatcaaggagttgaagatcacagatagaaaattactagttttttcagttgcaattaaaggaaatatcaaaatggtggatgcttggacatactatcatgggctttttcagctgtatccagaacctttccagtctcaacacataaccactgcaatgtggagccatgggtcgcagccaaaatttttccatcaggggaaacactcaggcggtcatagtgcagtgtagtaccggaagaatcatgaagaggaattaggaacaccttcagcgtcttcggatcctcatcaagatgataacgaacttcaggatagaaggaaaataaaggtgagaggagttgaattaattaacaacctagtccttaagacagcacatatgaacatttggaaccccggagaggaaagaatacccttaattgatcaaataacaagcccatttatcaggccaaataaaataacatgcaaaagaaaacatgccccttttcagccaaagattctcatcgaagtactgtttgaattcttcattaataacatgaccaaatatcttgtctagaaccattaagactatttgcaactccaggccgacttcgacatcaagtgtttgctagaaaaataaaaccaattcgataagtaaaaaataatcatctttcaaaacttgcttaccattgatattccatagtctcattgaaccatccttggatgcagtgattatttgctcagagtttggcataaagcataaccaagtcacagcactctgacacgcaagtaataagcatattaatcatagtcgaaaagatgataataggaacataatctttattatttttatttaaattggtaagtttctctctcacacacacacaaagagagttaatatgcctacttttaaaaacagaccatcatctttaccctttttgtttaaattaaaaatacacacatgcttgccacgtgtgcaggcagcatgcattatg

SEQ ID NO: 978 - DNA, 669 bp, Glycine max
agtcataacatctttatacgtgaggattaatctataaatctagctcatagtatagtatctttttactatgtacagtttttcatcctttatctttgttatttcatttgagaattgtagctttcaaacaaccaagactacccaggacaccatgatgaaatagacattgagttccttggtaccacgccggataagccatatgtcttgcagacaaacgtatacatcagaggaagtggagatgggaatattatagggagagagatgaggattcacctttggttcgacccaacacaagattttcacaactatgctattctgtgggaacccagtgagatcatgtaattttcacaaagatgcactacataattttttttttgtgaataattattttgtataataactatcaacaaccatccagcccaattaggaaattactaagccttggttaaaatatttcactgaaaagaccatttctatacaataatggactgtcgacccctttaaaatatacctattaacctttaatcatgttagtcaaagtgagaaaaaaatgtgcatgtagcttatttttcgtcactcaatcattcatagcttatttatgggatggaaatgtagttttcaccggagtaggttgattattataaaatcttacaatatctagattttggatgg

SEQ ID NO: 979 - DNA, 682 bp, Glycine max
aggacaaatggacaacgaagaacatgtatatatataactatataagcaacataacgaaataggtaggcaaattaagtttaacagcatatattgtacagtcattttgaaagcataatttcttaatactttcagaaacccacaagagctaagctagcatatacacattatattgccaacaaaaagtttttatgtttgtggaaactcaagtgttataaccgttggattcttaaatcccagcctactttaacttcaagtttctcttgtatcattgaatgcatattaccgtttttttttaattgaattcatcattctacaatgtcactatttcatattatgaataacaataatttagtctcaaggttcaacttctggaactaagaagcatttcactatttatatttatagatggaagcatccggatgcaccgacaacatcctcatttaggaagagttccttgttaatgtgccccaaacatttggagccaagatatatgttgatagacaaaaaagaaaattgaagacttcaagaatctagcagcttggaagtcagaatttcagatgttaaaaaaataacactacaagttacaaccatcgtcatctgtcgccatctccgggcaccttcacaatatccatgtttgcaaccgtaacatcaccttgaaccccaccttgctaccatggcaaaa

SEQ ID NO: 980 - DNA, 774 bp, Glycine max
ggagtcagcatcaatagcagcggcttccgtggctcatgattttctggcaccctcatcagccgcgttgactccaacatattcctggtgcagcaccatcataacttggtgctgagagcagttgtcagtcttcaccagctccgataattccccggcgggggagctatcgaaaattcaagtctggtgaccaccgcaggcggtgagcaaagccttgtgtttggacttgaagaaggtgatggcgttttggaaggagcagctcagggcagaccaccagtggatcaatcacagttgggttcccccaatcaaagaccacaataatagggacaggatcagtgagctgccggactccattctgctccatatattgaattttatgaacacaaaaagtgctgttcaaacttgtgtcttgtctaaaagatggaaggacctttgcaaacgactcatcagtctcgcgtactgtcctgatccttatctcctaaagaaacgcggggttggaaggtttatgaaatttgcaacctgggttttgtctagacgagacgacgccctattccctacttaatcttactcttcacctttggtggactgagcctgaactcctagataaggtcaccaagtatgctctgcttcatgatgtcccggcagtgaccatggaaactatttttaggctttaaaacctgaacttgaaacccctcctttaaatactttgctggccttctttgacactttttaaactttgcattaaagggaaggaaacataccctcattaaactttccaaa

SEQ ID NO: 981 - DNA, 803 bp, Glycine max
ccacttagactcaaatttacataactaaaattttcaatttaacatttgtgatcgacactccaaagctacacctacctttaagcaaggcctgttcataattttcaagacatttcccccaacataaggtgttggcagtatttttccataatgtacacatacaagcatgcagtatttttatatacagacttcatcatgaaccatgaggacttagcatgtaatgataatgatatgagtatgaccactaaaatcaggttttgagtaataacctgtaagctgatcaaggatcgagcataagggcaatcaatatcatctggagtcacacaaaatgtaatggaaagatcaggccccttacatattttttacgtagctcttcaaattgtttctgccaagaaacataagatgaaaacattaatgtgagtataaaacagcacaagccatcatttcactcacagcaactgataagcaaaacatcaaaggtccagtatgaacaaaattgtgaaagtctagcatgcaaataacaccacagtggaatttttccacgggataagatatatctgatgaagaaaggggataaaacaaggtacttgcatatcatgctaccatcaatgtttaatgcaaaaagagccaacggggttgccataaagatcaagccatatttcatgacttgctaatgctaccaggaagctatatattagaatcagagagaggaggagttatattcagcttaatatttctccaaacatcacgggcatttttggtttccttcgtagcattaatgcaacccaacaagtgctagaatcaat

SEQ ID NO: 982 - DNA, 810 bp, Glycine max
gcctgcacatgatagcgaagaggtatcagccagaagagaagagagggaaaaatttgcattggagcacatagcaaaatgccagcactctggtttgaatttctttttttattttttatatttagttaagcatgttctttacagatatctggttgacaacatactattttattctgtcagctgttagcaggctaacaaatccaattgctaaatgggacataaagggtacacaaacagcattgctgcaacctttctctcctatagtgatagctgctgatgagaatgaacgtatcaggtatttgaagttaatcaatactattttagttaaattgtgactatcaagaagctgggcatggctttagacaaaggttgatggtgcttttgtgttcagagaatgttaggacaattactttacaggccttgaaggccatctgttgtgaatcattagaagttataaatttccaatcatttttgtattcaggattggtagtacttggcgttggcaataatgagtgacatttgttagttttagagactttagcaaataatggaccatcatttttagcttaaatttatagacagtcatgtttatatagaatgaattttctgtattgaccagggcagaatatctttctggtcttgatgaatgtcattgctgttagtctttgtattgcccaatttggatttttgttggctaatgttcttggagttttccacaggatatggaacccatgagaggcacactactgaacagtttgatatcatgatttctgacaaagaattctagctctgcttgtaagagcttgtaaagct

SEQ ID NO: 983 - DNA, 720 bp, Glycine max
acttgcatgcctgcagcgaggtctttgtatcctgagtaggtgtgcgatggcaagaaacataaatttccaataaattccagaatttaacacattctggaaactaatttgccagaagtcttggatagtttctgaaaattaatttctagaaatggatattctttgaagaaacaaataccaaaaactggagtatatatgtatcgatgtagttagcattactcattaaaaatgacaacttgcaatagcaggttaagttacttgttaatagttaattggacaatatatttacgttgaagacagcctgccagtgacatgtcatcaaattttgccaattcaacattagtatttagtaaaacagaaaggcttcatgccttcatcacaaattagtctctactcatgtttcacttgagactgagactagtttatttaaatgaaacatcgttaaaaaaacaatatatatacatggttcctgatttgaatggtatattataccttgtatgaacataaaacagtgataaagaattcagccacccaatctgaaaactgtacaattgagcagtaccacaccgcttgcatagatgcaaacctttatctattttaagtgtggtcaaacctctgcacgtatccaaagaaatgaaagccagttatgtccagacgcaaacaatcccattcttatcagctgaagctagggggttttgcaattccgctccacctacaacacag

SEQ ID NO: 984 - DNA, 977 bp, Glycine max
ttcccaggcacactcaatggtgccaggaaaggtggatattcaaagttgtttgactttgacaagcacaggtccaagtagaaaaaggaagtttcctctggatgaggtactgagacctgcaagcatgtgtaatgaagttctgaactcagagggaaatgaaaaaacagctgatactgttttggatactagatccaattttaaagatgtacccacaggattaggtttacaagatgttgcaaagggacactggagtaaaactgaaaccgaaagaagccatatcattggcaagaagaaatacaaaaagattcaagttgtagataattgcttgattcctgagcaaccacaaggacatcaaagagaaaatgaagacactgtggatactacagacaaggtatatgaatctaaaactaattcttctagattagctccctgtgcattcacagggaaagggatggataattttcctatccgccccctaagaatagaaaatgaattcaatttgtccaaagaaaaggggaaaatgctgcaaactgacagggagctggattctttatcctggcacaaaaataacatgcttgtacaagattcctgtgcatattcaggggaaaaagccaggtctaatatgcctgtaacaattccaattccttcagcccaaaggggtgctaaaaggaataggactggaagaaggacttcatctttctctaaaccaattatttggtgggatgcactatttttacaacaaaaaatttctctcataaaattgggaaatcacctaccttttcttaaagcctttttggaaaaagggactttaaaaagttcctcctttctttaattgggagggaacaatgtccacttaatgtttttgtggatggcaaaaacatttccttttaagttaaccccacttggtaaaaggcgtttcattggtgaaaataaatatttttatgaaaaaagccccttttaaattggcttccttatatttt

SEQ ID NO: 985 - DNA, 664 bp, Glycine max
tgaccggaaagacgtgttcttctatcaagccgatgaccagcattatataccacgggctctcctgattgacttggagccaagagtcattaatggaattcaaaacagtgactaccgaaacctctacaatcatgagaacatctttgtctcggatcatggaggtggtgcaggaaacaattgggccagtggatacgatcaggtttcttactacttactagagcatttttttgtaattaatatttgtatgccattggttgactttgtgtctttgttacttccatgaaccctctcaatgcatagcaatcaactattgtaaacttatgtccctttttgttttaaagttacaacatcaattcttgcactttccaatgtaaatatatgatactgattaatttaggcttggatttcaatcacatttaatttaatggttcaaattcagtctagccaacttcgaacctaacagacactaactcatgctcatgccatgccatcacatggagaagtttttctacttttgtgcagtgccattgatgctccatttgtttggtgtttatacatacataaagagaaattttgaatgtgtgtgggtgtgcttttggacactccagatgtttgagtcaatgtagacacaactgacattcacaaaactagtgatgagtttttcccc

SEQ ID NO: 986 - DNA, 938 bp, Glycine max
acgtgtgacaaagacatttcttcattctttcttggaccctacaaaagctttgcctcaacactatggtgcaattaaagggatagaagctctcggatcaagactggtatgttttgaccaccgtgttttaatttcaggccagtagattgttcgatggcttctggttgttaaattggtttcatattaattatttgatgatctcttgcggataataactaatggagacagctctacttttcccttttagattatatatgattattttttataaaaacactattctttaccatctgtttagttctcatggataataataatgaagaattattacttttttttatatgatgtttcttaaatatttgcaactgtttttaatgcatgtctttgtatggggttcacaggtcacttttatgctttgtgatttagaacctctagttgtattggtgtcaactaatgtgtatgttccttcactttgagtagattcgcttgcttatacttccaaatctcgagccatatttgcatcttcttgagccagaaatgcaacctgagaagcaaaaaaatgaaatgaagaggcatgaagctttgcaagttatggagcttttgtcgtgaaatggaatgtttaactgtgtttaaattttgcaaattatcttaaaaattgaccctgtcctcctttaaagtggttgccctatttatttggccactcttctccttttttgatttttgcaccccgcaataaatggattgtgtaaattttttgattcgttcagattaaattttttatttttaaataccctaggtcttttttccaataatggatgtgtacctgacatattttttgtgtataatgagaataataacctttggtgtgccagaacatctgctattaaagaaaaaatttacactttttctttcactcttcttttttgggatgagaaaattat

SEQ ID NO: 987 - DNA, 818 bp, Glycine max
aaaccatactagtcagtgatttacaagaggaattgagtattgtgaaaaacttatataagaaaactctattacattcacagagaacttaagtttcagtttaccatcaaaccctatggaagattaaattctccactaaaactgtacaactatatcttcagtttaaccaatgtgagctcactccattttttatactcactactgtctaatctttatcaaacattttcacctttatatcatatatctcctaaccatttattggacaattcccttcatcttaccgattgatcaaagctacaccgaactctaataaatattttccttctataacttcttctttgtaacattaaacactcaacattcaagatatatcaacactgtttatgattaaaagaaaatcatattaccacctgaacaatgtcatcatatgctttctccacagaaatgaaaaaccaaatatagatttaaaccttgctctctttgcattttccatagatcttctcagcaaacacagtttcaaaaaattaacttgagataattatatttattctgtaaggcctgctgtcttacctctattctatgcactcaaaataaaatacttctgacaatattaataaccttaattacagaataattgattaaaaattatctaaacaaatctgttacattgggcagaagagaaaacaatttcaaactgccactgaagaatgcacacatgtttgtctgttcagtccacaaataacttcagttacatataataaagataattgtagtctgacctttactgtgacccaacattgctgtaattacctatttctgct

SEQ ID NO: 988 - DNA, 691 bp, Glycine max
atcttgcatgcctgcaggatcctggtgcacatgtcccatcttctgttaactattctgtattaaacaattcaaaggtgttaatggattctgaaagggtgattcaccagtataacggatcttctttggggattggtaaagagaaagtcccagtagtcaatggtgatcatggtttggatggaactgcaaaggattcaactaatgcaacacttactaaacaggcatgtggtactgaccaatcaaagctccgggataggctttgtagtatatatgatgatattctggttgttgataatattcctcttgcagaggaagtttctaagatgcttacaacaaagtaccggcatcttatttatgcatgtgataccgaggtataattctttttactgtaattacttgtattatggttactccgtatcacaagagtctatatagcaagattatctcctctcttgcttctgtgcacgtgtggctgtttgtgtactttggacatgaattcaactaatttgtatttgtgcaacatatattatctgctgattttattgtcttcaaaggtggccaagatagatgtcaaacaagaaactcctgtagatcatggggagataacatgcttcaacatttattgtggtcctgaagctgattttggaagtggaaaagtctgtttctgggtagatgttcttgatggtggaggcca

SEQ ID NO: 989 - DNA, 796 bp, Glycine max
gcatgcctgcagatgatttgtaggttcaagataacaaccttgttgggatgcctggacccaatgcgatacctctaaacgcccttcatttaaataaaaaataaaaccattttgcagcttgaacatttttgtgtttcataatgacatttataactcatatttggaatggcaacattatatgccaacctccatctctcatattaataatttttttaaaaaaattgaaattaatttaattaaatggatagactaaaagagataagagattaaaaaaaaattacctaaaaacactattgttgaacgaaaaattcttaaaaatactcttattaaagagtaactcctaaatgctccttcattcaaaatgttatattttttatatataaaaaatataattcatatgtttaaaactatttatatttatttattacaaattttaattatgtaaataaatatttatcttatatattccacaaaataaaatactgtactaattagataataaagccttctaaaggttaacaaaactgtctcactgcaagggcacaggaataggattagattttgaataggaatttttttatgaaaacaataataaagtttactttttttaatttatagtttataatagaaactaattattatgtaatattaatataaaaaaattatactattaaccaataaaaaatatataatgtttatcgtaaaaattaacacaattacataaggcatttgtggcttgggttaataggttaaactacccaccctttttttctcatcacttattataatgcgtcccctt

SEQ ID NO: 990 - DNA, 640 bp, Glycine max
aatctgatggaactggggagttataccaaggagggaggaggaatggcaatattgtcaactgccttcattaatttgcttggatttttcttattttgtccttgaggaagaaggcttcaactaacccctcaactatatgtgtaaatcgacaggttcaattagttgaagccttgatcacttcaaatttcaaagtgagctacatcttgtacctagcaaacaataattatattcaagagggtacccagtccacgtacgtacacaactgaagcaagaaacattaactacattcatctaaccccaagcaaattaaccaagccatatttgcacaattctatttccaccgcacccaacaccaattctccagcaatggcagcatctcgttactgtaagaaaacttatgtacgtgcttattttctgcatgtaacattaatattcttgctccttgtaattcctcgtgcagcagcttcattagccttcaactatcagcaacttggtgacacgggaaacgccctcaagacttcaggagatgtctatcctgaccaagatgtcctcctactcacccgttatgagccagatagttatgggagagttacatattacgaaaatttgcatctttgggacaagaactcaggaaaagtcacag

SEQ ID NO: 991 - DNA, 681 bp, Glycine max
aacccatggcaaagaaaatatatataagaaaaatcaagacctaaagcaaagcaaaagaaacatctcttactatttgtcatgagaaatatgcatctatacgcttaatgagtcttcccatgcaagttacaccaaacaacatgcatgggatactctatattttaaatctttattgagtttattccttccagttcctgggtgttttgtaatgataactgttagatacaaacccattcataagctttcacctaacagctcaaccttctaggaaagttggagagcttggtaataatactctccaatagaataagatcaagactatatcatgattagctctaacaaaatacagggaaaaaataattcttaacacccatattttttgtactccatttcaaaataaattttgtacaagttaaggttttgcacaaggaaaagttactaaagtattctcaatttcaatgaaatataagagtttatttgactgttacccttttataccattaatgctttcttattccatttagtgctgattccaaatggaagtttaattcacaactgttccgccactcttatattgttagtttctttctttcatatcactcttctaatttatttaacctccaaaccatttccttttctcttcttttattttatttaaatcccactacacttaataccacatgt

SEQ ID NO: 992 - DNA, 798 bp, Glycine max
atggaaaaaaaaacttaggagctcttctgcctgcacaaatgtgacaacagatatagaattacacttaaagaaaaaaaaatactaccataaatatcaaacttagtatgtatgtcaatgtgcggctgctggagaaatgatgacttcacaagttgtgttcgattgtgaggatccagtgcctaagctacttgaagttgaagagacacattggttatttgcaaaagcagaagtcctagagggcatagagctgaaagatgaattataggaaaaggatggaacctgtggtgagagagtgggaagtggagcttcaaaattaagcacctgaacaacttgcctaattgtaggcctcagatggaaatctgtgtaagtacaccacaggccaactatcattaacctctccatttccttctcatcaaagtgtccatataagcttggatcagatgctttaagaagatcaaccatgccatggagttcccaaacccaatccaccaaatagagctgttcttcattcacattaggttcaattgcctttctaccacaggctatctccaaagcagcaactccaaaactgaatacatcagactccctactagccttgcctcttgtgacagcttcaggaggcaaatatccaattgttcctgctaaaacagttgtttttgaacctattgcatgatccattagtctggctaacccaaaatcaccaagctttgcatcaaaattagaatccaacataacattgctggattttatgtccctatgaagcacacattcttcccactctttatgccggtataataatgc

SEQ ID NO: 993 - DNA, 652 bp, Glycine max
aataccctacctctatggtgggagtcattgtcttggttaatctagcaacagcattgccacaaaacccaagggaccactacctgcagcatgcaatcgggatagctaagggaaagaggctcacaagatggaaatgttggtggattgctctgacatggacaatttggaatcatagaaataaaatagtattccaaaatcacacgtttgacggaagtaaaatgttggatgatgctgttctcttactctggatgtgggtcaaatccatggagaaggattttgccatacattttaaccaatggtcctctaacctagaggaagcattcagtaactaggaagggatgggtgttctataatcatgtaacaactacatgcgcattagcttggttctgtgaatacactcgaaccagctacatacttacctcaatatatgtaactctagtaccactgatactattccatattaataatatacctatttttgctgagcaaaaaaaaaaatatatgttgataacatgccaccatgaaacagagtaaaactccaaactcatcttgttatcattggccagtacaatacatgcttccaccaatatacatctcttgcaatcattttcagatttctattaccaataccattagcattctatttgatgttata

SEQ ID NO: 994 - DNA, 817 bp, Glycine max
  misc_feature (741)..(741): n is a, c, g, or t
  misc_feature (748)..(748): n is a, c, g, or t
attacacaaatctctaaccgccaattttccttgagttgtgtctgaagaaaaagaacgttgggaacagaagcattcaattttctcgttggttggttgagagataaggtggtttcgcttctgttcagtttcggtctcttccttggaatgtggagtattggaagtatggtgcgagaggccgtttgatccgatgccactttcttaatcccacagttagggtgttttaatattgaattggatcggttttgataatatatcatcaaattgatttgatttaaaattataattttatttgatcagattcaatctaaagcaaattagactgtactgatttttttttttatcaaattcaatttaaaattatttagattgaattgatttttttaatcttattttatattttatagaaaattttaaataaaagataagataaaataattataatctataatctataacttaactattatattattataattataacctcatttgttgttcacttttttttggatattttttattttcaattattaaaaattagtaactaaccatttggggagatttattaaaaattagtaacacaaaggatagattctactccatggaaatttacaccacatgagcaattaacccaaatacataccttgacatagtggtctctcaaatcattcggagagacccaaattaatcctacgaaagaattgtgattttattgaaaataaacgacatagatattgattnttcttgntcacccatttattctataagcccattctaccttaaagcacatctgtatggttcatacggattgaaaatc

SEQ ID NO: 995 - DNA, 1031 bp, Glycine max
  misc_feature (952)..(952): n is a, c, g, or t
attttctatagaattgatgattaggtgtggcatggtgaatatactagtattaagtcttctttccatatgacgatatcattattctgatataatatacatagcaataaactactatagattatttattatataagaaatttaaagcactaattactgaagattatcattattttattagtgaatcaaatttaaatggaaacttagtttcttcttttatttaaagcaggaaactgtcactcaattatttacaacttcaagctgcagtggctaaaccttacaaggatgattggtctagaaaaaggaatccccggaaacgaggaactctctcaggctatgatagtgatgataacatgtttgaacaacgttccctttcaaagaataacataaatgcaattcgtcgttcacaagtagggtctcataatcaattctacttatactttgtactctaatcatactgtccatctgttcctatctttcacaacataaaatcttgatgatggagtgaggataatttggcttctattcaataatcacttatgaatattgaatatgcagtctgggttgtgatacgcatttgggctaaaaccaaactcatgttttgttgaaaaaaagaagacttgtagatcttctatttataataatggacatacattcttatatggagtataatcttaatcttttttcaggttcctcaagtaattgatacattatggcaacttcagtccagggatatgctgccagctatttggtttatttttagcaggaagggttgtgatgcggctgtgcaatatcttgaaaattgcaaacttttagatgagtgtgaatcaagtgaggttgaactagccttgaaaggttccgcaagcagtaccctgatgctgtcagagaatcagctgtgagaggacttttggaaggtgttgctgctcatcatgctggatgtctacctttgtggaangcattcatagaaagattgtttcaaagaggacttgtcaagggttgtttttgctacagaaaccctgactgctgggatcaaa

SEQ ID NO: 996 - DNA, 684 bp, Glycine max
tagccgttatcaattctacacaaaagattcttccaaatttatgctgatataaataaaaatactccagctgcctcctattatgttacagtcacacacacaaaaaaagatccttggtaatataatggctactatgttgttaatagcgaagctagctaagaaaggttagggttaaaagaaaaaagagtaatcatataatgagcacccatttagctaaggtagcaggtgagattaaagtaaaaatgatcgtaaacaaggcacgtggatgagatcatggccatttttggattaagttgagctgtaagcgtcgtgctgaaacgtgagaaggggaatataaaaagaggccatgatagggcaagagaggtagaaagtacaattaattgaactaaactaatgtaataaatcagaatgaatgaaataaattaaaacttcgcacacctccccaagtaattaaattattagcagcagaggaacccggctgtaaacttggacactattggaggagtcacagcgacaaaacctgcaagagatcgattctttcagattaaattctaccccttttaatcattgttaattaatacattaattatccaattatttacgctgtaaatggagtacagtatcatttaaactgagattagttaacctgggatttttgatttaaaaaaaacaatatttttttttaaa

SEQ ID NO: 997 - DNA, 880 bp, Glycine max
aaagggaaaaaggggctccacaaataagattacgcgggtgccttctgcatcacacaaaaatatgctgaattacagtgcccatattttaccacattattctgaggaaaataaagatctgaaaataaccatgcttaagccctagcataatttaacataaagctaacacagatattccaattgtaacaataaattttaatgatgaatttctgaagttgattcaaatgttacatatctgtttacaccattttttatatgctaaaatcatacatgaaaacatgtaaacaagaaaactcttgtattgtatcttacagatttatatttttcttgactgttttaacccaattcaacaaggaattagggtttttataattttaataatttgaataaatggtttattatacacaggcatgtacaaatgcaattgtgtttaaaaaataaacttgcttcatccatgcataacaacagttcaaggattccattgatgttgaaaataattaacatttcagaaaagtcccagaaatgaatttgcaaaagagatgtcaatgttgtgttagtgttgagttaatacatacgtatatgaactataaacccacccccaccccccacaaaagactaacaccaaacacaaaataaataatattaccttgtatctcaagtgatctgtatccaccaattccactgacgcctgcacttctcattactccatccattgccttctcttgggaaatcaatccactctggatggccaaactaaaaatggcctcatgaatataactttacaaaatatgatacatgatatacaactattgtaaacaagaggtgggatacttcaaaaattcacaaaccaattttacatgtattattccaattaaaaaaaaac

SEQ ID NO: 998 - DNA, 749 bp, Glycine max
  misc_feature (735)..(735): n is a, c, g, or t
aaacttgctcagggcttgagctttcaggcaaagcagtagatacaacctgatcaataagttgccttctatattcattatcaggatcaagaactttagcccacaaatcaccatccattctctcaacaacatatctgtcatcaaaatataagtatgtgaatgttgaattaaagaaaattgatttggtggattaaggaccacaaatagagctcctctaaagtgacggagtgtactttaaactataaagtgcagttataaccattgattagaaaattcatggttgagaatatgataaaatacaagtacagcaaacttcgaagttgtaacaataataacaataatcaatggttgtaactacactttatcctgcaaagtatactctcactttagaggagccaatatacaccacaaaccttgcttgcagtttgaacaaagaatttttgttggtgacattgataagttcatcgtcacattgtcctcgccgataagctacaactgctaaggtgggatcacgtttctcacaatacttgcccacaactcgagaatcatagtatgggttggttgtgaggaaatgttctgggttggtgttgctatcaatgataattttacccagtgcattgtgaacatgtacatcctggcttccctcacttacaagatgttccaagaactgtgtgagcaaacgaagccgaatccttgctatcaaaaagccccaggataaaataagaaacacgaaccgcnagcaataaccctta

SEQ ID NO: 999 - DNA, 721 bp, Glycine max
aatttatattctgttacattggggaccttttaaagacatactgtctgccctatgtgttctgacatagaccttcattattgaaggcctgctatctccataagattgatattacaagttaatatcatacataaatgattaaattgcaagtttgatatgagtttctgtgcgaattgactcagttttctcctctaaaatacaagtatacgagtcaactatcaagtttgacaaccgtgaaggttactgctttaacatcccttgccattgggctgatattgctttttcatcatattaaatttcattaagaaaagaatagaaagttatcttggggttactagatcttcagtgacatgtttttcacattgcagtttatgtagcagtgactagtgaacgattcctctcatgtcaaatataaggcaaaaaattatggtataaaacgttaaaaaccccaaaaatactcaactttacagtatccatgtaaatcctagttttgattaatgtgcttgtatttgaataaatcttggttgctgttgtttttggttgaccttgctgttactggggaagtggggataaaatgaaagaaaggagaacacatattttacaattgagattgcattgtcagccacctcaattattttgatgcttttctccactcaaattcacatagttgacacgtgcaattctgggttttgttgaatttttcagttggagattccctaactgt

SEQ ID NO: 1000 - DNA, 695 bp, Glycine max
aaacttcatcatacctagcacagaacagatcctaaatattgcacccaattatagatcattcgttctaacagtaagtaagctattaccttctgaaaatttcaacaatgaattgaataaatttttgaagattttctttcccacgttttcgaaccaactcactcacaaaatccatggaagcagtcctaggactatacaaatcttcaataatgtctgtaacaaagaattagaagctataagatatccctgtgcaatttgttgaaatattgattccatgtttacacagcaacacaactttgtcaacaagattgatgggcagattatttgccattatttgtgcagatttattggccctttaaaccagcatatcttgtatgattgtatagctgtaattgtgtaattatatccttaattacttagcccagctgtaggttaccgtatatagttttttagcaaacttcaaggctagaaatcagattgtatcatactatcatattatttaaatgagaaatctccagaggagaggacacagttttcatcctaattttctgagtttaacaaacttaccatagcctttccttacatattcatgtggatcttcatcccaaagcttttgatcattatcattgaagcacataagggggaacactatttcaaaaagaggacatcaagccgtggttgcagcagagtatacatac

SEQ ID NO: 1001 - DNA, 798 bp, Glycine max
aaatgtcatgtataaaaaaactcttggccaagtgactaataataagtattttcttactgtcatgatatgaaaaatatatagattttgtgaataattaatcctgatgagaaaatttgattaatcttttaagatattttcctctaaccacaagactaataagtgtatgatctaaatgtgcacactctataactacaaacaacgctcattttaatagtttttaaattctatttatctccttatcctgttagatatacatttacttctttatcttttaagctgtcaaatttggacaatcgttcaacctaacataagaagtcgaaaagtctaagacagggatagaacgaccatgcgaaattggtggtctttatgggccgatggttagcaccttctctgggtgctttgcatcccattttgaaaaatatttcataaacatccataatactatcttacacttagacagagaattaaaaaagagaaaaaattataaatatgatagaatttataacatgaagaaagaaatagaaaaaaaatgaaagatattgatggaatatttagattatgtatgtatatcattactctatctatttaaagatattcaaagctaatcttctaatattttttttagtgaggggaacaaattaaaagatcttctaactctatcgaaattgattttttttaagtgggtattacccttttatatgcactcaaaacgatcattgacatggataatcaaggttattggcttaaccatattaaaaagttgtagctttttgacggtagatgtcaccggttgattga

SEQ ID NO: 1002 - DNA, 661 bp, Glycine max
acacaaagcaatccttgatctgaggcaagcataacagcagaagtgaaacccctacgtgagccatcctcatccatgccggctgtaacatctgaagttttttgctcaaagatgcaacctgcactgtcaatagaaaaaagaaaaaaaaactaatgcggttgtgcataaattccatctcgattgatgcaattatgaaattgatctttcacttttttcagtatacttacatcacaaatcagaaatttaagtgtgttaaaatatgtacaagctgcccccataagaaaaaatatccagtggcaaacacattctgtttccaattttttaacctgaatcattgcataagagcttgtttgtttctttttcattaaaaaacaacttttatttggaaaaaaaaatactttttaatatttttagtaagtttaagtttttgaaaaatatcagaatctaaaaaatatcatatttcaaaataaaaagaatcatttataatttccaccaaacaaaaaataacttctgctttacataaaatctttaaaaaacaaatcacttttttacactatcttaagatcacttttttaaaagcttaagcaaacccaagctaagtgtaactaatgcaaaatgtcatagaactagagatatttataatgatgattgagaaatcttcata

SEQ ID NO: 1003 - DNA, 688 bp, Glycine max
catgcctgcagcttctgcatctgctactgctgtgccatatctagacaagacagattttctaaagcttcaaaatggcaggtcaataccacttgattacaagcaagctaataagtttatacccccccccctcttttcttttgtcaacttaatataaatttggtcaaagtatattgtctctctgttatgtatgtggagagagagagagagagagcaactgaaaaggaaggaagagatgaaaacaggaacagaagtactctggaaaatttcttaggaaatgagatggacatgaaatactgtcgaatcctctctgctcctttccttcccattggcttgttaattgttgtacacaatccatgttgtgtatgtgtagcatttagaaaaaagagaataaaaataaatcttatcgtattctatttaattcttaagaccttatttttccttttaacacaaattaaaagattaaccatttcatgaaaacttcattgataatggctatataatctttttgcattcagtataatgatgactgtatacagtagagtattttacagaaagcttctagctacacaaatcccatcttcctttttattaagatggctagcatttattcggtcttacatcctgtacactgacttgtatatagcttactaataaaattaatttaaacagtgacctttcgtggtgtggc

SEQ ID NO: 1004 - DNA, 816 bp, Glycine max
aatggtttgccaaatggcaaggaaacacacaatttataatggaccacaattttttttaaccattgtccaattttgttcaaatttttgtttgctaattggggcccgaaaccttttcgggttctagactattggttaggggacagatcatttaggaaggtggtccatgatagttggatagcgactccttagcgactccagtaagtggctaggggggttttgtcttaaaagaaaaaattgggagactaaaacaaaggctaaaagaatggaacaaaacccagtttgatgacatccaacagaaaataagaagttaaagtgggagattaacaagctggaagtagaaggtgatgacagacaactgacggctgaagaaataaaattgagaaggcaactacaagaggatttatgggtagcagcacactgaaatgcgtcaattttgaggcaaaaagcaaggactacatggattaaggaaggtgactacaattcatggttcttccacatgactgtaaattggaagcgtagaagcaatacgattaaaggtgtggtgtgtttgttaatggttgctggatagtggagccatgtagggtcaaagaagaaattcagaatttcttcgagatttgaggaatctgagtaggagagaccgaaattagatggggtcagttttaaatccattggacagcaacacaataattttctggtggctcgattaaataaaaatgaagtgagggatgcggtgtgggaatgtggcagccagaaaagtcttgacccgggagggtttaaattccaattttttaaggatttttgggatgatattcaaat

SEQ ID NO: 1005 - DNA, 666 bp, Glycine max
atgcctgcacagcaggtaatagctactagatctccaaatatcattaatatgcatgtatctattatctcatcagactgatgtgtctgtgccggtgtgctggatgtattaatcaacatggaacacatatttgtgttaaacaaagtcagtctattcaacttgaccagagctcatgtcaatgagaggggtgtcatgtacaattcttaatattttgtgatccattatttattttgggtattaatgtggatattgttccattaaatcatttgaggtattgactatgtttaagggtgacattacacatcatatatttgattcattttatcttttcagttttatctatcatacatgggtctgttttctaataacttgacagtattgagcattctggaggagaatgtgttcgcctagacttgcaacggttaagccattattcaatttttcctggccaggtgagcaatgcaaaagatgcgttaaaattctggtttaaaatgtgtgaaaggtatcagatttacaaattataaaaggtagttttcatcttgacagatagttggtattggagggcataatcccagtgggcattgcttcgttgcaactaaattggtggattctatacctacctccgttgctgatgaggattcaaatcctgcaaagaagcaagctgttgat

SEQ ID NO: 1006 - DNA, 878 bp, Glycine max
  misc_feature (670)..(670): n is a, c, g, or t
gctgttgatggtaccctttatgtcttggatcaaatgtggttgttgatgttggtgatttggggaatgaggatcaaatgattgtgggttctgctatacccggattattatttgatgtaaatgtaataagtgttaaatgcttgtcaatctgaagcattaactagtttgtgtgtgttgtattatgttaagatacaatgtatcaatgttgcatgataccttttttcttttgttggatacaatgatagtactgaagtttgaacttgtggcttatatgtaaattactcaaatccgacacagtttgcattgccaatcctagtgttatgttgcataatttgattatttgtgtgggttgctctgtttgcctcctttgtatttcttgttatatagttatccaatatattttttttattataaccaagagatatttaagatttctaattgatattcaattactctctcttgtcaggttggccccactttgggagtaaagtaatatctcctctcatgatttcattcttaagttgagaattgaacctcaatttcttgattaagaaacataggtatcatatcacttgggtcaatgacttttcattggtcctaaaatgaatcttaataacatttttctcattaattggggtacaataagttaaagccctattcttcttggcctgcntttgaggaatctttattaatatctaaaaaccatacacgttatttttgaaaaaagaaatgaagggctttattcattttttagaaagaaataagatgtttttaacacttttattgaccctggaaatctttttacaagtttaaaattccctttcgacaatcccaaggatttagaaattgcggggttagtaagacaacgttccgaccgacgt

SEQ ID NO: 1007 - DNA, 874 bp, Glycine max
actgtctggcaaatggaacttctgtaaatggtggtaaaggttattcttcaacactgaaaagaaagagatcacaagtggcaaatgctcatgaattattgaaaaggaaaaatcgacaccggcccctgactaaggttttggagagtacagccatggtgtcagttcctgtcatttgtgatcagcttcccagttcaagcggttctccactatgtggggtaactgatggaagaatttcaggattagattctaatggttcaaagaaaacttttccaacgccaacacataattcagatagtactgaggctacttgtgagaacgggacttcattaattggtcatgaccatggtagtgatgatgcttcccaaatcaatcacaaagtcaaggagaatgaggcttctggcttaccagggctagttggcaaagattctcctgatgaactatttgatgttccatttgttggggttttaggggaggagaaacacactctgggtatgccacagtatctgaatttccgtagtgtcttctcttctgtacctgcaatgtttacaattgttatcagaatgtattgcagttcatgatcctctccccctctcactaatattatttttttttcccttttcatcaatattttaaatttttctttttggtttgggacagatttaggtcttagatgggtatgttgcataagttaaatagtttatgtaacattgctctgatctgaacttcataaaaaagggaaagatgggttctgagaggccggcctcctagattatacatgataacctgggaatggtttggtgtttttgagaacatggatatgcttatttcccggagggcccgtgtaaaaaataggaactgcctcttaaaaacattccgg

SEQ ID NO: 1008 - DNA, 694 bp, Glycine max
ttgcatgcctgcagaactaaaccaaaatctctccaattaccaaagaagcaattatccgcaccaccatccaatcgttgtaactcctcacaagtcaagggttggatgatgttggtaatgcacggtgtgtggaccgtgcttgaccgctcacagcttcatttatcctactgaatactacttggaggggaatacaagcaataacaggacccttgagcttatctaccactggctttttttcctttctttcctcttctgactgcctgtgacctgtcaatgatgacaacttccgaatctttttattcaacagcccggttttcttcatcttggaagatttactaggagaaaatcgcgttgaattcttggaatgtattcttccagtcaccgagtttggcttggctacacaatagacatcaccaacttccaagtcacatccaatgtcactcaacattttatcacaatgaccttcaaccatgacctcaaccgccaaagggtgtccaataaaggctttgccattcagtttactcacaagggaaaccaaaggcacatgttgtggccggtagctggatttaacttctagcttaacgtcatataatgaagcatcagaacaataatttcttccagggaaatctgccgtttgatatctggagttaacagtgaagcgtgaatggcgataaggaagcaatctctgaggtgtgag

SEQ ID NO: 1009 - DNA, 625 bp, Glycine max
actcaaaaacatactgacagtataagatcagttggtaacttttatctatcaatcagtcaatctagagagagagagtatactacaacataaaatccaatgaagtctcaagaaaaaatgatgaaaaactcccaagttacaatgtggtgctatgataaagatgttactcggacagagttatcagctgatccagtcaagaaaatgggcagggtcggatgccaatccacagcagtaataggagcaccgtgcggaagtgttctccatccactcaaatgaccatgaacctgacacaagacaaccagacacaacaattccagataactaacaagataaccggaaatattcaaagccaaaatttactgggtgtaacaagtcaaaccaatgtatggataattatataattataatcccttaaaggcaatggtctaatcacaattcaccacgaatcatcaacctggtatatgggtgctctaaatgaactggatgttaccaagagtctcctcccatttgcatctaatgccatctcatgtctgcaatattttgaatcattgaaggggtaacagaacctatggaaggcaaaaaaaaggtcatgctgtgaattaattttttcaaccagtataaaacccag

SEQ ID NO: 1010 - DNA, 786 bp, Glycine max
gcatgcctgcagctacaaagttgatggcaagtgcagcaacattgactgtgagctgaaactgaatgaacttttgaatgtttgcgtacacacatctcccccgctccaatacagtgaccacagaagagaaattgtcatcaaggataacaatgtctgagctctcctttgccacgtcagtgccttgtattcccatggaaagtccaatatcagcttccttcagagcaggtgcgtcatttgtgccatcacctaaagatataaggttggttgggtggttaagaaaaaagagaaataaggaaaggtaatatgtttgatttcttgtgcaaaaaattagtttgataaaaaaatcaaactgaattagttttgaaaatagttaaaataatttaaaaacaatttcaaaattaaattgattttaaaaaattgattttgaattggattagttttaaattaatttttcaaataaaaagaaaatttaaatgaaaatcaatttgattaaccaaaccgaattggttttataaaatagtgtactcattttttcttgaattagttcgggaaaaaatcaatttgatttaggtttagttagaatccgaacaagttttgttgaacactcctacctacctgtgactgccaccacatgaaccttctgcttcaaacattgaaccatcagaagcttgtcagatggagatgatccggccatgacttgaatctatcaatcttatccatcttttctatgtgagaacttctgaatgaaagcttcaccactgctgctgatctatccattcacataagatc

SEQ ID NO: 1011 - DNA, 794 bp, Glycine max
agaaacccaatacaaattattttcttttacacagagatctgaccaatataaggatttaaatttttattggggtaaagaaaaacctgaagagtgaaagccagtgatgaattcacattacaatcttcaggtggatgaagcaattccacaggacaattttcaacttcacagtaaagttgtggagtcctaccattttacataataacgcaaaaggaaatattaaaccaaataaagaaatgcacgccaaagctttcttaacatgcactgcataaacttacatatcatcaccagaagcctctaaaggtcctcttagaacagatccaggtccaacctttgcatttcaaagatgatagttaatgcattagtacagaaataataatacatttacacagtttaaaggtcaagaaatcaattttaagaatttcaaaattggaagtcgcataaatatacaaggaacgagaagacaatacttaagttatgcatgtcaattgttgtatgtgccaaaagggcagagatttctttactacatatttatcaaattcaatcttctttgctcttaacatggtaaaaatatttaaattaaaaagggtagtgacatagtgggcttaaaactaccaaatctcaacatcaaatggtatataaaaaatattatataatatgactcaattcatttaatataatcatcagaacttttctacttaagaaagaagggcctcaaacagaaattttgggtaaaaaaaaatataccttttgactattcattcccttatggtgagctccaccggatcccacaataa

SEQ ID NO: 1012 - DNA, 794 bp, Glycine max
ttcatttagattttttccttcattttatggaaagataaacagctcgtgtatataaatgagccttttcactgtccagggcagtcctttcaggacctcaataagaaaagcaatatttaaaaaaaaaaaaaaaacactgggaaaatgtttatatagtagtgtgtaccttctgtaataaagccaaattcatcactaagttccttacatattaacaataaaatacatattaacaataaaataagtagtcgaactaaatataaacattccttacatattaacaataaaatacataccactgacaccaagttatggatgcatttaggatctaaaccaggataaaggacactgatatctatattggtgctcagggctgccagagtctctgttatatcattggcactctcacatgtattttgccaacctaggactgtaaataacatgcatgtaagagagagtagcaaaaccatatataaaaaagtcaacaacattccaaaagcaacaaatgaggtacctgtcataaaaacatggggtggagttgaaagtaagtgatggatgtggttgagcttgccacagccaccagcttttagatcacaagccaactgatggttcatctccacaagattcaaaagcttatcgaaggaactttcagcaaacatattctaacaagtgaagaagggatccagctaagggtacttaacaagcttaatagtttgcccatgctttcagcagcagaaaatcagaagcaatatgaattgtccaatgttttaaaagataccttcattgtccggagggcactg

SEQ ID NO: 1013 - DNA, 632 bp, Glycine max
agagaaaaccagatattcatcaatatgtagttcttacttcttatataaaacccgtaattcatgggagataacaatgcataaattcaatgaataattacttctgaaaactaaaatttgataatcagaagaaaaaaaaagagatcaattggcctccctaccaaattgaaatattttaaaaacccaatcccttgagttccccaactaggaattattgcatttcaatttgaaacaaatattagattgactactaaccaaaaggccataagctacagctatcagtcagtgcttaaacctttcaagttagcagcaccaacacaagtgacacaatgaacaatcaattaaactctaacccacctaggtgttgctcgcacaacacaatatgttggcccaaagccaacaatcttacaatcccctttccagttcagcctcatacagttcaacaccatttcagaaatataactcctaaactcagcctgatagcacttgcttaccattgaattaaaagactacagcgcaatcttacaacaatccacctaagccttgtcaagggaagatgctgacccaaaaccttaactcaacacattttttttttttttgctcaggtaaaatagattaatttttttaatttgagt

SEQ ID NO: 1014 - DNA, 619 bp, Glycine max
tggaaatctaacccaagttgtgaaaatgtaaaagaaattcagtatggtcttcccgagtaaataaaattattgaatctcatacttattcaaatttgtttacattcctgtagaaacttgcagtccaatgggttgactggtaggctacctccagagcttggaaacttgagataccttcaagaacttcagctggataggaataggcttcaaggacctgttcctgctggtggtagcgcaaattttgcttcaaatatgcatgggatgtgagtgtaatttttataattgagttgttatagtttgattccaagattccttatccttattcattttcctaataactggttgttaagcacttccttttatgagtacagctatagattgtagctcccctagatacgtgttgtgcatagtgattgttagatgagcttaattttggacttgaatacaattgaatggatgcaaattactgttttttttttaatgtcacttgtttcacgatttcaccactcattagtcgtgactaatggcaaaagagaaattttattcattttttattttattttattttttggatatgatcatgctttagatttatctttgaagtttactataaaggaaataa

SEQ ID NO: 1015 - DNA, 836 bp, Glycine max
tcttcagtcattatgccaacaaaaaatgtttaaggagcgcctgcttaagaataaggttcccaaaccaatcttacattcttacttcataaatttggagagggaactgtgtccctaaatctatatatgaagaaattcttctaatgtttgattgcagatgagggctgtatggaatgaaagcctggttgcatcctttgtccctctcagtcattatataacttattaaaattggatagctccataaataaatcacgtcaaattccttcaagtatagattatgtaaatattcaaaaaaggaaaacgtcaccacatgtttacatccttttactttccttcaaagccacccttttctctcccctttaattgtgaaacaaccaaaaatggagcagcgtctcaattttgggcattttgactcttggtgcttggctggcacatgttgaggagtctctatgttagatctatatggtgcttagcacatcgttttgtttattttgttggttgttggtttttcctattaatttttctaaggaggatttgttagccttttttttttttttctgcgtgtgtctcacttctttccttctatttttttcccatttcacctaacaaagtattggtagatcttttctactggctgagcactgagcagttttacctttttttacctcacaactaaattattcttaaagggggttttaatgccttaccctgagtttttattggttgaggggataaccccctgacacctctgtggattatataggacgggcttctaaaatggaccagggccctccctcctattaccttttcttctgggcccttctattggcccaagtccc

SEQ ID NO: 1016 - DNA, 871 bp, Glycine max
  misc_feature (829)..(829): n is a, c, g, or t
tcttcagtcattatgccaacaatttttttttaaggagcgcctgcttaagaataaggttcccaaaccaatcttacattcttacttcataaatttggagaggggactgtgtccctaaatctatatatgaagaaattctctaatgtttgattgcagatgagggctgtatggaatgaaaacctggttgcatcctttgtccctctcagtcattatataacttattaaaattggatagctccataaataaatcatgtcaaattccttcaagtatagattatgtaaatatactttgtttcagaaaaggaaaacctcaccacatatttacatccttttactctccttgaaaactacccttttcatccctttagttgtaaaacaaccaaaaatggagcagcatctcaattttgggcatcttgactcttggtgcttggctggcacatgttgaggagtctctgttatatttacatggtgcttggcacatcattttgtttattttgttggttgttggtttttcctattaattttctaaggacaattccttagccttttttttttctgtgtgtgtgtgtgtgtgacttctttccttctatttttttcccacttcaccaaacaaagtattgttagatcttctctactgtctgagcactgagcagctttacctttctctagcatcacaactaaattattcttaaagtggatataaatgcttaaccatgagtttttactgtttgatgggataaccacttgacaccctttgtgatgatattaaatgggtttctaaaatgggaacatagcccacctctatttacctcttttttatgggcctatttgngaaatatatttatataatattaatcatattttttttttggca

SEQ ID NO: 1017 - DNA, 870 bp, Glycine max
acttacacaatatagagcttattcaacggatgaagtaatgttcttatctattcttttgagaagaatataactttagacagctgtttcaagcttgaattgaccctttgtttggcatttttaacttttctttttttctttgttgcttcaggtgatggcattgcttcaacaaggaaatcagaaccgaactacagaaccaacccgtgcaaatgaaacatcttcgcgttcccatgcaattttgcaggtaaccgtcaaggtttttgatgaaagtgaatgatccatctaacgtttggtaaaacttaggtgcactgctcaagtacctttggtactaattcaaattaaaattgaagttttaccttgatcatatgtgcatttgaggtttgtgagtcgcttatgtgaaactctaactttatttagagaatggcactaatagcacatggtattgctttaagttttatcgtttatgttgtgactggcatgttattcttactaacccaatgcaccttattttgttaggttgtggtagaataccgagttagagatgctgcaatgaatattattaaccgagtgggtaagctctcattaattgatcttgcagggtcagagagagctcttgctacggatcaaagaacacttagatctcttgagggggccaatataaaccgatctcttcttgcactaaacagctgtattaatgctctgggagaaggcaagaaacacataccataccgaaacttaaaactcactcaacttctcaaaggattccttaggaagaaccttggaacactgtgtttaattgcaaacattaagcccaagtaaacccctcatttggtgaaaactcaaaacaaccattcctttggggctgaataaaac

SEQ ID NO: 1018 - DNA, 456 bp, Glycine max
tgcatgcctgcagtacctgattcccctgctgctgcttcttcaacagggtgtgctccagttgaacttagaggcacttctttagctgccacaatgcttatatatgtggtgacagcaatgaaaataatgtcgagaaagaaagcagacttgagatttgcacaactaatattgcatgcaggggtaagtgtgaaagcaaaaaccttgtaccaaccactgtatgatccagttgcatatccaagaatattaccaatagccataaacagggagtaataagcatttgcaacacgtgtccttctttgatccttgcctatcatttcaaagatagataagcaaaataagaaggttgtcaatgtattgtttgcttttcatagctgacattttatttctcaaacaaattacaattgacataaaaaaatattctattctttttttttttttttggggggggggggggggggg

SEQ ID NO: 1019 - DNA, 636 bp, Glycine max
gctgttctggacgtatccttctcttttataatacttggtaaagtttcatctctgtttcaatttatatctgtcccaaataaattgcttatatatatgactattatttaagataattaggttttcctaaactttcaacggaacttcactcgtgaatgtgataagtttttgggtgactgaaattttaagtagtgatcctaaatttaagttaaataaaatggtggaaaatttgtgatgctcttgagaagccattgtcaaggaaaaaattcctccaaaattaccttattagagcatggacaatagttgtttatataagttgcttatcataattttgtgggtcttataatttcatttaattttcgcattttaaacaaaaatttcctcccatactaagattgttaaagtgagtgcttaaattaattttatggttcctacaatgcttgaaaatatattatttatgatataatgttgttaagcaactgtgcttatataagcaatttcacgtcatatgtttctgtagaaaaaaaatacttaagcataacttgctcaaaattaagcatctcattggagatgttcttctaataatttaaacatttttttttgacaaaagtttcttaattaaaataagagttaaaatat

SEQ ID NO: 1020 - DNA, 821 bp, Glycine max
tgcctgcagcagtgtagaatcgtaacagattctgtaatgaaatggaagaaaacttggaacacttgttgtttacgtgtagattcgcatcgttagtttggagccaatgctattcgtggcttggtattgagactgcacagcacaaggaaccacaaaaacatttttttcagcatgattgtagctgtttgggaaggaaggaaaacaaggagtggaaatcagattggtgtgcggttgtctagacattgtggaacatcagaaaacaggatcatctttgatgggaaaacctgggatttggattatgctttggagatgatcaaatacaaatcttgggcatggctggaagcaaaggtggaagcatttcatttctctttttctgaatggtattcaaaccccagggtgtgtcttcaaacttcacggatttaatacactcttgtaacaatctactggtttatcaaagggacagggttgattttgttctaggaggtaattatgaaaaggataaatgtgtcccgtagctatgactcgggtgataatctattttccgtaatttgtcatgttttggatcctgtaactatcattggtattgctggtaccgtgttaataataatgttttgcttatccaaaaaaatatatttttttttaatttattggtttgatttaatttagtcttttattttattttttgaatcaatttggttttctaatttctaaaaagagttcaatttaatcattgccatttattccatcaaaaatgttaatggggaaattcatgtaacaaataacatatcctttccttaagtagacatgtgaataccaacttaatg

SEQ ID NO: 1021 - DNA, 762 bp, Glycine max
ccagacttgcatgcctgcaggctaatcaattttaatgtgaaacgaggaccacactcctgcatttaagtgaagttgttacagaggcaagtttggagaccattattaataagattaaaacttgaacgaatcagcttgaagaatttaaattcttgaaaatatcaaaaacattagacattgtaaaggtaaatgcagatagagtagacccatcacccatctctaacgtaagcatccatatcttctcatgtgacaacttttagtctgtcataatcacattcatgattaactaactctctctacggtctacatgtgaatacagattaatatcataaatattatagacattgtgaaggtaattgcagatagagtagacccatcacccatctctaacgtaagcatccatatcttctcatgtgacaacttttggtctgtcataatcgcattcatgattaactctctctagagtctacatgtgaatacagattaaatagcaaacaactggcataaacaaaacattaaataatcttcacatagtctctcttatatattagcccctgatcaagatcactctaaatcacagaagtcaacaatcttaaccaccagttctattatctaatacttatggaccatcacttcacgtactatatatcactattataacacttacaaggaagtcaactttgggggtatatctctattggtaggattttcagtacctctggtactttgcttataatctaataacctattttggctgagccaaaa

SEQ ID NO: 1022 - DNA, 923 bp, Glycine max
aaaaccctcctctttggtgggagtctttgacttgggtaaacatctcaggtgccttcctgcataatccgagacaacattttctgcaccatgcaaatgtgttggacgctggaataagggctaacagatggaagtgctggtgggtagcactaacatggactatttggcagcataggaacaagatagttttctcaaatgacaccttcaatggaagtaaactgatggatgatgcaatcttcttagtttggacatggttcagatacatggaaaaagattttgtaacagatttcaatcaatggtcgagtaacctaagaaaaggtttttgtaatcaggagagggtagcagatataggatctaagtagtatacagattatactgtaagtagcttctggttcctatccagactgtcaagtctgatcttaggaaccaaatgtctacccaatcccaaacatgtaactttagtacctctagtactcatatatatatatatctaacttatttttgctgagcaaaaaaaaaagtctgaatattaatagcagcctaaaaatatatcaaaataaaagatgaattaaattgaatcacctcactacaatgtctggataaaagggttgatatccagtgcaaaagcttcaatacaagtagcctcccattcactaaatagttgcctaacccggcaaaccattcccaaaataattcttacagaataataaaatgccaaaaacagaattgggctaaaaacaaaacaaaaccccttaaaaatcaattttccctttttatattttcttgggatttccccaaaagcccttattcccaaatgcaaataatattttttaaaaataaaaaaggtgatttttcacaatatggagaaacccttagacccatatttttcccggggggtaaaaaaaaaaaaaaaaaaaattttcccc

SEQ ID NO: 1023 - DNA, 993 bp, Glycine max
atcattttcaaagagtgtatattttttttttttaaatcgctgagttcctaaatataatccaaacactgaattgaggagtcaagtgctgtgtgtgtaagacattgcaaaataagttaccacaaattcaccgaagtttcatagatattgtcttattgttatttgatcctgaaacatgctagcaggattaataaaaagaataaaaatgttaccagctgcactagtatagttttgatcctgtcatcctttctagcaatggttccattccttgaatacacttcatctgaatgaccaattttattcttggcaccttcattcttttcaatggaatcaatgttggtggagctcacaccactggaatacacttcacccgaatgaccaattttattcttggaaccttcattcttttcaatggaatcaatgttggtggagctcacaacacttgaatacacttcacccaaatgaccaattttattcttggcaccttcatttttttcaatgcaatcaatgttgatagagctcacaacacttgaagtcagctccatgatctgctcagactttgttcctttgtcatcaattgcatcctcagtagttgtctctggcatatcttcataagtagagagtttgacagaatcgctgaaagaaactcttttaatttttggcgttattgggctttctaacttagaaacatctgattcaaccattgacatagaaaatctttgtatcggaccaggttggataaaaaaatttctaccctttgaccaaattttgttagagtagtctttggttgtcctccatctcttcagtttcgtgctgccactgctactttggctactggaagagcctttaaaggtattaagtttcaattcatccgtttcgctcgatgtggaatttggagagaccctctcaagctccagaacagaatttggagcctgcctttttcccccaagatccttgggtggatgttgcccccaaagctatctcttactgaaggaa

SEQ ID NO: 1024 - DNA, 745 bp, Glycine max
ttatattagcctctttggaggaaggagttagggagggtagaattttgcttcaagaatggctagtgatcctcacagctcagtacaacgatgcatataagcttattcagtataataatggaagttccgtaagatctcagattgatgttgcattctctcaatgtcctcaattgcagcccctaccacgcctaatttttgctctacttcgaaatcctcttctccgctttcatgaagagggtgttcatcctgactatcgcatctatcttcaatgccttttcaggtaattgttgctctcaggtttatttgcacaatggagtttgcaaaatcatgccttaagtgtctggtggaaggaattaaacagactaacataaagatgaatgaactttgagtccaagatattcgcataaaaaatgggtaatatattttagagttttgctaacattgcccacactagtatagcataataaagaaaaatagtatgacaaatcttttactcgatataatttgttagtttggttacaatttgttaaagaaagcacatttgactttgaaagtatatgataggaagaagcaacaatgattacagcaccatcaccatctagccatgggtcataacagaatttgttatagcaattctgttatgcagttagtagtgcaattctgttagaagaatattattggtatatgatttccactaacagacaaccatgagtcatgtataaataagccctaaagggaaatagatggg

SEQ ID NO: 1025 - DNA, 1149 bp, Glycine max
ggtcttgtcggcaatatccatccaaacagtacgcttttccatctttctcatcttcactcactcaaccttgctttcaatgattttaattattctcatttgtcatctctctttggtgggtttgtgagcctcactcatctcaacttgtctaattcgtactttgaaggggatattccttcccaaatttctcacctttccaaattagtctcacttgatctctcatataatgggttaaagtggaaggaacacacttggaagagattgctccaaaatgcaacagttttaagggtgcttgtcttggatagaacagatatgtcttccatttcaatcaggacactcaatatgtcttcctcttgggttactcttagtctaggacaaactgggctaagaggaaacttgacagatggcattctctgttttccaaatcttcagcacttggatctttcatctaattgggaccttaaaggtcagcttccagaagtgagttgtagaacaacttctcttgatttcttagatctttcaggttctgatttccaagggtcaatccctccctctttctccaacctcatacatctcacttccctggacctttcaggtaacaacctcaacggttcaatccctccctctttctctaacctcacacatcttacttccttggatctctcatatggcaacctcaacggttcaatccctccctctttctccaacctcatacatctcacttcccttgacctttcacgtaacaaccctcaacgttaatcccttcctcctctccaaccttatacatctcacttttctggacctttcacgtaaaaccctcacggttcaatccttccctttttctcaacctacacatcttaattcttggatcttcacatacaacctcacggttaaacccttctcttttttacctcaccatttaattcttgaattaaggtacaacctacggtaaaccatcttcttttaccctcacatactttttgggctctttaccaacagggcaatccaaggtttcctcaccctttcaatggtttagtaacaaaagggggggccaccctaaatacaccattttggtttaaaaaaagagcccccccaaaaaggtacccacatgggtggaaaccaggcaatcttttttttcttttgattaaaaac

SEQ ID NO: 1026 - DNA, 805 bp, Glycine max
tgcctgcagtaagatactgtttagctgtaaataatggaattctggttatagctcttaaaattaataaaattctgctcttgcttgttaagatggttcacaataaattaactccagttaatcttaaccagctttgttgaggatcggctagctaccttaaaaaatgtcatcaaagagcctgagttagaccaatggaatttgtatcttggtagttctctgtacctgtttatgatttctgcaccgtccctcattttgtcctagttcccacgttgtcattattgtgtctgtttccctaatgtttagtataattgataaggttgattgtttggatcaggtaattggggttacaacacccagaaagaaagagaggaagctgctgctatccccagaattcatgttcttgagctctccaacttcagcaagaagttgaaataggggtcttcattggattgtcaactgtcaatcgttgaaccaaatatttttcttccaactcatttataagcaataacaagtttctagtgaacacaatctttctactcagaaattctctccttttcgtcttgtgaaactgcaataattgggtcgagagctttgttgtctttactagacctgcccaacttgaacttgaataagatggttcaaacccataagttacagtaatttgtactctcttagaggaaatgaaaattggtgaaattctggggacgtgtctgacaaattcctaccaatgtttcatagtcacaaggtttcttttaggtataaggtacatctgccaaaatcaactttttggtagaaaccaggaggaata

SEQ ID NO: 1027 - DNA, 656 bp, Glycine max
ggggagccaaaattcctgaaagtgattatacaaccttgcccaatggtttgaagtgagtttatgttaacttgttaatctttctaacttttgttttagtatcatattctggcgactaaagtgtgttaaagcccttcaaatagacatcatcatggatgaattcctccatttagtacattaatttaagttttctttaactttgacaaacagaatctgtcacttttttttggtttgcagcattttgtagactagtcttaagtttggtttatcttccatttaaactttcacaattcacactatttttttttttgttgatttcacttttaagatgtgtattgctagttggaggctgctgtgtgatgaaagtgtgatatcttcaggtactatgatttgaaggttgggaatggagctgaggctaaaaagggatcccgtgttgcagtacggttgtgactcagttaaatatgtttcactcatcagtgttttgcatgttatatagagttgactcatcatgttattaactaaatgtgtgggattaccatatagtttggtttttttagtaccacctcaagaacttttctgaagaggaaactgtcacagtactcaaagcttgtcaatgttttcaccaagtgaaactgatgaatgcatattcttggtactta

SEQ ID NO: 1028 - DNA, 623 bp, Glycine max
atattatatattgcatggtatgcaattacccgccatccaaacaggattgaattctatgatgctaactatcattgaaatcaagacacgtgcctgtctaacacttttttacttttttatttatttgtctatgaataatgttaatataatgtaactatctttaagtttaaacagatatagatgattttttataagtggtccagatgttttgcatatgaaccaagcagtccatctgtacctagtttgaaatatggtttagtaaaagcttttaagtatttaattttcatacattagcagtgcaaaattgttttaatttttcatagctttttttttttgtcaaactttagtgtgttgcttaaaatgtttgcttttaaagtcatttgatatgagcaagagagaacttacctaataagtatccatgtgtggttattggacgccactgaaaagtgctatgatgatgtggtttgcattggtttctaaactagatgtgagtcaactaggtgttaaaattacatttggtcgtttgcatgttaattaaaagtttattttaaataacggggaaatattcattggatattttaattacttaaaagaaaaaagaaacctttaagttaaaggatgaattt

SEQ ID NO: 1029 - DNA, 711 bp, Glycine max
  misc_feature (628)..(629): n is a, c, g, or t
tgcctgcagcctacaaataggatttcaacaagaggaaaattaacatgaaataaaatacaagagactcaaaagaatccgaatagaataacgcctatgccacaattcccacgaagaaagagtcacaaaaccgggaaaaaaaaagtagtttagatgcatacatacaattacaagcagtaacagtgctgcaagtgtaaacagcgtaccttagttatcaaaggatccttaacatcagcaacaagtgaaaaattcacgcgctctgcatcactgcattgattttacaataagacaggggaaacagggaacacgagaagaaacagaggtgaaaaccacgtggcacactcacattggttgaggaagctcgtgtttttccaacaacccatcctcgacgaggccttgaagagagatcaagagcgtgttgccacaattcgcatcctggaaagcaaaacgtcaaagagaatgctttgcgtttcaagagttaagcgaaaacaaaatggataaccgaaccgaacctggccagagtaaggggatccttcttcgttggcctttctgccaggtggcacgaggggaagaacctgccaaacggagcaacccgagtggtggagccagtcgatgaaacggaaggcctcgnngcccagatcgccaattccgtagggggccggaaacgaccgcggttggagcagaatgcccaatttttttggcgaacttcgggtc

SEQ ID NO: 1030 - DNA, 766 bp, Glycine max
attgcactccgtgtagttgggtccagaagaagcatttacagaaacttccatgtattggctataggcatgtagagcaacgttgttcatcgcttcaaattttttaatgtaggcttttggtattgggccgctgaagttgttggaagagacatcaaaaatgactaaactggggaatccatgcttgatctttaaaccggcaatgggaccgtacaacttgttggctcgcaaaaccaatactttcaattctggtagagtttgaagccaatggggaaacacatcctttatttgattgtttccaagatctaaaacctccagatgaatgcaattggacaaagattctggcaaaaaaccttctaatagttggttgccattgagatccagagttctgagctgacagtcctttgaaaagatacttggcaaagtgccatgaagcttgttcagttgtagatccaaaactagaagggatgatgagtttgcaaggcattgtggaatggttcctgtcaacttgttgtgagacaagttgagaatctcaattgcacttgcattgcaaattgaggaagagaagtcaccagtgattgagttaaaactaagatcaaggtaaccgagttgttggttccatgagaattggtgcaatgattgtgtcaataggttatgagagaggtccaattcagataacgatatttcatgcaaccaatttggcactctacctttaaagttgttattggacaaatagagcgattttcagattggggactttttccccataatt

SEQ ID NO: 1031 - DNA, 787 bp, Glycine max
aacatggcctcagggaacaaacataacaagaatatcatactgagggctgtgatagaattgacataagttgaaaccaaactatataaggtcaggtgctaatgcatagacacaccacaaatagaagtactaccaagctgctgataacaagaaaatgtgtattaatatacgagcacaaaattagagggctgcttacgctacataaggagaaagaggcttctccactttagatgacgatgttgtctgagagatgccatctactcctggcacactacttggagtatctgaagcacttggttttggcactgtctcactgatctttgttggtttcccaccaccaggctgagatggagaaggagatgatggtggcttcaaatcatcataactgataaaataaacatcaaattagtttatgcctcctcagtccacaatgaaaaaaattggttgtatcctaatccttattagttattacataatcagaaagactaacaagtttcactgcataacattttaatatctgttgccaaggcaatatatggaatttggcttacacgatataaggagaaagtggttgttttgccactggtttaagttgtgcagtttcttgttgagtggcaactttaggttccacagtcacaacattagcaggggggatctggaacactgacagctgcaatatctggtttctgaaccatccccataaacaatgaataaactaatatcacttgttagccatagcaaagtagaatagaatgggtaaatatgattagtagcctcatgggcagttgaa

SEQ ID NO: 1032 - DNA, 743 bp, Glycine max
agtgtataaagcagttagagcaggttggttgtccattacttgctttttaccactatctaattggcagctgtgtaagatgtacaaactgtgtagagtgttgtgtgtcatgtgttttttttgttatcacagtacatatcatatttgttaataggactttgtgggatttcactacagaaatctgtgtggcaaatagtcaatttctttggaatagtaattctctttccaattctgaatgagaacacattttcagtcgctttgaattctcttattatataagaaaactgggaactgatggctgcatgattaagaacatcttataattctgctcagcaaatttgcttctgaaatgttttatcatgaaacttctaataactaatgcagctgctttataattgtatttgtaattaaaattattttcttgttgaacagttaagacactcagttcagattgactagtctattaatttacctttatttttttgttctatgccttggctgatatcatatattttggagtgatgctcctaaatttcgtttctgtccattataattgaatacttgatgaggttatctctatttttaatggcttggctatatatatatatatatatatatggatatattttatcccccccccataattttggaagataatggtatttcttatatcttctttatccctcttaataaattaatccttttcccccagaaaataaaagtttttatcatcttaaacattcaaa

SEQ ID NO: 1033 - DNA, 767 bp, Glycine max
atgcctgcacaaaaaacgctggggaagctgctggagcttatgttggtgttttggacctcataaaaacagcaagagagtgggcaatgctgtccttgttcctgaacctgttgaacctataggcccagttggatttcatcctgctactgctgcaccaaatccttcaactgctattgtaatgccattcattgtccctccctcttcacctgcatcttttctccaatctgatcctccatctgctactcaatcaccggttggattattctccctcagttctctcactgttaatgcttctggtggacctgcatccatttttgccataggcccttatacctatgagactcagttagtctcgccacctgtattttctaccttcacaactgaaccatctactgctccgttcactccaccacctgaatctgtgcagctgacaacaccatcatcccctgaggtgccatttgctcaattgctggcatcttctttagatcggaattgtaaaagtaatggtacaaatcagaggtttgcattatccaattatgagtttcagccttatcaacaatatccagggagtcctggcacccaactcgtatcacccagatcaatcatttctacttctggcagttctactcctttccctgatagacacccagttctggaattccacaaaggggaagcaccacaactcttgggctttgaaaactctttgaccataaatgggattcaaggcttggactgggtcttttgcgccaaatgtgcagggaagggtaaaa

SEQ ID NO: 1034 - DNA, 863 bp, Glycine max
  misc_feature (819)..(819): n is a, c, g, or t
aagtttagaaaatgatcatgatgtagaggcttctgattttcaatctctcatgtttttctttctgtcatggatcaaaccgcgtgtgagaatataaaggaaaggccgtggcatggaaagaacgtgacatgtttggcgaccaatagcgtaccatacacggtttcaaatccaatataggttatactttcaaaatcaaattttcttcctttatgtttaatgattcagattaattatgctatctcttcaactattaacacagttgtacaacataaaaatgaaaatttagatgaacaaatttcaactcaagtcgttaacaaattcaaagataagcagtcaaaacacatcaagttaattttcttttgcaaaaatgcattacaccaatttcatacccgaaatctaggaggattaaaaacaaccgttgaattgccattagagtaaatcaatgaaaaacaaaattcttaaagattactgtcatggggatgtagctcaaatggtagagcgctcgctttgcatgcgagaggcacggggttcgatcccccgcatctccattttcaattaatttgaaaaataagcaatattctttttatttttctcttatctcgaaaaagcggaatctgccatataaaaagcacacacattcccgccaatatgcaagagagcgggtgacgcaaaactagggtttctgttgctctttcccacctggggagcagctctggcccttggggagggaccttcctctttgcgccgagtggctggagcaaacccctcagctcccacgcttcccggctgtggcactggcgccggcgctagacgaagcctggncacctcattccggcacattcctctgtactccctttccctattca

SEQ ID NO: 1035 - DNA, 641 bp, Glycine max
atcacaaaaaaagaggtagcacttatgtttccattgtaatacactcgtctgtttttaacaaaccactatgcaatactgacaatagtctgtgtgcaaatcacattgggaaaaattagcatcatgacttcacaaatgctagttaaagctgatgagccaaaaactaataccatcaaaggccaactgaaacttttagatggatttggctcatagcatccaaggccaacttatagatgtagtgtagacttaatagaatttaataacaaaactacgccaaaagagtatagacatcacaaacaatacaaccagaagacaacagaagaattccatttagataataagatcatttaacttctaggcttcagctcccccattattgaatatattcaaatcaatgcagacaataacaaatatatagattttttatgtcaagtatacacgcatcaaaccaatacttactgcaaaatgtaggcatttgcatatagtgaggaggactttctcagtttctttttctgctatgccatgggttgctaaagcctgatccaagcatcatacaatcactcagaagtgaagttcataagaaaaggtgagcaaggcaaataagaaaaacacaacaccttttcaacaaattgatggaaaacagc

SEQ ID NO: 1036 - DNA, 694 bp, Glycine max
gtatgcctgcacgcccattcacagaaaaccatcactatatcattcaggaatacaacatcatttaactattacaaaagtgagccatgttatataaggcctaggaagaaagtagcaacgagtagaatccctacttataacttttctttttctttttcttcaatgattgatcaaatgttaaaaagtctccattatccttgccccttcatgacggcttcattttagttcaggtagcctacaatgactatttcttatgtgttggaaagtcaccttaattgtggtcactcctagcccaccttagttgtggcaggtagccgtgggcaaagaggaatgtgttgaagtcccacatcatggcaggtagccttgggcaaaataggggcatattaaagtcccacatggctagagatagtgccagaacaaagtatatatgtggggagcaatcaattcctcaccttacaaatcagtttcctagggttgagttagatccaaacccaaattgtaacatggtatcacaatctgtcttagattcattaaggcattaagtgggagaaatcatcaccttaaaaaccgattttgtaggattgagttaggccgaaacccaaattgtaacattaagcacacaattctttggataaaagaagacatctttctaaatcaatttaaatagtcaacagcatgttgataagtaaacactacg

SEQ ID NO: 1037 - DNA, 784 bp, Glycine max
  misc_feature (690)..(690): n is a, c, g, or t
gctcgaatatctcgctgctgaggtttgttttgggtttccgattaggtttagatttgattagtcatcgtgttttttgtcaatctgttttttcttgttttaatttttgttttaagggtctgatttttaattgtgttctgattgacctaatttatttttgaatcaattgttgatgatgtgtgtttttttatttttttaggttttggaattggctgggaatgctgctagggataacaagaagaatcgtattgttcctaggcacattcagcttgctgtgaggaacgatgaggaactgagcaagcttttggggtctgttaccattgccaacggaggtgtcttgccgaacattcaccagactctgcttcccaagaaggctggaaaggggaagggcgaaattggatctgcctctcaagagttttagggtttttgttttacccatttggactatagttttgattttattgcgtttgtaacatacatgtttcggttattttctacatgtcttctctgagaaattaggtgcttctcagtctgatgaactggatggtgtattatcacttttgaatcagatgtgaatgtgaagtgctatttggattatctgtcgaattaatttattttataacgatagtgtttcataagctggcgcacattgctttttgaactttgaacagtcaattgattattctatatctnctaaatatatggtcggattttagcttcttaatacgagtgtgactgtgctgaaaactgtatttgccctttttggtggcattgttgcaccaaattg

SEQ ID NO: 1038 - DNA, 775 bp, Glycine max
acaatcattgcctggcttctgaagacttatgtaaccaaaaagaggtgtcattgcacttcttcattgactcactgttgtctttctgcaagttttgttggaaaaagaaaataattatcataaaaagtgttttgcgtgaatattttatatattggttgattctaaggcaggacttgtagacaatccttccccttccatatgccctcaaaaataaaataaacttgagtatgcttgtttttgctaaaaaagtattattcccataaatataataaaattataaaaattgaatttttagtgcaatttctgtttgttgatcattaacttacatgtaatttgttgagttaattatctagttatgactttgctgactttgctaactcatgcatccagtatgcaattagtgaaaaatttaaactcattgcagatttacatgttaaaatatttgcatcataaggtgctacaagtgcaaccagaatttcttacttgcaaatagtatgtgccttacattacatatggaattgctcgttcaacttaaaaattttcttctacaagaatgattattattttatgcatgtcccgctgcacaaaaaggttggacctttctttattaccatactaccattaattatctcttcttatcttacaatgaaataattcatcctgaaattttaaaatcctgtagaaagctactgtgaaaatgttcttttcttgaaaactattattatgccacttttagtgcccatcacttaattttaatttcccaataatggaaaaaatt

SEQ ID NO: 1039 - DNA, 755 bp, Glycine max
atgccacactccacaagcaacagctattgttctcaaccccaataaggattccacttctctaggatatgaaacattttgcctatctccatggcccaagacaccgaatgttccatcaccaaatgtaaacagctgccctgttgaagttatcaaggctgtgtgccatggaccacaagcaacaaatgcaatttgaagtccctctaatggaccagcaattctctttggtatccaatgactgacatcactgccatgaccaagaagcccagcattatgggtaccatcaccccatgtatatagttccccagccattgtaacagcacatgaatggaactccccacaggcaacaaaatcaacagttgtagaagtcaatgcttcaactagacgaggttgaaccacattcttcccaacaccatgaccacggcatcctcctgattcttcgccccatgtaaaaacttcaccttgcctagtgactagagaagcatgtctaacaccacatgctatatgatgtacatctaaaactacattagattccagtggtctggggagaagtacatctgccctcgggctgaaataatttacatttttatcagcaccaactttaacattttcacaggtaacctctccccatatgtatacatcccacagagcatcataatcatcaggtgcagatccatgactagatgtactaagggcactggaaacactgacacgaaatacatctgaagcagatcctttcacttgcatgtttgttggggtct

SEQ ID NO: 1040 - DNA, 814 bp, Glycine max
atcgacctgcagcagttttagcaggcctaatgaagggcggagatgaagatcttgctagagatttccatgatagagcttataaggaggcaaatattgtacagaagagaagaaagtcgaggttattctttgcctcttctttctttgaaatttagtttttttttttttacagaaatgggcctcaaagcaagcctaaattttggttcatttcttttaatttaacatcatctttatccattgtgcattttcttgtggattatatctctagttttaattttggaccttcatgaaaatactattaatgcaaaatatactagcatggttgttttagctgtaggatatttgctattcatgaaaaaataagtcatggtgtgcatgcagtttgtcttaaaaaatattttatgtaacatgtaggcatgaggatcgtagttagttacaagatggatttacaaacattttttttatctgtcaattaaatagctgatatggtcatctagtaatttctcattttttattatctctaacattccaagtttgataaagtgtggaaattttctaatacagaaatgcaagttctggattatcaatagcatctgttcatggtgctgtactagctttggtagcttctgtattatcagccccatatgacatgcccaggtttgtctagtaataaaatccatgccttatgatttgtattggtaatttggaatgcctgtaatgactcagtgaaattcacttatgagatattgaaaaaagttaacattaggtcaatcctactgggataaggcttttgagggtggtgaatgtcaatactttt

SEQ ID NO: 1041 - DNA, 669 bp, Glycine max
atttgatggattggacgccctataacgactaacggagtgggagtcattggaggagtggtcattgttctgttgaaaatatatcttcccttggacattagacaccacccacaattttcacatatcccaccctcatttatgtgcgtggccccccaccccgcttcaataaataaataaattgttcaacataacaccaaaaattcaatatatgttcgtgagcttatatatagagtaacattgcacgaacattattgactaggtttagctagcattcaactgttttatacaatgatgtattttatgaggtttcaaacaaacaaaaggtatggtgtagtttccatgagattggtctaattaagtgtctaatgcagtatgttcccgcaatgaattttaaagaaacttgttttacagtttaataaactgtttttggatagtaatttattttcaattttgctttgagctttatccaaaataaactatttttggatagtaatttaatttcaattttagtttgcgctttatccaaaaaaaattgttttctttcttggcttgctcttcatccgaaaaatgtggattagtagaactggccatgacgttcatgttttaatttgaacagtctatatgcttggtctcgagggttatgagttgggcgcaaacgttgcattttaatcc

SEQ ID NO: 1042 - DNA, 871 bp, Glycine max
aaaacacaaagcctgaacttagccctatcaaggcagtgcctatgtgtaatgctgctccactgccagatatggccagcaaaatgaatgcaattggtgttggcaccaaggctgctgcaaaccatccagttcttgcaatgtgtatcctcctgcattgtcatacaacattagttgattaatatttttgttaatagaaaaaaatactaactgcatgtttggtttcacagcatgtgctcttacgtggtcgttaaccacacatgttggcgaccatatcaccacacccactgtcaaccgccacaaccaccgaccatatcaccataccgcgaccaccaactaccttatccatcattaacgttggcgaccataaaccgcaacgataaatgtttctctccaaccaaaatagagagaacatgaaaaaaaacaacatagaagaagaaaaacaccatgagagagaaacaagtagagagagtgtatgagaaagggaaggtgatggtgaataaagagaaggagagagaaatacaccaattgcttgttggtaggtatggatccagcgattatcggagttagatactccaacgcgaaatcaaatcttttcgtcatttgaacactaaatatggggaacgacttctctacttcatccttgcccaaattaagaaggaacctttcaataaccagacaaacgatagaagtcgaaaaagagtggagtcctggcaaaacaatgcacacactggattacgaggcgaagttcacactttttctactgaacagcacaagcggtagatatgaagaggcccgcggtgtgcgcccattattgggggggctctcagggggggggggcttcaaaaatcgagggaaaatagttcgaaaaaaacac

SEQ ID NO: 1043 - DNA, 611 bp, Glycine max
gcagtgagcaagacattctttgattttgctgaaagaaaaataatcatggtgtctatttttcaaggaactagtgccgtagtgggccttaaggtttacatggagtctatttttcaagtttataagcatactttaacatacatttgaggaaatcatacgatattgaagcattgaggggaagtgtcgtaatttggaactacctgatccttgtttggagaataaattgcagaaggaagctttttttgcaatttgggatttgaactctgatgaaactatagctggtttggaaattgcaaggatagacggtgatgaaataatgtggtaggaaatgcaaatgatagtgtgtcttgacagtgggcacgccgaaacatgattgttacgtcaaccaaaactactcaattaggggagagctacatctcattatacagttggattctcagcaaaatatttatgtggaaagctgagaactaatggtttcataggatacttttgcttaatttgggggtgttttcatttggtcaatttagtagtacgttcaatggttaatatatatgccttgaaaaataaatattgtgctcaacaaattcgcttctccgctcttcctttccaagcgg

SEQ ID NO: 1044 - DNA, 681 bp, Glycine max
taattccttctaggagtgggctatgcaaccaaagtcatgcttaaggtacttatagtcacagcttggtttcaacgtatttggttggatatatcatgtatggggtaatttaaattgtctatgcggagtaaactgtactaagcatccttgtctctgtaatgtttttcttattcgggtatttctggtaccctttaataaaatgttttctttttgcctagaaaaaaaaaaactatgttacaatttacaacactatcacttacgttaagtctccctcccactaatgtttccaacatcgcaggaaaagaaataccggacataataaagagctaatacttctgtaaaaaaaaaactaatacatgcatctgtcatgagactcttgactattgttttaaaaaatgaagtatatagtcatttggaaaaaaaaaatgaaaactatttttttaactttttgaagaaagtttttcataccaaaatcgcttttggaattgaaaaaaacaataaattaccagccaaagtccatagaaaaacaataaactatttttcttgttttaaagcctatgtaatgttaaacacaaacgttaaagaaatttcttattttgggcaatattgcagcatatattactttttagcatctaaacttatgttacagttttttaaaagcatcataaattacagaaaaaaata

SEQ ID NO: 1045 - DNA, 888 bp, Glycine max
cctgacttgcatgcctgcagattaggttagtggttgcagccaaactgttaaagttacatgcagatgtttcaagcacagtagtggtcttgatctgtttaaaaagccaagtgtgcaaaacaccttatgtttaatttagccaaagtcttaacattttggttagatttttattcagaatctagagctcagaaaaatcaatgtaatacgcatattgtgctattgcattgattgacagtaaccagtcagtcagttgcacaatttagttgtgtctaggtgtgactggtggcagtttttagccttcactgagttccttaaagaccatttacattgccaaccttctgttccattttcattcactcccattaagaaaaaagagaggaaatattggattctaagagataagttagtaaggacagctcaataccaagtgtgaaacccttgaaaggatctatactattctgccgaagttttcgatgcacccattgaaatagctgcaataaggaaaggcagggatgaagttgaaggactggaagaaatttttcattgtcattgggcagagtttagactcaccttcattttgatctcttttcttgtttgataaccaaatatttcttagttaactgattatgctggcagatatatatgtgcaagaaaaaagatctctaggattgtgaggatatgatggataaagtgaaaagggcaaagacctttttctttgtggatcattacgagtttggaagtggattatatttacaagagtcttagttagatgtgggcttagaggaaaacaatttgattgaatccaccacggtggtgggcgtttcttttccaaggcataccatgaggggtgacttgagcattgcggggcctttgcctttcaaaaggcatgga

SEQ ID NO: 1046 - DNA, 701 bp, Glycine max
  misc_feature (674)..(674): n is a, c, g, or t
agcttgcatgcctgcagaagattgcacctgaggcttctgaatatggtatttgataactggttatagattttttttcttttaattacatgtagtgcatcactgtgttgtgttgatgagtaaagggattcatctgtcattaaaatgtttataccaagaattccctttgtataagaaattgatgcagaaaattggtatggtttgtaaatatgttggcatttttgccatacaatgtacaattgctataatgacatttgattattcagatgctgatcagtataatcacttttatcttgcaaatacaaatgccgggactactttagaagtgaaggaggggggaaatgagggaaattaaatggataaagaattgcagcactcattcatgtctgattttcttacatccattttgtttgtcctcctaagcgtatactagggatgctacttagtgtctcttccaattctccatgtactttcctttggtcttctttctcaaagtgtccaaatcacaaattagaagaaggatttattttaaaccagaataatttgttcaaacaggaaagaattatctacaatagaacaagtacttactgcatttttctgtcttttttttacatgtattctaatagtttcatcctcatatttcaggtatatgccaaatttggtttttccaatttgcnaccttataacccaactgccttttgtct

SEQ ID NO: 1047 - DNA, 674 bp, Glycine max
atttaaaataaatcttaagatagctacttgtgattccaaacatttttcctttcctttcacaatttttaggggtggggaaagaaaagttacaatgccataatccagtttttaggatcctacctggcatatcaagctttcgctctgtctcacggattatatctccaagttgtgacttatcaagggcctgtgataactcaaagcaatcaagcagagcataacctcctactcctacttaagtagcattaatagtacccattttctctatttaaaagctcttattatacacacacatttaaaacccaaatgcaatgctatttattttttcctcacatacaaacacactttatagacatttacagattaagcgaatactgtgtaattttaactaaatggaactatccaagtaatacaaacctcccaaatctctttatcagagtgctcatcaagaggatcaagattgcttcgaatggtgccttcaaataaggttggatcttgtggtatgatactcaaatgacttctaagatcatgaagaccaattgatgaaatattaatgttgtctataaggatactccctgccttcggttcaaccaatcgaaataatgcttgaatcaaggtagatttgccactgccagtacgaccaactattccaatctctttccaccaagaaatgtgcg

SEQ ID NO: 1048 - DNA, 718 bp, Glycine max
ttttcttgggccaaagtggaggacttgacaccgagggtaatgaacttccacgtttagtctatgtttctcgtgaaaaacgtccagggttccaacatcacaagaaggctggtgccatgaatgcacttgtgagtaactatagaaaatgtggaaattacttatctgcatccacgtatttgtctcaccacaggtgattcatataactgtttcaggttcgagtctcagcagtccttactaatggacctttcttattgaatcttgattgtgatcactacataaacaacagtaaagccttgagggaagctatgtgctttatgatggatcccaaccttgggaaaaatgtttgctatgtccagtttccacagaggtttgatggtattgataggaatgatcgatatgccaatcgcaatactgttttctttgatgtaagcatcgcgcaccatattaatatgttttctcttgggttttaggtcaaagattatgttaatgatagtcaacttcttgttgcaaggatgatcccttgtacctcacatatattgacttaacttttttgtgttacttattttcccaacttgtgtctttctgaacagataaacttgagaggtttggatggcattcaaggtccctgttatgtgggtactggatgtgtctttaataaaacagctttttttggctacgagcctcctattaaacctaagcataaaaagcctggggtgctttc

SEQ ID NO: 1049 - DNA, 676 bp, Glycine max
agaaacattatgagatggatcaacagcagacacaagttgaaagtttttaacagaagccactgtaacacgacccttgaagtttaggcaccagcattgcagctgctcatgccatctaggagccttatttttaagtacaagaggctcagctgagccttggctctctactggtagtagctctgggaggcttgcattgtctaaatctctaattggaccctttcctttcagtgctggtgagggagaaaaaggctcatcaatgatttcaggaaaagtaggagttggagcattgccccctgcttgaacagctgagacaggtatggagttcatggtgcagtgcattctccttggccctcttgcacggagaacattcaactcataggcaatggtgctaacaacatagttacatgctggaactctaggagatacctgctttgaatgaaatctcctactaggctgactatctggttgaattgcagctccatgtgggggttggctgtcataaatagtgaacttggtacccaaaaaattagacctgtcaaagtttgtcatcaagttgcagatatggtaaggagcaagatgaaaaataataaaaaaaagaaggcaagtttcaatcaaactaaaacttgcctgagttttccaacatatgtgttgctggagcgagaaaaatcatctgccacca

SEQ ID NO: 1050 - DNA, 670 bp, Glycine max
ttttttaattataatttctaatttgatgaacacacatcatttagttgactggatctatttacttacttaggggcagagttatttaaaattacgtttttatatttaggttgaattgttctaaaatttatataattggatcttttatttcttaaaaattattctaatatagtattatttccactcatctaatattattgccattgtcaatttactgaactaaacagtgatgggataataaaataatatttaacagctaaagtttctgatctgatgcattatgttctggaccagtggacctgatatccagcaaatcaatagaattttcgtagtcaactaattcttgtgacagagtagggagcttctggtgattcctttgttattctcagcattttgatgtagtagactatttgagtgaagcatctatcatgcgtatcatctggttgtaacaagtatcacctttgcttttcagactgctgcggagttggagaagcgcaaagaaaattttactaaggagcttgattttgtttgtgctgatgtggtatgcatctcaacaagttatcattttggttatagtatattatttggtgtctaattgagtctcccttccattcccagaagctggttaggagtacattacattcccctcctgtttctttacccagcaaataag

SEQ ID NO: 1051 - DNA, 659 bp, Glycine max
tttttaattataatttctaatttgatgaacacatcatttatttgacaggatctatttacttagggggcagagttatttaaaattacgtttttatgtttaggctgaattgttctaaaatttatatgattggatcttttatttcttaaaaaatattctaatatattattattgccaatttactgaactaaacagagatgggattgtaaaataacatttaacagttaaagtttctgatcttgatgcattatgttctggaccagtggacctgatatccagcaaatcaatagaattttcgtagtcaactaattcttgtgacagagtagggagcttctggtgatttctttgttattctcagcattttgttgtattagactatttgagtgaagcatctatcttgcgtatcatctggttgtaacgagtatcacctttgtttttcagactgctgcggagttggagaagcgcaaagaaaattttactaaggagcttgattttgtttgtgccgatgtggtatgtgtgtcaacaagttatcattttggtgatagtatattatttggtgtctaattgagtctcccttccattcccagaaactgtttaggagtgcattacatttcccttctgtaataatcgcacatgcttagtccttgaaaaactcagtttat

SEQ ID NO: 1052 - DNA, 767 bp, Glycine max
  misc_feature (713)..(713): n is a, c, g, or t
ctgaaacaacagcctcaactccttccaaattatagacattaaatgctccaacagcatatccacccttttctgcattctttgtgccaaaacaaaaaacagcattaaaatttaaaagagaatcagttgcacaaccgtgaaccaggtgatccttacgttgataatttcttttgttgatgtaagtctgattggactagtccaggactttacaacttctgcaaatgctgtgctgttaccaacattacctaccagaagcaaattatctttgataagatgaaatatattgaagaataagggaagatatagattttacggcaccagatactcagatttggtaagaaactgtaattaagtaaaagtaaaaaaggaaaattacaaaaatttaccagggaagacaatgtaaggaactccaggatgtctactttcagggcctaattgccacaagggaataccagcaagtgcttgtccaactatcttcgcatatcttgcaccaagggcttttgtagcaaggtctgaagatgtaataccaccccagaaaatgtactatatttgtcggtgtatgattaaaaactcaggacacaatcaaagaggaagaatatgcggctcggttttctggctttgatttgcacgaaactattttatttcagttgtaaaatggagatggaaaaatgccatgaagttttataagatctctagtaacaaattaaacagcaaanatgattttgaaaaaatttcttgctttcttgagcatgaaaccttagtgtcaaatt

SEQ ID NO: 1053 - DNA, 692 bp, Glycine max
ttgttcctgccggggacactgagtttgccaaagatgcttcctttggctacaaatcttcaaacctgtgtgatgtaaaacctctaatccctttattgactaaacattgtagtttttttatttttcataatttggacaaattcttaattttgagatgctttttttccaaatttagtgggagaggagaaaacaaatggccgaatacttggaagtagggttgcatcgatttctatccaacttttgaggaaaggtggtccagacgcagtttgtcggcatctatgcagtttgcagaaggtatacagataagagataagagatatagttaatgcatctttgtttgtacatttttaagttctaaaaaagaacacgtggctttactttgtctaggtaagaaattacaaatacgaaggtatattgaattcactcactatgtctgtatctattgtattaagcaggggtcaatatgcatagttaatgcagctagtgaaagagacatgactgtatttgcacttggaatgatcaaggcaaaactttcttctcgttcatgcttttttgtccctttttgctcgttttgttactaatgcaaatgtaattggactgttttgtcttattaacaggcgggattgatgggaaaacgttttttgggtggcactgcttgttattttgtttttacacttatgggaattattcctaac

SEQ ID NO: 1054 - DNA, 650 bp, Glycine max
cttgcatgcctgcagatgacttttcggtactctacatctatggtaatttgacaatggtacctaccaactgctatttaaaagagaattatttttcgtggtcactaccataatggcttactgtctttttacttattgaggttctatcccgtgctttattagctgaaagggatgggaagattgctggaaagctacttactgttggttgctgatttaatcaagctggcaactgaatgaagtggtgttaatcaaattcaaggaaatatctgtacttgatataaataaatgatttcatgacaagtcatttctgggcagggtcgtgttagttgttactaggaattatgttttattttattttattttattttttctatacaatagcaacaattcggtttgagtataagatttcatgtaaactactcaaatctcttatcacttagccaactcttgagagttaagggtcgtgttagtcgtcgttacatattggaaataagacaccttgagaaatttccatgttcttataaacaaacattttcaccaacatttccatctttgtttttttctcacttttcaccaatgaattttgtatccagatccatcctgtggctaacaacagtcaagtgataaggagtgtcaaactattgagcaacaaa

SEQ ID NO: 1055 - DNA, 703 bp, Glycine max
  misc_feature (693)..(693): n is a, c, g, or t
attagatggtagttgaagcaatctgcctttgaactcttcttctggctcagcatgcatgcttgtgttcatactattactatatccacctctctttatgtctcattctatttcgtaagtatttgatattgaattttggataatgattatttgctgcaatagccactttgagcttagggagaacttttctattctttgatggctgcaataactgcatatggcattttaatatagtttgataataatgtaagagatgggggacctggacggctggacccggtaatggcaaagacaatttcttttagaaaaaattaattaggacatttcgttttgtcacaagagaaaagtgaatcttaatgtatgtaatagataatgccacaagaaaaaattaaaaaactagaaaaactaaggccttctatcggtcagttgacctcaaaatacgtactcgagtactgtacattcggatgttggaggtataaattaaaagtcatttttaatttatatttatcattagtgttgagataaaattgaattattcaacttgagaaaatgattgataattcagttggattgcccctttgacttgtatgcttgcgtatattggtatgaaatcaaatatgccaaatattatcatcattgaaataaccttttgatattgatagggtacttaattatttcaagaattgttgtgtgctngttaatcctt

SEQ ID NO: 1056 - DNA, 870 bp, Glycine max
  misc_feature (814)..(814): n is a, c, g, or t
  misc_feature (820)..(820): n is a, c, g, or t
  misc_feature (837)..(837): n is a, c, g, or t
aattgaagacttagggaacatacctaaccacactctacacacagtaactggaaggagctaatttattaataggaatgggatacattagcaactaaatgacccttttggcaaagctcaaagtagaggcgagcgcgtgccatatgtactaggcattagcattagcttctttgaataaaggtgaccatttccaacttccttgtgaccgcaatatatagatagatgaaaacgtgccaactcattgtgccatttgtataatggaaaaaaggattagatttaggttgtatgagaaaattaactaacttttttgaaagttaaaaagctagttcgtaattaaaaattaaaaattaaattaagagtgtttcataaaattaattattaaaataataagaagtataaaataataaaaaataataaaattatgattttttttaaaataacaagaaaaataaataaatatatcatgcataaaaataagaaaatataaaaaataaaaaataaaaaataatgtttaaaaaaatattaatttaactaatatttcaaaaaattattaaaaaacttacttatccaacaatcaaattattattaccgacagtggcagagttgtaagttgtcatcccttgttgccccacgttggcgttaccggtgatgacgatcttgtcgactatgaagcacggacactaacacggacactggacatgacacggaaacggacatgtgaacacctgtagtgtccaaaatataaaatgtagtatgggtggtttgtcgatgtcggacactgacacggacgcgtgtcggacacccgacatggcagggngctggngtgtccatgcttcatancttgctgatgtcgtcgcccaagaacaccaattt

SEQ ID NO: 1057 - DNA, 1002 bp, Glycine max
  misc_feature (876)..(876): n is a, c, g, or t
  misc_feature (892)..(893): n is a, c, g, or t
  misc_feature (898)..(899): n is a, c, g, or t
  misc_feature (902)..(902): n is a, c, g, or t
  misc_feature (904)..(904): n is a, c, g, or t
  misc_feature (918)..(920): n is a, c, g, or t
tggggtagttgtatctgaagcattcactcaatttcaatcaccaagtttcccagtgcatccttatggttgtacaagtgttggtgctagtgctagtgctagtgttggtggtattggttgcactagtactgttaatgctagtgttgttgctggtgctagcacaacagttaggttagcaactactgatccacaagatcctcctcaaattggcactagtactgttaatgctagtgttgttgctggtgctagcacaacagttaggttagcaactactgatccacaagatcctcctcaaattggcacttcatttggtaattctgtgtttccaaatacaacaggaaacccattgactcagtttcaatcatgttcatcaaaatcaagcttcccaatgcttccctacgacagtagcagcaacagtagttaccaacaatttccaaggtacattccatacctaatgactgggattggtccacaaggtatacctgcaatgatgcctcagcataatcaaggaaaattttggcttcgcccaccacctctctcagactttccaaactttgtgcatgcctgggaggtaaactaactaacttgtctcattattctgataatttctaaaacataatggatatatatccattatggcccttatatatatatgtgggggttacaaaatacaaatgacttgtcagtgcttgattgaagtcttttaaattcatgaaaaaccaaccgggttaaccctaagcattttgccttaatttttggattcagatttgtgcgaccggtacattacttgtagctgtttactcgtttaaccttaataagtataatattgttttttggatttttctaaaataaattgctgagggctaacccaactaatanaaagaggggggggggnnggggnnggngnggggttgggttttnnntgtttttctcttccccaacaaccacaaataaaagggaaagggtggtgtgtcttttaaaggagtgaagttgtttacaaaatat

SEQ ID NO: 1058 - DNA, 814 bp, Glycine max
aaattgttctcaacatctatattctattgcaaaaactccatattttgcagtctaaagtgaaaggagaagggatctgtcggcatgaaaatatgtggacagaaccatgtgttatatcagcgagttttatgttggcaaaatgatatgcacttaaaaactaagattattaatataaataaataattaccccttataagaccatcaggttttaaacttgttctgccctttggtaaggattgaagggtggtattacccctctctcttccctaaagttattgtcaagggccaactatcccaaaaacttaacctcttttgtgaaggcacataaatgattttgtattagagattccccctcatgcaagccctttgggcttgacgtttgaagattgaacagggcacaagtccaactcacatcattttgaaattcaacaatattttaataagggttggcatggggtctttaataccaatgtcaatggcctactatctcaaacctcaaattgttaggagatatctcatgaatagttttatttattttatatcaaacaattatattataaattagtcaatggcggtgctgcataagcaagccactcggtaggcatatagaagataccagttttattaacaagaacgtaatttatgggagtgtctgcctggtgtgcatttcttggatgtgatgtatatgataaatgaatcaacttcctcacgatccttatcatcaaaggattaatatctcaagttaaccaccgggaagagaaatttgaaaatggtggagtatgctaattcagcaatattaaacccaagtataattgta

SEQ ID NO: 1059 - DNA, 815 bp, Glycine max
ttgcatgcctgcagcacaaggaatttgaggaaattgaagggcgtttacagcgacgggagccacttattcttgggatcacagcttcacaaagactgaacagacggcttcctgttgaggtcattagtgatcctttagatgatgtggagattgatccttatgaagatggatctgatgctcacaaacttagagaccatcaggtaccctcttgtgatgagttgtaaagttttttgttcttttattttggcctttaacccctgggaaatctacctactggctgctgactactgagcatgcctccagtgacttttgagccaaagtttaaactgaccaaagaaagtttgaatattgacatgttaatccctgttgactgcatgttaggataacaattggtctgatgaacattaggcttgataatttacattttacatattcaaataaaaaagaattgaagaacagaatgcagggccacacaataatctctcttctactagattgagattttatttgttgtaaaaaaagatattttttaattaaaagatgcttctaaaaattgagataattaatcgagatttttttataaggaaatattcaccaagacttatagtgttttttccaaaagctaaaactagtagcttctgtaaaaaaacaaagctatatcatcaaaccataattttcaaaccttatccaatgcaccctgaatagttaaatgaaactttcatttcttcaatgtctatgtatattggtgagaaaaactcttagtcttgcattggctagagataaggtcacaatagaatatataagtggaagacaaccct

SEQ ID NO: 1060 - DNA, 692 bp, Glycine max
tcagttaacaaaaacaagtgtaaattcaaaaaagaagcaaaatgccataatttcatccgtctccatgcatctttaaaataataaaaaaataaaaaaaatgaactaagtctaacccttcacctttgtttttaaggaacccaacttgatagaaaatattttccagataaatgcaagtttggtataaaaatcaatagaaaaatccctccagaacaaaagtcatttaaaaagaaaaacaaccaaaccctttcccaataggtgggatcagctatatggatccagcaatgcctttttaatggtttcaccaagagctttttatggtctccccttatttctaagaataaattacacttacacccctgaggtttcgtgagattgcacaaactctagttgcttttttaatgtttacaaaacctcccttgtagaggggacacagtgtaatgtttttcaaacaattaaaggggtcagtgtaatgtataaagggtgtcaatgtaatgtttttcaaacaattaaaggcaattaacataggggtagaaaaaataagggggtttgcacaatctcacaaaaccttaagaagagtcaggggggaaatcaataatgtgggagtatatgattcaaattgtgaagtcaaaacagcaaatagttgacttatagaataagatcccctcaaactttataaattcctgtgcctaaag

SEQ ID NO: 1061 - DNA, 812 bp, Glycine max
  misc_feature (793)..(793): n is a, c, g, or t
cttagctagtgcgcaagttggttccctcgaattagcacaatggatggatgactatgttagcaagagtaactatggaagtgacatttttgttaatacttctctcattgatatgtatgcaaaatgtggaagtgtggaatttgctcgcagggtatttgaacgtaattctgataaggatgttgttatgtggagtgccatgattatgggatatggattgcatggtcaaggatgggaagccattaatctttaccatgtgatgaagcaagcaggggtgttcccaaatgatgtcacctttattgggcttctcacagcatgcaatcattctggccttgtaaaagagggatgggagctattccattgcatgaaagactttgaaattgtgcctcgtaatgagcattattcttgtgttgtagatctcttgggacgagcaggttatttgggtgaggcttgtgcatttataatgaaaattcccattgaacctggtgtaagtgtatggggggcacttttaagtgcatgcaagatctatcgctgtgtaacattgggagaatatgctgcaaacaagctatttctcattggatccatacaatacagggcattatgtacaactctctaatctctatgcttcctcctgcttgtgggattgtgttgcacatgttcgagttctaatgagggagaaaggattgaataaggaccttggttacccgggaatttgaaataaatggggaagctacagggcattttcatgtaggggacaagtcacaccccatggcgttagagatattcgatgagcctccanagattaaaaagaaggttaa

SEQ ID NO: 1062 - DNA, 737 bp, Glycine max
atcaatgcttttagttatcctacattcctataccagtgaaaacatttctacatacaaagatgcctgctagacatatcattgtttctactcaatgcagagataagttcaggtacaggactttataagctatactcactatttctctctatgctgagaaaatgcttaggtgttgaaggcaacataagtcagatactgagacttataacatgagtaattcattccctatgtatgaagttatgatatgtccctatctggagtattactacctcaacagcaaagcgcgcccagattttgtcattgtgagcttccattaccccctttaagatggttaaacctaatcctctgattaagtcagctatttccaaaaagaaaccccgttcctcacaaagcatctgtcagaataaccaaacaaacatattatagaggtgataaagaaatatattaggaccaaaagaagtttaaaaagcatccactacctccactagcatctgacgaggtggattcagatcctcaactacaatagggcaaaccattgattgtgagccaacttcatatgcccatgtagccccaccctcaaagttgtctttcaaaagcagcccaccttccttattaataatctgcatatttaatgaaaaagggatcatcatttctttcattattaacaattcctcaaatatttattgcatcatgggtttagtagatatttgatttgagctaccataaatattaccatatac

SEQ ID NO: 1063 - DNA, 628 bp, Glycine max
atgcctgcagttaaccacacattaaagaccacgggagtttcgatggttgtatttgtatatacgggtgggaatttttctgattgtcttaatttaagattaaaatacaaaaatacaaatgctgaattctcttgaaaaaaaaatacaaatactgaattgtagcaaatcaaacttttttttctacataaaaaaaaacattttttttcctaaaaatgccttttgtggttgaagatggttaacaaccattttattttcagttatgtattcaaatagtaaatagtaatattcatttaacctaatattattcatataatcaaaactttacacaagatactagattaaaatctagtgtgatcattgtacataaaaagaataatcgaagcattacactattttctgtcaaaaaagaaaacaattgaaccgtttcgagcaaatcaaatcatcaacatcatatcaagtttataatcaaagtagatcttttctcgtatcatgtgatttttttatgtgtaaaaatatgtcaaattaagacaattttttttaagaccctaaatcaataaaaaaaattatcgaatcgtgttgggtcaaatttatttattaggaaaaaattcaatttaacttaaattacccaaat

SEQ ID NO: 1064 - DNA, 668 bp, Glycine max
agttgtggtcgtgctaggcttccacacttcttttgttgtggtgggaaaccaaatcagggtaatactggtgaacataaaggtagtacaagctaagctaatcaagttgtttgtgaagcagcagatgttggttcgtgtgcagggccacccgtaagtaggtccatttggtagtaatgctttatttccttatttcttaagcaatgccatcattagatccgaggttttttgttttggaagataaatggagtagttggtgggggaaaatactaaaatttatgaattttggaaatgatactgtattttatttccattgaagaatagcgcctttggtgctttacaattgatctcatggcctatttatttttcacctataaaaatactgttcctttgaagctaaataaacattaatcattcagatttatactatcattttaaattaaaggataaatgatataagcgcacgaatctgaattcactagaccagtgtgggagcttacaaattttaggcccaagggcctgtgttatgtgtactgaatccactccactaagcaatgtgaagtgtccttattcgcccttttatacatcaatagaacaaaaaaatacttgtcaaaatctgctaattagtgaaatacacgaatttgaaccaagttccatcgtgattcacttttttg

SEQ ID NO: 1065 - DNA, 874 bp, Glycine max
gttggatatcatttacagttaactattaattaaagagtattatatcatgattcatgactttctgtaatttgttgcacggtactactatttatatcatgtgtttgtggtcttgtggctaatgtaatatcacaattgcatttcactttatagtttctagttttatgacaatgtaaggcactttattgtgtaggccattgcatcaattacgttctggagagtcataccatcttggaaggactttaaccaatggatcagagtcataatcattgtatcagagttttagtaaaacctaattgccaaaggattaaactgtaaactgtgtaacagattttcaccgaaaattaagctgccagttattaatccaatccagaacccaggttataaattgcaattatgagcctgaaactgtaacagacatgaatcacatgatcacaacttctttggaaatattttcaatgtcattgaattgtttctttctggcgggttgttgcaaccttcacatgttttccttaatgaatattgatttccatcacggttgctgatggctttgatgattacctatatataacggacaaaagaattaagctcaaacttctcaccattcaaagattacaactttatttaaactaatatgtcaagcatttgtccatgcaatctctcctatatatgaaagtccccgaccatgggactaggttgaaaaccacacacattccccattttattaaaagaaaggaactggggcaacggaaaattttctcttaagaattgcgctaatatgatgaaacgctggagaatcccttcgattttcaaatacgtataaatgaattgatattattttgcctaattggctgcaatgttaaattctagccctggt

SEQ ID NO: 1066 - DNA, 840 bp, Glycine max
tcttgcaaaaccacacaaagaaaccgggtctgaaccaaagcttatcaagaggtattcctgcccctatgccggctgcaagcgtaacaaggatcacaagaaattccaaccactaaagaccattttgtgtgtcaaaaaccactacaagagaacacactgtgacaagagctacacttgcagcagatgcaacaccaagaagttttcagtcatggcagaccttaaaactcatgaaaaacactgtggtaaggataaatggctttgttcatgtggcacaacattttcaaggaaagacaagctttttggacacattgctctattccaaggccatacacctgctattcctttggatgaaaccaaaggagtggctgagccacctgatatccagaacagagaaagcaacaataaggtagaaagtattaacttctgttttggatcaaattcttcaagtgaaaatgtagttcaaaacatgatggatatgaaaggtaataatgatgatcccatgaattatttctcatcattgaacttcgaaggctgtaactttggggcgtttaatgaattctcccaacctccatttgaagattcagatggttgtttctcttttcccatgtcaggatcctttaattatgctcccaaatttgatagcgacaatttataataatgttactctacatggctttggtttcctttatttccctggttaccaaataatcttttgggttttggcttatttggaaaacccgggaatatcttggcctccccctttcttttttttggaaaaacaaagctcttattttaaatcctaccgggttcgtaaaaaaaataaatttctgcctgggcctcaaa

SEQ ID NO: 1067 - DNA, 917 bp, Glycine max
aagattcctttcatgacagaaaaacaacacttcaattaaaaggtattttattttggagacagggtatcttattgatgctaccttgacttcttacaccttagctctatcaactatctatgaatacataattaaaatgattttggtgaagatcaattggaattaaccttaaactacaaaatgaaatttttattctaaaggttactatacaagcaagaacatgaagcttcccaacatgtgcaccatatactacacttttatggaactaaaccattgcatcacatatggaagcataaaatagtcacccagttcttcttttatggtattttggtaaactgctatggttataaatagctttaaaaatcaggataggaagtgcaattccaagcaaactcaatattggatataggtttgctgaatcttgaatgtaacaattttacagtatctgtggtacaatttacatgtttgaatgctttccaaagaaatgtctggtatacccaataacaaagaatgacaagaaggcatctacaccaatattattcatgtctaaacatgaagacttccccattttcctcttttgtggaagaagtcctaaactgaaaggaaactgatggagtgcacttttctgcacataatgttttttctgcattaacattgtccataattctataaaaattcaagttgatatagatattatgatgctcttcaattatctttattatctgatgtagccctataattatcaatacacttagaagaagtgaaaatgtgctactataatggaagaaattcagaccttcattgcacttggatagtcatatctgacttgccactgacttattctttctaaagaaaacaggagacatctgatctcagcagtttctattgaatttgactcctccaaaaattcctcaagtttg

SEQ ID NO: 1068 - DNA, 675 bp, Glycine max
acagaaggagattagagatggtgttgtgactcttgtgagtcatcaaagggaatgtgaatatcaaaaacgatgagggggcactatgaggatgggtgtgcactttttaggaaaaggtttgtggtgtggatgatgccactagggcagaggagctttctactctgaaatcttttctttttctgaatttcctttctatggtattttttttttcaaatcttgtattatcagttctgattctgtattttctataattctctagtatacatctaagttcctaccaagtatcctttcactaacaaataaacaattcccctaaaagactgggaggaatatgtttctgaaattgtaactgacattgaaagaacagagcccaaaaaggtttgctttggatacagtttgctctatgtgatcttttgcgatgaataaaatgttgtgttgaacctttaagttggtcaagtttatggattgcccacccaattgtgtagtcaactaatttcacgttttagttgcttatttggttttctgagtgacttatgtggtgtgcaatgtatctttcatctcttcatctcatgtgttaggttgtttcaagttggaggaaagctgttagagcgagctattgaaaaaactggatgcagaataaagtatgaagtatgacgttgagctgcattattctgtaag

SEQ ID NO: 1069 - DNA, 813 bp, Glycine max
gacttgcatgcctgcagtgccagtcataccacaaagtttggggaactatagaggtacatggtttgaaaacatcaaggtaagttcaaaggcaaatgaaattctgaaatgatggttcacttaatcagctcagatacaacatttccaacctgaagaaagaaattctggtaactgatagaagccagcgttacagtttcattttgaattggcaacccttcctttgcctcaactgcttggtgaaggccatcactccaccttctcccctatcagagtaaataaaaattacttgttccttgagatatcaacagaatttacttctcagaaatttgaagatgtgacagtttaattctttgttctctctagatagaagtggtagtgagtgtcagtaatatgtaagattttgctattggctagactgacactacaataattagatagtaatgtaaacaccaaggttttggcattatatcacaagcatgacaggttaaaaagaatccatatatatccagctgaccacagggtgtttaaagataaggacagcacctgaaatgtatcaaaaggtggaatctctattaacacctaatgtgcatttcaaggagtttccaggtgtagactgtagactaatataaatagtttctgtgctgaaacttcaagccaaatctagtgaatattaatggcaactattcttatagtatcaataattaaatataatgctttaattgttgaatagcgatcataagtttcccggtaaggacagtgccttaagtcatgatttaatactttttttcagccctaatctgaagcaaagttttggcc

SEQ ID NO: 1070 - DNA, 809 bp, Glycine max
  misc_feature (772)..(772): n is a, c, g, or t
gactttgcatgcctgcagcatggacacggggttgctgaagggaaaaagtcgacaagatggaagtgttggtggattgccttaacatccacaatctggcagcacagaaataaaatagtcttccaaaatgctacttttgatggaagtaaattgatggatgatgcggtccttttaatctggacatggatcaaaaccatggagaaggactttgtaatgcatattaatcaatggtcatccaatctcaaggaagggtttaaaagttaggagggactgggtgtggatggattatgtaacatattagtgtgttttcagcttggtccagcttaaaggatggaaccctgctggatgcataattacccatatgtatccatagtaccactggtactatttcaatctataatatatctatttttgctgagcaaaaaaataaaataaaatatagggctttttgattcttctcatacccttaaggttgctcaataaacactgcctcattcaactcaccatgcagaaatgcacttgttacatcaggctggtacacagtccacctttgtgggctacaagggcaagaatcattctaatggtatcccgactagctactggagcaaacaccttggtgtaatctattccaaactggccacaagccgagctttatatttatcaacctcaccattgtcattcaacttgctcttaaatatggatttcactcctattctggggtccatctaggcagggctgcttaattcccccgttgccttttttttaagggctttgnttttccaaatccttaggtatgtgcctttgggcccgtt

SEQ ID NO: 1071 - DNA, 712 bp, Glycine max
agcttgcatgcctgcagatcaagtgttacatgcaacagtttcttcgtggtgttgagcattgtcacagtcgtggtgttatgcaccctgacatcaagggctcaaatcttctgcttgacagtaatggcaatctgaagattggtgattttgggcttgcaactttgtttcagccatctcatgggcagcctttaactagtcgtgtcgtaaccttgtggtaccgaccacctgaacttttacttggagctacagattatggagttactgtggatttgtggagtgctggatgtattctggcagagttgtttgttgggaagcctataatgcctggacgaacagaggtagtattcctcttttgtcctggatatatgtgcattgtacattttcttggacacactgaagcttttacatgtgataccttgagcatcctagcttgatgatataagtctaaacaaataggtcctcttctttctcctatgcatattattagaagagagagatttatagattgactaagtaatgtaaaactagaagaagaaacccaaatgatcatcacatttctaacctaatttccaacatgagagttttttagccacttgagttatctgtaaatgtaatcatgttatggatgagaaatgagtttacaagttaggacagggtcttacacattgtgaatgagagacggatgttagtatccttttttggctaacatttctga

SEQ ID NO: 1072 - DNA, 761 bp, Glycine max
tcttcattccagtctctttgcatgccaattggttcattgccataaagaagtgtcaaagcattctcagccctagctgcatcgcgtctgtggtctgctaacacatgaaaccaaattaagaatacatcaagccagtctgagattcactatttggtcttcttagatgatcaaatcatcttagaaacagttctacattgctttcgccaacagttggctactccaacttcttctttaacaaattcatttcaaattatctacgcttgtatgaaaatcattcatgaaattctcaactcagcaacactcagcttaagctcttgttatcattattaataataacacactagaaatcggaatcatccttaatcaacaataaatttcagatccaaaacaagttgcaatgtaggaccattgtttcaaaagtttatttcatctgttattctgatttgactcattgttataacaatatagtttttgaaatatattcatcaagcaaatatatgatagtagcacactgccaaaaatggctgaataacttccttctgatgaagcatatgataccaacaatgcatgaaaactaccgagccaaatagaccaaactgtagatgcgccaaaagaaagatgttcaattaatgtgctcttactaaaataaaggcaaaactatcatcaaatccagataaagaactacaaccaaaaaaaatttgaaaagaaacgctggtgaaacaaaatgacagggaaagctcaccaggaacagggtataatcccag

SEQ ID NO: 1073 - DNA, 690 bp, Glycine max
aatgaaatggttgccaagaccaaagaggaggtcagtagcctaaggcatgtgaatgaagacttgcttaagcaagtggaaggactccagatgaataggttcagtgaagttgaagagcttgtatatcttcgttgggtcaatgcatgcataaggtatgagctcaagaattacctggcacctccaggaaaattatcaacccatgatctaaataccagtctcagcccaaaatcacaagagaaggctaagcagttaatgttagaatatgctggatcagagcatggacaaggtgacacagatcttgattgctacttctctcattcctcttcaccaggcagtgaagattttgagaatgcttcttcctttgatagctctatgcataaacatagtggtgttagcaagaaaactagtttaatccaaaagttgaagaaatggggcaaaagcaaagatgattcaagtgctctttcatcagcagccagatatctttcaggtgtctctcctagcaggatgagtatgagtaatagaccaagggattccctggaatccttgatgcaaaggaatgctggtgattctgtaaccatcactacctctggacagaaggatcaggaacctactgattctcctgaaactctagctcttcctaacataagaagagtttcatctagcgactccttaaattctgttgcagcttcattt

SEQ ID NO: 1074 - DNA, 761 bp, Glycine max
aaaagatatgtaaaacaccacaacatatattttcaatcaaagatatattggtatcttttaccaaaataaaatttatgacaacaatccatctatcccagcttcagaacttacaaaaataatatacaacctcaaccatatactttcaaatcctaagctatctaagaactcaaatggttctatgcagggtataaacctatactaaagtaaaattccttctttctttacactacaattgttcgccactccccgacataatagcagaggtctaagaagaaattgtgagggacttggaaacagcgagtagtagcagtgtgctaccacattgctcacctttcaatgtcttatttaggtcacaaagtctggcaacaattgtgcagcaaacctctttgggttttgcatgctgatactctcataagcagctgttgagtgaggagaggaagtgcttatggcaccaaactcgtttggttcaccaatgtccaagcttcttcccagttgaatgttttggtttgggagaaatgtttgatgagttcctggtaatgagtcaagaccaagagtgagggaaacaccattacctgaaagccttggtgtaaactgctctgtgtcaaaccttccaatatccccaattggatactgtccaaacccaccattaaagtttgtttgatttcccatgaaaaaggactcatttttgccttggctttcaaccccaaattcattgggagctgctcattggtttcatcattggggcttcacatccatgcttc

SEQ ID NO: 1075 - DNA, 658 bp, Glycine max
ttagcaccaatcaaaaaccgaaaaaatttaagaggtacactgtttcaaaattagtttaaaaatggaattattaaaattttccatcaaatgaacgaagggaaaaatattgtcaacactgtacagtgttcatgcccatggttattaaaatgatgattaaagtcatgacattgcacatggccacaaccattgattgacccctgacaattaagttatgaggcaacaacctttggtttgtgccaaggttcaccctctcactagatcattcaagcaaattaaaaaaatgtataaaaaaaaaaccttgtggatagattccaactccttcagagcagctggcgtcttgggcactttgagtgaccctggtgtaaatatttctcgaagccggacaagacctttctttgcataattctctgcaaactggtttatcataagatatgtcattttatgaccattcaaactagcatcaacatatttcatactaacaatatgataattacctgtgctaggccttgagatgaaatttcatcatccatgtcagctgggctgagtattataacgatcagttaaaaattaactgaaaaggctaactagtataaactgtaacatacagacaccctaatttttttcattccaccaagttttcaattcataaaatagtcct

SEQ ID NO: 1076 - DNA, 819 bp, Glycine max
cttgcatgcctgcagccaggaccacgtgacgttccccaccaatgtcttataaagcggaaccagaaaacttcaactttttatttatatcttgcccttacaccatgtaagtaagtattgtattggtaaaaggttttaatttttcttgtctgttctggaaatggatgaatatgaattatggcggagttgaatgatctcctgtgctctttggcttgtcctatggagtagagcgttgacaatgcaaagtctaatgatatgcttgtatagactagatctgggcacggggcactgtcttattatcggtcaagcataacaccaggcctttcttgtttgactggacatgcttttcttttgtgcttcaaagccccacaagtttaaatggctttttagtttgttaacatgccaattgacttctatttatatttataaatgtacatggaaaatatttgtgaaactgcatgactctaaccactttgttgaccggactaagtccaatatgattagatttagccaatttatggaactttcattgtgcaatttattcatctcaagtagtttgattacccaaaaataagaaatgagagaagcaaacaagagttagacttatgtttatgaacaataactggaggtttttttcagagatagaagtggaagaaggatctatgacttgtggtgtgcttgtggaaatataatgtaagaaatatacattatttaaagcagcttgagaagtttcctttttcaagaagggatcggtagtaataaaaagagaaggaacctatttaaagcagctttggatccagaattctgatatttttgggaagt

SEQ ID NO: 1077 - DNA, 692 bp, Glycine max
aacttgcgggcttatctgcttgctggcaaaccgacggctggccctgccacttgatggttttgcaccactatggggtggctggctgtcataaattgtgaagttggtgccaagaaaatccgagctgtggagatttcagcaacaaagttgtcattggtagatactcaagaaaagcagcaaaagattgactatgtattcacatgcatagtttttctttaaaaaaagaatatatatatatatgtgtgtgtgtgtgtgaagagactaacaatctccaagctattaacagtttttcaacataggtgtcaatacaagcagcaaaagaattgaccaacactaacattaaatgctttttctttgtatgagactaagagggtttaaaggattagtatagcaatcctttaattcagcataagatataaataagggagataattcacggtagttttacataagacaaataaacaaactgtaaaccaacatcaattataatagtttcaaatttttaaaatcagttgcttaatttaagagcagcagtcatcaaatatttttatttatttcgaatgtttatgggtattttctatttctttatttagtagaagatggagttggcaagagatgggaggatgcaagtcggacagactattctagaacttttttagtgcggttttgatcttaaaacagcaccacagtcaacc

SEQ ID NO: 1078 - DNA, 778 bp, Glycine max
aatggagatattcacaaattcatttaaagttaaaaaaataaaaaaataaaacaatatcacaaatttaatccccatcaagttaaactaaggtttaaatatcttttgttgtttgaaaaaatatcacatttttttattcttcatcaaaattttattcttttttaatttctacatgacaaaatgatgttgttttcatcccttgtcatgtactaaaaacataagtagtaagagactcaactacattaacaaaatgtagagataaaaacatgtgtagtaagagacatgttatttcttttgttaaatgtagagatgaagaatattaaagtttttatagaagctaaaactaaaaaccgtgatgttttttttttcatggatcaaaagcacatatttcaacttaaaaaagaaaatatgtgggtcaatgaactcaccaacaagtactactaatgataaagaaaaaacatataattgaaaaggtaaccaaaacacctcaagatgagtaagggaagcaagaaggtggaaagggacaaaggaagctttcttcatgttgactgagaggaggcttgtgcagtggccgcatctcactgtcaccaccgttgacaaaatgctgcatggaacactcacctgcacgtacacctcacaacattggaaaatggaagcaaaaaagttgaagtgtggaaaaagagaaatcaatacccacacatggaacttcagtacagcatgcattattaccattagtattggtgtacagaatccacattgtacgtagcatatctgttctgga

SEQ ID NO: 1079 - DNA, 839 bp, Glycine max
  misc_feature (676)..(676): n is a, c, g, or t
cgccaagagcaaccatgagtacatcattggcgctttcgtcgatttgttgttctatctcgctgttccaaattcaccttgctcacaagactttgaacattctcattctcgtccttcttctcctttatcgttttatagttcttcttcttcttcttcttctccctcatcttcatgcagcactcgctgtaatataaaaggtgaagtggaagaggaagaggaggaggttggtgcttgtagttcttctttttctttagcgcagggtaaggaggagattacacctgaagatgaagttgcttcatcttctaacaactgattttaatggtagtggactgaattgtatgtaaacaattggcacaggaaaagagtataattagtgacatcaaaattttaatttttgttgcaatagtgtgtgacttccatggttttcgccttgttcctctccctcacacaatctgtgtgccgttgaggccacacatgtgggggaatagcaagtgtgtgatactcataggcctgcttaatttttggttatttgaaattacagtcagacattaaatgtcaaccttttttttaatgaagattaatttaaacatttattcagagtatccctacacatataacctagttgaaggtttcaaatttacatgaaaaaactaacagaatttgattacatgctatgcanagatatcttaattgggagcataataattctaaatcatgtaataatttctcctttttgagagactaatctcttctactagcataaaggttatacttttcttctaaagcgctaagggaattttggctttccttaattctcatcccaagttttaaaggattaaaat

SEQ ID NO: 1080 - DNA, 918 bp, Glycine max
ggagttaaattttgctcgtatttctggattcaggggaagcaatgctatctgtggattggaatcatccttaagaggcaattcccatcattcttcccatggaactaccactattatttcttcaccctgcacaaagacacattatggtgctatgatcaattaaaatagaacatagcttagtcaccacccccaacaacaatgaagcaattacaaaattccctttcaaccggcatttacatgattaatggataatgttaagagtaaaaagaaagaagatttataaaaaaaaaaaaataattaatcagttcagtaccttttcattctcgtaccctgattcaccaacccataaattgcccaattcatccttcaagcaaatagcagtataactagcaaatgaaccagtcacccacttttttaacgtctcaaaccctccccacctaccctgaatcttcgacacggctaagaagtcccctgaatgcctaacaatttataatccctaatctctcctacctaatccataatctttttcttcctaaaccccaaaagacaaaaaagtaataattcgtacttaccttgttttgtcgtttgacagagaatgcgagttccagtgaagcagagtgaagtcaccgcgagggcacgcacaaaggagagtgaagcaccatcgcaaggaacaagattgaagcatcgtcgcagtgaacagactaaagcgtcgtccgtcgtcggtgagtgagtaagggcacgagcacaacaaagggtgagtgaataaaggaccaacgtgatgacattactggagaagatgagtagatgacgccccacctgattttcaaaaccttgtgacacaattggcaaagtttataccctgaggcttattcaaatttaacggttggtttaaaaatttgaaacgcgcattgcataaaaccc

SEQ ID NO: 1081 - DNA, 628 bp, Glycine max
aaagattgtaataatgagagccaatggagttgacatggctagaaacacgggtcctttcttttctatgacccatgcttgtaagtaatatgagacaccggtgaccataattccctattatgataaattaattgtaataagtctatagattataaatctcttttcaccacatatgtatatatatagagatagagataaaagtcatgaactaatcaatttaattggaaagattaagaggattacacaatatagtacggcgaggagcctgacattccaacccaacttccattgttcaatgtccctttctacggccaaggcaatgacaaaagactgaattgaacttaagaaacactgaatagttgtgaagagcagctttgaagggtacccttttataataaaagtctggatatataaaatattaattaattagtaattaagaattattatgacttatgaattaattgatcgctaaattaaagaaaaattaattaaggttacctgtagtacaagccatagcccgaaaaacgtgttggagaggagcatgaagaagcaaccctttatccatgcaccggattgagcatgaccttgatgttgaatgcctttatggtaatccaaaagatgaaaatggctt

SEQ ID NO: 1082 - DNA, 832 bp, Glycine max
  misc_feature (795)..(795): n is a, c, g, or t
accctgtgatcctatagagtccacctgcagtaattattaaaactaagtcctacatttcctagaatagactttcctagtaattggtcttggtgggtgccgtgtctgatgccttatcatttgctgtgcatttttttttcagtgtgttttaaacttttccagccacttctattcatttttttcgccaatatttggtttatctcttttgtcccatgatctctgctacttaaatcacacctctttggtattgtgcactatgagagaaatcagcctgtcctcatggctttcctagaattattagtctggctcctcaacttcactagaattattagttgaccctgctgcttttccagataaatcagctgccatgactttcacaggaccccatgactttccctgagaaatcaacatgggtgccgtagtttcaccagaattatctgttgctatcatggcattcctagagaatcatccttggtccattttacccatcgtggtcatgagtattcttcaactaaattttgaattcaattattgttcaatggtctttatgtggcaatattttatgcattgttatttcaatgtgtttgtaagaagcagctgggttgctcactttccaacatcatttgcaataattaatattgttactattttttaagtaatctaagaacaagcaacatcaagggtcttactatttcaaacatagaaagaatgcttatttttttcactttttgcgataatatagatatatgtatctgaataaatcttggaagaatctgctcattgttggataacctggangataaggaaggaaactctttttgggctaccattttga

SEQ ID NO: 1083 - DNA, 903 bp, Glycine max
ttagttagattggtaaatggcttactttcatttggcactttctgtgtgctcttattgttgaacattgcatctggaatctgtttgtaggttctccatcaagatgaaactcctctactatacagcctagtctttggggaaggagtggtaaatgatgcaacatcagttgttctcttcaatgcagtgcaaaagcttgatgtttcaagtttaagtggcaagacgttcagtgttattggagaattcttgtatctatttataacaagcactggtcttggagttatagtgagttcctttattgaattcaaaattgacctaataatttttttgcatgtgttgttagatgacttcatggctttctataaattctctagatgatggtgttgctttcacatgcatctatacctacttgttacatgaaggaacattcatgactgaagttttcaatgtttttgtctggcttcacttgtagtctgtcccagggaattcacatttgattcaaagcacggttaccattttcaacttatatttttattaatgaattttgttgcttacacagaattctatcaattttggtacttagttgtactgtttggttctttttgatagaaaaagagattttattagggaaaaagatagaagaacacacctagtgatcttggaaaactttggaagggaatgaaagcttttctatgcttgagtggacataacatactgcgattggtttgccggagaagcacaaccgacagtttttttgtgctatccggtaaaacattgcctaccaaaaataatttaaagacctggatttaaaattgtgcaaccaaaatggaggtgggataaaaaactgaaggtgtgaaaaagttcagctctttataagataaaagggaattataacagagggggaaaaaa

SEQ ID NO: 1084 - DNA, 736 bp, Glycine max
caagcttgcatgcctgcagtgaagaagttatgctttattagaagaaataaaggctattattatactaaggtgatatgttgcaatatatctcaaattcttcttaagaagattccagaaacaaaaatattgcaaaataacagatacttaagatcttgtgtgtcgtctgaaaacaatttcaagcagcagaaaataggtagctaacatgtagctttatgcattaatccaattactattgattgtttcacaaattagaagcagattatactttatcattaaatataatgttttctttatcgtaatccaatgatgtcatagtccagtaaatattttggagattgttgaaactgtcgttgaagtcacattaacttgtctatgtaagtagtgacactatgcaatcggtaacgagtaaacacaccatacaaggacatgcattagaccataaataacattccatcagtgtgtgatgtgttagtttaggtgaactctagataaaatataattatttagagttgtagaaaggattaggaccttaattgggtcatcttccacttctcaatgtcaagggcatccatgcccacatatagaaatatgaaggtttctgcaataaatgacattgttgcaaacacatgcctggagaagggaaagaaatcagaaatctcagaccatttaatctggaaattactgaaatctttgatggactaatcaatacctggttgtgattcttgaaattttcagt

SEQ ID NO: 1085 - DNA, 791 bp, Glycine max
tataaatgaggttttagatccctggatcaatgcaagacaaccaaagaaggaaattgaaaaacaaatatattggaaatcaggtattgattagtcctttgatttttttgatttgtccaccccccctccttgactctggttgtaaatttttaatctttttttttggttcaaacctttttttttaaaaaaatattagggattgggtaactaatttctttccttttagactaatatgttagcttgactagtataaattaggctcatttgctagcaaatataaccttctgaccaatgtttgttgccttgtcatttgctcctgtgtggtagtgtgccttagattggtttatcatggaaaatttgattcaaatggtctcctgattaatttttattaatttattttctttttttttgtgtatgtgttggggcatgtaaattttagaaggcgatgcacatgctgccaaaagagcccggatgctggttgatgatagtgaagatgaaattgatttggaagatgatgatgttaatatcgagaaggatgaatccacttttgaagatctatgtggtgatgctactttccctgaagaagaaattggtattactgattctgatgtgggaagctggggaaatttggaaggtcgagtgttagcacggatcttccattttttgaaatctgatttgaagtccctttgttttgcttcaatgacttgcaagcgctggagagctgctgtaaggttctataaagaagtgtcaatacaggtcaatttggtaatcttaggtcatttcctgcactgaaa

SEQ ID NO: 1086 - DNA, 759 bp, Glycine max
acttcccgctcaagacgtctagtctttgacatgaagggggaggatctcgcattgactggtgatatgaccaaattagcatatataaggggcatccctcactccataaactagctttttgatactgagttagagccaaaccgaaattctaaaaatcagaaaacaaatcaacctaatgtacagtacagtatttcacatttcactaattactgtagaatatttcaacaactttaaaactactagatttagcaactaaaccctatatgcaggtataggtatcaggaaccattttggatacatgaatagtaggagatttaagcctaataggttttaagaaaatgttttccattctcatttcccatgttcaatttatttcctattttcaaagaggaaagggacaaaacaaagtgaactttgaaaacaggaaagtgaaaaccatgcaacacattgtttaattattaatgaaaacatgaaaccaaaaaaaattaaaaagcaaaccaaatagatccttagtccaagcagcatactataattaacctgatggattctaaccatcatgtttcctataagatactattgacaactgttcttctacatagctgcaaattctaactcaccctttaagatgatgctcttgtagttgagcttgaagctgatggtccgccaacactccagatgaacccaaggcagaaagtttttcctttaaaacagatgctgcatagcacctctaccatcagcatatctgattaaagagctggatgg

SEQ ID NO: 1087 - DNA, 687 bp, Glycine max
agaggacacgtggggatgtgattctcatgctcgtgctccaaccatctctctatgcactctctgtggaacacgtggtagcagttcatcagctccctaacctcgtcctccacgctcagctggctcaggcacaccgcacatgtctcctccgtctgcggcagcctctccttaatctctccgaacgtcgtcagcacaagagtgttgttgtactccttctgacaacatgcttctgcggctggggtctcatcggattctgttcttcttctgtcgttcatcactctgaagatcaagcacaagacccatctcagaaccgcaatcatcagagctacctcgtatatggcctggcctattgtcaagcctgagagagtgtcttcagcgtagaatcccattgaaagctataatcaaggaactgatagagaagaaaggggaaagggggaagttctaatgagttctatgccttctttataaagccaaaatatgatggtgttggtgtagtggaaggctactatgctttttttagctttccttttactttcactctcttgcaggttctttcttttttgcttgctttttttttttttttttccttttctgaatgatacatcacatgtgtttcttataaaatattaatctttttcgcgacattagttttaaaaaaattatataagataaaaaaaatcaaatataatt

SEQ ID NO: 1088 - DNA, 673 bp, Glycine max
aattatttaatgggataagatggtttttctattgtcttgttcaatcccatccaatgatctaacctttgaccaatattatttatagtttcattataaacattcagaatgctgatacaacaactaagccttttcccactatgtgggattggctaccctacttgaatcctatggtttacaactccctctatttctatgttgttttctgaaagacccaagaatgttgagatatatatatatatatatatatatatagatgatagcattgaccattatttatttatttatttattttccatctccaaagtaagggaaataatacaagaatctcctaactctgccattttttcataaagattgcaaccttttttttttagttgagcttcatcttatttgctttattcatctgattgcgcaggagaagcttttcacaagtaaaaacagaacggaggcatctgtagggaagaaggtgaagatagacatgctccctgaaatcgagaaagttcacagggtactttatttttttattggttactggcccaataacttttttaggttatgggtggcatgggttgagaaaattaagatggggcattctgagaattgaacttgaattcatgtttgctcttctttttatcttgatagcatttaactgacaaaattggcccatcttgtg

SEQ ID NO: 1089 - DNA, 830 bp, Glycine max
aagtaacaggctcaactgctttggtttcttgttcttcctcgtcgttgctgtcggagtcttcactttccatcatatactccccattctcagtaggatctgagtgatcgtctgatgcattggacttgtcggatttaatgaactctgtttctgaatcagatatctcgtaccttcgataatttatacggctttttgtcgttgccctcttactgcgtcttagacctgattgaatctcacccacagacctgagtttagtttccttcctagtacggcctggcagttgcttgaatttacgaggcttgtcactatcctcactggcactcaaggaatcttcgtcatcgtcttcttcatcttcaacattatcttcatcccaatgatattcttcatctccttcagacccagagctactagaagccttctttctctgcttacgtttctggagatactcttcatcatacacggcttctccaacaatatcatcatcgctgtcatagtcagcctcattatccgacagtgcttcaacaaactctttctccgaataccgtttaggcttctgtcttcgccgattgctgatgtgaaaattatcagtgaaataagatacaagtcatcagaacagatttgaagggagaaaaaacaaaactacaaaccttcgatccaagtccaacatgtcaagttgattatcttcctccatatcatcgaagtcaggtgaattttgggatggcatgcccaaattcaggtctttgaaggtcatgtgaaggaccccctcctttaccattggttaaagctgctggttttgtccctgcctttcttcctgggtataagctctgggggag

SEQ ID NO: 1090 - DNA, 909 bp, Glycine max
ttgaaaggaaccttgttataaaaccattcagtccaagaaggagatttgcataagggagatacaagtattaaaccaagaacacgctccctatatttcgtctgcatcaaaataggaaaaaataacaaaaaaataagattgacttcatatcaaaacttattacccataattaggtttttaaataataaaaaaaaaactactaagaattggttaaacaggctcctcccccctctcttcaaagtcaaataaggtacatactgcaaacagtgaaaggatataagcaccagacgatattcccatgcacatcactgcaccaagcctgaacaagaaaatagttcatgaaatcagtaaatatatcacatatattagattttcccacattatatgcaatattctcttggtcccttttaattttagggcataactatgaaaagaaccacaaaagatagatcactttctatgttggatctgttctcaaatacatggaacaatttcaaaaaatgaaagctaacaatacaaaaaaagaagagaaattgtattgtagttaccgaaaataattgagaacctcaattatttgatctgctaagtcttcagcagaagggactggatcatcagaacaaattgcagcagctcccaactacaagaactcttgtggaatttccagataaactatgtaaataaaaatattcaggttttaatggcataaaaaaggcattcaagtggattaacttacaaaccctcttgccaggaggactggtttatagatgccaaagctgggaagaaagcaagaatttgcctctgggcaaaaaataatccttggaaacatgacatatctggcccaattcataaaaacaaatatatggcctaagttttcatatttaggctagaagggatggaatcaacattcccttc

SEQ ID NO: 1091 - DNA, 908 bp, Glycine max
tatcattgttagatctattacaggcccacattctcctccgcgaacatttattacacacttgtgtttcccagaacattcatttccatacaaaaagatttaatgagcatgttagcttcagccttctatctgatgagactttatggaagatgtttgcatttattgtcttctagttgtatgtaagatttgtgtacccttatcaaacagacaagtaataaaatatatattttttaatcaaaatgactgaatattgcaaatgatttaggggaagaaatctcaattaagttgacacatctcatgaaaatcaacagacaatctaagttgacttttgaaaacatgtcctttttttcattaggatattggtgtaaactgtaattttcactaataaaaaacttgactattcatttataataaaatttcttctctccattataatatttttttcaatccgagatcttgatttaataagttttaaatagtaaaaacatgaaggaacctagaatgcgttttatgacagaccggaaacctaataacatttatgttcattgtgtggtggctgtcaacaacattttgctccatatacctattttagaattataatctatatggtaagattttcaacagcttcaagtgattcaaattttgtatttaagaaatgcagagttacataaattcaagaaactagaccccagaagagatgactcagatgactggccttgatcgtttgccagactttgtatataaaatcaacacacattagtgatctgattcgtagttaaaaaaaagtttaatgatataattttaaaaccagtcccgttcagtgttggtgctgcgtagtcaactctgctgaaaatatttggcattgagattctagagacgggataatgatgataatgaaaccttctgggggg

SEQ ID NO: 1092 - DNA, 900 bp, Glycine max
ctgcctgcagccttgtaatagggatagcttctcctaaaaaaatttcccccaaaaaaaatcaaattcaggaaagacgtatttgtgacagtccagatctagtatcaaattttggttttggttttgcatctataaataccatgtttgctctttcttctaagaacgtttacataaagaattagaagatatagctagacataaaactagaatatgcaacaacatcaacccagtctggaaaaagattcttcaatctctttactggatcaaccaacttttggtctaaaaccgctaggtccactcttaatgcttcagagctgttagcctgacattatcaaacaaaataaaattacgctgtaatagtaaagagaagtttaatacagcatcaaattttacctctaaccagaaggtccaatttccatcgctaggtccactgagacggcatatatatgattgtggaccaccaccataggtttcggttcctgtgcaaatgcaggctacattaggcaatgaaaacatttaatcacccctcttagaattttgagtttagcttaactcaaccctaaaagttaacgcatgagattttcaatataccctcctcatgctgaggattaggcatctaagttaacttaacagaatcccaaaaactaactcataaggtaagttatatacactatttttgaccacatactagtcaatatggaatttccaacatacccttctcatgccaaggattagacattagaagcgtgaaatttataagattgaacatttgtaggtgatctaataatgaccccatatacaggggtctcataagaacaccaataaccactgggatagaccttaatactatctttagaattgagtttgggccctactaaatggaagaaccatttttctccctgg

SEQ ID NO: 1093 - DNA, 740 bp, Glycine max
taaatgcagtaatgtcttctcttgaattagctgtgggagtgaaccacgttgagatggatttgttagaacataaagttactggtagttatgatccagacattacaggtccaaggtatctcatttactgtgttctggaggaagctagctgtggctccaagaagtatgaagcaaccttgtactctccttcggggcaaagagaaagggataaggtgaatgaaatccgtatgtatagggaccaatttttgttcagctgcttattttctgttcctgtgtttgtatttgctatggtgcttcccatgcttcctccttatggaaactggctaaactacaagatccacaatatgcttactcttgggttgtttttaagatggattcttagcacgcctgtgcagttcatagttggcaaaaggtactatgactatcaataactatttaattctaatttcttttcttgttaatgattctctttattcaccaaagacaattttattgtattgttttcaagaaattggagattcttatagtcattttactatggctattactattaggttctatgtgggatcatatcatgcactgaagcgaaaatctgctaacatggatgtgctggttgcgctgggcacacattttgaaggacaagatttttttgaaacaagttccatgaagaaatcctttattctataagggaagtacttggaaaatgggggcttaaggggaaaacttcaaatgcttttaggaaa

SEQ ID NO: 1094 - DNA, 968 bp, Glycine max
agcttgcatgcctgcagaaaatctcagggcctggtagtgatacccgtgttctacgaagtggatccatcacacataaggaagtatgatggcacttgcggtgaagcaatctcaaaatacgagacatattttggtgacaaagacaatgaatccatccaaaagtggaaagctgctctcgctgaagccgccaatatatctggatgggactctcgtagccgtgaatacaagtaattgcttactattttctcttcttttcttccattagtccttcaaagccaaattgattacttatgctaatttcaacattaaattgatgttaatctttcttatgtcaatattcaaaatggtaatatggtaatacataaaattagattatatatatatatatatatgtgtgtgtgtgtgtgtgtgtgtttaaagtgttaagtgcattacttaatgtattgtttgtccgttccttggttaggaatgactctcaactgatagagaaaatcgtggtagatgtatccgagaagttgagccaggggaccccttttaaactaaaagtagacgactttgttcaaattgaaaaacattgtggagaagtcaaattgttgctgtccaaaaaccaagatcagttacaaaagaatgttcatgtaattggaatttggggcatgggagggattggcaagacaactattgccaaagccttgttttctcaactctttccgcaatatgatgctgtctgcttcttaccaaatgttagagaggaatcaagaagaattggactaacattttttacgtcataagctaccttctgacctacttaaggaaggtcatcatgagaggaggctcaacaataaaaagttttgtatggcctggagaagtggaaagctttgaccactagaagagtgggggaacccttgacctttgcggcccctatggtaccctctttaccaacaagaatggccctttttagggagagtctgccc

SEQ ID NO: 1095 - DNA, 769 bp, Glycine max
ccagaaaaccttccccttcctaggtataagaaaataaagcaacctgcaagagtttctaaaaagggttcaggaagtgcttcaactagaaaaggaaaagagaaagtggttaaagttgaagaattgcaatatgaagataaaactgagcaatcaaggcaagaattgcaaaatattgattgagaattcaagagaagctaaaggatatgcctctttatctgacaagaagaattatgattatattcggaaagaggaaaggaaagaaggagcatcaagagggtgagattattaacatattcttgtgtacatttttagttgtgcagcttttatctttcttggtagtgatcttatgagaagttatgcttatgttatgagacttgatgaatatgaatttatttaatagaatatatttctaaatctattatctccatatatgttattagtttttattattaatatttattatatttagcagttttctttttgtatttatatatatatatatacacacattttttaattcatccaccatgcttctagaaattgtccacaatgttatccacaatatcatatggcagtgttctggctttccaccatagaccaccatccacaattgataaattgaacttgattgataaaaggaggatgcttggtagaagctattatggaggacaaaaaacagtgcttatgttaatgtgcttcactctaagccatgtttgctgtgcttcacataagatgtagactaaattactcaatgagacaaaaatgagataag

SEQ ID NO: 1096 - DNA, 555 bp, Glycine max
tgtcatgcctgcagctaagacaaaagatagcttctgctacctcagcaattaaatccgtatttgggcaagaagaaacccgacagaatgctgtaagatttatacctgtagtcactgttgcgtttagtttcatcttaatatgttcaccatttgttatatcatttattgtgcaggctgataaattggagaaactcagggagaggatgataaaagtgcgtgaactctttcgtgatactgattcaaccgaatttgtcattgttacaatccccacggtatgacttataactggtgcatataacgatatattggtgaattgacttataatttagtgtcaccaaccctaccaagaaggactttggctttaaggtttaaatgcaatcaggtgtggaaaggaaatgatcatttcatagggaatgccatttgcctccaatttgagggaactatccttctattccatgaatggtttatttaatttaattatcattataacgtgtgtctttcagtgaaattgtgtcccacctgccatgtccactgatgctggggggggggggggggggg

SEQ ID NO: 1097 - DNA, 613 bp, Glycine max
tagcgggctgggtatgtgttttttttacttgcatgttaacaaaaagggtttgggtatcatagtatctgtatctgcgagtacccgctacccattaaatgacttatatgacttatttggtgttcttttttatttggatatggctctttaattcactagttactgtggttgggatgcattttactagtaggaattgggtccagagattcaaaatcacaccatatatggtatcgttcttatttctttgattttttttttttacaatacaaaatctgatttccttcattaaagacatgtaatcttcacatataaaatctgaaaatagtactccctccgttcctatttataagaccctgatttaaaatggtgctcgttcctttttataagacccaacctataatgttccttacattaattatttttagattagaaatgcccctaattaaaagaagagagaggaatgaactggcaaacaattagaaaagagaggagttttaatgacaaggatagttttgaaaaaagttataaatttaagacaaatttattgctaccaactaaattaatcactttccttaatcttgatgaagtaggtaattgagtcttataattaggaacc

SEQ ID NO: 1098 - DNA, 780 bp, Glycine max
agaacatttgctgctgcttctctcagtttatccatcttctccacagcttgcttacaaattcctccaactaaattggtagcaagattttcattgaataaaaaaagctctcggttgttcttaagcatgctatcaatcgaaggatatgcaataggttcaatttcatttccatctgatcttccagacaaacaaactgacttgtctatcttacagagcatgtatgtacatttttctaggccatccaatgcagcctcacgaacccaagaacctacatcacctctattatcaacagaataatcatcaagagctttaaataaacttatcatcacctcattctttatcagaataaacagggaaaaatcatcctcaacaaaagaggtagcagtatcttctcttccattaattaatgtttcacacactaatgtgagccctttgacagcatttactcgtgcttcagcatctctgtcttcagggttttcctgcacatgggaaaacattgtgtaacacaatcattgaacctaagattgtataatatatagcatttgcaatgtggagcacctcaattttacaagagccacaaagcttcaaaagcacatttctccattgactggctaataactcatatggcaaaacacctattgccaatgcagatcctctccttacagctacatttggatcagtcaacatactggaagtacctttgcttgtcaccatcactttattacctttattattcttgaaagccatggccaataattgccacccggattaaaagtggttttc

SEQ ID NO: 1099 - DNA, 645 bp, Glycine max
aggtaatcctaatgcatgctgcttttaactatgaaacattaaattcctataagttatatgcattgcgaagagttctgtgcaaatatgcaaatgaaattgtatacttcatcaacaagtatacagaatactacacttgaagattgtataagtcttagcctatggtgttttattttgtgtcatcaaatactataccaaattggatcacattatcagcagaaaatcataatacataagtttaaatcccaaaaatgcaaggtttcaaagaatgactgaacaaaatcaatgagaaacaacactccagcacaatttgtagacagttgagcataaactaataaaaatatatttcaattagtaaagaagttgtcaaaacctaaccttttgcttgatccagctatgtcgtttgccactgcgaggacaaagaagcacttgcactgaagagtgcttaaaaaatctacgagtctcctcatcatgagttgccatgacaccatcctgaacgtaaagtccaagagtatctcaaaactaaagctaaaagggaaaatcataaatattatatttggattaatgaaaaaaaataacttaataatctaagtctttcttgaaataaagtaaaaatcagtagtcatacatgagaaagtgttaatgaag

SEQ ID NO: 1100 - DNA, 690 bp, Glycine max
tatttattttcccttgttccttcatcaacattgtttcaaaataaataaataacttctacaagggacacatgaatcactcacaccaatattttctcaaagtttctaattctataggtagaaaactgtgaagaaataacttcgaacaagaaaaaaaaatcatgaaaactttcatagaaggatagttgagtatgtctaatttcttgattcactaggaagaggagtcattagctgatcccttgaagttgggacagaaaacatagagaagaaaaaaagaaggatggttgagctgaaccgaccaatagtaaactacccaggtcatcatctcaaggatagttaaagtacctacattgatattttattcagccgttcaaaccataacccagcttctggacctatgctgattgagaacctccttcctcaaacaatatccatgcacaaaataaatatgaagttgattacacaatctaatgaaacgtaaattacctgtacaacttgcaccccaaaactagattttgtttcataaaaatcatcatttcctattccttttaagtttggtccacaaatacagtaacttctgtcaggactgcaacaaagaacacagattaattcaatcagaccattcttgccagaaaaaacagtcaacaaaattggaagtccaatacaatacctgtaatgatcccatcgacgtat

SEQ ID NO: 1101 - DNA, 810 bp, Glycine max
attaaaacataatgtttatcgtgttcttttactacttgtgaagaactcttgtctttctctttaataaattcataatgtgttgttaccaacatatatcaccagtacttagaaacaaaagggggaaagaaaaactaaactaaggagcatctacactgactcgatgattgatcatcactatgaaattccttcacttcctgtattttgggattgcatattcttcaaattaaccgagcttggttgttagtctaacctcagtatcattagggtgaaccctaactaagccagataaaaaacaacataaccaaactcatcaacgtgttccctataaactcgtatgaagctgtgaagcagataatagagggcatcccatccccctctaaaatctaaatgattgggttaggtttaacaccaccattaatttctattctagttttacttaatgagagtcttgtgcgaacatgtcctatatataatatgagtgttttaaatttacattatatttttataatcttagatgtgagaattacaaatatttatagaaagatacaattaattaatttaattaaaagaagaagagatgaagatcattaattagtacttaccatacttaaagataaatggactaatttttttagctggtgccacctcaagttgtcagtttagtaaactctgatctacggaacatttaaaaattccctttggaatagtatatgccaactttttctcttaaaaaaaaaaggaatataaatgatctatatgtctcacttatcaaagacaaagattgtcttctagataaagcatttatttctg

SEQ ID NO: 1102 - DNA, 647 bp, Glycine max
tgcatgcctgcaggaattgtagcctctttaattatctgcattatttcttctatgctttgcattggttgatcaggctcctcaaactggttgttggtattcccatccatgagatcacttggaaggttcttcaaaaaccactcgtggtttctgatctcaggaatagttattctctgttttaaaagcaatattagttgtcaatgcaatcatccttcacacaaataaaaggagaagcaagtaatataattgcacatgattagaatgaataacctctagacataattataaacaaaaaaaaaatatggactcaaatataattataaatgtattttataggatcattcaaccaaactgttgtgtatggtaaattttttaacttttataataaatactttgaaaggtatataagtttcataaaaaaataattatatgaaataaaaactaacccttgcaggatcagcgacaaaaatccttgatatcagatgacggcactcggaagatatgtgaacgtagtcaggaattgagtactgaacattcaaaatcctctgcaaccaacattcatcaatttaggaaaactaattcaatcaaaagttaccacattggttgaaaaaaagggtcattagttacatgtattggcttgcggaaatttt

SEQ ID NO: 1103 - DNA, 713 bp, Glycine max
ggaaaaaaaactttggaaagcttgtctgcctgcagttgaaaacgcctaatctgaggatctcatggttgcagcggcttcagtctggtggtccacctccagtctaggtttttgtcatactttcatagtttttttttagttttgagttcttcatagaatgtggtgtttaggcagtggtctgttccttacaatatgaggatgatataacttttcagggagtgatttcccaaattgagtatacttggaagcttaaaaatgtatatcattaactagttgacgcaataatgtaatagttgataaatagtagtggagtctcttaatactattttaatgttattttattgcagttacttttccatttgcctatggttttgattcagtcagatgttattatttgcgaattgcaaccacaatgtcaacttttttcttgtgaaaaaagaaaaaaggcaaaatggtgaaaccaagttaaacagggaaccacgtttttacaactattgagtttatggacctttgaagtctcaataattattttaagttgcaggaccttgttcttgaattggaaactgacgctcgaagactgcattttttgtcattgagtatgtttggtttagaagataaaaatagaagataatttttttttttaattataaagagtgtaaaatgtgtaggtctcactaaaagagtatacagcttctctttatttttttttttcatct

SEQ ID NO: 1104 - DNA, 688 bp, Glycine max
aaaagtgcatagtccaattatattataagaaaagtagaaaaagaggttatgtaaccactagttcatatgaaagttgtaattgtaaatgtaggtagcagtacatgagagccattctgaccattaatagattcctatactaaatttgttactccacacacttctaattactaaatgtaaactgatcattcaagctgacaccacaagattccacttattagcaggctcaatttatagctcagcaagttgccttatgtttataggataaacaaaattggggttcccattaaaagccattcttcccatgagaatgttcactgcttctgttgggtggaatgcatcccagaacacgtactgacgcctattggggcatggtgtttggaatggaagacatgtaatttggcctctgtttcttccaatgccacagcaccctctatttaccacagcgaaccctacacagaaaaaaaattaaactattaagagctaaaccataagtttaaaataatgtaacactaagttttgttagtgttattttgaggggaatgcaatagtattttttgattcatagtaccataagatctagcattgagaaggatgtcttgaaacattcgggaactatcagcgaatatgaatctggcaccaggtagattattattgaaatttcccaacatggtcttcacattttcatttg

SEQ ID NO: 1105 - DNA, 739 bp, Glycine max
  misc_feature (687)..(687): n is a, c, g, or t
ctcgcatgcctgcagtttgatagtattaacaaacctggaattctgctggaagtggtacaaatcctgacagatcttgacttcataattaccaaagcttacatatcttctgatggtggatggtttatggatggtatgttcgtgattgaaaattgaatcggtaatgcattgactacacagatttgtcttgtccttgcttgttgttagcctaattagaagctggtaatatagagaacactggttgttatcaagatgttctatattttgttttctcttgactatgtatgaaaatgtccatgaagtatttctctctgtagtatactaagtacttgacagaaaacagcacacttatagttcttatggacatgtttactaaaatattgtcttgtaaataaaaatgatacgaatttaacacgtttacctaatggaataaacagtatttcatgtcacggatcagcaaggaaagaagataacagacagcaaaacgattgacttcattgaaaaggtactcatcttttcctctatatctgatatattcttatagtaagattgagatataatgtgatagcaatttaacaaccaagtaaaacgattcaaattattgatgtacgtaatagatggaaatagcacaacacatttaagagttacttaattgaagcattgttttaacaataagcttatatgtcttangaagaaaccatacatgattgccaattcttattttgttctttcaaaacgcatg

SEQ ID NO: 1106 - DNA, 666 bp, Glycine max
tactatgtagggataaaagcaggacaaacgaaagaaggagtaccttctttttcttgacaggtttcagaatcttaattatacagcgctcattgctattgacatttatgccttcaaaaacttcactatatttccccctgcccacttttcgcacaacctcataatcatcttgatcactgaaaaataaaaggcaacactcgctcagtaaattaaaaaaagaaatggtatacaaagttatattgaggattcagagaacaaattcgatcaatgaactcagcagcacacggtgattctcgaccaccttctgtctctggtcctaccacaaaaaaactaagcaaaaacatgcgatccaataaaaaaaacatatcagagcaacggaaatggcataattcctcgtcaatcagttagttaacacaaaatgctagataaaattgcattatgccattggaattcacaaggaatggggaagaatgcaacaaaacagcagctaagaaactatctacaaactctaagatcagacaataaaattccccttcattgtggattgttcactttggggatcagaaaaaaataaaagaaacataaaaattagggttcggaacattacccccattgaagggggagagactcgtaatccgaatactcctttgggcgaaggacattgacatc

SEQ ID NO: 1107 - DNA, 689 bp, Glycine max
atgttaaaagtgctttcaaggtctgcacaccatgacaccatataatggaggagaattaattaaaatttcaaatattcaaaccaggacacatgaatataattgcttcacgataacaggttgctactgtgtctgaaaaaattgagttttacgcaagtcattgtctgctataaaatttagattttgcttgacaaaacattcaaacacacattgtaccacatccttcgatctacaaaataatgaaaatatgatagttatttgccaaatatatacatgactgcgttgtagaatcttatacactggcctgagtacataattaaatgtaaaacaatactatctatataatttttcttaagtatcaaattaccacagcagttttactgagactaatacataataattgggaaaaaggatgcaacaattagaacaaatcatcagttattcatatccaataaccaattaaattctttaatgaagtactaaccacgactcggaaattttcaaatatgggatgcattgtgggagctctaactccgtaagtacgcttcggatcaatagtagtgacaggatcattatgattttgatattgctccaaaaatgtctcaccgacaatggactcaggaattgtcttagcgtaaagagtcacaaatctgcaaataaaaacgaataatatgttaacttcaagatttaag

SEQ ID NO: 1108 - DNA, 615 bp, Glycine max
gctggaagtcaagaatgagcttgatcgatttcaagaataaggcattatttacccaatgtatagacaacctcttcattcgacagtagtgtaacttaaaatcatcaaggaggtccggggctttactgatttaggtttgaaggaggcaaaggatttagtggaaaaaactccttccgttataaagaaaggcgtttcaaaggaagaagcagagcaataatagagaaaatgaaaattcttggtgcaaaagttgttatggaatgaagtgatatattttgtttcttcccgctttcaatattttagttgttagaaaattttgtattgttggccaaggatactactttgctagtgctgtgttaatttttttttttagcacgaactggaatttgattttatgcagcttacaatacaagggaataatacttttattttattgagagggaatttgattttatgcagctttgcaacattattcttcaattccctctcaatgaaataaaagtattattcccttgtgcaatattgatttgcaaacatttatttgcattactttctacaagtaaattagtgttttttggacctttttcttgtatcaattgaattttggtgtggttaccataa

SEQ ID NO: 1109 - DNA, 706 bp, Glycine max
attttgagaggttgagcaataattatctcattaaacattttttttacttttttaatatctgattaaactcgacccaacatgactatataataaatatatgattaaaaataacaatttcccaattctttctacgtgttgtatgtgagagattgagtaataaaaaagaaaaaaaaataaaaaaatctaaactctcactctcatttacttacaagccgcaatagtttattttagttttgtagattgattcaatctaaaagttgagctgtgaattttttttaatgaatataaactgagttgtataataatgaagccaatggatactaatggctagcttataagaaataagaaacaatgaaataatgctgaattacgaattttgaaatactttttttcattcagagttaaagagttaaagaggtgactattttttttaattattgaactcaattattcaattcaatcaaattaagatctgagttaagttgattaaataagagctaaaagtaaatgaatttaatcaagtttatttgagttgggttaaaaaattgaccaaatttaacttaattaggattaaatacaaccctaaaattatcactaattgatatacaaaatagtacgaaatctaacctaaagcccgtctagctcagttggtagagcgcaaggctcttaaccttgtggtcgtgggttcgagccccacggtgggcgt

SEQ ID NO: 1110 - DNA, 659 bp, Glycine max
attttctgaagtaattgcttactgtaaatttctcttttctggttcaatggccatgctgctttgtatatgtgattggtatatgtggcaaaaagggtagataaatttctgtcattgcaatttcttgcagtaaatggtgcattaaagaggatatgggctcttcctgcatatttagctacactacacagcccttgaaccagaaaaatacttgggtagacagactctgcctgcccaagttgggtagattaaaccaatcaataagtaactcattgtcacctaatgcttaataataatacaaatcttggtttttgtcacatgataacttatttattgtcgattaatttattaaaactaaattggggaatatatcctctcacctaatttgtgtgtggacagaacctacacaagtgtttctcactagactgtagtgaccaaatacataaagataatattggtcctatgaaattacccaccagaaaaaatcatgcattgagttgcatcttagtagttgctaataaaatatgtaacgtcaaatgctttctaaaaataatgccataaagatcattcatgttaagctcaaactttttttgtaggcatgctttaagtaacattattactttggtgctttttatttattcctaataatcattaactaagttaaa

SEQ ID NO: 1111 - DNA, 688 bp, Glycine max
gtcatgcctgcagtcttggggtttgatcaacatctgtatcgatagggatctggctaaagggtacgttatgatggtgttatcagttgatctgatcatattcctttaccaacctgtcaagcaaagagaggctttttgtggagtaatataacctatcaaactgctagtaaaatagtttatgaaagtaaactttgtaactaaaaataaagttttggaattgccactgcctctgtaaaatgttaaactttatgcagagaagccattgttactaaaaaaacagtatatatctactcgagattttgaatcatgtggcttgtttcttgatagccaattttaccgagcaaggaaggagcagcaagagacacataaataattgtcactatcactgccactctcccagtgccagctttcacgtgatgggatccaagaaacaaagaactcttgccttttggaattgcaaactgaaacccacttaacttgctaaacccacaaggaatgaaggatttaatttttttttctaaaattcagattggcattcataaattttaagacataaggagtctagttatacgtaagtcacatatgaaaaaaatttgagacacaaaataaagaaaaaataatttgttattaaaaaaatcaactctcctaacttgcatgcaaacatacacttagtgagggtaaaacaatgctt

SEQ ID NO: 1112 - DNA, 750 bp, Glycine max
aaactatctatctacgtgctttgtatggataggttacttgcctccattcatccatttcttaaaccatttgaaaagtatctctttagcataactagtttttcctaagagaaggccacataattacatattaatcaataggggtaggggtgatgtcaaaattaggactcagtctcatttatagcttgattttcaatagttcataacagaacttaaaaatataaaggaccttcaatgtttattacagctaaagccactaaatggtaggcatcaataacagtatatatccaatcactgatataaattaatgaaataccaaaaatatgcttcagttccttctgagcttctcggataatataagctaaagaaattcatattgaagaaaacaaaaattacttcataaattttgttgaagagaaggccagtgcaaaaaacatattttcctaaaaaagattatgaacgagtatagataccacctgatagaccatcttccagtcccattcggtatatgacgagaagctgagatgcagaagctcataatgtccaatgtcaggagcatctttggttgactttttcttagagaacaatttatccataaaaagtgtgttcagatgggcaaaagtaaaaacagatgaagcactaaaagccatttatgctttaacattgcttggatttatttatttttaatatttttatgaaagaacttgcactagctgtcacaatgttctttggatgagattctaaagaactaaa

SEQ ID NO: 1113 - DNA, 911 bp, Glycine max
tgataaggtgaaacaatgggaaacacaagaaagttaattaggcattcagatcagcacacatatgatcatattctgttcagaccaatgtttaaatagcgagctattgcgacactatagcggtgtagtggtgcagagcggcccttgcccactacaggggatgccgtagtggagaagtttagggtagcggccatagtggaccaaatagcaggctgaattgcggccatagcaggtgctatagcagctctatgtgttgattccaaaaaatccctccgaacaaagacatcggacaatgccaaagttcattgcaagggtctgctcctaaaagttcaacaaaagcttcgtgtccaaggatgacaaggtgcagtacatgcaaggagataagacattccgttaaaacttaaatagtgtatgggcaggatatccagaaatcatgcatattgcattgtacataaagtcacaaacaagggtactcaagcatgttaatatctgcaatgtccatcacattttaaacagatcaaggaataaagtcaagagggttacagcatccacagaggcttcagctgggccctttgaaatagccaatagatccctaccataaggccttctattatccttgctctggagcaattagatgtgggtgataaccatccgctttcataaaaactttttcgaattctttaaagaaggaaggcgattaaatgggagcttttttaaagcaactggtaattgggggtcaaaaacaccatatatttatttcccccaggacgcttaaatagtaagtgggccctaacaaaatattttattttccacaaatcaaccattgggggaagttttgcgtaaatcattttgctaaagcatgcctgcttaagggtgtgctgaaaaacatttttatattttccttctccactgaa

SEQ ID NO: 1114 - DNA, 831 bp, Glycine max
  misc_feature (742)..(742): n is a, c, g, or t
attctgtttactgtcccattacaagactgttttatggttgagttgcaattttccatttcaggattatttctgctgtcacttatctggcagatatatttggcatacatttatatgtgatcgttgatcaatgttttcaaattgcactagcttctttttccttgcagaattttgtcatgtgactttctcaattctcaaagatctactctgcccagaagctcttctagaaacaattctatttttttttacaatctgaattgctggtattcccctttacatataattgcttgtggacccaaaagctaaggtgacataaatatgaagacatgatactgatttcaaatatttttattaatgaggagttgaggtctttattgacatttcaatggtctatattaaatgaatcacctccaataataataataataattcaaagaatgacattaacctgcaacctaaatttcattggaaactagtcatgctttcatttgacatgacatcattatattttgcacttctgttgaagtttgactcatccaaaacaggttatggatacttatttgataaaattgtactgcaatcatacatcaaagcatttgtaaattattccaagttatttatgtaaataaacattgaatttcaggtgcagctttcttgtactgatgttttatccttgaaaggttgagctgcttgattaatatcagattatattttattctcctatttattattagaaagacattanggatttagtccgtattacacatcattagattgatcttatgtaatcaatattgattctcttattataaataaagaacaagtgtggtcatc

SEQ ID NO: 1115 - DNA, 908 bp, Glycine max
  misc_feature (805)..(805): n is a, c, g, or t
ttccaaattttcagcttcacaaaaaactaaatcctgctaaacagaggttggaaggaaaacatggataaaagaatatactagctaaggataagagttataagctgaaaatcaaagagatcaaatctatatataaatatgctaagtataaatttaacagtaacacacctgaatcggtgcaggtcgacatgccatcattcccaatttattgcttgcagtatgtccagtaagttctaccaaaatatcaacttgatcttctctaaccatgttggcaaccctcttttcatcaattccataaatatctttccagatacctcccttatttaaaactttctctctaaatctaatggtttttgaatctgcctacaatatcaaatgaaaatcaattccaaattatgtgcaagaagtcaagaaaagaggaggaaataaagaatgttaacaataatgaaatgtatgctacaaagtctataaacgcgtaaattatgataatgtaaccaaagtcagaatattaacccagctagccactagtgctgagccaatttaaagtgtttctagataattggttgtttggtaaattgttgtaacaactgatttcaaagaatcctattcttgtttccacaaaatagaactgcttaagtcatatttaaaagacaagataatcaaacatcaacaaagcaaaagcatgatgaaactttaatcaaactaaaccgaactaaacaggagtgtatcaaaagaaaaactaaatgcaacatgcaaactttaaaccaagaagaagaaaaattgtaacttttttaaaccagaagacaanccaaaaaggaaaaaagaaaaggaatttgaacctggcccaaaatataatgggttcaaggccccaattccccaccggattaattcccctttaaacatggccccat

SEQ ID NO: 1116 - DNA, 844 bp, Glycine max
atctgatcctccactgccaatgaattctctgggtgttagttcatctgcaatgccttgggttaatccacttagtaagtcctttaatttggctaattcagttccagcaccgaagctcttttcaggttcttttagtatcagcaatggttctaaacagttccatcgagtggtacatgaaccagaagccagggaaaatgagacagcctatgttaataacacatttcaagatgtgggattatctgctaatattaaaggtacttcaattgcattggaagatgcaacttcccaaactgatctatctggatttccatcatttgctcgagcttccatccccgactctggttggaggccccgtggggtgttggttgcacacctccaggagcacctttcagctgtcaatgacatagctatatctgctgatcatagtttctttgtgagtgcatctgatgattctacagtaaagatttgggattccagaaagctggaaaaggacatttcattcaggtcaaagctaacttatcacatggagggaagccgtgtgttgtgtgcaacaatgcttccaggttctgcacaagttataattggagcatctgatggatttattcatatgttttctggtgatcatatctctagaggtctaggaaatgttgttgagaaatattctggtattgctgatatcacaaagaaagatatcaaggaaggtgccatactcaaccttttgaattgtctgtggataattataccatcatgtatagcacccaaaactgtggcattcatctgtgggatactaggtcccattccaatacctggactcttcaagcttactcctaagagggctatgcttctt

SEQ ID NO: 1117 - DNA, 735 bp, Glycine max
attatttttcactttcttcgcgagtaaactcttatcttcatgttgctgtttccattgctcagtatgaaggatatctttttccatttgtggatgacctgctggatagaaaaatctgtcactgggtatgttctgattaaatctctctctctctctctctgttctgccaaatcttctgctcctgtgttgaccctaattgcacttgtgatatggatttatggtttactttctaagtgaaggccatacatcactatagcctgatttctggatgttgaatataataaaatttttgtagggaaatcatgcatagaagagagatgacagaggtattttctcaatgggtgtgtgctttttggtctattatatgatgtttgatgaagttttcttctattcaggagtcatacattgaatttttttatgttgttttattgtttcctttaatttattttttaaaaacttcttcaaaggatgaaaagaagtcatgccttatgtacatatttgctatttcataggtgtgtctatagagtaaagaggatggtctagcctttttattttgattatatttaattttttatttcttgtcttattattccttgtcactgtatattttttggcatcaaattgttcaaattttggcatttagtaacaatttatggttattcattttgttgcttcctgtatctcaattttctcgatatatttggagaaagttcctggaaatacgtctccagataaagc

SEQ ID NO: 1118 - DNA, 679 bp, Glycine max
acaataattcctcatcactagcttgaatattgtctactagatcattccagttatataatcctattctagattcctgattctcttctaaatttcccatgtcatcctcctccaatttgtaaggtttttctgacagaagtgatttaagcttatcaagtctgggggctgtctcaataagctccatattaccagatacaactttgagtacaggtacaacaactttctcttcatcactattactatcattctttagttgattttcataatattctgaatgatttgcaggtggtacaagcagaacagaattggaagttccaacaaacttcatagcgtatgtcttggattgagtacaaagaactgcatcttcgtcaggctgtcctctcaagaccaccctggaatagagtagtaatcatgttaaagttaaaaacacaaattggggaagctgagggcagggacagagttacaagcaactgattgtcggtcaatgcacacctttcattcagaacatctgggagaagtttctcatcaagctctagaaagaggaggtcttcatatggtccaaaagatgggtgatatgcaacagaaattgatgatccaggagctatatgtttaagtgcttttgcccctttttgaacccaactgcggaggcaattccatttcttcctctcactaagtacaaagc

SEQ ID NO: 1119 - DNA, 688 bp, Glycine max
catgcctgcagtgtctcaaccgtgaacttggatcccctgcacatttaaaggaactaaggattcgaaaattgttaaattcagttcaaaaggataagcttatcttgcaataaaataaagttaacggatgtgatttatgaagttcacaagagaactcgacgatcgtgatctctccaaccattgcttttaaaagttaaaagtagacaagaaagagtgagaaaaattgataatagagattattccctttttattttttgaagaaaaagcttttgtagtgtaagattgcaataatgttactcctcaacttcttttcttatgctttaattttttacaaaaagaaatgatgaagtgtaaaagagaagtgtatgaattaaactacagcaataacattactgagatgattagtagaaaaattgtttccctccctgagtatgtctatagagtgcttatgtatggcctgtagtgaatccatgtttctcttttgatatgtgcaggtttgaattcaaaggatggtagcaaagaagagaatgatttgagttgtttaagcagcaaggtgtcctcttcagctatgcttctaactcctcaaagtgaggatgagatattgcaggccagcaatttgaagaacttcacattcaatgagctaagaactgctacaagggaactttcgtccggatagtatggtgggcgaaag

SEQ ID NO: 1120 - DNA, 626 bp, Glycine max
acaaaccaacgaagcatccaatcaatttgatcaaaaccacatatgtcaatgatacaatgattccatggtaacatcagcatcctgcttctgactcggttacatttcatgatttcaagaaacaccacttaagcataaagatattttatatatggtacagatgcattctttaaaaaaccaattgaaaacacaccaatataccacacaaacaacgaaacagatcggttttgtaatttatatacactctgtgcacgatatccagtcaagcttgtacaggattgagtcccatttgttttcttgttttaccaacaaacaaatctccagacttgatgaatcctggaattcttccactgattgtcaagaatggtaactgtgctacagcatctttcctcccgagtgaaactattgctattgctgaatgtggcttgtaagtttccatcctacattctcttcctccctctattgtcaccttcaagttcttcacaaccacttcagcctggtgctgtgccaaaaacccttgcttgatttcctgggggttggatttgcattaaaaaccctcctattaagtggcttgtagagagatttaaatgccacagattatagcatctaaccaatttatattggacaaa

SEQ ID NO: 1121 - DNA, 973 bp, Glycine max
gcatgcctgcagcaacctttgcagactcctctggatggagtaccgccaatcttgcccgttagatttatagggtgtttgatttcatgattcggaagtgatttttaaaagttaactgttataggttccacgtctcaaacgttattcttctattctcaatatgtttccaaacatgttactattacaagaatggttcttaggttatgatgtaggatcacgccaaatacatcatatcatcaattgggattcatcaaagttttgctcaaagagtttacaatcatcacttttccattactatacagggagggttgccacttcttgtgtcaagtctcccttttccattaatatattatgatttcttttggctgtggaaaaaaaattagggaagtcataatgcatatgagcacaacagttcaataaaattctttttaaaaatcaattggatgcgtaactaacatgtaaagggaaaagttaggaaaaaaaccagttaggaatccagttatacttcagttcatctgctttagtttaatatcattattatacaccaaataaattaatttccacatataagtttagctaacattatttggatgttgacattagcccctatttataaaaatttgaaaatgggggttgattgctgggcccagggcctcttaagagggaaaacgtactccttatctatgcactacgcaaaatggggaacacttgtctctttagaccctaagaaatatttcttcttatcttctctagctcttatttattaggactttccttggtgcgtggaaatctaacatatgttaatcatgaagcccagtctgtgattaaattgctctatcttcaacaaccgtagcatacgactcgtgtgctctctctgcgcttactagcgcacatctacacttttatcattagtccccttagtctctttcatacctcatatatgtcagttgctcacattccctatacatttgtcaca

SEQ ID NO: 1122 - DNA, 676 bp, Glycine max
cggcaactcttccctttctcttgaagcttctattctgtgctgttgctgaatcagaatggttcgtgccttctttttcccctttctttctcccataagattttgcgttgcaacacgattttagtttcctttgctttccttgattcctaggtctatctcctcccccaacgccctaatttccttatattttgtagtggtgatactctgtgtccttcgatgaggactgctattggctgaaaatttgttgctattactgtagaattgttgatttatgctgattcatgtggtagatggttgttctgttaaatgttaatttaattgagtattaattgcgttttctggactgtggaatcaaatgggaagggatgaaattaaattgttgaggagtataaaataaaaatttggattctggcttgtagggaaagaaggtcatccatgtacatgtatagcttgtaacattttgaatattgcaggatggtgctgtgttggcatgtacagatggagcagttcttcccgtcagtcaagtgtttgatgcaattacagagcttgggaatggagggcttgagcaatgggatcctcttgttcttacttctgcctcactcttaagtatttctcccgctcctttgactgtatttctgtttgcgctttaataatctatcattctatgctgctgggtgtt

SEQ ID NO: 1123 - DNA, 687 bp, Glycine max
cttgcatgcctgcagttggataggaagaatatactagaagctaagcccatcaagggtacgatagctcgtggtgctaccaaagaggaaaatgagcaactcaaattaaaattacagttcaggtgacctatatttattattttatttatacacatcactattttaacaaatgtttctaccacattagtttaaattttagcattatttctctaaggatttatttttgcttctatcatgtgatgcattgaatttcaagtatatttaatgctttaataatttgaaaactattacgactcattaaaatgtgtgatactcctatttggttgcaaatatagttgtgaaaagtttattatgaatctgttatctaaactttggatgctccggagaatttaagatcaaatttacaatgtgcttttctaactcaaaattgatacaaatattgaatacccagaattgtaacgtgttatagcaaagcactctaacttgctttcagtggggtgaatctgttgtgaactaacttgctttctctttcagcgaaaaggatcaggctgaaaacttgatgattgttgaccttctaaggaatgaccttggccgtgtctgtgatcctggatctgttcatgtgccacgtctcatggatgtggagtcatatgcaactgttcacacaatggtgagtacaattcctgggaagaa

SEQ ID NO: 1124 - DNA, 717 bp, Glycine max
gcatgcctgcagcatactccagcaattgacatttggagtataggttgcatctttgctgaagtattaataggaaagcctcttttccctgggaaaaacgttgtccatcagttggatctgatgacagatttgcttggcactccctcgctggatactatatccaaggtagtttctttttttctctttagagggaaaactgcttgtattttcttaactaagtttcactaacatcattgtttggctggtttacaattttgaatctgtgttggatgcaggtacgcaatgataaggcacggagatacctaactagtatgaggaaaaagcagcctataccatttgcacaaaaatttcctaatgcagaccctttagcactacgactactggaaaggttgctcgcctttgatccaaaagatcggcctactgctgaagaggtttttatattgttctctatttcttacgtgtgtgtgtgtgtgttgaaaaatcattctactcagataattaactgcttcttgagcttatgctttttctttggagtttggagaatacaacaacaacaacgcctgatcccactaggtggggtcggctagtttggagaatagaaatgtataattgatgtgcaacaatatgtgacttccttgctttaaaattctgaaggatttgacattttcaggcattaactgatccttacttcagggactttcaagattgagagggaaccct

SEQ ID NO: 1125 - DNA, 768 bp, Glycine max
aaacttagagaaaggatggacaggtatttacacttgccttgatcaagttgcaaaagatgttctttgtgttgttacaaacaaaataggggtaacattttgtttgagtaattggtagagtggggtattgacaagtgacaacaacccttcatatttgtcatctaaaataggatagcttttgacctgttttcaaaattctatttggtgttagaaacttcctttttgtgtttcccccattgattggttttctttttattcagtttccccattttgattgtgtagagacataaatggggtaccagttgatgtaggcactttatttcaagaaattgacaaattggttgttttcagagtcaatgtgaagttacctactgtggaggtcaagtacaagaacctgaatgtaagagcagaatgtgaggttgttcaagggaaggcattgccaactctatggaactctttttctagctcactttctgtaagtagatgcttcctccttgaacctaagcaggccactctcttatgaaaccgaataatatataaagcaatattaagagacacaagctaaaagaaaaaaaaaacaaagaaatatctgtggctgttcatactaaaatgggctaaatttatcacttgaacagggtttcatgaagaatatatcgtgtacttctcaggggcagagataagcattctgaatgatgtcagtggcatcataaagccctcaaggtaattgaatatgttattgtgcgtatgttattttagaacatgagaaaactt

SEQ ID NO: 1126 - DNA, 696 bp, Glycine max
actgccaaccatgctgcccattgcgttgttggtgtttatgggcttcacagtttttagctttgagaccctgggcaccaacatgaatttcagggcaatatccacacaccctcacattgtacatcctcattagtctcttcgcacctttcctcacccgttccatgcttggagagtttcctcggcaagagggactatacttaattaatcaggtatttcagctagtaatggttttaaagggccctctgagattttatctggtagattactttcatcagcatcaatgaattccttcctccaaatacggatgataggctttcttctccttttggtgggaaactctggaatttcaacactggcttgaatgcggagctcaaccactgctggaattcgagggatagagaatctctcttcatgagtaatccgttttccaagacgatcaaagaggtgataggcttcaattggaattaatatgtcttcaacatgtgcattcgtccattcgtggaggccctagcggatgttggcctgtgtgcctttacatgacttgaatgaatgtccaacagatcctaaatggatttcactgcaccacctgcgttagtattccaatattagacgcttcagaacatttgatcacttctttcttttttcagtaggagacattaaattacatttatttgcaagggagtgtcaatttccagttgc

SEQ ID NO: 1127 - DNA, 906 bp, Glycine max
atcaaccatgtcaatttactatccaaggaaaggaaagataaggggaaaaaatttgctgtctgattccccctaatttaccatcattcataaagcctaacaaattcatacaataaaaagttgttacacaatcaatttacagttatcaacttaattagcaccatattacacaatacaaataataataaaataataacaataataaaattcatgacatgagtccagaaaccacaatccaatttggaacattttttgtttgattggaaaatattaggttcctctgatgtatgatcttagtaatataaacctttaataatccccatataaacaataaaagggtgaaataaatttataaggatgctgatctacacaagacgatcttgtcaactcctcaatctacatatgattctacagaatcataataaaacgaactcgtcccattttaataagaaaaaatgcaacaagagttgaaaggaacatacaaagctattcaaatccaaacattatcagtcattagtaccatcatcttcagcactccaattgaacaccattttgtctgattaaagctctaaatttcataggctcaagtgatggggtggggatggaaatttgcatagagacccaaggtttattttcctaaatgccaaattaacagagctaaatttcaatagattttaaaaaggttatgatgggatcaacaccctacaactttctcatcctcttaccgtatttcctgctggtttccttgtctattggtcaccactttcttaattaaatctctgttaaaattactttctctatttctcgacacggttctcgctcctcacatgtaccaatgctcaccaaattataactcttctgctattatataactcaagtataaaatgtaaagtctaagtttaataatct

SEQ ID NO: 1128 - DNA, 838 bp, Glycine max
tttctgctagctacgagagatggatcttataccttcactggccaccataaacggtgataattggagactcaagtcatggtgcttgctgccctccgttattgctcaatttacaacattgctttcaggaggaataaaaaaaaatacaacaaaccaactgtacttcaataatgaatcaacagacaagatttgacccaaatcatcctatgacaatatcttgtaactgaagaactgttatgcctaatcccgtatcttctggactccaacccagcgagcataatccacccacctgttcccagaagggaagaatcatgtagtatgtaacgaatgataagaagtgaagaagaaccaaatttagcaaaatatatacaaatatatcaagatcaacttagaatcttacaatagtgagcccaagaaagtgtttccagttctaacagcaaagcaaactgcgcttagcataagtttgtgctggtgcagcaaaggttcaagaatacgttgttcaataactccagctagtacttggtacctggtggaaaacaaagatttcctgttagattctgcttatacatgcaaagaagaactcattactgctaggatgtattattgaggtcacacaaaaaccgattaatctctaagcattgtagaaaagttgccttttttatactaaaacgcctgtatatagtattaggctattacatattatctaggccatggaatttgggaggaggggaggagtggatccatcatggtcagagggcaggaaatgcctccctcattcaatccaagaggatcatttcatcatagaagttatttatttgttaaaaaaaaatacttaaagtgg

SEQ ID NO: 1129 - DNA, 756 bp, Glycine max
aaggagttgactgaattgaggttgctctatgtttcttatgtgtttaatggccttccaattccatactctttttctttctttcttttttcttagcttgtggcaaatgattgtgagttttaaattatcgttgcagggatgagtgctctcaattgaaggtggacttggaagaaaaaattaaatctctggaactggttgtcagtgagaattctgaacttaaagcacaactggagcagatgactactaaagccaataaagctgaagctgaaaacaagatgttgattgaccgctggatgttagaaaagatgaaggatgctgaacgcctaaatgaggtacaatatcttgttatttgccatttgaacttttggaattagatatttagaattggttagtgttatatcaagggcggatgatggaatatggcagaacacctcattgtggcctatggcaccgccatcacaaattgcctatggcagttggcaaaaaatccaccacgcattccgccatgtagatatttagtattggttagtgttatatcaagggcggatggtggaatatggcagaacacctcattgtggcctatggcaccgccatcacaaattgcctatagcagttggcaaaaaatccaccacgcattccgccatggcagccatggtgccgccatttaacaacatcggtattggtacccattctctgtattattcgaactaagtgctgctgatcttcatctgcttctgatctcttaaatgtcattttgct

SEQ ID NO: 1130 - DNA, 963 bp, Glycine max
ttatatcatcaagcttcaaccctaactacttttactctatgtttgaatgtgaggaaagaaaggagagaatagataatagaaataataacaaatagggtgaagataacaattatttatttgaagagaaatagagtgagatgaaattttttagtcccgttgaataccgaaaaaaaaaaatagaatagaatgaagatgaaatatttgaattaatataactatattatattttaaaaataatgtaatttaatataaaagtaaaaataagtaattatttatttgactgagaaaataaactaaaatttgtcatattatatatatatatatatatatatataatataccggagaaaattactcgaaataatcttaagcttaatatatacataatattatttaaaaacttttgattttttattatataaatagacaagaaagtaaaaaaatgaataagaaatacaactaatatagaaatttagtaagacattaatcgagtttaaaattatataagacaatgttattataaataacgttgaaaaagaggaaagtcaatagtacacaataagcattcagcataaaatatagagtaaaaaatggctatgttcaattttttggtaatgtggcgatgttcaataagaaaaccatttattaataaaaatatagaataatttattttaaataaggagcattttaatattttccgtgttaaaaaaatcaatactttaagaaaaagacaaaacatttttgttttggaataaactgaaacaaaaacggaattttgcatattaaactggtttaatgggattgttttcggaaagactcgattccataacacgcagcaggcttatgaccttttttttctaaaaaatacgaatgaattgtattggaaaagttctccttctcactaatcctagtattcaatattaatatcattttaatattaatttctgattttatagaaaagttt

SEQ ID NO: 1131 - DNA, 810 bp, Glycine max
actcaactagtatttactgcctatagatatgaatgggacaaatttttcaaatacatgtatgaaaaacgagttctatactctttcaaacctcccctagatcaaactgacccaactacgttatcaaattggctagaccgacccaattaatatgaacaagttgacccaaacttgcccacatctctactgttttttaatgctcttcccaattagtatcattcaattttactcatttaaagtggaaacttctttatcaacaaaaaaaacgtgaaattttacttaaagggattattttaaagggaaaaaacaaaactatacctgttaattgcacaatcaattaatgcaaatgcattacaaattaaaaattatcgaagcttactctttttaaattgttcaattgacaggtatatcatatatgaacccaaatccataaatatttccggctgtcaaggggaagattccaccactagttgcattcaatcactatgcacacgttcaactagtaacgctgtactacatttttcacttatagtagttgtacaatcagaaatgacccccataaatatataaaaaaaaaaggacattctctgatcagaactcacgcgtccacatttatgttggtttatttctcccttgctctgataataaaaggttttggtcaaagaatggagtaaatgcaaaaggtatggaccctttcatgtcccaaaatacaagttgggcgtatgttaggtacatgcgtagttattgaacgacgtggagacaatcaccatactcatggaagtcgtcggttgatccgcgtacttgtccgctgtt

SEQ ID NO: 1132 - DNA, 850 bp, Glycine max
cttgcatgcctgcagtcttaatttcacacagctacaaatccaaatttggccaaagagaagagccttttgcttttatattgataattttctataacggttcaaacaacaatcagtattccaacagaaaacccttaaaaaactattggattgttaaaagtaattaaaacgcattaggcagcctgaaggccaccatttgactttattaagataggttctcaggaatataattagtcagccaatagtttctcacccaaagtggcaagtggcaaccaccatcttgtggggttcatgatcacgagttgaatcctaactaattgacctcagtgggatggggataaaaatgaaaaggttaacagatataacagggaataccgcaatacccacaaaaactatgaaaggtcattataaacctaactaggaaaataaaagcaggatcactaaggagcacgatagcattttaccttcacttgaagccttaagaacttgacataatccacaatttcatctaacatggctgctctatctgtctgaacatggtaaagatgcaccataatattagaagaattgaataatttagtattgttatattttttttcacaaacactgagcattcatgcaataaaacaacacagttatcacttatcacaaatatcatacaaaacatagcaccccttgaaatccagtaaatccatttgatacttcaagcatacttaaaactttaaatttccatgcatgtcaaatcaaggatatatgaacatgttattctggttttttaaccctttcattaaaagcaagttatcctgggatagcaatccctccactcaacaaatatgcctactttaaaattcct

SEQ ID NO: 1133 - DNA, 684 bp, Glycine max
tgtcttccacatcccagaaagtatgtgaaatacatcagcctttgcccctatgctcttcaacctaaataattcatcataatgtgccatcactccatctacaagaaggtgcagttcattctcatccatttgagaatttatagctgatcttatatcattgatcagccgttgatgctcatcaaaccaacgggcatagtccatgtcaaatgctagggcacctgaaagatacaaaaaaaaataaaaaaaatcagagatgacatattcacattccctcccatattataaaagtaattaaatctcagcacacttaagcatattcagcatgaaacttgagcttcaagaaattaagcaaatggtttttatcacttttggaattaagaaggtaaccccaatatctagccatgataataccctatccagcaccaacaagatacagacaaacatatcaattttgatcatcccctcaagacgtcaataagattttcaaaaagttgaaaatgcacaagtgaacatccctacattttaaatttaaatcatttgaaaatgtaagaaaggtaaaatgtttggattcaagaaatgtaaaatgatttagatttaaatcctcatcatcattcttgaatatgaccagatacacgtgcatgcatgtttttaagttgcctaagagactttgtgggcagagattttcgg

SEQ ID NO: 1134 - DNA, 710 bp, Glycine max
aatgaatactcaattttgcagaacaccaccaccccatcacatgcatgcacccatcatccccacgtgccacttcccttctttgcacactgtctcaccctcccaccaccaccgacgtttcttcttcttccatgccaatttctcagcttctcccacacccatcttggaagaagaaccttcttcttccaacacccccaccatcatccatgttgtagatgttaacttcgttgctgatgttcagcaacaatattccaagccagaacctgagaacttgaacgagttcttatgtgggttgtttgaggatccaaagactaaagaacttgcttttgactactaccaaaggttgaaagagagaccagagtttagacccgagaagccaacactgaagcacgtgatcaggtacttggtgagtttgaagagttggggttccattttgtctgtttcagaagactttaaggtttaccatgtgttgcctgatagggctacttgctctaagttggttaagttttgcattgagcataggaaattcagggttgctgagtctctgctttatgtttttaaagatgatagtaaggttgctttcttggcttttagttctggcatgagaagttacaacaagccgcatatgtttaggaacactattttggtgttgaaagatgaaatcgagtatggtgtcccgaatcagaggttttcacttatggaactctctaacc

SEQ ID NO: 1135 - DNA, 831 bp, Glycine max
attcaatgagtaggcattagcaaaagcagcctagcaaagaacattatcagcacaaaaaataacaaatattcagatgaccatccaccctccactaacctgatgtgctgaaacgccttagcaatgtgccatgatccccaagaggcataatacaactacaagccaaaaaatcaaccagccattaacagtttatatgaactttaagttgcctgaatcccactgttaatggaatatccatccatagtgttgtgggtaggagcataataaattgagccgaacaatggaaaccgctaccatataattgaaaatctcagcattttagaaatatgtaacataaccaataacatttggaaaaagtacggaggtcatgaaaggagatatatactttatacagttttcgtgaacagttccacgagttcttgaagtttcaactgtatcattgctcactccatgcttcgattggccataaaactttccaaatgcttcagagaactgattaaaagacacaatttgacaaatgaaggaaagagtaaacctccagttaacaacataaagagtaatactacatgatttagctatgccaactaatgacctcgtgccaacctatctaaagcttgatttagctgtcaaatttcacatcacaatatgagttttagataataagaaaatatacttaattgcattttttgtctagtgtgcaattattgtccctcactaattttttgttccgaagcctcagtaaaaagggaaggctatgttaagaccatcgaccaattgaccattacctaaccgaccttgttttgaatcatgttggttgatcttaccttgatgaaa

SEQ ID NO: 1136 - DNA, 651 bp, Glycine max
tgactacacacaatcatccttcgaataaataaaaagatggccacaaaggaggtttctctatataatactgtacttcactgtgctctggcaacttccttttcactgcttcataaaaatcacttaaatattgggtttttgacgagcaaaaccaggctgaaacaaacaagaaacatggataagtttgttagagttttctgggttaatttggactaatatattgattagtgaatttcttgtgtaaaaatgagttggttacgttcaaaaccaattggtaagtgtatttaatagatgatatggtataaggacctagtgcatacatgaagggtagaaactaggattacagttacaatttaatgtcaggatccttctctgctaataacactctgattgtgtacttctaccgtcaagtgtgtagaggagtaggagtagaaaatcttactcatgacatatacaaatgttaacacttgtgtagtcgattaaatcacattcttggaaagataatttcaagaggtacgaggtttattgtaattttcttggagttctaaatcctaatattaattcccaattaattctaacaaagtcatctgccacaattacagaaaaggacagtggatacatatgcaggtgaataaataaaggactaaggaagga

SEQ ID NO: 1137 - DNA, 607 bp, Glycine max
atcctcaaatgtctatggtttggactttggaagtcataacccaagagcttatggaaatttaagtgatcctgaaaaggaagaaaagaaagggagatacaaatcaacacaaatgccagagtacaacagcaacaggatgtgaccataatatttattctgtttaccaaatttttcttaacaaataattggtttgctaggaaaaccaacaaaatcaccacacttcgatcactgcaagcaccattatattgaagtagctcactaacttgaagtacctgaagaaaaatataccgaaattccattatactgccatggtatcaagtgagataaagcacatttataattcttcttttttgctttcggttacacacaagttcaaccatcttaattgggatttttgacacaatttgaatgttctacagttagcttcactattgatagagtgctggaccacaatttggagaatgtatgtttgtaagatgaagaaaacatgtgagggagagaattacgagaatgctgagttagcatgatggataggggtgcaggacatgaatacaggttatgcatttttgctttggtttatagagagaaaaacacttttctcttaagaatg

SEQ ID NO: 1138 - DNA, 709 bp, Glycine max
aaagtatacaaaagctttcgtacaagaagaaagctagcagattgtgcaattcttattgaacaaagctggtactttatttactgcaatgagaacctctgtccttctttactaaactctccatgagttttaattttatctttttgttttaatacataggtggaagctcttagattttgctgaactcaagcacagctctatatctttcttcaacattgagaaacatgaaactgccatttcccgttggtctagagctacaaccagagctgccaaggtatttctagcattctgcttcttcggatttttttttttatttttctccaagcttatccttttaaatttgaagctataaggaaatgatttaccatttctttgtgattgcaggttggcaatggtttatcaaaagatgacaaagctcaaaaacttgctttgcagcactggcttgaagcagttagtcatacacttgatcatactaatgctttatatacttgtaaattggcatgtcggtcattcatcaattattatttactgaattacttttaatttgcatcaaacagattgatccacgccatcggtatggacataatctacacttttattatgctaaatggctcaagtgtcagagccaaaaacccttcttctattggtaatattccttataaaaaaatatggggtacaatttaagctactatttcatatagatttagatcac

SEQ ID NO: 1139 - DNA, 712 bp, Glycine max
cctgcctactcggttatcctgtacagtcgacctgcagttcaatttctttctcaatttcacattctgctttctcttacaccagcctctaccaacggtctgaataactttgtttaattgcattttaaacactagtcagttttttaaaatataaaccaaatacaccctaactctcagtttcaattttttctttttttttcatatacaatactcagactcaaaacctgactaaaaaaatggaattaattacccattgatagaaacaccatattttgcaaccttgcataattggacaaaaacacaaacaaccttaaataaagtgcacgataagattacttaaagtgacacaatatctcaagaaatatcagcaaccactaattcaagatgaatacggaaagtgataagcagaagaaaatgacatcagttgctacttgctacaattgtattcaatattggtgtttgagtttgagaaaaaaattgtaactaaatccttcatcaagaatgagcaatttacagattccttgttcttcaacgagaacacattacatatataccctgatcatgctttaaaatgcatgcaattacaatcaaatttgtcatgcattcattcctacttgagcaattcaactagtaggactcaatgagagtacacaatcttcaagggcagatttgtatatgcgcatattttgaggccctcttggttcggagagaaagg

SEQ ID NO: 1140 - DNA, 691 bp, Glycine max
aatctggaatattctccgctccttcactgccgcctaagatactgtcataagcggcagccacaggattaatatgcggaaacggcaagtacacactatgcaccacgatcttcacgttgcgaatcacatccgaaaccctaaccctaacgtagttaatcctcattggcgccaaggtctctcctccccctgaggtagtgatgagcagcgactggcctcgctccagcgtcggcagagcagttccgaccggaagcttctcgagatccgcgatggacaggtaatggtttggcacgatgtggaacctgacgttgctgatgtatgcgtgcgaaccggagaagatggagaggtcatcgacggcgaacacggtcatgttgttcagcgtcacgagttccgcgtacttcaccttcatcgctagggcgaggatgctgaagccgttgttgcggagacgaagcatcgcgtctcggagcatcaggcgcatcatagcagcaggctgcgccgtggggctgttggagtggtggagatgatgccgagcgtgaccggatcggtgatctggatggaacggaaacgagagcgagttcattctctccacgtcgcaagagaacggagataacggagagacgaagccttgaagaccgtgaaccacgaccatgccggtgttgaacagatccggttgcgtgatctcgacgcctccgacgaa

SEQ ID NO: 1141 - DNA, 748 bp, Glycine max
cacccgatgatctagagtagacctgcagtcgttctgtaaggaagttcctattcatagttatcatctagtgtttctgcttatatatacttatttttatctatttattttatggataggtatacaacagtctagcagatagttgcggtattcctcaactagcaaagaggttgaaccaggtagaatcttcgtgacattgaaaacacattgttttttgttatatactcttaaaagtgttagccttatttagggctgtcagtctcccttcttcatgcagagtaatcttcacattttttccttctttacccaacactataatatttaggttcttttttataagaacctttggagaacaccaccacaaaagctagctattgtagtttgagagcccaacgtataaaccccacgttacttccaatgtgggactccatgtatatcttacaattggatcctagcatttttcctttttatgaagttggtcaaaatcattgaattatatcctttacctataagacggaggtttcaaagaaatgcacttaattgtttgaccttcaatgctgattttgtgatggctttggaattttgctttgaataatttttatcattctctacaaagggagaggaggaaggagagctgaaataatgatttgttgtgggtgatgggtctgttagggataaatttgaagagtgtatgaatataaccaaattataactttctcagagtaaatgcataccatgtcaacattggaga

SEQ ID NO: 1142 - DNA, 684 bp, Glycine max
gcatgcctgcagtttgcgtttcccacctgggtaaaaaaggtaaattagaaagtctataaagggactagaaaattatgaatcatgattaaagaatcttaaaatgctccaaaattaaaattggtacctatccgcattggaggtactccttcaccccctaaaatcccctgatccagtcccttgattacctggaatcgattgatacactctgataagttacaacatagcaaaacgatgttagaaaatactttaggataaaaagaattgtataccttgcccacaccaatgcgcatggtgagaggtctagcacgtttatagctgctatcgaatactatcccatcagcgaatctcgcagtatagtgaacctgtagtgtataaatatatatagcattcattcataacaaacgaactaagaaacatgtttgcatgctgaaagtgagtgagtaactaacattgataagctcacccagtggagcttcgtcaccgaagccctcagcaatatcgcagtagccgaggccagacttaacatagttgtactcacacaaaggctctgccactgttgcgtagtattcgattctcgtggcgtccgcatccaatgcagttaaacccatcacacaagacgttacaaccccaataccgattccaaccaacgggattcttataatcattgtgagctgcacatgacac

SEQ ID NO: 1143 - DNA, 702 bp, Glycine max
tgcctgcagctttctgataaaggtaggattcaataaaagcaatgtgttgcctaaatatgtcagaccatcattatcgcaatatattgattgacttcaactcaagtagtgtcatattttatctttctaatgatatatttcttatggattgatactatgtcctgttttaaaacgctctctctggtttactaacactcataaggaatgaaatttcagctctatttttttttagactagccagctcaagactttatccttagagaattttattgaaacaatgctttaaatcttcttgttcatctgaaaattgatgttatgttttttcatgagctgaagtcttggagttgctttttcccatatattctaggaggatgtgttgtggtcggattctttactctttcctctaaacgaattcttcttttatacgcaaaacaaccaaccagttatctactataataacaaataggttaatattgttgtccacatatcaagtcattgagggtagggaaacactgatttatatgcatactgttctgcatgactttgcataagatattcatcagtgttaagtctcaattctcaaataagctgttacatatgcaccctagaatgttttttgcaatggcttaagtatgtttagtccctctaattagggttataatttttttaagtccccccaaattaaagtttgtttttttagtcccc

SEQ ID NO: 1144 - DNA, 766 bp, Glycine max
  misc_feature (673)..(673): n is a, c, g, or t
  misc_feature (686)..(686): n is a, c, g, or t
  misc_feature (714)..(715): n is a, c, g, or t
  misc_feature (721)..(721): n is a, c, g, or t
  misc_feature (747)..(748): n is a, c, g, or t
  misc_feature (756)..(756): n is a, c, g, or t
ggaaaaacaagtgacctgcgctctcctccatgcttctgcagaaagggcaggtgctatcatctaactcaatttgtcgccttctcaagtttgcttttgtcggtagtctatctttgagtagcctccatgcaaatgctgagattttagttggaaccttgagtttccacagttcctcaaaagctccatcctggatctcctctgatgtctcccccgcagcacattataagcacttttagccgagtattgaccacaccccctcatggccaacacttttgggtttggtgcatggataatatggtggtggcttgtttaatggatctagaataggctttgatactatcttagaatgtgggtttacctcaacccaaaaagctagctcgtaaggtgagggttatcttctatttacatattctaccttggtcttatctctagccaatgtgggacttggattttttccaacaatcctcattgaaagtggaaccagcctctacttcatctccagcaatttagtcgagttaggagttgtcgcgggaacccactcaaccgtatcaagtgagattgggtggtggtaatcaaaagctgacaagggggcactgcaaagaggttaaaggtacaaaattggagactgtgtgctatctacagaattttttttggttgatttaggaggaggtgccgnggttttgggaatngcttgggttggcccctctaggggggggnnaaatcnattggggggctttgggcgtggctttnntgcccccnggggcgattt

SEQ ID NO: 1145 - DNA, 873 bp, Glycine max
  misc_feature (711)..(711): n is a, c, g, or t
  misc_feature (767)..(767): n is a, c, g, or t
  misc_feature (778)..(778): n is a, c, g, or t
agcttaaatgcctcaatattgtatttgtttcacaaagttataagattggtttgatggttgaagggagaatggaggagggagaggtcgtaggatcgaatccctctgactaacaactaacaatagccgataaaaaaaaaaattcatcattctatacaaaattaccctgtttcaacagattaatgcaggggagaaacatcttcccataactgcatataaagtgcctataatattaatatcccgtaaggcttccttgatagactttgggagaggccactgcaatatagcttcaatcttttgagggtccatagaaactcttgctttggatactatgtgcaccaagtagctcatctctgtttttccaaaactgcatttctttctattggcaaagaggtgatgctgtctcatggtgcctaagatttgcctcaagtgttgaatatgcatttctcaggacttgttataaacctatatactgtcaaaaaatatcaatacacgtcttaaacagggccttaatgtggtgttcatggcacattggaaggttgccagggtgtttgtcaatccgaatggaatgaccaaaaactgtgtcattggtgggttcagaaagctgtcttgaggatatctaactcatgtatccttatctgattgtatttgtcaaccttggagaagttgcaatcccatttaactcgtctaggaagctctcaatcactagaatangaaacttatctgggattgtagctttgttgagagtccgattgtccacacgggacctncaacttccatnctttttcttcactaaaatactagtcttgatatggcttgtgctaggctaatattcatgacataacagcgagttttaaactcaataaataattaaaa

SEQ ID NO: 1146 - DNA, 687 bp, Glycine max
ggagactgtgagaatatattcttagctttgcagaagctggtgggaaaagcgattaatgttgttggtgaggataatgtaacttggacgttgttgaaggcactgaaaaaaggtgagagcaagcttagtgaggcacttaatgttttgcgtgagtgttttagtccagtcactgatgctttcttcgggagagatataatttctgatgttgttttcagtagaggttcagaactcaatcgtttgaacttttgtggtttttacactgtgattttagagagggagggggaagtagtttctgttgccactttaaggatttttggcaagagggttgctgaaataccctttgtggctaccagggtgcagtgtagaaaacaaggattgtgtggcattttaatgaatgagattgagaagcagttgacttacttgggagtagaggagattgttctgccttccacgcctaaggtgatagacacttggacgaactcatttgactttgaaaagatgacactctcagttaagtcaaagtttcttgatcatgtttttctggacttcgaggataccatcatgtgccacaaactactagtggtgaaacaaactgttatatgattggaaaaagcctaatttatgggtatgtaacaatcttgtattacattaatgggaaattattaaattgttttggaaatattcacttgg

SEQ ID NO: 1147 - DNA, 654 bp, Glycine max
attcttcttgctacaacatccacagatgggaaatgccgagtattctccaccttgataaaaggcgttgatgcaaagtatgataaaagcaactctgaatgtggctgacttttactttttcttttttatatcattcaagtttaaatgttgacttggcacagggattcaaaaaagggtacttcatcagattcaaaatttggagaggttcaattttaactcttattcctcatatgaattttttatatttataatctacttaatgtataataaattttcatacatgttgcaatagatacattgcttgtgaagcttgtttatggatgtattgttcacctgttttttgattgaaaagttgaaactaatattatttataaaaaaataactttgttaaggtcttgatgtctggatttatatatatcagcattttttagcatatcgatcaatgactgaatgtggctgaaagagtactcttgcgaatgtttgatattttagagttgaatgtttgatatttaattgaatgcttataattatttttattttttaatgtattcttattctctaccttagcttacagaaaaaagaaatcccaattttttgacaaatgtgccttttttaataaaaaaaagatgaatttttaaaggttttttattaaatccg

SEQ ID NO: 1148 - DNA, 656 bp, Glycine max
aatatagtgaaccgttcgtgaaggaattcaagatatttcatcaagaactcaaagacttcttcaatgctagcaggtttgacatgactatcagtctatcacaaacatgactaagtatcccttgtaatcacatgtaaaagttttgtttcttcttcacatcaatttctgttattaaattttaacattatgttgttttctattggaatctccctacatgatcacagccccatcatttgaatacacaattcttcattttgtatcactgtaaaccaatagactgatcatggaacttcatgcatttgaatcgctgactagaaaatcttcattttgaagtaatcatatatttccttaagtcagaaaatcaactggttgaacactatgtgatagtttctccttttaggaggttccatgttcaatcccattggaagcaacttgctaaagggctccaataaaaaatggtggcccaatgcattaatctccagtgttatgaaatgtggggagtgtcatgcactccacatgcagaaaggcttctttcaggactagaacttgtaggctgtgactaccaaggtcacaagacagcaaccttcttgtgccaaggcttaccatctcttggcctacaaagggtgtgtgtgggggtgtggtggaaggggggggggggg

SEQ ID NO: 1149 - DNA, 661 bp, Glycine max
gcctgcagctaagattctattttatcaagaaggaataattataatgaaacttttatttgagaaatagaaattagattgaatcaatttttgtagattctgaattgtcatctgtgggtcacctaatttctaggaagtggaagaaattcttgaacttttgaagtcgacttggagagttttaggaatcacggagacaatccatcaaacctgctatgcatgggttttatttcgtcaggtatagcatcacattttcttttaatgttattttcaagaaccactgtcaattttatagttggagacttggggttggacttctatactgtactgttgttgattgcctcaatgtatttgtaattaccataaaaaaggtttaactacttttttcgtccctgcattttagtgttttttttttcgttttcgtccttgcaatttttttttcattttagtccttgcaaaatgtgtttatttggttttttgtccttaaaacactttagatagtgctttgaatagaaaaaagtgctttgaacagtcaaaaaaatgctatcgaaagcgctttaaggacaaaaaacaaaacaaacatattttgcaaggattaaaactagttgcctattatcactgtggcccttgttttcggggtttttccctttcatgtttcactctccct

SEQ ID NO: 1150 - DNA, 698 bp, Glycine max
cctatagagcccccctgcagcctgcattatctcacggcctgtttgtgttgaaccagtaaagctaacctgaacataccaccaagtaaagaagcatatactcgaatatatagattaatataatatttaactagtcttatttaagattttatggtacttctatatgcttgacatgcaaatttaattaccttatcaacatccatgtgtgagcttaatgcagcaccagcagttgggccaaatccaggcactacattgatcactccatctgggattccagccttcaaaataaggaaaataatctaatttataagcttttatgctaaagtaacttgtgatgaagagccatgtatgcatttgtttttaatcgacaaacgttaattgttaataggagggatcgaacccatgactttttcctccttttcttctttcttaatcatccaaccaaccttatatctccaagccatgcatgcatggttgataaagataagaatgaatcatttaattgttgaaaatggatcacatgcacataccaatttagcaagatgagcattaaacaaagcagagaggggtgtttgctcggcgggcttgaggaccatggtgcagccagcagctaaagaaagagcaaccttgatgtagaacatggttttgggggaaattccaggagtaatgtgtcccacacaccaagtgggttaagcaatgtt

SEQ ID NO: 1151 - DNA, 677 bp, Glycine max
agttttccccactcgtatcgccagcacccaatgatcctccccaaggtcaaatccatttctcttccctcttcattcatgcaatgcctactcttttctagtatattagcgtttaattttatcctttaataagttacacattttatgttatgcatatatcattgtactctttattattatttattaaaatgaatctcaattatcttatctagcaagtctgttatgtaattttatagttttcaatcgattatggtaaaagaagtgtgacagagaatatgttcataaatatattatctagaaatacaaccaaaagcttattaaagttggtgatatatagtccatagcaataacactgagaaaactcaaaattagattagaccatacaatataatagagtttgagtagtttgcaccaacttactggtgctgtggtgcaggtacatgtgtgctgaagttcaacacgtcccaatatgtggcatttggtgagtgcggcgatgtgaatgaggttttagacaagtggggtgacgatgggttcccgacaaccttgtgctgtcgaaatgctctgacggttttgtcgaatgcgttggcatcgcaacccctgaactcaagaggacaagtgttcatttcccaagattagtcgcagagttgtgccaagacatttcacccgcagcaagaatgtcc

SEQ ID NO: 1152 - DNA, 689 bp, Glycine max
tcaagcctcacacaaaaaacatgtcactataatttttttaatatttcatatttactgttattagtttaaaagatcatatgctgtcagacagacagaacattcacaaatagttcatggtcttttttcttttatgcatactgattgattacaagagtataaactatcaaaacactgaaaacagttaactataaataaatttatgaaaacacaccttggatgataagggttgcacatgtgatttgctctccgaggtttccatatctactgaaactggggcatgaacagcaacataacttgacactgtctcaggtttctccatcactttatcattgtcatactgtctctttggtatccctgttttttcttttgacttgtcatttttaatattgggggcacaaggtttttcacgctcaagcattacaacagtcttttcaattataggattatcatcttcatcatcaataggtgaaattccaaattcatttttctttagcatagtaccttcagaattcatagaagatttgttaacatttagcttctgtgtcctctctttaattgatgatttattttggaaaatgttgctagctttaggtgttttaatttttagttcgggaagggtcgcagtcttgcttttatcatgattcacaattgccgaaatctttttgaactcaatttcattagctgctttt

SEQ ID NO: 1153 - DNA, 648 bp, Glycine max
tcaagcctcacacaaaaacatgttactgtaatttgttcagtatttcataattactgttatttgtttaaaagatcatatgctttcagacagacagaacattcacgaatagttcatgatcattttaacatatttttcttttatgcatactgattacaagagtataaactatcaagacagttaacaataaataaatttatgaaaacacaccttggacaataagggtagcacatgtgatttgttctccaaggtttccatatctactgaaactggggcacgaacagcaacataacttgacactgtctcaggtttctccatcactttatcattgtcatactgtctcttgggcatccctgttttttcttttgacttgtcattgctaatattggggccacaaggtttttcacgctcaagcattacaacattcttttcaattataggattatcatcttcatcatcaatggatgaaattccaaattcatttctcttcagcatggcaccttctgaattcatagaagatttgttaacattcagcttctgtgtcctctctttaattgatgatttattttggacgatgttattagctttaggtggtttaatttttagttcgggaaaggttgcagtcttgcttttatcatgattcacaatagc

SEQ ID NO: 1154 - DNA, 714 bp, Glycine max
tgataaagaaatctgttaaattgcataagattacccgtcacctagtgaagcattgttctttattttcatggttttcgtctctcatctcagttgccagacagaggcttaatgtagatgaacataaacttttcttgaagcatgtgttggtagcattgaaggtaagtgcttgattcttattcagtttgtagttcctgttggatgaagaaggtcctcttcccctcttccttatttgcaccatttattatgtttctctaattctatctgttaattttcctgattttcctttcaaatgtgttgggatttttctaaagttatggcttgtcagcctgcatatttctttagcaaggtttgttcattgatcattgtgctcaagagggtaaaagagaagcagtttgataatgatggaattgtcaacacccccgcccctctgtccctctacctctagagttaaaccaaaccactagatctcacagcaattcacataacatatagcaattatcaattcacaatgcagacaccagaagaaagagagactgtagaatgaagattaggatctcaacagatatacctctcagatcccagagctgtatgtcctaagccccaggcaactacactcacaaattctgaatatcccccctcccaaatattccctttcaaccatagcttaagctgaacagaatctccacttacataaccgcttctttgcatgcatcc

SEQ ID NO: 1155 - DNA, 665 bp, Glycine max
caatgaatgatttttttttaaagtcgtgaattaaaaccatgacagagactaaaatgattagttaaccttcacaatctcaaaaacaagaacattaagcttcagtttatccaaaaaaagaaaatttcacccaatttcaccataaacacgtcactgaaggtaaaaatctaacacactcacggtcaacattttagtatcgcattcacagcaattttcctgcaatatcaaggattcggaattgaaaacattgcttagtctaacaactaccaataagacaagagtgactcaaaagaagaaacctaaactgaaataaattgcgccaaattgcagcgtgaagcattatcattctttttttagtaatttttttatacaagaacgatacagtgaaactggattgttcctatacgttgttgctgtgtgagtaattttgacaaacattaggagggggtgctgctgcggagcctgtaaacgatgcgtcctttggaggagtcgtagcgggtgacctcgaccttgactctatcgccggggaggatccgaacgtagttcttgcggattttgccggagatgtagcctagaatcaagtcctcgttgtcaaggcgcacgcggaacatgccgttcgggagggactccatgaccagaccctcgaggacccacttctgctcgccgga

SEQ ID NO: 1156 - DNA, 616 bp, Glycine max
accgaaaatcacattatcatgcatccggttcagaagtttctttgcattcatccttttctggtgatcttctatactcctaccaaggtttgctatgcactattcaaataaaattgcacagggatcagtaaaccttatttatctaattgtcttaaaacataaaacccatagcaaaagtgcacctggcgtttaatctcctcaattttcaggtacaagctagtttccccacttgcagttgaaacataatgatatatattaatcacaggagtggtcacaaaagattgcaattccttgtcttcaacagagtatacctacaaatgagattcaaatcactagagattagtaaaaccatgcccagtatctaacaagcagcacaactaggtactatccacattccacaagaacaatgcactttgcatacaaggtaaatataaggaatgcagaagagtttataacagtgttttactgtaatgttgtgtgtcaatgtagaccacacaaggaaaggactacctatggagggttttgatcaacaaaaaaattgtgtgaagtgtcctaatgtgtgagcggccgagaagtcgacaatcaggggtgttacagatggtattggagcagatatctc

SEQ ID NO: 1157 - DNA, 769 bp, Glycine max
cttttggataattctattgatatgttttagcaggtttgttctctcaattttaattttgcttattggttggtgatttaaactttttatcattagaaaacacgtttatcaaattttttaactaattttagttatatgacacattcaaatctccaatgaacaactgtataatttcaactatacattgatctggatatcaaattttattctaagagaaaatgatgtataattaatttatgtattataatcaatatgtgatcataccctgtattagtgcctattattggtatattcccgaaaaatacataaaagaagaaaaggctgatttatatttttcttgctgagattaagttagaactgattacttctttgcttgcttgagtagagcaatggtttatgccagtaaacacatacatatagtcttgctctcaaataaaatttgaatctaaagatttcacttttgaggattttcctagaccctaaatcaacaaataccaataaaaatacaggagcaaaaggaaagttagtctcttcaaggatgtggtaacatgagctccagagtatattaatctgaccaatcaccacccaaatagtaatgggtcgaatctttgtacatattaatttgtattgctgagcctcttgtcttgacttgttcgttgagttataatttctaattgttgtctcaataagtaacttttcattgcgtaagattttttttttcatttggcaattattgaatgtggtaacatgagctccagatatattaatctga

SEQ ID NO: 1158 - DNA, 653 bp, Glycine max
tgctgctggtgacggcggttgagaaggagccggtggtggaagagcagaagactcggcaacggtaaaaaaatggccctgcgagtgggtggagcaagtgttacctcctgttacaatgctgaaattggatgaaccctgcaaatcaaaccaacacgttttgcaacagcacccagagcaggaagtttgacatggtggaacttgaccttgatagggactggagccagagcaggaattaacatggagcattggtaaattagtagctgacaaattggaggcattgtaagccatgagtcccaggactggagccaagtatgtgtaattgtgcaaagggtagtagctgatgggccaattccctaaatattggttcaccaaaaccagcctctttacatatggtttggtaatgacccctatgggaatctcaaacttgttgtaaatgggaaacccccttctcctcatggtgccactccttaatctcaattcggcaatcttaaccccagtcaaattggaaggaagctgagttgttgcatttctttctgttacatcacattaacaatcatatcaaaaaaaattctttctttctccaatctctgtgttatgatgcagagagcacaggggtatcccagaataattttctttatttaaatttctcaataact

SEQ ID NO: 1159 - DNA, 707 bp, Glycine max
caccttcggagggaaattgttctggataactgtgagaatcttcaagaaataaaagggattccatttggcattcaatatttttcggcaagggattgtcattcattgtcttccgagtgcagaagcatgttactgagtcaggttgctattttctacatatttgacttgataattgatatattttcacgttcatccattctctaaatataacgttgctaaatgtacgaatgaattgtgataaacaggaattgcatgagactgggggatgtggagtgttttatttggcaggaacaaggattccagaatggtttcatcattgtatcaatggatcgtcaatttctttctggtttcgtaacaatttcccttcaatatctctgggtgttgttgctggacccaagagttatttaaatgtgcattccagatttaggatcaatatcaataacaatataacatttaatttaggaataaggaatcatttggttcaagtacgtcatcatcgggtggagctagcctcgatacctatagttttttggggaaataaatggaatcgtgtggaatgtactgtatacccacttcaagagttcatcaaacaaattggaatccatgttttggaacaaggaaacaacatggaggacatccaatttaccaatccgctgtcgtcctcaagggaaatgaacaaaaagaggaaaaagaggggaacccaggcgttc

SEQ ID NO: 1160 - DNA, 696 bp, Glycine max
attagggtcatccgagttggtcggcctcattgccatcagggcggctggaacagaaatccgatgcaccgtcaagcgcgggaaacagaaacccgaaggcatcaaaagggggaaacatcaaaccaacatggaatggcccctaaccttgggtaagggcgcaatgaaggggcggccaagctggtgaagtcgctatctgaatggagtggccatgcgctgtcacgcaccggcagaattgtgcgcacagaacctgtttggcctggacaaacagggcgcgcgtgggagtgtggctcgtcctttggtgacgctgtaaccaccaacatgtagatcgttgaatggcgagtccaatggtgtagtcactggtcagaaaggtcactggaggacagcggaagtcgccaggaaagttataaatgttgccggaaaaggagcagctagtagaagggtccaccagaatgcgaaaaacaaaggaaagaagtttgccagaaaaggtacagtgagtataaaggtccaccggggacaatgggtgcctggtgggggacaatttttgttattccctcaacctagctctagataccatgtgaaaatgagagaaactgagggatatttggactgaaaaccgtgtcatagtacacagcagatgttcctttatatagattaattaccattaattataggaagatattggtctataattctgatatg

SEQ ID NO: 1161 - DNA, 673 bp, Glycine max
tgcctgcagctagacaaagtaccgtcgttctttcgcgagattgatccaaagcctaaaaaacacactatgtggactatatctcatgacttcaccgatggtcaagcttcagaataccggtacatatttttactcttcctatattttttcctctttaattttatgttgaattaaaaaatgatataatttgctcacaaatttggtccattagtttatactttaaaatatagttttaacttgtttagacattttatgtaaaacaaaagttatttttttatttggctacaattataaaaaaatacatttttttaattttagtttaaacagtagttataattcgaccttgttttagaaactattagaaataacttctcataatgatttttttttatatatatattctatatttttttccaaaagtttaaatatacacactaaacatattttaaggtaattttttcaaaaaaaaagttgaaacaattgtgtgcataatataactttccataggagtttcactcctagattagtagatgtttagttttctactctccttgtaaacaaaaaaatataatataacttttcatctcttatttttttcatttttctgctaataatatctgttgctgacaaacatttctattcaggagacactatctacaatttcctcctggagttc

SEQ ID NO: 1162 - DNA, 726 bp, Glycine max
gttgcctgcagcatgtaataaactagggagtgccttgtgctttgcacggtttttatttttaattaaagaaaaacagaaaaagagcgtaaaaggaggagagagagtgtgaagtgggaaggaaaaaaaaaatcactgaccagtcaacacatggcaacggctgaatagtttttgtactactatagactatagataaaatagaataataacatatatcaattatcaagaacaaactagaaaatgttttaacaacactggtaagattttggttgtaagatatttggaacataaaaaagataactggctaatttaaacacactgttaatgatgtttgtttcactacattatccaaaatgcctcactgttttgttgtttgaagaattattttattcattggagtatcagatttttagttcagaatgatagtgtatattctgtataggttatagtgtatgtagtatagacctacaggtagcttagagttacctctcagttagctatgacagctgttgagttacttacaacagctgttagtcagttagtgctagtgctctatgtttgtactctgtaaatacatatcttgtaataaactcaattgatgaaatgaaatacagtttaggtcattctctaaatctctccagattcctttagattttacacagaacagtgaaattgcctgtccctaattagatagcttgatggatggattgcattctgctttcctcctgg

SEQ ID NO: 1163 - DNA, 632 bp, Glycine max
atttgcataattacatgacaaaaagagtcccattctgaatcaacaatagattcagtttccgacagatgagctggatcactatctttccagagaagaccaagaagatgtctgtaataactagaacgaagcccctcagcaagtgctgcgatgcaatcattagctaatgttgatgaaggactttgtcgtaatgcacatctaaagatctatatggaaagcagagatttcaaatgatgcaaagaaacagactattagtttccatttgccaagaaacctacatatgccaacttcaatgtaaaaaatgaaaagaaatcatccctaaatacaagtcaacatacctgtctattatttactatcacattgactcgcccctcaacagcatcagccaggcctgtaatctttaagtaattgggaagaggagattcttctgaaagctccaaatcatgcaaaatcttatctttatttaagcaagaaggtagcacatatttgcacaggcattgcttcccagactacaatataagcatgacatattactaaaagaaatatcaaactttagcaatcttaatggcacttgatggaatcatgaaaaagggtgagtctgagaagactgacaactttgtataaagtataaaaag

SEQ ID NO: 1164 - DNA, 658 bp, Glycine max
gacggcccccccatgcatgcagctcgcatgcctgcagtggatacacgaacgatgctgcgttgcgtttagagcgtgagttgtgtgagggaggttgaagaagggttttacaagttggatctcttattaaaatcagccgtattgctacagcccaaaatatcgggttgggccttagtaggcttcatcactatcttgtcttgctcattgcttgggagacacagaaggcaattacttcatgtatctccagaatccctaaaaaattgaacatgattttagaattgatttaggaaaattgaaaagatagaaacaaaaaattgaatccctaaagaggtctagctcatttgattgagttaggtgcatgaattatttaaaattcttttgtatttgttttcaatccttatagatgaaaaaatgttagtatctgttttccattccttgtctctattctttttttataccataaaaaaaaactcataatattaggattgtttataaatcattatacattcaaatataaattaaaattttcttaatcaattatacatataattaacttttcacattatttttcaatggtcatcttcattattgatggcatttaattcctctgaaataaataatatatttcaaaaaaaaaaaatatatttgtaagcattaattg

SEQ ID NO: 1165 - DNA, 684 bp, Glycine max
agtcttgcatgcctgcaggaagctcgtaaagaattaataaaagtatgaccttgtttactttctccctgataaaattataccccctggtccccttttctctatccatatatagagatttgctaatttaccccgaccttttttaggagtattttaatttagcaaactataccttggccttggatgcatttaagaaaatcctagttatatctttcacttagattccatggcttaacttttctcttcattgattcttgaagataaccactctaaaaagcaactgcttctgttcctgcatctaattatgccaagctgtgaatatgtttgcaagaagattctcttcacctttctgaaggaaataagaattttgaaattctattttgtgtgagtagattgtggagactaatatttttatgttttaggggttagacgatatgctgaatgctcctagaactaaaattgggctcaagagaatgggagaacttgatcagaaggtttttgtgaataactgcaagaaaagatttcctcttgaagaagctgggaccaaaggtgtcgagctttgttctttgtggcaggaaaatgtgaagaattcagcttggcatccatttaaagtggtcacagttgatgataaagcagaggtatgtacaaccttgacatgctttgtgttcataaaggagttctgcctca

SEQ ID NO: 1166 - DNA, 926 bp, Glycine max
atagaggctgtttgcaaccatagagtcactcaccaacccgaaatcaacatcatcaaagttgaggggacctctcacctttcggttgctaaaacatggaatcaaacacgaataaacaaggttgtcacctttcaataatataaatgagattcaaatgtttaaggcatggagaaaagcatacccattcaaacggttattgatggcggtcaggtcttttgacgggctctgatatgcatgagtgctctccccaacacatgcataatagctttttgagctgtgtgatattagagcctccatctgtacacacataactaatgaatacacttgtgtttcataaaagaaaatagaagattttgttctcttatctactagagattgtatcagtatgcaaattacaaaatacagccatctatgaaaaagaacaaatcgaacactacagtcctcacaagcatgcttcttccttttccaaaataaggtcacatgattgttatgcactaactagttatggaaactgggaaatcatccagttcgaagaagaaatctaaatgaataaattagtaccttggacgatcgtaatggagagacatatacgttatgtgtggctgacactttttttggagacatatcaaggaagggtgggaaaggtgatattttaggaaaccctggacaatggactaaatgtcctgatagaaaaaaccccccggtcatgggatccgagatggcctaccatggagtggggaaccttgaagtactttcttataacaggccttattttatacttcaggttcgcgctttttattggtcccgggccattaaaacatggctttaaaggagaattttttgaagaaatgtaatgcccggcggtctgttctaaaacataggccatggggtaaaaaaacttttgtttttaccttggggccagaaaaaag

SEQ ID NO: 1167 - DNA, 663 bp, Glycine max
caccccaacacaaggccttgcatttcagaaggtgctttaattattttcagaaacaaccatcctagtgctgccccaatgatatatgtgagaagaacattcaatggcatgaaccaccttcatagttcatgaaagtgtctcagctacaccaattaatgaaagaaagagatggaaaataaagtaagagttaacattgaaaatgtaacagaatggcaagaagacaacatacaccagaagcaggctcccaaatgttatagttttagtcagggagctgcaaacaagagccggaagaaagacaaagtatactatctgtacataaacaagaaaaagtcattgagttatttgtgaatcaccaatcaagtaaaaagagccttgtaaggacggaggtactaataaattggaaagagagaacacaaatacccacaagcacaaaattgcatgcattaattacaaagattaaatattaaccttccgttttaattgccattctatactagtcactagtgaaacattaaatattttcttccaacttaattaactatttatcacggagtaagaaaataaaagaagtttaaatgagaaaaggtgttattaatattttattaggaaattgcataataaattttataaaaattcaaaaattaattatactttcttaatttctat

SEQ ID NO: 1168 - DNA, 830 bp, Glycine max
tgcttgagtcccaaagaaagaattaatggtctcctcctcataggagaccatcttccctctcacccagctggtgtgcaggggagttgtatcaccctcaatgccataggcattcgcatagaactcgcgaactatttgagggtggaagttctgtgcaaaggagcatagcttctcccactttcgccatgttatgactttctgtatctcatcatattctcctggcttgagcttgaagtttttctctgggatgaagtttctcatcttgatttctgtctcgtacctctgctcatgagttacagtcctgaacttagtggggtactcagttctgtgtgcagactgagaagaagactgatccttcttctgtctcttagctggaggctgttcaggagccatacctgtggaaaaaccaaatttacatatccaatcaatctcaattcagttcaagcaatgtaaacaagcataagattatatccgatatttgcattcaattccaatgagctgagttgtgttctatttctaaattttaaactaatgcagcaagatttttcccagatcaacttagctcccctctcagccaaaagcatgcaatgaaagaacatatctcaagtaaagcaacaaataataccaaggttcagcctttcaaaaaaaaaaaaaatcataccaagggtcagtttctccaaaggtttggccccgatttcatgatttatcaagaaaattggttcaaaggcctttactttttaaggcaaaagaaccttctttttttccattaacaattctgaataaaaaggtttattagcacataccttggcttttatctgtgttacccaaactcc

SEQ ID NO: 1169 - DNA, 697 bp, Glycine max
agctgagcatgtcagactgcaatctctctggaccccttgatccttccttgacaagacttcagaatctatcagtcattcgtcttcatcagaacaatttctcatccccagtgccagaaacctttgctaattttccaaatttaaccacccttgaccttagttcttgtgaattgactggaacatttcctgagaaaatctttcaggtagcaacattgtctgttttagacttatcattcaattatcatctgtatggatctttgcctgaattcccactgaataggcctcttcagacattgattgtgagtggctcaaatttctcgggagcaataccaccagctgtaaataatcttgggcagttatccatcttggatctttctaattgccattttaacggaacactacccagttcaatgtcaagactcagggaactcacttatctggatttgtcatttaatgacttcactggtcaaattccatccctgaatatgtccaagaatctcacccatttagacttcacaggcaatggtttcacaggttcaatcacatatcattttggcggcctaagaaatctgctccaaattgatttgcaggacaacttcctggatggaagccttccttcctctcttttttctctcccactgctacgaagtattcgactttccaacaacaatttccaggatcaactgaataaatattcaaa

SEQ ID NO: 1170 - DNA, 759 bp, Glycine max
agaaagatgaccggtccaagtctcccaaaaagaatcacatgctggcgttaaccgaatagttcctaaccgattgattattcagggattgaggaaaacaaccataggcgacatcagtcgtcaaatacacccgactgatatttttcgagaaacatcaccggaaatcatttaccaagaacggttgtttttcggccgacattgtgcaaaagtttttgtaatttttaccaacgccgggcgataatatatttttacggttgagaaagttttattgtctgatgtcacccataaatagtagactcgaggtcgggtaggctttttcatgcgaatttaaccgaggttgtgtttcgaccgaaaagtgtcggctctaattttatcggctgagaaaacactgccaaaccttggcgaaaaaatatgcctgatgggagattgatcgaaaaaaatcctgcagagaaagatgaccggtccaagtctcccaacaagaatcacatgatggcgttaaccgaatagttcctaaccgattgattattcagggattgaggaaaacaaccataggcgacatcagtagtcaaatacacccgactgatatttttcgagaaacatcaccggaaatcatttaccaagaacggttggttttcgggcgacattgtgaaacggtttttgtaatttttacctacgccgggcgataatatatttttacggttgagaaagttttattgtctgatgtcacccataaatagtaaactcgaggtcggggtagggttt

SEQ ID NO: 1171 - DNA, 652 bp, Glycine max
aacttgatcacaacagaattaacaaaaccaaataaatgctctacttatatacttatcttcgaagatatttcttgaattaagagagttaagcaaaataaacattaaatttaatttacctccttggcatccttccgaggaatgccttctcgtagaccaacaagtttctcaacaacttcaggctacaacagcaaaaaaaaaaaaaaaaaaaaaaaaaaaatccaccaggataactaaggtagaaatcttcacgtgcattaaaatttgaatcataaaaatattttaaaagataattttctaagcttaaaaaaataaactgtgataacttgaaacccactgcaaaaaatatttcaactgcttaaagaactcatacatgcatttgtgaatgcaaaaattgagattagattgggcataattttaccgggcagtcaggttgatgttcgagtatatttgtatagatgagtgtaaaggtatccaggctctctgctgaagcaagctccctcaagtcgctaagtacactcactctgttttcaactttctaatccaaatgaaggaaattcgagtaagaaacttgggcagagtgtgccaacattaacagattcggaactggcacaatatcgatgttagagagcaacagtaacaaaatgtctaaaag

SEQ ID NO: 1172 - DNA, 744 bp, Glycine max
tgcctgcagctttctcgcgctctgagtcttttcaggaaagcatgtaaaatcatgtattttgttccagttttatggtcagctcaaccatgtcaaatttgttggatgaggcacagaagacttctgaaagttcatttctgtcatggataattccatctattgatgttaaagaagatagccatgtcaagaaccttgaagaaattttaagctgtatgttcaccagtcaataagaatctcaaccttgtgtcaccatttgcttcatggtaaagtaagagtcatggcagaacttgaaatctgactgaggtatgatatttaggcttcaaaacagttgcaatcaagatattactcctttgagttgattctttgtttaatttgatcttcatattttcatcattgtccggtcaatcttaggttaggaatttgcatgtcattgacttctttatgtgctgttttcagactttttgaggaatttattttattggtttctttccctttattttccaaaagattggccttgtattgtatcttgagagttgattatagcaaagagaaaaatgctcaggtcacaggcttgttgtagcaaattttctttcttcttgtcttatacatagatgaagtcaaaatgatgatgctattggtgacaatctctattgtgatcaggtaaattatagtcatatattttcttcaagacatcaatgcataatttagagcccaatacaaacttttcccttttgactttacctggtc

SEQ ID NO: 1173 - DNA, 809 bp, Glycine max
  misc_feature (694)..(694): n is a, c, g, or t
  misc_feature (714)..(714): n is a, c, g, or t
  misc_feature (770)..(770): n is a, c, g, or t
agttagtcttattcttatgcatattctctttattttctctaacaattgaaaaccaggttgaagttatggtggttcagattgaaaaaatttgttaaaatgaaaagaattatcctctgaactgtttttaatattttagggtttaaacacttcaggagtttatgaagaaaatgaaatacctttaaattattattacatacgttttagttacaatgaagacattaatttttaactcttcgctccccttttcattgtctatgaagaaaatgaaccctagagacttagtatttttccctgaagtggcagaaacagtatatgacaactgacaagcatctaacaatagccattgctttctagcttccacttcttgaagtgttcaattaaccaattcatgtgtttgcagaatctccaaagtcaatccatatgattttacctttcatgatatgtcagtatgtcaaagttgttcatcataaaagtccatatcaataccactcaaccactccagagatcccagtcctctccaagattaaggactaacaaaaaatatccaacaattgtttagtcaaacatatggttggccagtcagaggcactagcaaaacttaaagttaccttctcattcctacctgatccaaaactttatctgacattagtattccaacatgaacacatataattaatggacttgaatctcattntgagttactttctagcatanaatgttttcggcctctcaaaatattttgaaattcaggttttagtcctaccaaaatncaatatggtttttagtctctatatttaccaaaaattatg

SEQ ID NO: 1174 - DNA, 666 bp, Glycine max
atatagcagtagaggaggattttacccatataacgaaaccgcgtgcaacctcctttgagagacacctatagatcatctttttcttgcggaatttttttggagagaaaaacacatgctgagcagatgaggacttgttattatttctgtttagattacacaacttttgaccaaacaattttacgagacaatacaaattccttgattgcttggttaatcccaaagtaaagctctactactattgatgaaaaggagaaaaaaagcagtggtgttagttgacagttcccatagctaacactaattatgaatcattcacacctagttttttaattaccatgatattggtacagaatattcacttagttttcaataattttaattgttctttatcctacaaattaaatctatctagctaaatcatcttacaggtattttattattacgagagaatcactatggatcctatgtcttgtgttaatggtgcaagagctttcttctattgaatactataccgaatatcttgttatcaaattgagctgactcatcatcccgaaaagaaatattaaaaaggcagacttctgccgaaaattaaaacaatcaaggaaaaaattctatgtaaaactagtcgataataaccaaaaattggggaatctctagggagctaaataa

SEQ ID NO: 1175 - DNA, 773 bp, Glycine max
  misc_feature (658)..(658): n is a, c, g, or t
tctttcctcctctcccacactgccacttgccaattctgttactcccttccccattatttgtctatctccctccttacttgccgcttgtccccttctcctctcataaacccttatatcttgtttgggcctaatctcctcaccttccacttccttctccctctctttacctcttcttctatacacattaattataggccaatcagaaaagttagcacctctttttcaaaataatctcttccaaccaaagccttctagttttgcttctttagggtggatgcttttctgctttttaatttttttaatgaaaaatgactagaaattctctagggacatctgcaaggatgcatgtattcattgtttgatgaggtaaataaacccttattattgatttaattctgatcaattgattggaaaaaggatctctctgaggtttcatcctcttcaaaattttgtcttttaccttaatttggtttgtgaggatagcattactagctctttgtatacggggagactcaagcttgtctcagtatctttcaattcaaattgtgtttgaacactttgtctgaattttttcaatatactttttttttttgttggagaacttgcttcaacatctaatacagaaatttttcttcctaaagatcttctgcatcgatgntgctaaaaacctgtgacatgcctaactatgttttcttgcccttacttgcaggggtagggaacaatcaacttagtccgatatattctctgaaaaaacctgggaaccagattggcct

SEQ ID NO: 1176 - DNA, 762 bp, Glycine max
tttaatcatattaacaaataaattcaagatattcaggtaagattacatatttattcttatgggaataaatgatagtaacgataatttcacaattttatcgtataggcacaattttcccactaaaattgagttcataacccgcaaatggcataattattcaagaaaaccaacacagtaaccaaaagggaagatgaaacaatggaaggaggggtttggaggcatttgtgatccaaggctaatttttcatttctgaatttatatatttataaaacttcataaaaaaaaaagaaaaaaaaaataagtcatgggttgagaacttataagctgacatatcagtttctcattgctaaataaaattaaaaatcaaacccctcctacaaaacatattctaaggttcagaaaatgtgcccctcaaataagaagtcgaatacacaatgtaccaatgtacttgcactcccattagactgaggaatacacaactaggaaattaagttccaaacaaacgcatgtttttcaatgctagatgtcatctctagaacagaacagaactacttgtgtagaagcaatcacttatataacaagcccaggaagattcaaaaggcgagtactcatctgacatgcttcctaactgtaattacataataaaagcacatttctcattatgtcaattaacataaaaaaggtaccctcgtagattttcatatcattactgggagattacaataaaactccgaccgattatttatttcttttcttttttaa

SEQ ID NO: 1177 - DNA, 753 bp, Glycine max
atcaatataaaaatcaagatatactaatacaacaatgtttgactatatatttgataaatgataatatggttgttcctatatcttacaactggaaaaaatttgggcatttaaatttactcatattttattaaaaataagttcctcaatatgtgtagaacaggaaaagtttgggatttatgggcaatgattaaaatgaatttattttatattcaatcacaatgattatgatgtgccattcacctgtgtttatggaaggagagtaaaaaaaaacaggtgggtataacagtagaaaaggcatgtaggtatatgagggaacaagaagaggaaaaggaacaagaatggaaataagatgagaaaaaagagagtcaatgagtggagaatcagttggaggagagagagaaatgactaacggattggataactggaaaaaggaattgaagagtcatgagtggaatgatgggggaataatcatgtaaggttttgggtgagaagcagtggcctttggcatggaggagtggctatgtatctggtgtcaattcctgttttttgtgttcctttttgtttctgctttcctgggttttgttgctgtgccttttcttctttatcatctgggtaagaaaatatatctgtgttttaaaaaataattttataaactgacttacataaacccatcaaacatattgatgaagagattgaccagttgacatgagtagccaaatcaatagtgttgtgtacaggtcataattaactaaa

SEQ ID NO: 1178 - DNA, 688 bp, Glycine max
cattttgcatgcctgcagaagtaatacctaaattgtcaacatgtgtgcgtatgtgctacattttcacacttttcagacactatcacaagtgaagtgattcccaggtggaaacattcaatagttccttttacaatacaagatatgtgcagcaggattacctgtaagaatagcttgatcaacccgcacttgattgcttagcatttcaatcatcctcatatcagcaggaattttgcaccccactatttaatttacaaccagaacagagtcaactttcagccttccaggattaaatactcaacttaaccagtttgcttttaggcactgcataatctcataatcagcttaccagaaacttccacaatatccccaggaacaagttcagttgcaggaagtatggaaaaacaacctgcaagaaatagattctgcacacttcaaaatttggactataacttcaacaagacaagccataaccaattcaatagaaatccccacagtatcatcacggcagacagaagaaagaaaacaaccaaaacaattaaaacacaaattcattaactattagggggatcccagaatgtgccccatgtgaaagaaggaaggaggtgggaaatggaaatgaaaagcagcgccagggtttgaagttagaacccacactatccttgtttgttccataatctccaacagagct

SEQ ID NO: 1179 - DNA, 682 bp, Glycine max
tggtgatttacaaggcatgcctttcaactaatgtcaaatttattttattttacacttttctgttactattcttattgttcaattgcatggaaatataatttatttattgcatattgcatttgaatgtattgctttcaggactcagctattattgtgctaaataaacctccaaaattgccggttaaggtttggatgtctattcttcaatatttataggaattcacttacttttagtaatgagattttagtttcttgcttatgacctggttaggggagtttgccagttcataatagcatggatgctttggcagctgcggcactatcctatgattatgatgagggtcctaaactggtaaactacccctcttgtaaatcattacaacggaacaatttggtctatacttgacagtaaattaatcatcttgtaaaaaatggatatctattcataatttcatatagatatgctggcaccccctacttttacaaaaatattaacatattaaaatctgtgataactctggaagtattagtcaatttcatggcttagtcctggtttctcattgctgggaagaccttcaggccaaattttaacaggagcagatttatttgcggcataatccaatcactggaaccaagacagtggagataccctacactttccaaaaagagatattattccgtg

SEQ ID NO: 1180 - DNA, 643 bp, Glycine max
agtaagcctattttatttagtgagacatgaaattgatctaacaattatcagtacgattagtgaaataatttgaattttcactttacctgtccattttgcttaaaaactaaaatgatactgaactagacaatgaaaaataaacgacaagaccatcaatgatgaactgagtttttaacaaaaaaatcttgaaagattatttaaaaagaaaaaaaaaagtaattagcataacgtagagcgtccattgcccgtcgcttacacattacaaatggttgcaattaaataaaatagaatcacaattcacgaatcactatatatatataataaccataaaataaaaaacaaaggaaccatgcagtagcaatactaactaaaaaacatgggttcctagcatgcatatgaggcgttgttactctgtacaacatctatttccttattatatattgatattacgcttatgttcaaaagcacaccaaactaaagaacctacgctttcattcttccatcaagcagaaagcttctgctgaacatggatgctttccttttcattcttacattcttggtgagcttccacaaactttcttctgccgcaagcagttcaaaaacatatattatccatgtggaggggccacaggataagacacta

SEQ ID NO: 1181 - DNA, 785 bp, Glycine max
  misc_feature (723)..(723): n is a, c, g, or t
aattgacgcaacagtaccttacacacaaaggacatctcatgcaatcctccaaaaaaacttcactactacgtacatttatgagacagaataaggtaaaaaaaaaaactttggaatgcaagttgaagacagggacaaagacaagcaacttcacttggctatccttattccttggtcaaatttctcaatctgttgctcctccatcaccaaacagatgattgtgggttggaaagaatagtggtacatcaacacctcttttcattttaataaactaataataagcatctcaaatgtgtctttcctgtttccacattaagtgattaagggatacaagaaaattgtggcatagtttttttttttttacaaatgatgttagttctcacctggaagcagaagatgagttgagcaaaacaaaattgattagatcctcaattttgcctccttggtacttctaattctgtaaatttggaaatttgaaagtgttgcattatttttctttattattttctcttaatatgaatatattcataacaataattcaaaatcactagagagcacctactctaaattgatttttatagctaaatcttcaaaggaggcaataagaattatgctttaataaatcgaagggctatacctctgtctaatgccatggatgctctcaaggagttcaattgggttggtgcaccctaaaaattctttggggctctttttctttttcccggnaccaaggttgggaacctttcaaaccaggaactggtcgggggtggacttgccctgggggtgtt

SEQ ID NO: 1182 - DNA, 804 bp, Glycine max
  misc_feature (653)..(653): n is a, c, g, or t
  misc_feature (744)..(744): n is a, c, g, or t
  misc_feature (772)..(772): n is a, c, g, or t
gtcgttttcgtacaacatatgaattgcatccattatactgtctccagctttcaattccaaaacttaggatagaagggacaggacatgcattgaatcatataagaatcatgtgggcatattgatactgattcttaaacaaaaagttgtcaacaactataaataaaagtaccaggtgaattttttatgccagctattgaaataatgggtatgtgatcaagaaattgttggagggcaaagccagaatcaatctgcacgtgttggttttggttatcatctttgtggaggctagaactgcggttcttttgcttcttgtcttctaacccaccctccgagaccttcaacacgtccgcaattttccgagattgcattgtttttgtttcttgttcccgattcgctaaacaccatgcatttaattttagcttgactattaacttttccatatgcctcacactcaccacctgtgcccctcaccgccaacttaggactttgacctgtctacaaagtcacaagtcccacgtgccaatctcttggtagtgacttaccctgatcttgccacgtggcattgggcatttccatttaccatgcatgcatcctaagtcattttttcctatcactattttcatcacatgctcgttaaatttaagattacgtangggcttcagttcacgtataatagcaaacagaaaacagaaagatgatgccaatgaatcaattcagccattcactgataccttagtaatacanataatttagaaagtgtcttttacaaggnggtaaagcaactttgtagctagctcagggtca

SEQ ID NO: 1183 - DNA, 709 bp, Glycine max
ctcggacccttgatcctatagagcccgacctgcagttgtagtatcaggattgacttgtgacttgggatcaacacataaatgatatagtcattcgtaggcaaacaaatttacacaagctaatagacgccattgttgccaatttccccattccggtaatacaagtaattacgcaatcaaaagacagtggcagaagaaactaaggaagaagcttacatatacaagacttgtcaaagattgctagttaagaagactcaatgtccacaccacgatgttgtatcattttaagagcaacaaccaccattttgggatgcttgggattcttgttttggttttaaaacactccttttaactgctgttgatccttcttccaaaagactaggagcttccattatctacgaaatggtgccatatttgtcatgataggaaaaacaaaagacagcaaacaattcactcattcaaaatattatctctgtcttatattttccaggtaataattatttcctataatcaataatgaaactttttttagaataaccagataacatactcattcttcactattatgtctattcttactgataactaaagcaaatattaggtaggaacttctgcatcaaaatctgttaatgtaagcccaagaattactagctaaaacacccacactttacacatatttttcatttgaaatatatatttttgaagcaatgat

SEQ ID NO: 1184 - DNA, 666 bp, Glycine max
agtttgattggcaggttcctgattgggtcattgtgcctggtggcaaccttggcaacatttatgccttttacaaaggcttcaagatgtgtcaagagcttggtcttgtggataagattccaaggcttgtttgtgcccaggctgccaatgctgatcctttgtatttgtactttaaatccggctggaaggagtttaagcctgtgaagtcaagcactacctttgcctctgccattcaaattggtgatcctgtttccatcgacagggcggttcacgccctaaagagttgcgatgggatcgtggaggaggccaccgaggaggagttgatggatgctacggcgcaggcagattccactgggatgtttatctgcccccacactggggttgctttgactgctctgtttaagctcaggaacagtgggcttattaaggccactgataggactgtggtggttagcactgctcatggcctcaagttcactcagtccaagatcgattaccattctaaggacatcaaggacatggcttgccgctatgctaaccctcccatgcaagtcaaggctgattttgggtcggttatggatgttttgaagacgtatttgcagagtaagactcattaggttagcattgcaactttttctcctctcttcctgagtttgctgctgattattt

SEQ ID NO: 1185 - DNA, 948 bp, Glycine max
gacttcacgacctcactcactgcaccatcaccatgatcctcttcttctgtctttgcacttccaccatcgtctttccctgtttcactccatagcggtttcttcaggtacatctccccctttcctttccttttcgtcaattcctcaatctcagtaaccactcatactcctcagggttagggtttgtcaacacagatccgaaacaaattgggaacagcaaaatttccatggctcattgcttacccccttttttaccatctctataataatcatctataaaattaaagtgcattttctagttgtagttaaaggataactagtttttatattacataaaccttctgtaatataatttattcttttagacaatttaaatttagttttttttaaacaaccaacacctaaatagtataatttattcttcaaaaattaaagtctagaatcaaaatcatttttaagacacattataaccttttcaaaagtatgtcgtgattttaaaaatgcctagaattatgaaaaataatggccaaaacactttgcataaataaaatatagaaataaaatatttttaacaaataaagaaaaaataaataggagaacttaatagaacaatgaaataactcaactagaacattatgtgtgtataaagatcaaatcaaattataaaaactaaagaaaaaaaaactcaaacaaagagaaagaaaaatccaagggaattaagcaacaatatttaaaacttaaaaaggaattaagaaatatgaaattattcttaaatcttaaatcttttggcccgcacttttccattaaaattttttttctttgatgaaaaaatggggaaaaccaacttcccaaagaatatactaaaatctggataccctaaaaccttaaaaaaaaagtgttgcaatattaccgggaccccaaatcattcagtcccattgtgaaatttggcaa

SEQ ID NO: 1186 - DNA, 790 bp, Glycine max
ttatgcgatttaatgactagttcgacgtgttgtcgccagtgtagatagttggaatcatccaatttctcagctattgttgtcggaaatgaatgcgaactgaaacctttagatgcggaagccatggatgtgaaggtgtagcttgataaactgaagagaagagtttttacgaagaaacaagctctgataccatatcaaatttagagatctgagagaatagagagaataagagaaaacattgagaacagaaaaagggaaaattgatattattgattctgaaaaagttagtttttaatgcagttacaaaagaggtatttataaacctctagaccttgaagctaattacaaactaactaacaactaactaacagaattctgttagtgaaagaaaagtagttagcagtctaactgtcctgcaataactgtttgtaacagttatttttatacattcattctaatatactttaacttagctttatttttagtcaatgtgggacttggatttttcccaatacactccctcacgcccaacacttcttgggcttggtgtgtggataacatggtgggtgaccctttgaattaatcttggatatgctctaataccatcttagattctttagaatgtgagtctaggcctaacttaaccccaaaagctagctcaagggatgagggttgcccctcacttgtatactctaacttggttttatctttaaccgatgtgggacttgaatttttcccaataattttgatagcttgtgacctataaatcagtactttagattttgatttcctt

SEQ ID NO: 1187 - DNA, 713 bp, Glycine max
ccatctgtcatgcctgcagggcgcctgttgtatctcaaattgggatacagtcatgaggtggaactagccgtccctcctgctgtccgtgttttctgcttcaaaaacaatgtaatttgctgcactggaatagacaaacaaagggtgcaccagtttgctgctactgttcggacttgtaagccacctgaagtttacaaaggcaagggcataatgtatgttgatgaagttatcaagaaaaaacaaggaaagaagtctaaataactcatataatctaagttgatttcatgaagtttaggactcagatgtacattggctacatcttgtccgctcaatgattcactctaggtctctctctagccttcaaacagtttcagttttggaatccttgaacatagcattatggtaatcatgtatgctttgaaataacaatagttttttgcttctgtatgattgatatgtaccttttagcgtttatcttacttttcttgagatattttgtctaaggatataatattattttgaaagtctcattttctttttgttcccttctaacggttgaaacaaatattataggatgattagttttaaatttcacctcacctctttcccattttctctccatgaagttttaatttactttatctttgatgcttaattaaagctcatacgtgcacttttctaaactttgggggtataactagcttcaatttgatctt

SEQ ID NO: 1188 - DNA, 683 bp, Glycine max
atgttttatcgaaactagtggaacacaatctttctcgttattaaataaagttgcttataaaatgcaatagataagaaataagtggacaacatcatttaaccacaaacaaaagatgtcccgaataaaattttcgagaatgtaaatacctgcggagaaccaaaaagcacaacaaagatgtgcttcagaaactcgttaagcagaagcagtaattaaacaagcccttggggtaaaccaaatttggaccaaatatatgaggaaattaatggtttcgtttgtataatgaagttcacaaaaaatcaacaaaagaaaaaaaagatgctttactaagaatgtataaacaaagaaattgtcaaccatccacgttaaacaggaaccggaaaacccttcttggccatgctatccaaaacatcgttgagggcttgacataagcccacaatctgcaacgaaaaccatcatcagtaaaagggtgaggaaattgaactattgatggttactaaagcggcacaactcgctgactcgctcaatcagaagttaaacaatatggtcctcacagtatacgtgctataatgtaaacacaagtccatcctacaagtacatttaatttaagcacaaaagtaacatacataaggtatacaagtcaactattacttttctaattctccttttcttgaagcccatgggag

SEQ ID NO: 1189 - DNA, 863 bp, Glycine max
aagaaacaatttctttgttgttccacagtttgcatgctttcttgcatcatttattcatacatattagtggactgagttctttaatcattaaggttggtcatggaaccttttgttggaattgctctgaatttggaaaaaagtattacttactgacatcaaatagaccttgtgttgctgatgcagattagactttatgtattaattgggttgatgctttatgagaaaaagattaaaatagtagtgctgatgctgattaggctataagcattaattgggttgctccaattaacattttgcgcttcgagcttttacattggatactttcatgttattataaactgaaatataatttcgatagtttgttgttcttttgctcaggctgatagtatgcaatggattgttgatgaactccctgatcaggcccttttgaacactgctgaatggagattccttattccacaattatacaaaaaatatccaaatgacgacatgaatcttaatatgtctgtatcttctccaccagatatacaagtgacaaacaaagatgtcggtgtcaacattttcatagacataacaattgatgttctgggaaaaggggaaagcatacctggtgcatgcctctcgggggatgcttttatgaagccaattttgaagtgatggttaaaatttttgaagcttggactgttaaaaagccacccctataaataccgggtacatttggcaaacttataaaatcacctttccactttggttatttttgcggccaccaccatatactgatttttttgtaaaattaagagtcttttttgttcgccaaaaattttatatttttttgttgaaagggtgacaattatttttaatct

SEQ ID NO: 1190 - DNA, 767 bp, Glycine max
acgttgtgacatggacatcctggataattgcttgattttacatcaaggtacctttttgtaaggtaaacaacaacacaaaagcaccatgttgttagtccaagcaaaacaagactcggatcacccaagatgactaaaaaaaaggtatatgaattattaggttgaatgaagtttatttaaagttgttatctaaaccaattataatcttttatttcaatttgggttggctcgttattttttttatatcaaaacttaactaaaccaattcaatccgataaaaatagattgatttttgttagatctattatcagtaagggatcattcaaaaattaaaaaataatgtatttttttcctagcattctaacattttatagagtcaaacaattctggaaattcaaataatataacaaattaaaagagtaacaatatcttacataaaaacaaatgaagtgtaaaaattcaactatttttaaaataatattatatgtatgattcggttaagtaatactagaagtttatgtaattatgtatgattgtgttaagtctcggacggtcagatttgtcagtaacaaaccaaaagactcgagcaaaacaaaatgcgtttggacgagttagattaggttggacataaacaacataaaaaactgaaacaattacatggtgttgggtataaaaaaaatgaaaaataatgatactaaattattttgactatttccttaatgctgaactaataatcattgaaagttcggtgaaatgattcaattaaagag

SEQ ID NO: 1191 - DNA, 669 bp, Glycine max
ttatttttatgactatgttctgaggcctcttcatttgcttatatatttgagtcaattattttagagcagaactctttatcctcctttgatttttgtatgatttttctagggttcaaatgtggttcaacttctttctggatccaatgttgatgactttgctgctccttacatatctgctgtggaaagttttgaaaaggaagctcagtcagtatttcgtgagcttggaggtcgcggtaatcttggagatgcagcaacagttacggatggttcagcagctgctacaggtgatttataatgttgtgcagatcaagtttgttgaataagtgtttttaaaaacgagtagaataatgattttagaaagagaatgcagttttccagtattattcgtggttttctacataagctagccttgtacctctggctatattaatggattgactacaacatggcaggttctcttgtccatcctcaaccccaaggcattacattttcagcggcccctggagctagtggtttaccacctaaagccagtggagaaagtgagaaaagacttgcattacccaaagctagtgttgaaactcgtcgagcaggtaggagattggtcaggcctaaactactaagacctgaggagctacaaggtggtgacacggaaatgtctgatgccgaagg

SEQ ID NO: 1192 - DNA, 729 bp, Glycine max
accatgtattactcatgcgcagcacttcctttttacattcattatcatttatatcattctaagacccaaaaacaaaaatcaaagttcaaaattataatcacaacacgaatcgcgtatttctatccttggagaatttgtctagtcatgcttgttttatgggagcaaaagaagaggtgaaattatgagaaggcatttaaccattttttcctcgaggcttatttagataaacataattggtgtgacgactaaaattttgcacagcacaagtgaatgtaaatcgggcagatttcccactaactactccgtccaacacacgctgcgtgatcattggatttaggtgtaatttttaatgcaaaataaaaaaagtttaattaagcattcaatttctataatttttaaatttatcatttttaattcaattattttttgtcaatttatattttaagtctcaagatatctttatcgttaaaattttcctgttaaccaaattaaaaaaatataacgaaatgaagtttctgaaaattaaaatataaacttcatgactaaaaaatctacttattaaatttttaaaataaaaaattttaattattaactataacaactaaaagaaataaatttaaaaactgtaaaaattaaatatgtaatttaaatcataaaaaaaaggaaaaaagcatattctttatatacagtatgaacaatgacatataagatcactgatccttcatgagc

SEQ ID NO: 1193 - DNA, 786 bp, Glycine max
tatagaatctgaagctaactagatgcccacaatacttgataaatactgaggttatagcatatatctatatatactcacatgaaggtaatcaaatagcttgtagatatatacacatatagcaaaattccctgttaaaggctcttttggggattaaagctgatactagcagtagcacacagcagagatgaccaatactttgtagaattagataattattaaaaaaatgtatagctcttgccaagccagtatgtttcaatttccacctagaatttataattgcttataggtgataataagaaattattttttctgtctagcttattagcttattattcttccttaaggtttgttgctgactgttctttttgtaaccatggcagcttcattgatcaggtacattaaaatttttataagccttttcacgttaaggattttacccttgctatcaagtgtctatagagtaggcttgttcttttcttttatggttttttaattgaattttactttccaaacatttgatgcaattctatttcttaatctttgtttaaaacaaccctctttaaaatccaattggtgattaaaacttaattgacccatttttggtaaaaacaactttcatgtttctatcattttgaaatgctcaaaaatcattgtcctctcttatttggttagccaggtcataaatccagacttaagagcagctggaatgagacacctttctgttttgaccacacactatacctttgcatatgtaaaggatttacaaaaaaacccaaatattggtct

SEQ ID NO: 1194 - DNA, 665 bp, Glycine max
aaagaaaagactgataaatttgtattaatttcatttaaagcaagtcgaagtgcactgttcaactacaaggcttgtttattcttttgcttccgttgattacttggactagaaaagcagcaagacgccaagaagcatagtcaagaagcaaggtggccaaaaagtcaaaaactgtaactgtcaaaatttctttggaaatttgagtttctaaaacctaagtagactagtagagttgaacataaataaatagtggttcaaccaaactcaggtcaagttttaatgagactagcaacttttttttatttagaagacaaatatttcttttttaagaaaacaatctctttattacttagtgccacttagtcaaagcctaaagtataatagtgaccatgtttccctaatttgattcaagagtcttacacatttttttatcacacatcttattggatgaaatttattgataatgataattttataagtctcacttcttattgatgaatctctcttttaattttagagatttccataaattttaatcaataagagtggagagtgtctcacttgttttgacaagtgtgttattgggacttcttttttattcaataggtccccctagatatttgaataagtcaagaaggtaaaccaatagaagctcattgtgatatgcg

SEQ ID NO: 1195 - DNA, 648 bp, Glycine max
atggatatatgttagcttttgtttgactttccgggcttagttgcagcatttagagatatatgtttaaatttaaattgcattgtatatgtcttgttttcacttttcagtcatatggtgcatcgagctttttgttttggggaggaaaaactgttatcctcatgtttttgtacaccttgtgggccaaaccatcatcaataatattcttttgtctttcaaaaaaaaatctaaatatagtcttaatgtttatttatcctctgtaacttgctttgagtgtatctacgatgatgtacatatattctttaagttcctcctatatatgttttccttatgagaaagtgcaatttattgtagtgattttttaaaataaaaatcaatgtatccttagaacggtaaaaaaaaaagaagcaaaaacatatattttctattacaaagaaaaggaccaataactgtggttttgaagttggataaatatatttgaacacccaaaatcctattataatgtaatgagaaagggggagaaaagaaacaaaaacctaaggttaatagatgatataataatccttttggcttgattgttttttctgcaaaaattggagcatgtagcattactcatgcaaaactgggcccgaattccattggcctcgatat

SEQ ID NO: 1196 - DNA, 814 bp, Glycine max
ggacccatgacaaggcggtgggtaattgcttcaacgtcgtttatcaagaacaatctcgtgaaatcgcattcaatcatggcccctttacacgtgattccacgtttgaattttgtgcctcttgacaacaacggcgtatttggtaccattagaaaaagcatggtaacagtgaagtatcatatttgggcccattaagtttgaaccattggatgtttcccacgtcaatcattggacagggtcaattttaggatgagcggtcgtgtatttccatctaattataaaccactgtaaatagtaagttaattaatttttatagtatttttttattggttcaatagtgtaaaagtttttaaatcaaagatgcatgaacattaaacctaaactatttcaccaaagtcatacataccgaatatacgtgacaataatagaacagaatgaaaacaaaatcatggtaggaataagtgaaaaactccatattgaaagaaaaacagtctatttagtgtaaattttacaatttgctttcataacatttagcatttctatttgttaacaacttggtcataaaatgaaagcccaataatctcataaaagtagaatggaagttcattatgaaaatctcatgattttgaataattttatctcattatagaacaagaaaatgaaagtagaaaagaaatgaaagtgacaaattgttagcttacacttgtatcacctcccagtacctcatcaactctttatcagcattcttcactgaatctgtattgatggccaaaggaaaatcattcattcccattttatttgtaaaattaatttttgt

SEQ ID NO: 1197 - DNA, 853 bp, Glycine max
catgcagccagatccatgacaaggcggtgggtaattgcttcaacgtcgtttatcaagaataatctcgtgaagtcgcattcagtcatggcccctttacacgtgatttcacgtttgaactttgggccttgacaacaacggtggtaccattagaaaaagcatggtaacagtgaagcatcatattagggcccattaagtttgaactattggatgtttcccttgacaatcattggacagccaattttaggatgagcgatcgtgcattttcatctaattataaaccactgtaagtagtcagttaattcatttttatagtaatttttcattggttgtagtgtaaaaatttaaattagagatgcatgaacattaaacctaaactatttcaccaaaatcatacatactgaatatacgtgacaatgatagaacagaatgaaaacagaaatcatggtaggaataagtgaaaaactccatatgaaagaaaaacaacttgttgttcataaaatgaaaacacttaaattttgcaattggctttcataaaatttagcatttctatttgttaacaacttgttgttcataaaatgaaagcccaataatctcataaaagtacgatgaaagtccactatgaatattatatcactagctaaaccaatctcataattttgaataattttatcgcattatagaacaagaaaatgaaagtagaaaatacataaggacataaaagaaatggaagtgataaattggttgcttacactcctatcaccttcactagcaaacaatttccattgaatctgggccttgattgcccaagaaaaatctttattccattctatctgtaaaaaaatttttttggttc

SEQ ID NO: 1198 - DNA, 679 bp, Glycine max
aggtcctctggctgcgtgattcaagatatgccaaatgggtattcaagggtaattcctattttccaaagtattgttatgtatgtgttcaaaattttacaagcttggtgcttctaatgatttcatttccaacattttttggcgtacgtgtctaatttaatcgttttttttttggactatatgtgtaaatgtaggtaacatgggttgagcatgcaaaagtagaagagaagcctgtgcatcagatattctgcaactatgtgtacagtggaatggcatttggagcacagcgttggttaggagttttgcagagacaatgtgagagggtcgcaagcctcatggccagaaacatatcagatcttggaggttctcttaattttatctaccttatcttaagaattgcattaacttaaattaactctctctctctctctctctctctctatatatatatatatatatatatatgtatatatatatatacatataattaacaaggaaactgtggatgaaaaagtactacttcacctaaaactaggctaggaaataggaaaccggatagtcctaggataaaataaataaaattttaggtctattaaccttgttattagttttttaaagaaaaatttccacatattaattaaaatgccttacaaatcactctattctcttaaaaaaatatttt

SEQ ID NO: 1199 - DNA, 728 bp, Glycine max
tgcctgcacagaagatccaactcccctttctaaaacaattaaatttaagttggtatattatctgttctaacttttaacatggtaaataacgtgattaatttaacgccccaatggctgatatttcaatggttcacacgctaaaacactctatttaattattttttttactcacaactcttcaatggttataatttttttttaaatagtctttttaaggatatcaacaatcagttatgacacaattccgttgtttttaggatcattgacgactaaaaaatttttatattaatttataggtataatcaatgatcctaagaataatcaaacgatattaaaattaattatcaatatctcaaaaatgactattacgaattgttatgatcaaacgaatgttattcatcaaaaagtttaataaaatctcatatggattgttttgatagtaaaatttgttttctttctattttgttttattaggttccacgtaggattaagataaagacatatttctctttactcatttactgtcttactgaaatactgttatctatgatttccaatcaattaaacaaataataattcatggcattaaagtttccaattttgctcctatgatttcacattttttttttttaaatgatagtattatttgtgcaacaactgttgaataagcttctcaaatttgtaactaattccaaaaaaatcctattaggggggtttttgagaaaggg

SEQ ID NO: 1200 - DNA, 725 bp, Glycine max
  misc_feature (649)..(649): n is a, c, g, or t
  misc_feature (693)..(693): n is a, c, g, or t
acaaaaaaaaaggacaatcattaaacacgtatctaaaatgcattaaaatcttataaaagagattcatactgcatatgtaatattagtttatttggataggttggctttaaaaaatcaaataaagattatttaattgaaatagtttttatgatatcaaacttataaaagatccaagtttatttgattttaattagttataaatttttatttgattttcaatttaggtaggattttgacagtaccttacttgaatactacgatggtattccatatttaatttttctaaaggcttgcatctctcttcccaattatatttcaatgttgcatattatctctcacacacacatttatgtttactaatgttatttatttttttcatttgttggaaaaaaaatttcgtaataaaataattattgacataattgagtttacatttacatgtttcaaaatatcacgatggaagataccagctgatatgcggaggagcgctgggaagaagtgtttatgctatatagagtgctacattatccttccgaacaaatgagtacttctggtacatttcttgaaaatcacatttccttttatatgattttacttgcgaaaacacattattttgtatagtaatgatttagaattaaacaatattatnattatttgatgccggtggctattttaataaatccaatgaggtgnctattaataatatgggctatgaacacacatat

SEQ ID NO: 1201 - DNA, 704 bp, Glycine max
ttagaagttctttccagtcaaggcctgacatcccttccaagctatgaaggagacttgtgggcactttatgcatcatagctcttggtattctatccccaccaaaagccccacaacacaataatgacacacaccgttaaaggtattttgcagaacttataataaaaaagtgttagagtgatcgactcttatataaatatacatatatattttatactttcccagaaaaagagtttgcgagataaggttgctttgaatctattatgaaaaatagacatgggcaaatgacaactcgctggcaagcatcattatgaccacaactaaggtaccttgtgagttttacgtttctcattgcgaagattttattaaggattggggaattgttcggcacttcaatgtccaagccacgagccatgtcaagaagtgatggaaaggctacttcaaaaccaattggcatatgctctacattctcgttctgaagcttgccaagattctctctaaaaaatgccattcctgtgtaacaacattagcaaaacactcattagtcattttggatcatcacaacattggtgtaaaatattcatcaactttactgatgactaatcttcactggaacttgatttatcatctttgatgaagcctttcttttcaatcacaaaaacttaaacttgaaaccttgcttaacaggatggaacttaatactgctt

SEQ ID NO: 1202 - DNA, 746 bp, Glycine max
  misc_feature (703)..(703): n is a, c, g, or t
atcagaccttggagaaggaggcaccccactgccaattaagacttctttagcatcaagcattaacatgcttcctttttcattctttcatctctatatagtaatacaaaaccaaaatataccaaattcgccactcatgaaaatgagtaacataattaccatgcatgaaagccagattttggcataagcagaaaagttagttgcaaaacaaagttaaacttcaatttgcacctttgatttttttttgtttacacccttaaaacattaacatttcccagcatatcaattaaaacttccatacccatccccacccaaccaaaaaaaaggtaaaataagaaataagtgagagagaaaggttgcttcaggaaacttcttacacagcatcaatttcatcccatgtcatggtttccaaatcaagaatatgtaaatcattcaatagagttctctttgcatcttctccaccaaaaattactaagcttgtacccacaaaggtaactgattgtccgccacgtgagacctaaaaatcatatatgaaaaaatgcaactttaacactccattaatgcatttcttttactttttttttttggaaaaaataataaaattgcacttccctctcctccctttatatacactgggtttctctctattaaaaaaaaacaaaaattacactcccttctcctaagagattgacatgtgtaacattgngatctgttttaatgtgaacaagacatttaagggctgtttgttc

SEQ ID NO: 1203 - DNA, 906 bp, Glycine max
ctctcccaacatatacaaaacctacattacccaattcccatgttccccacacaatgtgcaaaagcctcaaacttgggccttctcattgttgatactagcagtttcaaaatgtcataaattaaatataaatatatgaatatcatacccgagaagtcacagtgagaggcaatggggcttcaatctcagcctgagactcgtcactttcgagttccaattccctctcttggcctttgccctgcaatgtccactcccacatgcaaaatgttaataatcttcattcatcgctcagatccaatccaatcatggatctacaaccaccacttaatgcagatcacaatcacaatgcaatgcaatgcaaaaaatgcatgtgatgtaacgtaagatctaaattaaagccatgatcaagaagtatatcatatcatatcatagatggttttttggtttttattattattattattattatttatatttggatttggattggtaatgtagatgttatcatgttgtgtagatgaaagagggagattgttaacctggttttgctcttttggcatatggtatggtattaaaagatatggttcttgtggggatgcatagtcaatttataaggtggaaattgcccggatagcaagcaaagtaatctgctttttttaggagagaaaaaagaaaaggaggttgggaattagggaaagatgagggcactggatgtcataacaaacttaactttcttttgaggtggaccacaacagaactggaccacggtttactgttaaatgatgtgtggtcacccaactttttgaaccttaccattaaaacctaccgtttttggcgggggggggtattatacaaaaaaaagatttggttgatgaaaagtttcgagattgattgatatctttttccccc

SEQ ID NO: 1204 - DNA, 927 bp, Glycine max
agtcttgcatgcctgcagattgtgagtattcacacttcactgacacgaatcaatgtcttttaccgactacttcatttataatgcctccgatctatattattgtgtttttagtttgtttggtgtaatttaccataatttctgcattcgcctctgtcggtgttggataatgagaatcaaagcgaaatcatcatttcacttgatcatattcatgattatggccacatgcatgccaagcttggagtcatttgttgtgttttgtttagtgggatggagctggacaggagcgattcaggactataacaagcagttattatagaggagaggatgccgaagataccagtagatcatcagagaaaaattcaattgaagaagacattgaaacttaaattgctgaagtgcaaacgtaagtttattatgcatataatttcagtaccatttttgttatatgattttggttcttgggtatggcagattttctagcaaaaaatggggaagaagagaaaacacagtgagataactcatgacgaggcacagccccaaaaggaacaactcatgatgaggcacaacccaaaaataaatttctttgacttgctttattttggcttttttttttcctaaatcatgcacacattttgggttgaacccggccttaactgtatggaccattgcctgtgcttatattgtaatcatttataaaagcttaaggggaatggggcatattaaaacaattcttcttaccttatcttagaaacccttggtgttttttaaaggttaatggattaagcccaaaaattatgcttggaggtggtcttaatcttttggcctgagcaaacaaggtctcttttgaagccatgttaggtaacaactttttggcccacgaaatttaaaattcccgatctttggggggccgacttgggtgggggggga

SEQ ID NO: 1205 - DNA, 628 bp, Glycine max
tttcctgattctgtatacacacaaatgtggtggttaatcaaacccactcaaaaaaagtcaatataacaaatgcaagcatttgtatttgtatgacagtcattgcataataggatccacccactcatttgcctaaatccataattatgagtaaattggtcaatatagaggaagtatttgcttaatcagaataagagctttagcctgatgtacacgatttctcagaggaataaacatttaatattgtaaagtgagaacaagccaaatctaaaacccacagcaattacaaatgccaaaaatattttcaaagttaactctttcaaaagagtatgatagagcaaaataattttttatatacagtgcaggtagatgtaacatttgtacaactttaaacactacgaagcatcaacaattcaacagtgaattggttattattttcatctccaggtatcatagtcagttcacaatatataaccaatacattgtatgaaaatcaattgctttggtggagcttaaggcaaataaaaatataagcaatccaagaatttattgtatgccttttaacaatttaatttaataaaatataccaaagagtatcagtgatccagttgtaataattaaaaagtaataa

SEQ ID NO: 1206 - DNA, 827 bp, Glycine max
agtatatgaactgatactttttgttcccattgaaacaagtactacatcataagcaggagctgagtgtttttttcccttgttatttgtattttgtgggaaaattccgaaaaacattcttcaatgcagaaacctgctaaaggtttttcagtgtgtgacttttttcttctattacatttttaaactcattatgatggttgtacctgtttcagagttcagtagttcactgaggggcacaatagtgtcataaaggtggtgaaggcagagatgaatttccttattatatcaatgattggcacatttaaccttttgaaggaaatgaaacctttgttggagttatcaacataaataagtgaaaactgaaaacctgcaagtcatggaggacagtgaaaggtaatattcatagaaactccttctctgtttcattcatcctcttgtgttctgtgttttatgttgtttttgcattctgttctgcttgaatgtacaatgacatctctgtctcttgtaaggtgtaggtttgaagaaaagtcattttcaaatggggatgtctacattggtaaaatcaagggcatgctttcccatggcaaaggaaagtacacctggtcagatggagcagtatatgaaggggattgggtaaatgggaaatgacggggaaaggactgattacatggccaacaggagcaaatttggagggtgaatcctcgggggatatcttcatgggcatggcacctttacacctttctattggtggcattatacaggcgcctcgagaatggagcctctccatgggatgggacaagaggagtttccccattcgatggattggaagt

SEQ ID NO: 1207 - DNA, 726 bp, Glycine max
agttatttaatatctttaatagcaagatgattatgatgcttctgaatgtgtttggataaatagcttaattaagcatttagtttataagttcttattaaatgtgagtctatcaagcttactatacaacaacaaagtcttattcaactacgtgaactcagctacatggatcacacgacacatttggtttagttagaaaagccaaatttcaaagatgtaatttactggaataagctaaaaagagcttttagaaagattataagcaacttccataagttcaaataaactcttccaagctcatataagtgtgtatgcatgtgcatgtgcaaggttttttttaactatttccctcaccttcagtaggatctcttagaattcaagtcaaccccaattatcctggaagcaacagcaagtctagctccctctgcggcctacagaaaatgtaaaagcaaaaacagttacttaatatgcagtaatagatgcaccaaattttcctattatttgggaagagacaactcacagcaagccccgcggctcccaatccaaatacaaccactgatgaacctttggttggttttgcagcatttcatggtagcaccccagaccttctatattaaaaaccaactggaaatggtaaattggaagaaaaatatcctcaattggatccaagaagagaaatggcccctattttaacccgtgtggggatttccccgcttcagaaaacaaact

SEQ ID NO: 1208 - DNA, 801 bp, Glycine max
  misc_feature (691)..(691): n is a, c, g, or t
tgctgttggatttttgccaattgcattcaagtgaaatccttttagatgctttgcttgatatgcttgttgatggaaaattcaatgtcaaaatgagtcctatgataaaggtgatgtaccagtacataggcctagctttcaaaaattgtttgatccacttgcattgtttcattttctattccaggaaactgaagaaagtggtatttggtggacctgatgctatatcttatttagtactgtgaaatcttcatttaataaatcttgttttcatgttttcttatttttctgcttttctttttttatttcagaatgaagatgtaataatattatatcttattgtactgcaaaaggtttgcaattcatttccccatgttttttctgatcaattattttctttaatgattattttagtagttttgctaaagtttgttttaagaaaataatgccatttgttttattgcttgttatcttttgattgggcagagcagtgagtcattgcagcatcacgggctagacatttttcagcagcttctaagagattccatttctaatagagcttcttgtgtcagagcaggaatgcttgattttcttcttaattggttttctcaagaagaaatgacagcgtgatctttcagattgcacagttaattcaagccattggtgggcatagcatatcagggaaggatatccgcanaatctttgctttactccgaagtgagaaaagttggatgagggagcagtactgctctgttttgttaacaagtctcttgtcaatgctacatgagaaggggccaactgccttta

SEQ ID NO: 1209 - DNA, 701 bp, Glycine max
agtaattttctactgtgtttctcaaatctgaaattctgacaaaatagaactaactatatttcatctgaattacaattgagttacttatggacatgcagtctataaaaaaaagtgaaactaactaattcatccataagcacgagtttgtgcgagctgaatttgaaccaagtttaccataagagatggcgagtttattgtgaattagcacaatttggtcactatggcctatggggcagaaagtttatgttaaaagggtacaacaggaagagaattgagagggatctgagaaaaaattattattgatatatgtgtttagagatacaactgattgctatttctaggatactacagttggttatttacaacagaaaataactgactaactaactaacagaattcagtatgctaaacagtagtatactccagcagttaatggtttaaactagcgagttgactaccatgcgagtaagaaaagtggatgaatgggaagatagtccaattagaggggagcggaatagctaagaaaacattaggataaaccatttaaaaaaaccctgcacaaatggtattattgaaatctagatattgacagagttagtagtgttagtcggtttatgtagccaaccttgcctgctgaaatatgttgagtgtttgttgttgtgggtttctcttcagcccaatgccttttggaactcttaatg

SEQ ID NO: 1210 - DNA, 660 bp, Glycine max
agtatggaattttccatgacctaatgtccatcttgaaacgagttgagctcatattattatgcaattggttgcaaggaaaattaacatgatcaaatgcatttgtaactaaattgcaagcaacatgcttttttaacatactttctctgttggaggatacttctcatgttgatcttatttaataacctgggtccattctttattagtgggaccaatattaaataaattcatcaataaaaaaaggcagtatttctagtatcattttcgtgactttaaggtggccagtgaagcatccaccgacccccataatacctgaactgaatgcagtaagcaatgcactgtttttcaccagtgaagcattggcaatgttggtatttaattgtgcttgtgttattagtggtcaatttatttaacaaaagtgaggtagtgccagtagtttggttataaaatgcggcaaatgtattaggaaaacagggatcaattcattatgtgtgaagtagtgaagcacaaaacttgtttcaataaaattgttaacctggttgaaatcatcacaagagatctgtgtattggctataaaagctatgatacaattaaagggtaacataacataatgtagcaatggttaactaaactccttcagtgtgtttttaaatctttccaccc

SEQ ID NO: 1211 - DNA, 823 bp, Glycine max
  misc_feature (802)..(802): n is a, c, g, or t
aatattgctcaaaaacgtgagagcagaccaaaaaaaaaaaaaccattaattcacctatcaaatggtttccgtccgctgagaagttctaacatgacaactccaaagctgtagacatcacttttcaaagtatactgaccagacaaggcaacttcaggtgcatcatatccagatccaacattatggttcaatatctgaatgtgcgaccaagagttagaacaataattttatagggcttagagtcactgggtaaaaggaaaagctgcatttgttaagaacatgatcaatattcctgcccaataggaaaataactacaatatacatccaaatccaacgaaatatgtcagacagaatacagatattctcttccatataggtaaactacacggtatattgtgggtttgaaccctttgacacatcgcacatggtttaccttgttagactgagaaagttgtacaaagaacacttcctaataaattaaaccaaagagccaactgtactcttttattattctgtgataaataatagctgaactgattcaaggcattcataatatgaaaattatttgtgaagttatgttcatatggtcatgaagaccactaaaatattataaccccaagcttgtctaagctagtcataacttgaaagagcaactagtgctattggtaattcatcaaatacattacaaaccatttgctttcttaaaagtcataaactatacatatttggaagcatccatgacaaacgggaaattcaaattgacaacgatctgtgtagcctaaatatatgtagaaaatagcaacgnaaacagtaaaacaacgttggc

SEQ ID NO: 1212 - DNA, 669 bp, Glycine max
atcaaaagtagaacacaccattacaaaaatagcatcggcaaagtactttaacgcagtgggaagctttaacaattttttttaaaaaaaaaagacattgaataacatgttgaattacttggaatcacgatgtttgtcctgcatcacgcgtagttcttttttcaagttttcaaggccaactttattttttgcagaattatcaagaattttttcaagccttgctcgcatctgttcttcctgtgaattcagttcagactccctgtttcttaactgttgaagattttcttctaagttcttttgagcttcactatcagcatttagtttcctatctagaagctccttttcctctctaagctttgcagttttcatcccagcttcctctttgctgtaatgcaacattgcagcatcattattacaaattccaaaacagaaaaatgtaataacaaatgaaaagttaacatgcatgataagtgataactacaaagtactgacaaataaatttttaactgctcagggagaacaaattggctaccagaagacagaattgatgaaattcagagcaaattatgaaaaaaatatcttgtttcttatcaggaagttccaattgagaacacatggacaaacctgctaatgagaggcaaattggtcattgaatgaaataccatatacaag

SEQ ID NO: 1213 - DNA, 659 bp, Glycine max
aaagttctactgttagcaaagtatgcctcaagatgtcgttggaaaatattgtaaaggacatcccatcgattactgacaagtcttggacatatggtgatctaatggtgaatatgatctatcattcataaatgaccaatttctataattttatcattttttgggtattgatctcacttggctatgttcacattgataataggaagttgagtcgaagatactgaaagcattacaaccaaaacttcatctagaccctactccaaagttagatcggctgtgtgaaagtccgcttccaacaaaggtataataaacatgttatttcccccctttatgaatgtagttgtatgctgctgtgtgcatcttaatgattttgaacttcatgttacagctcaatttgccaagaaagcgattaaaaaatatgccagagtttgctgttacttctactaataaaattcatgggaagaaagtatgcatagatagagtgcaagaaagctcaattaacagattaggtgatgtaggaaacactgcatcaaatgctattgtgcagcagacccatgaaaatccagccatgcaaaatcttagtccgaatgttgccatggccttgagatctaagaattttatacctgattctttcatccctaaactttcctatgaagtcccca

SEQ ID NO: 1214 - DNA, 709 bp, Glycine max
atcaaattgaagaaagtacgggcagaattgtagggacatagtaagttattcatccctttctcacatgtcttgttttacctaacattcatagtcattaacgctaaatatgaacaaattgtcgtgttttaattacatacagtggttatatgtcccccgagtatgcaatgcatggacaattttctgtgaagtccgatgtgtttagttttggagtcatggttctagagattattaatggaaagaggaaaggttgttcttctgaatcagatggtattgatgacatccggagacatgtgagtacaaaatttattctatttctattctgtaaaggaaaaaatatatggagttgagagtatcatttgagttattgacacatggagattgtaggcttggacgaaatggacagagcaaacaccattggaactattggatcctaacataggaggaccatattccggagaagaagtcatcaaatgcatacacattggtctgttatgcgttcaagaagatccaaatgatagacctacaatggcaacagttgtgttttacctcaacagcccttcaatcaacttgcctccccctcgtgaaccaggatattttaagcgcgatagaatacaagacaacaagacgacccacaaagaattggataatatcaggtgattccatccaacgggatttctttaacctaaattctttcctcgttaatacattg

SEQ ID NO: 1215 - DNA, 661 bp, Glycine max
gcttctgcttcttgaataccatgatgaaccatgtcttttctcgctaactcctttattggaatttatgccttcccttccaggatcaaaatctacatcagcttccagatcaactaatctcttcctcttaagcttaggggtgctataatatgcatcacttcttctagtaacattgtcattgagatgatgatgctcaagggctaatgaatcaccttcttgaagaagaggaacactagcaagttgagtttgattggcctcacctgactttaattccagcgtttcattcctcccatggtacactataatctcccggcaagaactcagttcattgaccttttgactattgtcactattctcttgtgctaatggcaatgactcttcaccaccatcatcatcatctttccttttgtttaacttgtatggccaggttcgaacattaccaacctttatctcagaaacattaccacaatcagagtaacgttcaggttgtatgttcctacgtttggatcgtcgtaagccctcaaaaccataagatgatggcacttcatcatagtgggaatcatgtttatcgccgcttgtattggtgtcagtctcaaataaatcaactagatgaataacaggcatttgcatgccgtcttcgttcactttaaagttcacaacactt

SEQ ID NO: 1216 - DNA, 879 bp, Glycine max
aacaatatatagtctaattcttcccaatcatacataaactataaattcaacaacaaagtgatgaattgtaatattattactgtgaaagtacaaaagtacacgcatccctactcaattatattacacacccacacacctaaagttcatagaattggtaccttagtacttttagttgaatgaaaatgtctttatagtattatgcttgctcttttagaacaaaactaaaaaaggcaatctaaatcaatttgaatatgcttatgtgaatactaaaacaacatgcgctttgatttgtgtagaaaataatttgtcaccttagattctatcaaatctaaatcaaaaggtatgggttgttacaccagtatgcaaggttttaaactacaaaagcaaatactttcacatacaaaaactgaggagcattattagaatatgcataatgaaaactttaaagacataatactgtcatagacctccatgtgtgaaactatatatgacaagaagttttaaacaaaaactatattcctttactgtgtttaaaaaacagaaaaaaggatgctaaaattttgaaaagttacatcaacaaataataaaacagttcattaagtcatccctataattgctctacaatattaatgaacctaatggtgtgcatgcaggcccagtcccgacatttcatggactctaaggcaaatgaataataagggccttaagtgtactcattataacaaatttctttgttatagaaaacagccttatgggaaaataaagaaattccaatcattctacacatttttcttttacacccacctaatataatttaaggagtaattttattaaattacttaatttagtgggaagggattggacccaaaaaaaaaaagg

SEQ ID NO: 1217 - DNA, 630 bp, Glycine max
ttgcatgcctgcaggatatagcagtagaggaggattttgcctatataaaagaccgtgtgcaacctcctttcagagacacttaaagatcatctttttcttgcggaattttttgagagaaaaacacatgctgagcagatgagaactttttttattatttctgtttagaatacataagttttgaccaaaaggttttttctccacaaacatcatatctcatgagacaatagaaaattgcttgatagcttggttaatcccaaagtaaagttctactactattgatgaaaaggagaaaaagagcagtgttgttactttgacagttcccatagctaacactaaatttcatgatgcttccacacctagttagaatctagtttagttaaaatctcaactatcatatttttaattaataattataattgttctttatcttacaaattaattctacctaactaatttatatatataaaaacaactctacctagctaaatattctcaggtattttattattactatgacgagagaatcaccatggactgtatgtcttgtgttaattgtgcagagctttcttctattgaacagaaatgagccgactcatcatcctgaaaaaacaaatttttttaagctgactt

SEQ ID NO: 1218 - DNA, 895 bp, Glycine max
gcttgatgttgaaactaatttgttaagtatggaacccaaggcctgtgcaactggaacaacacctctgaggagggttattataaatagatgcacaagtactcttatattcggaatgtatgttttagggcaaactgcaataactactgatgcaaataatgaaattatcccttcatctctaagggaaatatcatattttccaggagttagtggtaatctttcaacttctttaagctgaaagttagtgtgtgaagacagtacactgtaagctttgcgaattataaggttttggctctccacagaacaactccctacagaaagtctcatcgctttcatcattgcgtcaagaagaccctgaagtacaaacagaaaaaaaatcaccattactacttggattgtctatttagttgcatgtaaataataaaaagtacaggattttaactatactcataaaataattaaggaatacatgtgggtcacagctatataaacctttccctcgaatggggtactcaaatccatgcaatttccagcttgactccaaatgtccacagcaaattgcatcacaaagtcctctgaacctccattttcatggatcctacacagattcaattatattggtaacaattgataagctgaaagagctattaggctgtccttcctcatttctaaaacaataaattaggtattttcttatcttaatgaaaacaattaaaagtccagcataaccaggggatataagtctgaaagactataccatggaccactgcaagaataccttccaaactgacacaatttaaaaaataattctatgaccattgaaaagcccaggtcatcccccaaaataccccctttcggtaaagggggaaatgtttaccgccaaaaccggggggtggaa

SEQ ID NO: 1219 - DNA, 645 bp, Glycine max
ctgcattctcttctacacctctctttgagccgtttgtcattcctctgcttcttgagaaactttcttcttcactgcattctgcaaaggttggtattaatagattatcattatatctttgatgctaaatatctgtgtaatcacctttattattttttaactttatcattcatattttctgtgttggttttctatgcattcagatcgattccttaaaatatcttagagtgtgctcttccaagtatggggcagagagaattgcaaaatatgccggggctatttggtcttcattaaaagacaccctatctacttatttgggggagccagatttttcttttactatagcacctgtagatggtattggcttcccagagaatgaatttgtgatagaagctctgtccctccttcagcagcttattgcgcaaaatagtagtttgttggttagcttgataattgatgacgaggatgtcaacactattttcagcaccattacctcttatgagacttatgatgctattcctgtgcaagaaaagaagaaactacatgctattggtcgtattctgtatattacttccaagactaccatttcttcttgtaatgccatgtttgaaagtcttttcaccagaatgatggataatttgggatttt

SEQ ID NO: 1220 - DNA, 728 bp, Glycine max
aaaaaaaaacattgaatgagtagataagtagtttcaggaattaagagaacctagtaaacctaaactacactgaatgaaaacaatgaataacagttacagataatgtcaagatactatgagatcaaaatatccaagaaaaattagaggtgaaatttgtattcctcgtgaagacagttttaattgaaataagaattggcaaagtaattatttattaacagatgatatagccatatcttcatagtcacatcacattaaggcgctcaaacagagaggaaataggaaaggaaaattgaagcatttttcttggaaaatcacagaaattaattagtctctcaaatctacaatcttaactaaacatgcaaatggttaggtcaacattgcactcaaaccatatttttatcattattcttaaatgatatactaataattaaatcaacccaaaaaaagtacaaaagcacagaaacagtggacagggaacttgagaaaaaaacaagcatacttaagtctctactccacataacttttgggtttcaagtttcaactatatatgttagctaaaagaagcgaagggagagattaaagttggaaactgtaacaactaacactaaaaggttgtctgtttatatttaacaggctgccaaacctttaatgttcttagctgaatcagatgcccaaaaatactcataagacgggttattaactcttttgatacttttcccgtgcgttgc

SEQ ID NO: 1221 - DNA, 734 bp, Glycine max
attctggaagattccatttttgagaatatatcctcatcatctacgagagtacgtttctctggtgtacttaatccagagttgttgctacaatgcccttgtgatgtatgatctgacatgcaagaaagaccatatttgcttacaagtagataaagaaaacggcatgaaaaaagtagaagcaaagacggaacatcctactccttaaaatgcatacaatcactctcacaaaattaccctccatcttttccagataataaacaaatatgaacaatgcgttacatctcatcggacaaaaaaaattataaccttaacccattaaaagtacagtacagcacgtcgcaccaaggctctagttatagaccatattttctttttttatttccatgatttctcaagatgcaaggaaacagatcaacatttagaccaagtatttacagcataccttcacatcctggacatataggggcctgattgtgtgcttccttgcctactggacctggatctgatctaagacttctcagactctgcaatgccacctgcgtctcctgagctttgaatcctttcattaatgaaggctctatgctttcttccattgttgacttgtcagaagcaaatggcatcatggtaaatgagtcctccattacatcagaaatttccacatattgactggtagatataatctcatctgcgctgaaaccaaaggatgctcgtaagcttctatttcttccacatcttgc

SEQ ID NO: 1222 - DNA, 829 bp, Glycine max
cttgcatgcctgcagcaccaacaggtatgtgttgtttttctttgttttaattattatttgcactcataatcatataaaaaattgaatgagtttctctaatctttgttttgtgttcaggtatatgtgtatttataagatctattgtcttggctctcctttcatttgtttatgtttgagaagaatactttttctttttgaagaaaaaaaatacccttttttgctgattttttatttctccacatgacttcatgaatcttatttcttagtgtgtgagtttgtagattttgtgagttctattggtttgagaagaagtttcatgtttatttctctttcgtatgtgctggagtgttgaagtaattgatcaatctttcaactttgatatgatcttttgaatgtaagattgtgagatctggtgatgtagatcatgatctggaaaaatatttgatgttttgttttcttgtacggattttgttgattgatttcccttcctttttggttttcttttccccctcctggtttgagggatttttgcttaattttatgtaatttttttcctccatggattctttttattaaccaataagactaatggatctgttttattggcctgatttttgtttaatttatttgtattatagttttttctttttgctattttgttttttgtttcctttaaagtctggctatatctatgtatgtgagttgttgaccaagatgtgttacagcagtacttgattggcctgaaatggagttctaatgacaacattggaacaccccttaggccaatgaagcaaggacagaatgtagcctcccatgggtggcaccaaaa

SEQ ID NO: 1223 - DNA, 879 bp, Glycine max
atattgttttgtagaattcagaatataatctgattaaaaagaaaagaaaatgtcatccaaccaaatatctcctataagtatcaaattgaagcagtattagcctgatcttctgaagcaatacaatgggaagctagaatatcaaattacatattagaagaaagaaaaaggcactaagctctcccatgatatacatacaacataatactatttcagatagagttagtgactggttattaattgaacatatagtttccacatgttaagcagttgtaggactgttatgatgcatgacaagatactttcatgggaaactttataaaattagaagataaatataccactcgtgtattttaaaagtataatttactcatttagataatcaacatgctaaaataattaaatgagaaagactaaactagaaagcactagaatatatatacaactttttttttttttgaggaaagaaatatatacaacttgaagaatgatatttacacatttgttgaagttacagttaactaaaacagattataactaaagagataaatgcataaatagcattaattatacaactagttggtgttagatattcatatccttatattattgcaggccggttacacattatttgaataaaacataattgcaaatactgctatatgaattaatctctaattgacaataaatcttttctatggttaaaatccaaattaagcagaaatttttcctttttcacttttctttttgtcaactcatttactagctagcccaactgtaatccccctacctttgagaacaaaatctgcattttatatacctagctttttattacacatccaaacattctcatattgtacctatgccggaatttggaccttt

SEQ ID NO: 1224 - DNA, 689 bp, Glycine max
gccaagctcgcatgcctgcagcctgtctactctataccgactaaattatttgttttaggtgagcagacaaaacgtgaatagtacagaagaaatgagtaattctctataaagggagtaaaaccacaaaacacatcttatcaataatttaatataattgataacactcggcataggaaatattttgcctgtggaactcaggcgtgccaaatcaacacaagcctattgcagaaagtggtaaagaatactgttttacaataaacctgcttcatttaatgaattaattagcttctagcctttttctgaatgctatctaattttgttgagattatgttggtttacatgcatagaatggtcatcaaatggtataactaatgttcattctagcaagttataagcatgctaccaaagccaaaagaacaaacaaataaattgaaggaaaaaacaacagaagacaactcaagctatgtttcgatcaaagttggaaaagcattatgcaaattccaatgcacaaaataaagaagaaagaaaatgttactttgagaataaaaatacttttgagctctctcaactaaaacacaaacatgcactcagctggtaaacaggctggggtgtttcggacacttggtccttactttccagtatccgtgaacgatgcacctaatattttcttacttccttaacaaaataag

SEQ ID NO: 1225 - DNA, 949 bp, Glycine max
gatttcctttttgcctttttggtgtatgactttatgcaatttgaaatgggaatgcatcagtcataataggggttaacttgtaagatataactgcatagtcatagtctactttttaggatatttggtgttcaattgtttatcatataggtattgggtcacacactttgattttttcatgaaaatgttataattagtccagactcgtgagaataaatgaagctatatagtatgcttctgttctttattgtatatttttgttatatgaaaaatctaaaacttctgaactggacaaacaagtggtgccaaaccaagctaccttacttctacaagtagtttctgtctgtagactatgatgacaatcttactttacatgtttgactctagaattgatgtaaatcgaatggaaattttgattttaaagtctattcttttagttatcataatgtcatcatttaacttactgaaatcagcaataaattcatgtttatttcgttatgcctatactttagagcaaacggtgtaatgagtaatggcccaatacaaaacacaatatatagaggcagtactacttggaaacccattcaacagtaacttttttttctttttgttaagggattgtaagaaattatcactgattgaaataatagggaaatatggtttttacataaccctgtgccctaagctggcttaaaatttaagtcctcttttgttctcctcttgcgcgtttcagacttgcaatcccttgaaaatgtggcgaagataactgttgcggggtaaaaatatacaagatttttccttacacattacctgtccaaattgactacggaaaacttgaaaggaacggattttgtgcctcaattataacctgaacgaataaaaaaatgggaaatttttttggttatccctcccgatgaaaaaatttgtgtaatttttttttaaaggcccgggg

SEQ ID NO: 1226 - DNA, 754 bp, Glycine max
aaatacaaatatcaactcagtttctcactgtcttgctttcacaccacaaaaaaaatgtggatttctattctgtgcacatgggcacatggtgtgcaaacattggaaaactttaatgtttttcgatataccaatactttcttttctattaaaaacttggggcatttgcttgcacttctattgcctgttttctttaattacaaaaatgtcaacttgttttcaatttgtttcctattctcatagatttgtacaggaaatggagaaaaaaaagcttttagcatttcctgtacaaatacatgaaaacagggaacagattgaaaacaaggtggtatttttgtaattaaaaagtgaaaaccgaaaatgaaaacaggaaataaaagtgcaagtaatcgtcccccttagtatttttggcttcttatcatgtgcttatgcacacacattaaaaggcaaataaataatttaccaagatgtgtggtcaatacaaactaaacaatttacagtctatatacaactaacggtattcataacatatgttaatataactcaataatcatcatatgataaaagaataaatgaccattgtgtatacccaccaaattaagtaaacatcttgaaaatcaggatgtttaatagaatactacaaagcagataaagacaccaacaaatgggtgggttaccactttacccttgtatcaaaataatgcaagatccctaataaatctcatattttgtaacttcattgaaaaccatacctttt

SEQ ID NO: 1227 - DNA, 707 bp, Glycine max
aatgttcagaaaccactcatttctacttaaattcaatagcctccatgctaatattgttgccacgaaaaatgcacagccaagcagaatatatatttgattcctttctagaatgttttgtaaagtcattaccttagcattttcaacgcaaacaaaatctttgtagcatgcttccatttgaaggtaaggattccacaacacagcatctgatcaactacataggtaagaggcaaaagaagtataagcaagtgacttgggcaaaccaaataattaatagaagtttaaaattacatactgtgttcttgatagatatcagatcacccaaaccattgtcaagttgcaactcactggaagcatcaagataagcacaatctacaaatccagggaaagtgacaacttccctgcattatgaagattactgtatattaaactaaattaagaaactcaatgtcaggatatgattctacattattcaatgaaattttggttttacatgaattagattgagtcaaagtatacttgtgcattagataaagataacgaatgaggaagaaatgaaaaccgaaagaaatgggaacatgtattggccactaaatgaatgtaacgtttcagaattcttgttaaaattcaggcaaaatgaataaagatggattttaagtaatagttgacatgtataaagaacaaagggtatgcacaagaaaatgcatgtc

SEQ ID NO: 1228 - DNA, 788 bp, Glycine max
gcatgcctgcagcatgttagaaccagtcctaacgtaaaactacaattctttttagttttttactgtttacaagatttaattcgagatttccgtaaaaaaaattgagatcatatttagaatctgcatctacctttcgatttgtgcaattttgctaagtaaaaaaacatatacattgcaccctacaagcttacaaggcttgttcatgttaatcacggcgagcataaaatgaaaagtattatgcaacttaatagaagccaacaacacatcaattcgactcgattgaactctcaaaaatttgcaaaatacttaaatgaactcaaatgtatttaaagtgaaaaaccataaatgtttatcataatcaccctcaaacaagactaccaaaaactagggtgaagtttaaacttcgccatatctctaccagaaagcaacctatgctgagacagttggttttgcagcattggaaagtttggatctccgtttagccaagctctcactccggcgatctctctgctccttcaatctggaagcaaggagtttttgatactctgctgcttctgattttgccttagcaattctcttcttcttgtcggcaatccttgctcgtttcctttggagtgtcaaaggagtgaccaatcgttgaatctttggagctttgctcacttttttccctgcaaacaattattcattactcaaacctaattcattaccaattatgaccaaattaattggatgtccacaaaggagtccataaatggttgagtaaaaagtgtaaaaacaatcctttttat

SEQ ID NO: 1229 - DNA, 820 bp, Glycine max
  misc_feature (754)..(754): n is a, c, g, or t
caactcgcatgcctgcagtgaaagttttaaaaaagaataatattaatgcaagacaaccagttactatgagaacaaggtatgatggaatcacatgagtaacaaaggccaagtaaaaaaaaaaaaaaaagcattttagaatgtgttactaattttgtgcacatggaaatgatatgaaatatgatatattttttgttaaacaatgtgattactaaataattataaaaaacttttcctcacactcctatgggatatattcatgtcgggggagagaaaataatagataattagatttaaagaataatgtgacaaaaaaggaagcaagataaaaaaatattaggtgtaaaaattagaatttgaaaaaactaaggttgatataactatataccaaaacaacaacaaacattaaaggtcgcgtaatcatacacgtcaaaaaccaatattggcgttaaagttcttgcttgaaggagatcctctaaattaaatcttttttaaccatcacttttttatgatatgatctacataccaaaattagacaatgaccattaattaatgttttgcatcaagtttaggaattaattaggtgacatgtttgaatgtattgcaccacacattaagtacctttcatttcataatagttttctaccttccatttaaccgtggtttttttgcaaagaagttagagcatatataaatagaacaaaagtcacaagttagaatatagcacattccgtacaactttgaaaagcctccctanaaaggttaaaaaaaattctgatttttttcattgcgtatatagagacctggggtggacataccatga

SEQ ID NO: 1230 - DNA, 658 bp, Glycine max
gttttgcctaaaccatgacgaggatgcagggcatttgttttttggatgcaccaaaatcatgccattgtggtgggagaccctgtcatggataaatacactctctgtttttccagaaaggccaaaagaacattttctcaatgcattctgaatggtttttttccacatagatggaagatttggtggatctctctggtttggtgcacttggaatcataggaataggattgttttctcaggtgacagctttgatggtcaaaaactgaaggatgatgctctccttttctgctggtcatggctcaaaaacctggaaaaaggatttgacatccctttctttttatggtccagcaacatcagagttgccttttttgtataaaggggtttgatctttagaattcttttttgtagaagggtacccagcttacatctatagttacctaatatctgctttcaattgctaatattaggttaccatagctcatagtagggctatcttgggatgtacataccacagtacctcttgtactgatatatttattttaatatatgtagcattttagctgattaaataaaaggtcttgtttgaagcaattaattttgaacaattaacaagccactataagtcggctgacagctgtaataagattgggtgggttgcacac

SEQ ID NO: 1231 - DNA, 751 bp, Glycine max
gggccttaaatcactacaacgacccccactatctcaatgggggtagggtttcttcctatctccacatgctatactttctaaaataatgatttaattcgtaccttatggtatcaattttttttcccaaacagtacaaatgcacttcatatagatttgtccttcattgcaatagaaggtaatgtgtgattcaatctagcaggtccccaccatgcatccgatgatcccattggccaacgaatgaagaaatatgcaacttgttctagatgcatttgggatgggaattttctcactaatttaggctaaatattatagtagactcaatttgtgagttgactaacctatagagcaggtcgaatgtaatggagggctaaataagacattacacagcattactaatgaaccaagaatatccaagtcaaatagtatctgtaatcaaactcatccacattgacatagtccaaactcaaattccaactgtgacatacgggattgtagattattggcagctaaatagacccgtcaaagaatattaatgtaacgtgttttgcaatcgttgaaaccaaattgaaagcaaaataagagttgggcaaatttcaattatagaactagctaaccatttgaaaatgacatcaatgcgtgtggtaccaaagcaatgaaatcatacgtagagatgcattcactgaaagataaaggaaaagttagccgtataacaacatcaattggaaaaccaaatatgagaaagagagaaaga

SEQ ID NO: 1232 - DNA, 678 bp, Glycine max
gcatgcctgcagtatatgagcacacaagagttttgcattgttccgtgtggttaggccggagctaataatgtcttaggtcatcaggaaaaggatgcataacttgacccagaaaacagcaacaacacacaaatgcatcaaggtgaacctactccagggaagagttctgatattttgttgaagacatccattacctgaaatgtttaagaggaaaaagagagtagttattatagctttattcgttagagacgtagcgaaatatgcaaattcaaactgccaccacctgtcatctcgtcaaaaatcatcaaaagattttcacctaacataaacctgaaactaattacaactagagaacctatgcatgccaaagagcaaacaggaaacaaagggagagaaaaccaaactcggtaaagtacactcctcccggaaggacaaaattaaagtcagaagtatcagcatacctccttatcgttttggtatttagtaatattcattggattctgcgaacactgcaaccacaagagatgaaatcataccagagttttcatatgaaagaccaatgaagtatttcaattggaacatacatccatgatagctgcttgaactctaagattttgaaatgccattgcaaacttcaagattggccataatcttttgaaatgacttttttcgggagaaagc

SEQ ID NO: 1233 - DNA, 698 bp, Glycine max
aagttcgaatcagtgagcttctcagtgattgagtgcacaaaagcagaagatgaagagaaggaaggaggaggattagattcagccattgcaggatcttcaagctctgtataccatattagaaacaaagagaaagagaagacgagagagagaggtagaaactgaaatttgtgaaaatgtaaattctgatttcattcccaactgttttcagttacattgtagcttttatactagatactggaaacttgcagagtaagtttgtaagacttgcagagcaagcttccaacagttagttgccagctgtcacatgacagctggactactaacttccacattctaaactagcttaaccgagtagaatactcacatagtcagtgagtattagagtatacgtaatccactaagtgtcacatgacagctggaataattatttttcattataaatatgcacactccttttttgtgtgcaccctttctacttatgacagttttatgaactatgctatattgtattagagtatacctaatccactaagtgtaatgtcttttacttcttgttaactgttagctgtcagttagctgtttgttaagggaagtcctaactctagttagttagtgactgctattggtagctttctggttggctctctctatatagaaatgactccaaggttgtaactgtctttaactgattcagatta

SEQ ID NO: 1234 - DNA, 830 bp, Glycine max
acaccgcccatattgacctcacccccaacagagggtactttaactgatattttagtgaggaagccttcgtcgtcctcggtttcaggtgatgatctcttatttctcaatcattctgttattcctgatatttgcaatagaattcaacagagggcttattggtctaaagtatcttttttatgcatctagcggtcctccttttggtggaatttgtttttcctaaaatgactgtggtaggctatttggctaaacaataattctgaaactttggtttttaactgtgccaaatagtgtcgtttggtccacgtagctgacctcacctactgggataagactttgttgtttgttgttatggttgtaaaaatgattgtggtaacttagatgttattcctggctcaagacatctttacttaacaatggaatgtttgttgacgtggctatttttaaataaaaatgaaaatgtagagttctatcttctcccagtttttgcttttactcatggttttaaattgcggccacatcagtcgtattttctggcaattgcctgctatggaaaggttttctggcttacagcaacacaaccacaaccacgaccataaccgcaatttaaaaccatgcttttactgggtggggatttcaacacatgttgcataacttctgttgccactgatttattatttataaaggtctttgacttgttggcaattattatgaactcttctttttatacaagctttaattacatgggtattttgcaccttgaaaaggttcaaattgaaccgagcggttttgcttatacttgcaagatattttggcccaaatgaaaataactg

SEQ ID NO: 1235 - DNA, 706 bp, Glycine max
ctcgtcttctgcagtccatagttgcccgctgcaatactttgtgaatctgtcaagtattgaatcaaattaattagctataccagccagtaaaaactgcattacatgaaggtttatgcacaatgtatcagaaattaaattcatagttcaaggacgaacctgacttgttgcaaaaacaggacaccaaccttctgcaaggagacatttcttcgtcacattaatgctaagcatatttagagtatgataaatggattattcctacttcaactatcagttaaaattgaagaaaggaaatgttagcattgtaatgaaaattaattgcagaagcttagcagcaaaactgaaaacagaaacatcaatcaaatagtctatgcatgtcttttagcaattatacttagaaaatactagatctaaaattaaacaaaccagaagcctccactgcccatggtgatatccaattgtctgcaatagagtgctccggtgaatcaacgctgcatcaatggtagccttcaattctgaaattcttccagaaacctatcaagttcatgcaataattatttcctgtaccttatccggtatcagtctatgaagaactctactatgggtaaagtacgtcaactactgtggggaagttgaaagaaattcacttcataaatccagattctcgtatatggtgaatatctttttccaaacaatgggattcattcat

SEQ ID NO: 1236 - DNA, 848 bp, Glycine max
aaagatcaattattgaatatacttcactgtttttcatttccaatcatttgtaaatgaaatccccccacccccttctctttcttttggaagagtaaagatcataggatcatgggcaagtgcaactctcaggcagcatacaggtaaatcttgtgttgtttttttctttttgttgggaaaattcacagacaagtctaattattattagcttattaaataattgcactcaccatctgcattgtaattttatccgagctagacctcaacaagtgaagtatagaagatagctccgattccagattctggatacgggatttaatgtcattgtgatttgcatttccatcaagagaatatagtcctgtttctctgtttatatgttcagaagaaaactcccttctgttgaggatatcaggttgtcttgaagcgtcactcatgcctcctttctcagtttcactgggaacaatttcagcatctgttatgtcataattatgaagatatcagttgatcctgactacaataataagaaaaccttaaaatgtaaactagattaccttcaaaatctgtatcccgaaaaccagttctctgaataatccaactcctccacgtctctggcttaagcgagtttcttaaattttcagtacctaattgagatccggatggatcatgtttgatctgagaaccactaatattactgcttgtatagctgatgaagatgcttgctacatttgtatgccatatcttctttcacagcagaataccaaagatatattaacttcacaagttgtaggctcaaactcatatattcaaagttctttctcttggggacccctggcaggctggaggaacttcta

SEQ ID NO: 1237 - DNA, 827 bp, Glycine max
aaaacaaaacgaaattcaaagattattgtgattcttttccgcaaatgcaggacagttgaactacaaaatattacatgataagttgataactatacacaaggaaagcatactatgatgaaagatttgaactaaaaaatattgtaaaacattgactgatagcaaacatttgcagcagcattgcttctaaaagtaaacatgaccgtagaaaagatatataaaatagcacagaagtatattcaaatttttttcattccaaattattttagcacatgcacattttgttatacatatatttagcataaagacattcttcctttggatatatagatatacacacaaatgcaaagtggtcaattttggaagcacaattttagatgttaaaaacatttcttaccaacagcatgcttgctgccatgcctcctatccgcgatcaacttccgagtaaagcgggcatgacgaaaatcaaatatactaataaaaccccacatacatcctgactgatctttctcataattcacagggaatctttgggacctctttgccataatgatcggttggtgcagttcacttccgtttttccttatttcccttttctagggatgctaataaggtaatattgaccttatgttgcctatgttcatacaaactgctcacaggtgtaatcttgcacaaccttattattggacaaaaacatgaagtcaataaatgctgttcaaagtcatggttagtgcacaacacccctacaaagagaaaatagtgtgctaaatatctggaagccagactaatctcctctggctacaagttggtcaaatcactcagtgcagatc

SEQ ID NO: 1238 - DNA, 717 bp, Glycine max
tgctacaggtatttgcttaatttcgtatttggtttaagcctttaagcttattttgaaaagaaaataaaggttgttttttcagccttatgagagattttagtaggaaaacaatgatttctcccgggaaaagaaagcattagcaattgaataatcatattcattcatctactttctcttctatttcgttttcctttttcacactatttttatatatctctctttcttcttttctcatcacttactccatttttcacttgctctctttcttttctttttttctttctatctctcttccttgcatccatatccagaaccagaggtacggtctcaatttccacgcattgatatagtcagacaattttaactgttggaagaagattaaagtctccaacatgttttaagtctgaaggatagaaaatgagtcctccaatctttctctaacagttctgattttctgaatgagtgaatgtgtgaaaatgcttatctctgaatcatttgtattcaccccaagattgggttatacatctttattcttacaaattctggaaagtgttttttaagacttgttataggacatgaactgttgatcattcatgacaagaatttttctttttcatactgtgcataatcagctttgaaaggagaagcagctctaagagcaagattgccaaacgaagcaaaaggaatgcatctataagtccctatgatagggtacta

SEQ ID NO: 1239 - DNA, 678 bp, Glycine max
tgcctgcacattgtctaaatatgaatgtacctcatgatgctgttatttgcataaaatattttgagaaaaaggagaataaatttgcatcatatgtggcttcagattattttgcatgattggcagtttttttttttgttttggtgacatttttataatcattggtcacttgtgattggcacaggaatttccatgggggatcttagtataaaggcagaatcttccttttctccatctagagccaagtaaagctgtctttttttatatcctctatcttccatgtcatctctataccacattctttgatgttgatttgttgattcagggttgaagattctcataaagctggctcctctaatcgcttggcatccggtttgaattcaggtatagcaaaataagttcatagctaattttagcctttcttgcatcaagttacctgtgttcatcttctttggatctctaacttgtttatatattgcagagtccgatggccccttgggtaacacacatgctgcaaaccaaaaggcatctaatgtgggccgtggaaaaggtggtcctggaatcattaaaatggaaggtgtgcatctttatttttggtcctgaaccccaattgaattctatcctttggactttcacttccatagaaaatttaaaaaaccaacttcttggaataatacctta

SEQ ID NO: 1240 - DNA, 678 bp, Glycine max
aacaaattctcatttgcaaaccccataaaggcatatcatctttatactttaccgggatctgtgtctccttttatttttccccaagacaaagtagacattgtcttccactcacttcaaaaaagagagtgagagagagaaactttgtggtctgtgttctgtgaaactgaagtgttcttcctcaatcattgtcttttacagtcaaattcagcgtctaagatctcatttcaaaaaaatttccgcttgttaaagttggtttctcactcacaagtcacaagtcacaccctttatttacttcagcatccaacaaagtgttccttacttgttctgttcaatgactcagatcttcaaatgtgagtgttgtagcatcattgcatgagtcacccatcaaacattgttcaagtaactgtttttagtttattttgtaaatgagggtgtggagggttcacccacaagagcaaaagctttgtccaaatggtgttttgaggtgggttttggtttggatgagtgtttgttttcttgtgttcacggttggtccaccgtctcgctcgagggtgaggaagagtgcattcttctcaactttcttgtcctccatgtgattgtttttgctcttcaactgaatatctcctcgatcctctagggaagtttcttttttttggtttttctgcaatgtaataacat

SEQ ID NO: 1241 - DNA, 718 bp, Glycine max
aagaaacaagctcgttaaaaatactccgtaaatcatgaagtcatcattcccatctcaaagtacagagtccatttccattacacacaaaatgccacctcaaccaaagtactaaaaatctaaaaccaacatgtacctttctagacatcagctgtttccccatatccacccatttgttcttcgcagcctgagcacaacctatcttaaagacagaaggatccagctttttctacaaccacaaaaagaaaaacgatcaaatttataatttgttaataacacaacacgaataagttgtaaagaagggtgcgtgtaacagttaacacatgtaaacaacctgaagctcttccttagagataccctcttgaggaacggccaaaaaaagttgaacttcaggggatcctacagtagcatacgttttcccttcatcagtgagtacccatgtttctctcttaatatcttgcgcatcaacgtatctgaaaccgtgcaagctcttaatcacattcacgatctcgttgtggtcaatgccgcattcagctgcgaattcacccgagtctttaatctcatcgttcttctctaggtatcccagaattgcttcttccgccattgcttcgccgcacagcacagtagaagacacagcgtttagaaacaacttcggaataagatagatactagataggttcgctaatattgggccacataactagggttgggcccgcccaat

SEQ ID NO: 1242 - DNA, 718 bp, Glycine max
acaatcaattgatcatgagcttgatactctacaaaaggaatatagtggatatgaacatgagacgctaaggaaagaatacaatgtacatcaaccagaaggaaagcatttagactcaagtgtatatcgttgccactcctcgttatcccagtgtacaacatttacaacaagagtatctgctccagccgcagaagtattaaccgaatctctgcgcacctgccattcccaaccattgtccatgatggaggtaaatcatgtttcatgggaattttcttttacctgttttgtatttagtatggctcctagcacattgagttgctgcaatcatactgatagaaattgtcttggttactcaaacagtcaaacttgtgtttatccttttggaagaatacacaacagtattcattttattgtgaagttctgttatgtacatttctctttgtaaacatatcagtgctaatcccagagaataatatttgtggatgccttctttggatttttactcagtttaatctatgcagtatgcccaaaatgttgatgcttcatcaagaataatcagcctggcagaacatcttggtacccgaatatctgatcatattccagatacaccaaataggctttctgaggatatggtcaaatgtatatcggctatatattgcaaactcgcggatccatctacaacaaatccaggcctttcatctcccaaatcatacttgtcttc

SEQ ID NO: 1243 - DNA, 676 bp, Glycine max
actaataggccctttatatcataattgataattctgactttattttgctgcttcatatttcttaggatgccttagagccttatatgagcaagaggacaattgatatgcactggggtgaatatcatcagaattttatagaaggtttgaacaaacagctggagaaggatgatatactgtatggttacactttggatgaactagtcaaagtgacatacaacaatgggaatcctctgcctgaattcaacaatgcagctgaggtacttattagattgattgctcactggctttgatcattttaaattgattctgaaattgcttattcataaaaatattgaaaatgctccagtctataaaaattaggatatacataatgttgacaatattaacatcatctaagatttccaaaattagtctcactccctttaattttttgtttctacacaagaccatatgaatggtatatatgaacagaaaagaaaaattggtgtgcaggtgagattaatttaggtaaatctcaagtaagtgtaatgtactccaatttattttttattcaaaaaaataaatagaagttttctttagttaaggatcataactatatgaaattttacctatgaagtgcataggtatgataattgattacatgtattcagtgggagagtgaataatgttcatgata

SEQ ID NO: 1244 - DNA, 642 bp, Glycine max
gtgcacttcactttcactttctctcaggagtagggagtacctcaaccggggaatattataagctctctttaaattggtaggggataaaaacaacgtactaaataatactactacaatctagtacttagtaaattattagttattatgtatcaactatcaactattatttatttaaaaaaaattataaataatttttaaggtaatttagagtatcttctgcaaaaaaaaataaaaaaatcaacgactaatattttaaaatattaaaatctatttaaagaactaacatttatggataaataatatttcttacaccatcatatcattggtttcaatggaattagtcttaaattttttaaatcaacttatgaaaataaaaaaaatgagagtaagaaaaaaagatcttaaaaatgatcaatcaagtgggatttttgacaataaaaaataaataataattcacactattattataataataaaaaaaaacctctttcatagacaacataaaaattgatatcagagtcacatgtgaaagaggaataattatctatcaactatatcatatatcatattatgtaattttaaaaatacatgtgaacaaatcttgagtgtttagaaaactatttaggtttgtttttaacgcct

SEQ ID NO: 1245 - DNA, 698 bp, Glycine max
aatgaaaaattgttgaacacttgcatgcctgcagggtgtgtaggcgacgtttggcagatatagcagatggatggtcatggtacagggtatggttcacagtagcagaagctggacatggttgtggtttttgcgatggtgtggataagttaacaagatgatggggatgttagttaagggctgtttttagggtaacaagtaacaagtaataaatagcatgggtgtgcatgtcatataagaaaatctaaggggtaccaagtgcaattttcccgaaaactagttaatacttacgaagtgcttgcagacatcacattttggatggtagctttccttatagcatgatttatggtaagggtaattcccagatgtggagaactgcaataataatatgtataaaacaaaagtgtaagtacagaataaaaaccatttatgaaaacaggaaaacaagcaatgttgccagtaatgttagcacctcgtaatcagagattggtaggttgcaagcacggcagcggaagcattcaggatgccagaatgcattcaagcaatttagatatcgtccaaaaccaatctcagtatagcagccagcacaaatcctattatgtaaataactagacaactttaattatgtgcatcacatgtattattgataatataaaggtatagcaaattgaaagaagagaataatatctctcacaatcgaa

SEQ ID NO: 1246 - DNA, 684 bp, Glycine max
gacctgctgtcctgcaggacaagagaagggtgagagtggctgaaatccatgtacagtagttataacagtgaaattagtcatcagatattttacctaagataactgagagcagacattcggtagagacaggtgaagaccaagatatgcaatccaatggtataaaagaatgcgaaagttcgggcatacctgcaaaaggaggattctttatcaattaaattaacagtaacatgtgtaagaatgaagaaggaataatacacttgatcttcccaagtcgaaagttaaaacttcaaataaaatgctattgaagtttagaaaattatttaagcagaagaatgggattatcaaacgagttaacaaattatttaagcagaagaaaacaggagcactggagaatgtctaaaatattgcagaagccttcaagcatacttgttgccaaggagaaaacgtccactgctaagtgtaattctgtccctgaatcccaactccttgtatctttgatccctttcctaattacatgaaaaatagatggaacagttcataattaaaattaaataacattgaagagagaacacagtgaaagataactttttcatgtttctaaccagttacttccttatctttcatccaatcctaatctgccctcacttttctaggtaatgtgcagaatgggtgagggagatctat

SEQ ID NO: 1247 - DNA, 833 bp, Glycine max
actggtgtacattttaaactcgattttatagttgaaaaatatagacaaacagatagaagacagtgaatatctttcatatctgaaaattcaatttcaaagtataatcattattagtttgtttggaatattatctcaaagtttccaaccgtccacatgcacttttcaaggcactaaacgaagaaagaactccaacgttagattgagaatgacttagagttaaagtatatctaaacatataataaatatatttaaataatatctattaatttcagttaacagtttcccctctttactttaatctctacaaattcaaattcaaagtataatcattatagtttgtttgagttattgttttaaagcttcaaaatgcctacatgcattttttaagacactaaatggaaagaaaaaaaaaaggttataaaattgattagagagtaaaagaagaaaaaagggaaaaaaagatcacaaatttgattcactagttaataaaaaattaacaattaatcactaatgaaataaaagtacatttaaaattttaaatatataaacactatgagatactaaaatattatctattaatttcaattaacagctatcattgaaagaaacgagaaaaaatggagacaatgtttttcgtttagtgtgtttgaattgttttcatggcactaaacgaaaaaataaaataagaaactgtcatcgaactgaatataacgtcgacttgtgttggatgcaaaaaaaattccaacacacgaggttatgagtatgacattctgttaattggatatttattttccatggcaaatatgaacttcgactgaaccacaatgacacaa

SEQ ID NO: 1248 - DNA, 852 bp, Glycine max
  misc_feature (726)..(726): n is a, c, g, or t
cacaccttttttaatttatcttccttgtcaagtgtctctctgcgcttgtcgttatcacctccctacaaagaaaaaatccaagtgaggctcacatcaagtattagtacaacaaatttaatatgtaaaactaaactagacttaataaagcagtcatcattgaagaaatgcaagaagtatatgattgctttatcatgacttttttggtttgctgtttttctgaacttgaaatatggtaatatatatctgttaatttgagtagatattttagtaatgtaggtggtgtttgcaaaaggaagtataggcaaattgttcataaaaagtggaagcatattaccatgccacgtccaaaactgataaatcttaaacgaatataacataacatagtccatttctaaaactagactagtccatttccaaatgtagctgtgctcattattacgaatataacataacatagtaatacagatgtgaatagtattttagtttttcttttgcaggatttaccaggcttcatggaatcccttgtgaagcaaatgtctgtaaatcttaagcgcattcacagcttagggataaaaaaggtagcagttgggttattacagccaattggggtgtttgcccgtgttaaatgtgatatctttccgtacgaactacattggcctttggaacgtgatctccaaatcaccacaaaatgtggttaaagctgggcaggactcaacaagaaacagngaaaatcagtttcatgacactgactttacactcctcttttgcattgactatcagaaaggggccgtagtttttcggctaataattcacacctcaaaatgggaggagctctatttttttaaatttttg

SEQ ID NO: 1249 - DNA, 662 bp, Glycine max
agaaaaaaaagggcttcggatttttctcctcaaaatcttggctttttctctttcaaatcgaagatccccacttttcatgccaaaaggtgacgtgggtgtattctatttttggctaaagttttgttagcttcttcatgtttcttctcaattttccttcacaaggagttgctgatcccaagtggtggacctgctgcttttgttattatcttctttttgatgagtgatggtggtctttgaatgaaaggtgttgttttttttcttcttcctgtgctattgtttttaaccattttgaattgtggctttctgtgtaatatacatgtgtgtctttgtttttgtctttgagctgattcattaagattctgggaatggtgttcggaattgtggaatatgactttaagttcattgagcctactccaactttgaactttgaggttttgttaaatataaaggcgaccaaatttttctggtttatacaatggccagatgggagcaagaatttccaggaacatttggattgtttcatttctgagcagaataaccattttcaagtagtgttcgatctactacatactaatcaatatttgattgattggtatgaggttattgacaaaaaaaagatttgtctgagttgtgaatttgactgattgatggtttgcttgtgc

SEQ ID NO: 1250 - DNA, 693 bp, Glycine max
agcttgcatgcctgcagctaaacacatattcgcaccagcatatgctaagaaagcatcaagatatctgcaccggaactactaatctgtgagaatatatgaacattaatgccaaccataaagaattacatgacaaggattagtgataactgagagaaaataatttaaaccaagatccgaaaataatttctacaaggatttttgttcattaaattggtgaattatgatagaatataaatatatatatatatagagagagagagagagagagagttaatatatgatttaatccgtgaaatgctgtttatttttggtccatgaaagtgatcatttgtacaatttagtcttccaatgtatcaacttgctcatattttagatatttcatcgcacatatatataatcaaaatgtgagcaaaattaataaattttgggattaaagataaacaggatgtcactttcagaaaccaaattatatattaactctttctctcactctatatagtcgcatattgaatatgccaattgcatctccaatacaaagaaagattacccgaaagggaagtttaagggaaaaagagtagttgcaaatcacaatacatttattgcttatttttaaaagtatattatataatagatgcatttaagttggtaagcagatgacatatttataaaccaataattgggaataaagcattt

SEQ ID NO: 1251 - DNA, 655 bp, Glycine max
ttgttaatataattttctcactttttcctgatgtacagcatctgcgagatgatttcaagtccaatcaggaacaactggttacagttcttaatcttcttatgtactgttgcaaaatcagagagaacagacgtgctttgttgaagctaggagctttaagtttgcttcttgaggctgcaaggagagctttctcagttgatgccatggagccagctgaaggcatacttttgattgttgaaagtctgactttagaaggaaatgaaagtgacaatataagcatcacacaaagtgcccttactgtcactagtgaagaagctggcacaggggaacaagccaagaagatagttcttatgttcttggagagattgtctcatccattgggccttaagaaatcaaacaaacagcagagaaacacagagatgattgctcgaatattgccttacctaacctatggtgaacctgctgcaatggatgctcttgtccatcattttagtccttacttgcaagattggggtacatttgaccatttgcagaaacaacatttggataatccaaaggatgataatattgctcagcaagctgcaaagcagagattcacactggaaaattttgttaggctttcagagtcgcttaagacaagttcttgtggagagagaat

SEQ ID NO: 1252 - DNA, 698 bp, Glycine max
cttgcatgcctgcagatctgcgatcttcaatgagacttcctttgataattgggtggacttagctgctgccccagctttgccagccattttgagtttgtataacgagcttaaggaattgggcttcaagatattcttcttaactgggagaagtgagtttcaaaggaatgccacagaaacaaaccttctgctttcagggtacagagattgggagaggctcatcttaaggtacacaaatcattggttcttggaaatttacatgccttgttctgttttaaaaaaaaattcacctgagattccttgttaatgaaacagagggtcttctgatcaaggcaagccagccactacatacaagtctgagaagagagcagagttggagaatgaaggctacaggatccatgggaactctggggatcagtggagtgatttgtggggttatgcagtgtccgcacggtcttttaaactcccaaacccaatgtattatattccttaacatagaaatggcttctcagaaatctgtaatctttttcataattgcctgttctagtacttctggccatgatttttcatggtactatgatacttgttacaacagggattctcagtgacactagtttctaatgtgttggatgctacatttaaacttattttggagataaatattttttctggtggggggacaatgatgacttggaaattga

SEQ ID NO: 1253 - DNA, 822 bp, Glycine max
tagatagaccatagatgatgttacatgatcaagactaataccccatggccaaccttttcttctatgaaatgctgttcaatcttcacatgcttagttctatcaagatgaactgttcttggcaatgcttatgacaactttattatgacacaaaactctcttaattttgcttgcctgttcattgtcactctgatatagattagaaattggcattacacttcagacaatctcatggaaattttagttgacagagcctataagccagtcattcaagcagtactaaagagatattattgtttcctacccataaaatggatgtttttataactgcctattgtaaaatggttgtgttatgcatcttattttattactgatgccattatcttttaattaataactactttttggtttactttttagatactgagtaatcaatctagccatcaaattattgctaaaggggtgatatctgatattagtccgatccatgtatctgtgagtattataatactgccccttttctgtttggttctgaaatttacccttttgtaaggtagcatttttacttcatatgatcatattcacaacttttaagtgcatatatcgccattaccatcataatccttggttggacagttgtcttgctgagttgataatttcaaattatttacattgtaaaattcctctaggtttccttttccaagcgtttacgaattcctgggagttcttccactgcacatgatctcagtcagcaggtttggaggattgataagggatgatatgtgacttcatttgctattatgaaggggcttctctgactactgc

SEQ ID NO: 1254 - DNA, 670 bp, Glycine max
atgttctgtaggagctttgacaaggtataatatctttatgtcaaaagtcaaaaacttgaaaataatgtcactaaaaagtgttgttggtatgatgctgcaaatatttttgacatcttaatgacttgtttcgtgtttctgcaaacatataatcaagcaatggattttgctttatggttgactgttttgtaaacatgttacatgtttctttccttcaaactcatttaattgattaaagcttaatcatccttgttaacaggtttatgatgttgattctttacgcatgtccagttggcctatagatagtgcttattcaggctcaacatgtgaggtaagttgtagcaactgtgagcaggaagttaatgatgttgattttcagaaatccttggaacagtgtcttctacattcacacaaacaaaacaaggttctcatgcaaaatgatcttcaagaaaaacttttgaatgaaaaagaaaagataaaatcaaatctagaggcctatggaatagaagacacatatttatcttttaaaaggactctgttagatggacctccagctgaagagggtctgaagaagcttgacagtttcaaccaatggatgagtaaagagcttggagatgtggaagaatcaaataaaccatccacttctgggggtaatggggaacaagttgaactg

SEQ ID NO: 1255 - DNA, 813 bp, Glycine max
gtcatgcctgcagcgagcttatatttttattgaatgaaactcatttaaatacattgagataaaaacttcgtaccccattgcccagaggctcttcgctatgcgaaggtatgggggagggatgttgtacgcagccttacccttgcatatgcaaagagactgtttccggattcgaacccaacattgagataatttaataaaaatgatgcatgattttaggagatgctattgataaaatttgaatataaaatcagaaattaacttgtccataacagcaaaataacaaatttgacttattcagactaaaactactttggcaacattcaaaggcatgatctcaacagttctaaataaatacttttttgtttttaacatataaactatatttagatttgtgctaataatttatattatgatacatggttattttcaactattgttaatattttcttaaaaaattattgaaattctattttaaaataaagatgaaaagatagcttgaaagagataagaggttaagaaaaattcctaaaaatgctattgttgaagaaaaactcccaaacaaggtcttcttggagaatgactcctaagatcacccgtgttgaggattgatgttctaatttatatatagaggacatgaacttgaaaaaaaaaaactagagttgtgaattaatctgaatttgattacaagaatggagagtcagcagactcttattcatgcatcataaatttgtgatacaagcttctaactgaagcataatcataacagaatgcaactgccataatgggacagctgtcgttattaatagttgactc

SEQ ID NO: 1256 - DNA, 843 bp, Glycine max
tgcaaatcccaccactgggtgccagaagaagctggaaatcgatgacgacctgaagctgtaatcatttcactttctctgcaattttcatttgtattactcttctgattgtgtgtcgtgtgttgtgcttagaggaaaaaccgttgctttttaagtggggatgctcagaaacgaagctttacttcagtgatgctttgtgctctgtgtttgggactccttattgattacaatttcgaatttgccaaagggattttgagtttaatcgttgctatcttagggttgtcttttttttctattaaagtttgttagctttatgattaacctgacacataaagctatagtgcaatcatgttagttgcttctccatagatttgctgatatgcgtgcataatgaacattatgtcttagttgacttgatattcttgggaattttgaattttactattactctgtgtagctactatggggagttaagttcttttggtggaattttatgtgacatgatattcttttttttattaattggaaaatggtagttggtaataatgacagttgttatctgtaactgcctcccaccgcctaatattgagcccggccttggggacaggaggacttcccagaggtctgggtgaccccccggtgcgtttcccctgactgaaaaactatttctagccttttttggcaaaaagcctgggctggcaacctatatgagccttattttgtcaccagagaggtcccggttctctttatgcaggggggtgtaaatgagaactaggaaagtcgggaagcctcgaggtgccccccctcgaaaatttgggtaaaataccgacccccttccccatagga

SEQ ID NO: 1257 - DNA, 729 bp, Glycine max
ttgctatgctgctaaagtaagtttaatttcagccatgttataggaacctatattagctgttagaaactgcaatggctgacttgatgtgtatttttcatcattgcatcatcaggatattattacctgctggaatacttatattacagaagatattcttttttagatccgatcaaacctagataaactttttagatcaagttggttatttcacagtattgtatatttagtactatctgagtgtccagatcttaatgggtttggtttgattaaatctatccataatatatgagtggaaatatatgtgaaccaacatgcaaagacatgcttatacaataaatctgctttcttgtcttatattttatactcttatcattctataggtgacattaactgcgcttggagaaatttttggtgctgcacgtgtcattatgggttggcttggtgattgtgcaaaggtttggtctcatagcatgttggacttcaaatgatactaaaatcctattggttttggcactgttttatgtgtgcttgcatgtttgcaagctttctttctatttctgaatggtgggatcttaaacttttaataggtaattgcttttgaaaaccaacctgtttgttggaccactccttttggcctttcagttgtacaacccatactggtaaaactgaaccggcactctgggaaggttttattataccaaaggatgtttccccccttttggtttaatt

SEQ ID NO: 1258 - DNA, 664 bp, Glycine max
atctgtcatgcctgcacagattattcatagggtaaaatgtaatttacgctactcaagatttaattagcgtaaaaaaatgttttaatccctatctttttaaaaataattattttgattatatttttaaaatgtgatggatctcattcacatgtgtgtgtttagaaagcaattgaatccaatattaatgagctttcagataaaaattacaatatagttgctttcaatttttacattataaagaactcaatttctcgtttcaacgtgattttaacactgattcaaacataatatttcatcttaacttgatcaagagcgaaattcactatatttttaaaaacatgatgattaaaatcaccatttttaaaatataaaagactggaactaattttgaccaaaaacttaaaatacattttatccttctatggccaaaggagaaggttacaaagaaaagatatatcttcatgcaagataaggagggatatgaatatggtcgtttgaaggaccatcactgaagttaagacaataactgagaaaatcatagctgtattgtggacctctcttgcgccatcccatggattgcttccagccacgcttcaacttgcaaactacctgtctcagaacgcttgatgaagaaaggccatagccgagtgcctctttcttgtaa

SEQ ID NO: 1259 - DNA, 631 bp, Glycine max
ttgcctgcagttctgcacattgtaagcttctggattagaactgtttgttggaagtgatagttgtttattaagggtaatgagagttcgagatgttagtgttattgttgttgttaaaatgagttttttataacttaaaatgagtcttaaaatgaatttttgcataagttaaaaatcttttaaaaatctatgagagtttttataaattattttatttagcttatcttcatttaattttttttctcttaaaagtgttttagaataaattcattcaaataagtaattattattgttgtcgatattgttattgttattatcatattttgtttttttttttgggaagttgaatatcataaactgatttaaaaagagaggccttggttgtaaaaaaccataaacttacgtcataggtgtgcgaatatgataactaaaaaactttcgaggagtgacttttgacggtgaaattgggaaagaaaacaacatactagagaaattcatcaacatactttatcttatttataatttcactttgttacaatacattggggtttttttataatttttaatttttttttatcgaatctttcaattttatgtgccctttactgtttaccataaaaaatatccccctact

SEQ ID NO: 1260 - DNA, 888 bp, Glycine max
agaaaatcttgctatgactattatgtcaacgaaaagaagtactaaatttgtattttgtgtactagtccctttctcttcttttatgaaggaagcccttaaaataaaacacgacagtattcggaagagggtgagcactttggcatcacaataagacaaaattgccgagcaattaatttaacacaaaaggccctggacccggagctgtatagattttcaattattaaaagaaagaagaagaaaaaaatgagcgtattctagttcatttatttctctatattgatatcgaactctataatgtcatcttatctaaataaattagaagtcccctatgcgaagggaaactatcatacaacaaatctggttgtatcaactattaccatgctataagcaaagcccttgcacggacctaacttttgctgtagttgctacttggaattgctcacaagacagcaccacaaatttctgtcttcttcacatcaccacattatttctcaactttatcacatcaaccttcaactgtgttggggacgaagaatctgatcaacaagcttctctggaagctttttagtagcctggaagttcctcatgtgcaaaataggttcacatccaacatctgccactgatctgccattcggtgtttgcaacttaaatcgctctgccttgtatgcagaaaggatattttcttcatcgggtaggtgattgctaacctttcaggagtgaagcccagaagaattcatctgaaaggtttaaagaaccaatcaggatgacaggcttcccaagattaaaattggaaaaactaagttttacttccagaataaaaacaatattgggcggtccctatttgaccccccctaagctggggaaaaaatgatttgaacttcccggcct

SEQ ID NO: 1261 - DNA, 895 bp, Glycine max
  misc_feature (733)..(733): n is a, c, g, or t
  misc_feature (819)..(819): n is a, c, g, or t
tataaatgaatggagatttgccaagataaaggaatacaaggagcggaatgttgaagtggaaaatgaagcttttgaccgatacatgcagaatgtagatttactggaggaagtattagctgtgaagtcgttggatgagaatgtgccctctgcattggagtctaatcctactacaatggagagcaatgaggcaatgatccctgggttaaaattgcagctaagatcaaattctatgagaagtgatggtttgagaatgagaatacaacaaattgtagacgagggattaaagaagctcgagaaaagtgctgtagatggtgacatcaatgaatcaattgatgatgaatctaataaagcttcagaaaggggaaaggggattgaaaggttatcagctataagtgatcttacggataaaattaataaagcccgaactgaggaggatttgaagccgtgcttagagatgaagacccaactcttcaatttggatgaaggcgctagcgttaaagaccttcaagacaatgaaatgcatgagaatgaaactgttgtaattgatgtggtaccagcagaaggattggattattctttaccgaaatttgttaccaccactgagattgatctagaaactctcaacaccatagacaaacacttttctacccaggatatagagcagttatgagtctagatttcttaaacattgtgatttaccttgaaagaaacagaaatctaaatgttgtgctgntctaggaaaatgctctctaattagaattaggtagtcaaatgcaagccaaaaagtgtttagaaactaatctggatacttgaaccggntgaagtggtgacagattatattcagtttgagcactattcaatttaattccagttcaacgaactttagtccatttat

SEQ ID NO: 1262 - DNA, 898 bp, Glycine max
tttctgaacaacatctcccctttcattctcaggtagctcagcaacagcttgaagatgctgtattggtctctggtaatcacatggagaacgaattccattctccatgtcaaccttactaccacagtcttctgtacccatgatttggtgagaaacagaatcaaccttcccatttggtccaagagggcttggcctatctctcagcttccgttcacgtactccagacctaaccttaggggatgccggcaaaaacccatttgaccaaacgggtgctttctgactttgattttggaagctggcaacactgtgttcatgcccatcttccctgccaggagacatgtctgaagcatgttctccagacttcaggggatctggcggatggattggtggtggggtcttggcttggcaggcattcttcaaaattgactttataaaatggttgtgcaatggaagattctccctcccaagaactcgaaaacataacttatcaaactcagtcttgctcaacttctgactcaaaaacctgttcaagtaataaaagtaacgcttcgacttatccgctccaagcttctttacaatctgtgctctcaattcacccaaatcaattcttgagctctgctggggttgcatttctcaccagacagattcatacaacgcccaacaaatgaaaaaaacaatccacccacccaaaacctcaatttgacccaaattgctgcttccaaataacactaaactttcccttccccataacagcttattccaattttcaaaatagctaattaacaatcgtacaaataagatgcatgagtgatactaatgaccgagtaacccatagtgaaacttacaattctggccaaaacagggttaccctttaacccccccccccccccccaaaaaaaaa

SEQ ID NO: 1263 - DNA, 758 bp, Glycine max
agcttttacaacatggtagtttgaaataagaatgctttgtaatgaatcctttttgaacaaatgaggtagactattagaggtgatccgtatcatagagacaatggatcaaaccatgtgggaaattattgattgtgggcatagagaattgaaaatgagaaacttacagcaaaaatataggtagtacctactaagaaatccaagataaattagcacatgcatgcgcgggcttaaaaaaactctggctagaggagtataattgcagtagttttcacagtccaaaagttgctgaatgaaacagaaattttgtgcagcctaacgaagttgtggcattgagaattttacagtagtacaatgaatatggatgagcttggaatgtgatgaggggttctcatgtacaaggcagtttaacacatcaaaacatgtttttcttctgactatgccccaaaagtagttaaaatgtttcctagtaattacttgctacttaaataaccttatgctataaattctgaagggcttatgccactaaccaatcaatacaccaatgaattcgttgaattctaaattcacttttcatgactattatcttgggtcctttcattaatatgatattgatagaactggaccaaaaatagaagaaagatcggtatatttaaattgaatgctaccagcaacattggtccaaacacctgtgagttgaagtctcataccctctacatttcccaatttttttttaccttaactaattttccaatttttta

SEQ ID NO: 1264 - DNA, 804 bp, Glycine max
gcagttgaggcaaaatggtattgttttagtgaaaaggagctacatatgttggtgagaaggcaacccttctcacttattcacaaaaaacaagtggaaacaaataagtcctcatgtgcgtttctcttaaaaacatgcggtgcacttgtatatgtaaggtgaagttggtttccatttataaatgtaagcataatacttattgcacaaaatagggtgaataattagggacaaccctttattcagtgtttgatgatctaacaaacagcttaccagtataattagtcggttattggattttgagtaacaatcaactgccactttgttgggaagtaatggaggaacttgtcttgtcctaagctgagcttcaacaatggtatcattcagttcactgtgcaaaaagaaaaccttgtttttagaataaataatcaagaataacatacgtggcaccgaccaccatagaaggtcaggacaaaatctagagcaatagagcgaccaatatagctatttcaaagacagaatttccatttttctccattttcccattgacactatttcaaactagctttagtggtcgatctaatatgctcatgtaagactgactgttccatcttacaagaaaaataaagtacggaacaaaattgatccaagaaaaacaaaatgcaagcaatgttataggattaaaacctcacaaaagttgctgcccattcctgtgacgtgtgagtttcaacatgttttgaaattaaaactggatggtcggtttttctcttttcattagactggacatttttcaaacgccattaacccatt

SEQ ID NO: 1265 - DNA, 775 bp, Glycine max
tacatccaaaaagttaatcagctaacccaaaagcaataaaaggataagaagaaagtaagattgaatttttatagcaaacacatgcagaaagttgggctagaaaaaaagggtgtgtaaaaataccattttgaagcgacgttaactacaagaagaaccttccctttgtaggtgctgaggttcacgtctctgcccttagcatcctgtgccaaccatgagaagagatttctataatcattctccaaaatcaaataataaaaaaaattggggtttcctgttgttgagattcaaaagtatataccttgacaatgaattcatggatggatttttctgtgaccgatgccgaagcacccatttctcaaagacgtgaacacttctctctcaactttctgtctctttgatttcttaatttatgtctatgctaatattttgggtttaccaatttcttcaacagttttatagcattctctctctcaaatttcatccattaagatttaagtgcgtggtccagcaatggcagatggacaactttcatgtttttttcatgattaaagttgacagtttccccaacatcaagtacttgattagccaaaaatcaagaatttaaaaccacgtaatcaattattttagttttctttttttcgtttttttaaaggtggtttccatcaatgaaactaatacaacgttgttctattcttctaaatattaacaagttttcttaggtcatctctgcttgcctctcagattctacatttgctcaataaaaaaaaaatgttcc

SEQ ID NO: 1266 - DNA, 655 bp, Glycine max
atgcctgcacgcaataattgaggttctttctttcgactacttcatcacgcaccaataattcaaccatttttgctattcattttttgaattaaaacatcctagatcctcgttttccccgtttcaaagaagattcaagagaataaaattcaactaaatactagtatgctgacaaatcaaatcttatactcctggcttatctcaccacttttacatgaaacatagtaattaattaagcatgtcattatcctgaaattggtgaggcctatctgattatggattattttaattaaacccattttgggcaataatatatcaattaaactcaacatcatttcattttaattagaattaatgagaagggcttaagagctataaacatatttaattacctgaaattttagtatatatgaaaactcgattactaagaatatgcaggccatgaaaaataatattcagatatgtggctagctcccacttaattttatcatcctttaactagtaaccagagaacgttagtctagtaattatcatggagataaaaagaaaaaaagaaaaagggaaaagaaaaaagaaaagatgcctggatttcctggtaggtttcttttcttcttagcaggtggttgtgaatctgcgtttgagccaccattgctattat

SEQ ID NO: 1267 - DNA, 785 bp, Glycine max
ggatcttcctcaatgtgtccagatttttgagaaaatgacacttgtggtgtgtacattaatggagccgattgctccctttcactagaaatattaaaacttgcaggagtcatggaggtttgaatttcctttgagctcttctcagctaatgatggaatgttgttgacattcagtaattgctggcaggtgttggtcgcccgttctgactgaacatgtgcagcctgaattgttaacacaagcatcaaatataagagaaaccatgcttacaccaaagtaacaatttcaatacataatacatgaaataaagtaatttacttctaccatccccagttgacgttctgaagtgttaattctaacagatgggtggggtaattatatattaggcataaaattattcatgattcttcacctaacaacttaggcttttgggatagttagttcataacatggtatcaaaataagtctatacgaccaagtaataaacagtttgatacttcctgccaccctacacctctttctaatgaaaatgtgagtttcagcaaaaggtagagtgacaaacaactccatagatgggcaaaaagatttctgaatagcttaaaatcctctgcctgattcaatatacaaggtttatatattggaaaattactaatgtaaggaaccaacgtaaactaattatacatggaatatatttcttaattctattcggaatatataatcaaacctgccccccaccccgtctctcaatataatatgttccaagtttgttacacatgaactggcttagagga

SEQ ID NO: 1268 - DNA, 658 bp, Glycine max
aactgtttaatttctaatctaatcaagcagctaaaagtaacttctctaaagttctaaaagtaatttctgaagttacaataacagtatattgatgtatatggttcttgttaaattgtttagaacactcgcgggggaagagttgtacttcaccccatcaagaatgtcccctcagaatttgagcatgtggaaaagggggatgcattgtatggtgagtttgctgaattcattactgtctcagacttatctgtttctcaatgccttcatcttttgctgttgtagaatgactctgaatagttctgaagctatggattgtagtttctcatatttgttcaaatcaatatatatgctgactttcctctattgctttgttcagcaatggaattagctttgtctttggagaagttagtgaatgagaaacttctgaatgtgcacagtgtaatgcctctttacttttctgcttttggttactattatttttgtatatctcttattttttatttcctgaggagctcacaatgtttattttagtctttagtagttaaggctaatcagttgatgaatttggggctgataggtggggagatcgcaacaatgaccctcaaatgggcgacttctttggaagccagtttttgtcttgaccggtgaaaactcatctaaa

SEQ ID NO: 1269 - DNA, 727 bp, Glycine max
tcgccattttcttattcccttaaatagttaaggtcaaaccttaattgcataaaacaagtatattacaaatgtgaatataaagaaacaattgtaagccattttacttcaattatgcttttcttgatgaattcaaattcaagaaatatgattctgaggactttcctcatttcctggtaaataatcaatcagttcaatttattcttacagcaagatacgtgttataagcagaggacttaaataatgcggagcacattaaagaaaagtgaaagagtctgaaaagataatgaaatttattttccaataacacaaaagaatgtcctacagcttgagaatttcaccaatccaatagtgaaatatgatactacttctatataaaaaaatattactactttgaataaataaggacaagatggactaaatcttgtatgttatagaagaaaatgagtaccagttacagcatagagtgcacataattcatgaaagtcaagtgaccgatcctgtaatcatagaaagagatagtccagaaatcatcacaaggtggacagaataacactaacaaatattttctgtatgataaataaacatttgactttacttcatttgtcacatcttctgggaaagattagcaatattatttatttttccctaataatagatattagcatccacactcatgatccttggcttggtaaataccaaacaagcaatatgtgttgcacaagtttta

SEQ ID NO: 1270 - DNA, 815 bp, Glycine max
ctaggatgtatgctttactatagatgtaaacgaccttctatctgtttctgtggaagaaacaaccactggttataggaatgagattaccataaccaatgaccaaaaaaggctttcagctgaggagattataagaatgattcatgaagctgagaattatcaggttgatgataggaagttcatgaagaaggctaatacaatgaatgctttggatgactatgtttacaagatgaggaatgcattgaataataagaatatcagttcaaagctttgtttacaagaaaaggagaaaatcaaatctgtaatttcgaaggtgacagatttgctagagggtgataatcagccgtatgaaatagaggtgtttgaggatcatctgaatgagcttgtgaacctctttgatcgtgtcattggcaagtttgcttagatgttttttaagtttttattttttgcaatgctgagatctgtcattttgtttgtattgaatgcaaacttttctaatttatgatgttgtagtttaatatatttgtgcctgacatgttttaaattgttattattgttgactttggcttttgttattgttattgaattcatctttggatcagttcacaagaacaagctttgctatgcgttgttcatctttctctgaatggatctcagtcaatattggtgtggaaagaaacatacgttcaatattgtttcttgtttgggcaattatttgtggctatatatatcaggtacaagtttttgctgacatcataatcatgttgggaaaggtattcaggagtcattaacttgcaattttctgtgcttggccaatt

SEQ ID NO: 1271 - DNA, 897 bp, Glycine max
  misc_feature (731)..(731): n is a, c, g, or t
agctgctgaaagcatgccaagaaaaacggtttgtgtgtgaagaagcaaacagggcacccattcctactttttcaatatttcatcttcaataactacttataacccactgctaggccgattttagtggagcacgaaatatttcatctttaatgcatggggataaggaacataaggaagtgtcagaaatttatatgtatgtgtagaaactaacattcatgattcagcatgaggaataatgctagaataaaaattgaatcttgctaactaaaagaggaaagcatttagtgtgaaaatcataacagagcacaatttttaccttccaataaaaatatttttattttaagtttcttaactggttagcattctatttatcttgttgccataattttttgacgactttagatcaattggaaacccttcgcttcacatatgccaagctggaaatatcatctttaatatttcaagttcgcactgcctgtagatcaaatttattattcctgcaatttgaattgattttcaaaatttcagattttacattacaactaatcttcccacatatcctaccccctcactcacctactcacaataaaccaatgagacttctaaatgataaagtttttagtggctctagcacgaacttcccttgggaagatactgggcattgaaacttaaaaactaggaagattttcaaaagatgacccagattcatcccgaaaaacattcttaactgnggcccagcaattcgttcatcaactccactttgactttttggagtggagaaaagaatttaccaagtgcccattcctgacccccaaggggtgggtccgtgtttcacctctatggcattttgcggcggggaagaaggataaccggaaggggcttgatttttttatttaa

SEQ ID NO: 1272 - DNA, 702 bp, Glycine max
tcttgaggattacttgcctgttgttctgggattagttaagaatggtaaagcttgtgttagttcatttgtatatgatgtatgctatctgcaagacaagtatcaaatattattgcttgtgtttatggtgcaggaagccatttacagtataaagtacaatttacttgggtgaatcaagaggatgacaaagaggtaatcaggttttctatttaaagtccatacatgtttctgaatttgacgtggaagttactttctatattgaagaatgctgattaatttgttcccactacttccatgctttattgtatgctgttattggcactcttcacaggaaacaaccatgtctaatgcttggtatgaggtgttgtcagttttgcatttgatggcaatgctatcactatcacaggctaacttgttactgtttccaagatcatcatcctctaatggtcatctgccaaaagtatcagaaggttggtataaaattttggtatttgtcaacaaatttgttgtcccatccctgaatctcttattgcttaatatatcaaactgaaaaaaaaacattggaacagattagtttagacttcaagaacatttgatatgtgaagttaatacttttgatatctactaacagaaagcagacgagcctctgttgatatctttctaaaggctgctgggtatttggattgtgcagtcaaacatgttctt

SEQ ID NO: 1273 - DNA, 656 bp, Glycine max
gtaaatcattagaacaaaaatatcacaacttcatatcagttgcttcagcagaatgcatccagtatactcattcccaaactaaatatgaatatgctgaaagcagaagaaaacatatataggcatatgtacctatcactcttatgccatcaaatacaattattacaacaacaaaattaagaaaaaacatcaaattgattgagcatttacgaccacaccacaactactatgcagataccttatctcatatatcaaaatcatactgttcctttgggactcatcatgtataatatgtattcataaaatggcgctgaaatatataatgaaataattcttagggactggcaaaatatttatcagattacctataatgtaagatgcaacaacatgatacaatatcatggattcatggttcaagaatatcaaagccatttgggtttggttgatagcaatagtaaaagctttagtagaagatttaatcatcctcatctatctcaaaattagcaacagcattgaaaaagtttcatcagactacagccattaccaaaaacacctatctggtttgaaaattcaatcccctcgacttcttaattttgcacacaaacttcatatttaatattgaagttgtagaggaaaatcaattattcgaaccaatttat

SEQ ID NO: 1274 - DNA, 622 bp, Glycine max
aattgtatcatgaattggatgctttggataaacttgaacaagattttcagcgtaagtgtgaggaggaggatcaaagaggtaactgtaaagtatcacccatgggccatggcataatatgcatcttttgtttctaactagcaatttttaattgaagctcttaatgacttttaatttaaagtgaagattaatttggcattattattattattattattatttacaaatagaaccatcatatagtttagttagtggtatacgtgtggaaccttaagacaaggttcacattgatcatgtaattggttttgagatattgaaaaaatatatgctagcatcaacaactctttcaccaaggactctgaaatgaatatagaaactaggatactgggtatctatattctgctttagcatatatagatatttatgatataaaaatatatatgtatgatttatgattctgcttgcaccaagtatcttgttttttttgttatgctgttctgagtccctattaaattgcaaacactttacagtctgataacagttgccaaagcatctactttgggttttgttagtatttgcttatgtagtctcctgtagatatacttttgacattcaatatctcttg

SEQ ID NO: 1275 - DNA, 655 bp, Glycine max
tttcaggacatcagcattacagtttggtgcatcactcatttgagttggaatttcatagttggaaactggcacatttatttgaacaccaatttgaatttcacctttggaacttgtcacatcattggatccatcgtttttcaagctctcaattaaggattttggtgtgtcatttttttcatcaccatttcgattcaaagaaacagcttctggttctgggttgacagaaacctgcacgatagtcatggatatgtaagaaagaaaccttaaaaaacacttgcaacacattcccagagataatctttattggctcattattatatttgggatcaccagacaccaactaggactcaataactcaaacttgggattagattcatgcaaagcaactggaggtgatcttttattcactcccaccatctagagccattgaaatattcccttatatggagaatgttatcttgtgagatcacagtataaaattgaacataatttaacctccggaaacaaaggaaaaaccttagtacaaatatcctacaaaggtatcaaacaaattagatcctgaccaaatatattttcaaagggagaaaacgccttggaggtaaggttggtgaaacaatccattgtggaaataaagaaatttttccgaagaaacccc

SEQ ID NO: 1276 - DNA, 890 bp, Glycine max
  misc_feature (719)..(719): n is a, c, g, or t
attatgaagtatgtgacagaattgtgttttcaatatatttctgacaattagggattgcacgggaaaatgaacagcgaccagagaagttatccttaaagaagcaattgaagcggaaatgtctagaacaaaatcccaatcttgtccaaaacccagttatgtgtggatatggagtgggtgctgccagtaaccagcccatggaaatcttgaactgtagccaaccaagtgagaacttgcttatatattaactttctgaggaatacaataaaaaaaaattatttttccttgaagtgatatgttttttcctgtcatacttggtatattggatttaggaagtccctcaaatgtatatcacagcttatattacatgctctcttgtggtaatgcattttcttggtcttaaagattttggccattttagtagataatgtcaaggtagtgagatttgagaattagtgctcttagctgtactcacattagtgttggaacctgttcttcctacttgtttatgtttattgagacaggtaccatggcttgtggcaaggtgatattttctaatggtatataaatataacctataaaaatgtagaccctttatgagcctggaggatcaaagaatggaaaatggaatttggtttattacattcataggggcgaaatgaaatatgctgcatcatgattaccggcagactaaatcccaataaatcatccttttttctganaggaatggtcccgcccagttaggaaaaaactacaggtatcttttgaccgtttgtggaagctctatgagtcggttaaaccgctaactctattcttttatatgcaaggtgtcttctttttcgagtaaacaaatcaaatctcttaaaaaaaagctccggataacttatgtttca

SEQ ID NO: 1277 - DNA, 760 bp, Glycine max
actactgcaattggataagcttaataaagctctagatgatgcagagatgacaatcaaattaaaaccccaatgggaaaaggtaaatgtttatctattaatatttgagtgtttgaacccttgtaatacaattttcagtaatgctgcttgaatacacttccagggatatttcaggaagggaagcatattggaggctatgaaacgatatgatgatgtatgaatataatagccttttgcttagatttgattggaagctatttactctgttatgttttgggatttttatcctactgtgtctgcttgcgtgaatatttgtttgtactttgtaggctttagcttcctttcagatagcattgcagtataacccacaaagtcaagaagtatcaaaaaagataaagaagataaaccaactggtgaaagatagcaagcgagctcaagaagtggagaatatgagatccaatgttgacatggccaaacatttagatacattcaaaactgaaatggttagtatacatgtattctcattctatttctaggattgctcaacaagtatgtgcttttttggattttcttttgcattaattatgatatgatgaggaaagggtaagggagaaagaaaaaggaatatggtattcatggagagacacaaaaagggaggagaaatccatagaaaagggggacaagttcccaaggaaggggaacataagttttgtttacagacctttgggcttttttatataataaaaatattttgcggtaaaaa

SEQ ID NO: 1278 - DNA, 689 bp, Glycine max
aagcttgcatgcctgcagcttattgtcatataaattattggcagcaccaaggatgtcaaaattgtaaatcccatcttggttcaaacatggaagatagaaacataaaaggtaaactctgagatcataacacaagatagaagatcctataaggggggacattaagtgagtgtgtgaagatcttggctttctggttaaggactagatgtagcccttggtttatgagatgaactagtataaattattgtgtgttcatcatcttctctctgtgtgctcttactaacactcattggggacttgatttgagattttgtcttaaagaaaatcttattaaaaaaatccttttcaagatatctactatgaagataaaccactagtctgcctgatcaaatgcttgtctaaatgctgctttgcaaaaggttttttgtcttgattgtttttatttgaaatagtattaaagaggagaaaaacttaattcaataatccttctagtgtttttctgctttcttccttttcaattattttactcttgatcattcattttggtttctatgtcaagattagcatacacaaacaaccacttgaagagacaaagatactactaatggtgatgtgaaacctatagaagtttaaccaacgtttggcatcattcactttgatttcatactcatgaggaagtttaaaatcaaaag

SEQ ID NO: 1279 - DNA, 814 bp, Glycine max
tgcatgcctgcagccttggaaaaagtaatgaggaagcacttgcctgacttatttgaggaacaaccaaatctactcaatgatctggtataatgctaccacttgtactttctttgttgcttgcatatgttgactagtattttcagttaccagttgctttagtgcttctttattgtttctacagagaagaaatatatcttaatgttgtgcatctcaggtatgcacatgtgtactatagtaacatattagagtacaaagggagtcgatcttaaatacaaatcaaatccctaattacaataatggctatcttactgatattaaaaccttgtgtaaaatatttgggtaatgcaatcagcttttgcatgccctttattttaaaaaatataaccatgtgacatgtgtataatatgctatttaacacactctcccatcaaggtgaaacatatatgatgtgtactaagcttcttacaagtatattcaacctgagaacatcaaagaaacttggcaaacatgcaagccagctgattactggatttttttttttatcagcaaaacacacacacgcacacacacacacacattaaataaaagatagaaaaataatataaggtaacaggggtaccccaatactgtatcattgcagactcctaccacccagctcacgggtatacgttatttatgcaccaaatctgcataagtatcatctaaccacttgcctattacagatcccattcgaccaatactaatacacatgtcgggacttgctatacaaatctatggctaatatatacaacaattattcaaaatttgtgccctg

SEQ ID NO: 1280 - DNA, 669 bp, Glycine max
tggcatatgggaagaaaatattaggcaggtgtgcttgaacgaagtcaatctttggtggtcactgcaccctcccatcaagtagttaatttaactagaaatatagatacattacatgtcttgtgtggttctcaaaaagtcacagaaacacacacaacaccaatttaatatttctgttttagcgttaggaaaattattgtccattccgtccatcttgtgtttttatattcttattaatggaaggctgctagaaatagttctccatttagaccatggactttcgagggagcttatcaaccgcagacttcctggagtatgctgtaatttttatttaccttgttgcactcttaaaagggtagtgcattttttatgagattgatatgagttttcctgattgattcaattagtagtattaacatttgaacaattgaatttcatcctacatattaaaaatgaaatctatgattgataatctataattaaattcttaatataaagattgccatatcatatcttgtacaggctgaaccggcaggtatctcgacacacagagaggttttcacttcctatatacaacataatcaaacaagtcttcaaatgtaagaatttaacttaagccatctgttgtgactagcaaggtttcaaatttaaacttcaataccggttcaaaag

SEQ ID NO: 1281 - DNA, 782 bp, Glycine max
  misc_feature (768)..(768): n is a, c, g, or t
tgagagcaattagaaggggtgatgtacattccatctctttactactatcaggttgatcccactttctcatagaaagaaaacaaaagagaacagaactcttcctctgttctctcaaccaaggaatataaattctatcttttcaaatgtaagagttagtacctcaaaatttatagtattgttcattctccaatgaaatctaaccaaaatatgtataaaataaacaaataattgtgtcacatgcatggcataacttaagttaccttatggatgaaagtatttgcagtcagctttgaaatttttgtggagataccaactggctcaccaagttttgcatcctgaagcacataagcacaacacattcagaaggaaaaatcttagaaccaacaataatagaaaaatagggaaaataacagaaaaaggaattcttggtaaaccatttttaatttaggaaaaaataatctctgaagtggttaagtcaaaaagtggctattcattaacctctagtcaaagtttttagcatcattaaccagttgcaaagatattatacaggcagaataatccctcttctctccctacatgattcactgattcagtcataaatttggtgctatctaacaatacctggttgatgcactacccaccaaccaaaagaaactcattggaaatttcacatcttattcaataaactacacattattcacatgtaccaacatttcatctggcataaataagtggcaaaaaaattgaagaacacaatccttaactagntctcattacataaa

SEQ ID NO: 1282 - DNA, 829 bp, Glycine max
  misc_feature (698)..(698): n is a, c, g, or t
ttgtgatctcaaaatggggaaatcaccaggaaaatggatcaagaccgtactatttgggaaaaagtcatccaaatcaaatatttcaaaaggaagagaggtaatgcagttagttaaagcaatgccacaactttattcaatcattttagtcgcatgtgtgcatccttaaatttcatttaaatgacataattggtgacataacaaaaataattagatcccgatagcccttacattacaacctaatcggtacatcatcaggattatggattttgctctccaataagggccaatagccagtttttttgtctctgacatttatttctgtaaaaccacattctgctttggtgtcattgctgagactagagttttccattgccaaacacctaagattatgaaccagaaatgcagctagggtatataactgctgttgtactattgaaaatataacttccttgaagaaataaatgtgttttaatatgaactttcctttgttaaatttctgacttcttttgctgtaattttatgtagaagtttgttaataaaaaagaagcagtggtttcttccaacgagttggaaaatggtttgtctttagatccaacccccgatgagattgctacaaatgaggaggaccatgaactggagaatgaagaatcagaaaatattttacctgacaatcaagaaagagacattattggatctgntgacccggatgcaccacctgatccagagaaaatcagctggagcaagcagcatcaaaggcacaagctgctttcaagggttacttggtaggtgacttactgttttagagaccttaagtgattaaattcatata

SEQ ID NO: 1283 - DNA, 826 bp, Glycine max
tctctactattgatattggtctgggagttactatactgttatgaagttagtttgcctacagttcttacagttgggtaccattagcttatgtcaattgtacagtggtgtacagctgttattattttaggaaagtaattatgtttctttgagtgtataatttagtgcctctgaacagtttcaaataatcaaataatagaaaagggctactcaatgtacaaggctcccatcaagaggagtcagggaagggtagatgtacacagccttacctttatcacaagacagcaactttactgttgcgaaaaggctcgcccttttaaaactataaaaaatatctaagacttcatttctacaattttctcaagtactcagatcctgtagttacctcaggcaccaacatgaggacatgcagtatttgtaagcctggaacaaatagttttttatatggattatatagaaaagtaagataaaatccatttctggaattttaatttgatagcttcagcttttggatatatagttacatgataacaatcaagttcagaatccaaaagtaactcaatcataattcttactgtatatccttcctaaaagagcctgtgattaaaacttatagagatctgaaatagtcactcttcaacaaacataaatacacaggaaattatgattataccatgtgatattaggctatataaggcaaattctcatgtttcatgtaaaagggttaactactaccccaagtctcagggagtggctatatcctactatttttccgtgatggttcaacctcccacttgtgcgaaagggcctcatgtgttccttttaggtg

SEQ ID NO: 1284 - DNA, 666 bp, Glycine max
tcgtcgttttcgtgaagctgatgctgaagaaaatgctcaggtcttttgtcctttataaatttggcacttattaaattagaaataatactgttaaataagctttaatttgatgaatgtggcgtgcatttgcaggatgcagaaattgaaagaagaatcaagttagaaacaaaggctgaaaagcatattcagaaacttttattactaggtgtgttttactaggtgtgactttccttattttatatagcaatctgtagaattatttggagtttagcaattagcattaatacgtaaagtggttgtactccccaaagtttgaaggaatcatatgtgtgtgccacaatctcttaatataccgtgcaaatactagcttttgttatttattttctgaacttatttgtgtgttaatatctctgttttttaggtgctggagaatctgggaagtctacaatctttaagcaggcaagaaattgcatcttctcaactgcttgtgaattttgatagtatatgattgctattgggtgtagactgcaaaccaaccattttgagaagggtgaagtgtgtcccaaaagaaagaaagtttcgggttctcacataaactgtatttctttgatccttcgtcattcacacttccacatgaatcttccaaattgtttccctcacagcgtg

SEQ ID NO: 1285 - DNA, 667 bp, Glycine max
acacattgaaaaacatgtcccttgcagtaatcttaactgagtcttatctacctagctttgcctcgcataacgccatcgagtctttttctgaaactgtttcagtattgtacatgttcatcatatcatggacaaatggcgaaggattaatagatcacacctaaaaatggcataattctgccagcctctcaactcaaagccccattcggttagtggataagataacacctcagtaagatggcacacaatttgatggaaatgaggtgtggggagttgaaaaggaggaatggcaatggttaagctaaagctcgatagtgtttggtgtgtatgtttctgttggcttttggtttatgttttttagggtgaaaagaaggtggccacaaaatgtttttgctgtcataaagggatctgaagaatctgatcgatatgttctgcttgggaaccatagagatgcatggacgtatggtgctgttgatcccagcactggaacagctgcactactcaacattgctcgatgattttctgctctattgggcttggggtggaagccaagcaggactatcattctctgctgttgggatgcagaggaatttgggatggtaggtagtaattccttcttcacaactgatatatatcgtggttccatgaataataaggcaaatagccagtt

SEQ ID NO: 1286 - DNA, 738 bp, Glycine max
  misc_feature (689)..(689): n is a, c, g, or t
atgtgtattaagacagcatataagatgattgcaacttttaaaatcaagactttatatcacagaaaaaggaaagaagagcaaaataaacattggactacttcagaataaatagtatcattcagaacagggaagtgtaaacctcagtttacttttgcttattaagttattatataacccttgatagaactagaattataaaggaataaattcaaactacaagggtatttctggaaaattcattactgagaagattgaccatccttcttccaagcttctttctgcttcttctcggcgtaacgaaagaactagatgaggagaggcctccggtttcaaatccctaccctacgccttacgagggtgccctagccagattcactcccaagggtcaatcaatcctttgaaactagttcaaatagtcgtcacagtcttcgttcctgctttcaacaagactttcttagctgcatcagcctgtaaaactctctctccttcaccaggaaagggagagcggacaaagtaccagatgatttgggttgggtaagaagagcgtacggtaacagtaagcagacgatgtcgatagaagatgattcgtgggatcttcctcaaagtcaaagaaagacagtgaaagagagatgcttgctatgaaccaacaaaccagaattgaagaacagaatgaaagatagaaagaacanaggatgaattctgttcttgggaaaatggaaaccctctacagaaaaagaa

SEQ ID NO: 1287 - DNA, 1022 bp, Glycine max
tcacgaatcatgatgccacaaattccagtaaaatgggttcttttacactacacaactgcataacatagatggacatcatataagcagtgataacttgcagatgattatataggagatagaggctaaaataattaattttttatatagacatctcagaaaaccaactcttattctaaattgaaaagatcaagtattttttttcttttaaaattctaaatgaaggaccatgaaaaaggttatgcaggccagtggggatttcagaggcaagggagggttcagatcagggaatctttctggaacaagaaaacccaacaactgttctgtgccctgaaccaactggcagcttatctttactattgaactaattgccataatttaaacacaatgattgcctgcaactacttctactcaaaaatcattaactctttctaagaacaacaaaaatagtctttgacaattatagtacagcagtaaaagcagttttaacacacctttcaatgcacaaaaaagaattacacattaaaacataattatctttggggaaaaaatcaaaatagaaaataactaactgtccttgtagccaatgtactaaaatgtagtaatatattgactatgctttaacaatttgtatagtaagattatcggaggtgttcttaactcattcaaaagtaaaagagggggctcaaaccctacataagagccccatgtggacctgccccaggagaccttgagcccatgattttcctgcatattaaccaggccatgccatatagggttaagaggaaccgactatcgaacgcacactttaccctttctgcgggccatttgtacacaactctgaatttatacctccggaaagataccactcgtgcccgtgactaagaaggccctcaatctcatttcccaatacccttgactcaaaaaacagcgtcacacgcatatccattcgggtccacctagttttcgcgaatgctccacatgtaaagcgtcgggaccacaatatctcctcggctgactctgca

SEQ ID NO: 1288 - DNA, 706 bp, Glycine max
tttgcatgcctgcaggcagcaacaccaaatagaccctacaattaagaatgtaaaagtggaagcaaaatgaactttgtaatggcttgtgaacaaccttaatgctctcttcttccattttcttcttctatctcttttctcagtcgtgggttagaggattttggtgcactgattggaagcataatggttataaagcattggccagactttatgtgcagtgcagcaattggcttttatttagaagaatgatgactagatgatgaacaactttggttttggtgaaagaaatcttaggaatttggttttgacctctctgtaagccatatattctcaggttcactatgttctatcaagttgcaacgaaatagtagaaaaatgaaagcctgaaaacaaggaaatggaaaaagaaaacgggtttcactactgtgagccagctagccacataaaagatctttgttttgggaattactttttacatcactatttttttattacatcactatttttttgttagtcccaccttccttttttagcataataaattaaattttggaagagtatttaatatttttattctgcaattaaatttcgataaataatgcaaagaagggtggtgaaactaaaaaaagaacggtgcaaaaagtaatttccatcttcttacatccattctaatggtggtgggaactgggctagtctacaagtttcaact

SEQ ID NO: 1289 - DNA, 829 bp, Glycine max
  misc_feature (743)..(743): n is a, c, g, or t
ccgcatgcctgcaggcataacttctgccctaacatcttgaatgccaacctatcacagcacatgtttttttcttttagccaagttgagataataacaacaatttctacccaaaaggttatgttacaactgtcataaagaagtgacacatactccattatgatttacaatagagggctgaagaatccgatatttatagtaacaaatttaaaactgttttaatttctttcaacattttcttttttggtaaattcatttctttcaaatattactattacaatatttcctgtctacagttcaatttaactgtcatactatacactacaaaaccactatattccaaagcaaagatgttggttttcttctcaagtagaagtccaaatttaaaatgcatcaactaagaaatcgcactcaaagttatcacaacagcaaactttccaatcaaaagagaatattatatatatacaaacctctttggctacagctcgagctgttctccagttatctcctgtaaccataacaggtatgactcccattttctgtaggccttctataacaacagcagcttctctctttagtgggtctgcaatccctaagactccaattaatatatcatcatatgctactagtatccctggctttgcactttcttcaatctctacaacaaaactttagcctagtgaagaaatatttatgccattttcctccagcagatatccggtacccacctgtttatgatatgctgnctcgagtaaacaactctcttgagaaatgtttttaaacagaataaggtgtatcacattaaccaaaagacttttccaaaattcgcctc

SEQ ID NO: 1290 - DNA, 1088 bp, Glycine max
aatttttttgtataatcgaccccatattcttgcttgtatcccttggccccaagcgcgccttatacttgtcaacttcaccattttctttaagctttgttttgaagacccactttacgccaatggttttgtgtcctttaagaagatcatttagctcccaagtatcatttcttttaatggcatcaatttcatcatccattgcttttcgccatttttcttctttgacagcactatccaatgttgtagggtcacaatctgaaaataaggcaaagtgaatagtaggatcttcagtttggtcaatcccagttaccttataatttgacatccatgctggcctcgaagacgtttagattgagttgcagctgttgcgtctgttgttccagcatttattggtgttgaaatctctgtttcaagagctatttgagctgcatttggagatgttaagacagtgtttacagctgcaattcttttacatcttcattgtcaacaataattgaattgggttgctgctcattccagtcccatgtgttgtcttcatcaaaaataacatccctgctggtcacaatcttctttgttagtggattaaataacttatatgcttttgatgtttcacttacaccaacaaagacacacttttcagctttgtcaacaagcttcttcctcttctcatccgggatatgagcataggcaatgcacccaaaatttttgaaaggatccacagatggttgtctcctactccaagcctcttccggtgtcatgttttgaacagaaaaagttgggcttctattgagcacatgaatgctccaattaactgcttttggtcaaaaagttttcggtaatcttcctcttgttaacaaacttcttaccatgttaaggataattctatttttcctctctgatacaccgttttgttgtggtgtatatgctgctgtaagctctctttgaatgccatgatgttcacaatacgcttcaaattcttttgagcaatattcaccaccacgatcagttcgaagagtctgaatggtctttcttgcttcattttctacacgagctttgaagcttttgaaagtagagaaaacttctgatttgtt

SEQ ID NO: 1291 - DNA, 729 bp, Glycine max
gctggtttgccaagttcccagaatacaataatagagatttttatataatgggggagagttatggaggtaaagtcacaataatttatttaccttgaactttgcataaaaaatccttagattgctaacactgacaatgttggttttggtggcaggtcattatgtacctcaacttgcttaactcattatcaagagtaaagtgaatttcaacataaagggaatagcagttagtaaaatatttccactttttttttttctgttggtttcatgctgttgcattttctaagttaactttgcatttgcattgcagataggaaatcctcttctggatttcgacactgatatgaatgcagttgatgaatattactggtctcatggaattataactgattatgcatacaaaatcatgacctctctatgtaactcgtctagagtattaagagaatacttcagtggccaaatttccaaaaattgtgtcttgttgcagctcaaaaagtctcaaaagggtattcttttacaactttcattgacccatagtattaggggcggacctaccggcagtcaaatggcggacctacaggcagccgagggaatgcataaatttttaaaaaatccctccaaaattttataaaataaaaaacctaaaaatttccaaaattcaaatttgaatttaaataatttaaaaataaaatgaaaaccccccacggggaatttaaaatatttttaaaaaaa

SEQ ID NO: 1292 - DNA, 615 bp, Glycine max
ggtaagaggaagcccaaaacaaattttgttgaagttcggacgtttttgcatctgtataggagttttgatcgaatgtggatattctttatattggctttacaggtaattttagtagttgaacctgtggaatgttcttgatgttgattttcactgaatgtctagagctattgttaggtcttgaaacttcaccatgcaaattttatttcagatatgaaaatatttgtttcaggcaatgatcatcatagcatggagttccttgggacctgttggatttttttttgatggagatgtcttcagaaatgttatgactatattcattacttatgcttttctcaattttcttcaaggtactggattcgtttatgtctgagcatttatctgtacctactttttcaaaagatttatttaaaggagagaaaagaaggcaggaagataaaaatcctccatctgactaaaaaaaatgaccaatactttctgacctctggaagagcagaacttaaattaatgtcaggatatattgctgaaggtaggccatgtactaacagattatttcctacaccttccaaaaggagtctataaaaaccaagtctggactaaggtcctgttcaaataaat

SEQ ID NO: 1293 - DNA, 742 bp, Glycine max
agacaattaagaaaattatgtcaattataaagaatttttgcacaataagtcatcatactacaagtaattggaagatgacattaaaatttctttcccccaccttcctcattcttgcaatatggatagaccctactacaagaatctgagttagtttatttggattatcttttcaaaatttatacatggaattgattatctgagtaatatacagcacaaactcttgtatttattactaatcattaatttgtcactaaatatatggttggttcaatgctctgataaatgacgtgctttagttattttctagtttaagccgtgttggcaaattttataacaaaaaattgaatgacgtggtccatttttccttgtaaaacacggatagaagccttgtaaaatactaactatcaagaataaagagcaatatgcaaatatgattacatggtccatttttccttgaatgcattaacaattgaatgaacttactccattatctgtttgatttagaaataaatgcctatattatcatcatgaaatgacctctccttaaattgtatgcgaaatgcaaatataacggggaaaaagcatgcaatgaatttaacttttttaaagcaaagtgtctcacctcagataatgacgtgcttcatccaatagttcttggtattcttggtttaacctttccatatcagttataacctacatgaaaaataaaccttgttgaaaaattgaaatatttgtaatgcat

SEQ ID NO: 1294 - DNA, 680 bp, Glycine max
aggtagatttcaattttaagcctaaaaccttgtttcttcactttttggtcaataatgcattgtatttcatactgtttttttctcatattctaaggagtaatataaacagtaagcttttattgctttagtagcatcatgagtttttctttttctaaaataatttactttaatgtgatggacatacccagtgaaatatgtctgttaacaataagcccgttcagtatattgacaatagtcatgggcctgggaaggaaattaaagaattaagggttaccagtttgagattagtatgcatggaaagtcaaccgagttttttcaatttacaaacgataaatattttgtttttcaaaataaaaaactgtcagttgtttgtgtaaaagtttatgactttcagtgtgtcaccaaggaaaagcattgaatgccacagaagaggaaatgaattccggacttttatttgaaatgaatcagaagaaaaaaaatatatacttcattcttgatggtatatgcagcaacatactccagctttcatttcatttttgcagatctgctctgtttctgtacattagcagtttcatctgccaggtgaatttctgattttctcatcttttaatgaagttcaaaataatcttcattatacatgtatgttgatttcaattctagactgccactttaagaagagg

SEQ ID NO: 1295 - DNA, 890 bp, Glycine max
  misc_feature (880)..(880): n is a, c, g, or t
ttgtagttggaatagtagttgctgcaattgttcttgtcatcctaattgtactttgctggagaatttatattaggaaaagaaattcattagcaaaaggtgatgattatctagaataaagtaaccaactataaaatatatttaattttactagttagttctcccttaattctagctttctattaaattttgataattcagttttttttttaaatctttatttgtgtcatctacttatgataccaaagataaaagaaaaaatggataatttttttattccaacttactatattttttggtaactaaaatgatgtatattttttcaagactatcaatgacaaaagattttctcaagatacataagacatctcattcggttttattctattgtcagagttacaggatttaaatctgcaaacgagtttatttactatgcaccaaatcaaagttgcaactaacaactttgatatttccaacaagattggagaaggaggctttggtcctgtttataaggtatcatacaagatattagatataacaccttataattattgggattgatctatggtaattgtgtagatgaatcattaaataatttagaaattcataaaaattatataacattttgcaaatgccgggcattttatcaaatggcacgataatagctgtcaagatgctctcatctacgtcaaaaccaggaaatcgtgagtttattaatgagataagcttgtattagccttgcgcccctttgcttgtaaacctatggtgtgcgttaaggaacaatgtgtatatccatataggagacaaacctgccacctttttggaaaaagctcataaacaaatgtgcttgttgataattcatcactatattaataaaaagganccctattgtc

SEQ ID NO: 1296 - DNA, 724 bp, Glycine max
tttttttttccttttgctaattgacaccctctttttacttttgacagtcccatttttatttttttttcttatttgacacaacaattttttattcctgttcagtcctcttttgttttttttcaatttcaatgagcttatatatatgtatatttttttgttttgtccgccatgacatccgccattttccgctacgccatccgccatatttttatgtcggatttttggctttccaccatgaaccgccatccgccattaacaacattgttataagggcacatgcagcacaaacccaacatggatgggaatgttgctggaaattaaaaaaatcatgtcaaggtgcagctggaaattaaaaaactggtgcaggacttcaggtgctgtgtgttactatgttgggacacagtacataggttatgttttaaccaaaatgtaacccatcctgtgaagctgcaagatccttaatggcagacaaacctgtgatgcccaacattcccgacattgcatttttcatgtaggccacactactactccactgtgatagtgaatcagcgcaaacttgtgatgttatagggcaattgcactggtatctttactatttgatagcactcttctttcttaggtatttttggttcttttatagaaatttaaattattatttttcctcattcctttttaatgttcaatattaaggaaattctgggaatgtatgttggccccttatggt

SEQ ID NO: 1297 - DNA, 652 bp, Glycine max
attgtgattttcactggtttgtgagagtgcaaaagaattgttcagttgaatgtgcaaaattgcttggatcagttgaaatgcacctatgaatttgtatttttcttttttatgacaaagggcatgtagaatatgattatattttgtttgaatagtgtgggggagcattactgtttttttttttttggaaaaaaaaatctgatgtggtagtggtgtctgattcacatgtggaaaattcttatggattgggaaagaatattgattgtttccttttctcacagtgctggtggtgaaagcagtggattccttgcattcagagttcagggctgtggataatttggttgtgtgcaataccaaccgtgtccttaaagctttccagaatgctcgagttggatcccatgtaagcattccccttgatttatataacctttatgcaaatgtacatttaatatgatgctcaatgctcaagggttcaaggctaataaacttgttaactgttttgattgtaattggtagagatgtcctttaagccattgggctgatcttgatgcctttatgtattttgacatttttaccaaaaacataactaatataggaacccaaaaacttaggattcgattagggagaacctaaggctgcccattaaaacttgagc

SEQ ID NO: 1298 - DNA, 703 bp, Glycine max
atagaaagagacagtcagttagtgatgactatataaaggtttttgttaagtaatttgcatgtgcattttttgagttgttggagtgagaatgagagtgagagagaggcatacctcccacaaatccaaattgataattggctgcatgagaaaaaaataattagcttcatatccaatattaactcaaaaatattttatggaggaaaatagaaatattaataacttactatgtcatcccacacaattgggcaaatggcatttgaagttttgactatctccagtcgtttctcttctctcttcactaaacaaccaacgaattttagcatcaatcaccaacattattattattaaagaaaaatatcaaacaagaaggttacattaaaaataatatatcggcatagttctactatacccaagaaatacaacgcaattgttctggaactaaaccaaccagaaatgagaaaagactagttactacatcaactcatagaataataaaatattctcaattagaatctaataatcactccagataaaacataacagaggctcttatttttaaattttacattaaatttatgcatgtatataataagagaaatccaaagattttatggcatattaagaggataatacggaatttgaacatttgtttaaaaatattgggacaccgcagatgggaatcaattaggaggaacttacaaac

SEQ ID NO: 1299 - DNA, 648 bp, Glycine max
aaaaacgattcttgtccataacagactttattatgtaagcttccattccgtactcttcacaaagcttaactaactccaaggcatcaccagctgctttatacccaaattggtagttctcacctaccagaaagttccagaatccagtacagacttctatttcagcttatgtgtgagtaaatattggtaacataatatatcatgttgatgttgctattcaggaaaaataacaaaatacgagtaaattatgttaatattaaagggggtggtataccttgatggtaaattgtggagctacttatttacctgtggattgagatgccgcacacttgaaaactcaacctgaaactcttctgggaccatgttacaacaataagaaacccaagaagaaagaactcgcttttggtcacatttagcaactataggaggcctgtttgggaaacatttaacaaaatatacgttactttaccaatggagataacaattatgatgctctgataccccaacaattcagaacctaaacatgagttaggagtttatttatttactaaaattatgtcaagaactattttaacaaccataacatagccaaataatgtatctttcacgtatataataaccccaaagaactccaaaacaaagaccaaactt

SEQ ID NO: 1300 - DNA, 684 bp, Glycine max
agaatggaactctcaacctttttctcctttttattttctgtccttttattgtcaaagtcaatcatataactcataatttatgaagcacggacattccaatcctttgtcgtgttcaatgtccgatatcaacatgacactcatactatattgtgttcatgtcatgtccggtgtcaatatttcatagctcataatacgtaaaaaatgaaaaagaagaaaaaggaagaatgaagagtaccttttcgcgatcgacgggttccaagcaagagcgagagggaggatggcctctcggaggccgaggcaacactcttccaggttgtcattttcctcgttcagtcatctcttttccttcaagcaaagcttaataatgaatcaacttgagagacacagggcagccacatagagaattcttatgcctaactttcccctcttttgggcttgggcctaacacttatttccattgtataattggagagaatttgaataatgtaatttgatatttattttgtttttttcttctaaattgtaattttggtcttcttcaattcttaatatgtaattttaattttttgatttaatagaatccacaatttttgtctaattctcaattttgcatacccttaatttgtaccaatctctatctcaattagttaaacagtgtgcatgaaatattgtaaactttttata

SEQ ID NO: 1301 - DNA, 778 bp, Glycine max
aaagcacaaacttttttattgccgggacacaatctatatctgatttgctatcacctattgcaatgagtccattgacttgtgagtagaatactgtcttcgctagatgcttaatagaccatttgacaattctcaatgctgacgatataattaattaactattgtttcagcatggtttttatccagcaatgctgcctttgaatgcaaaggttttagcattatatgtgcattcatatgcatggtgagctctctaaatcctgtcatccttctctcttgtattgtacacactttctctccactaactttgaaatcttgcaattttttcagataatttctctttgttttgcttgcattctaaagccagatacagatactagtttgggtaatgacatagaaggcagccctgaaaccccgcttctgagtgataactgattgtatcaattggtcacatgcttggccaataggcagccttgcctcaataatttctgctccaaatatccatcattttttctgtatagaattggctatgggagaatatgagcaaaagtatagggaaagggtgggagaaagagagagatggcgtcatcagctatattgaacactgaaacaagtcaaattaatcattgaacactttctatgctttgcaataaaatagtaaacaacggaatgggtttgtgagaattgaaggcaatacatttacattatttacgggtaacattttttatgtgatgaaaaaacaattccggaatattttgggctttttcatttataataatatgct

SEQ ID NO: 1302 - DNA, 672 bp, Glycine max
agtatgtggaggaaaactcttgatatgcgagaccaagcaatttgtgtggataacatctacatacaaaatttataatatgtaaccagtgcaagctcagccaaatttatttcaaaggaatacataagcaaaatcacataaggcgttgttgttgttgttgttacataagcaaaatcacatacgcaagcaacccagtcgagttgtttgagatccatccccctcttccaaaacagactggcattggcagcattttgggggccaatcatactccccatctataacccattccgaataagtccggacctgtgaaaatgacaaaacagacaaagcttaaccctggaaactctacggctccatacatcaatatttggacaaattacaaatccgcatgatccccaataaaactcaagctaaaactagaatctgaagtatcggaccaagaaacaatgacaaaaagtaatatattaaacgaaaaacaaaaatcaacaatactgaaagaggaaatgaaggaaaggtcgagagaacaaacgaggcaaggttagcataaattgaaaatgaataataataataataataataatagtaataataataataataataaagatacgaattgaagaaaaacaaattaccacgcacatttggtgctccgggaagcagatacattccccacaa

SEQ ID NO: 1303 - DNA, 628 bp, Glycine max
atggaagaaggaccaaacaagttttccccgttgcatgcatgacggccgacaagcgctgaacaactcgtatcttccatttcacgcgatcatacacctttttcttcaaacactttgacttcactcctacaaacaaaaccgttttcaacaacattgttctcgctactatcgctaattacttttcccaagcaaagactgtgaaaccctcaatattaaatattgacaataaaaatattcattctttaattaatttgttcataaagcgccaagagctagaagctggcaagttttgacatgggttcaaatttggaccctataaagaaagacccacttctctttctcacgattcctctcctctttttgttcaacgacatacccttaattacttgttattcccttcgcaataatggtgtcggcaaggtccactacctttctcctagttttcattttgcttcctctaagattctccagcgcacacacccaacaccaaggttcactaatcaactttttcactttccccatctcttttgttcctaatgttgtacgtgttgggttcaatcatgcaatttcccttacctttgtctttgtggcaaaaaaaatgccttaaccttttggcaaacattaatggtca

SEQ ID NO: 1304 - DNA, 906 bp, Glycine max
agtgagacccacagcagaagcccctttgccagtagtgtatacagctctctatccatttttttcaacgtaccttgtagtagattttgaaatatttattaatttaatgattcctattgtaattaaaacgtggaaagatatttacataataaaatggatgaagttatacttgagaaactgagactttgctgttcccggatcactgaggagaagaatatttatgtctcctcgcaatctatgctttccttccccatctttttcttggcctccaaacatagctaaagctattgcagtttttatgtccttctgaccatagattgatggagcaaaatagacttgataatctgaaattcaatcagcatcacattagaaagcaataataatcaaattgaaagaaaaacaccaataaaaatcctaggaaacaaaccctttctcgaattcgagggtctttagccaaattttcaatctcttcaatgtcttcctgtgtaagttagtaagaagacaagctatcttgcttttttcgtaacataatttgcctcaagaacggttgcaagcactgggaaaccattttttgtgcttagggataagtcgaagttattagtataaatacctgtgacttcctgaaacaacaaattataagcataagaaagaaatcaatgcataacaccaagaagaaagaaatcaatagtatcacttgcttgtatattggaagtcgaccagcaggtactgtttcaggactctcttgggagaatgagcctcttgaaaattcctataaattgtctaccaaaagaaaaaagtgaggtttatttaaatttttcattctcatgtattccagaataactgttaagtcagagctttaaatttggcttatattcttgctgggtgggaattgggggaatatggccgacc

SEQ ID NO: 1305 - DNA, 809 bp, Glycine max
acttccaagatacaaggaagtgatactattaaatgatctgattgattgtgcacgccctggagaagaaattgtatcatcttttactttgactcatcaattttttggccggcccttagttgttatataatgaccttcttaatcatttccttatttcaggaggtcacaggtgtttataccaataattttgacttatccttaaacacaaaaaatgggtttccagtgtttgccactgttgttgaggcaaattatgttacgaaaaagcaagaccttttttctgcctacaaacttacacaggaagacatagaagagattgaaaatttggctaaagaccctcgaattggagaaagggtgtgttccttggaatttttattggtatttctttcaatttgattattgttctgtaatgtaatgtgctatggattaaatttcagattgttaagtctattgctccatcaatctatggtcatgatgacataaaaactgcaatagctttagctatgtttggaggtcaagaaaaaaacgtggaaggaaagcaccgcctgcggggagacataaatgttcttcttctgggtgatccagggacagcgaagtctcagtttctcaagtataattttctagattttattttgtagatatctttttactagtgatcaataaattaacaaatctataaattaaccaatatttcaaaatctacttgcaggtatgttgagaaaactggacagagagctgtatacctacttggtaaggggcttctgccctgggtcttacagctgcccttcattaaggatccagtcccaagggaatgg

SEQ ID NO: 1306 - DNA, 671 bp, Glycine max
accatataatgaagatttttccctagcagatgtttttggacttcttgaacgaaacaggtaaatacaagggccctgtttgtttatttccatgctcttgttaaacagagtgactaaattctacctaaatatcttttacagaaatagattagggattgcagagtacagcatcagccaatcaactctcgagacaatatctaatcattttgcagctaatccatgaagtgtatcaaaatgatgacattctttcacttccccggctagaattaaagacgaccttcggcgagattctaaggccatgtatattgtacaatcgataattataatgccattaattgtaaatagatttacccttaatcaatctaactgctctagaaacttcagctttgttgaggataatccatattaggattatcttcaatttattttgtttttttccaacacccaatggttgaaaatagggagagttcggcagagtcattttcatcttcccttgctgagatagttctccttgcttgttgcgaagcacaatgcagccatctactgttcctgccagagtactgaaaaaatgtgctccaatcatagatgcacttcttaattcttaggcagattattattaaaaacatcaactctacattgctattgctattgcacaccaagaaaacattaacaac

SEQ ID NO: 1307 - DNA, 634 bp, Glycine max
ttaattctcttgctccatatcaaacattttctgaatgaattgaacagtttagcaaccaaaaaaatatttcatacaagatcagaattttaattgcggtctcaatggtgtgcaacattttagttttactaattgcacgatctcaacttcagttgtgatattatttgagaatgtagtcgtcctaattcttttgtttttccaatagaaaggcatttgatgtgagcgatgaaggaccaatactcaacagattgtggctcacatttctgacacaattcatacaaccatctatgctcaaatcttcaagggtactgaggcgatgcttgtcacttaagagattcaacagttgaggacagtttacaatatgaagcatcttaagatgagtcattgttgtcagccactctggaagcatcttaagactatcacaatttaaaattaataatgtctgcatagtgtcagcggcttccttgaatccattgaggcaatgtcttttgccctgcacaatgctcaatatgcagaaatttcatcctcaatcgttggattgtgcttgcccagtacaatgacagaattagcatttggcaacgtatcacatacaaaacctccagcttagggagaatttaagaggtttgggctccagcct

SEQ ID NO: 1308 - DNA, 679 bp, Glycine max
aataggagactatgttcacatataaataacccatcttatgcttagctgaagttttttctaatttttttccgttaaaattaaccattcctaatttaactacaatcaattataattatatttaattttgtctgtttaatttttttccactaaaatcaatcatgcctaatttttttctgtcaaaaacgatcatttctaatttaactacaataaattacaatcagttttaattttttccatctattttttttcattaaaatcaatcatttttaatttaactacataaattatactcgtatttaattttttttagttaaaactaatcatccttaatttaactataatcaattacgaatgtccaaacccctatttcacatgttttttcactgtcaatgacaaaacatgttccacgtcacctgtgttgccaacatacatggcgaaacatgtttaaaaagagatcttatccgataattatttcaaaacaaatccattttaagaaattatttataaaaaaaaccacattaggtcaattagccctccacttaatgacttaatgcagtacacgacatgatacattagaagtgaaaaagcatcccgtacctcgcattaaaaacatgggtgatgtaataacaaccttgtctaacaaaactgacgaaaaaagacaaccatgaaattaccaatt

SEQ ID NO: 1309 - DNA, 809 bp, Glycine max
agaaagcaagtacaataatacatgaaggaaaagtccatatgtaaaatacttacagtctcctcatattctcttccacaggccttacactagaaaactgttggccccttgatccttggtaaacaaactctccagtggttggtatgactgcctggtcacatatataatagcatattgatacaaaacttctttgaaaggggagttagggagcatagaaatagccaaaaagctttcaaccaaaagtacatatacaattataaggaatgattattattgatgagctacaaccttcaatgcaaattctcaggcaatttttaccttttttttattataactagtcaaagtttgcttttttgctggagaaaaatccataaaattatttgaatgacatttctcccacccattgggttgatatgctcgcctgctgttaaactcattgatcttctgttgcactttcggtttcaatttctctagctcattcatagaatgtaacaatttctgtagcaagaaccttaaaatcagtttacatttaagaatgtgcaacaagttatcatccaaagaagagatgaaaactaacctttctcaaagcttctttcttgccttgaggagatgatctataatctcggtgacgaggtattgtctcagagaccaaactaacatcaacgaaggggaaagaccctcaattcagtttgatggcaaaaataagaaatagatataatattgaccacgtattttaaacccttcagcttgagacagtccacaccatttatgaggaaaaaatccaaggacccttctatattacctggaaaatc

SEQ ID NO: 1310 - DNA, 681 bp, Glycine max
agaaaacttctctccgttcatcttctttctactcaatggcatcctcttatcaacaaagcccttccatgaagcaacaagatgcttccaccaacactgataggagcacccaaatcccagcatctacagtgacgactgttacgaacagaggacaaagctagctatgctaaactacactaatggttaccttcgtaattcttccttccttcttatttcattactgccatatttataatgatttcaacaaaagataatatatggcattccaaatggccataacagaaaggaaaatatcctaataacagagtgagatgaagtttgttataacagaaaggtattttggggcaataacagaattagtggagtgagtggtggaatatcctgaagttggtgcccatgctgtttatcctacacttgagtcatagcagcgttgctatcaacgacgcagagagaaaggggctttgaattaatacttattcctggtcatgaagaggaacgcaaaaagtatgcgaaacacaggtactaattccagcttctcttaacaataaaaacatatgttttgaatgtccttattgtccacaggtggatttagagtccattaaaagttggttcccaacacatgatgggagaacaccctataattcataaagatactaccattagggagtgatttttgaaagaaaa

SEQ ID NO: 1311 - DNA, 817 bp, Glycine max
agaaagaaacacaccattaataattccataaaaaaaattatatcgtttgagcgatcctgaccgtccatagactcacaatttgagcgatcctgaccgagcttacccgagtttacaaaaaacgattctgcaacagagttgttgcaattgatggcaccaaactcgtaaacacatacattatcacaagtgaacaagcgagtttgataacagttctttcaactctagttaaaatacaggcatatacaaaaaagaaacataatagtatctggctttgtgatgggaaagaactacatgaaccaaagataaactgttacttggaatagtaccatgcttagtgtcattcatcaggtaagcatgacccaacacaaaactcagactaatacctttgttaaggacttaaagctaatctaggcttatcaggtacactatcccttattggcaacaaacaataaaggagaaaatttgatttttggtttaaatatatctctggtacctatttctaacactcaatttcaaatttcaatttatgtctttacaacaccgtgagattggtatgaagttacagcaaaagatatagaccaaattgtaaataactgtcatgaatagggacggaagacataatattggtggtccatatttgtactaactccaacagaccgcatataactgtcacaaataaggattaaattgaaaatagctgtcatgtcaatgggaccaaatatttttaatcttcattttttaaagggttcagtataaaaaattgcccctcatcccttacctgtcctcatatcccagaaaggaaactgcacaacataatctc

SEQ ID NO: 1312 - DNA, 687 bp, Glycine max
ctcgcatgcctgcagctgtatgactataatatttatacattatccccacacgatggtgggaaaagccatgtatttaagaagtaagttgaattttatccattccttgtttatatttattaatcaatattagtccctgagaggactaaaaataggcaacaaaatgacaaattcaatttttggataattgaacttctattttactttaatagatattttgaagagtacaaaagtcaaaaagtttaaaccttagggtttttaaagttaaacaggttcaaaaaacaatactaccagatttgataaatagttattccattttcttgtttatgatggactcgtacgtctcacaattttttatgatgggagggataagactttgttgatttgtgccttctggtccgcagtgggatgaattggaaatatgatgttaaactttatcctcaacattccattctttgttggatcctcccagaaaggcattccaagtgttggaaagacctgctcgtaatcaggacgaataacttcgttgatatacaaatgcaatgatccacgatccagtgccgtgagatacaataacataacggccatcaagagaaatttcttggacgacaattagatcatttccatcacgaatgaagacactgtgcggttcttcacaatgatgagaacaagtggctgtttgtaattgtt

SEQ ID NO: 1313 - DNA, 661 bp, Glycine max
agcaattgtagtagcagttttgtctcgattggaaaattgcagacaaatacgactaatgcaactacaattgaagttgtgaactgttgtttaaaacttgaagtagattgtctcccatagtaagaaaaaagggctaccaagcaattattttacaagctccttaggtatgagatatcgaaaagtaaagttgtgtggaatccattctatgctcttcttggattttgcgaggtcacacttctttacactctttcttagagattcaggtagagacttttggatcatctccatggtaccagcagggcacaaacccgagtccttgacgaaagactctacaagcttgggaaaaagtattttctggtccttgcgtaccccaaaggtagctcgaatgtactcttcctttgcaacttctagttcttgaagcactctcttgggtgtatatatgcgtacctgtcatagtttataaaaaagataagcaactcactaaagttaagcatgtaaaaaatggttatgtaatgtttgtctgtttgtccatataaattcacattaactaagtaatttaattcttctagatttgatagtagtatagagtcaaatgcaggcatgagaaccaccattataagggatttaattccttgaagtccaaacaatgtagtgtacataacta

SEQ ID NO: 1314 - DNA, 792 bp, Glycine max
ttgtaatgtcaatccttgcagatcttccccattcatctgcctgtgtacgttatagatgtctcggtgatataattttatacactatatgcaacatatatatgaaagtgatagttatgcggagtgcatgtgtatatacctcagttcacgagtcttatcttctactttcttgcgcagaatgttgttggagtcactctcaatctgagcataaatttaaaaacaatcgttaaaatttgtgattattatgcaattaatgtcgaagacatgcagttaacatataatatattttttgtacttttccattttcttattgcagtcacgagataattagatcaatttgcacatatgcaccacaaccaattaatatacttcccaagtctgaaaagaaacacaatttatgccacgacgactagaaaattcacaagtatatttctcccccacgtaaattagtatgtcataagacataaacagttaatgcttacaaaaaaaaagacaaattttgttaatatatgtatactgaatatgaaaacttttattagcagtttcaactagaactgctaacaaaggattgattgtgttttaaaaaagtccctcccccaaagtctccattttcttgatgctctccatttccaatcatctatccctctcttctctctccaccctcattctcattctcaagcaaattgtcaacactgtcaagctaccccaatctcatgctccaccttaaaataagattgtgagtgcctcttgtactcacagccaaataactgaaacttttgtgctggtcaaaaaaca

SEQ ID NO: 1315 - DNA, 689 bp, Glycine max
tgttgcctgcgcagaggctcatttcaagtgaaggggaactcaaaacacagcttgagaattttcgtcgtgaccctgacatatcaagtgagacactcgtttagttagaattataatttaatatgtatggacgactgttagcttcagtgatttgtctttgaaatgataatttgtttatacaattgctttatattatttacgtgtaagtgtgcaggaggcttgtgtgcattttttcttcccacggctttgggggatttgatcctcctgttttgtgctatttccactcttaatacacttttcttttattaaaaagatattcaactgggaaaataaataaaatctagaagcttgttgtgctcggaaattgcaacacaaaattcctgttccatgattgtgccaagataatcaattcaagctagaaacaagtaaatatatgaatacttatgtatgtttcttattgatgcttgcagtggagacagcttagggattttaggattacgtgttatagaagttggaaggaaagaaatactagcatatgtggaagtaataagtaaaatactgaggggacagaggacttggacattgagaactttcttatgtgtttcttggctcaaaagggtatacgtgaggatacatgcatctgtctgaacattacctacattattggttctaaactttcctaccaaattggc

SEQ ID NO: 1316 - DNA, 675 bp, Glycine max
tcaggtataaatccacgtcagatgcatgctagatacttgtattccttttaatgcctttattcagttctacaaggcaaagtctagatgtaacttatattacgatatttatgctgataaaaaaaaatattacgatatttatgaatagcttctatttttgcctgacccatgcccaataatggctaacagatacatacagtatgttgttgagatgttgatatctcataattcataaatttgggcatactatgttgacacccaggggctgcaatgtggtgtcaccacccgtcctgcctttttgcagccaagggacgtggtggaaagctttgataccaattgataagaaccttgggaggacgaaaccacaaaagttgtcattgtacttagttagagagcccaaggccttttaaacctcgctagaattgcatacttctaatgtgcgattcgattcccatagtctgcaattggaccctaccattaacatatatctcccctgatttattaattgaaggaggtccgtgtggggtaaaaaaaaaagcagtattggacttaagtttaaggggtgtcaatgtaatttgcctgacaaaatagtatgatacacatgatgaagttaaatttccatcaatcagaaattgtgattttaaggtgagggacatatcttaggatgatattgaagca

SEQ ID NO: 1317 - DNA, 867 bp, Glycine max
aaggtcaaagtaagtcatcatgaaataaaaggaagttccacagtaagagcattgtttcccaaattcacatttgtttaaatatgaatactcttccaaattttccagtgataaaaatgcatgcaccaaaataaatataaagccttcagattgattcttgaggaaatcaataatgatgaactccagaaagtagggaaacccaagcaagaattcacacaacgaacccacatcacttaaactagcttttaattgctgaacatgaaagcatattcgatcaatttgataacaaaaacgcaattaaatttccaccagagatcctgaaaccacttgctcttgcaccctcacacattaacggacctgattaacaaataactagagcttgaacccaaagcactggcggatgaatacccacctccacaacaggccttgccacaacttcataaacgcgtttttgtgatgaaaattcagtgagcacctcatcaaattcataagtatccgcatcccaattgtttttccgaagtttcaacctcttgagctgcaatagagccagataaacaagttcgattaacaatccaacaaccgcataaagatacgaacagcagccagaagagagttctgaaacaagcaacaagatgttaagaaagttacgggatatatttactatacctctggctgcaattcaacacagtcagcaaagtcagcatccgccaccgattcctctgcattccgtggccgcaatctaacagccactctaactcttccgggaactcaccccaacataataagcacgtgaatgttaggaccaaacaaagtgaggacactaacattacttttaattaagcttcaataacactcgcgcgtctgttcatg

SEQ ID NO: 1318 - DNA, 821 bp, Glycine max
atctttacaagttacttgatagaactttccaaggtgttgaggtttctcactttgtatagtcacagttgtgacttgtgcagagaagaggctgaagaacaggacagaacaggcaggtcaggggcgatgccggagagggtgtctattcattcaaaacccatttacaatgccctagagatgtttcaactttggaattgattcaactccttgcatactcaggaatgaggcgttggcgcaactcttcaggtgcattcgccagttctgcattgttttcttgcatgagtaacatgcccgatggcgagaaaatgtatcatttttaaccaaaatgcaacctcaaatcatctttaccttgagatgtgaagttgaacaaaggaggtagtggtcgcccattaggcaagcatgcatttgggtcccgcagatcgtcaaagaagggatgagcacatgcagccaactgtaaaaaagaaacaattaggacaacaggacattagattaatgatggtgttgaaaattctcccaactacgtactttcggtaggtaatggataattttaaaacataaataactatcacatttaagaatggttcatctttcttctttggtgagtatgtgtatacaaaaactgtagtttgattgaatatgtattatttaatctagatataataggtaacattttcaagagcaaatcaacttacagcggtgcaacgtagatttggtgaatattgcagcagccttgacacaagatccacggggttcaggcggcattctcttgtgaaaaacctggaagccagttttcaagtcagtctgaatggaagtatttatcatta

SEQ ID NO: 1319 - DNA, 660 bp, Glycine max
ctgctttccaaaggctctctaaaagggcagttaatatgcactggaccacatggtgaagaagttgcccaatgtacagcagaatcaagagtggtaagtaccatttttgcaggaatttgatctgtgggtgcagggagattaaagaaaaatctcacaaaagaaccaaaatggttcacctgatacagaaatttaatgtgttgcttgagtaccaaggataacatgaacataaatattccttcatttagaataactaattattagccactgcaactaactacattcgaattaaaaatcattttagactttccaaattactgcacttgatgtagtagtgaattatattaatctaaaatatatggaaatagtgtccagtttagctaaatggtaagaatgttgcattgtgactgttgaaagaatatatccgaatgttgggttgtatggtcacacataaatcttattaataatcacatattggggtacaacagaatctcttatggaagcattgcaaagattgggtgtttagacagtttagaagcaaactgcaacccatttccctatgagagatgagcagagggcttggtagcaaccaccatcagtgacaaccaccatgatagtgatcacaagcaaccaccagtggaattcagaggtggtgacgactcaccc

SEQ ID NO: 1320 - DNA, 683 bp, Glycine max
tgcctgcactggcaagaaaccttcagaacacaagaaagagttccaaggtggcagatgagagcatgtttgaagcaggaaacggtgtagagctatatggacatgagaggggcagaagacaacatggttgggggcttgtgtgtagcattcttcaagcccccatatcaatactctcatgtgtttctcagcctcaggttaataatggctctgatggggtttgggtaactggggaattctcacaagtgtctgaaatgaaccatctcatggtaagtgatagcatgagatatgcaattttgatgtaggaaatattgtgaatatcaattgttgctcttggtttctaacttctaaagacaacaacatcacataactctctctctctctcttgtcctcatttttcttttctcttgtctgtttacagtttggatcatatatatgtaatacactaggtgattgaatggatcagccaaagttatgacctactttttggtgtgtatttattttcatcccatttttccattgttaataaacaaagaggtgtatatatgtatggaattgagatatagagtgtgtttgatttgtagttggcaagcctcaaacgtccattcagcaattgtcacttcttatttattggaaagtgagaatttctgtttacaaggatgcgaacgggttcataatcatataaaaaa

SEQ ID NO: 1321 - DNA, 655 bp, Glycine max
aattgtcaaccttgtaccagaaaagcagcctcatcaattatcagatgcttcttctggcactgacttggaacttaaaaacaaaccatcaccagcatgcctacatgaagagaaactatttcctttatcatatttctcaggtccaatgcaaactaaacaatcagaaatagttgaagaaggagaaccacctgactcaaaattaaaagctcctcaatgttctgaaattgaggaggtacaacaagaggcagttcagaaccttaagaaaagtagtaaagtcgaagaaactgacattcaatgtaggtgcttagaccaagtggattctttaggattgattctcatcactaaccggtcaaggtaccttataaactggcttgtaaactcaatgcggaagcttaagcatcccaacacacaaggggttcatttggtcaagatttatggtccaaaagtgaaatttgatagagggcctgctttggcattcaatatatatgattggaaaggtgaaagggtcgagcctgctcttgttcagaaacttgctgatagaagcaacatatctatcagctatgcattcctgcatcatatttggtttgctgataagtatgcagaaaaaaaaggaaaagtcctacaaaccaaagtggttggagggcaagaaggagtgatg

SEQ ID NO: 1322 - DNA, 669 bp, Glycine max
attgttatatcagaatacaatgcttagaaaaaaatttcttccaaagagtaaatagtaaatataacttgcaataatttttggaaacaatgtcaagaaaattcttgcactacatcccacatagcataaagattctcacagaaattaaccaaactttcaccacaagagttttcaaattcaagaacacaacatatggatgtatctagttctgcctaggactagagagagagagagagagagcaaaaccaataaaattggatcattcattatcatccagtggcaacaaacattatcaagacaaagaaacaaattttaacataacaagggcaacaagagaagttgggttttagggtgtgcctactcctcttcaccaactcatccagaccccttaaataaagtcatgcatattattgataccgggaacgataagtaaattagagtttacaaaataacatgttatagtctaatttggatatctatttttgctaagccaataactaggtaatgtgaaagttagtttaaatcagagggatagatgagtaaaaatatcacaagttcacaacagtcatccatcagataagaaagtcaccactatacacatggcaataattaaaaaaaatagtttatactgtacaaactgaatttgtatatcaattgatagtattaaacctg

SEQ ID NO: 1323 - DNA, 647 bp, Glycine max
attttcatggtttaagtaacctagaacatttgatattggacaacaattattacctgcaaaatgagtttttaaaaaatatcggggaattgacatctttaaaagttttgtctcttcaacaatgttatataaatggcacccttcctcctacaggtaattgcatgtatatttgatttttactcttttgttattcatcacatttattgtatacaagtttttcttagtttggtcaattattatcgccctttttcattatttcacaaataagatggatttatttatttatttgtcaaaatttcatttttcagattggtttaagctaaagaagttggaggagttagatctatccttaaacgaatttgagggaccacttccctcatcttttgttaacatgacatctcttcggaagttggaaatttcttataatcactttataggaaattttgattctaaccttgcaagccttacatcacttgaatattttggtttcataggaaaccaatttgaaattcctgtgtctttcactccatttgccaatctttcaaagatcaagttcatctatggccatggaaacaaattcttattggactcgcatcatagtttgcaaacatggattccaaaatttcaattacaagagctttttgtgtctt

SEQ ID NO: 1324 - DNA, 673 bp, Glycine max
cactgaggaccctcttaagattttatcaagttggattggtcccaatgtgtgtgcttacaaaggagtcttctgtgctgcaaaccctcaagatgaaacggttggtgcatcagcagcattcccagttgtagtagcaggcatagatctcaaccatgcaaatctgaaaggaactcttgtgaaggagctctctctactcagtgatttgtcccttctccacctcaacagtaacagattcactggcactgttcctgaaacattcagagaccttgtgtttctggaagagttagacctcagcaacaaccaactctcaggtcctttcccttctgctactttgtacatgccaggcctcatctacttggacctcagattcaactacttctccgggtccctccctcaggaacttttcagcaagaaccttgatgcattgttcctcaataataaccaatttgaaggtgaaattcctcaaaacttgggcagttccccagcctcagtgataaacttagccaacaacaagttaagtggaagcatcccagcaagtttgggcttcatgggttctaaaataaaggagattctgttcctcaataaccagttaactggatgcattcctgacggagttggactattcacagagatgcaagttctggatgtgagcttcaactcactcatgggtcatttg

SEQ ID NO: 1325 - DNA, 830 bp, Glycine max
tgttgcctgcagcggcatattcaagtggcgttggtgttgcctttgataacaccacaaccactgctagagttgagtacagtggcaattacactccaccttcatctccttcattgcctaaccttcccaacttcaacgacacgcgtgcggcgttgaacttcattacaaacttgagaggcttacctgagagagcccccagccatgtcccaacaaacatcacaactcaaatagtaaccactatttcagttaacactttgccatgccctaatggcagaaacgactgccaggggctaaatggaaccattttctctgctagcatgaacaacataagctttcgaatccccaccattgacatactaaaagcctattactaccatatcaacggggtatacgaacctggatttccaacatttccaccgtttatatttaacttcactggggattttttgcctataacactgaatacaccaaagcaagggactagggttaatgtgctgaactatggtgcaacagttgaaattgttttccaagggacaaaccttgttggcgggatagaccatcccatccatctccatggctacagtttccatgttgttggatatgggctaggcaattttaaccaaagcgtggatcccatgaatttcaatctcgttgatcctccttatttgaatacagtgatagtgcctataaatggctgggctgccattaggttcgaggctgtaaaccctggtatgtggcatgggataccagcttatattaatttaacttcttttgttcattttccatttttttgttttctaagtttaaagatcatttttgttacatgaattcca

SEQ ID NO: 1326 - DNA, 672 bp, Glycine max
aaggcttaagacattgatttctgcaatcttccttgccatataaatactgtataaaatgtacaaattctgaataaatgaacccactctgttacatttctcagcttttatagtaaaagttgtgcactataaatggggcgaaactcaaattcaagttcctaatgctagcaacaacagccccaacagaggtgaagatgcttcacaaaattctttcagccaatactacgttaatcaaagtgaggaccctcttcggtcgtggttaacaattacaagataaaatatgaattacattgagtggatgaattgggtcaagtttggcaaaaacggaaatgataaactttctctctatatatttatttcagtttaactaataatttgtatatgctactgagcactgagattaataatacatagttattttagtttaactagtggtctctaatattattgagattgtctacaaatttctgacagttattcaattgtaagacgtcttttaccaagaaagaaaatttttacagtataagaactacagcaattatggacagtaaatttctatctagagactactaattaaactaaaataattatacaatagttaatctacaagcttaataatattttttatgggtttaaattaaaatcttttaaaacaagtgacaaaatctggtggac

SEQ ID NO: 1327 - DNA, 672 bp, Glycine max
actctcattcctgcatgattttgatctgaattccattatagaaacaaactattcaaatacaagagtgaagaactaagggtgtagttttaaggagagaaagaaaagaaagaagctaaaagagatggtaggttgttggactgttggttttgctttcttctagttgtattttattggtgttgtttattactacttcatataatcaaatctttgaataggagacagttgaaaatgataatatattaatgttactttgttttgtcgtcttcattaatggagtcagtggggcagagaaggattcattcaacatggcataactgtgtgaagtatttccgtttgaccaacttttacacgtggaagtgatcaaattggttatggcatggaagtagctggtagggaaggagtaatgttttttttttttgacaaaatacaaattaatgtgccaccctcttagctaaacttgtaaaattgcataaacacaggaacttcttgtaattcttggggttactaatgatttctacaaaattattaattccaaagttagatgaagaagccaactttactatttcaatagattaccggtgatcttaaatgaatatggatcttatttttttccaataattttagctaaattatcattcactgattgagaaacttgggaattgagatcaaatt

SEQ ID NO: 1328 - DNA, 694 bp, Glycine max
atgcctgcacaagatggccaaacataatgtcatagatttcctagcaatttcaatataaaggaattaaacagcggaaaaattatatttcctcgctcccattttttttataaaaaacaagttatactatatttttataaggaataaattataatataaaatacattataatttatttcttattaaaaagatcagaaatagtatcactcttttgaaatatacaattaaatagcagcttaaatagcaatttcaatatataggaaaaaacttgtaccattttttaggtgctgtttgtattattttttaattaaaattgaagttttacttagataatttatataatcctctaatgcaaacttttattataaagattaccaagataaaactgataggagtaaaacaacatctatagaactgtttctaacttttgtttatatatgttacccactcagtgatatagcaatttcagacatgtttatcctttaaataaatagaaattaaagaatactgtgttttccaattacatagttaaaatcaattcaacattatctgtctcatgatgcatgcttttacttttttctcttcttttttttttcttctattcacataattaagttttacatttagtatatttgaatggaggaaaaaaaaaaaaaattgaatccataaaaatgtgcccatttgtcttaacaaactt

SEQ ID NO: 1329 - DNA, 706 bp, Glycine max
acaaaatcaccattataaacatcgtattcagcattcaacacgacgaaacgaaaaaagtagaaaatgaaaacctcttcttctcttgaacttgacttgatatctcttgaagtaggcttttgatttctgagccttgacgtacaccttgaatatgaaccaaaaagcacgttaatacttatcatgtcatggaaaaatgcacaggtcataggaatagcaacaaagcatgcagagccttcatttaaaaccgttccattagaagctaccaaacacataaaaactaagaacacaaaaaaaaaaaaaacataacgggtaactgaaaggagcactcatggaagtaacaacaagaaacaaaatcccaccataactaagaacttttccttccactaaaactacccaaaatccataacgttcacactctatataaatgcaaaagattggaacatagcttaaattaagcatggataactaaatttcagattctgcaaaatagcgaagcatgctacagagaagatacaagagggatcgcaccattgctgaagctcgattacttctcccgatagtgacgagagacagcgcaatttagggttagccctttgcttaaatgatatgatgtttgtttgggtcgaatggatctagggttttaccggcccaaatagaatgcgggttttgggttatgttgggcatattagcctggttttaccggtaaaac

SEQ ID NO: 1330 - DNA, 915 bp, Glycine max
  misc_feature (666)..(666): n is a, c, g, or t
  misc_feature (739)..(739): n is a, c, g, or t
agggaaaaaccgatttccgtgccaggattcggttgattaatcaggacaagaacaaatataacactccaaaataccgatttgtggttcgatttgtatccttttcttatcgatatcttaattaggttaatccaggcataaagaaatgatttaggagtgagaataatgagaattgatttgactgtagttaaacttgatttaataaaaatataaattgactattggtaggtaaaaatgattttgcctcaacctagatttgactagaaggagtgtatcggactaacattttaaaagtttttttataaatttttttagtatttaattaaattttttaaatgatataaataattcttatgatatttaattatgaattttataattttttaaagaaatacaacaaaatttgatggtatttaattataattttttataatttaaaaagtcttttgatatttaaaaatatataaatttcaattgatgattttttaagatgaatttcatgtaactttttaatataaaatatttaataaacaatctcacaatcactttaaaattctgttagacacttttattattttttatattgggtatcaaactctttttttctcatcacattaaaatgtaattcttcttttttgatacctacccaaaaaaatgagatttactcanatgaaagagtagtgctgaaacaaaaaaaaatatttttaaatctatggggctatggtttcctatctttggaaanacaaggcaaatactctcattttggccttctattgttttaataaataagtggctgggcaggcaactgattcttccactactactttcaggaggtggcatactacttttctatagacccaattttcttctttttccgcttgtgccctttactttgtttttagtaaaatttttcccaca

SEQ ID NO: 1331 - DNA, 835 bp, Glycine max
accgtgccagttgatttctgctgattatgttcctcaagaagggttgaggctactgcaactatatccctgagcttagaagcagttttgtgcgtgatgttaagatcagccagcagttcatagaggtaaggcccaggtttggtgtaccccaactccttagattcaataggcacctcagcaatacgcttttcaagttttagaagaagtgctgcaataaagaaaatatcaatctgtacctgagatgcaagaaaatatatggcagaccagaatctagaaaaaaagagactgcatgtgtacacaattggctgcctattcagaaaatccagtaaacacaaatgatttttattagataacatttccttaataatgttgtcaaaatgagtgaaaacatgcatcatgagattgtcacagagaaattggaatttggacaggcattctgtaagattaaataagttcacctctaaggatagcaaaatcatctggattttgtgacttatcatttgatttatctcttctttctattgaaaggtcaatacaactttctgcctcagaaatgcaagcagttagaagccaagaaggcaagtcaaaggaggctgcatcagcacatatgctttcctgcaagtaataaaaagcaaattgaatcgcttgaataaatttcaataacacatatagcagactgaaagtagtcacaaataaacttaaattaacatgaataaaatttcaataatttagcatagtgaaaagggaaacattaaatatagcatggacaggttgacacttaatagaactattcgttatgcagcaaaatcttattttccaatcacaaatttgaaatgtt

SEQ ID NO: 1332 - DNA, 693 bp, Glycine max
agcttgcatgcctgcagaacaaagagaaggaattgattaaacaacatttacaagtagaaattaagagaataaaaatttggcacacgcattattcaactctataaaaaaaaaagatgaaatttaagctatatttcccttcccctgtaaggcttctcatgagacttgacgaattccatagaaaataagcatattaaacacctaaattaaactaatagcaatttgggtctccaaaatcctagtcacgctgaatcaatgtggtttcgaagttaggtgtaaatttccacataaacagtttagcactgaaggtatctaatactaatggcattgttgctttcgcattattcataactccaccatttaaatttagcgcaattttatacttgtagatccaattttatacccagttcacaaattagtcatgattcctgaatttaacagacagaagcacacagtatagggccttgattatcttctttcaacctcaataatattattcaaaggttaatggttcaatatgcaagccaaagtgcaatcttgctatctacttttctaagttgaaagagtcaaaattacaaactattaagccactttgaaatgataggaggatcaacatgtgtttacctggtaatcataagtctatttggaggttttaatccaaaaagagaaaaatctagtgacattggagctggctca

SEQ ID NO: 1333 - DNA, 659 bp, Glycine max
agtggcagagataaagtttggcactctcaatggtggaaggaccttagaaggctttatcatcagcctgatttcaacattatacagcagaatatgatatggaaggttggttgtggggatcaaatcaagttttggcaagattcttggctgagtgagggctgtaatcttcagcagaagtataatcaactcttcatgattagtagacagcagaatcttcccatttctaatttgggaaagttctctcacaatttatggagttgggatttaaagtggagaaggagactattttttttttttggaaggcaaaaatatagtattattaataagttaagacagtaccaggggtactgtaagataaatacaaggcaccaagcgtgccaccttccaaaacagacaaccaacaatccctaagcccaacagcacccatggaaggagactatttgatcatgagtatgagatggcagttgctttcatggaaaaaatttctgatatccctatccagcaacaggttcaggaccagatgctttggaaagctggctctagtggtgtctattccactaaatcagcttataggctgttgatgccctccaacagccctttttctagcaggaggaacttccaaatcctttggcaattgaaaatccccccaagagctgcggttt

SEQ ID NO: 1334 - DNA, 822 bp, Glycine max
ggagggaatcagagtacaactgaccacaatttaaatgtttgatgatcttttcccatcctagggcgagacaaaagaaaagttatgattctttctttttaattttttctttcatcttgaatggatccagcaggcctgtcacaatgtttttttaagtcctatacaacaaagtaaaagaagttatcaggatgtgcataaagaaggtaattaccacactgggcactcatctgatagtgtgatactacaattaggaggaatttggtatgtgcttatttttacaccaatatgtaaattaacacagaatcttgtatccctacatttataatgtcatccaataatgggagcttaagttattcctatagccaagacctcctttagtccttattgctagtgctatcctaaatgctttgaattattcttattttcatacaaacatagcaatcttaaatttcacagaatctcacacatggtgttggaaattgggaagaacatcttatttggggtctgaacatttagaccgaatgcctataattcttattctttacttcataaaaacatttgcaaattaccaaatgcaccaaatagatatctgtcaagagtaacaacaaatagatgccagttaccaaaggcctaaatcttttcacaaatccagtgatgtacaaaaagaaagtcttcatttaaaaaattatggacacgtttcctccctttccatgttaaattaaacaccaaaatggaaattaaatctcaataaattccattgaattctcccatttctccattgggggtaaaccccccaatttcccttggtggttacacccaaaaata

SEQ ID NO: 1335 - DNA, 713 bp, Glycine max
gcaactcgcttgcctgcaggcgaaaaatgattcacaaggaaaagcaattaaaagcatttcatatatgcattcaaaatgatgatgccaaggcttaggtccaaactatacaattctcacctcatcagagctcccaatgttggacttatcaaccattttcatgtaagcttttgctgcacctcttgatgtgatctaatgcataaaacaaaaggagggtcaataggaaattttattttgctttgaggagaagcttcaacttcaagtttgttaaggttgaataagttaccttatcatatttcttcattatctttgaaaatgccaacacatttagaaagctgtttcacgaagaacaaacccataagcaatgttatgacaacacatttattgatgtaacaaaagattgtgatagcatctactacgtgtagttctttagaagtcgaagcttctgatagaactcaataaaagccagtttgagtgtttcttcaactttgctcaaattttccttggtgaagtttatctctgtttggccagggtacttgatgaagcctcttatagtcgaacgaggagtctcacaagtgttatttagttgcactcggttaagtatttccacagaagcaggtctgatgggtttgatgggggggatattcttcttcttcttggtctgaacttcaactcttttggtggtagttggaatctcttcacctttttcactatcc

SEQ ID NO: 1336 - DNA, 681 bp, Glycine max
tttaccaaatatatcaactggccctatggctttcctagagatatgagcctggcactacaactttaacagaaatatctgctgaccctgtgactttcccagataaatcaacctggctctgcaactttcccaaatatatgagcctggtcctatggctttcctagagacattaacctggcattgcgactttactagaagtatttgctagcattgcggcaatcctagagaattatcttgtcaccatccctcaaattatattatttgattttttcttctaaaagctatattcttaacaagctttagcttaagggatagtgttaaaatatgtgaaaatatcttagattacctttgttacaagtttagttttcctattttctcactatcttctaggaccagttaccttgttaccttatcttatcatgatttcctgagtacttaagattatgattaatacaaataaggactaatgctcaaagtttatgaacatcccatcgcattgtaatacatctcaatgttaattcagtgtaccattctcttttatctctcttctccctctttacctaatctcttaatttcaacagcttcaaatatatcaacaacaatcaagcctaataccattggtggggtcaactacatggattgcccaatgccttttggttccatcaaaaatcaaacttcataaaa

SEQ ID NO: 1337 - DNA, 641 bp, Glycine max
aaatacacgaaaatactaattagtgctgaaggacattggttggttaagaaaatataaatataaaacttttattgaagaaaaactttattatataaaaaatacaaaaaattcatttaatactttttttaagaactaatctaaagcacttgatgcagtagatttgaagacaaaacttagatgtagctccttaggtgcttttggccctactttgtaattagaatagttgtttcacctcgataattaatgtcgatctttaatgaaaactttaattgcacaaattacacaggagaaactccaattcttatcggagaacaaccccaaaagtacataagaaattgcatctaagtttatactatatttaatgctccttaatcagtaagactcaaaaactaaaaggaaaatgacagtaagactcgaaaatgatatttaatgcttctaattggagactaccagttttgaagacattgtgtataaacttgagctatttctggaaaagggttttgggggtcttaatattatgaagttggctcacacaactggacaacaatgaagggggtgaggggccctttcaagagtggcctttggacaaagccagaaaaaaaaattcataattaatttgcccaaattgcttaaaaggattg

SEQ ID NO: 1338 - DNA, 790 bp, Glycine max
  misc_feature (748)..(748): n is a, c, g, or t
  misc_feature (767)..(767): n is a, c, g, or t
tgcctgcagctgatagtaattcctcttccattttctctcattgccttcaacatttgcttgattggctatttccatctctccatcaatgcgaaaatgtcttcacatattatcactgcttgtttagtattcaagctatttccttgatattttaaggcaccttaacgttttctttctttctttctttcttttttagtttttttgtcgctgacgcttttgaatctctttgcttcactcaaggagatctattcttgttcgttgtgtttctcttgtctgtttcaaacttgtttgcagttttcatttaccggtcatttctgattatgttgttaaaaaaattaacataaaaaaaaggaaatagagtttgaaggttcaattgattgggctttttgtgatccattagacttgtagctttcaggaattgtggcaaggtcctgaaggatatttatacctaaggaaataaagaaaggcaggactacatggctttccttggttgatttgtgctagttaattatctgaaactttctagttgcagcttctaaaataattatgcaattaactttaacaggatatacaaaggaaagaagcagcattatcgccattgggctcaatgtgcacactgcacctgggggaaatgcgtgaaaaacttgccattccagaagcagaatgggcctaaagctattgcagagctgtgtagtctgaatcataatgaaaacaactgttctgagtacctgcaatcgatggagaaaatgtncttgccctgcccacatccnggggtgaaaaagcatggaagggt

SEQ ID NO: 1339 - DNA, 675 bp, Glycine max
acccattcccttgctgacccatcaaatataggaatctgtatgagaattagaaatgacagaaacacataaatttctaatacaaactattggttacaagaactagataaaggggagtggaaaggaggaaagaaaaaatattcatcaatattttccacaaaatactttatctttattatgataaagctgagcaaaggaaaatatccaagaaacataaaataaaccaatactatacaatagattagagggaatccatttcataaccagtatctgcaaactgggacagatagcgagttttcgatgaactaattattctgtttgccactttgccaactatagtagagtgtacatttgttgatataagtcattcaaaatgtagattaaggacctgtttggataaacctttttataaagacttataggagaagaaaataagaaagtaaactcaattgaatttttcccataagttaaaatcagcttatgcactttaaattttatagaagttctttcatctaacttctccaaaagctgaggtgattagttgatttttacttctggaaaaaaaaaactcaaaattcattttatcttcttattctcttctcctacgtgcttatagagaaatttatccaaacggacttaagaatttctagtctaatctaaatattacaggatcaaaat

SEQ ID NO: 1340 - DNA, 856 bp, Glycine max
  misc_feature (572)..(572): n is a, c, g, or t
agtgcgcatcatgagaaacatgtgcaattttgggttgtactacacactctttgtgtggatcatactcttcataaccctcatccctcagcgcaaggtgtcattgattctgtatgtgaccatgacctatgtgacaaccctttatattttactcttgagggtatatccaaactctgttgtgcttcacagaatcatagacaaaagggttgtgttggctttgcttgcaattgcaactgcggtgcagctgattttgactgaggcaggtattcatcttgcagtgactttggctagtagtgtgcctgtgcttctggttcatgctgttttgtgggctagctatgatgcctttgaggttgaggatgcttctgcaaaaggagaactggctccacttgcaggccatagtgaaaatgttgatgacaatactgatgctgcttaaaaatttgggggctcactatgtagtcctttctgacatggtgactgagtttttcttggagaaaaataaaagcattgatatccttaaaaaagtgtaaaagaaaaaaaaaaaaaaaatatatatatatataatatatatatatctnggggaggaataaaaactatgccaatttcttggggggtgtgttggtctttttataaaaattgggaagaaattaagtttccaagaatttattaggactataaacttccgcgccttttctacatttggagccaaatctttttcaactccccccaccttttgttgggcctggataaacaagttatgtccaaatttttttgaaaaaagacttgggcccaaaggggaaaaccttttccttctttggccgaaatttgtactttacattggacaaacatttttttcaggggg

SEQ ID NO: 1341 - DNA, 675 bp, Glycine max
gttgaagttgcttgatgttttggtgcaacttgatcatcttaaaaatgctaaggctagcatacctaatgacttttcatggtataaaaggtatgtatttaatttatgcctatctcactttatcttcaggttgaggatcttcaacttttctcaggttcagtgcttcagtttgtttgttatattatcttatatccatttcttctcggaaccctttttatgtatggtgcttttgtattcacctcattcttttctcttaattagcaaatatgttttctttttatccttttgcatttttttttctttcttttttctctctaataaaatttcttttcccataaaataaattagaaaattttagatatgttatgttaaatcacttagctttagagtgttcaaattatctggttatttaggtaatgatgggaaaaatgtctttttagtcctatactttctatcaaatgtggtcaatgtatagggacctttcatattgatgaatttgatattcaaactttaaaaaaacatgtggatttaattccttctctctaagaattcatcatattttttaaagttaggagggactaaatccctaatgttttttaaagtttgaggaccccaattcatcaatatgtaaggataaggaccttgattcctttgaccgaaatacagggactaaaacac

SEQ ID NO: 1342 - DNA, 756 bp, Glycine max
actataagaactttacacgtcattttaacatcttgacattttgatagataggtctgcccaaaggattaagcaatataaagtaaattacacctttaattgcaaagtattgtgctgagaaatttaggaagaatggtgacagacctttcccttgtgacactaaaaaatgacatgataacataaccatctggcagagtgcagcttctacaaaatcaaagtactaaccactggcatcccaaatttaattcatcatggactagagattggatacttgaattaatagcaacagatagatgaacaaaagaatgtagaaagtaaaacaagatttgttttagaacaagggaaagctaaaaaagaaactcaataaatgtagttcttccagtaatctcaaaggagtaaactaaaggagcaaggagcaagaatggaggactgaaatgaaagtaatttgaacagttgcgctgcgtaatttggctaaaaagcagagcaacaaaatgaaaagaaaatataattagaagcggaaaagaaaatgccgcaaaaaataatgggcaatacataaacagataactgacctacacaaggccatgcactaaaatggtaaccatttcagctgaaatcagttccaggctccgagagacagacctcttgacacctgtttgagaaacggagtttataagatttatattatatattacttgccaatttaagaatacagagaatgagtgctgcatttaggtgaactaagatcgatgacatactcgt

SEQ ID NO: 1343 - DNA, 671 bp, Glycine max
agccgacctgcagaagagctctaaattttgacttggaacataataaatatgcaagccagagcaacataggttgccagcaggagatcaaccatagaaatgagaaagctttcaataccacttcagaccacaaggccacagagatgctggatggagcaactatgacctatggtaaaaactcagctttgctgatcagctcatgggatgaacttacagtagaaaaccaacaacccagaaacacagaagataatacacttctactgcatgaaaagcaagctaataatatcctgtcagaaaggaaatcaatcacagccttgtcagccactacacaagagccacagatagcaaaatttcttgtcgctgaggaaggtccagctcaggaagattctgatttgtgtcaggaaggaaataatggatgtatgcatcaatatattcatacaaagcaaattgccaacaggtatcaatcagaagcatgttttgaaaactcacagaagaccagagaaccaatttgtcagaatacccttcagttggtgcctaacatcctctccaattccattgaagcagcaaagggttccaagagaaaatatcgcaaaagaactcagaagcaacatgactcagccacaaattcatgtgatacttccttgtgccaagagactttacaagcacatggaaat

SEQ ID NO: 1344 - DNA, 633 bp, Glycine max
gatccttctcttgtatcatctacgtccattccatcaagtgcaatgggaaacatacttgacaaaaaccatactgttccaggcaaccttttagggcataaaattgccctcactgaagtggaaaggggcgctcagcctgtccaatcaaactggcaggtacttactgttatttctcgctatatcttcagtagtgtactcttgcttgcatgcatatatctgatgtctcagcataaatatgagtattcttgaggttctcttaggaacagttgtgctatcttgttggatgggacaatttatggaattttctgtcccagaaaccatagtttctgcaattgtggtggagcggcaccctgctcctcctccaagggcagtcatggtgtggtgtggtgcatttcacggcaaatactgggcacttttcagaggaggcatcgaatctttatgcttcttagcaatctatttataattttgttctagagcacctgcttctgttttgcacttctgcaacacttcctgtcatgaacctctgttttgcaacttccagcagtgcaaaaaatagagtgaccatcacgctatccattatccggctatagcattttttcccggggaggggggggggggggggtctccagaatatta

SEQ ID NO: 1345 - DNA, 676 bp, Glycine max
ctttgcaaatcctccattgcaacgctcacttgagtcctatgcaaaaaacaaaacaaaaataggttttgtttatcatttcaatgtctattaggataaatataatttttttgaaaaaatcgtctgcataaatatatgaaaactcacaataaattgaatttagatagttgaataactgcttataggtcgaataaataattggtttaattgctgtaaaaaaaattggtctaatggttcatttagtttctatacttaaaaatattatcttttaatctctatacatatcatttttattcttattctttgtttgtaaaatctgaagaggactaaaatatgtgtgtaggcaaggacggatgtacatgtaagtctttcctattttttttagttttaatttattttaactgtataatattttttttatttaagtgttatttatattttttataaaatgatcagttattttttatagtctcattataaagataatttcaacatttgtagacaaatattctatttctctttttataatttttattgtagaaatattatattttttctcttttaaaacaaaatatttgggtttcatttttttaatatatttttctttttataattcattgctacttaaaggatatatacatggtacaagaaacgttgcaaaaaaacaaaaagctataat

SEQ ID NO: 1346 - DNA, 691 bp, Glycine max
ttcacaacctcatgtacgagaaaagccactacgttaaggcgatcaaggcctgcaaagacttcaagtccaaatatcctgacattgaccttgttcctgaggaggactttttccgcgacgctcctcaagatatccaggactgcttcttgtccaacgacgccgcgcacaatctcatgctcagaaggctcaatttcgagctattccaggtgactatgcaatattattctcttgcaaaaaatttaaccttgggagtatgcctcacaatttgcaattaggttgcttgaaaaatttagttgatgaaatagaaataagtgtgcgttatgattattatatattttcttattacattggcttctagcaaaagtttattgcagtgtcactagtgtgcctctgccctcaatataagttttgcattgataagctaaaagcaaggttttaaattgtggttgcggtttcatagcaatccttgatattgtgagaaattgcggataaatgatgccacaaagacccccaaagcattgatgttgtgtctgaaaccgtggttgcagaccgatttttaaaaccttggctagaagttaatgcatagtgagaagggattgtaggataaacacaagggaggcttttgttgctgcatctctgtgtttttggagacatgtttggatttgattctcattttatttggaagcgtatatgt

SEQ ID NO: 1347 - DNA, 732 bp, Glycine max
cagcttgcatgcctgcaggatgcattatctgtaccttggagggcacttcaccggagaatgtcaaagctgtactatgctatgagaggtctggtaaacagtaaactgtagagttctgtttagtgagtaaaatacataaaatgaaaataaatgattctaatcaattggaaaataaaacttttagttgagaacatctgccttattgattgggtccctagactgtgttacctgagaagagatagagctggagaccatagcttacatcttaatgctttttgttgtgacttgtgtttgaaagaaatctgtcttcttcctttctgctttgcattttgtgatgggcctgatctatagaaaaattttctgtcagttacatgaaattatctattgcagtaatagaaaagtttgaagaggctgagggacgtagcacaggggaagtttcgattgcagatttctctggtcttctcaaactgaaaaaggagatttgtactgcacaggtatgcttcctggaatttgttattattgttttatatgttttacatgttaaatccattatttatcttatttttatgtttgcgttgacagtctctcaatgaatctcaagtgcctgattctcttctaaaaagattggtgacaaatgcaacagaatttccccctgtttgtgctattatagggggaatccttggacaggtattttactagttttcattgtgctttaagatgtctggggacattaac

SEQ ID NO: 1348 - DNA, 729 bp, Glycine max
agcttgcatgcctgcagcctcatgttttgcagtgaaaaaattacaagaatatagaagttttgagtacctaagtttttcttatttatcttgacattaatgctttcatttgacatttttgttggggagagagagatggtttgagacatctaatgataaattagagaatatggaattcatgaaaacccaaacttttgttttttgaatttgtatcaagttatgaaactcgcttgtctgaattacttgaaatagtgcatatatcatgcactttttattcagcgtttatatctctggctcaccatgaaaacatgccataaacataataaaattccttatctccaggtacttaagaggttgtgacaatatattggctcaactgcacacaaaacacccagaactttgtgacaaagttggtggacttttggccatgcatatagatgacctgcgagccttggcacctatgtggctttcaaaaacagaagaagtacgacaagatagggctcactggggagtgaacataactggtgacatatatgaaaaaggatggattagtgagatgtatggatactcttttggtgcagcaaaagtgaatttactctcttaaaaatgttgtattttgaacatcaagcactatataactatttaactttcaatatttgttttggatttttcctttttttcactcttttcatttgaagcttttttttgtggtcacaggctggtcttccgcac

SEQ ID NO: 1349 - DNA, 659 bp, Glycine max
gtaccttattttattcagttcagatcaagttggccaatgcgctagactgcaaacatgcccctaagctgattttaggatgatatattttgcccaacagttgcgtgattttctttagctttctaatttttgaggtgatcataggcagaaccaaacagaatatttttgttttgttcaagagtagttagttagttctcttctttcccttgctcctgcctaattaggcaagggaataagaaataattgtagtctcgttttaaaagtcaaaatgcttaaactcattttttactgatttatgtcatcatcatcatcattttagtgcccgtttggttatgcataaccaaactctgatccacgtctattcgttgcttcagcgttttttcttgaaaattgacgcagaaatggttcaagacttgagtcacggacgtggtaccaaacacaattaatacatctatcggattcaggatttggtactcgagttgcatcagtagatttgggttttaagatataggtaatggtgaaaaggagacttgatgtggaatattttctttaagtatggcagtcaagttcagtggcgaggcgtagatgacctcacacttagtcattggaagtacttaaattaattatcaaactggggaagaaaaagtggctcatggatgctg

SEQ ID NO: 1350 - DNA, 779 bp, Glycine max
tctcagtagcagcgttggcatagacaaaggaatatatatcgttcagaatgattgattcaacttattataagtactaatagttggcgttgttgctcgtaccaatgactatgtttgtggatagaatagaggaaatttatgctggttgcgttgagaaatgaagtaactttcagtccaacacaattccatacaaccaacaacattgcaatttcagcatatctaaagtacgctatgttattggggaagggaattactctccacacgatattatattaaaataataatagtaattgctctggtctctggtctgcataagtagctcaaaaaatgatccaaaaacaaggttctaacaaacaccattcatcttcttcctgtccatcacaaacttcttccaagctttagtgatttccctttgtgtttctatttcactcttcttggcaaacagcactttttcgtcattttcttcacctgcttctcctgtaaccattatggtgttggtgctgatcaccctagcaggaaggagatccagctcgtgcacaactttggtgacatcaatcactagacgctccgcgagggtgcgagaaaaatcctccctaatcacaacacgaagcactgtcacatgttgtgcatctgggggcattgtgtatgctggcactatccaaccatagcgcctcagcatgtcagagatttggaattatttgaagtggggggttgtcctttaatgtgaaagccacccatggaacacccaatgtctttgaatataatctcaaaccttcctgttt

SEQ ID NO: 1351 - DNA, 686 bp, Glycine max
ggtgttggcacggttggctcatcagaggccataatgttggctgggttggcattcaaaaggagatggcagaatagaaggaaactggaagggaagccttatgacaatcccaacattgtcactggtgccaatgttcaggtacacacacaaaaaaaaaagaaaaaaaacacttgcatgttctgccattgaaattttagcattgccgaaaattgttttttaagagtctagcactaataatataaagagaaatgcttgcggtacactttctatcatcagttaaaatttattgaaaattacaaaattttgttgactctgttttctatttaattagtctcttttacaattttgtagcttttaataaatttaaccaataatagagatatatgttagaaagagtgtactagagagtgttactagcgctcctctgatataaaaaataagtcattgagcttaaataattctgctcttatgaaggtttgctgggagaaatttgcaaggtactttgaggtggagctgaaagaggtgaagctgcgtgatggatactatgtaatggaccctgaaaaagcagtggaaatggtggatgagaacaccatttgtgttgctgctatccttgggtccactctgaatggagagtttgaagatgtcaaactcttaaatgatctcctggtggaaaagaaataagaaactgg

SEQ ID NO: 1352 - DNA, 660 bp, Glycine max
agagaggagcaagtttatttggtcatatcttctccacatttaggatcctatccaactgaacttttctaatacctacacttctgattaaatgtagtttttccgaaatatcttgataagtgttttttttttcttcactttttttccaataagctttgtttggtcataggaacaaacaatatgatgtgttgcccttaattaaaatataaaaaatttactgtgttgcgtgaaagcaatatccgtttctgagattgatcagaagttacaatctctacaaaggaagtaaaatgaatggttaaataaaattaaaaacaggaagtacacgaaattttagaaaatattgttataatttgctcttgtttttatttatcatatttctccatttttacgtgctttgttggtacccatatgcatgattgttaaactctcgatttaaatcgtaaaattgtaagattttacgattctaccgagggttggcgagttaaatcggaagtagaattgaaatcggagtagactcgtccgattttgcgtagactcggacgagtttgggtaaactcgcgagtctgctccgagttcacgagtttatgaaaatcccaaattgcgtcatacaacaaccctaaaaatgacactcgcgactctctctactcacttactctaccttgt

SEQ ID NO: 1353 - DNA, 712 bp, Glycine max
agactgtcctcgcaagcgcaccgcctcccctccctctcgttcttctccaaatccctgatctaccgccgcacctcctcttccacgaagaaggtcgccgaccgcatcgtacggctctcggcgatcgacttcgtgggaaagaagcacgaggtggtgggcctggccggccagaccttgctgaaggccctgatcaacacgggcctggtcgacccggagtcccaccgcctcgaggagatcgacgcctgcgcggcccactgcgaggtcaacattgcccaggagtggctcgacaagctcccccctcgctcctacgacgaggagtacgtcctcgtccgcaattcccgagccagagccctcaacaagcactccaggctcggatgccaggtcctcctcgacctcgacctcgaaggtatggtcgttgctctccccgaacctaggccctgggacacttcctaagtccaaagcgaacctcttttatttttatggctcaataatgtgatccatgaacctttggaaacatagcagaactgtggttgaagcttgtattggtttcttcttgttatatttttggggggtttagactcccgtgcctgttattggctcgctatggataactatttgcaaacttgtgttttgttattatgatgattatgatatgatgaatagcattgctatattaaggccttgctttaactcttaaccttggttggggcctttc

SEQ ID NO: 1354 - DNA, 657 bp, Glycine max
aattgtgtggcagacaagaagatatataatatatttggcgaactcagctacagcttcgggatcctacctacaattcagcctttctatttgccacttcaaaaaattttaatttatcacgatcgtcagatttttgtttagctttataaacaattgccagtttgaaatcaaatagaggtctcccctctcaaccattcctttagcattatccacccttgattctcacaatttttcttatatttttttgcaacttttttaaaataaaaaggatacatgccaaatgatacgatttaattttaaaaaggtacatactacaagagaagtgaaaaattctctcaagcagctagtcgtttttttcatcatttatcagaaaggaacctggcatttcaagtggaagggataaggcttgattactcgattttaaatgagaatatgcggaagccatcaagacaacgtaaaaaaaataggggcgcatatgattattttgataaaaaaaaaaaaattgacaacaaaggaaaccacacatgctcgttgtgcatggaactttgaactaaaacattaaccctgccaacacaactgtggacacatacaaaaaacacactccactagccagcagtagtacacaatttacaacgcttacgagggaccaccgacttggct

SEQ ID NO: 1355 - DNA, 827 bp, Glycine max
  misc_feature (685)..(685): n is a, c, g, or t
gattctctagagccgacctgcagcttcatattaatataaaaatagaccattcagatataaaatagcatgaactagtctcatgtcaagaagttttgattgtactagcagttttgcagcgttctgatataaaaaatatttatcaagctattcatctttgacttttccaaaaaggtctatgaaagatcactattcttaccgtaattatcgatgatactgatcttcaacttggatcaattctctagtgagctgtcagctgtgaacccttacaataatattgtatgagaatttattttagtcaacaggtattttgtctataccagttataagatccgatatgtaactccaagtcatttacgttcttttgcaattgaaattataaagttaattccagtggcacatgttttgaacaattgttaattaaaaaaaaaggcaaaaaaaaaaacattatacccactaatgatttgctaacataaggtgtttgatatctttggcaataatctcggaattaaattatattcatgttcagtttacaagagaataataaaccaattttaggttataataatgggtacagataaaaaaaactaccacgtgttttaaacaaattaaaaaaaacaaatttcataaaaatcattaaaaaaagtcttgcaataaatgaaaaagaaaaggtgaaccaattaaatanaacaaaaacggaattaaaatataaatacaaattagataccaaaatgaatttacctttatttctatttcatggcgaagatattttcttatatcccttcgcgaatatcatttcttattggatatacattatcttcatctttttt

SEQ ID NO: 1356 - DNA, 661 bp, Glycine max
aaataaattggaaattataataaaccagcaatcctggatcacctattcctagcttcctttaggtaaaagcaaatatgttggcaaaaggttaaagtcacctttagatattccaaatatatctttcactttttttttttttctatttttctttaaaagtgcattcaatttatgactaagctacgtgatggagtaaactaacaattcatttgaaaataaagaaacgatttcaacatacaagtttctgagggttgtgatattggtgagaactttggggaatggccctgacaatttgtttcccattaaagagctgcacattcaattcacaagaatctttagtgtcactctcaagttgtttacagtatacagaagaaattgaagagacaatgtagagaaaccaaagggtgcaaagcagaaagttcttacagctcaaccaagcgcatggtaccccattgtggaggtatagaaccagtgatgatgttacgactaaggtctctgtttgaaagtgcaagacaaagttactggacttcaccattccatagggaacatcatgcagagcaaaaaaaaagtcatggtttcaaaaccgagatttgatatcttacaatttttggaaataatgaagcttggaaaactctggtgagagactacctgacaaattctgaac

SEQ ID NO: 1357 - DNA, 584 bp, Glycine max
atatgttgaaagtcccaagttataggtagttaaggataaaaaaaagatatattaaaatcatatattgactaaagataatacttgtgataaattatataagtaaaaaataattttcatcttataaattaatttcatagaattaaattaaatttaaactcatttttaatagcgactcaagaacaatgaaaattaataatgcgtataaactagaaagaacttattcgtccaacaattcccatccacacaccattggaaagctagctagtgtagtgtagtcgatgtcatcaaagaatattgtttgtctttttatgagttagttttaatcagttcatctaaatgcaataataagcccaagttgggtcacagccacttacaagttagcccaccaacccttcgcaaacaaacggtctcagtcccacaacttgagaatatgctttcatttgtttgctttattattaatgcatttggtgagcatagcatgtagtgtggatctccaaacctaaccccctaaactatgagagaatgaattaagacaatcatgctcccttgagcctacgtcattgaataggccattcatttatata

SEQ ID NO: 1358 - DNA, 665 bp, Glycine max
aaaaaacacatgaacattaagacatgtatgaagtttgccaaattgattatggcatattctaccaaatccatctacacattacaaagtagcataacataccaccaaagaatctagtttaacattatttcatggaatagcctgccaaatgcaagctgaggcactgctgaacaaagaatggacctgaatactaaaactaacatacgaaccctaaagtatgtatgtggcatacagagaaggaaataaaattcttagttatctagatactatagaacagaaggatatatttcttcaaaacctgggcaaagcagaagattgctcaagtgctacatgttgtacttgaggaaacatggaactaagaatctcaaattcaggaagcattctgcgtgaaaaacgacaccaggaagcatagaagagtatagaaatgtatccaaccctctttctgccagacaaaaccccttctatgaaattcccatccacctgaacaaatcaaaacaataaataaaatacaagacaccagaataggcatagttatacaaattaactaaatgaataaccaaatcggcaaaacaaatcaattttcaaattaatgaactatcaacttcaaagaaaaataagcattttcaggaaactctaaaacacaatgacacattagaatcaaagccaaa

SEQ ID NO: 1359 - DNA, 773 bp, Glycine max
agtttgcatgcctgcaggttgaattgagtatttatattttgtgatatatttttaattaaaaataaatgttccaccgtaattttaaaaagtataataataaaataaaaaataatgtctcgtgtccccgagtccatatccaagatttggagccttgcaaaatgtgttcccgagtccttgaaattagaatttcacaggtccaaaccttggatccatatccgagtcggatacccgtacccgtacccgagtccgcacatgacagctttcaataaaagctattggaggtgtcatatgtgatattgtttaatgcagtccatatatgtatttatgaatgtaatgctagaaaatataatatgcatttaagccatggactcattgcattgctcaatgacaatgccatttacaatgattttgcattgctctctataatattgccatttacagttacttaaacgtctcatgcttactttgactaagctctatagaaatacataccggaacaccactacacatacatatagtataaataaaatatgctcatatactcattagttttgcactagttcaatcaagcatagacactctcagattcatatactcattagtatatatcaaatgcagtaagttggaacactggggggtcgataaacaaaggtcctgacagttgtgaatgtcccgatgggtgattgaactgaattaaccccatgctgcctccacaagtgaggctttgtcatgaaaccctgttggtgggcagacttcttccaacacactttcgg

SEQ ID NO: 1360 - DNA, 742 bp, Glycine max
tgctcagtctgcaaatttcctctgggatttcaccaaagagagaattgccactgagatcaatgacaatgagctccttatagtctccaatttcctttggaatcatgcctgtgatgttggttgttgagaggacaagagtcttcaaggacctgaggggttgaaaatttaaaggtagtgaaccttgcaagttcactgacttcaggtttacctcaaccacctctccttgtaagttgcattgcaccccaaaccaattgcatgggcttgggttggaaggattccaagatgctagtgcatctgaagtactgtttaaactgttcttccatgctaatagagcttggccttgctcattaagggagtaacagcatggaaacaaaagagagtttaataagagaagcaaggtgagggagaagattttgggaggaagtgacagatttcttaagatgacagacattgctgtgaaagaagagaagtggtgatctgttttgggattgtagagggggaaattctatgattttttttttatagaggaagagaagaagctctggtcagaagagctagcttccttgtttttttattgttgtaataagctcctgttcaatgacaatgacatctccatacccatgatgatgtttgttgatttttattaagctaaacttctctttttatttatttatttcaagatgaaccttgggtttttctataaagaaggaaaaaataatctcttttattattgaaaactttttaa

SEQ ID NO: 1361 - DNA, 693 bp, Glycine max
atagaaactgatagtcatttgtttcctttagaccatcataggcatgccgccactttgaaataaccaattgaaacattgactcattcaaggatgctgcaattggaccacatatttgaccactgaaatctgaggtatctgcatctttatgactaaaagtctcaaatgtgtcccctccctccatggtctaatgaagaagagaacatatgtgagaatgacatcttttctcaattgtagattgacaaatcacatgtatgctatttacaaataaagcagcaagtgatacctcacacaacatgagaacaagggatgttgttatttactgtctaatttcattttgtatttttgttgatttccatttgtccagctaaaaaatttcatttataaacttatcatttagcacatggataatgacttattccatattcaccttaatgaaatccaatatcaaaggtcataaaaaaaataaaccaagaaaatccaagaaaccaaagaaatagaatcaagtgagtttctatcctcttgttatctcctttattgtgttatacagaaacagtaattagtatcctccactattcactaatagatagccacattgtgtcagaaactgtaaggcctacaaacaatcattatatgaaaagtttgcctcaacatgctttgagaaactgaaaattacaatttacacctacttcaata

SEQ ID NO: 1362 - DNA, 846 bp, Glycine max
aacaaagcaaagaaagacgagcataaatacatggcaataaggaacaacaagttagagtagtgtttacaacataagaatcaatttatgaaaactgttgcggttattttgactttacctttaattcatcattggcttctttggcagcagaagcaaattcttcaattgaaagggttaatgggtgtagagaaattttctggtctatcaagttgctcaacgtgtttttgtacaactggccaaagcaaggaaagattacataatcaatatacgaatgatcggcaactaacacatggtgccaattatacaatgaacatcaatattataaaaacttttttttttttcatttctcactgtttgcttcagccccatgttaatcttcaattctttcctattagataaacggcaacgtttttagataaattttttttaatgcaattcatgaaaattcaattttaaatactttttatgtttaacaagaaaaaaaatgatagattaataatcaatgaaaacgtaattgaaaggaagaacaggatataaatgcaacttccatgcatgtcagtatgtcactgactagtatcaactaatttaattttgttagtttaaatcagaggtgaatataaatgcacacctgtaactcatttgcatatggaacgtaattgaaaggaagacgggatcatcagccagtgagggccaaagccccaactccatactgtacacaacacgatattactcttgctgcaatgatacagtataaaatacttttacctttatagatctacccactgcgggaaagtcctccgctcattagacacgggagcgaatgaagaatctccattaacacggttcttt

SEQ ID NO: 1363 - DNA, 687 bp, Glycine max
aagatctgaaactcggaagcgaagtaactgccaaagtctcgcaaattggtgcacatgggttagtgttggatttgggtggaggacttagaggaatttaccggtttgaggtaggagtcatttttgtatcctcttttctcaagatttcatgttaaggagatattctctagtcatttggcattttttagttaaccataatatatgttttttagtggccataatgatgtatttattaatcattatcagtttgtcaatggaattgctttgctgatcattcatacgcacaagttcacaggcttaaaaaattgatgcctttcttcttgttttccatttctgcaactattgatctatttttctttgtagcattacttcacacataagctcaagaattcctttatgttctaaaacccacaccactattattaaattgtatttattctcttcctcttcatgtataattgcctaaccaactttttcatctgcaccatgaaccatccagttcacttgctaacctattcttgttttgtcatgcaggaaaataacaaaaggcactttaaaataggcgatgagatgcgagttgtgtgctcaagcttttctagcaagggagttccagtattgtcttttgtggatgatcaataacttcctaacggtaattcctttcgttagcccatggatttatactcccatggt

SEQ ID NO: 1364 - DNA, 691 bp, Glycine max
ttgggtaatccagttctagaatatgccaccgacttcaattcaagggctgagttcttctggtctcatggactaatatcagattcaacctacaacatgttcaccacagtgtgtaactattctaggtacgtgagtgagtactatagggactcggtttcgcctctttgttcaaaggtaatgggccaagtgagcagagaaaccagtaaatttgtggacaaatatgatgtcacacttgatgtttgcatttcctccgtgctatcacaatccaaagttatttgtcctcaatcccaagtgagtcttctcttttggacttgcccttctcatgcttctccaatttccatcacattactttcataaactattttactttagatcagtgcttctcaagtttggcttgttaattaaaattcttgccttttatatcatggcatggcaggaagcaaatgagagcatagatgtgtgtgtagatgacaaggttacaaactacttaaaccggagagatgtacaagaggcacttcatgcaaagctcgttggcattcgcaagtgggatgtttgcagcaagtaatttcttcatactacatgccttgggggttggcttttcttgggtttgaaaattgaaagatcaaaagtcagaatcactgacctgcattttgttggtaacagcatactggactatgatatgctaaacctggaa

SEQ ID NO: 1365 - DNA, 698 bp, Glycine max
atgcaaagggaattattgtggttcaaggtcattgttcaatcattattctgtcgtcagctttctcaatttagtttctcattgagtatctaatgttgttttgacacattttatttcttgcatttgcaggaggtggaaaagatcatacagcctctattcaaggagattaaggattctcaaggtaggacacctcaaatgttattcactgaggaacacaaggagttggccaaagaaggagagaagtggctgaagaacactgcttcatcatgcatgctagttgcaacacttattaccactgtgatgtttgcagcaatctttacagtaccaggcgggaacaacaacaataatggatatcccatttttatgcacactacatccttcaaagttttcgctctctcagatgctcttgcattgttctcctcagtaatatctgtattgatgtttttgtccatactcacctcaagatatgcacaggaagatttccttgtgtcactacctagaaggttgagtgttggcattgcaacccttttcttctccatcattacaatgctcatagcttttggtgcaacatttttcattgtacttggacatcaattggcttggattgtcattccaacaacccttgttgcttgtatccctgcaatattgtttgcccttttacaggtttccttctttttgttgatacaaatctcatgtacata

SEQ ID NO: 1366 - DNA, 793 bp, Glycine max
tgtctcagattcctgaaattgttgaggttcccagtttcagtgacggtgctaaatctttttttgcaaggcctgattgatgactttagtgttgatgatgccttggaggttaaaaacattgagagggtcacaaatgatgatgtgaaagcagtggagtacttcttgaaacaaaagtgtcaatccaatgcagaagtggttaaggttgggattcacttttatgtgtttctttgtgctatgcggttgtacactgttttctgttttaatcatgagttctgatggattgtgttattctaaaaccttttcgtaggtgcttgagtttttccactttgcttgcacatctgaggatataaataatcttgcacatgccttgatgctgaaggaaacaatgaattctgtcatgtttcctgtcatggatcaaataatcaaagctttgtgtgacatggctaaagataatgctcttgtcccaatgctttctcacactcatggacaggaatgttcatttgtgcatttgttgaaaatttaaaaatcaatgtattattgcgggctgtaaaattaggctatggcaaatgctttaactttgtagtgacaaacaattggtttttaggcttttgaactcctgttatatgaaaggtcgtagatagtgatactacttagttcctttttaaacactattgcaattcattagcattattgttctttcacttatttagttggtattcttccttgttaaacagtcttgattgaactttggaattttctgcactattaaccagccagcttatcaactaccctggga

SEQ ID NO: 1367 - DNA, 804 bp, Glycine max
gcctgcacatgcataaagaatgcacaagccaaagctgatgatgatggtaaaggtaaagagaagggacttggagatgtctgtcatggctctaagtggaactggaacaccaaaacaagcgaaagcttctcacttttaaaaaaaagcttcatgttgaaaactaatgtcactctggaaaaaacaattattagatcagtaatatttggacaattggacccacagcgtcagattacacaggatagagagacaggctcatgccaataagaaaaagacttgtggggtgttatctaacccctacttgttgaactttaaatctctcaaatgaatatggatcctaggttgttgaataatataatataataccaagttgttgaaaactaatgttactatgaaaaaaacaattattagattagtaaggaaaagtaatataatattggaacttaataatacaaaatatgtccttaaactcttcttctggttatttaaatcagaaaatgcagtgcatggttctggctggggtattaggttgtgacagaaaaacggtgatgggcaagtgttggcaattgaattgggaaactgacatgggttgcgttagggggaggcacaagttgggttggtgatatatgcgaacatgccatgcaatgagcaggaaaagggtagaatattcgaaaccagttttaaagaggaaggcatatctaggagaataattcggatcggatgctctgctttcagtatagaatatatagctctgacgcacgcaacgccactccattgatgattgaatttgattggtggattaacctataa

SEQ ID NO: 1368 - DNA, 853 bp, Glycine max
  misc_feature (776)..(776): n is a, c, g, or t
gccagacttgcatgcctgcagctatttctgcttccagtaaaaacctcctccactggagttgccattcccaacctgtgtttgttgttatccccatttgctgaacttgttgttgagaaatctgatacaatcttggatacttctccttcagcgacacttcatcctccttccaagcatcttcccaaaacagcacctttgaaccacttcctattttccattttatgtttctattaaaccagctcccttccttcgtcaaattgaaaatgaagcttaggtccctccaccttataaattctctattgaatcttcttgtctcatctagattccgccatcctccatattttgaattcagaacttgtgcccacagtccaccttgacggtgaaacaagttccaatgccatttcccaagtaaagcgtagttgaacttgctcaaatccctaatacccatgccccttgcctcctttggcatatagactattccccagctcacccaagtgatatttttatgatctaagtttcctcccaacaagaaccacctctgtagctttaccatcttgtccatcaccttcttcagcaccctgaaaaaagagaagtagaaaattgggatcgagttcaagattgactttatcaaagtcactcctcccccgaaagagagatatttttgtttccattttgacaattttctttcacattttttaactattgcgtcccatgtctttctacgcctttgggtttgccccaatagggatacccaaataagaaaagggtactgatagccntttgcaatttaagtagctggcagcacttgtaataatgtttcagtcgtcccaaacgccccaaaattacttttgggcaa

SEQ ID NO: 1369 - DNA, 695 bp, Glycine max
tacaccaaaggacggaccaagtgctggttgcacgatgaccacttcactgttgtcccttgccatgaagaagcctgtgaagaaggatctagcaatgactggggaagtgactcttacggggaagattcttcccattggcggggtatgttgagaataccctctattgcaatattattgttcataacttgtggatgcagaaacgtgtgcatctttagatgtcgttggttttcaagttatggaaatttttgttttgaagttgttacatttgtttcaacaatgaaaggggtatttccttgatgagttggccccctgctttcagtatctattcactaactaaattacattaagaataaaaaaagaaaactcctctagttatggttgcccagccaacagattatttctcagaagctacccctcaatattttgtgctgtgaattcttttttgtacattgtgtctgaaactgtcaatcatgcaatgctgtgaaatttgcaggttaaagagaaaaccatagctgcaagaaggagtgaagttaagactattatattcccttcagctaacaggagagattttgatgagctagcacctaatgtgaaagaaggtcttgatgttcattttgttgatgactacatgcagatatttaatttggctttgggtgatgatcatctcagaatatagagtaagtcattaatgttctgta

SEQ ID NO: 1370 - DNA, 693 bp, Glycine max
tgtcatgcctgcagctttttattcatccaaaatgttcaatcaaaattgtaatagaggcacatctgatcattaaagtaaagttattgcattttctgcttcaatgtatcatcatgcaagaattcaggtaaaaaaagatcagcatgatatacgttttccggctatgttgatccgtacaaaaagcagctggatttcaaacacgttaaatacttccaaccatgagaacaaatcatacaataacaaaagccttattgtattaaatgaggtcggctacatgaatcacacgatatcatttggcttggttaaaaaaccacatattcatagatacagtcaccaatcataccatggcaaattcaatagttttctttccatcatgagccttgctgaagaaatacttgaaatagtcagagtacaaaacttgtttatattttggttcatcgccatcctccaacacttttgacaaaggaccaataacagcatcaggagctgggttgacaaagattggaatggagatcctggtttctttttgcaaccactctatgctctatgcttttgtatctttcattgctcattatctgtagcacatccccaatattgataccaatgctccctgaacaggaggaacaaagatccaactatcatcatcaatgcctcttacataaagccctccaatatcatcctggagaaggacagtga

SEQ ID NO: 1371 - DNA, 864 bp, Glycine max
ctttgcctgcacaagaaacaggctcacaattcaatccatattcactgtgaacaaatccagaaaatgaaacatctaagacattaagtttatctgtagccagattctaatccacggtttcaaaagaaaggcataataatttattgattcaatcttcaatcagcaacatcaggaaataaaactcatctggaatctagcatacggcaaatgaataaatgcaagtagatgattcgagccttcaacagccatcccacaccacaagacccaagacgaaacaacagagaagtaattcaagaaatgccctcatactagaccattgaaaagtagaagcaaaagacaatccaagaattctaaattcagggtagagatcaccaaatcatgtaaataagatagccactgcctttcacaaccaaccacatttactgatttccactacttgacttccctgtgagacccaaagcagaaatcatggagaagaaatcaagaaaagcgcatacactaaaagcaaaatgaagacacatctgagagattggaatccagggtagacatcaccaaatcatgctgaggctcaatgctatgcagaatgcaacacaaaacttctactctacattgcaacagttttaaaactcaatccatatgcctcatgatcaaattcagaaactaacaataatgaatatcccattgaagaaaaaccaaattcatctagacttgttagccattctaatttgctgcttgcagaacggatggaaacttgatacacaccaaaatcttgtgaacatacttcagcacatgctgcaaacgaaagaacttgagcagagaaaagccaaaatctccttgatcaacagaagataacataaaaatgaattt

SEQ ID NO: 1372 - DNA, 679 bp, Glycine max
aggattgtaaattgtaatccattaccgtaacatacgatatgaagaaaaatccaatcaaggttttgtggaataaatattatgactttatagtttatataaatcatctgcattttcatatgtatgtggattaatgaacttcagttgccaatatccattcgaaacccctctgggactggcgtcgtcccaggagaaattaatatcacacctagcttgctaggcattaattggtggaaattggtagtattcattttattttttttggacttaagaaacagtttgtgtaaattatgtatcaagtattttttttcaccaaaaaaatgtaacaagtattttttgttaatttatatgaaaagcaaatagataatttttgaaaaagtaatattttttttttgcaagttaaaatttatatattttatactttttaaaaaatcattttatttaatttttcatgaaaatattgatttgattcattattttattttcgtacaatatttaacgaaaaaatttactcataaatccgccagattatctaatgcgtactagacaactcaaatcactattgcgtaacttattaatttcaactctggtcccaaatacgcaagtcgattaaactgggtcgtgacatcatgtcaaaagaagtggctaaatcaatggtaaatacatacattaattgtgtttg

SEQ ID NO: 1373 - DNA, 906 bp, Glycine max
agtgctttagatgacggtgttaagagttttatgacatctttaaaaaacgttgggagtaaaggtttcatcctcaacaagaattctcaatcacaagctttcaataacccttcccactcacttacaggaagcaatgaatgatgaagggaacaaagttaacttgtcataaaaagtttgtgttctatttaatgtaactatgctaaattttccttatcataattgtcatgatgtagaattgtagttgattcagaggaattttttatttacattttatgcatacaatgcaatttgtcatccatactcctatctattcactgataataataaaaaaatactcctaagtcctatctattcatttaacaaaaaatttctaaaacgagaattattaggttgccgtttcggcggtttggttggctttattgtgtcgtgcaacacttttgtatgtcccctccttcaatctaagacgccacgacatagatattcaattcaggtttcactttaactttgtattatactctcaagtctcaatcttttaaattatttttattttgtgtataatgccagcaacggaatttgaacttaagacctgaaaactacttgaaatcctcccacacttaatttggcttaaattggccttttcaaataatttgaacttttacttctcgctttccctcttaattacaaaaaatcgtttcctttaaatatcctttaaaaaaaatcccaactccacttttttgttgaaccagggaaacttaaaaatctcttttatgggaagctcttaaggtaattaaccatggcacactatggggggtttttttaattaatggaacatttgggtagcccccatttcccaataattatacacatttttcccacttttattattttattttagaattccccaaattt

SEQ ID NO: 1374 - DNA, 763 bp, Glycine max
ttgtgactctgtctgtatcatttgtttcagttccgcttaaaagattgaaaagaaatcagaataagatgatattgaataattttctgacatatgcttgctctttagtggtttttttgatttgttttttttatattcctgaattttccccttttaaatagaattaaatcttacgcatcagaaactcattgaatatattctattgtattcttcctgtgttggttggcagtgtatgacagtagtttttccaatgcttctaccacagcttcattagttaattatatattcgtgatggtcaataatatatattacatattacattcattacatttcatagtctaattttctggcttaattttggattcagttatctttagtattttgcctataaatagtttctctattataaccagctcttgtacaactctttaagtttcaatcattaactgcttctgtgcaggtggtttggttgaaggttgaattatgcagattgatggaggagaaaagatctgccatactcaggttatagtttctttgggttcaaattctaattctagctctttcaaaactgatgttttgttcagcttgctagttataaaggaaagtgcttgaaggtttctagaatatattgcaaaaactgtaaactgtaaatgtagatatggtaaactaaagtacattattttaggggtcacggttgaaaaatcatggaataagggggcgttggggcaagaaaattttagtttccaaaattcgagttgaaatcttg

SEQ ID NO: 1375 - DNA, 790 bp, Glycine max
cttatcaagtcagataaagttctgacactaagatgcatgataatgtgacttactagggttcactgaaatagcagatactagaggtccataaactcctcttgtgggtatgccagtggttccttttccagcccaatagaagtgaatcttcaaagtatgttgggtgacagaagcattaaatgtcttctcaattgacttgccagtaccaccagcttctcttcggatatcaaagtctttcagcactaaattccccttaattttaggacataataatatatttcatatacatcaatgcacaactcagtgcaaatcaattatttagcatcatttgcaaatcaagcaagtaattgttacctggatatagacgtcaaatactcgccttccaagactgttaagggacctatcattgatgaaaataatctctgcaaagtgaagcttaactgtgtaatttccatttattaggcagagaccatagtatgtgagagcaaggggagaaacacgtgctgttgtgtatagttttgaattgagtgcagagacattaagtctagaagtattggccacaatatatggatcagagtcaatatcattgtccatgaaatttccagtgctactaagagcccaatcctggctagtgtaatataacattgcagcacccttttgttctctgtcagcttcataaatattaccactaacatttgcttcgtttccaccacaattaatgttcagggagtaccgatctattgacaaaacaatgaccaacagggtttgaaaagaaaagatacttactgtaaaa

SEQ ID NO: 1376 - DNA, 908 bp, Glycine max
tttatgatgataccatacgagtatcttgggtataagcttatgtgatatttatcagtatgcaggcctaagatggtagtcctgggatctcgggagcaactttgcattcatgatgaagtgaagttacttcggggaaaaacacaaacaaatgcttgccgattactctgtcgaaggcgtgggaagcgtcattgtaaccattttaaaaaagttcctggtaattttgtaaaaattttccatgcatacaatatgggcgcttatattttatgtgtggaccttgtttgacattatgcatcgtgtatcagtaattcatatttaacacttagcatgtatttatttgaatgaatgaatgttctcatatatgttctgtgatcactcttagtaccatgtaatgccataattcaaatgatgaactagcactaaaattacaaaataccatgttttatattattattattttattttatacttgtagcttcagtgtgctatttgtgctagttatttcatacaaacatctggtaccttactaatcgaaaaatggagaattttgggataaaaaaattgatagggttacctgtacagaatacaattctttgtatgattagagagatataatttcatgggtcaaaagtttgaactatgagcttagattgcaaggaaagtcattttaaactcattgttttgagtgagaaattattcttgatgtcatagtcataggctttacaaaaaaagggttcttttattgtcatttaaatcaaattgtatcatgcttcctatacccaattggcaattcaaaaccttatgtggctttggttaattgggctgccaaaaaaaattcccaattattcccttggcctctccaattataaaccctagctaattggcaaaatatgccaaaaaatttttctttattt

SEQ ID NO: 1377 - DNA, 669 bp, Glycine max
agtattgttagcatagggaagaacgtcaagtgctcccattataacaatgaagaggagcatttatatactgccattggactttaaagaagaacaacaaagcttgatcatagagttggggacaaatacgagcatgttactttttttagttgttagtattttgttagaacgttacctgcttcatcccactaatcctatccttgttatggctaactttgtataactgttaagatcacatcaactgatcaacccctcactaaaacatccgcataaagaggaaaaagtgtcataggatcacatatttatgttagtaacctgtgttgttatcaggatcaacacctcataaattcaaaattatggtcatctcagcaaatcgtatttccttttagcttcttcacattggcatacaatttttaattgaaaatttcaatttcaaattagcacttttatttggtaggttgtgcactacgaaaaagccactaacataaaatccccgagaccaggggaaggagctactaaaaactcacacaaacatgcttgtttccgtgcaatattatccgtctaattgaagatgccagtgtcttagcaagaagtaaattacagccatttatggaactaatacaagagcagaccaaatcatagaggaggttcttgctctcagttgcagacttt

SEQ ID NO: 1378 - DNA, 843 bp, Glycine max
  misc_feature (743)..(743): n is a, c, g, or t
tcaaagtcattgcaactttccagttttcaatatctggtggctctccactgccaaattcagtggttcctgaaccaggctttctctcatgaattaatatcacctgatcatcagagcctgatgcaacataccttccatgcttagcccacctaacacagttgacagacccaaagtgatcccgtagagttgcaagaagcctttgagaagaggcatcattttctatgtcagtactaacagacttcatattccatatgcgaacctgcatagtacatagttgagaatgtggatgtatgaaaattaattcaagtgacttaaacaaatcaagaaactaaagttgaaaataacgacccactctaatcctaccctgaaggccagaagtcctatacagccagatttctcagacacagggacaggaaagttatgaaaacaaaataagtgaagagaaacaagaaatttcagcacaacttatatttcttagatgtttagctgaacctgacactaggcaacatattaacgtcagatctttactacttcttactttttaatatgaaaagtgattcaccagaaggcaccgaggaaatttgggttcctgagctaagttgtgtccctagaaaatacaattgacaagctcactaggaagcttttctttaaaatatgaaacacataaagatgctctctgccctggccaaccaatgtttacccagaagtcacatgaagtgcagtctatattgaatcagaaaaatgtnaccatttctactcttataagaaactgtgaaatttcatttatttgaaattatagaatgcatattcctctgctagaaaaaaaaaagtgggaagacattaaat

SEQ ID NO: 1379 - DNA, 787 bp, Glycine max
agcacgctccgcacccattgattctatagagtcgacctgcagttatataaagcctaatctgcatacattagcctaatatattaaataaaatgttttctactttctctttgttttgagtactatacaatattggaggtgttcagtgaatcagtatatgttttaatcttatcccattaatttaatttgaaattaattttgacaaatttaaatgttaaaaaaagttaaatttaaagtgttttgaaaatgaatttaaattatattttgagttgattttggttcattctaacttgacctaataatgtcgatattttattataacatatttttaataattaataaataaaaatatttttttaaaaaaatttaagcaatgatattttatattatatatttatattgatacaatgatcataaaatatatatttatattaatattaatttaagtgtatattcttttaattatatatatgttgttaacatttatataataatattcataaattagtttaatttaatcttatctcttgtattatcaaattttaattaggttaaattcatatacaagtaaggattaaactaaatccagaaacagtatgaacaacagcatcacatcacacacacacgtacatattttggaaaaacaatgaagaaatctgtgtatttgtttccgctgaaacaaattcttgtatactcttgctacttaccgcttaccatactagttaacatatctgcatattgcaaaagcccccctcataaacataaagtaagttatcttttttcaactctg

SEQ ID NO: 1380 - DNA, 724 bp, Glycine max
tcaccaacttcattatcccattatgcaattttagaagtagtcttattgtattttccattataccataagagttataagacagttaattcaacataatggttccagtttctcaaaccatggttcataatccccaaatcacagtggggagtggccaaccctaaaaatgctatagcaagaagaccgctataccaatggttaaaaatacaaaataatcaacttatactatacaaatataaatgcccaaaaaataaaaatacccaaaatgacatattcataattaataatcaaaccttattgtataaaggtgttgggaggaaaaagaacagaaccatgaagtgtgaagaaagaactaacacacaaaaaaaaaaaaaaaactgtgagctaaggtcctcaatctgaacagagaccaaagcataaaagaacagagatgtataaacaggaacctaaacactgccatagagcagtgagtctgttgaagaacgtcagggttgctgaaaataacaatgatgcagtgattttgttgctggaaacgaaacagagttcacattcattcattcattgaaacaaggtcaaacctccaatatgttttttgtcagaacagaaaccccatatatttctgatgtaaaacaatgacaaatcatgaaaatcccccaaataatggggtttgttaacttagaaaaacagggggaaaagggactaattccctggaccttgatagaacccc

SEQ ID NO: 1381 - DNA, 651 bp, Glycine max
gaaaataattttaaaaaatgagaggatttaattaagtttttaggagactaaaataataacttaactaaaaacagagtatgaaacttcaaataaaaaattacaaaagggatgtttcctcctcagtcttacttccatcgcatccgtttagtttcaaatcatgtttaaattgcatctacttaccactcattttatcctttagtatttgctcacactctctctctctctttttttttttttttttttaagtatcagcattcgatttatttgctcattcatttcaaggacaaatcaaaacttactctattatggaaatcattagaaaaacaataatttgtttaacatattaccaaaacatagaatattgattgaaatagaacttataaaaatttacgagatcgtaatcaaatcaagcatgttttcaattttttcttatagtttgatttatgtattattttttaaatatgactattaaaataaataaatttatcattatgtgatgatatttattcagataacattgtaaaaagtttttatattggttagttcattttaaataattttttttgtttaacattaatttaaataaatattcaccattattttaatcttaaaataaaaataaaaatttgaagggattgaaagcgcacgaaa

SEQ ID NO: 1382 - DNA, 659 bp, Glycine max
cacatgcccttctgaccatgtcattggtatggccttttcagggttccatgaaccaaacataggatcattaccaactactagaaattgttccccataattacaattgcattgtaactgaaatttgacatttattgtctttgattcctctgcacaacacaaattgacattttttagagttttcgtagctatagaataaaaatattcagtagacagatccaataagatggtagaactcacttggtttttcttgagattgaagcaccaaattgtccaagtccacctgcatcatgttacaaaaaactcattaagggcctaaaccaatatatacctatcattcaaacaattaaaacaatgtaaagaaagcaaaaaaaaaacaaaaaaggaccattgttttggatggcacagcatgaagtgggaaaaggcccttgttttgaacaagtttggggaatcccaagttgcagccctttttgtcattctgggacaaggaaaatctgggtgtgttggaaacatcaatagcacatttaggaacatgagttcctagcatgtcaacaatggccttggagcaagaggtgttgagggccatcacttgatgttgatggagtgaagcttggtcacaaagaaacaaccgtttactcctttgtagtataagcttttgttgt

SEQ ID NO: 1383 - DNA, 699 bp, Glycine max
aatatggaatgggtggccacccttcagcactgggagatatttacagttatgggatactattacttgagattttcacaggaaaaagaccaactcatgagatgtttgaaggtgtcagcatgggaattcaccagcttacagccttgtctttaccaaaccatgccatggaaataattgacccattattgctccctaagcgagaatttgatgatagaaatgaacaagtttccacagaggaggaagcaatattgagggagaatgaacctgaagtaatagagggttgcttggtttcagtgttgcaaataggagtgtcatgctcagtaacttcaccacgtgaaagggtgcctatgactgaggtcgtcaacaaacttcatgcaattaaaagctcctatctaatactaaatcagttaaaatagaatgaatagggtgaaaatggaaaaagggaagagggaaaagcatagtgccaagtacgttgtatggacgcaaaaattgtggtacctttaggtgattcgtgtagttaggtatacctttctcgccttttggcaaagataaagtccatgtgttaggtgtttcttcactttttacattattattgtaagaagagattccaaaaatgcgatgcgaatttagtactagtgtgtaacactcattggtgacgcaaaaatcacacccattaatgtaagaaaaacgtgaagctcaaac

SEQ ID NO: 1384 - DNA, 738 bp, Glycine max
gcaatcttgcatgcctgcagtacagaagttgctttctttactgacatctttgaaggtgaattgtttcttttactaatttttaattaacaattactctaaaatactgtaatattatatgttgcttatgttattcactcttggttcaggatcttaaaaagcaggaaaattactttcagtccaatcgtgatactaaacactcagaacttcaagatgatatcagtgaattagagaggaaaataacaaatgactgtgataccgagaaccttcctgatgaactatatcattcttttagtgaattaattgaaaaagtcaatttgatgaaaaaggtaagccagttttaataagtggacttgtttcatactccttttattctcattttgtggcacttgatggttttaaattgttgtttgtggttgaactgcaattactgaaattgtggaacatgtgggctaatgtggttgcaattgcagttgggatatagttgcaaaacactcccaaactgaaatactgctgctgcaattgcatttggaaactgctatttaaaaccatatacttcctttgactagttcttgattggttgcttgtttcattgtttcaactttcaattaccataaacctcatgccttttccctttgtgttaggaacttgctgctaaactgagggaaattgtggtattaagacgacagattgatgacctaccgtgccaatcagaagtcattcagtatgtttgtttctttc

SEQ ID NO: 1385 - DNA, 692 bp, Glycine max
gtatgcctgcagttttcagaaggaaatctcagcctcactctgctgctttctccacctccttgctcttcgacgaaactcagatacaggttccttcatattcagtgtttgtttgaaaagcttagtcaaaatgtatgaccttttcatctgggttgtcttgaaaccactgttattataaactggtgcgtgaaaaatggagtcttgattgaaattattatatgatcaataaaatgagataaatgaactattttactggataggaagtttttttttttttgggggggatggtcttacttaggtgtatcttctgtaggagacaattctgctggatacatggttgagcactaaatgtggatagctctggctaattattcattttctctttaactcatttcacttggtctgtcaaggatgtagaaaaggaaaatccaatgacttttagcatgatgtttgaccttggtatctgctatttggttggaatgtatgtcattgccataagttactgtactttggcaacctacagaagctagcttgagaattttggttggctgaagcatatccctttagttcacactatgttcaactgcgttgaaaatattgacaagccccccacacctaaagccctatctgcatcaaattgtttattttgtaataacaacaaattagagtgtgtgtgtgtgcacgtgcccacatgt

SEQ ID NO: 1386 - DNA, 618 bp, Glycine max
gacatagttatcttcctcagttattgtgcgttctgtgtaggcttggcctttgggcccttctagtaataaaaaaaaaacaataatagagttagtaagatagatttagttgcaatataacaagtcccgtgaactaaaaggaaaaattaatcatcatacattccaattcttgtgaaaagaaaacactcgtattattgtaataaatgtattgatactttattgaaatcaaatcattttaaatattggaacaaacaaaatcattttaaagatttgtttacccattcaatgaaatctaacattattttcaattgcgtattttatttatatttataataaaaaatataataaaaataaagttctttccgagttcatggtcatattttttatttctctcttaaacatttttttctcttctctcagaactatctcactctcacaattcaatctttcaaataaaagcttttgtttcaaaaaaaaaatgatgcacagaccaagatttgttaaaaacagtctcaaaaataaggattgacaacaatatttcattaattagaatatactaatagtataaataattttttacattaacatgcaatcacaaattgatacataacattattgact

SEQ ID NO: 1387 - DNA, 564 bp, Glycine max
ttcttgatgtccgtgcttctacacgttacttgatacagacgtttttgaaagaggccacaatattgtgttattcggaatatagaaataaaattgtgacttgtacgttcaagcttttatgaagttacttaacacttatagcaaaagcttctatttgctctatggaatttgtgttttgtaaagtgtgaacagtttgtaatgttttttataatattatgtagactattttgaagatacggtttaaggatattcaaaaagaaagttggaatagtcattctctatttgtaacttcatttccctctttccatttttcatttgcagcgtatgattatttaacaataacattatggtagctttaagagattggttgagagttgagtaaagtaaaataggatttcacatttgatacattaaatatttggaccctagtcattcaaatttttgaagtggagtaaatgtacatatgatcataggatgggccttaggtccaaaagaaataaaattaagcagtccaaagattaattttattggatagagttaggttattttaatcatatgatattttga

SEQ ID NO: 1388 - DNA, 697 bp, Glycine max
attacagttagaggcttgcagctaataaatatgtcatcaaaagaattgcggtgaataatatatcaatgactaacctcttttggatcagccaacattccaactatggcagtgtctattgcatcttgattctcaagtcttgaagcttgagctgccatcaaaacaacagtatccgcatccactcctttagtaaaaaccttattggtttaaacaaaaataattagaaaatttgcatataagtaaaaagtccaagccttatcacagcaagtaaaaccattaagtatccaacctctataagatttttgtcaacagtaagcttatttagtgttagggtcccagtcttatcactgcaaagcacatccatgcctgccatctcttcaatagctgtcattctctttgtgatagccccctacaaaaatcattattgattaaccattaattcttgttaacatccaccaaaccaaacatacgcaactgaacctaactgacctgctgtgatagcctatgagaaccaatggccatagtcactgagaggacagtgggcatggcaattggaattccaccaataagaagcacaagaaggttatcaattccagggcgatattctcgatcttggatgggatacataacgataatctcaataaccatccccacagcaattgaacaaatgcagaaatttcccaattgcagtcaacaccta

SEQ ID NO: 1389 - DNA, 824 bp, Glycine max
tgcatgcctgcagctgtagattgatatgtcttatttgaagcaaggttaatgtgaacgacaaaagaatagatgtctaaaacctcctcgagattaaataaataaattctcttactaacattgtatggctttgaaataaaatctgaaaagtttgtcataaagaaacaacaccttgcaatggcatgtatggttatggggtcattaactagtgaaattagggctaggagattggttgtggggttgggaaaataatcaaataagtagggtttgaatttaaaaactacgtaaaagaaccttggagaaaaaaactgcaaaacataataacattaagacagaaaaagataaaggcactaaataacatttatatcatcaacttgaatttgctaactcctactttgaaacataattaaaatgtaaagtttgttgatactccaactctagtgaaatcaccaccaacatagacactagttttgcacgaacacgagatgatttaacatcataaatatatatatgccagtctcttccaagtgccatgctttctgatagcagtgtcaccaattgaaggaaagtgacatcaagctaaactgtacatttgtactatcattttaaatttttttttatatctctttatttatttaattgttttttattaatgttttttatatctcataattaatacatctaaaaattaaaaaaaaaatcttataaaaatgaataaataaatttctgaattttttttttataattaagagccaaagaataccagttttccccaatacaccatgcctaaaaaagtaaaagctgaaccacaatgaaagcaccaaatg

SEQ ID NO: 1390 - DNA, 740 bp, Glycine max
gttctcttggaggttgttgctggataggcttcctaccagggccaatcttctcaggcgaaatgttcatatccaggacaccctatgtcctctatgtgggacgcatcaggaggaggctgggcatctgtttttccactgcaagatgacaaggggaatgtggggggaatccatgaattggatccgggctattggtgctctctcagctgatcctgctagtcactttatccaattctgcaatggatttggtgcagggagcaagcacagcagagtgtgtggatggtggatagctttatcccttaccatttggcagcacaggaattctttgattttcaaggggaccccgtttgaccctcatagagtgatggatgaggctttattccttgcctggtcctggttaaaagctagagacaaacatttcaatacccaatttaaccactggtctaccaatctacaggaatcttttggataagttttgttttctttttggtaggggcttgtgtgggcttttgctttgttgggatctgttttgttgggatctgtttttggaaggtggcaccatagatgtactgtattactttcttaagtacctctggtactgactagttatttaataaatctatatttgccttccaaaaaaaaaaaatttagataacctaattatttaatttcatgggtgcagtaataaattgaggttgcctattcagaaactggtgctctgaaaagacaagagaactcatccctga

SEQ ID NO: 1391 - DNA, 682 bp, Glycine max
ctcgcatccctgcagctgcagcttcagcctaaaattctgcaccacatattcataattgtttcagttgattaccatgcaaactaaacacgcaacgcaagtgcatgtttggtttaacttattttgaagaaataaggactcagtttgtttaaacttatttattgaaataagtgtttattttaataaaataagcagttttttatttttttagtgtgtttaactaaactgtttctgcttaaaaaaaataattttatgtttattttaagaagtaaatcttatctgtttcttaaaaaatcgcttataaaaaaagcacttattttaaagttgttatttttaagtttaaacaaagtcacccaataacttattcttactaatagaaatttttgaaaaataagcgactgttatctaaatttaagtattacaaacattcattaaatcagttcaaacattgacaacataatccagaaaaattagcaacaagctcagagaaccttcagtgtctctatgggaacaaaataagaaaggatagaaaatgaaatgagtaagcaatgataattttctcacgtcatacaaatgaggggggtgaataggaagaattgaataaaaacattttacaattacaaatttactcccaacttttttgattgggacaatactttgggaaagacaactttgtaatttaaaa

SEQ ID NO: 1392 - DNA, 638 bp, Glycine max
aagacctccctatttttgcccttcaagatgacagggtggttgaagtagttggggatcccgctggagtgcataaggcattagagttaattgcctcccacctaaggaagtttttagttgatcgcggtgtaattccaatttttgaaatgaatgtaagtgtgatttcatctttaacttgtgaagaacctatcttcataataaggaataagctgataaatgcttgtgggagcccatttgtttcagctttttttcaggagaaatagttttattttgaaaagcgtttgtttaaacttttgaaaataaaatctttatttttactatttggagtagcttctgaacaaaagctataattataactactttttataataaaaagtacttttcataattgttaccaagcaaaatatagcttatattttccataaaatatctaattttttttcttcttttataatacattcttaaaaacacttttcaaaaaaatttaaacaaacaagtcctaaattactatttcttcagatgcaaacagccaatccccaccatgcagagcacatgccaccccaccaatcttggggaccatctcagggtctttctccaaatgttggtgaagatctgtttttggacctctttctaatacatgc

SEQ ID NO: 1393 - DNA, 897 bp, Glycine max
tgcatgcctgcagatcctttacagcactccaataatgcataacccaatttgcctccagtttattatcttaaaaacacagaaaagacagtctataaattaatctgtagtgacagagaaaccataattgatctgccaagaattagaaaacaattaaggaagtgtttattaccccaaaatcaagggtggttaattgggaagagattctaggtgactgactggagtatgattaaggaatgcaagaatgacagtgacagaatatgctgtcaatatttcacaagcatctagctgggggaaatttttacatagtctctcttattctgaatctctgattatcttacaaaacttttctccaattttcagcatcgccattacaatatggacctgacaacccccattccaatatgtctatgctgataattcgcatgggtgtcacctcttattagcaacttttccatttagtactatttaaaaacagaaacacagcacacaacatccatgttagagtagttagtttagtgctttagagctcattaggattctgtttgaattctgttaagcttgttgacagctgtatcaaacaactgggctttcactgcaagcatcctactctcatataaatagtgttcacttctgttaatcaatgtaatgaaaagtattctttcattccagaatattagaacccactttcactctatatatatatctacacttaaaattataacaatattggcagctgggcattattaaaaacaacctttgaattttccataacaatcatattaatcgtattttgaaatttggaatcactaatataatgcatggaccacccaaattaatgttgcagcattaactttccaccttaccaccacaattttaccttaaccccacctgtgaaaa

SEQ ID NO: 1394 - DNA, 661 bp, Glycine max
gagtagtttcttatttagttttgacctcgtgatatgatatggtatttatagtgttttgaaaaaaatatttcagcaatgaaaacaggagaacacgagataaagaataaagagcattgaagtgacattcttatattagatttttctctgaagagtagtgtttgtgttcggctgtttgaagttcacaccaatgtgaaaatgtgcatttagatacattctttgtttaatattaatttttttttacttaaccaagtttctttgtgaaggtatatatgagaagtttgcaaatgctttacgtgatactgttcagaatatgaaagttggggatggtttcagtgaaggtgtggcacaggtagttattggtctttgtttttttttttttttttaaatttatgagtttctgtttttctattgaaccaactgcctatggatattgtctatcttgcatctccgtttttccaacttaatgggggtaatattcattcatatagacttaaggtattttttgataaatatttcctttccaatattcccgttataatatgttgtgtgccattagagtcctctcctaaattgagagaaaatgagtcatggtgtaactgatttcatatccatctctaaacagggtcctctaatcaatgaagctgctgtcaaaaggtttggt

SEQ ID NO: 1395 - DNA, 640 bp, Glycine max
tctcttacaatactccaacactatgcaatatatacactgtctccaagccaacttcttgataaaactccacaggctactgaatggtggaaacagctatatgcataagtacatgacacaaactggagttttcttttcaactaaaataattcacaaaattcattgttgtaataaacaatttaaactagcagaggtcaaagactcaaaataccgatggtaaaactccattaccactactaattttgaaatataaagatccactgcaaatctgcattcaacaattttaaaggactactccctggcataccctaagttatatccttaatctacagttttctaccgtatgtatagaaacctgtagaatacacaccacagttaaataattaatatgggtgtcattactcaataggataagcaattccacctctaaatatctggaacaatgaaaaatagaaaagaacaaaaattatatgaatgtcagagaaagctatgaagcattagtggtttcaaatttcaatctattggtaaaaaaacaagtcctacattgactagaaacagtgcctgaataatgtatgtaagtggcaactgatgagctaacttttagggttgaattaaaggcccaaacccaaattctaaaatagta

SEQ ID NO: 1396 - DNA, 845 bp, Glycine max
  misc_feature (786)..(786): n is a, c, g, or t
tctaatacagaaagaactcatacaaaattgctaatataggataagttattttctatcacatacactcctaataataattgcctccaatccatcaatggatttttcctaacccacttggatctcaaatcccatctgatccacatcatacatcaatctatactaaaagattataaagtgtacaagaaattatcatgatgccaattgcacaattggtcaaatattagatgaaaaaatgagttatcgctggtatgcaaattttcatcagaacctggagattaaactatagaatgaaaattcaatcatacacaaaattttgatcctttagattgataataagacaaatgtgtagcaacagatttaccttctggcatttatgcagagaaatttatgagagtgagatccaatgaacaaataaatgtctgtgcctttaaacacaagtattggggaagcatcaacacaagattccatgtaaactttccaaaagttgttcatgtgacctctgctgcctcttggaacatttgcagaccaagttgtttggtttgtatcaattactgcctgcttccctttatacaacaccttgttgcatcggctaaatgagaatgataatagtgaaggggaataccacgggaaggattcatcaccccatgatgtaacatctatcaaacccctctttaagcgtttagaaggaaaagaatcatgatcattatctttcaaaatcatccttgactcaagaggactagaattttcagcatgattcatagaaatatggttatcttggctggctgngtttatttgcctacaacaatccagccttgtatgcaaagagcatgatccttttttctggg

SEQ ID NO: 1397 - DNA, 884 bp, Glycine max
atgcttcatctaagagcagcattttatgagtcaacgggggacctatcatctgctcttcaagattgtcaggcagctctttgcttagacccgaaccatacaggcacacttgatgtatatcgaaggatacaaaaattgaacttctaatcttaaagtacatgtgcatttgaaagatagaatgtggagatcttggttggacaatggggagttcccaaatgactgagtttttacctcagaaatctgacaacaatcatttaagaacaaaggtcgaatgagatggagaatatgtattgtggaaacaaaaccaagaagcaatactttttggatgattgaagaaaaaggtggatagaagagattaatttatgtgttatattatcaaacagggaggatgattcaggtgtaaagcataagaaatacagaatagtaactccattgatttgatatgtattctcgtgagccatatttatggaatttgtctcacattatttaaacaacctcttgtacagttacaaggttataaagagattcataccacttgtttcctacaatttatatttcattttcctgacttttttgacaaataaggaagaaagcacaaataatcactttttccttctttgaaagtagtggaccttgcaactagaaaatcacatgtccgttttggaaagaacatgacacaccagtgggtgaatggtgacttaatatccactgaaacctcttattgttggtgctggcttgtccataaatttgaccttatccttagtattaaaaaatcctaggaaaggagagatttttagaaaaaaacctttgttttttgtttttaaaaaatggatgttttttttaaaaaaacaataaaatttttcctgcgctccctagaaaaaattttt

SEQ ID NO: 1398 - DNA, 738 bp, Glycine max
aagaaaacataaagtatatcggtttgagcatcacttttttgtagaatgcccacaataacagtaaattcagatcaaagtaaaaggctgcacaagactcatcagccagagcaaattctgatttgaattcaacttttacatgaggagtcagagccaatgcccgtttatagactgagttgcatacagttacagcacctatgactactttattgtttaaaattttagtctcctctagctcaacctaaataatatcctcaatataaagatgacattgacagtaaatacaaaaagagaccaaacagaaaagtcaagattgcatacgtgatatactctaaaaaggttgacaacggttctgtggcttggcatagcatgttcttgtaatcatcaaccagcttaagagtacacttctccacaatcgtggtggtatgcaacggagaaggctctgcaataggtaacttactcatcagccatcagcatagaccaataatcttaattagatcttgtcaacgagtaaacaccattgtactaattgtactaatacaaaagcaacagaaattcttgtaaaccttcaatcaaattcaattcaacagacagagttaaacaaaacccagactaacaaacaacagttcactttcaataatagttaacattcagacagatataacatggaaataaacaagataacacaccacttttttctttgtttcccacaagtatcatcctttggaagagacaatccta

SEQ ID NO: 1399 - DNA, 794 bp, Glycine max
  misc_feature (685)..(685): n is a, c, g, or t
tgatgaagatgaagccatccatgacccatcaattgataaactatgactttctgtttgtgtctcgtttctctcattttcttctatttgaaagtaatattgtcgcattgcctctaacttcatttcatccattatctcagatggatctgaaataaattctggaatcatagttcttccttctagtatactaagcaccgatgacatggtgggcctaaggtttgaagtggcattggtgcataggagagccactttgatcatcatcattacctcattttcattgaaatttgaacctaaccttctatcaactagctccattaggttacctttctctttcaataaatgtgcctgttgaacaaaatatagaaatcggtttgatttgagagtacttcacaattgaaaaatacttatagttgatcgagcaggaagtatgtcaaagtgtaagttcctaattaatttgaagattctttagagtaggaagacattttctatatttgtgtttacaaaagtctataattttgaaaaagaacggaagactgtggttaggttaatttcttcatgttagtagatattatgaaaatcatgttatgtttgaataacatattgctttatttaaatttctaaagtgatcctagatgatacaacattcacagcgcaagttgagcatatcatattttttttttccacatanacagagaaaataagttaccccatctagaagatgcaatgcttcttgcttgggtcggtggaatggtatttgctctttccagatacattttccaaggcaccacttccaaact

SEQ ID NO: 1400 - DNA, 670 bp, Glycine max
ataaaagaatgtatatatctactcaatgctcacaattcaccaatgtgaattaactcaaaatgaaaaggtaaagatatattaatcataattttcattgactttatgaattattttaattcacattccccaatttgtatttgttgagtttcttaattatttaactttttaataagtttaaatatcatatatattaatatacctatatgtaatattgccaataacaatgcaaacataaatgtgagagggacatactttttttcaccctcgtgcttatacttgggagaagaggtaatataatgaatttcaaaccatgatgggggataagatgaactggaaatcacaatcaattttggaacaaaatatgtttcattgtccaacatcaggcaaatattctttgcctcgatctcgaaccattttgttgggtcaaattgaaacttaatttgggttggtttcttttatatttccttgaaaggtgggttcccaccttggaatcctacagcttattttactatttttagccaccaaaattaaaagccatgcatgccgtgtttaagtagggtattcccaaaatcattaaaaagggccctttttggtcaattccagaaaatgttatggcccgatatatttaatttttttaagaataatttcaatatatatatatatatattat

SEQ ID NO: 1401 - DNA, 669 bp, Glycine max
aaactcttaaaattgtcaaagatggtcaggagtgctctccgcaattagaaagtttgttttatagattacagagtgaagctaatggacatgaaaatgttgtgcacaacggattttctagtgagtcaaatggccgtgatacaactgaggggtgccagcgtgtgttccgcgatatcttagcctctgaaaagttcagttcattatgtaaagtgctacttgaaaatttccaaggaacgaaacctgaaactgtatttgactttagtttgataaactcaaggatgaaggggcaagcttatgaacaatcgcctacacttttcctatctgatgttcaacaggtaatttataataatagcctctttactgtcaatttttacccggctatatgattttacttgagaaaatttgaaaaatttaaataactgaatatgtggtttaccttagtgtcatgatgatggtgtgcttgttttggcttgctcttttttttttttggtgaaaacttaatcaacaatcatgaatatcttttgcatccaattatctattatcttcctcaaagagatcctttcattgggaactaagcagggttattttttaatcataaagccacaggaaaacaaatgatatatcgatttaaataatccatttttaaggcaaaaccccttgttaatgcagaaa

SEQ ID NO: 1402 - DNA, 847 bp, Glycine max
caactcgtatgcctgcagttttaccccatggttctagaatgggatgggcggatggcaggggagggtttgtttttcattgcaactggaattctacccttcaaagcatatattttggtgggctcattgccacatgactgctctacatcaaacaacagattaatgcacaaaagataggaaaaggaaaaaggagtgtgctagacatcatcatgtggctgatcatgttggtattgatcctcgttggggttgtgctcgaaggatttggatatggctgaatgtgctagtcttggtactcaccgcacattaagcttttttatctttttgggtacttaaatttgttgctttcacaatacaccttaaatgtcaggcctgtgttgtatgatttggaaaggtttcttgaagaggatgcagttccttgtgtaatttgcaactaaaacaactctagtgatgatattcagaatgaaatagttccttatttgaaaaaaatgagttatgcaactcccattagagtttctctaacatatcctagatctcacctatgattattgcacttacaagtagggaattttggtaacatgaagaagcaaaaagcaatcaatggtagcatgcaatagtgctcaaactcgaagtccaaacaatggcacatgggacatgtgagagaaggtgacagaaaaggatgatgagcttaagatcacaagcaaggaccaaaaagtatttgtacatcagcaaccatagaatgcagaatcaatttacacaaccactggggatgtgacctctttgaaatataaggatacctattcttttaactaatgttatccaggttaagtaaaatcacggtaacattctccct

SEQ ID NO: 1403 - DNA, 792 bp, Glycine max
tctctatacaatactctaataccgaggaaggaggggtgggtttgctctattctcatggcatgtgaatatttctgccatgcaagcagtccataaacactttaccattttcagaagtggccaccttatgcaatcacaaattgccacacctcggcaactcaatgccactaccattgactggcagagggaggcaccttttgcccacatcaccataatccaccaccgtctgccataattgatagttgaccaggactaccaacagcccctggtcaccagaatcccaccaacctctgcttcatcagaagttgacagctgatgacagatcactggaatccagccactccccacctcttctagcagtcagagtcagccctcagaatgtttttgtcaaccaaacattgcaatcattattcccagtaatatcattcccaagatccccaggaatatttttaaaatctgaacaaaattgtgcatcaattatggatataactcacctggcttgttcgaaatgttactttcttgtcaataggttcacacatgacatttggttcaaacttaatttcctacaaaaacaaaaaagctcggtcaatttactaattgcatccctcaaagtctaagatcagaaaaagaatagtaagtatggaaacgatacagggctcatatggcacagaaggaaaattaaaaaaaaaaaaaaaagataagacccaccccagtataaaggtttggctatatatatgaaaaaaaactcaaatgcccctattaaaataatctgaaattaaattaaaaaagtttaac

SEQ ID NO: 1404 - DNA, 612 bp, Glycine max
ctagtggtgacaatattcctgaaaggggtggcaacaatggtgggaggtcgggtaatccaggaatgggaggaagaagaccaccaggtgtttttggattttgaagtggaggaggaaatgatggatctatttttggaggaaatatgtgtttcacataatcagggcccttgatgttttgaatgcttggtttttcgttgcaaagaactggctgtctaagaggcttgaatgagaaaaagccggctgagaatatgtgtagtccttcctttctggacttgaggcacagtgatgaagaagttgctgctgaggcaacagcacaataaggctcactgctatttattagtttcacagtgcatccttttattcttttcacatgtttgctcactgagaaaggcaactgcaccttgaactccccatgctcatctgtcttcacttctttcctaaaccttggctttgacctcccatacccatctttgcattctacagcaactgatgcacctgccatcatgaatatagaaaaacataagacaacatgacttcataatcaaaatttagagcatgtgtgtaagagttaagagatatgaaactgaacctttttaagaaaaataagtcaagcag

SEQ ID NO: 1405 - DNA, 862 bp, Glycine max
  misc_feature (670)..(670): n is a, c, g, or t
  misc_feature (678)..(678): n is a, c, g, or t
atgaacaaagatacaacaacacagtgtagtggtgctgacccagtttgacaccctctgagattgctgagtcatataaggataatgctcccataacgtcacctcttttagaacacatatccaaagcattcttcaacttcacttcaggacaatccttatccttattcttcttcttctttttcttcttcttcactctctcactaacctcggaactgctgctagtgctactaatgccagcttttggttcgaatgaagcaggaggggctctcttggtcacgatttcaagtgaagaagaatatttagttgcagtttgtgttctttggatgaagctgaaagtgatgatgttggttgaagggcgaggatgatagacacgacaaagctttggtttagagaaaaacagagagtgacgaagttgaagttgcagagtgttgaagtcgagggtaaaggtaaagggggccatcaatcaccgtatcatgtgctgccgctaattctctactcttagatagatatgctttttgttttgttttatttctgtattttcttttccactgcccccggacctggattattatgcgcatgtaacaaattaatttcgcactggcagtggtaatctatgaaacacagacatttcgatcccttatcgtctggtcaatctgacatttatactacgttntatatttntttgacattacatcatttttaatatatagatcatcttttgaattatatgcttaattttcctattttttcatttttccttttggctttaactgtgctctctcataaacttttgagtagatgaagagaagtataggaaggagacaccttatgaaatacatttcaaaaaattcctattctatttttt

SEQ ID NO: 1406 - DNA, 626 bp, Glycine max
gtctgcctgcagccagctaggtatcaactttgttattgatcacttttcataattgtgggcatattctgaattttaaaaagtcaatctcctcaaattttcttaatcagatgaggcatttttttcttttatgaagccaacaacatatttgttgttccctacacctaaggttgtcaagaggcaggtgtgtagacagcaggttgaatggatcttctgtttgcacgtaagagttgaaaattttatggagtcctgttcgatcaaagttctggaatttgagtatgcctacaaaatccctctccaattctatgccagtcgaacttccactgctctgagatatggataagcaatatgctttcttatatcatagtatttgttattctgacacaatgcttttcgatgctctttcatttttctttttaatggcttggtgttggtataccccctacaataaaatgcaacttggggtgcaaattagcttatatatttgtaaattattcggttcagcttgtttaactaaataaataaagttaaacttttttttaaggataaagtaaacttatagtcacgcttgtttatttaaataaatcatgctcaattagtacttgacattattaagtcgtgcctaaagt

SEQ ID NO: 1407 - DNA, 702 bp, Glycine max
atatcagcagaaaagacaagactttccctgtcactgacaaaatttttagagattgccaccatttgcttgatctcttatgtcggatgcaagatagaaatgcgagatcattttcacatcttctgacttgtattttcaaccttgaacggtacactcatctctctgttggatactactttatggttttttgtctgtttgcagataacaaaaagaacttatattatagagaagagaaacatttcaactaatgctggcgtagggtattcataaaagacacaaactaaagggaaacagagtgtcaaagagctcaaaagtgtaaaaatgccagaaaagaaatggaagattttatttcttgattgaaaatgaacaataccaggaaaaaaatctatcctcgaaatggttttccccttttataacttagtacttgttctattccccattgctaacaattcagaatgtgttttgcccctcacatccttctatttatttttctaaataaccctttataactagctaacttactaactactctagctattccaaaaaaatattaccttcccttctgtcccaattccaaacacaaccctatgccttaataattggcatacatgcggtcttgagagtcttttcactttgatctggtgcttatattctaatagcacttcaaaactagacttggtcctgtttccaataattttaattttg

SEQ ID NO: 1408 - DNA, 605 bp, Glycine max
ctgagctgaacccactgtattgtactcactctttgtagtctagaatttattaataataaataataataactattactattgtcgtttaactacttataattaattatgttttcgaacaatcacgaatatatgatggtttctttttaaagagtttaattgttattacatttctagtttattttgtcaactaattaaaaattattcttgatgattttcaaaataattatacaaaaatgaacattatcagatattataatttacgattgtgtaaaatacctttacactataaatgcattttaattatttgttttaaattcatgtttttaattagctattgcctcagcaactgtattgcaagttacacgtggttaaaaatcaatttcataattgcttttttatttattatgatattagtacgacatagttactgtcagaagaagtggtaactaatctttggtttacaaaggatgtttataatgtgtgataaatatttgtgtggggctttttcattaattggattacaaagatgtttatattgtgatacatatttctctaaggcttttttactttttaagtgttactatttaatgtttcatcctatttat

SEQ ID NO: 1409 - DNA, 578 bp, Glycine max
aaagggcaaaacatattgttgatctgcatgttccttttacgcagattctcttttgtgggcaatctgcccctgcataatctccaagcgaataccgcaattttgctaggtatctttgtcttccatagttccatactccaatgtggcctgtttaatggatctaagatttttgataccatctttgaatgtggctttgggcttaactcaatcaaaagctagcttatagggtgaggattgccccccatttatatgccttatcttgaccttgagatgatgtgagacttgggtttttcctttttttattttattgtgttgatgcgcttcttgaatatttcacattacaaaagattaggaaactgatggtggcagtgcaacaaaagattagggaaccaacccaattgtgacagttttgtcaaacaaatgccaagaaaatttgggccaaaacaagatcattcccaaatcaataatgaagcaaatcaccaaacacttggtgcacaaagatatgcaatctgatgtgatgaggcactaaccagccgtcaggattgagaaccgatgaagaacatgaacatgtccccgagaac

SEQ ID NO: 1410 - DNA, 819 bp, Glycine max
gacttgcatgcctgcagttatggtaagagtggtcacagtgcatccttcccttccagagtcactgtgatccaattcgactgaagtgaacggtggatttgaactctgtaaatttcaggcatcaataaacatttaaatgcaaagggatggacaatccatgaaaataacaagagaaaagggatttatattgggaaatttgagtatgtatgattgaaaaatgaaatccacagaatggaatcacttgttatctctgtcaataacttggacatactttatagaaaactgagtataattacaggaaaattaggatcagtttcgttagaagaaacattttctatttctatttcttgttttcactaaaaatcacaaaaatgttatattattttcaattatcaaatatttatacaagaaatggtgaatacaacaaaatcacatgataaatgccaaatgaattcctacactagtcataaaaaagacaggatcgagaaatagaaccgatgcagatacaaagaatttcatctcaccttatatcttgtattaattcgaaaatgaagagcagacaaaaatattcttttcatcaagacctggcgcaagtctctgtatgtttgaaccttattcactggaatctgcaaaagatataaaaaacataattaatagaggaaacataaatttaataatatctaaaagcatatcaataaaactctaaataggagatacgtaaagaaaaaagtatggaagaagaaaatgaggatcattatagaaaatgtattatatctaaaagatatcaataaacactagtgccaaccacaaaagtagcatagc

SEQ ID NO: 1411 - DNA, 610 bp, Glycine max
tggatgggcacattgtgtttctgtgacgggtaaggtttatttacttatcttgccttgcaacgaaggaacataatgtgattgaaaggggaagggataaagtctaattgaattggtagtattgtcctgctggataaattatccaaatacttgcaaaatttcacaattaattaatccaaaatggattctggagattgtatgtccatcatgttttcttacttctgccatcctacatacctgtgttgttgttcctatgcagattgtggagaagtttacacatggggatggagggaatgtgtaccctctgggaaggtgtttggtgaatcattaactggggtaagccctgaaaaggatgtacccagaaggcaaagttcattcttgacggagcaaggtatgtttgacctctttgtaatgaccatttgtctacagctacctctccctcccaggaggtgatctaaggtagccaaagtgtactaaaaggagcaagaggggaactgttatgatattggatagggtgtttgagaacctaaaaggaaaaagaagagtttttcccctttatgatgaatgataaaaaaaagatacttagcctttatctatctaactgatgtggagg

SEQ ID NO: 1412 - DNA, 1273 bp, Glycine max
aaagttggctgacacctgttacaaaccattttgttttcttgctgtggaacattttatcatttattgaaatacaagatgtcataaattccgtttccttgtatagaggatcagcgttgcatcaaccaccttgtactacattatttccttttagcctttgcttattgggctcatgaatccaggaaagatgaagagagagttaaagagctgtttgaagccattgaaaagttacgaactcaatttgagtctatagagagaccaattcttgaaatagagacccctgcaaaggctgaaacaccaccttttgagaaaaagtctgatgctactccttcagtttctgctccaactcaaggtgccgagctttcaaagccagaaacggatgagcaaccaaaatcaccttcagttaagacagaccagatattggatcatgaagcggaattagctaagctggaatctgagtttgggaaggttagtaaggattattcagcagaggaaattggtgattgggaatttgatgagcttgaaagagaattaagcaagtagttaggttatttatgagtaattaatgcttgctgttgcatttttatgatgaagtgcaagtaccataaatttgtaagccataggtcggctgttaatgaagcttcaatctggatcggattcctttgaatttgtaaacattacatagcataatttctttattcttctgtaaattaacgggtttgcaacttgcagcccagtcaacaaaagatttgaaatgatcagtatggttagaattttgaacttcggatgatattggtgcgcatagatggaaacgtaagcccactgatggctcgtgtcatctgtatttatttatggtatgtttggagtggagtgaaaatagaaagggaaaaaaataagaaaaataaatacagatagagaaaatgtgttgtttagatatatataaattaaaaataaatgttggaggaattttttctcacttgtttagatgatgtttttttttttggtgaaaatttaaatgaataaaccaggggaaaaaaaaatgaatggttaaaaaaaattaacttaaaaaggcttaaccctttttacaacaaatttttgtcccatctttttaaaaaaagttttttttttaaaagttaaaacaacacattgttaaaaaaaattttacacccttgcttttttgctctaaacttcccccaaaattttttatttttttcttatgtggccaaaaaaaaagttttatttctcttttcgataccccacaaagtgtttgggtttc

SEQ ID NO: 1413 - DNA, 693 bp, Glycine max
tgcctgcagtcaagattgtgcgttatggaagatcacgaaagccagagaaaagtcagaatcctgtgcctccatggattcaggaccagtggtgaaatcctcaagcaattagtcttaagatggcctgaacctgtcttgcaaaagctggagcttgtgttcctcgatggcccgtttcctgcacagggaagatctgatgttgaaggcatttttgaccctccttattttgaatggttccaagccaatgaggttgtattgtaaggacaattactcaatgttaatcataatcatatggtgctaattaacttttatttatttgtgtgcaggagttcactgagtataccaactttgaagaatgtttagcatacattgaagattacatgctaaaaaatggtccttttgatggtttccttagcttctctcaggtgcgggctgtgcggttatgatattttcttaatgaagtttttgtatgttcagtttttccaattttgacaaatcaggaatgttaattgtcttgtctcttagggagcaattttagcggctgcattgccaggaatgcaagcgcaggtactaaaacagaaactcatcttattttgctgtttaaactttccctttatagatagcaagttgaccttttttagattttagttagaaaaactcaaaagtacttttacccttaatgtaaaaaatcattcctcc

SEQ ID NO: 1414 - DNA, 672 bp, Glycine max
gatggtgcactcaaaagctgaatatcaaatcagaacatgttaggtaacattatggtgactagttcatatacttacagttacaactgtcagctgaaaaaagaagtgcaacgggaaagggattaatatatatatatatatatacctcttggtttatgtcaattccaatctcatcaagaacctggttcactaggtcttctgtttcttcttcttcctcatccccttccaaagcatcatctattgcatctcccatcacctctgtaatcaattccatcctctcattctgtgtctcaaattcttgtaagattttctgcaatgatggcaagttcatctgcctattcatatgtcccattgccttagtcacacctttcattgcctcccccattgcttgtgttgatttcaaagtctggacaattgtgataaattagaaaccagcttttagcatgcatatattcagtaaaggcaattgttttgatcaagtttttgtagcaattcaatgacagctgccaatcagttcccaaggaaaatgataactagaatcatataattgatcatatgctactacaaaccaacagatcagttacatcatcatgcacatacttgaattctgagggatacaccctggagctgtgatttgagcttataaaacttttcaatctgatgctttgttctaac

SEQ ID NO: 1415 - DNA, 658 bp, Glycine max
ttcttttgttccctcctataattcaattatttcattacattcttcagaaaaaaattaaaatttctattttcattttcattttctgtttttattttctattcaatccaatcaaacacattttcatcaccattttctattttcagaaaaataaaaacagaaaacaaacacctcttaaattttccgccttttgcttgttttactgatgtcattaaagtttgcatctaattttttaatatttccttcggcataatatcaagtttgctctacttacccatcaattttaatcacgtgtaagtgcaaactatttttgacatcatgaaaataacacattgaggagtttgtgttgtaatttttgtagctatcacaatccaaaatttattatatatggcattttatgcaaatgatgaacacctttacatagccttcagtgtgtacacttttaggttgacatgatgatattcaatttaatgtttataagctgatgcactctcagttgatatcattgtacgtgattgtaaataagctgtgattttcagaacttttgcgggaaaataagagaatgctggacaaatcaattagagaaatagatcgagagagacaaggtttgcagtcacaggagaagaaactgatattggagataaaagaaaagtgccaaaca

SEQ ID NO: 1416 - DNA, 896 bp, Glycine max
aatcaatcaagtctttgttctgtgaaactgatgagacagttagagtagcatattcagatctgatgacttcatccaaagagactttagattctatattggaactgcaagaggtgcgatttttgcctggaaacttaaataaaaaataagagaatgagaattttttttcaagtctgtttcatatccatgctttagtggacaaggtgtgtttgtgctgaatgtttcatttctatatttcaccaactcttgttatatgaagttttatattttttatacatacatatatgtgtgtgtgtgtgcgcgcgcatgtgtatatgagaagggatcaagtcactctaatgggagtaacttgatccctcctttatatctatctatctatctatataaataatatatctgaccactgatttcatagtcactgatctttttccttgttccaggctctctttgctaagaatccatcaattacccaagccatagttggtaaactggtttctctattggtcttatttttctttctagtttcttccatgatttatcttgtgcttgattgataccttgtttactttgatgcttgttgacatatctttggagttgctattgagggttgtgtaataacacatttctcgtaagaaaatgaaaattaaccttttagttgctttaggaatatggattttttccagggatatttggttttttctttcctttttggaggacccgtatggggccgggcttcctttcttttaaatataaggtgggggcctgaacataaaaactacccctgggaaaatagacttgttttgttccccccctttattttatacccacccaatgggggaaccttgcgaaaaaaagacaaccttaaccttccaattcaaagcaatatacaggttctcttt

SEQ ID NO: 1417 - DNA, 659 bp, Glycine max
aatcttgttttttgcttccttcacttcttctgcatgccttgaattttgatcttcaatacaactcctcagtttgctggacatattaagcaagttttcaaccacttaaaacaagattatgaagacaacagagaaaaaagaaagatatggatagagatgaaaacaataaactaacagcaaaatacacgataaaacttttctaattggacttgaaatacttactcagtaattaaagcttcatcacaaagaaaattcagcagtgtgagctttttagataaatccaaattgtaatatccaccaacgccttcttgaagccaatccaaaggaaaatcttttaatatatgatcagatccagcaattaaatcctccaatggtttcaaccatgaattatttccattgctagtagttaaggatggagacctaaacccaccaaagtcatccatatgacaaccttaatccaagattccaagtatatcatagaaaaattatttcccccaaaactatacactaacaaataaataaaagctataagggataactcactcatttcctgaatcagttagtatcaaggtcaacactctaatttgaaactgaaccactaaagtgttttgtcctcgacgcaaattttgtttacgcactaattctcgtaagatggcttcagg

SEQ ID NO: 1418 - DNA, 687 bp, Glycine max
ttcgcaaatatacaaggcttgagtcttcacacaaccggttaatctcactcaaacgagtgtgtcacattctactgagagtgacaactcgaattcatactcagacaccaatgttgtgtatacaaatcagtattcctcagattcacaaggttctagtggtcataataaccgtgggggaggcggttacggtggaggacatggtagtggtcgtggtggtcggagctcagttcaatgtcaagtgtgtttcaagtataatcacacagctctgacctattacaacaggttcaatcctcagtatcaagttgcaaatagtgataacaacaacaattatggaaataatactaatcataatcaaaacaacaactggaacaacaggagtagcaatcaaaattggggtcagaatcagaatcaaaacagcaactggaacaattcctcctccaattggagttcgcagcagagtcaaaatcagaaacataattctcagagttctaattcaaggcctccacaagctatggtggcaaattctgattccaatgcttcttcatcatggtttccagattcaggagcctcttttcatgtaaccaataactcacagaatatccagcaaacctctccctttgagggtgcagatcagatcttcattggtaatggaaaaggtctgaatatctcagcctctggtcactccaagtt

SEQ ID NO: 1419 - DNA, 688 bp, Glycine max
tgtatgcctgcagaaggtccaaataggtatcccatttgtttccaatgacctaaatcggagaaaacgaaacaaaatgatcattaattaaccaaaaccctaaaccataatcccacataaaggcccaaacttttttgtttttaatttacgaaatagagtgaaaagaggaagaaacagagtgtttgggaagcgaatagacctttccgcaggtgaaacaacgaacggggatgatcatcttcctttctctcagcgtgctcttctgtgccaagtgctcaaaacccacctaaacccttcttcaccatatttatattggtttttaacatgtaagaaaggaaataaaagattatataaaaaggggggaaaaaaaaaataaagataaagattttaggtggatatttcacttagaaaaaaatcaattgattatttatctgctgaataaggctcttcttgacggaaaagtttaccttttcatttttctttgcaaaaactcggtaatatttcattacaggtgtgtttcattcgtaaaaaataaataaaataaaacactgaacaatataaaaatatttatgtaatatttgatttaaaaaatgactcaaaaacaatacaaaataaagaatgatggaatgaacaaatatcaaaaaatttgtaacttcctaaatggtataactttttgtctagtatccaacaaaag

SEQ ID NO: 1420 - DNA, 964 bp, Glycine max
accttcacgaagaaacttgaaaccacaacgcgtatccgatcatgcaaccaaccagttgcccacaactctctcattccagcatccaccaaagggtaccctgttctgccttgtctccaagccttaaagtacccttcattcaccacccaagggaaaaacttaaggtgggctagaaggggcctctcatgactataagggtggttgaaactaatgtatctcgaatactctctgaggccaatagacttgagaaacaagttcacactctcttcaccagccttgtttccttcattggcccaaaacacttgcttgatgcggacaaggtggaaaactttcttcacactcacctcaccaaagtgcaaatgtggtgagagaaatgaggttgtggcactgtctgccttcctgcgattcttcgagtattcgatcaaagcaccgtttacgaatgctgtcaatgccttgtctgcattgctccaccccggtgaccatgctcgagcaagaagcgcattgcttgccttctccaattcgtcttcaaacaccaatgtatcagaaggacaccttgatacatcacctgaaagaacgcaaaaattgttaacacatagtgcaaattaaagtcaagagtgatgcttcattaaaagtgacaatgctacaaagaaaaaaaaaacatgtaccaaatattgaaaaacacatgacagacttttattggataaaattaaacactattgaaggggcattactttggtccttgaaagtgttgttattggattcggtctttcaataaatttttacattaaaaaagggccattaatccttgtaaaccttaccgggaaaattagtcccttaaaataaaaccacccgtccatggcattaattttttaattgaaccaaaaaaactttttaaaatcccaattttgggctggactgtgcaaacataaaaaagggggaatattttttttaaaaatttccccccaaa

SEQ ID NO: 1421 - DNA, 965 bp, Glycine max
gccgttatgcctgcagtgggcccaccagagctagatgagtcacagcccaaaccaacagaagaacctctccttgtggatgagttccagtgaggcccaggtgaaccacgttgcttaaacgggccttgacttcgaaccttggcctttgcagactgggttggggccatgtagctagggacaccagcactgtggtggcgctggtggtacctattagaaattgggcttgtgtcaaaagattctccattaatgaagcccatattagcatgagttgagtccagagttgcacccatgtccatttcaactgtcttttcttcagacatgtcatcagtggtggaagtagcagtagcaagagtcctataaagggtctcacgtggtcttaagttgggtgattgtgatgacatccaacgttccaaccagttccaatccaattgggctctttcacgctcagtgctatagcttcctatatcatcaccatttgggtctatgtgcatgtgttgcttcagctgctgctgcacaccaaatgatcaacaatgaagaaaatggatataggataatgaaataatatggaactattattccaacgcatgcatctggagatattattatgtgatccaaacaccatcgtgctctcaactaatgattttttttttctcgcaaattattgaaaaacttacgagtggataaaacaattacaatttaattcctgaatgaaaaaacaaaaaatctaatttagtttggtgattaaagtttcatgaatcatttttttaaaggtaaaaaattaatttgatattaaattgaaaaatttaatagggaaatttgtttttaaatatttatataccagaacgtccttttttctaaccatttaagaactaatttatttgggggatgtgggtttcctgaagaagggacaaaaaaaacctggcattgaaagcatacaaaacctctccttttatataaataagtgtcct

SEQ ID NO: 1422 - DNA, 644 bp, Glycine max
cgttgtcgttaatgcaaatggagggatatatatagttagttcgagagagagagagagaagtaaaaggatatgagagttataataattataaagaggtgagcagagagagagggacccagtggatgtgttataggagagagaaaaattaatcaagtctgggagactgaatcatgcagtcagggagtgagtgtgggtgtagggtataacttagaagcaatagtgttgggtttctatgtgtggcactgtttgtgactttatgcaagatttggcattgcgtagtttcgatatatagcaatatgtgaggtggaattggagcgagaagagaaaagaaaagaaaagaaagagagagggtagttttggttttgattttggttttgtttgagtcattgggtaatgggtagtcaaaagagcccacgtgaccagcgggaacagtcttccatggatctgccttttccgatcacgaggttttagtgtctcaaacccaatatccgtatctctgcctctctgcctctgccactggcagtgtcaccctcccaaggaaaatggaatagttttccactccctcttactctcacgctcctttttcttccctcctcaaccacgctctaattccaatattactaaccatacactactctatactg

SEQ ID NO: 1423 - DNA, 702 bp, Glycine max
aaataacttgaaatgctcttggcttttccatagatcctaacactcaccaactatttgttctgtttcattttcataattaattaatcgtgtcagtctccaataattcggtatatttaattttctttataattaattagttgtcctttaaaaaaaattaattagttgtgaatttagttggctcaccccattgtcaaacctcaactgtctcacctgtcaacttctttaggatttgtgaatacgagtgttcttttcatcaatttttttttaaaaaaaaacagtgttctcttcgtcacttatttatttaatcttaatatatttttttaaaatattctttgaaattaattaaaaaaaaagactcttcttatccaaaataaatgtttcataaacattttttttctttgttccatttaattatctttcataattttttagatcattatgtttttttaagaacagatgatcattatgttattagtacaaaatgtttataggtttacttacttttctctctcaattattttttctcctattcaaagcttgattcgaggttttatttacgagatccaaacatagttaattggaccaacaatttgttgaaatttttacaagttaaaatgagttataggctttctttaaaagaacccaatatgatttttttttttctcaatcatttttttccctatatttggtgaatcttttcat

SEQ ID NO: 1424 - DNA, 673 bp, Glycine max
atctctccgggctctacctgatgctgaggcctgaattttcccataatttaaaaatgattataagacataaattaataatggtcacaggaaaaatgacagagagccatagtacaattccccttgcagagcttaccacaactaaaggaggaatttacttgattgaaaaaacagtagaaattcaaaccaatttcagatactgttaaatcaaattagacatgaaatttatctcagttaatgacaccttaaactcgtgcagtcattacttgtctatggatagagagggggagaaaatttgtatacatgactagaggcatacaaatgaaacctattttcgtggtggaaacaaaaatttacattggccttcctaaattgtgaggcaagaaattaccctgcataaaatttaatatctagaaagaagtaactgcaaaataatgatgctacttgacttcaaaacaatcttctaattattaaatataagaagcaacatatgccagcaactgaaattataagagataaaacatatcaggggcaatttgaaatgataaatagatgctaaaaattttatcaaaccagaacaaataaatttgacagacaaaaaatgtttattgcagtattgtacccagataaatttatagtacatgcatatttgattttcatttattttgggagaaac

SEQ ID NO: 1425 - DNA, 640 bp, Glycine max
aataaatgtcatggactatgatatacctgagcttgttgtttttattcaagaggaacatcagcaatttgtcaaggatacttgcattggtaagggagtgtcaccagaaggcaagtgtatgtcagaagattgtgcagtaaatcatgatccaatgtcatgtcactttgagaatgacttgaacccccgaagagattcaaatctaagaactatggaagcaatgtcaatcaattcaaatgggccagagtttgaatctaaacctcttacccttaaggatgccatggaattttatgattcaagaggtttagtgatggatggtgaagaggattcaggatacaatatttcaattgaccacctcacaaagaagacaataccagagaccattagagaggtgagacactttaatctcatccttgtgcattttacgtctttggacgaggagttaattgttttttagaatattgccactaagacattaatacttatattctaagcaatataaaatatactgtggactcgtcttctcttttagcatggttggtgaaaccccctacatcaatgtacatcttctcttttgtttcatatgcttgattgtatgattgataaaagattgaaacaagacttaataatcatatagggagttacc

SEQ ID NO: 1426 - DNA, 728 bp, Glycine max
gctgcctgcagaagcctccattggcctggtctgctagctacaaataatagtcacaatcaaattcaaacaatgaacgttttcaagattgtatttcaaaattggtcccccttttttttctattggccaggaagggttgaacataaaatggtttaagagatgaagatataaatttggcttagtggttggaaaagagtgaagggagaaggaagggaggagatatcacggattcaaaacccctaactgataattctaacaaaactaacaaactaatatttgttgataaaaaaaaaaggtttagagatataataatatagtgaggtgtacaaattattcacctgtgagattagcataaagacttggtggactaataaccactatgtggacgaatcatgggtgcttctaggagtaagaagggtgtgggacatgcttgaggaaagcttctccctaactttaccttcacgctcaccatcatgcaactatgaccttttgtcaataatgttgtccatttgttaatttaaattttgtctcagcttgcggtgccctattgtccataccaagttaaatatgatgacagttcaaaacacactgcatggtttgttcatgcaattatctaccgccacctttaattcccaacatgcatgccaacacctccggctttgaaattttcaattgagtttggattgattaccatcattagaaattccattttatgtgtaacctcatctttt

SEQ ID NO: 1427 - DNA, 693 bp, Glycine max
cgctgcagcagctggaaaccaataaccatataccatacttggtaagagaataagtgcgaggtggaaatctagaaaaccaatgggtgttactttgagttttcatcatttcatggaaactcattattcaaaaatagaatcatcgttaatgtgggttggttgacttggttcaattggtagccttaactaaatggtttccaagtacaaaaccctggcagaggcctgtggcatgcattgagcttgcttggaatggagtaacctctcctcccccaaacttctctcacaaaaaaattaaagaaattagaatcttcaggagttctaggacaacccttccatcatgctaaaaaactattttttgaagtattgttcaaaatagtataccaaataccccatgaagctactcaggacagttgtaaaagtaatctaattaacatgttggaatgcagataaagtcagagaggtgctgaagcttgatctggagatgaaggatctagcaaagcagttgattgctgagcagtctcttcttgtctttgggagaggatacaactatgcaacttgctcttgagggagctttgaaagtaaaggaagtggctctaatgcatagtgaagggatacttgctggtgagatgaaacatggtcctttggcattagtggatgaaaatcttccgaatgttgatctagctacccgtgatgcct

SEQ ID NO: 1428 - DNA, 922 bp, Glycine max
cagcttgcatgcctgcagttatgattgacattgatgaataatcaagtaatcattattcttgataatagactaaattttctcaacataaaaggttaatcagttagttagctctaaccaagttatgaatttaaccttattatattttaaaataaaaaattatataaaattgacgcaatcttttttttttttaataaaatttgcgctagtcgcattcgtaggtgatgtcatttataatctcttccggtgcagcggtgctatcattcttttatcttttttcccttaatttattcattatatgttttattcttgtccgacttaaagttgaagccatgccttgaaggtatgaattgtaatacacctagtttttttttttttttatcgaagtgattataattataattcttcaaaaactccatgatattttctagtttaagtgtgaaagttattaaaatatgttctaaatcatagttgacgaaatgcaatacatgtgtgatattcattaaaaactaatcacatggtcaaaatcatttcattaatcggcggaattgttaggtacaaaaaatgtacttatatacacgttattgatagctaatagactaatgtatcattcctctgttaagaatcgtaggatgtggggtaacagttcaagatcctcaggctttcatcgaagcatgttctgaagaagaagaaaaaaagttttttcctcctgtttataccaagaaattttggaaaactttcttcctaatggtggagaaaaagagttttttagttctttttatctaaaaaatttgaagaatccccatattttttttttacttattacaaagaaacatataagtaggtggtttccaagattttttataattggttttatgaaaagactataaaaagtaacgggattttaaacttattttggatgtaa

SEQ ID NO: 1429 - DNA, 809 bp, Glycine max
  misc_feature (746)..(746): n is a, c, g, or t
  misc_feature (791)..(791): n is a, c, g, or t
aagaagaggactagaatgatttgagacatgaaggaaactggctgactcgggcaaataagaaccaataacttctggatccttaagtctctgattatcaaaagttgttacatcatcttccacttcagtattagctgatactacttgagattgagaatccaatgacaaatcacactgttcctttaaattacaaacctcattatataatgcagcagctttactgtctgcatttttaatcattaaatctttcaatttgtcagtattatactgcaattcttgagattgcatagatttaaccaacacattatcaggtgagctgctaggtatggataggctgtagtgtttattttgggcatttctatcaatgtaaacagaagaaaactcgcaggacaaattctcaatctcttcacaggtagatataactgcttcctcaggaccaaagcttaatggttgtcgagtgatgtcaattgaactagttgtgttagttgcagtaaagctgcctctaccactatctccggctaatggtagagaagacaactggttgttcaatttaacagctgaaagagaaacatcagaaaccaaagttctttcaccagcactatccaggatatccatgcttctattttgttcaacaggtttcaataattcattttttacttgaggtgtcatactacgactcccatcactcaacagtggcctctttgtcacatcactatttaatgaagcctgaattgtgcatgcaacagcanaagaaaaaggtaggctgctgctgattgtatcaggtttaggcctgnacagtccatttggacata

SEQ ID NO: 1430 - DNA, 772 bp, Glycine max
  misc_feature (765)..(765): n is a, c, g, or t
tgttaaaggctgcatgtattttttaaattgattcaaatgggttttgcttggcagttgatacatgattggaccattcatttttcccccctattctatattgttcataggaatcattaaattctagattgctctgatttattacatataatttcttttttttttccctatctaattaaaggtttcaattgcttttgaaattaatattttagcttgcgctttgcacaggatatatatttatttttatataattataattcataataaataattaaaatttgtaaatcatgttattataaaattcataacaagtaaatatttgaaattatcttttggagttataataagtaattaaattttaatatatggtgtttaaagggatgaattcgttcataggaatcattaaattctagattgccctgatttattacatataattttttttcccctatctaattaaaggtttcatttgcttttgaaattagtattttagcttgcgctttgtgcaggatatttatttgtttttatataattataattcataataaataaaaaattaaaatttataaattatattattattaaaattcataataagtaaatattttaaattttgaaattatatttttgagttataataagtaattagattttaatatatggtgtttaaagggatgaatccgttcataggaatcgttaaattctagattgctctgattgattgcatatagtttcttcttttttacccctatctattaaaggtttcgnttgcttt

SEQ ID NO: 1431 - DNA, 775 bp, Glycine max
  misc_feature (748)..(748): n is a, c, g, or t
aagaacacgaagtgggtatctcctgcttcatttccgaccttcgtggcttccgcggaattttaaagcaaaggtctcttcattttctacataattcattgttaccttcctcactgcacattccttgtttaatgatgcatgctgaagtgcattattcaggtattctgactttatcgtgaatgaagtggacagagatggagcagttgttcaattgtcctcacttgatgcccctctagaggagccagaggtataatcatctgtgatcattgataaattgatttgtgctgtttttgttttataatctaactttttctgtgcttatttctgagttttcaggaaaatcgaaccaacacacacgacactgttgttagttatgcctctcagattgaatctttcaagtctcttgctgaggagtatgatgcaattcttttggaagaatttattaataagattaatgccggtggagaagatagtgtttctcccattgttctttctccagattctgataaatctcatagaaaggttggtattttgctctttgttagattcaggggacatttgagaagatgtctatattggctagcactttgatattggatccaagtgggtgtctcgtttcaatgggttgaccttttttgctgaagttatattggtttttggattaaccaaaccaggcattatattgaattgcttttggattggcatttcatttctttatttagccccttttttgagttccccaacccctggnattggtttttacctttaattgaattca

SEQ ID NO: 1432 - DNA, 663 bp, Glycine max
aagttttttctacagttcaagaaattctagtaaatttcaaagagctgaaaacatgtcagaatgacagtagggtggagaggccagagttatgcccaaaatggttagcattgctgactatggagaagggttgtttgtctgccatttctcttgatggtatcgtaaaggacatttatttctagtttgtattattggctgaagatgttcttttccctctattatattgtgtccttttaaatgctaatgtcggtatttttgcacaaaaataatagtaggcaaccaaatctgttcatatatattttatactggtatttactatttagtgtttaaaatcattagcgatgagtttatgtattagtcttgtttatttttatttctttctaagttctgacggtgccatcttgattttgaaatacaaataaaactagtaagttctcagaacagtggtgcttaatttgatggaatctggtttgtttatatgctagggggctttattctgaattttatatcagtggtctttgtttatgtgaatttccatcccaaattaattaggattatgctgttttcacttgtaaattatgatttctggggtattctttcttcacaaaaagttatagttgatcaggaactaactttaatgggctttgtaatgttccatgaacctgc

SEQ ID NO: 1433 - DNA, 813 bp, Glycine max
ctcatctagcttctagtagaagttagttagttagttagtcagttctgttagattctgtaacagaattgtctatagatagatacactatgtaaatctgaagttacttgagtctaggttatcaaactcgtgagagttccatagactcgactactagactcaactcgtaaactgataagagttcactttgtataaaaataataacaaaatatctataaataacatattaattaaacatttcaacaatataataaagcaaaataataaatcataaatttcacaatacttaaataaccaagtctagtaatgcattactactagctaatcacttgcagatgttatagtagtggtagatcattctcatcgagagtttgatgttattagagaacaagggtttgatgttattaaaggtgaaattttttttattcgggaataacacactaagtgaaggtatgttgaacactaaacagatagaaaacaacccaaaatgatttacattttggtataatttttttaacttgccgactcattgactcggtggtaaactcgagagtctactgagtttacttagagtttacagagtctgctcaaagtctactaaaaagagagtttacacatgagttaactcgcggaggataagtggactcgtaaactcactaagagttagcgagttaactcgagagtttgataaccatggacttgagttagtaagaggaaatttaccttcttcattttttcccttgtgctttctctcttctccaatcccttagaactagaaacctttttgaattgcgaggaaatccaacctggaaattt

SEQ ID NO: 1434 - DNA, 657 bp, Glycine max
attccgtgtttctgcactctcttcctcccatcataaccccaaatctggtattcagtttttgaacttctttttattgttctgtttctatgtatgtgtgttttatggtggggggattagagttttttgttataatttatgcttggtaggaaaaaagattcattgaatcactggattctgatggagtcaatcaaatgaaatgtgtgtttttgaagttgaaggtaaattgataggtcaaatgatgctgttgctgtttttgttttgtttttatttttatttttttgttccttcttcagtgctccaaaacaaacaaacaaaaaaagaaactgagttgaacatgttggttctttaattcttttgttattggactagagccatggatacacttggttgacaatttccaagggtttaagggagtgtttggataagcggttggtgaaaaaacgcactttttattacataaccctttttgtaagctactttttctgacttttttagaaaagttttaaacttttttttttatcctttgtgattttggcttctaaacgtgttaagaagtgtttctatggtgaaacacttttttctttagaaagtactaataaaccggccctaaattttggtaaatcacccaagcctttttgccattaatgtataatggtt

SEQ ID NO: 1435 - DNA, 857 bp, Glycine max
cagcttgcatgcctgcagatggggtttctggtgatgatggtagagagaattctttggctatcgtgccagtgcaaccctccgttgcagccataacggaaatgaaaccaggttggccactactacaccgcggaattttattggacaggcaatctgctgatagattattgatgcatccccagatctccgtggtccagtgggcaatgaggttgccttctagaaacctctcatatgctgtagattgtaatgaaaaacctaacatttgtgatcaaggtcaagatcagcatgccgctttagatagtgaaagtggcgctcttgttccagtagatgctgaattagggaccgcttcttcgcctgaaaacaattcaggaaacattcctaaagaattggagggtcttcatgagaaatactcatcaacttgccgattgtttgagtaccaagaacttgtatcggccacatcgaatttcttgcatggtttgtttcctagtgttagtttgactgagttcaatttatcaaaatggtttattttagtatcttttaatgtggttaccattgtgattttagaaaacttgatcgggaaaggaggaagcagtcaggtttatagaggctgccttcctgatggcaaggaacttgccgtcaagatcctaaatccttctgatgatgtgttgtcggaatttcttctggaaatagaaattatcaccaccttgcatcacaaaaacattatttccctcctggggttctgctttgagaatggcaaacttcttctcgtttatgatttcttatcaagaggaagccttgaagagaaccttcatggtacacaaatatacattactatatccctcttttgtttttctatgtgg

SEQ ID NO: 1436 - DNA, 616 bp, Glycine max
aagatattatattcctctttatttttatttacaattatattgtattgtatcgcgcatgcacacacaaatccttgagtagtatttaaaataactatttctgccaagaattggttgcatacgttgtaatttgtcaaataaatttaacattgttcgagatttccaaatttctaagattcaaatatagatgtttaatgtaaaagagaaacaaaaacagaaaaataaaggatagtaaaaatattgcaattgaaactaagaaagtttaaagtgcaacttagacattatttcatgattgtccttttaatgtatatgaaataagtaatttcttgaatgtcctttctccaattaataacagatttcaaagaaaaacatgacaaactaactttcatgttcttatgataacaggatcttatcgttcataagaatggaatagagcaggcaagtttgtttagtttaatattttcttaatgaccatttctttcttttatgtgatgtcattggattgtccacttaaatgacttgattctatgactaacaaaacatgcatgcaactatatcaggttgttggcgaagcaaagtctggagatgtagttggggaaataggagtgttatgctatag

SEQ ID NO: 1437 - DNA, 704 bp, Glycine max
ataaagatttcaactcccctattacgcatagctcgagaaacttcaccatagtggggattaactgtgaggaaaatgcggaaattagggtgtggatgaataaccaatgggtttccatcaacaattccacgctcattgaccgtgattgaaccacaaggttccaccaatgagttaatcctatcaagaacctagcaacaaaaacaagtaaaaaataattaaaagtatcaatttacagacttgcattgcccaataacttcagaaaaaaaaataacattagatcaatccatgttctacatttcagatcttgcatgccaaatttcagaaaaatttaaacaagaaaaaccatatcatccaatggcttatgttctagtttatttgggggaaaactatagatctaggaataaaagtttgattatggaagtaatgagccagatgtgcttgacgcaaacttctatttgcacagatacaaaacacatattcagagaaagggagagcaaagagagattagtcagttaatgaagttcatacacaatgtgtacaaactacagagaatacaaatgactttgttcaggcaaaataagctttaaaatgcatgaatttgcacaatattattcaatatatgcatcatattatataccgtggggttacataaatttgcattcttccagaacatccattcccccttgctgaaatagcctgaacaacaa

SEQ ID NO: 1438 - DNA, 746 bp, Glycine max
agtttgagcgagacgtctatactctgcctctatactgttaggaagttccacatcgtctgcctcagttcttggagtgcagcttatatatctgttaggcaacttcacttagtaccaattggttttaagttgaaatctaacatggtatcagagcctatagctcatcttagttcttgcctattctagtaggctcgcctgtattggcaagcatctgtggaggggggtgttaggaagttccacatcgcctacctcagttgttgaggtgcaacttatatatatttgttggacaacttcagttagtgctaattggttttaagtagaaatctaacatatacttgatctgacaacaacttgctgcttgcaagaccaccaagaaatgagattaggacaaaaatatacaactgcacaagaggtagatcctatcatcgacatcaaatgcccagtctgcatcacaaagagccctaatggagtagggaagtcctaaaacagcaggctttagatgttgaccatgaagaactattcctttcaaatgccttagaatcctctttactgccatccagtgagtgtccaaatggataaattgataaacctttgtttacagcaaggccttatctctggtctagtgatggttaagtactgcaaagcagcccaccactgacctataccaagtaggatcagaaaacaaatctgaacctgttttagtaagcttgacttgaagaaagaaatcatgtataaaagtgtcgattggc

SEQ ID NO: 1439 - DNA, 809 bp, Glycine max
gtgaccttctgcctgcagtgttgcctcccggagccaaattaaaaaggaagcctatacacctgaagatgtcagatctctctttgctgctttttctgaggttgtttctgaaacattacttttcctgcgtaatgtgaaatctatctctatttttgtgaaggaaggaacagggcatgaaatgcacctactgcaccgtgtgcgtagaacctgtattggtgagcctgaatttggatccactgaagcccaggatgtgttcaattttttcaaagaaagtagacatgtcggaatgaatagagttcagtttctgaagaaactaagcctatccattggcagagatttgccttataaatgccagaagatgctaattacagagcaaagcacatctagctgtaattcacactattggataaccacagaatgtttaggtgatgggaatgctcaaaagagaacatctgaaacagccaatagtaactattacaattttgttccttgggcatgtgttgctgcatatttgaattctgtcaagcttgatggggacctggttgaaagttcagagttggaggatgattgcatggtttctcctgatctgtttaaaagtggtagtttgcctacacatccactggaaaattttgatggtcgtgcattctggctttttacctttacccaatcagtactggtcttcctgctcatataaatgcgtacttcgaattatcatcaaatcgcagggatatcctggttttgttctgatatgggctggaggtggaaagaaaaccctcaactgggatatttatctccttgaaactggtggtgcc

SEQ ID NO: 1440 - DNA, 626 bp, Glycine max
tgaagatggtcaagttaagttttgggacatggacaatattaatcttctaataagcagtgatgccgatggaggattacaggttggtatttatggttaactattttaagtcttgtggaatataactacacttcataaaatatcctgtatatatttgtatgaatttgttcagagccttccacgcttgagattcaacaaggaaggaaatattcttgctgttactaccatggacaatggtttcaagatacttgctaatgcttctggtcttagatctttaagaacaattgaaactccggcatttgaagcattgaggtcacccattgaatctactccaattaaggtagtgatacagtttaaaattttgcttgtatcccaatgcttagatcaaaatatgtatgtgttactgtactttgtttgtgttatgtaggtatctggctcttctactgttaatgttagtccggtcaactgtaaagtggaaagaagctcccctgtcaggccttctccaattcttgtatgaatctgatcctgtgaattgaataatcattaattcattattatgatgttagaacgatggcgttgataggtgtttcccttctctacatacactctggcatgtggactatattttg

SEQ ID NO: 1441 - DNA, 844 bp, Glycine max
tgcatgcctgcagtatattttacctcaaacttctgaaaagaattccaacatcagggatatcatagaacatcctctaaaccaatgttttgaaattgttgacccaaacccttagggcctgtgtacagcagccaattttgcttaggtcatgaattttatttttccaaagatcaattaaaaataatattgggtatcttgatcatttcataattcaaaatatttaggcattggcatcttaacctaagtatataaagccttgggttattgggatttgggatgacgagtttgagtgtttcttggattgtggattatggttattggcttattaccgtttggtggcaaggattttgtttctgagtgatgaagtgaaggtggtgcaaaaggattttctgtgttgcctgttgcctgttgccttttaaaaacctatgctaacaagaaaatgatcagcatagtagctaccctgtacgtacaagaaaaagaaaaaccaatattcaaacactcatcatttatgtatagcaatgcagtagtaaaaaggtatcgaagacatcaattagaggagcagagataagtttaccatcttaaattactaataaagaaacagagactttaaatttactttctgtgcttataacgctttaagttacactctcgtgtattattatttttgagaaaaggaatcatgaccactgcccagtatcatgcatgcatcgactcaatcggattccatgaaataaaatattgatccacattatctgaacaaattatatgaaattatatgatgattcaggaggaccatggattccatgaaattatatgctctcaaagtatttactatttatctaaaaca

SEQ ID NO: 1442 - DNA, 737 bp, Glycine max
gctcgcatgcctgcagtatactagtaatgggttttaacatttaaggtttaaggattaagaaagtgaaatgaaacaagcacaatagggtatgaatacgaatcgagggacagttatgaagcgggtttggaccaaacccgatccatttgcttcttgacgggttacaagggttataaggtggagagaaattaagaccgtgatatttagcatagactctttgggttgttgttttctgtgtttttattttcacctgagaatagaaaacagtgataaaaatgtgtttggttaaatttttgaaaatattttcataaaaatgaaaacaagaaacaaccagaaaatgaaaacaataaatccttggttagaagctcatttcgggtaaaatgagattgtggtggctgtaattttaaacaaatctcaaaatacaaaaaaacaaaaagtcaatatattatacattttcaatatttttatttcataaaaacagaaaataagaaatcaaaccaaatatattttcaaaattctaatcttttaaaaataaaaacagttttcagaaaataaaaacagaaaataaaaaagcaaaccaaacacatccttttaatctggtagcttattattttttttcttttactttactttttctcttcatctttttaccagtttggcctacttcccttttctatacctttggtaaaaactaatttatatagactaatttgattaagatgattttttctttaaaaact

SEQ ID NO: 1443 - DNA, 674 bp, Glycine max
ggagctatggaagatgaatctcacctatttattcattgcatcaaaatccaaccaatttggtgggaatcgatgtcatggatgaatatcaaaggcgctttccctttcagcccgaaacagcacttcatgcagcacatttctatccagattgaaggattaagggctaagcgatggaggtattggtggttggcagtaatatggtctatattttttttttatcagcaaaattattaatatattgatagaagtactagaggtactaagtacaaagattaggtccatactcatggttccaaaataaaactaatgtagtttgaaaaggaaccatagtaacatggtctatatggaagcttagaaacagaattttgtatgcaaatgcagaatttgatactaatcggctttttgaagatgctatctttatagtttggacttggcttagacaatttgagaaggacttcacagtccactataatcagtggtcaagtaatattagacaaggttttttgtttttgtagagggagtgcacatagttcagcaatacttgtacaccacacaagtagacctatttgactacttatgtactacatataatagtccatacctttgtaattagtacctctggtactttatttcaatatattatatttatctttgctgatcaaaaaaaaaaaaaacgg

SEQ ID NO: 1444 - DNA, 883 bp, Glycine max
  misc_feature (768)..(768): n is a, c, g, or t
tgtgtcagatgcagatgcaaaggttgaatttgatttaaatgaagggctcaatgcagatgatgagaaatgcggtgagttcaacagcagtgcacctgctggtcgtttggtcagtcctgtgccatttcctgcttcatctatgtcttgtggtattcctgctcctgtcactgtggctgctgctgcaaaggggcgctttgtgcctcctgaagatttattgagaagtaaaggggaaattggttggaagggatccgctgccactagtgcatttaggccagccgagctcaggaaagttatggaaatgccttttggggcgctaacttcctctatacctgatgctccagctggaaagcagagtcgagcaccattggatattgacttgaatgtggctgatgaaagaatacttgatgatatttcttctcaaccctgtgctcgtcacacggattctgtatctcttacaactgatggtcatgatcctgtaagcagtaaaatggcttcacctgttcgctgctctggagggcttggccttgacttgaaccaggtggatgaagcttctgacgtgggcaattgcttgagcagtaatcataaaattgatgtgccaattatgaaggtgaagtcatcattgggtggcccaccaaatcgagaagtgaatgtccacagggactttgatttgaacaatggaccttcagttgatgaagtcaccactgaatcctcattgttctctcagcatgccaggagcagtgtgccatctcaaccacctgtttctggacttanggtgagtactgctgagccagtcaacttctcttggcttcctttcagtggcaacaccctatcttgctgtcacaatattcttcaatattgcctgaaaagagggggatcaacccctttt

SEQ ID NO: 1445 - DNA, 665 bp, Glycine max
gaaaaacatgtatttctgagtagttgttaaattatttttctaaatattagttttcaaaaaatataaatatttattaagtttttttattgttttgtttcctttattaaaacaaactttggagatattttgaattctaaataagttaatttgaaaataatattttttacattattaagtaatttatttttcttttttatttacctgaaaatgtaaaaaaaaatcagaacaatagttataaaaaatctaaatgagatatggtatacctatttaggaaaaacaaaaattaataaatatcgcaattgatattacctaggttaattgaaacagttttctttttaccaccagcataaatatttttggacagctagctataaattactaaaataattattacttaagatagatgtgaaaactcttatcacaccatcaccatgaatatcttgtattgaacatcgaatatcatatcatatctatcacaatcttatataataatatcaaaagtcccaacatgacaatgtttactgtgtaatgtttcttaagttgttcatgaaagaaacgatcatctcatcagttctgatttcaacttcatgaatgtgtttttcattatctaaaatggaagaaacttgaattgtatggataattgattatcattgggcatctactct

SEQ ID NO: 1446 - DNA, 656 bp, Glycine max
aatgcaaaccaaccctgaagcattggcagaactgtttgaccataagtcatgactctaactgggtaaattatttccactaaaaataccttgagaaatcaattgatgtccaagtgctttccaccaatttgctggataatttttccccagtccatgaagtggaagcttgtcaaactgaacatcaagaattttcttggcctacaagttacaagcaaatacaactatcagcagttggaagaacataataaaatttaaaggcaacaataaaggttaaggatgaacgaaaaccaactgacacttttaattttagattataccaattagaaggtattcttaaagcagtgcagtaactaaaggaagcaaaaaagaaggtgccagattgctagattcaaaatcagtttgggtactcaaggatttgaatatgctcatcaaccatgtcacatccaaatcagcatgcactaaggcttcaatgattgtcactatgaatgagaggaaatgcagagtttatagtttattacatgccaccttgtgattatgaactaagagtgctatttgtgcagtcaaataactgtaatcttcaattatatttgaacacttttaggaccatattctaaattaagtgatgtctattgttagtttaaagtatctaaatttagcat

SEQ ID NO: 1447 - DNA, 685 bp, Glycine max
actggtctatctgttttacatgttacctttcacttttccagaataataatggtcctgcatatacatgtgtgtgtgattaagatacacagactttcattcattccaaacttaatatgtgcttctgaaggagtttccaattgttgcaaatgcaaagtctctttcagacagcacatgggacatgtgaggtattgaacgtgggaccatgtggaattgaaaggctgacttgagtatgcgtgcgtgtgtgtgaataagtgaaagagagagagagagagagagagagagagatgtagtctaagaatcttattttctgtgtgtaatatccaaaagaattccaatcattgtaattaatatcacttgttgacagattgtttggataaacttgccttataaaagaaaaaaaaataagaaggtgaaatgaattaaatttgtccaataggttaaaatcaacttatgggctccagtttttagaaaagttagatgagagaagttcaatttttttccctcttttaagtacttatgtagaagtttattcaaaatggacttttaagtctactgtgtttattagaaatgccccagttggcagtaacatctgagaagtttcagcacttgtagaccaggaaattatcatcaattgctttccatgttggttaattcaccacaaagactaaaataagaacatcaaaat

SEQ ID NO: 1448 - DNA, 729 bp, Glycine max
gagctcggcacccggggattcttttaaggccacccggcgaccttcaggagagaaaaaaggaaggccaagagctgaccatactggatacaattggtatgctgcacgtcagtcggtcctcggtgaaggtagaaaattactaggttctgataatgcttccactcagctctccactctgatggattcttgttattgacatgctatttgcagtatttttctgtttttagtttgtctttaggtgcatattttgatcatgtgtcttctgttcattttggtagcctcctaggagtttggttttatatgttgaccatcttcagttattattttatccttgcaatcatacatttttactatacttagtaacctatcattattttggcctggacctatattttagtccggtcttagttcttgaaattttggtcccaagggtcggggcatattgtctctgtcttagattaagtctcataataacttgcagtttctgccttttacattgggattcattcttgttaaatcctttaatagtagaagccctaatgagagaaatgggattgagggattctgctttaaggatctcattaatacctgtatatagagtagactcaatcatgcatgtgtgcatgaaggaggaattcgctttcagaaatagctgtaaaaggcgggagaataaattgactctgaaaaaagttcacataaccataagcatgtagaacaattagtggaggattt

SEQ ID NO: 1449 - DNA, 652 bp, Glycine max
tttccaaattggctctctcataatgactcttgctccttcattttcaatactaatggttggaagacttttagccggtgttgcaataggatttggaggctcgattggccctatatatattgcagagatatcaccaaacaacaccagaggctttctcactacctttccagagattttcattaatataggaattcttcttggttatgtgtcaaactattcattttcaggcttttcaccacacataaactggaggataatgcttgctgtggggattttgccctcagtcttcattggatttgctcttttcatcattcctgagtcaccaaggtggttggtaatgcagaaccaaatcgaagaagcaagatcagtgcttttgaaaacaaatgaaagtgatagggaagtggaggagaggctagctgaaatacaacaggctgctggtgtggccaattgtgaaaattatgaggagaaacctgtgtggtatgaacttttgtttccttcgccttcgcttcgtcgaatgatgatcacaggaatagggattcagtgttttcaacagatttctggaattgatgcaactctgtattatagtcctgaaattttcaaagcagctgggattgaggataatgcaaaactcctaactgctactggtgctggtggg

SEQ ID NO: 1450 - DNA, 697 bp, Glycine max
aagtcgcataattttgctatgaacagctttttgtcttagaataatactattttcaatcctgaatataaaaaacaattatctaattcatcaagatcaataaaagtaatcatattagttaatttatcataaattttaattatattccatgactatccatgattacttttcaaaagataatttttcaaccaataagcttaccttgttttattgatagctcaataaagacgccacttttatgggaaaatgaatgtaatcattagggataaaaaataaatttagcaagaaaaaattaccttttgtttctgatatatgggatggaagtggatggaagtagtataatgatactcatgccattggattatctatattgcacatgctaatttcaagctattggaaaatgtggaaaagagatggaattataggcatgcaactttaatcaattactattttctagggtgacaatgtgtttagctctaacccgaattgaaactattaaaaaaatagatcacgatgcatgaagatagaagatatatatatcatttgagtctttgtaatgcatgaatgctcatattttattacccattaaaaaatatgggttgagtggtatattgaattttgatttattttgtcaatcagattagattcgaaccaactatttagtataaaaaatacttttcaaagcatttcaaattttcaa

SEQ ID NO: 1451 - DNA, 694 bp, Glycine max
gaagaaacatttcggtgctttatagggtgacaaagttttttttccctaggtgagatactgagtttcttgttaggtaatctaaatttctctaatcatttaaaaatagaacttatggaaaaaacgcaatccactagaagttttatatattcaacacctaccaaaacatcttgacttgagtttttgcaattaatttgatttaaccttatcttgtctattagttctttctcaatttaaagcatattaaactaattgatttaaattgattaagctggcatatatgcctactggtttgctttagatatatgcaatgtaatggtgacaaggatgcagtgttttcttcttcttctttcctttttttttaaggtttaattacccatttagatatatgcaatttaattacccatttaatttatatagtttctaaatttatcccttttaattcttaagtgaatttttttagtcccaaaatttacattttaattcttaaaagatccctgtcattaaaaatctttaattgacaaagttaaaaaattttaatgacagagactttctaggaattaaaatgcgaactttagaagctaaaaaaaacctatttattaaattttaggaactaaaaaatgcacttattaactataggaactaaaagaaataaatttagaaactataggaactaaatggatgattaaacattttt

SEQ ID NO: 1452 - DNA, 682 bp, Glycine max
aagggagctgagaaagccaacaagatagattcccataaagtggtagataatatcatattgagttttgctggtaatgagtagttctgcattctgagataaaatggaaaggtattagttaatagttctagcttcgattgttgtatgtatttaatttatattgtagatgtagacatgcatgaccatgactttcagttccccctaaaaattagagaaatatattataaattcctaaacttcaaaatcatatgctcagacaatgtttgagcagaaagacaaagtgactacaggagttatttatgtgaaatgatgaaatatagagcaacaaaggacgaaaatgcctcaatagtaatagcagtataatggaacctcaaaaatcaaacaaactccacggtttgtgtgtgtgtgtggagagagaaagacagtcagaatgtcagatataaaaaaaaaacctaaaaatatatgttcataatatataaaatatttttttaagcattgccttacttgtacataacatttcttgttatcattattaagctttgcaggtttgaacacatgttggtcttgtccaaccttccgcatggcctgtacctcaacaccttctccaataacacttcctttttggataacagcataaggtccaatggaagaacatttgccaatcctaataggatggaaacttaaa

SEQ ID NO: 1453 - DNA, 681 bp, Glycine max
tcaatattattttagatattacagaagtacaagatgaaggatcattctacaaacaaaactaaagaacaagacataaaattcaaaatgaacatcagctcaatatttcagtaatgcctctgcatgacaaaaaatttcattacaaaaatttgaaagaaatctataaagatgtccaaaagacaatcttaacaaaaaaatacaaaattttcttgaaaatttatgcacctctctgttacaccacttttatatattctggagcttgatgttctcttggttcagtgaacaatggtctttgcctctaatggaaacatttttcttgatcaaggaaggtatattatactccgatggttctaatagtctttaagtttatggctcaagaaaagagaataggatttcaatatggagtgaaacctccaaagattctatccaggactctaaaagcatgatgtcattcaacgaaacagcaaatcttaatttttaagctcattctgatattggatatgcagatcaaccaggggatagaacaagacaatgccagttaagaaatgcaacatacccacacgaccattgatagacattttccacagcattgcgatttgataaaacactcaagtaccaatctgtccagtcactatttccctgtcaatttaagaagtttgaaaatgagcttcaagattatgaagt

SEQ ID NO: 1454 - DNA, 635 bp, Glycine max
tgaaaccctgattgggacctgctgctggtcgtatactccttacatgttgcagagcttcaaaaaagctcattccacgagtcttcatcagatatgccacaactatagtcacactggaaggtgcaacattattaggatcacttttgtccagttcatcatatgaaaagggaaataaccaaaagagcaatgaaaatgccaagatcttttttaagaagttcagatatgggcattaaaaaagtagtaaaatgctggcatgagtttcacgcagaactgaagttacggaagataattcatcactcttgaaattcaagcacgtccttaattctctacttttcatatgctaacaaagttaacgtctaaattagcttcttactgattaaaaatttgatagcatttcacaaatggaagtcagaaaaataacaatttgattcaactcatgctatattgagttttgaacttctatttcactgggaggatagtcaataaccttgaagcatgcacttttattattctttcaaattttcaatacatgaaactggaaaaatccacacaaaagaagattccggaaaaaagaaaagaataatgaagcaggggaaaaacaaataaatgatacctataattttcaagggctacaaatc

SEQ ID NO: 1455 - DNA, 695 bp, Glycine max
aatcactcatcctctcataaagaccacgtccaacatagtatcgttcctgaattaaattattataaagacataaataccaagttatttccaaaagtgaaataagttgaaataacaaggacacaattaaatagtaaaaataactcacttgataaatccacttaaaaaactgaaagaaaaactgatcagacatttccgaaagtgcatgacaagctggaaatttgagcaacagtgcaaggaatagacgtatagcagcataaacaccaagcacaagaaggtatatccggaaatagaatgaattgtcagagctattgctatttctctcctgcaaaaccttcctgcaattgagcataattatggtaaaaactaatatagttgagatgtactccaaattaccagtgttggcaaaacggcagatgtagccacctaggcacaggggcagtgcagaaaatagcctcattgtcaatttggattgcttcacatttttaaagtttttttttcatgaacaaagaatttatttattatgaaagaaaagatacattggtctagagaataagaaatcctcaaaaaaaaaaaagacaatgaaaaatctaaggaaaaaaacaaaacatgatcaagatacatgcaacacagcatgccagtcgctctgaaaatcaaggcaccccctcctctaaaaaaaccataggcagagaacacta

SEQ ID NO: 1456 - DNA, 720 bp, Glycine max
cagtttgcatgcctgcagtatcccctattttatgttcaatcctgagcaggtgacagtgagaagaatctcaatgcttattgtatattactaaaatttctttttgggagggggaggtatacaaataaaaggaagaacaaatcaatgatcattatatttgtctgtccacaatgatatatgtaaatggtgaattgccttcgttagggacctgcaaataatagcaaggacaataaataaatataataataacagcagcaataacactagtatatgcatgaaaattatataaaaaaacaaacacaaacaggcaaaaagtaaaaattgaacatggaattatacattgccatatactaaggttttaactttttttaactgcaaacttaaatcataccacagcttgtctaaaaattcaagatcacacatagacaaagtagtcaattccagatagttgcacagtgcggtaagctccaaaaaaggctggatgaaaaccacgcagctcatcttgaatgtgttttaagtccaggattctgagctaaaatatgagtcttctgttcttcatataatgatttttgagatgatgactacatgaatgagtgaaaaaactgactgcaaggcttccagatcacagagtttctgctatagcaaatactaccagcgtgtttggatgtgcgtttagagcttcaaacttgagttttggatggatcaaatatgaatattgcattg

SEQ ID NO: 1457 - DNA, 319 bp, Glycine max
  misc_feature (316)..(316): n is a, c, g, or t
  misc_feature (318)..(319): n is a, c, g, or t
atcttacaatgagaggatggccaaagttttgttagctgaatatattaactatatcctgatttctgtctcaggttttataattcgtgaatcaagttccaaaactaaagttaatttcaaagacaactaccggaactgctaaacttgggattgcaaagatgatgctggtctgtcaagttgtttgagttatgacagttttgagctaagactgcaagtggtgctcttggctgctgatttattggagttccatttcgtaaatgtgatcggtcctcaaatttgatcttttctgcatcatcagcaatatcggccctcctatatncnn

SEQ ID NO: 1458 - DNA, 223 bp, Glycine max
  misc_feature (1)..(2): n is a, c, g, or t
nncatatgcttctttgtccttggcagtaagacaatctaactttgtgcacttatctaattgaatgggttcatcataccaaaagcttgacagttttgaattaagattttagattttctaattttggtttaccagataggaaacatctacctttggacttttgcatacaacattatccgcatttattcaggcaagattttcaacgtgaacaaagttgatgattcca

SEQ ID NO: 1459 - DNA, 420 bp, Glycine max
gtaagatcgtcaacaccaagtgcaatgtcggcgccaatcgcaaccaggcttttgtcgaattcgtaagtaactccctttcctattcttttcattccttccttattttttagggtttttagccgtgtatttgtttattcatgagaaatttagctctgttacacatgagctctgggcatcacaattaggcctttcattctctttctctcttttcactctgtccgtgcataaatccaaccaatctgctcaatcatcatggactgggtaaaaaatttggatgattaataaaaataaaccattgattatgtttttttttaaattaatgagttaagatattaacagtttttgtaaggagtgaatttttaaagggagggtttttgctgacaagtaaagaaaaaggtgatggagatcgaggtctcttgc

SEQ ID NO: 1460 - DNA, 214 bp, Glycine max
  misc_feature (1)..(1): n is a, c, g, or t
nccacaagtgcagtgagttcattaccttctgggttttggttgaagccttcaaatccatcagtttcattattgaatcctacaccttgtaagacacccagtctgtcagtgcccgcaattccatcattttcactattgtcttctacacatgatcagcctgtgactgcatcagttccattgtccaggcccgtatctggtaagccagtaactccctcag

SEQ ID NO: 1461 - DNA, 264 bp, Glycine max
taggcgagttagatgatgtggtgaagcagttggaagaagcaactggttcagtggctgttggtcagattggtcgaaccctcatcatatacaggcccagtctctccaaaatgaaggcagaagaaaagaagaaacaagctcggaaccttattcttaaaaaacaagtcaaacaaagactagttaacaaggtaaaagttacgtctttatttatgttgttgtgaataaactattgtgttctattgctatgtttctctaatggtcttgtga

SEQ ID NO: 1462 - DNA, 205 bp, Glycine max
  misc_feature (205)..(205): n is a, c, g, or t
ctccgcaagcgtgctcaagtgcggcagaggaaaggtttggcttgaccccaatgaagtcaacgaaatctccatggccaattctcgtaaccactctcactcctttttttttttctttcttttttcatcactataatctctgtttctcttatttatcagtataaatatttttatttatttgttttcttatcgatgtgttgaggaccgn

SEQ ID NO: 1463 - DNA, 290 bp, Glycine max
tcaatgaactggcatttccaaattacaccttggcattaaggatatgattttaaatatctaatctaagtctatataccatagaaccatgccccagaaggagagacacaaatcacagcaagaggaaacatattatcgcatacttgcaaaaatcaaacagtatatttttcctgaaaaaactcaaaagcaagaatcaatttggtcatcaagtgttcaggtcactgacttatgtagacagcccagtttgacaacttacagctactacaacaggtatgcagacaactttgctttcc

SEQ ID NO: 1464 - DNA, 319 bp, Glycine max
ttgataaggtaactcaaatgtcaagcatttggaaattggaagtatgttatgagtcctacattgattgaatggaataaaaaacttaatttggtacttaagttattagtcttttgggttgaactctctttttgtgcttaagtcagaataattggtgcttttgttgagagagttgggacgaaaaggcctacttatatacaggctaaattaaggtgcaatgtactgaattctgataaatgaccacctaatggactagtcattttggatttatctcttctttgtgtttaggtcataacaaagtgccataaccaatgtaattggc

SEQ ID NO: 1465 - DNA, 333 bp, Glycine max
ctctgcccttgttgcatttagttctacttgtaatctttgaacttgttgctgcaaagctgatattgcacccatgcatccatacactggatctcttatcctcaagttagcttcataaacaaggctatttgctgcatcagctctttggccttctggtacctcctatacataaaaataaagtttgaaagaaaataaatcagttttttacttcaataagagaagtgaatccaattgaaaaaaaaaaaaagtgactaattaatttggtgggtggagctagttgttacgtactaaccattagcatcttggaaacattgcttgcaccaaacactttgtgga

SEQ ID NO: 1466 - DNA, 269 bp, Glycine max
ttcctctcctatcaacaaagcacctgataaatatagcaattgcagtccctcctttaatcaaaagctgtacacataacaaacaatgttggaaacaactcaactaacctagccgaagcacttgctattttggtttctaaaattggaagagtctatacactagtgattaccgatcattaacaagacgaaaatcaggagaagaaagaaggctgtgtagttccttttcccaacacagttattcagccactggagacaagcgatggcaattatat

SEQ ID NO: 1467 - DNA, 233 bp, Glycine max
  misc_feature (229)..(233): n is a, c, g, or t
attcctttgtcgctatggctattcacaggaaaacataagattaatgtctaagactaacttcagttgcgaaaggaacaccactgaagatcccatctcctacatcaactacccatcaatctccatcaaaagtaattaatagacatcaagcagaaagcaaagagcaatcagaaaaacagttaccaacatgagatctctcaatgccacgtatactgcaatggtgcacagtgcnnnnn

SEQ ID NO: 1468 - DNA, 329 bp, Glycine max
tggtatgttcgtgctgctttctctatttattgagatgctggaggatgatttctttctcaacaggtgaatccttacacatatcagataactcgacaaaatttgtatcattgaagactttgaagcacactcttcctctgtcaggagcttatttattttacatggtatgcccttctttgccccttccaccctgaaaaagaggacaactgcttagttagtttttgtttattgtttttttattcacccctgtacttctccttagctagtcaccatggagtctgttcgtggagtaaatgttccaatgtacacaactcttaggaggaccacagtgg

SEQ ID NO: 1469 - DNA, 342 bp, Glycine max
tcattcatgatagaacagagtcacctcttcattctctttttctttgatgaagacctccttattttctctatgttgttttgtatacaaaatgtgattgattttataccaaaaataatgaaaaatagctcccatgattttgttgccgcaacagccaataatcaaccacttacctagttccattacatgtatgataaatacgtttttgataattagaattgttaataagacagagtggtttaataattagagatgaatcattaaagttagggatcggataatggactaaatatatatactacttttgtttctattaattattcagtttggtacattgagaaccca

SEQ ID NO: 1470 - DNA, 417 bp, Glycine max
ttggtggctccaaattgaagtaaagattgaggaatctgcataaaactcattaagcttttcaaaattagaggactagtacatgttaattaagaagaacaaattaaacacatgaattttttttatcgacaaatattaatcattaatttgttagtaagaggatcgaactgcgcgatatttttcttgttccgttaaattagacacatgaattaatatgaagggaaaattaaacaacaacatgatacatacctcagcatgcacaacatgaagcatcgagtctccagcaagtgaggaattggcacttctaacatcaatgttctcttcatgcagcattcgaatgatctcagagaaaatgaactggtggtctaatccacaagtaagaacaacttgtaaagaagaacccacttcgtgaatctcaag

SEQ ID NO: 1471 - DNA, 378 bp, Glycine max
ttggagttcactacatcatgccattattatgcgagagttttacaacaaaaacaggataaaaattagtcatttgaaattatcataaattgttgggaggaagatgattctaaagaactgctgcgtggtagttctgtcaacagatttacttgtgtttaaaacttcatctgcaatacagattgattgccaccctctctattcatgtctatcagtggcagcaagaagtagcttctgcatttaatgtgttttgttcagcatcaaacaaaaactcgcgtctctactctaaatactcgccaagagcatcaaccaaaaaagacgcaggagcaaatataccaagcttccacgtcaagtgctgttccacacacattgataacgttcatg

SEQ ID NO: 1472 - DNA, 258 bp, Glycine max
tcacttggaataatcaacctcagcaacaatatcagtctcagtggtgaagtgatcaaagtaatcctatccctttagccatctaacttgtcagtagacaatagagcaatgacatggtaaaaatagctagcatagcctcaaaagccactagaggtagatccaaccatgggtgagagtgggtagcaaaaatacacccaaaacaagggctaaagaacacaaatcaagggtaaccaaccaaaccaagggccaaaccaaacaagt

SEQ ID NO: 1473 - DNA, 264 bp, Glycine max
  misc_feature (1)..(1): n is a, c, g, or t
nggctgtcaagtttgcgatatcattattgggattgcaaaatgtggattttgaaacagataacaaagaagtggcagataagaggcttttgtctttgaatccaacttatgctgttggttttttgaggagacatagtatggagttgctcatgctttggctaagacatctctatccttcactagtcttcaagttttctatcaaactccctatttcattgctcatttaattaataatgaaatgccttgaatttgctttcgtcaaggaaa

SEQ ID NO: 1474 - DNA, 295 bp, Glycine max
gcatttcgctctatcactgagaacaaagcgaagaagaagaagaagaaacaccctgtacccttcttacatcttctaatttatttttctgaagacttttttatttttatttcttcgtttccaccattttctgttacgccaaactgcgtctgcgacgcgaattgtgattagtgaacggtgaatgttgaggatctgctactttttgaacattgaataaggttactgcaattttcaacttcgtttcttcttttgctatttttctttctggattttgagcataatcaaatcgctaatcttg

SEQ ID NO: 1475 - DNA, 291 bp, Glycine max
acctttgtttcctctccctttgtctgtgaataacaatatggacatggtattgccatgaaagttttataaacatgatgcatgttttacaaatgatgagacattggttgtcttttttctgtatacataaccttctgtgtttaatttaaaacacgctccttgatttctgtcactgtcacataggtgcgtgaagctcatgaggcattgggtgaaagtggaagacctgatatagagttgcttgttggtggaacaactctcctcacttccaatgacatgctcgacttactgttaggg

SEQ ID NO: 1476 - DNA, 352 bp, Glycine max
ggagatcatctgcatggagaaacttaataccatttggcaaccccatattggtcttcattcctttcacagtttggactctctgataataagagagtgccacaaacttgttacgatttttcctagttatatggggcaaagatttcagagccttcaaagcttgataattacagattgcaagttagtggaaaacatatttgactttgaaaatattccacaaactggtgttaggaatgaaacaaacttgcaaaatgtatttctagaggcgttgccaaatttggtgcatatatggaagaatgacagctgtgaaatacttaaatataataatttgcaaagcataagcattaatgggtgt

SEQ ID NO: 1477 - DNA, 391 bp, Glycine max
tctatctgcctgaaggcctaacaacgagctttttatttctagctcgcatatgcatcacagcaaccttcacaattgtgtatatatatgcacccgaggtaatgtatgctactatattgcaaaataatttttaattatcttgttgaatcagagagtatttgaaatagaggaatgctagcaatagattttctaacactcactctactattagttaaaatttagtgaaaactaaaaatgtaagagagagattgattaaatataaactttgtatttcgatacaaaaattgtcctttatgttacagaaatctcccttccactaattaaaaaatgaattgtatgaagtacaatatttattctcaatatataagataaatgctggatgtggtttgacagg

SEQ ID NO: 1478 - DNA, 262 bp, Glycine max
aggtgtgtgtgtgtggcatagaaatagaatatcttttaagagaactaacatagcttttgcatgattgtcggtttacatgttgcattgccaagtaagaaaaaagtagctaaaagaagtgctaatggcctaatataaataactcttaaattaaacacaaccaatgttcttacatcttttgaagcggtggaacacttggtatcaaattggtggcctgaagggcatgaaagtggcatctctataccagtggagatcgaattgttgg

SEQ ID NO: 1479 - DNA, 321 bp, Glycine max
tgcctttgatatttcatgctttgtgtggatatactaacattcacttgaaaaatctcccaattaatgcaccagtaataaacactttttttagaacatacgtattctgcaaatactcctagttatacttgcgcctagaggaaaaataagccagtcatgcagaaaaactgataggctaaatggaatctttaacaactacataaactaagaatcattatgaaatatctgtcagttaaatttaccaagtgactccgtttgaaagtgccaacagagagtgacacatggataatttcatgacactcgatgtctcaaccacctggattt

SEQ ID NO: 1480 - DNA, 328 bp, Glycine max
tagttgtgcagcaacatactgaagaatccaatggcaaacaagtatgatgcttattgcaacaaatgttgaaaaatgccactattttccaatcaagttggggaggaggggttacataaaagttacaatgcatattttgaactaaagaattccatacatgccagtcaatattgaggttggaagtcatgcctgcggtaagtttgcaaataagtggtaacatattcctaagaaaattttaccactatttcaacatacagatgctgctaaagggccagccagttactctgtttaaaaatcaaagcaatggtgctaagacgctaatgaaccacct

SEQ ID NO: 1481 - DNA, 212 bp, Glycine max
  misc_feature (1)..(1): n is a, c, g, or t
nataaagctgctgctcaacacataaaaatccccaaaaatatgtgctttgttagactgcaaacaaaataaagcttatcaacacgtgaatcaaatacactgggcataaatctacaatgtggttaaatatcaccttaacagcattttgaatagattgacatagggacaacattttagatgcatcttggggtgtaaatgatgaaggcaataaggaa

SEQ ID NO: 1482 - DNA, 260 bp, Glycine max
taacaaagagcatgcttctgcaaacagaggttggagttgccgaaatggcaatccaaacacgcactaagtctgtaacttattctcaggttactgcaagtgcaagtggaacttccttgttatctattcaaaagctcacatcataaacatttttttttaccaagatacaccagatgaatttagaggaagatagaacggaatatcttagatagatttaggaaatgagaatgctttataattcgaggaaatgccatacataggtt

SEQ ID NO: 1483 - DNA, 427 bp, Glycine max
gtctgaaaagtctcaacacaacaaaactaaaggcagctctcaaatcggaccttacaaaaaatcataatcatattcatctccccagcataaactgctagctaatatacagtagtagcattctacaaaaccgacatagcaacatgcttgatctacaataaaaaaactaatttagggaattgcttgcacccaaaataaatgatcaagggaaaagtggaaattacaactgtagatgaaagccatattattccctatccattcatcaaagaataaatacatagacggggggctatgctacagattacataagtaatcataataggctatagaataaatggatgggttactagaaaatagtgtagttccatcttactttgggggaattgaaagattattctcaagcataaaggagagatcatgcatctgtaca

SEQ ID NO: 1484 - DNA, 334 bp, Glycine max
caggatccttctgtttctttgttaaggtttatggattcagttggttctctacttttcagtgccaatatctgcaccagaaaatattgattaatccaataagggtacaataacaaaatatgcaatatgcatgcagaaagtaggacctaaaaggctaaaacattaaacaccacccatattagttagccccccaaaagaccaaaacaaaaagtgctaacatgagagttttataagatatctagattctagaaactagaatatggtatgatgagaaattgaaaaatgaaaacggttatgtgcaaaacaaaaccagtgtggactatgcaagagagggaat

SEQ ID NO: 1485 - DNA, 249 bp, Glycine max
  misc_feature (1)..(2): n is a, c, g, or t
nncaaacaaatatcagcccatttcacccaaggaatttttttatgatcattgtctccaccccacagaaaattcctttggagggatatcagctttttgactaccttttgaggtattttgaaaaaggagaggagataaattgggagggcattaaggacagaatttataagggtgatcttcccagccatggatatatctctctgagagcccatttggctaatttagacttgaatttagtgatgagaggctccc

SEQ ID NO: 1486 - DNA, 281 bp, Glycine max
tttcccagtctaccgcaacattattgcttttctcctcctccttccttttgcctacttcttggaaaagtaattagtgccatgctacctcccctaacatatataactaatcaattaattaatcccattttataagaggatatatataaaattctgttaaaacttaaaactttccagttacaagcagctgtttgttttgcattgctcaacatttttttctcttgtccaggaaggagagacctgccattactttaaacttcctcttacagttctttcttctggca

SEQ ID NO: 1487 - DNA, 379 bp, Glycine max
  misc_feature (1)..(2): n is a, c, g, or t
nnctgagaggagaagtggtgggataatagcgacccactacttgtccattcttatcaaccacaaacttggaaaagttccactgaatatcatcaccaaaaattccccatttccccaacttcaagaatttgtacaaaggagcagaattgtccccattcacttcaatctagcacaagatcgaaggagacacatatataataccagtacatgtcacggttcttcaaataatttagcagaatagcaaaacggaaaatacaaaaatctgacttttttttttagtagtatcatatcacaattttgacaagtcggagtgcttaaaaatggtagttcaggtaaactttccaagatcagttatatgttgaactaccttatcaaagatggg

SEQ ID NO: 1488 - DNA, 363 bp, Glycine max
ttcagattcaatgtttccttgatcgaaatacaattccatatgtaaattattgttagacatgtagctatatatatgtttaattgctgcaccataatttttgaaaacttgcataattcttttctttggatctattcctcatattattgttttagggtggatgaaacaatttaatgatatctagatctactttatcttattttttcatcatcaacaatagaactatttgaatcaatgcatcaaaaaatgtattagggacgaagattgaaattgaagctaggtacatagtgcaaaaatatttgcttattttggaactggtctgatctgtgattattgaatttgattatgctctcagggtgaccaaac

SEQ ID NO: 1489 - DNA, 241 bp, Glycine max
  misc_feature (241)..(241): n is a, c, g, or t
cagatgatacgttatgagggtgcaaagggtcctattttgaccatccatgaaggtgaagaacctcctgggttttggattgctctttcaggtgattctgacaaagaagaagaggtcatggtcatggaggaaccctctgaaggcatggaaagtgctgagctggttgattcggggactactggtccaagaaaagttgatgcatatgatttggattttgagattttccacaaggcacttgctggtn

SEQ ID NO: 1490 - DNA, 215 bp, Glycine max
  misc_feature (214)..(215): n is a, c, g, or t
cctgcaataattgttcactgggttacaatcaagcaagatggcgaaataacgtttgattactgtgtcagagacattagtcatcaagcagagcatttaatgaaacactactaaatatccaagccacactctgacccaatgggtttcacccagatatcactctactcttacattattagataaaaaaaatgcagttaccacaatgttcataggccann

SEQ ID NO: 1491 - DNA, 274 bp, Glycine max
ggagatggacgaggaagagttatgagatttgatatatggcagattatggttagtttgtttgtctatggctttactaagtaccttgtagcaaagaaacaagttcgtattatttgctaaatgacttgggctcaaaataaatgtatttctacatcgtcattatttcacttacatgccaaatgacttagcaaacgagaaaataacaacttgccagactcaactccaacctctcgaaagttcctcacatataaatacgtgcacactcttattgggttct

SEQ ID NO: 1492 - DNA, 266 bp, Glycine max
  misc_feature (1)..(1): n is a, c, g, or t
nttatgttgcggtacagatccgaataaataattgccagcctgaatcgaacgcctcataacttatcaatcatggcaatgcaatacaatatgtttggacaaaatgttttatagtatctctctccatctgttcaaccaattgaagtagaccccttaacggcaaagcatcaaatttgcctcaaatttgcaacgagggcactggtaaaccataattctgaacctggaagatgccttccacgagatttttctatactcccgtgtagctgcgt

SEQ ID NO: 1493 - DNA, 245 bp, Glycine max
agtgagttgagctccttggttccttgcattggtgtgttcctcaaatcaaaaacctgaagtacagagttcactcctccttccctaaagcaaagcttcttcacagccttttcgatcaattgaattctccacctcaaatacttgtcacatttgttatctgatccaaaggtcttcttatagacgcgcctgtctttgaaaatcccacaaacatggtaacacacaggacgaccttccctatctttactgca

SEQ ID NO: 1494 - DNA, 390 bp, Glycine max
aagcgcatcctgaacctcattccagctgaataagaataatcaaggctctttaagaatctgtggataggtatgatgaactcagatgtactgaccctacaaagacagtggaatatcaaagacactgatcagatgccatactttgtaagaaggaaagaagaaaaaaaaaacaggtattacaaaaaaaaccatgaaaacttagaccacaatagtacatacatgtaaaatcatcaactgaagaaaaccatttcaagattcatacgttgtgctagaataaaagaacaatgtagtctaattctagatttattgtcatcaagaatctgtttgtttgaaaaagtaacccaactattggtacactcaagtattagcaataacaggagcaatagtcattgc

SEQ ID NO: 1495 - DNA, 218 bp, Glycine max
  misc_feature (1)..(1): n is a, c, g, or t
ngcataagagaaacaaactgcaaacataataacattagaaggaaaaaacatacaggcactaaatagcatgtacaactaagatttgcaaacttcaactttaaaatacagttaaattgtaacgtctgatgacactccaactttactgaaatcactaaaacaaatactagttctgcactaaactagatgatttaatatcataagagccattctcttccaaa

SEQ ID NO: 1496 - DNA, 203 bp, Glycine max
ttatgttggcaaatcaggtcacaacgataaatgcatcccagtaatctgtaaacatcattttaaaaaacaaagaaaaaagcaatgattgatcaaaacagaagtatgagagcaaatagatgaagaaaacatacgtagaaataacagtatcaatatgagaagagaccagaatagattgcccccttgcttcagatacatatttcggc

SEQ ID NO: 1497 - DNA, 428 bp, Glycine max
atgaagattgtcgaacgagtcgaggcacgtgatcttctatgacatgggttccagcagtacctatgcagcggttgtgtatttctcgtcgtgtgggaaggtgaacccggagcttgggggtcagcatatggaattgcgattggtggagtattttgctgatgagttcaatgcacaagttggtggtggaatagatgtcaggcattttcccaaggccatggctacattgaagaaacaggttaaacgaagaaaagaaatgcttagtgcaaacacagttgctcctatttcagttgaatcgcttgatgatggcgtcgacttcgggagcacaatgaaccgtgagaaatttgaagacctctgtcaagacatttgggataaatctcttttgcctgtgaaagaggtgcttcagcattctggcctgtcattggacctaatat

SEQ ID NO: 1498 - DNA, 401 bp, Glycine max
cttctaagcatggcattcctcaaattggtgccaaattgcaagaatttctggctgatttttggaatataattttacttcggaagagggaggagcaacttcaataaaaaatactttctaatttgaaattttaactccactattttataagtaataatcccaaacatttttcttcgatttttcaatagcaatccctcctctttcctctactttgaaaattaattcaactcatcccagtttagaatttgtgatttaaaattttgatcatagaaattaggaatatacagtaaaactttatttggggctaagaaaatgataaccagaaaaggaataaaacataaaagacaacaattaattgaaacatacatgtcaataattagtttaataaggacgctcacagccac

SEQ ID NO: 1499 - DNA, 342 bp, Glycine max
agtttgacccatcgaacagctaacagaaaattcgactttaaatcaaaacaacaaaatgaaacattcagagcaacaatattttcttagcaaccttaaattatgattctgcgaagtaacatgaaacttgatcattagtaccctcattcagttgtaaattgaattcccacgttcatctcaaaacccattgcacaaaatcaaattttgagaacagaaaggtgcaagacttactatgtagacgtaacactcgggcacttgaaagagaacgagctctatgggttcagcgtcttcgctttcgccgccacttttctgaatgtggggttcgttctcctcattctccatgat

SEQ ID NO: 1500 - DNA, 370 bp, Glycine max
gcggaagactcgatatgatatgcacactaaaacaactattctattacttagaaagagaagaaaaaaaaacagaataaaatttgaaatttcagccctacttcttgaaaattccagagctttctcattaacaagcatgcaaacagtcttaaaagcagtggaaaattactacgtacaactttacaacttgcttgcaaccttggacagttagattataagttattataacactaatcaacatgttaacgtcatcacttcctagttccgacacacttgttcctcttcctcttcgctttcaccacaggagttgtagcgctatacaaatctttaatacaacgatacctcttattctttctcgcaaagctttcatctt

SEQ ID NO: 1501 - DNA, 308 bp, Glycine max
caatatgtcgtcctagatggcgatgttcccaggacgtaagcgggggagaaagtctagggtttaggttgacattggaattgtaatatgccaaataagctggatcagctcgcaattgttcttcagactcgcaattttgcgtagtgctgcttagatttgcaaagcttgcattctgggcggtgttatgctggggtaaaaggttttctatggccagaaatgagccttcaatgctgggaggtgcactgccactgcgattgggtgccgcatcctttccaccaccttggaacctatggcccttcagaagtataccc

SEQ ID NO: 1502 - DNA, 318 bp, Glycine max
  misc_feature (1)..(1): n is a, c, g, or t
ncagttcagaaggctaagaagagtgtttaactaatcaatatttcaaacttttaagaaaggtatacttatttttctcaaaataaaaaaaaaaatggagaagaatgggaaggaacgaactgtaaaatcatcatacgaagagtagtctaactgttaattagctagaaaactagctacaatataatggatattagagacaacatatatatctttgatatctccttcatatcttaggccaaagacgaatcaaaatataataaagttgaagatgtaatagattaatcattttttgagttcatttgagtccaagaaggaagcaat

SEQ ID NO: 1503 - DNA, 360 bp, Glycine max
cagttattgcagggcacttagacaactaactacgtttctttcactaacagaattctgttagttagttgttagttaacagaactcagttagttagttgttagttagtttgtgattagtttcaagggctagaggtttataaatacctcctttgtaactgcattaaaggttaactttttcagaatcaataatattattttttctttttttttctgttctcaatactttctcttattttctctgttctctcagttctctaaatctgatatagtattagagcttgtttctttgtaaaagctcttctcttcagtttatcgagttgcaccttcacatccatggcttctgcatctcaaggtttcaatt

SEQ ID NO: 1504 - DNA, 360 bp, Glycine max
tttcagggaggagatattggacaaattgaaaaccttcttcctgtggtgttgttagcatccaggattttgggagatgttacaaattctgaagaagggcaagaaaaaggagataaaactagagtgagttcttctgagggccgggttgattactatatctgttcttccgtgaaaaatgcttttgaaaaggtaggtattagttaagaaacaataaaaaaggttgatatgttagaagcatgtatataacttatagtattttctgctttttaatttaaaagtaagaagaaaatatcacaatgtctttgatgattgtagatgatggaagcagcaaatgccaaatctgccgagtctgaaacagagaaa

SEQ ID NO: 1505 - DNA, 337 bp, Glycine max
ctttgcaaacctcaatcgtaaatccactatccataagcagcaatagccatgctctctgctgctcagagagtcggtccttggggcctttcacttcaacaagcttggcttcaccgctgtattctccatggaaacgccatagcagcaaatctggcattccactagaccagctccggtagtcttgagccagaagtttgcagagagatgccaaacaaattcccccaacacaagtaacaacagcatgaagctcatctaaaggatggcagtcccaattaactcctctacatgctgttccgatatgtgtttcccatgacttaataagaaactcctcagccatgcc

SEQ ID NO: 1506 - DNA, 424 bp, Glycine max
taaatggtaatgcagaaatgcaccaaatgcacaaaagatatgtgaatctcatacatgacacaggtcacgggacaattttcttttcataaaagaagatattttgttggtgagaataaagaaactgcaatgttaaggtatcatccaaaacatgaagtataaaattgtttgttggctcatattgtgactctcgtctacgtgacagcgtaacttgttactaaatttttggtaagaaacacatgaagtgctcactacaacaacagaaatcaattcggagcatctaaaaaaattggggatggggaggaaaatatgaattgataatagtgttatgcaaacaatacctggtctatatttcggtctgaagctagttttatcataatttctaacttttccatttttacatagatgggatcgttgtacttgcaga

SEQ ID NO: 1507 - DNA, 451 bp, Glycine max
aacaacctaatccaacagtgtcactactggataattaaattcagcacaattcttttattttggtgttctagcaagcactgttgatcaaacaaaaaactactaaatttatgggaactgtcaacggttatgatgaatcttatggagaaaagagagagaacaagaggcatggaatgaattccgcgtgttgactaacacaacagagcagatatttatatcaagagtcataaatacaaggataattatataacaattacaagaatatacagttactctaattaacacaattacataatgtataatctgctctattcctattattacattatttctaagaaatctgttcccaagaataaacttaaaaatcaatagatgccactagcattcaaagtccaacctgccaactcttcatcaagttttgatctattctttgatgtcttgtcacaatcaacca

SEQ ID NO: 1508 - DNA, 346 bp, Glycine max
cagccaaatgcttgggatatcttagattgaaaagaagaggaatttgtaacataattacagtcaacaaaaataccaatgggtgctatctaatcactaggtaaaaaaatttagaaaaaaaaactgataaaaacagcaaagggacacaattcaattgaaatacggaaactgtaacacattatttaagttcatacttaattagcaagtttgacaaattgaatatggagagctagcatagaaatgatatcattcattaaaatagaaataaataaataaatagcaaggacaagttgatcttaaatttttaaacagtacaacaataagcactaagtagaccaagacaccatga

SEQ ID NO: 1509 - DNA, 373 bp, Glycine max
tattggatttgggttaccattggagactaatcatttacttgtctttgaaacaatcttgataatgtagttggtttctgaattaaaactagtgatattttctacctggtaattgttatggcatgtcaactgcctcctttattttgctgagcagcttaggggattgttatagcccatgactaaacataactccttctatagagtttgaagtctgttgcatatgaaggttctaaaattctatagtagcaatttttctctaatggactcgatccttctttggacttgagtatttatcaataattggatgtcctatctactatatacatggtgttaggcatctcatcatatatgctgctattgtgtgtgtgcacttaca

SEQ ID NO: 1510 - DNA, 299 bp, Glycine max
ccaccgttgttaatggagtacagaacttgtggattgcacaggtatttaaccaaattggatatttgaaatcaatatttttaacttctttaatcttatgttgttgtcagtttgcttattttattcatctgcaaattttctcttattcaagttattgacttttgagactttacttttccagccccctgagaatatgaaatatgcagctttggtgatatgtggttcattcgtcattgaaggtactgctgtctgcatttcaatctgaatgcagtctatttctgtcctttccttcttcaatgagc

SEQ ID NO: 1511 - DNA, 445 bp, Glycine max
aattcctggaaataccgctgttgctcagcccccagcatatgctctggtaagctgaatttactgtaagagtttttttttttttttttaactgcaaagataatttattaatgattaaaagtaccagtggtactacaggatacaatgaaagattgacttctgaagaaactaaacatacaaacaaccatcacaataacaaaacacaaaccctgcccttcctagaagcattatttaaatgctaaagacattgctgaggaccactggagaaaagggacactgaaatccctttcccaccccttcagccaggtccacataaggaaaagagtactatctgccagtttagaaatatcaaaggattgactatggaagatgatatcatttctgagcttccagattgaatttgtagctgccaaccaccagatttaatatccttgataacatccacttt

SEQ ID NO: 1512 - DNA, 228 bp, Glycine max
  misc_feature (1)..(1): n is a, c, g, or t
nacgggttatatagaggccaaggaaatgataggctggtgaaatgttatggctgtgaaatttgttagttgtggagtgtgagggtatatcgcatctgtcatgcagaactaggatcttttatctaattattattggcgtatttgccaaaccgattctttgtgtcacatatatttgggtaaattttgagtttgattatggtgaattgcgaatggacacatgaaatacctgtt

SEQ ID NO: 1513 - DNA, 369 bp, Glycine max
ggcttattgacttgatcagctgaaagatgaactttgcaaggagaatttacagcttgcaggtatttaatttcttttatttaatggtcggcctataattaaattgtagtagagcttctcaaactattgcctttactacagaggaaaatcttcaaaaggaacctcgtatcatggaacttaggaatcaagtaagaatacaatcctatgattagtatgcttttttcttttcaatttattgctgactactgactttttcttcttcctcccatggaaacagtgtagaataattcggacaactgagttagctgctgctaaggagaaactaaatgagcttgagaagcagaaagaagacatgttgaaattgaattccgc

SEQ ID NO: 1514 - DNA, 425 bp, Glycine max
acatgccaactagggagttgataccaataaaatataagaattatcatacaaatttaagagtcaaggaaaaatggagcaacattttctactggacaaaataactgaaacagaaggcaatggaatgatggtgtacctgtaccaaaataaaaggtaaagatacacctccactgggaggatttcctgagctatataactgctcatttcgttgaataaggttctgaagacctacgaacttgacataataatacaagcaattagcaattagcaattagcaattagcaaatagaagctaaacataacaaaagataagtaatttgtcaggttcttcaacaagtccaaatttcaaatggagagaaccaactccacaatttcattcccaaattaaatattttagacagtggacaggacttacttgctcctcaagc

SEQ ID NO: 1515 - DNA, 379 bp, Glycine max
tctgtttcatttgccacaaactacacttgaaaaatttgttcaatactctttgagataattcaggggtttggtgtagttgtgacaacctattagaagtgctagatagtaagttccacgcaagaactgaagtaattgcaggcagaatgataaagaaacctcacccgatgagtatattcatttagcgtcttaaaaataggataaagcaggttgcacaatatatatgcacagggttgttcttttagtgtaaagcagtactatttctttctcaaataggaatcttgcttcctaaatattttatatagttgaagacattttttaaggtttactttatgaaatttttagcatgtactatgcctaccatgaattgatacatagtttg

SEQ ID NO: 1516 - DNA, 392 bp, Glycine max
  misc_feature (222)..(222): n is a, c, g, or t
taactaaccctctgtcccttcttgcaacaattgcaacctccttccttccactcttttcccatcatcattccacacctacctttctctctcccccatgttttaactttcttcaacactcactgacttttccactatctcttccttcttccattcacatcattttctcttctttcttcctccccctttttgttgttgttgttgttgtttatttatcaattattncaccatgcccctcaaacaattcaaccaaagcttgcaactttgacaaccctttggcctcttcttcttgttccccttaatgggtctctctccaattcccctcacaaagcctatctattctgatgtctgaatttcactttggttttcatatgttcccaaaggctacacctttg

SEQ ID NO: 1517 - DNA, 339 bp, Glycine max
tttcttcattatttgccttgccattattctcactggcaagtggaagagggtctatatatgtgtagggaagaactcattttttttttttactttttgaaaattttaaaatattgataagtttctttgtaagtaaaatagtgttgttattttttttttttttgtgacattctgagttgtgaatatggtccaaggtgactttgatctctgttgaagctggcttgtggtgcacaagggtataaaatcaggcttaagattttcatttttctcactgcattcttaatttatgctacaaatcactatggtcatatggtgcgaaacattgtcctggattgcttgact

SEQ ID NO: 1518 - DNA, 349 bp, Glycine max
ttagcacccattcaacaaatatggacctcaagtgataaacagtttttcattctaatgataataaaagaactaacattgagagtagatggtctccttaactaaatttggatcattgaaccttacaattagaaatttgagctttctatttgcaattttattttattatcaataacaatatacaagaacaagaagcttacagaattctgagggaaactcaatcaaattataccacgcaccatagacaaatgtctaattcagattgacttgatctcctcccaccaaaacaacaagatttctacaaaagctgtgaaggataaatacctggagaaacagacatgcaggatactgg

SEQ ID NO: 1519 - DNA, 271 bp, Glycine max
ataacaaaccatagccggcatttcaaatatttacttcgcatgatgtgaatactctctagctataactaagtccaacccaaagtctagtgaaggtgttcttcgatgagcaactgattaacagaataacagacaaacaaacaaagggttgttttcatcattctttttatacatgaaagaaatcatgcaatggcaggcttctctcctgttgctgcctctccgctagcagttgccttagcacgcttagcttcatagtctttaacggctgctttga

SEQ ID NO: 1520 - DNA, 305 bp, Glycine max
tggttgaatgagtttgggtacactgttgaggatcctctattaacttgcaatatgatcaaagtagtgtaaataagtgattctcatctcatgagctaatttttaagattgaattagatctaattctcacctcatgttgtccgaccgataatggaaaggaaaaatagaaggaaaaaaaaatgatgagatcacgttaagcagaggaaagggattggtggaggattgaagatgttgaaggccaatcgattggagccacttgttgctattggataagtcgttgatgaagttctcaaagtattggcaagccc

SEQ ID NO: 1521 - DNA, 354 bp, Glycine max
  misc_feature (352)..(354): n is a, c, g, or t
ctcctgatacatgctcacctgtggagcatatattgcatttggaacctatagaggtacccatatatattatataaataatagatagaaaaggaaactagtcagatatggttgccttggtttatctttgatattaagtaaattgcctgtggtttcatcgcaatagttgacactgccgaaaattgcaatcttgatgcagttgcagtcagttgaaaaacctttatgttgcagatcacaattaaaacgatgttaagtagtatcctgctatattttgtatagttcacccttatatcattctgttccttctctttggaaggtagatatcttccgaggaatcactcctccagatgctccnnn

SEQ ID NO: 1522 - DNA, 361 bp, Glycine max
tttgcatgtgcagcatattaagtgtgcagtaatttactctctaatttgtgcctataacaaattgtggcctattagatcctagacttatctagttagcctcagggatttgaagttttgaactatttctgaaattgctagctaaggttctgtataaaatttttcattcacaatacttgtagatataggtgtctgttcttttggattgatgtgctcttctggttcagtgtatcttatgcacataattatttactttagaagtttaggctattgcatcatatgcttatatgattttgtgttggcgaggcattataattactgttatattgttttcataggtttatcctgtgtggaagtggtttga

SEQ ID NO: 1523 - DNA, 209 bp, Glycine max
gcgtcaatggcttagacacagtagatattatagttttcgtgttaattttctttcctatacaagtatacaacaatagtgttaagactaaagatttctgaccaaaattttgatgatagtataactttatatgagattatttaaagtaatttaacaaagtcaccaagtgtaaaaaatcagaagacgcttgcagctaacaacaaatttaagcc

SEQ ID NO: 1524 - DNA, 230 bp, Glycine max
  misc_feature (230)..(230): n is a, c, g, or t
tgacaatcatgcataagcttgacacaccaaatacaaatattacaaacaaatttacattccccaaggagaaaatgtatgaccctaataatatgatcgatcttcgtaggtcacaggacaataagttgagtggtcatgaatgactgaaactcacctctattgtcttagtcatatgaagatcccacaaatgtcgcatttccaaatcagaagtgttggagattatgccttcaggn

SEQ ID NO: 1525 - DNA, 311 bp, Glycine max
tactatgcagggacagttggtgaaatccgtctacctcttcttccttatcctcccactgatttttcttagggcctccttcctccgcttcttccataatcatcaatctgaactgtttattcttacacacgagcaggattatacttctctttacaagtaaaacattctcatttcctcatcttctcatttactttcgcatgtgacaaattatggaaggttcttctacctcaccatccactggatcctgttttagcaacattagtaggatcaactacctaactatttactggttgccaatcccttacaaatttctg

SEQ ID NO: 1526 - DNA, 315 bp, Glycine max
gttgtcttcaagcagcagccaagcaacacaatctgcaatcacttgaagtggaagctgggattgggtgataaaattagtttttggaagggtaaatggctgcaccataatctgactctccaacagaaatatcctactttgtatcaaatcagtggccaacagtcctctacaatcaacctaatggggaaattggtagcaaaaaggtgggaatggaagttcaaatgaaggaagaatcttttttaccatgaaatccaaacggtagcagctttcttggctgagcttgacaatgttcacattactcagtccagcagggattct

SEQ ID NO: 1527 - DNA, 261 bp, Glycine max
tctcacctgatcaccttcttgactgtctcaaaataagttctgaacatgaagcacttgagctggcagataaggttgagtcttcaatgttcacttgaaggcgaaaagcttgtctgagccactcaaaaacatcatggaacaaagttaaggatctcatggctgacactgaccgaagtgacaaaaactacatcttagctgagagagctgagactttgttgttttgcttgaagcaaagatatcctgaactttcacaaacatcattgg

SEQ ID NO: 1528 - DNA, 390 bp, Glycine max
tatatggcaggcaacattggcattatctttctcaataagtagttcaagcccaggcatctttaaataagttctagcaaaatctctgatggatttcacttaaactgagaaacaaaccacaacaccagaaccatcaacaggattcatgtacctcctgcatatagtactcgcatccgaactcagtgcccacgacttcaagaggaaccctggttaaactactctgtacatctgaaattacttatataaacctgcgattgaataactaccctcccaattttaaaaccaggaagcacagagaatcccaccttggccctccccttgttcggccaggtcaacctctttgtcacatcttccatgtatatcatagaaaactccacacctctttccacttga

SEQ ID NO: 1529 - DNA, 357 bp, Glycine max
cctcaggaccagttattccaagttctataattttttttctgaccttcgtccacagcatctccattttctgcatggaccatagctaaggcaccaagagacttgcactttttaaatccttccagaagaaactcatcattgatcataagagctcctttatatgccatgaaaaacttaaaagagttggtacctgcaattacaaaaacatagatgcactagatgaaataaattccccataaactcaaccaaagggttatttccacataattagctaaattatcaaggaaataaattatgacctttctccttgaccatgagctccatttctctcgacatggtttcatcccatttggtaatagc

SEQ ID NO: 1530 - DNA, 255 bp, Glycine max
  misc_feature (255)..(255): n is a, c, g, or t
tcatcaccaccaacaatgtgtgttaaacaattggatatagaagtacagagcaatgcatgtgctgttccgaataactgtagggcatttaacccaaattgcatgaggcaaccatttcttcttattataaaatttttacttgctatcatgaagagcatgttggaaaaatgttaacgactagccaaaatcatgttgagtttcaatttcaaaagaaggtaaaaaggagaaaaatagcttccactatcaacgagaatgcgn

SEQ ID NO: 1531 - DNA, 381 bp, Glycine max
aagtgtggcaacaagttgtacatgccatgaatataattttctctaagtatgatgtatttttgttgggtctaatatatatagttcattttattgactataaattaagacaaatctcatctctttgattaattacgttagctttagcttgtggtggatattggatatggaaaaaaagagggtacagaacttgatttgatgtgaaatatataatatatatcttcacactgataacggattaatgttagtgacagtgaagttatgttgctacatttggttatatggtgcttggattttctttttattctcggttgtttaatgttcaatttctgttgaattgtttaattaatgcattaattgagggaatctgtgaggattagttca

SEQ ID NO: 1532 - DNA, 379 bp, Glycine max
gaaggcatatgattcggtatcttgggaattcttgttgtatatgttaaggaggttaggatttaactcacagtggatcaaatggattgaaggatgcatcaaatctgtctcaatgtcagttttggtgaatggaagtcccacagatgagttccttcctcaaaggggaattaggcaaggggatccgctagcaccctttctgtttaatgtggtagcggaagctttatcagggttgatgaggagggcaatggcagaaaatctgtacaaaggatattcagtggggtccaaaaatgttagcataagcattttacagtatgcggacgacaccatattctttggagaagcaagtatgggtaatgtgaaagctctaaaggctaccctgagg

SEQ ID NO: 1533 - DNA, 286 bp, Glycine max
cgttcttgctggacttccagttatttggatactttctattgtattactgcttccgggagccatgtaactcatgttcttggtagccattttcctctcatcacgtcatcgaagctttatttcttgtggacatgccaagctgcaagcttctctcatggttcttgattgaataaacggactgggtcaacatattcatcttgcaggccagccaaataagcatcaacaagatagtctttggataagcaagcttacaagaaatcacatcaaatgcatcattaaattctgccaa

SEQ ID NO: 1534 - DNA, 309 bp, Glycine max
  misc_feature (308)..(309): n is a, c, g, or t
ccaacctgagtcaatattcccaagaaacactaaatatcgttacctaaaggcatgaacagagatctcttgacaacactgcatttgtataatttacaatgataatttacaaaacaaatttttgggatccttgagtcaccactttgggaaaagttttatttaaccaagaccctgccccaaggaatgggtctctcaggtatgcttgtagagatacccggtcaaagactaaaaaatactaacttctaggagctctcagacaaagccaggcaaagatatgattgacactggattgtatagaaagtttccttggnn

SEQ ID NO: 1535 - DNA, 254 bp, Glycine max
tgcaaattgaagttgactaaaccaccccacaagacaaaagctatagtgggccacaattttattgattcacagctcttgtagtattataattttactctctttaattaagcctgcaaaatcattctatatggcattggaaatagcatgccactaatcatatcaaaagggtcaagccgttttgtttttattttttatttttagcattttcccctttgccacacaatgctttgtcatcagtaacaccatgttggctc

SEQ ID NO: 1536 - DNA, 243 bp, Glycine max
agattaattgactgcaagggacaggcaaaatcaagccagcaaaaaagtgcatttaaaattaagaacaaaaaaaatgttacggaacaatacacaagttgaacaaaaaaactgatttttcagaagatttatttccaacctcataagtgagtttctcctttgcaagcacagccaaggaccctcttccattttctgtaaggaaactgaaaagacccattgctccatttctagggaagttctcaaccc

SEQ ID NO: 1537 - DNA, 324 bp, Glycine max
  misc_feature (1)..(1): n is a, c, g, or t
ntcattgggtgctaaagatgttgaaaatctatctagacagtcagtttcactaactggtgagcatgcttgtgggggacatgtgtgtggagataacagtcaggagttggttgatggtgtcactagcatggaaaccaattgtgaagatccctcagagtgtgtatctcaccataatgcatctgatggtgtggtgaaaaaacgaaaagtggatgaagatttatcagctgatggaaatgttgttgctgatttttccttaaatgactcaagggaaactaagctagaaaaatcaagtattatacaggatgacatgttaatggactatcaggg

SEQ ID NO: 1538 - DNA, 295 bp, Glycine max
tgatttgacagaagctgcaagctaatatgcatattctattttattttattgctacgcaagctaatatgcatgtgaatattaatgtttttgttcaaaagggaattcgcttcttttgtgagattactacatacacacccagcttcaaatatcacggatgcatagaaagctgatagggtcatcaaaatcataaatgcatagctgcctaagatatgcaaatcaaaccataaaagaaatacaggcacaaagtaaaacttgcctccatttggcgagctggataggaaggtaaattcccgac

SEQ ID NO: 1539 - DNA, 441 bp, Glycine max
cattattctctgctgagcaccactcaatgtctcagagttcataatcgcattagctacaacaatagttgtgtgtggagatgctgcatcgacctagatgaaaaagttcagaaaggaaagcagaaattaatagaatgaaatttcaccaactctaactcaaatgatggtcaagcatatgcttcatacgagacaagtccatttaaagaagcaaaaaaaaaaagaacgtaatatggcacgctagagatagagggtgtctgcatacccaaacacgtccatttaagccaactgctatctcaaacgacagtttcttccctaaagcatcaagtactggacatgtgggagaactgagaagcctacaaacaacacacaatctctcatgtcaagatcttttaatgttatgcatagacaagcaaaattaaattccacagccatacatccttgatt

SEQ ID NO: 1540 - DNA, 316 bp, Glycine max
agatgcagacaaacccaaaggtctaatgtttcttccattaacatcaatgttcctccctctattgggaaccatttggttgctttgttgctgcctctgagagtaaaccccatcacattgcttctgcacattccagaccgagttctgctgctttgccagctgttgctgcctcaacaactgaaactaaaacaaaaaacaaaaaaacaaaatcagtaagatacataacaaaaggaaaaacttttagaaaataacaaaagatactgtaatggggttagcttacttgtgctatctgcaattgctggtgagagagtgattgttg

SEQ ID NO: 1541 - DNA, 264 bp, Glycine max
  misc_feature (264)..(264): n is a, c, g, or t
aggtgggttcatcattcctctcataatttgtttctcccaattcatattgtttacaagaatcaagcatgcatggtgtcttattagttattaggtctttctgttttgggttcccaggtttgcgaatccgtcatcaacttctatagctaatgttaatggcgaggcaaagattgagccagtaagacccttttggtcactttcaatgctttgcgtcatacaaagatgaaaaaaaaatgtatttttgtgttgactgttgttctgttgtgn

SEQ ID NO: 1542 - DNA, 337 bp, Glycine max
aaaggtttgcaattggatttaaggtattattggtatcacttgatgtctgggctgaggcactgctgacattagaggaagctggtggtagagtagatgccctaggtggtccagcctttcttagaggtatttttggaagaacagatacattatcgctggaaggacctaacgaagatggtgatgcaattttggacactgaagaaattaatgtggcaggggaagggccacctgaccgtgaaggccgaacccctaaccgagatggaagattccctgtatccagattacttttagtttctctggctaaaggcacttcggacatgggtggcttctcagtcttaac

SEQ ID NO: 1543 - DNA, 307 bp, Glycine max
aacgtgagaagatgatggaagaagctgccaaagccaagactgctaagcttgtcagacaaattgaacataaaatatttatagtaagtatctacatattttatacagatattatatgcttgagatagtacttggtttatgatttatatcaccagaaagtcagacttggtttatagtgcattagtggatataataaaacttattagcattgttatagtagtccccagattggaattcttgattgattagaatataaattctgccagctttttttctccttaatttttgctgctgcatgtttgtctgcttg

SEQ ID NO: 1544 - DNA, 219 bp, Glycine max
  misc_feature (1)..(1): n is a, c, g, or t
ntactgtactaaggcacaccctttggccaaagtttggtgaaaaaacatgagcatcttcttttacaccagtcaaagcattcggacaaggttgatttgataagtcctgcttaacattgtaatcactcctgctcataactccaccaacgatatttacctcgtggccaaggggttcttgatcatccatgtccaaatccattgacttcaccattccaggatcat

SEQ ID NO: 1545 - DNA, 223 bp, Glycine max
atcattcagggcataccgttctttagcggataggtatgatcacatatcaactgagttgcaaaatgcaaacaacactatcgcttctgtgtgcccggatcaagtcccatatatggatgatgatgatgaggattcgcctagaccgaaaaccccgagaaaaatgccagaagggcacaagccaaatattcctaatgttccaaaggttccaaagcctccacttagagat

SEQ ID NO: 1546 - DNA, 313 bp, Glycine max
aatgcagctgctggcttgagagcagccatggcagctcagcttgtgtggacccctgttgatgtcgtgagccagaggctgatggttcaaggtgtttgtgattccggaaatcctaaggcttcagctcttcggtacatcaacgggattgatgccttcaggaagatcttgagcagtgatggtcttaggggcttgtataggggttttgggatatcaattttgacctatgccccttcaaatgcagtttggtgggcttcatattctgttgcacaaaggatggtttggggtggagttgggtactacttgtgcaagggaaatg

SEQ ID NO: 1547 - DNA, 316 bp, Glycine max
atgcctgcccaatctctagagtaaagtaaactgggttaaatttgtagaaatttattaatcaaatacaaaaataaacctagagtattaagaaaactgaagtgataacaccaaatactgtctaccaaaaaaaaaaaaccctgttggaagccaacatagatgtttacaagtagcccaaatgcttcaataagattgaagaataatactttgcagtttttatgtaatgaccttggaaaagaaaggaaatcagattcagaaaaatacctgtgccataatttcatcacccagatcaataaaggagtcagcaaaggaaaccttc

SEQ ID NO: 1548 - DNA, 224 bp, Glycine max
  misc_feature (1)..(1): n is a, c, g, or t
naggaaaggagaggttggactgctaagttcttatgaaagcataccttagctagtatttcttcattggaactttactctattacagcaaatggtagtagcttttgacattgatgtcatagtttgaaatctgagtatatattgatgacttctagtattaaaatgtgtatccctattcaactatgtttttgaaactgtcacaatgcagacaatctattgcttacggc

SEQ ID NO: 1549 - DNA, 396 bp, Glycine max
accagcatttccaaggaataaattgatttcatctttagattctttaatagtgggaaacaatcccccacagccttccacaattgcttgtttggttgtttggtcgtcttccacacgcagtccaagggtccttaatgcaccaagcatgtaatgaatatcctcgctgtacagcaagttgtctataacagttgttccctaaataagtaaataaaaaaaaccagaataaattatagtttatgccaaacaagacatctattaaataattaaaagttataaaaataatagaatgaaagtaacacggaacttgcagcaccattctaatttgtgttttgggggagggattatcttctagagctaaaattggtaatacaaccatacttggataatcaagagtcaaag

SEQ ID NO: 1550 - DNA, 400 bp, Glycine max
tttctattaaaagtatcttaattgcttaacatgctagttccatcacaagtactgctccatccatcaaggattgtttattcagtacctagtcttgcagcaatgaaaactattgtgtcactgacaattctttcaagagatgcagatgggcaagatgttagcttcgtcatattaatttgccaggctctgtaagatgtggaatgacttgtgatttacatactgcatacgacttcacttcaaaggatagatttacttttttgacaatatatacatggcatgctttattcgtgaagctagttcattcattcttcttggttttaatcaaatggtctcaactctcatagtacaagttttatgcatattaccagctagtgctgactggtgtggcaacttaagggggcta

SEQ ID NO: 1551 - DNA, 366 bp, Glycine max
ctcaacatagcaatgcacctgatgtcggcccctctaaattcagtgagcaaattaatagaggacaactggaccttaattgtgaaaatcaatctagcaagctaaggtgcaaaggtttatcactgtctgatgccattactagtacttgtgattctcagatgcatagtggagaatttgaagccctaaataaaaaacccaagtcctcagatattgaaaataaaggtactaataatgatgaagaattgccatctcttgagctcagtttaaagaggcttagaggagttgaagatgctgatattacaattcaggatgaccggaatgttttaagacgttctgatcagtctgctttctcaaggtatgatgatttag

SEQ ID NO: 1552 - DNA, 272 bp, Glycine max
  misc_feature (271)..(272): n is a, c, g, or t
atgaactagtgggagaacatgcaaaataaataatgaaaaaagtttacccactaaacttgagaagcataagaacatagtaagtaatggacaattaccaagtgtaaacaactggctctagaagatagataaattagcatgacacaaatttcatcaggacagatagagatttcacctaaatatttgtagttatgtagttgcaaggagataaatcttcagaagacacactgcacattataaaccacagatagacgtgacagtgtgagacaaccann

SEQ ID NO: 1553 - DNA, 202 bp, Glycine max
  misc_feature (1)..(4): n is a, c, g, or t
nnnncctgcactgcggtacggagaagacgccgcagtggagaacgggaccgatgggaccgaagacgctgtgcaacgcgtgcggcgtaaggttcaagtccgggaggctggtgccggagtaccgaccggcagcgagtccaacgttcatgtcaacgaagcattcgaattcgcatcggaaggttttggagctgaggcggcagaagga

SEQ ID NO: 1554 - DNA, 337 bp, Glycine max
tttggtttgctatatgaactttcttgagcttgcttgaaatctcttttattttgaaactagtatacaaacttccatacaatacatattgtctgtaataaattgatgatgttttctattttttccctaaaaaggatatttttagacttatagttatcatataaacatcagtcaatgagatgcttgacaactcataccttgatcttttaaaatactcattggagaaggtcaatactaagtcctcccactgcttggatatggctagagaaattatttccttatctgagtttaagctaattttttggatgcttattgtgccacactgccaccacttacattt

SEQ ID NO: 1555 - DNA, 218 bp, Glycine max
aaccatttgagctcctcattccttaatctctctatagaacttctaaaattggtttcccacgcatacagcttcaacaccttcatattcacaagagcctcagaacaagccttcaatctatcatcttgtgtcaccataagcttgctttgaaacttgtgctgtaactttgcgagtggagtattgcaaagcacagtgattactatcaccaccaaggaggcaat

SEQ ID NO: 1556 - DNA, 309 bp, Glycine max
caagctttcatccaatgtagcagaatgcaaagaggtatatcttttcagttgctcttcactcaattctctacatatcatgcactgttgatgagtaatgtcataataagcatggatggctccttctatgtcaacattatcaagcttctgaacatccaggagtcgatcaaggactcccgatttttgcacagcctcagcaacaatagtaagcaagttctctgtacacagaccattatcagcttgaatgacagacttaagtgcatcttcaaatgctttagcaataccaaagtttgtatcttctgcaccacctcc

SEQ ID NO: 1557 - DNA, 289 bp, Glycine max
agcttgagataatgtggccaggaaaaggagaacaagcttataacaaaaaatcattgtgccccaagatcttttaaacataccagatccattgcaagcatggcagaacccatatttgttgttgcaaaaggtacacaaaaaggattcatcttcttatatgagattcttaaagcttcaatggcataacccatattttaattttgttgttctgcattgattcaagatcatggctaagttgaatactttttccatcagcaggtccttcatcagcactttccttgtcatgtgaact

SEQ ID NO: 1558 - DNA, 411 bp, Glycine max
aggccattccaataggccatagagggatcttggatattgatactatttatggcatccgaaaagctttccttccacaggtataatatacattgtcaaattgaacatgttacctatcatagataataactccttacgataatataaaaaaatagtattgaactccccaacattctccttttagtaataatgttcgttaatgttagcttcaccataattgtgtaccaattgttctagacaacttacctttggcttgaaactgtttagaattacattacaacaaaattgattcatttgtttgaactgatactttgtattctatatactaatactcattttcttgttgattccatcatgaaattaggggataaggaaatatactcccttaggacaaccaactgctcaacaagtgtt

SEQ ID NO: 1559 - DNA, 271 bp, Glycine max
tgtaccgaatccagttctagggaaggtgttatttttcaattgaaaagacagagaaatgagacatgtgatccaaatccaaatccaaatccaaatcaatgaaagcttccaagaataggtgtagaacaacagatcatatcagagaaacatcctgacatattgaacagactacaactttttgcatttctttgaaaatcttccctaaccagcaaccaaatactaatctatatattgatcagtgaccttatcataaagatcaaagcatccaacaaaa

SEQ ID NO: 1560 - DNA, 196 bp, Glycine max
  misc_feature (1)..(1): n is a, c, g, or t
ngatgtcccggttgagtgtgcacgaacactccgaatctccacaatgttattgaagaaaggggttgagagaggtctcactccttatgacattggaagcattatgtgtagggaaaatttgaacaaagaatctgtcatcgaggagattatttgtgaagcccaagaatcattgctacctggcatggaggaatctgtgttt

SEQ ID NO: 1561 - DNA, 219 bp, Glycine max
  misc_feature (219)..(219): n is a, c, g, or t
atgatttggtggagaacgataaggaagccttgtctgacattggcaggttagaaaagtggataaagatagcaatttggtgcattcaagagcatcctgaaatgaggccaactatggggaaggtcaaccaaatgatggaaggtttggttgaagtccctaacccaccatcgcctaatcctgatgtttgattaatctcttgacataattcccatcctccctaan

SEQ ID NO: 1562 - DNA, 232 bp, Glycine max
  misc_feature (1)..(1): n is a, c, g, or t
nttacatctctccaaacaaaggcacgtatgacatcaactctttcaaacaagagacagaataggaaaaaagtgaaagaacagcatcaaattgagatactaagcagtcaaatagtatgtatctctaaaatttaaaggaacatcacttgacacaaaaacttcactcttcacaatgtaggaacacagggacaatagcaagaaaatatagcatatttgatattcctgcacactgatg

SEQ ID NO: 1563 - DNA, 264 bp, Glycine max
cagatactcccacacgcaaagaaattccacgcgagctctgctacatgcatcagactcaaggtttccctcaaagataaaaacatgattttcgttcatgaattcaaagatagtttacacatgtttggcaaaatgttatttttgaaagagtgtatatattagttcgcaaatttgcagtaaaatccacggtaaacagtagcatatatagactgtgttctatcacaacaaagttgtgtttttcttgttcagcatgatctccaaatgaat

SEQ ID NO: 1564 - DNA, 320 bp, Glycine max
ttatgttccaaggccactgatctttatagcccctcttctgctttattcttccaacctaaatggttaaaaatatgcaacaaaatcatggcatgttgtgcctatttcaagtaagagaagagaaaaataatcatatttccctagcacaagtaaagcatttcttatataagcacgatcagagatataacccataaaaaatgtacttacaaattaaaaaaaaaaaacatgtgaatttactcagcattgcattcatatataaaatattatcaatatgcaaaactctaatgtaaaaagatcaggatattacttgtccaatgcctcca

SEQ ID NO: 1565 - DNA, 254 bp, Glycine max
  misc_feature (1)..(2): n is a, c, g, or t
nnttctacatttcaatgccaagggactctggatgggaagtcttacagggtctgttctacaagtgattattctgactgttgtaacagtgttaacagattggcagaaagaggttggtttatactttcttatgtgacttctccattgctaataattgcttgagtcatttgttttttttcttttccaactagtttttgagcccttttcgttgcctttgcttgatgaatccaatggatgtctgttaattaaagtggctc

SEQ ID NO: 1566 - DNA, 243 bp, Glycine max
  misc_feature (136)..(136): n is a, c, g, or t
aatgtggattcttctgaaggtggagatccagtgagctcgataaatggaaatttgaaggagagggatgtcatgaaaatacatccgtatactgcatttgtgtattcatttagtgcagcaggaaacccaaaatacatgntgacggttatgcattcgtctattatttcgttttctgttgaataatcatcatgcttgtcatcaatttaatgaatatgtggattttgcattcgtcattggtagaagtaa

SEQ ID NO: 1567 - DNA, 414 bp, Glycine max
agcataatcattcaacgcattcagaatatggtcacattctaccaaagctactctaaaataaatgaaacagtcgtcagcaaagagtaagtaagagatgataggtgcacccctatagattttaatgccataagtatgtccttgcccctccaacttcttaataagagcttaaatcccttcagaacaaaggatgaacaaaaaatgagagaggggatctccttgtttgagacctttcccctggataataggaccaaccaagctttcattgataataacagagtagacagattggatgcaaattaaaatccacttaacccaagtcgcactaaatcccattttggccatgacgttttttaaataattcccatcgacttggtcatacgctttgttgatatccatcttcagcgcaacttgtaa

SEQ ID NO: 1568 - DNA, 202 bp, Glycine max
aatgagtggacagtgtgtcctgaacagccataactttggtagcttgaagttgagtaggtagtgatgataggaaaacaagctgaggattttgaataaacttctcataatctggatcattctcctgagggatgagttttctcatgagggtagggcggttaggcacatatcctccaaaggggtattgtccaaagtttatggcagc

SEQ ID NO: 1569 - DNA, 259 bp, Glycine max
  misc_feature (258)..(259): n is a, c, g, or t
agttctgatgccgatgacctcaaaattggttccctacagaaggattatatatttataagtgaattttgtaatctgataatgaacatttgaaaagaaagcatactaggcatacgttctctctctctctctctctctctctctctctctctccacacacacacacacacacaagtgacacaactaacaacttgaatgttaaactcctcttttttgagaaatagttgacaatatagaaatgtgctgaggaatctttctccnn

SEQ ID NO: 1570 - DNA, 268 bp, Glycine max
tttgtggacacaaccaacaagctcttcactcagacactacaaactggagatcgatctctttgtgtttccaaaggatgtcgtgcacttcctacacaatgcggatcctcagaagactgcattcgctatatctgcctttggaagtgctagtgctgggactgtatcaattcctagcactctctttaacaccaccattgatgacaatgtcttggctctggccttcaagactgatgttgccaccattcaaactctgaagaaaggctttgctcct

SEQ ID NO: 1571 - DNA, 260 bp, Glycine max
  misc_feature (1)..(1): n is a, c, g, or t
nattgcctcaaactttcagcctcatagataattacaatcatgtctccccccatctttaaagtactcacattgatcatatctgtttttgccatcatgcaaatatcaacagctggtgacccagatattcttactgacttcatagtcccacccaacaccatacctgatggcaacttcttcaccttcactggcttccgtgtcattttttcacccaacaacactgtctcagatttcaaagtgttgaaggcaaccaaggtagaatt

SEQ ID NO: 1572 - DNA, 318 bp, Glycine max
actatttcactttgggcctcaagaaaaatgtagggcacgagtttaaattttaaatcgaaaacaaacctaaataagccccacattatacctaacacgcaaaacagtttaatttttttggaatttttacacagatttcctataaagaggggaacatattaaatgtaaggatccactataaaccaagcttaattattgtgttcaatatgagtagccaaagtaaaatttaaagccaagttgtttgactatgataaactaaattgaattctctggtctttattattgtatatatcagtcttgaggaattcaaagtaagcacgg

SEQ ID NO: 1573 - DNA, 330 bp, Glycine max
gattccacatccatttaccgagaagggccagattaaaagtctgtatatctttgatgcctagaccccctttgtgtttgggtaggcacactttctcccacgatatccaagcaatcttcttgttgtcatgtccccctccccaaagaaatctccgttgtaatttggttaatttgttgataactgattgtggtaccctgaaaaatgaaaagtaataaataggaatagatgtaagtactgattgaataagtgtcactctccccccaaaagagataaatctctgcttccacctagctagtcttctttcacatttttgaataatgggttcccacacac

SEQ ID NO: 1574 - DNA, 472 bp, Glycine max
gaacccatactgcaaaccctttctataaccatccataagtgaatgcactaataacctaatcagttgagcttagatttccaattgtcaaagttggatcaccacccaaccccatatattataggcaggacaaaatagagatttgtttaaaattgaaatatatagtcaaacaagttatgaaatagcaatttgtttaaaatagattgacacaaaatgatagtatgagaactatgacaagaaactaaaagtgtttttgaattaatgagattatcaacccaggagaaccaaccaggaactagtttttcttatgtttgtgaatggcagggacaggacctggtttctaaggatgctattttccccttcccgaggggggagaatgagaaaacctgttttaagtttgaaaaaagtaaaggtctatagaaagcttttggtcaagaatacaaacttaccggcaacagtaggatccagatctgca

SEQ ID NO: 1575 - DNA, 377 bp, Glycine max
tcgtttagcctctggaatcttcatcttgttagatgaattgtttttatccacttttctcttgagcattgacttctcatcaatttttttattggtatcactaatatctttctccaagttggtaatcttattcttaagttgccacccaggcagaaattttacagggtcaatcttgtgaccttccaaacatttaactacagattgcaaagcagccaaatatttttcatgtgctaccttctgtgaaagatcaacaaatatcagcaatgctaatattcataacgaaaaaaacattactcaatgttaatatatattggctaacaagctaaaacataccagtgcactaggaaaatcacgtgcgtcttgtttggctttcttccaag

SEQ ID NO: 1576 - DNA, 261 bp, Glycine max
ggcccgagaggcttaccagtatacctccgagcttatccattgaatccgatgccagcgagatgttcttgaaggacaccaaacactggtcagaattagtttcagacgtttatagggatggtctttctatgaattggtcaagtgttcgaaatataatggacatgaatgctggttatgcagggtaaagtatattcaattgtagattagctttattatgtcactcttctttgacatttatgtttaaggaatgctagcaacacattc

SEQ ID NO: 1577 - DNA, 272 bp, Glycine max
  misc_feature (1)..(1): n is a, c, g, or t
ntggtaaaggaaagctgtctgaccatattgtgcagcaacatgtgttgtctgcatccaagcaaatcataattagtaaaattagcatttacagctgcacacctgtgcttcaagtaaaacaagaacccaaactaccaaattagtatatgtaaccagatacagacagccaggtataagagctacataacatgctccaaatggcttaccccagcaatctcttgaataaagggaaaaaggaatcacaccaatctaacctgatatccattcatatcggc

SEQ ID NO: 1578 - DNA, 201 bp, Glycine max
  misc_feature (1)..(1): n is a, c, g, or t
ncactaaccagaagctgtagacaaatgcatcagacacaagatgatggccactattgtaagcccctcctgcctcaccaacccatgattttactgaggctgctgaactttgaagtatacctttgaggctgctgaatgtgttagcctctccatccagataggaagggtcaagaattttttcagttaggtggtcatcaactcctg

SEQ ID NO: 1579 - DNA, 329 bp, Glycine max
aagatccaggctttccaacagatagagggatggattcatcaatatacaactttgccatcctaatggaatcaacaacgctgtttccccgaagccgtgcattgttttgttgaactgggaaaccctcatccacaacaacaggactaatgttcctgctactgccacctgtttgcacctcccttttttgtgccaaattaatatctttgttggaagagcctgaggggtaaaatggtggggatgctgaattcaaatttgaagcaaccacttgatttttaacaggcacagagccagattctaccttggaagcatgtgtggaagtcctctccgaacta

SEQ ID NO: 1580 - DNA, 341 bp, Glycine max
tttgtcctcttgtgaaccttggtctatctttataccctttttaattagtatttttattttcttcttcatggaacatgaggctcttaattggtgctgttttgtgcctacagttagttattatgtacatacagaaaacaacaaaagacaaacatgatacttacactggaaaatagtatcaaaatgaaggtgcatattgcatagtaatgaactggttttctttttcttcttcttttttttttaaaaaaaagatgtgcttgctttttagctggatttatttaattcaattagtctgatgccaaaaaaatggtgcatttagtgaattggatgggtgtatagcattg

SEQ ID NO: 1581 - DNA, 252 bp, Glycine max
  misc_feature (1)..(1): n is a, c, g, or t
nagtaatgagtcgcatgccgtaagatggacaaaactataagtgctgcaacaatgtggaataatactatctatatgcttacccgcaactgtaaactatactttgaatcacgttgatgcccgtatgtgtgtgggttagtttcttgagagctttattcataaacatccaagtaacaaccattgagttattttctgagcatagattcgtatggataccgagtaatcttacccttcttctcacatttgggagcactt

SEQ ID NO: 1582 - DNA, 294 bp, Glycine max
tgcacctgttaatgcatgacaattttcattaacttaagcataagtttacttagagcccaagagaaaacaagataactgaaccatttgattcaaccatattgatataatcaaacattttatactacaattgcaagagaatcaaagtataagaattacagactaaaatcacagaatgaatattgctccaatgcatgctattgacaaaaaaaaaatgatattgctgagccctgagcttggttatgctacactccattctattctaggttaatcctttgaaacaccaataaaccaagg

SEQ ID NO: 1583 - DNA, 205 bp, Glycine max
tgcataatcctaggttccaaactcacgtataccagtctactgtagactgttgatctcaattttataaattgatattaatactagtattgtgtgttaataaaggtatatacaaggtatctgagggttaattttatttccttgtaggttgagcagttgcatcggatttttaaactttgtggctcaccatctgacgactattggctta

SEQ ID NO: 1584 - DNA, 281 bp, Glycine max
  misc_feature (1)..(1): n is a, c, g, or t
ntcatctatcaactcctccagtggtttattagcactgttcggaacaagtgccgcaaatgcagctggttttagtcctgcataacataaactccaaactgtagtgaaatctgccaagactcagaaatattaagaaagaaagatttcttcatcttcaacagattctaagggcataattcaggatgtgatcatgtttttcttaccagtttcggggaaagaatctatgaacatcatcatctcctctccacttaaaccagataagaagcatatccgaggaagtgact

SEQ ID NO: 1585 - DNA, 364 bp, Glycine max
attgcttaaacgccatcattcacttattcatatgctgacaagggaagaaattattgtttacaggcaaccattactattagctcaagtgagcactattggcatggaacatggaagtggctataatttacttaaaaataacttgagaaacctaaaataaattacttctcctaattgaggctggatcattcctattatcctattacaccatttcaaacaatccacttacatttatttgggaataatatatatagcacagcatgttgtattccaagaattgtaaataaatttgcgaataattcatggctataagaatattgcatacctttggccggacaggcttaacaaaggaaggtcggacaggtag

SEQ ID NO: 1586 - DNA, 372 bp, Glycine max
cattcatcagaagtgctcaaagcatttaatttcagtgccaaagcactgcaacttttcagctcagacaaaacaaacttgctagcttccttggtaactgtggaggatttgatagacttgaaaaccttctcaacagattcttgagcacatctgcgtacctaaaaagcaaacaaaccacaacacaatttaaacaaacaaaaaatccataagctcagagtaatgaaatgattaataggcatggaccaatgtctcgaaatcaaaggtcatatcataaccaaatgctgattgcattgtaaggtaaaaccatcaccaaatctatacataattggatataaacaaggtttaaaactaaagttgcagacacattagcagcac

SEQ ID NO: 1587 - DNA, 369 bp, Glycine max
  misc_feature (279)..(279): n is a, c, g, or t
cagcatcaccaaattgaaagcataaaggtccctaaatccaaaaacaccaccctctttattcactgtcaacttctcccaagctaaccatttaatagaacaccacaaaaatgaattaagcatcacttggatctcatcaaaaagggagtggagaaattaataaataaataactcataggataagtggggataacttgagcaacgaatttaatcaatacctttttgtttgcgatagaaagatatctcccacgccaagagttcaacctcttctagataccctcncttaacaaaatgtaatgtggtttttttgcttcttcccagcacaacaagcataccaagatactaaccaccaccaatactttccctcactct

SEQ ID NO: 1588 - DNA, 220 bp, Glycine max
agcataacagactggacaaccacagtaatttagagataatattatcagcatcaactatttttgacaattagaaggttaaggataaattacctctgctgccatttcaaaaacatgagcaaggggcaagtatgccaggtacacatccttgctacccagatttggaatcactgtcataacagctgctgtagtcgctacaatgttcccgtgagtaatcatgaca

SEQ ID NO: 1589 - DNA, 276 bp, Glycine max
  misc_feature (1)..(1): n is a, c, g, or t
naagtgcaatataagcgtagtcaaggttagtttttgtatgtgtactagaggaagagatgatggaattgagagcacttgattaatccaattgctgcataaacttaaaaggaggttgttggtatattatagatttgtatgcattgaagtttgtaggttatgtatgcatactatatgttagcttaatttgttctcaatggcaggggcataatatagcaggaaaggatcaccgtgttcattgttccataaatatcaacaccggagcactggaccgtatgg

SEQ ID NO: 1590 - DNA, 435 bp, Glycine max
  misc_feature (263)..(263): n is a, c, g, or t
acttcagcctcagagccaagtgaattttaacaatgttttcaataatcagaaccttttcatcaacaccaccaacaacaacatcaaccagtttctgcctcagagttctaactttacagctggagctggaagtagtagtactgccaatttcaatccaattggaggagagtttccaaatcagagtgctacattgcaacagccacttcagactccgagccaagagaatgttaatactgttttcaatcagagtattctgaacgacggangacgaggataacaacaacaacagacagtttctggctctggtttctaactttcctttgcttgctcgtggcaccaaaaatcttgatttagaaagctgtctccgtttcaccaattggccagctgagtttggaaaaaagttgctaggtgggaacttggaattggatttggaacctt

SEQ ID NO: 1591 - DNA, 469 bp, Glycine max
cagtccaaatgccttcaagacaaaatgacagcaaaggaaagtgcaacctggcttgccatcatcaaccaagaggaagccttggctagagagctttaccctgattattgccctccattttcctctgctgtagctaatggatccatggtgatcaacgattgcagtgagtatgatgttgatggggctgaagaagagccgaacttcgatgttgaggaccggaagcccgaccatcttcatccatcaaaccttgggatggagagaatgatgggaaggatgccaattcagcaaccttctcatcccatgaagggagatgttgtcacaaacctagatttcatccggaagaggaagatttctagtgacttcaacatgatgatggatcagaaaatctacacatgcgagcatccccaatgcccttacagcgaagttcgccttggtttccatgataggtctgctagggacaatcatcaattga

SEQ ID NO: 1592 - DNA, 277 bp, Glycine max
cttggaattgaagtcaagcaatgtgcaaatggaatatttatttgtcaaagaaggtatgcacaagaggtgttatcaagatttggaatgcagaatagcaatgctgtgaaaaatccaatggtaccaggaacaaggctatcttaagacaaaggaggaaggagtgctgatgaaacattatttaaacaattagttggaagcctgatgtatctaactgttactaggcctgatctgatgtatacagtaagtttaataagcagatttatgaccaatcctaccacgg

SEQ ID NO: 1593 - DNA, 297 bp, Glycine max
  misc_feature (1)..(1): n is a, c, g, or t
ncgggttccatacatgatagagtgtgcctattacaaacatagctccaaagcaacagagttcaatacctcgaaattttaaaccttcctactagtttagacaaagtttaacacaacaggagtaggaaacacgcttatattacagcctaaaaacagcaaacgcaaacacactcaaatgacagtgataacataacaatgctgagagcaacttctaacttctaaggttacattacagaactacaacaggactggttactctgtgcctgccatctgtccaagacaaattcccaaataaaggca

SEQ ID NO: 1594 - DNA, 246 bp, Glycine max
  misc_feature (170)..(170): n is a, c, g, or t
tggatagaataaaggttcaagggattgaagtttaaactctgcttagtaacagaaccttagatacgttcaactgaaaaactgcttcatagcattttagcgagcaatcatctaaggcttgctgtcatttgagtgggatttgaacctatcacccttgatagtatcagataaantttgactttgaattgatgaattttgtagggattgagattgcatttagactactctggaacacatggttatggaact

SEQ ID NO: 1595 - DNA, 409 bp, Glycine max
cttcagcatcttcattgcccttttcctaccctgaaaaatatcataaacaaatgttacttttcaatctttggcatcgtcaaaagaaactattttgtatgatatcttttgttttttgttttaatttgggttggcctaatatataatactagtcacgttatcttagcatctccaatataattctaatcataggactaattacaagttgcttaggattgcaccgttatatagaaagaaaattggttgaagttgtcaaattcatgtattattgtaggatccaccataagtgaattaaacaactatataccgttggaggtgcgcttttataatggcaaaaatttcaaaggaggaacccacatatatatagcatatgaggtgaagtaaaattaatgactagcgttggttggtgatg

SEQ ID NO: 1596 - DNA, 277 bp, Glycine max
gagttcaaggtcggaagaggaatgggaagccgtgggaacgatggaagacataaaatctctgaaaggggagcttattgctctgaaattatcaggaggaacaaggggagccagcagcagaagcaacaacaatgacagtagtaaaggcaattctgagagtgttgctgctagtaaaatgaaaggtctcgtgtcgaagaagataatctccaagatttggtcaagcaaagaaagaagtggtgagctaagtagctctgatacatcagagagccctgcttctacg

SEQ ID NO: 1597 - DNA, 317 bp, Glycine max
cagcctatccaccaccttctttgggaccttgaaaaaagaaaagaaaaagataggaataaaaatcctcttaaaactgataaataattatgcaagcgtcttccaattacattggctttttctataatttgaatgttttattattgatttttttagataaacttaaatgtaccacagatatttaaaggaaaatgaatatatattttaaacatgtttaacatatgagctagtagtgtaatattttttacattgtcattgtttccactttgaaagttttctcacacttaattggatcctatgtctcacttcgccttgggttt

SEQ ID NO: 1598 - DNA, 436 bp, Glycine max
tttgaatgcttagggtctacgattttatatgtcaatatggtatttctgacagttgattaattattaacatttaatacgagcaaagtgcaacgccagtaccacaactacagtactattaaacttgactacacctttttattatatgaacagatagaaattgattccaacatgatcaatttcaccgggtggacgagctaggatgagactaactgcccatattgacaagaaaagtggtacaaagaatatgatttattgttaagaccccttaatatacatatacattagcaactataaaatagaaactaaaaaaaaaggaagaaaaaaaagacagaagtcaataaagaatctaagacataataaacatagcatattttacatagacgattcaaatccaatcagaaagtggccattctcttcatctcttggaaccttcagc

SEQ ID NO: 1599 - DNA, 294 bp, Glycine max
tgctttaatccaacattcaacaccatatacacacatcaccaagtgcaatataccagaatttcgtataggcatattctgagatgggggggctttagaaggagctggaagttccgcatcatcagataaaagaaatgagtaatctctagtattcttgattttctgggctttaactttcatctgtatgaatatgaaaaaaatcaattagagcacagaggttaagctacaacgtgacatgaaaaacttaacacagatagccacaagacctcgctgactttgggtgccagattatgagat

SEQ ID NO: 1600 - DNA, 241 bp, Glycine max
  misc_feature (1)..(1): n is a, c, g, or t
naaccaagttgattcagtggctcagttaaataaagatcacagtcgacattattttcatctgctggcctgttacaattttatgctacagcatgttaagactttataataaagaagccaacgaaggattttgtcacacgcgttccatggattttatttatttatattcccacttattttttgcttagctgaaaatataaagtgtcccgtcatgtctgtctgtcgggattcatcatcaatgtaa

SEQ ID NO: 1601 - DNA, 287 bp, Glycine max
  misc_feature (287)..(287): n is a, c, g, or t
tatgatgatactcgagccatttggattacttgataatcaagccggttttgccaatttatggattgttgtgcaccaagttctggataccaagacttgaatttgagaatgcaacagacatcattcttctgctttcccattctgatctttttttttcctgttcaacactgattctgcctttctctctcgattcctttcttttcttcacttcctctcttgtcccatactaacttgacttctatttagctttctcaaccgatcagtgagaatgatgtcacaaatggatccan

SEQ ID NO: 1602 - DNA, 315 bp, Glycine max
tcatcatcttctctgtgtgttcaaaaggtttaacggaattgactttgaggagattaaagtagacatttccaaacggcaccacctttctcctgaatttagaggtatccatctaatctaggatgtaaaataagcatattatgcaccttataagttttcatttactaacgactctgcacttaacaaagtaatataattatatattattatagtattttgtcatggcactcactgagttgtagatagaaaactttaatagtttgaatccatttgatttcaattgaagtccctcttgtaatttcattgcagaagtaaacc

SEQ ID NO: 1603 - DNA, 227 bp, Glycine max
tgtacctctgccgttgtttctgcccaatgtatagttgacctggccaaagcatccattgggtctatgcatttccttagaagaggatcattgtgagggagaacccccagcaaatcatcagatgccagaagcaccacattcactgccctaaccaaaagaacatggattgcaattctcaataaattccttgccccttccacgtcctttctgtacaacgcctccattgcagg

SEQ ID NO: 1604 - DNA, 353 bp, Glycine max
  misc_feature (353)..(353): n is a, c, g, or t
cattctttcttcagcaatggatctccacccttcatatttcgaaattagaactctggcccacatgtctccctgattctgaaatagctcccaactccactttcctagcagcgctgtgttaaaagcccgtagatctttgatgccaagaccacctttgtcttttggaagacacacggtcttccaattgacccaggcaatcttacgctgttccaaatctccaccccataaaaatctacgctgaattatagtcagctttgtctacaactttgtccggaatcctgaaaaaagataacaagtatataggaagcgctgttaatactgaatttatcaaggtgactctccctccaaaggaaacn

SEQ ID NO: 1605 - DNA, 1720 bp, Glycine max
cacaatgactaaccagttgcaaggaagaaaacctatacttcctttcatttacaaaaaaactactcttgagaattctatctatataggctgtacaatttcctcactgtcacaaaacccattttggtttgcctatgtatcattcataactatgtcagaatcctataccaaattccagggaaccactggacataaccaaaaccaaccaagagggatacccaaaaaagcatggcagaaaaatgggttaccaccagtaataagttcagcagcttctgaactgcttagctaattgttcaaccaaagctccttttcgaagcttatagtactgttttactttgtggtcctttgccatggccctcaaatcagtcaatgacaagctattcaagtcaccaggcagcaaagatgaggtcccatcatgggaatccaccaaggaatgcaagttgctactatgaagaactaactggcttctgctgtccatagaaaccctatctgaatttgtttccatgtccacggtgattggcaactttgaaacttttcttctcttttgtaattcagagaagttgctatcataaggaacaatagcaccaccttcagtttcatgcttgtcaggttgcactgcccttctagaaattttcttccggttcatcggctcagttaaaatggcaacatcattacagggtttggatcttcgctgcctcttggttgatacaattatgggtgtactttgaataacttctgtacaactgtcatatggttctctggaagaaaatgcctctagttccagttcctgcttttcccgagcttttagctttgaagggaaactcatgttcaactttctgaatttagtagtaatttgggatttaaggtcttgtgcttcttgttcctcttcatcttcatctatcagctgtaaatcagtatacagggcactcttggtttgaatccctaacagaaatcaatgcagaattttcagcattaataagggagtggtgttttcaatattgaacactagtccagaattattaccattacttcctttaaaggagcaaaattcagtattggcgctacaaaatgtttgaggataaaatacttgtaaaggtaaatccatggagttcaaatctttatctggagcaaccttggactgtttcttgtaggccttccgtgcagtttttggagcaatatcacatagctttttgtctaaattagaatttctacattttcgttgaggtgaagtagctaatctggaattaggatactttttcctcactttgatgtcagttgcaggtctaaaatcatctgagctaacatcttctttgacaaattcattttctttctgcacaatttaagaaaaaaatgcatttaaaaaccttgtttaaaataaaattgtaaattgattagaaggggaacaacagcacttcttgcaccttggcttcatttggaatattttcattgtctttggcagaaaacaaatccaatatttgacctatatctgtatcaatgagttgacttctttcaacttcatttccagaaactttatcagatgtttctgataatttcatccaatcagagtgatcaggagattcaggtccacttttttgttgttgtgaagtagctaatctggaatgaggatactctttcctccccttgacgccaattgcaggtctaaaatcatctgagctaacatctttttctttgacaaactcactttctttctgcaggcatacga

SEQ ID NO: 1606 - DNA, 826 bp, Glycine max
attgaaccacattctgtgacaaaaccaacagctacttccacactgtcatcagtaggtttctcgagtaaaactgtgagtaactctagagcaatgatctcatgagctgcttgctgattcaccagatgtgctataaatttgacagctgctagtaattgaggctataaatgatgaaagacaaatgaaaaacacatccagaaacaaaacaaaaataaaatcaaatttgatgcataaaattgatccaagaaaacaagctacacaccacaccttgtcatttcgcttataagctctcttaagctgcaaaacaatccttcttagcaaaagatcccccacctcaggaaacttggtattaacaacagcaaccaaggcagcaaaaacatccgtaaatcccggagatgccatctgagacttcatacacgaccgacaaaagagtccccttcccctgatcaggttttccgcaaacaattccggaataatattttttatattagtagcattaaccttatttacaagcccattaatgctctttctcagagcatcccacgttaacctttgatattctacactacttttatcctgaacttctttcatcatcattgccatcttaaagggggggaatgtaaacacctccactcttgcccaaattagatacatcaccattcaagttacttcccggtattgttccccgtcgaggatttgcatcttcaaccattcttccatttctggcattttttcttcccattttcttcttggccggctgctcacatccttcttcctgtgggtcctctcattgtcaacatcctttttaactctacgcctcctataccta

SEQ ID NO: 1607 - DNA, 802 bp, Glycine max
tttgaaaatcttttgcctgcaggaacatagtgatgaattccccacctgatgacaacagttcagaacctacagagttgggcagcccagatgctagttccaatgaaaatgggaattttctatcctgctatggtgaggtggaaggtaatggaataagacttacttagttacttactactacctactagtaatttgcatgttatgtgcattcattcatgtggtgatatccttctatttgaatatttttcagccaaacatcgattgctcttggttcagtggttaacttgtcttgtcccttcattgaaccttccaataaatgtcacggatggtgaattaagagcatgcttgagcaatggtacagttttgtgccagatactgaacaagatacgacatggtaccgtgattgtggtaacactttttaaccttttacttactctaactgtaattggcaacttgatttgagatgtaccttttagtctggattctcttatgtaggttagtgaacctgataattttctaccatcacaatcagaaaatgttaaaacgtttctgaaagctttggatggaatgggactgccccggtttgaaatatccgacctagagaaggtataagatgcctaactttgtgtcatgcattcaaattagagtttcactctcagaaaaaaacttggtttagagacagttgcccaattgtaatcaataaggcattattttgatcagataaattaatgccttgttagtgcaaaagcttttatactacatatgaataacttattccagttttatttagacttttaccatttac

SEQ ID NO: 1608 - DNA, 815 bp, Glycine max
  misc_feature (780)..(780): n is a, c, g, or t
atcctctggatcgacctgcagctcattttttacctcatgacttgttttcactttcatcaagttgctatctttttctccagtagtaccattatcgtttggcttaagagtatctggagaatctgatttgacagaaaatgcatttttccttttcttcacagctttcaatgtctctccagacctagaaagatcaccacggccagtacaatttccctccttcataaattttccagtagatgatccaccatttctattactaccacttgcagcttcacttttcttccttgagccattatcaagctttcttgtcttagttccatttgttaaatcactatgcccattagcatcttgcctaaaatcattaacattactagcacctttaaaactagatttgttagcatttttctttgtctctgaaccaatggctaatttgttttttatcacaggtgatgaaacagaagaactttcatttggatggttagatacagagagcttttcatcttggctgtcattttctcctattctcggcacacagtactccaaattagagcaaacattatccatatcaatgttatctttttctgcatttgatacagcatcagcagcatcctttaggttacctactaccccatcattagaaggagcctctgaaccaatatgagaatcatcggtgtcatctgccaaaccactagcctttctgtttctgcatctcatcaaatgctgcacatatttccttcacagcttgggcaaagtactttgtcttgccttgaagacgagcagacnacttatttttagcctcactggtaaatgcctgaata

SEQ ID NO: 1609 - DNA, 1499 bp, Glycine max
ctctatgggtggagaattttttgatcgggcaagacgcttcacacagttcaaacgcaaggattttggtgtgctacctaaattatttttagaacaatcaaattaactaataataaaggtggcaacaacatacttttttccactgaatattttcttggcatttctctttaataaaaacttacaactcaccaaaattaccgacggatacatcttgatcttccttagctatcaactctgctaccaactggtgagtaacagcaggatcatcatccattgaatgtgtcaggtttcgcgcaagacctttaatatgattcaggcgcatcctccttggtgaattggctggtttataaactagagtttccaacggaattgatgatcctattggttgcattacaccataaggaaaaaaaagaaccattaatttgtctaacttgaaaagaaaaaaggaatatatatgtatatatacatggtatcaactcaggtgagaagactttgttaatgtaaaaaataggaattgtaaatataaactattagatcagaaattgaatagtcaagattaagaatgcacgtaattttttaagtgatcatgtgaacatgattcttgtgtagttggctgatctagattataaggagttgttcccgtattatatatgtgtgtacgttctctctctgattgtcaagtgtgaatgaacataacaaaaatgcaccttcaagaacttttggatccaaaaattgaatgtttcttgtacttggttgaggccctgagaaaggactccatagtctagaaaggtagaagaagtgagcccttgaagctcatcactggtactagcttcacctgcacttgatttctagagtttgaagttgaggaaaaggagaatatggaacttgagcatttgcagctctttgtcttcgaagctggtaatttctgcggcgccttgcaagatgtctttccctttgttcttgagtcattgattgtctcctctgcctgtctcggatgcgcctcctctccctctcttgctccctctgcattctctttaactctcctctctctggaaactcctgcatgctcactcaccccacatttttttcttttctccttttggataattaaataacaattcttggtcctcaacaaaacattgatagcgatgtactttcctaaccaagaaacaaggaacatgaattctgagtcaagatgaaacttatattatgaagcacatttcatatggatggaatccttgtgtaataaaattagaaatttatggaaatctagctaaatctcagatgataataatgatgtttaagctaaaactggtagtatcacatgaaataacaagaggttcattcatgaaaattgaacaataaagtttcaactttcaaggatcatttctttatttaaatggctaatagtaataacatatataatttaaaagggtgagtatttgtggatttggaaaatgaagattgggaaagaaggcatttttttacctgtcgctgcaggc

SEQ ID NO: 1610 - DNA, 804 bp, Glycine max
  misc_feature (750)..(750): n is a, c, g, or t
atattccttcagatatctttcagcagaaaatcgagactctggttctaactgaatcatgtgtaatatcatcttacggattccaagatctggtatctgcatcccatagagaatacaatatttaaaatattaaaaactgagtcatttaaatgggtagggattatccctactgatgggactacgggattaccaaacaagactaatgcacacacacaaaaaaaattactttttcaagatgctgacttggatcatattgccctctgcgataagcaagaagctgagacagttcaaatagtggctgcccctcaaggaaaagttcagcaactacacacctgaagatgcaaaatgatatttgcaacttagaaaataaagaacaaaagcataacacaaaaaaaagtattttagaagatgatataactacagcattgcatcagttactgcttcaacaaaatatatcctagagagttcaggttcaacataaatttatacagaaatcaaatcaatagcagactaaaacatcagtatctcaccataaatacagcagtacaatgccttgcagatcaattattttgtccaccacttaatcagttaattaaattgcgcaaaaatattcgtatttgcagcctaaaatatggatggtttaaagactaaaacatcttcaaaattaagattcttgcagcaaaaaatgctcacccgacagcaaatatatcctatatggttttagggggggtgtgcttgtgccacctgcatctnccctccatgttcataaaatctctgacacgccacagccccaaacaaaaatgaatg

SEQ ID NO: 1611 - DNA, 1482 bp, Glycine max
agtttgacgttcagctgggtcaattgcgagaagggtctcaattagtggcagggatgatgctgggaaattcttaaatgtctctgctatgcaccgtttgtatgatagtcggggcttaaaaatggtagcatgtggcaactttgatttcttccaatattcatcagaaggagaaccacaaagcttaaatatcttatgaagctgctccacctatgaagcacagtggatatatatcaaccaaatcagaagcaaaaaccttttaacacgagcaacaaaatcttgcaccacggacaagtaaagtggatatattttatgctcttgaaacttgaaagatgcccgtagagaaattataaaatgaaattaatcatttaaagattacctcggttcgaccgggcataattggcttgccagccaacaattcagcaagaatgcagccagcactccagaggtccactcctacaccatagtcagtggctccaaggagaagttctggaggtcgataccataaagtaaccaccctgctggtcatagggcgtttgtgattaggatcaaagaaggaagctaatccaaaatcagcaatcctaagaattccttcactgtcaatgagaagatttgacccctttatatcacgatgcagcacatgccggttgtgacagtgttccaatccagaaagtagctgatgcatgtaacatttaacctaaaatacccagctataatcaagaaaagaagttccaaatccagaaacacgagatgctttttgaatcataaatttcaaccaagtctagtgctagattttacactaagcaaggtatatatgtaaaaacctgagactctgtgaacttaattgtggggcttgtagcaagtccagccaaatcatgatccatgtattcaaagacaaggtacaaactgcatgacatccttgaagtcaccaaaccttcaagtttgacaacattgggatgatccagatggcgcagaataagaatctctctagccatgaatttcacactctcaggctctaagttgtcaaatcggaccttctttagggcaacaattttccctgtcaaagtatccttggctttgtaaacattgctatatgtaccttgtccaacctgattgaaaaatagtccagaagccaagccagttagagaccaattttttgttaactttacatgaatagaatggaagcagacatttcaatggaggggttttcaattaataacttcccaagataatagaaaaccccaaatcacgatgccttaatttcatattactaatttaagatgttgcgtacatttgaaacagaacaacataagcaataagttattcaaacttgaaatcaaggtaaccatgttcctcatacttaaattggcaactatagcaaagaagtcattaacttccttaccttattaagcttctcaaaagtgtcagctcttctagggaccaatccattaatagcttccccagcaaccttggagagccaagagggcc

SEQ ID NO: 1612 - DNA, 1561 bp, Glycine max
  misc_feature (796)..(796): n is a, c, g, or t
tgcatgcctgcagtaaattacctcatcagtacatgttttattttataattttttaacttgccttttttgtagttacattttcaatttgtttgaaattttccttgtcatgttttaggaaaataggaattaagtaggcattagatctgatgcactctttggcacccttctcatataatattaaggacttttgaaagcttgaccagagtgacggggatactagattttgtgtctagcagaaaatacactaagtttaggcatgaaagatgataaacagaggctttttgtgaaagcctttgattgcagtgaaagtaatcagataagaggctcaagatttcaaaatgaggatagaattggaaggataaatgataagagtgcttaaactattcttgatatgcatcatgcatgtaaggccttagaaatagaagtatccctttatggtcttaaaaattaggatgggagcattgattagtttgagagaactccaggattcagttttgctacgtagagaccacaaatggttgaaataaacgggctactcttggctggaaatgacagaaacaaatacttgggtgtagaattatgccttcggtggtacttgatggaaatttgtaatattgtatgtgactttacgttcatcattcacttggaaattgtagtttttagtttgattattggtacgaggttcatgatgggtgctataaaatcttatgtttcacattttggattattttctagggccgttttgagatactttcattgtctggatcattcatgcctactgacaccaaggatcaanaagcaggtcgggtgggatgagcgtttcattgtcaagtccagatggtcgtgttgtaggtggtgaagttgctggtctccttgtagctgccggtcctgtgcaggtaaacattcctctctcaacccttagaagctattctcaactcaattatgtatgtgattgtgagcatggattgggtggtagggactacaaggttggattcaaaatagtctgcaacatcccatatcatctgtgatgttgaaaactttgccaaacaatcttcctcaaatgcatccccaagcaattgagggttttcaaatgaaagaggcagaattgcatgcctaaataaagggcactacacaagggaattaccataatgtagcatctggtgcaatttactttgaacaggttatgcataacattttttcctcaaatgaaggatcacttagatatccttatgttatcaggtggtggtgggaagctttttgccaaacaaccagcaagatcagaaaccaaagaagccaaagtctgactatgcaccagctaatgtcactccttccattacggtgtcttctgcaccaccccctactaatggtgaaaaggaggatgtcattggtggacacctactacacaacaactcaggaacaacccttaactcaaaccttactcctccctcggcctttcgacgcgaaaactgggttaacatgcactccttgacagactcgatgaagtcggctactgacattaacatatcgtttcatgatagttgatgatcaacctgcaggtcga

SEQ ID NO: 1613 - DNA, 796 bp, Glycine max
  misc_feature (780)..(780): n is a, c, g, or t
ggacagtaccattcacaaaaaaatgaggccataggatcatagtggttgtttagtcaataatacataaagaaaaatactattccatataataatattaatgaaagggatgatggtactacaaggtagttagttaggaggaattaagaacttattttgcttactttgtcatgttgggtaaagtaattgttagaaatggtaatggaagttgaggcatgaataacatcaatcaagccatcagcacaacgagccaaaaagcaatgatcaatccaaatatttgaggaggcaaatatgctaatgccatccccatcagagcctcgacgatggccaagatgagatggggtactccttacaaggccagccttgcttggtttgcaatcatgaatgctaatgccatgtatgataacatggctaacaccttgtattgtaatgcaaggcccatttgcaatctccactttagcacctcttccatcaatggtcttgtagctattcatgataagctcattatcgagcctaataaccatatctttggcaaaaatgatccaaaggggctgtgtttggataacaccataacgaagtgtgcctggttttgggcttatggggtcatcagagggatctgtgactttatatattgatccatacttgccaccaattgaatctttgccaaagccaattccacaattagccaaggcttggcgatttgatgcccaatttgatttggccacgccagcaagagtctatcttgtttagaactgcactttctgttgaatatgcaaggtgtantatgaagcatgaaagc

SEQ ID NO: 1614 - DNA, 1354 bp, Glycine max
  misc_feature (1348)..(1348): n is a, c, g, or t
aagccgtgcagaataactcgagcaaaccctccaatgcctctgcacgttgctggtaagacgaggtgtcaaacctgtgcctgctagactcagcagaggagtggcttgaaacagcatgttcagagcattcattgccatgtgaaactggagcagcaggacaagcatcactgccactggaagggacactggccttgtccacaacttggattgtacacttgtccttcgtgattaagcagtcagcactctttggcgaaccagaagagcactgagcggaagttgatgaagttccacggacagggaagagagaatcctcacaagaggccaaagggaattcagccatcttgtcaattcgcggtgcattgacagaaatatcaggagagtccacacctcgaagaagaccaacattagctctataaggggtggttgtgcacatggttctggtaggcagtggaagggaagctcttctagttggtggggtgaatttaccccctgctggagtggatggaagctgaaatgatgagcaaacaaataaactgatatacaccctggattcttcaataacatacatacgctccattaattgaggctaaggaaaccacaccacaaattaagcccccactggaaattaatacgaaatcatcatgtaatgacatttgacattgataatatagaagaacctatatttataatgtattcacacatgcatgcatgttgaacctaaatgaatcatatatgataccattgacatgcttcaaatgataattcaggttgagaagttaattcaatcgtctcagtacagtcaaattattttttctgtttccttatttattctgtcataaagataaacgcatgtattgagaagtgtagaactggaacttactaactcacgcttggaaccagtataggatatctttgatggtatagtctgccgtcggggagtggcatattccttagctgatctcaatcttggcaatctatcaacagttgaggactttgtgtctcttgatttgttaaaattgcattcttcacggacaaggccaacagatagttcatagtgcttctcttttgaacaagtagagaatcctagtgctctttgagtagaacacacagaacctagctcagttccagaaatactaggattcaaggccctgtcattgctgaatgacaatcgtttgtctctgtcagaaagagtagaaacagatcctggctcgagaaactgagtcctccttacatagtttgagtcagaccattggaatggataagtacttcttctggggttatttaatttcaagtgaattttaagaatgtaaggttgaagatgcggatgatttagtaactctgcaggtcgatntagagg

SEQ ID NO: 1615 - DNA, 874 bp, Glycine max
  misc_feature (717)..(718): n is a, c, g, or t
  misc_feature (739)..(739): n is a, c, g, or t
  misc_feature (742)..(742): n is a, c, g, or t
  misc_feature (800)..(800): n is a, c, g, or t
  misc_feature (805)..(805): n is a, c, g, or t
  misc_feature (819)..(819): n is a, c, g, or t
agatgaagcaccgaacatggcctcgcgccttctcctccctcccttactccaaccgttccgaattctccgccgcacgctccacgcgcctctgtgcgcgtcctcctccgccgtcccctcccggcgtcggcggcgaattctcgtcgctcccctacgacgtgctggcgaagatcgccgcctccttcgacgaccccaatctccgcgcggcgtcgctggtgtgtcgcgcgtggtgcgaggcgctgcggccgctgcgggaggccatggtgctgctccgctgggggaagcgcttcaagcacggccgccgcggcgtccgccccaacgtcgacaaggccctagactccttcaccaaagccgccgtgcgcggctccgccctcgccatggtcgacgccggcctcatctactgggagcgaggcgagaagccgaaggccatggagttgtatcttaaggccgcggaactcggaaatccttctgctcagtgcaatttgggactttcctatctccaaggtttttcatttctttacattataccctaatttcatgtcccacatcgactagcaatatgaaaataaatagtgtatataattgcagggcaattctcgttgtgttgaagttttatgtttcatttccttcttcgtaggagagaatggaagggaatcttccttatcacatgcactttttttattctgtctatgtttattggtattttcggacatactttanngttgagtctaatatccctagntgntctgtctccttcctcttactcactgcatacttgcatactatatatatatatatatatnctaanaagttttttttttncgtcttcgagactgggggcctagaattattttgttttgggtattatgatttaaaa

SEQ ID NO: 1616 - DNA, 1395 bp, Glycine max
acttgcctgagagtgttgttgcttctgaacaggctgcatgttcatcacatttgaaagaaactgttggaaaacctactcttgatgcatctcaacccagcccaactgctactcccagagatattgaggcttttggccgatctctaagaccaaacattgttttgaatcataatttctccttgttggatcaagttcaatctgcaagaaacatggagactgatcctagtaatcgggatgtcaagagattgaaagtttctgataatatggtggtggacaaacagctggtagattccaaccatgggcaacagttgtcatatgggtatgataatgtggtcaaagatgggtggtcaggtaataattccatgccatcatcagatcctaatatgctaagcttttcaacaaagccacttgatggacagtacacaaatgcatcttctcaagaggaggttggttatggtaaaaaaattgctcttaatgttgctgacagtaacaaagcagcctctgttaaaagtgattattctctggtaaatcctcaaatggcaccatcatggtttgagcgatatggaacttttaaaaatggtaagatgttgccaatgtacaatgcacagaaaatgactgctgctaagataatggaccagcctttcattgtagcaaaccaattcagatagtttgcgctttcataattcagtagagcaaattcagagtgtcagtgatgctcagctaagtaatgctagtgaaagtccaatgcctgctttagctgcaaataagcatgcagactctcagttatcgacacctgctgttgaacctgacttacttattatgagaccgaagaagcgaaaaagtgccacatctgaactcataccatggcataaagaactgttacagggttctgaaaggcttcgagatatcaggtggttgccaaaactaagtgatttaatgtgcttatttttcggtgttgctattgttggtgtagtaaaagatcccatgtctccagttgatattgtgttgtttcaattgttttgaaagaaaacggtgtgtttccatagtgtcagtatgactattttaatattgttttatgtttatcaatatatcaagtatttgttttcctataacttaaaatttcttactatgtggcagtgtggcagaattagactgggctcaaagtgcaagcagattgattgaaaaggtttgtttataataaaatcagtctacgcatgaatctataattctataatttatgagttcactttactctgtataattataattataggttgaagacagtgtggaggtagttgaagatttgccagcagtggtgaagtcaaaaagaagacttgtcttgtactactcagcttatgcagcaacaacttagtcctcctccagctgcaggcaggcgag

SEQ ID NO: 1617 - DNA, 816 bp, Glycine max
gtggtgacccatgtaatgttgtaaatgctggttttttagatgccaatgataaagttgaggataactcactattacatgcacataacatatgcaatggatattctgatgagatcagtaccagttcttattggttccgccatgatgcaagcaatgagcaccacattggaagattagttagtgatgcagttaatattggaagtgatgctgttatggacaagggtgagagtagtataatttcaaatatattatcgatggagtttgatgcctgggatgactcgctggcatcacatgagagtttgaccaagttgttgggtgacaacactgacagccagaatggtccgttaaaaaaatctagttctaggaaagttcaaagtaacaatcaatcaagattttcttttgcatggcaggaggaatccaaattccaagccaatgtacctccatcttctggtgctacccagccatttccaaagaatggctcactcatccaggattttgtggaaagagacttttctttgaacaagctgggttttgcaaatggcttcccctccaataacctcaaggaatctggaaatcttggcagtggtcatttcattgcttcaaacaataagctttcaggttagttagtattaatagcttacttaaactggctattgtagcttttatagaagcatttcttatcattggtacttttgctgctcttttcatagccatgcttggcttatatttgggctattcttgtggaatattcttcttagtaacctgtattttgaaaaatgtcttactttttgtgagtttgccagaaataactagggaaaa

SEQ ID NO: 1618 - DNA, 833 bp, Glycine max
tacctgcacggaagtaggaccacgttgatctgctcctcaaagcaaattctgcataagatcttctcctgatagatttaccgttcaatttgaagtgttagattctgatacacttgacaggcattcaagcacaaacaatgaaccaaaataacctacaaactaataacaagaatgtttgtacaagattatgtaaactagttttaatagtaaaagggttgcaaaatgccaaaaataatccaatcaaagttgagaatgctacattttgaagtctttcatactcctcctggctaaattttgtaacgtgtgtctgctcacccagtgcagcttgtagtctccaaatctgtgagttacaagggtgattattgaaatgtatttaaaaggttaaacctgctcgagtaattggtttaactaaggtaatcttaaataaggaaaccatatcatattaaatcatgtggtagctacatattttgatataaggaaacatctttacctcctcaaccagatctgttctaggcattttcttcaccgtctcaggggtgaaagtattatacctaaatagtaaatcaaatcacatataattagagaaaagtttgattagcatttacataaggggaaaatacttaatgttgtaagaaccacttgagagcataaagagaaagaacaaagctcgtcttattgcaagcacactccaattgttaacatgacatagtaacaaccatcactgaaaaatcagaattgaacaagatctccacaattctattttcaaaacagacatagaaaactttgctaaatttagaagaaaaaaaatatcattgcactacacaacttgggaattc

SEQ ID NO: 1619 - DNA, 1347 bp, Glycine max
gccagacttgcatgcctgcagttgcaaaccttcttcctggacagccacgtgttgaggtaaaccatgcaaaatgctctatttttggccatttaaatatgtcaatgccattgcagatatgtagatgatgcttggaccaagttacttgcctgcttgaatttttggaattgtcacactattgaactataattattctcaaatactctgattgatgatttctagttcatacaggctctggttatcagattcctacttcaatgacttgtgacaaaaattgcttaatttcagttttttattttttttttattttaggtgtggactttgtgatatcttattttagaattcatttatcttgttttatggtgggaaattaaagaaaaatataaatctgttatgtgtgatattcagcgataataaaacaagttataaatcaaatgttctgtttcattttgtaaatacactagtgttttatgggtgtgcatcttggcactcccattagtcccactgctctaacaattttttttatcctcaaaatactcttcattgaatacttgttccttattccttgtctaactagtaattcttgtatttatgctgattccttattatgaaaaataatgatttgttaatttaaaaaccattttaatgtttttaaactcctaattaccctcacttatttgatatttcttctcttttcatttttgttttctttcctttactatataagacacactaaattcaggttcccaataataaaaactgaagagtatattcattcatgaaggttaagttgaagtctccctccataagatttatttaaagaatatacttattgcatatacttatgaagtgtggttctattggtagataacaaaattaaaattgcattaatttgaagttttaataaagaaaagttggaaaatcttactggttaggtaattggatttttagttatctagacaagctaactattgataacacgatcaacaattgtacttactagtgaaatggacctaacctgccctcattttattttgaaatgaatatttgcaaaagtatctctggaatggtagcctaattgtgttatgaaaatcattgttaagtttcttatttgtttattgtttattaagaagatctataaggatattcatgccctactatcttgggatgttatcagaaactaagcatattgcctaggtcaggaggggctttgggatttacttacactcctccaacaaatgaggacagatacttgcttttcattgatgagttgcgtggccgcctggttaccctactgggggacgtgctgcaggtcgatttagaggagcccgggtacgagtccgaatcgta

SEQ ID NO: 1620 - DNA, 1410 bp, Glycine max
aacaatactcattacagttaacaatgaatttcatggacaatcaggcacaatattttgaccctacataaatttaaaatacacatagggaccagtctcttgcacatgtaatcaaagtctatctttctccaaaactttactaagacatttctttttatgtcctcaattttctatttcaggataggtaattactattaacttcacagcaaatcactttgaagacaattttttccccactagcaaagcatgtcccagtattacagggaatgtgaaatgctccaccctacaaaccacagtcatgaagcataatttctataacaatctaacaaattcgggctaggttgattaagtccataactattttcagtatatttgcctacttaaatatgtcgaaataatagcattaggagtcttaatgtattaatgagcttaggcttgcactagaagtaccacacttgaacttgaccagactataagtatatataggaccagaagggtagtatccatactaataaataattgtcaagtactatcgtagtgctattagtacatgccaaaatccactaatataatataataaattgaaggtatttggcaaaataaacaaaagatataaatttgaactgtaaaatttaaatttttgtttagggaaaaaaatattaagaaacgagtacaaagctagaagtgaataagtgatagattctcattagtagctttgagatcctacatcgactatagatatggctaaagtagagcttataaaggcatggtcaatcctcacctctcgagttagctttcggggttgagttaagctcaatccaaattcaagaagtagctagcttggggtctattagtgagggagtctgttagttcgttaggctagttgggacttgcccaggctgagatagtagaagaaataaagcatatttaaataaaagagggaaggctgagttcactcctattgtatcttctaccctagcctaaggctgctaccacattagcacagccattggaatttaataaaaatccattctttcctttaaattctgaaccacttctatcaataagacatcctctcaataaactacaaaagaaacacctagaaactaagagattgaattatgtggcatagcatgccaatctctctgcatatctcataaagaaatgcattaaaaagtccatgagcagaaaaccacagaactgtaaaataaattttaaaaaacaatataacaaaaacaataatgactaacatttttgtcatcagtgaacacagcaaaaaatgctagaaataattgatgcggctacaaaattgggatcagatgacaacatagctgaacttactcaaataaaaacttcacatagttaattacatagcttgttagaggatggacagttccatctgttgctgcaggc

SEQ ID NO: 1621 - DNA, 854 bp, Glycine max
  misc_feature (780)..(780): n is a, c, g, or t
ttcctattgtgaggtgaaatttattggcaataaagtctctcagttgttgttttatatttccctatcgggcaaggcaagtaactgtaatactcggagttgaagcacaattttacttttgttgagtttgattatttcttaattaagttttatttaaaaagaaaaaaacacggagttgaaggtgttcaaagatgtttgaccaaatcagatagattaaagtgttttcggtgtataatataaggtgcaatgccaacaggggtagaggcgtaaatttgcttaagatgaataaggacaaggagagaaccttatattttttatgggggcaggaggtggccaaagacaagggagtgtatttgcatgtgattggattgggtggggacgaacccaaattcaatgtctgtggtgtgcctcacatcaaacgcatggaatcttggactcacgacttgccgttttttcatcattgtccctttcgaatttcatgttatagttcaaaaataaacaaattcatattattattgttaaattttaaagtcttacactacccttcatcctccccaaaaaagaaaaagaacaaactccaacacctcatgttatccgtgaaataaaaccattaaatatattttcttatagagatcaaaatcatatggaaaaaattatggaaagaacctgatctcaatcaggttttttcatccacgtatataacaaatccatgttaagaaatatgatctcaatgtcactcaaatcatcttggtatatattataaagtttataattaaacatatntaaactaatataatgatttgaattacttaatttaataagccatatctaataattcattcacccatttttagcct

SEQ ID NO: 1622 - DNA, 697 bp, Glycine max
gtaagtcaaattttgaagtgtgtcctacctgcctgaaatgccttgcctcaaatggagtcaagatgataccgcgatggttattaaaaattgtgacatggcccccaatttaaaattatggagcgtctgatagggagttttactactcatgtattcaaagggctatttgccttgtgcatacattatttcaacagtgtcgagttattaatttgttttgtccgtgcaataatttattaatttgtacatgtggctgtaattagtatttgtttcagatcccgatttgagacgttgctaattgcttgattaagtccccaaatatccctgctttgccagagagaagaagggtgtgggggtgtgtggaaatttgattgcataaatataacactcgatcgtggtttgcttttctaactaactgaagattttagatgggcatgtgccgtgtgccgtgtgccgtacaaaccaattgcaaactgcatgaggcagggcagggacacagaaggttcttttgacaatgttatagcatgtttggtttcatggatgtgttttttcatatttcggatgtgaatttcagaagttaacagcaataactttcacatctaacacgtgatttcttcctttttaataagtttccaaacacaccatcagttggaaacttatggcatgccaaactaatacctgcaaatcctaaaaacatttcaat

SEQ ID NO: 1623 - DNA, 771 bp, Glycine max
cctgcaggagacaatcttctccaagcaacaaaatgcacaacatggtggaggtagctcttccagcacgatttattttttttcatacacaagaattgaattcgagaacttaagaaaattcaaatatataccacttgaactaacagttgatcgataaaagcatatatgttaaatagcaaggaatttggataacatattttaaaaaattgagcttacactttttgcctcagtatttggtaaagaaagcaacatacctgggacacgatgacaaggataagaaatgcagggagaccaatttcagcgcaatctaccatctacaagaatcaaaagacaattattaaatatgttaccaatatatatgataagaaaagagcaatgcatgttctcttggaaatgctaataggaagagtcctaggccagtcagagtgacaaggggaaccacactaaaggggccgaggcacctgcaatatcagtatagttaataacttaatattagtgaatttttctattctaaaatatagctgatttttttcaaagaagcaaattgcactataacgatcaaaagagattctgaactcaagcatgtacattacctggcaaaaagcctccaaaatccaaaaaagccaatactgatttgaaagaccgatgcagtaataagtgccccttgtatggctctcatggaatgtataaatttctataagaaaaaatccaacccaggaaaaaattgatattagtgacatgcactatcacttttatttccaaaacagttataaa

SEQ ID NO: 1624 - DNA, 1490 bp, Glycine max
ccatacttgctgcctgcagcggtgaggcaaggggtttacacaaaatgctccaccattcggggctatgttgatacgaccaaaacttttttaatttgcggttaatgctttctttaatatattaacatttaatttgcttatagccaccctgctgctactaacactattcacaagacattacacatgctttttttaccatgcttctagtgaatctacgacttggaccacctgcattcataagcttaggcctcttggcatctcgttcatcagattcaaatgctagtgactcttccttgctaactaaagtattatcttcgagactcgtattgtgagtcagatcaaatatttgatgggttactgaattcatattattccggaatgaggaatgagattcaacactcacatcaacatcatttgcgacaggagaatccggaacagtgtagtctgtaagctcctcaccagagactgaggttgataaatactcaagcgctgtcttatcaggaatgctggactcttcgattttctcaagaggctggtcttcatgagtagctgtattcgatgggatccaggatacaccagtagatgttcttgaatgagaatggctctcaacagcttccacaaaatttacagagaacccaacctgaaatgtttctgatgctccatgatcattgctgacatatgtggctgggaaatcatatgccaatataccaacttgagaattttctctctctatgataaaacagtctcctcactagactcttcaatttcctgtatagagcaagaaaatcttcagttgctttatgattttttctgtcaatttaactactttaagcagatgaataactgggtaaccattttatttcttcatttctagttctactaatttacattgtgaaatagacaaaaaaggaggggcatcatggtgaagggaattgagaaatatttataaacaccataggactgtagacttgacattctagcctgtgaaatatcacaagctttttttattctaaatgtcaaactaatgaatttttctacacaatttcatttatattttgcttttgtgatttagtgatatatagttttttgagttttggggtgacttcttcacaggctgtccaagttcgcctacccccttgaatcaagggcagaagctgaactatgttgccagtagatcattccttttaattccatctgccatagaattttttttaacatgacttagacgcctcaaaaaatgtacttaaagcttctaataaacacgtacatctatattatgacaattccagaaagaaaattaaatggatctgaattttgtaaccctgggttatctttcaaggtaggctaatgtcgtgtagaaaacataccagcagaataggaacaaattgtagataaaataactatgaaattagtaatcaattcaatgattgaaattcctttacctctaatggtgacaggaagcccctctgatgacatgctgacatctgcaggca

SEQ ID NO: 1625 - DNA, 1435 bp, Glycine max
gacttgctgcctgcagggttaagcaaagatgatctcgtttccgaagttctaatttcgcaaccacaatatatagttcctttccctggtctgtgcagcaatctcgatgctgtgtcctgtggtgttcagtatccaattggtttgcataatgaaggtcgtgctttagaaaaggagtgtaacacgggagatggggtttcgaattttccagattgtcctgtcaactatgctgtatgtgcctcaagtggtcctcctgaattggattcaggtgctgtatcaccacctcagaatcagattgaaacaagggcctcagacagtcaccacgacccagctccgtctctcgcaaagttgcaaaggtcaaagtcgaggcagaaggctctggagctacgtaatagtgcaaaagcacccagacgattgtcaggagaagatgataatgcctgtgtctgtgctggcacagttacaggttctgcaccctcaactcaagaggcagaacatgcaatggagtcggatgtggtcaaagattttcattccaacatccaaagttgttccatggaagaaatggaagcatgtgtctatgtaactaactactctggccggatgacaagatctaaaagttcatcccagaaattcaactctttgaatgttgctagtccttctgtagcgaaagaagatggccctccgcctaataatttgaatgagtcatttgagatagtcaaccaaccttgttttgcaaatgcaagttgtggcatcaatgaagcaaataaaggagagtatcagagcaaggaagctggaaaaagtgtgtatgatgagagattaacagaatctagaagttctagccaggccagatgtaaccgtgaattgttgaagcttgatagcaccttgggcagtggcaaaggagttgacttctgtgatcatagacaaccaattacacatgctcaactaacagatttaagcaaagcctctgattgtaacaatggaagtggtaggaatacagttaaagatggcaattcctgcctcagcaaacaagaaagtaacattcatggtatgataaagttacttagaagttcctgcccgtcaccaggtcatgatcttatgatgactggtggttttgtaaggtctattgacaaatcagtgcctttacctcaaccttcaatttcacagaattcacaggatcttgtgctgtctgttgttgggacattcaatagtcaaaaggatctggacttttctgcactgaaaccaaacgatcgtttgagtagaagtggttctgaaaagattgaaaaagtactgaagtcttccagatacaatttctgtgagcagagtgctacctgctctgaatctgctggtaagaagtcttggaatgtaccgcctaccaaactggatgctagaaggttatcctcaagtccaaagtattccaaattagatacagaaactggcaggaatt

SEQ ID NO: 1626 - DNA, 1418 bp, Glycine max
atttaaatatggcaccattttctttccgtgagtaatgtagctgctactggttttatcaacaagaacaacattaacctcacatagctcctgcattgaaattcgtatttattagtagcacaccaaagatataaaagtaaaaaaaaaaaaattgtgtcaaataataataataatcataataattataaaaagaacctcgttgtgaatcagttaatggaattcaagattttctcgttaaagaaaatacgaatactaataaattataaactactatgcactaatgaactcagttccaaaacataattacaaaacttaagaatcatgggataaactgctcatgtggcataaggctacgaaattgatgagaggaacctaattaactcaatctgtattggggtcacctatgctacgtatgagcaacagaacaaagaagaaaaagaattggttatgtatgtgtgaagggagaaaacttaaggaagaaaaggtatgtggatgcatggatgaatctggacacacttcctctctcttctctaaattcttcagctcaattgttactgtatcgatgttagcatttccaattcttagaaactagaactattccatccagttgcaatttcctttccaaagacttaaatagtttcatggctgttgtattcagttgtagcttagacttaacaattaagctactaatgaatgcagttctgaaattttcttagatcagctaaaatattataacaaacatttatccaattaactttttgtgaagatgtttcttaggacatatataaaaaatgggtgggttccatcatttctatgattttttttagaaacgggcaggtcctttctatacaccggagcctttctttcttttcattttttattaatttaattaatgttattgttaacttgtacagttcacactatttggctctacccatccaatatttagtttagtaatttgattctgtattttcatttcttttctcccttggaaatgaaagaatatacttaccatctttgcttgaactctgctccatgtcagtctgatcttgccatggccacttcagattagaagatgaggagcactgctgtggaactgaaaatgaatatgagcttgtactggcacactgcttcttacatgatgaagaatcagctgtggagcaaatgtcttggtcaatgcttgacatgccagtatctttgttatgattttgagagttatcctggttctgcccctcctctaccatatgttttggcctcttccgcgtaggcggttcattcttggaatcctgaagtgctggcaccttttgatcattagctgaaatagtagcacatggagcctttcccagaacgacaacttttcgagtgtccaaattttcaagagagttagagttgtctacaacaacttcatcccttggttcaga

SEQ ID NO: 1627 - DNA, 842 bp, Glycine max
acttgcatgcctgcaggcaggaaatgctggggaaactaaacaaaaatataatgaaataattctaataattgaaagaaattttgtttaaggatactaacctttagaagcaaaccattacaagccttctttttgatggcctcagctattctcttaggatttgtaactaacaaatcatctcctacaagttgaatatcaactgaagcgagcaatgaagcccatgaaccccaatcatcttgatcaaacggatcctcaattgacacaatgggaaattctttaacaaaatctttatatagttgaccaagactctgagcagagtgaacatgagctccatcatttggctgtttcttgaagttcaaatcatacttcccatccttagtgtaaaactctgaagctgcaacatccatacctattttaatctgcaccattgttttttatttccagatcagcacaagtgaatattcaaattatgcaacagaaataatcaaagcttcacccaccttgccagtataaccagccttgtcaatggcatccatgagtaaaacaagcccctccctgttatcttgaacattgggagcaaatcctccttcatctccaacattacatgcatcttgtccatattttgccttgattattccctttaatacatgataaactgttctaccagaaataaccaagttaactgattgtcaccatatgtagatcgctggtgagattgaaaaatcatggaatttatgctatagataatatgcagtaaggaaaattggaattaagattagctatcaaatcatatgtaatacctatctaagaacctatatagcacagaagttaatatctgactcata

SEQ ID NO: 1628 - DNA, 705 bp, Glycine max
agtgtgtactgatgcagtagaaagtagaaacagctttggaataaaatttatgtgaaatattatgatatggagttagttagctgaagtttttctgagctaggtgtatatagcctactatacattgtgagtcaaacaccattttttgagggttatgcttggctcttgatattgtttttgctttgaatgaacaatatttccatctttttttcttctgacttgttattgcttatgaaaggaagaaaattaagagaaactgattttatatttacatatactcttcttaccaaagatattgggttctgtttttgaagttttgtgttgtacagctgatatttatggctctgtgtttgtcaaggaatcaagctgatgttgatgctattatgctggaaattgatggaactcctaacaaatcaaaactaggggctaatgcaatattgggagtttcgctgagtgtatgtagagctggtgcaggggcaaagggagtgcccttgtacaggcacatccaggagatttcaggaacaaaagaacttgttatgccagttccagctttcaatgttataaatgggggcagtcacgctgggaataatctggctatgcaagagtttatgatactaccagttggagcaacttcatttgctgaggctctccgcatgggcagtgaaggttagaaacctattactttgtgactgactgtaaccacactga

SEQ ID NO: 1629 - DNA, 1454 bp, Glycine max
gtcttacttgctagcctgcagcttgcaagatagggcggatgttcaaacaggcttaaaaatgatccttaacttgtgtttaacagatgggttcgatatgtttccttctctgttagtcactgatgggtcttgcatgatagacaggcggatgggcattcatggtcacccccttgagatccaagtgagtgtaactatgtaatgcttttcattcttatcttattggtattgggtgctaaatatggatttggaaactatgctgtttgtggtatgttctatttaaaattgaatgatgctctatattactaagttgcaattgtcttagtctatacttaaatcagtatatgctcctgttttatttgatgtatgctattttcatgtatatgccacaagtgacattaatctatgtttgttaaacatgagataaaactctgcattcaggtaatctgctttctgcattctacctctattttttcacttattattcctccatttatctgtggtaagttttactttacaggcattattttactcagctcttcgctgctcacgtgagatgcttgttgcaactgatggaaccaataatcttattagagccattaacaacagactcagtgcactgtcatttcacattagagaatattattgggtggatatgaaaaagatgaatgaaatatacaggtataaaaactgaagagtactccatggatgccatcaacaaattcaacatctatccagaacaaattccgttgtggttaatggattggattcctgaagaaggtgggtatctgattgggaatttgcagccagctcacatggacttccggtttttctcacttggaaatctttggtctattgtctcatcattgggcaccccaagacagaaccaggctattttaaatctgatagaagcaaaatgggatgatcttgtgggccatatgcctcttaagatatgttatcctgccttggataatgaagagtggcgcatagttactggttgtgacccaaagaatacgtaagttcttaccataatttttctttctgttgtttgtgtatttgagaactttgattttttttatacggagtacatttgatgaatttatgttgtataatttgtttgtctttgtagtcagaatttcttctactgagtgcatcttaactgaaacaacatgcttaacttttgcagcccttggtcatatcacaatggtggatcttggccaacccttctgtggcaggtaaatttttcctgatggcaatgtgtgtgttttaaggtcaggtcagatatattgttggctatctactctgtcctgtcttactacctcaactattgaacccctaattttggtggctctgatcgttgggaataagacgcagggaggagtacttaccaggccaccaatagaaactcatctgcaggtcgacttagaggtgccccggtaccagtccgaatacgatactac

SEQ ID NO: 1630 - DNA, 712 bp, Glycine max
gcctgcaccaccacgtgatcaacgtgttgagaacaaatatatcagagtccaatccgcccgcgtcgaaggattaaacagtgaacctctttcgccaatgggggctgcaaaaagacgaagctaaggctttcaagacgcaggatatggtgaagttatcgggggaggcgttgggggttgtggagaaagtgaatgacgcgaagaggttgagcgcgtggcggaacatgacgtgaaggtgtttctgttgggggtcgcgtcgaacaccttgcgcgcgaagtgcgcgtggttagatttggagtagaagaggatgagtttggagacgaagaagttatcgggtgtaacggagtgcaggatgaggcgagcgtggagctgcttgccctggcggaggaggcggtggttggagtagcgctggagggcggagccacaggcggcgaagtcgacgccggggcgggagagcctctgtcggaggttgccggaaacggctgattgttgtgtttgaaattgaagggtgggcgttaccaggttacggatcctcattcattggtttcgcaatttcgaaaattcgaatttttcatcgttgctttctattcaacaactataaagaatattttgggctgggctttgggcccaattaagtgtttttgttgactttgtttttgttgttcagaaggtcgtgattcgtttttgcttgattctgaaaactaaagctaatgaagat

SEQ ID NO: 1631 - DNA, 735 bp, Glycine max
tatacgaatatcgcacctgcggtacccgggggaatcctctaggatcgacctgcagtaaccgctttcccccgaacggtaacgattccaggactctctcgttcagcaccttctcttcttttccttgatctcccaaaccaaatgcctgcacaatcaaacacgccgtcaattaactccgtcacacaaaactgaaaaagaaaaaaagttacaactactagtgagcaagaagtagctttcagttcactgagaccgatccaatgaatctaatttcattttcttttcgctttcagtgtgattaatggcgtacctgaatcctgacataatccatacggttccaacagaaggcgttccctagcatctggtcaacggtctcggaaatgccgtcgagcgtaatgtcaaccaccgtcgacgtggagcactcgccggcgttgttcattctcttcgcctgagctccgtttccgatggacaggacgaggagatcctccacgccgttcaccgacgggaaatcgcgcttgttgtggaggacgtgcgtgacggcagctgctgccggattgttcatcaccaggccgccgtcgacggcggcgcacgaggtttttccgtcgacggaggagaagtggaagggagtgaagaggccaagggtcgccgacgtggcgcggcacgcccttccaaagctcgaaattgaagctcggtgactcggacgcgtcggctcgggagaacacgaacggcgcagagctcttg

SEQ ID NO: 1632 - DNA, 783 bp, Glycine max
cctgcagtaccctgaatcacgttcatgtagaaaatagaaggatttctattttctgttgcttttttctcccctccatatatatttcatacctgggatcatcttgatttttggtattcatcctcataatagatctgcattttttttaagaaggggcgttttaaattcccaatgtttcactttttcttttctttttttttctgttatttttggcactattatcaacaagatgtcttctaattaagcatgtatgagctttcttcgtttcttgtttcattgattcgaacattgatgatatggtttgatactaataaaatggacaaataaatctctacattcatgatgcatccttgccttgagtatgagttggttagtattaactggatttgcctaatgaattgtttgttttcaatattcagaagatggctgctggagtgtataaccaagcaattgggacttttcaatctcattctcatatcaacaattttatcatcagcaaaagtttaacaattttgtaagacgggtgacaaaggattttatcacgagtaattgcttgtcaagaagagattgtagtgtaattcaagttatagctgttggaattttctattccaataattaatatggactaatattacaaacaattatattagttatttatgtgatcaaattaagtgaatctattatacaactaaatcatcagatgatatgatacggatttaaatgagcaagtgtgtcagtggttggcacaatagggtatatcctgtggttttacacattccgtaacat

SEQ ID NO: 1633 - DNA, 828 bp, Glycine max
aaggccatagagccaatctcaaatttggatcatatgatagaatgcaaccagagtttttggcaatgctcatagcagcaaggtgagctgacttgcatggctcatcaatcaagctgatggagccataatggaatattctagcctaaaatcaatgttatgaaaatcatgattagatcaaaggtctcagagcaacatttcataaaatacaaacagatattccaaacacctgctttaggatatctttatcaagttctgactcttgaaggagcatatcagcgcttggattgcggaaaaacaagaattcacgttctccatccgctctaagtgtaacaaaagctaatgcagttcttgcattagagtcaaaccgcatgccagacgtctcaacattgttctgctttaaaatgttacccaacatgtacccaaattcatctgctccaacctaataaacagatggcaatgaattaagatgtgatttctattctagtagttcaagcaagcattttctttcctcctcttttcttttccttctgagaacaggtgcacaggaacaagtttcatcagaactattcagtttcaaagatagcatatgacaaatatgtataaatattcagatttggacaaatcattcaggacaatgtgcagatagatagtaacaagaaagtgaagaaattatataaccaacaggatcagtgaagttgattgaaaactacaccttgcctatgaaagcagatgaacctgccagtctagagataccaacagccacattgggcagggtgcaccaccaggaagctttcttgaagcgggtgcttcaaccagtgacactcctcccac

SEQ ID NO: 1634 - DNA, 773 bp, Glycine max
tcagaaagtaaatgataaacaaaaaccaaaggttctctttgcaatttgcactcgtgcccctctcaagatatttatttataaaataaaacagacacagggaggggattagattagggtaagggatgtcgtcgattgtgaagaacagatactgggttctgaggcatggcaagagcattcccaacgagcgaggcatcatcgtttcctccatggtttgcttaaatccagtccaatcttaataatattattttcctagttattgaattgaatcgcattcgcaggagaacgggactcgccccgaattccaattggcctccgacggtgttcatcaagcacaactcgctgcacaatcattccaaaaggtacctcaactcattttcaatttcaatttcaattaaccacgccaccctgactgcgcttcgcaggaactagaggctaataatatcccgcttgctaatgtacgcatttgctactcccccttttcaagaacaacccataccgctaacgttgtttcaactcttttgaatctcccttttgatggaccccactgtaaggtaagcccttccaacaacttgcctcaattgattctcatttactaagcactaaacactatgcagcaggtcatccaagatcttcgagaacgctattttggtccttcttttgaactcctttcgcatgataaagtaagtcatcctccatgcccactttgttctgctgcctactgttttgggcattcaccttatttgtttaataaattaaaatctctttctctgcat

SEQ ID NO: 1635 - DNA, 824 bp, Glycine max
gttgcctgcagttactggaatgaagatgacaaatacttgccatgccacctgacacatcactgcaatagtgcctagaatctgtattattgagaaagcacaccatcctattctgtttgccatttccaagtctagcacactttgatctgtggaagcctgaaataaaagttttcaagtgttggaatcattgtaaaaataacacttcaaggaagatccaaagagacatccaattgttttaaagtataaaacaatacacatccagataaccatggatgaactattgcattactttttggcactttacaatgaaaatcattagtccatttcattgtgttggagaatatacaagtcccacactggtgcaaatgaagaaaaaatgtatataagttgtgagtgcttgagtctaaaatgtctcaagcaccctcaactttttagttctctttgttctggtgaatgtgggacttctatggtctccaacatattataatccttttatggtcagtttgggtgtgttaagaaatactgttgtgatagtaataataaacataaatagaatcgatatgaatgcttaccctgttcaatattcttccagttggtgtagaatcaaaaaatgccatgggggcacggagcacactatgcaacatctttgtgaaaagtgtctgtgctgtccaaagtccagcatttaacaccatcatggctcgcagcaaaacacaaaatgaaccagcacttgagagtgccatataaataagtagtatgaaattcatgtcaaatataggcttaccatcactacttgtgggacaaacccaagcatcccaatagtactagca

SEQ ID NO: 1636 - DNA, 859 bp, Glycine max
  misc_feature (812)..(812): n is a, c, g, or t
aaacagtatcaattataccatccaaggtgcacattgcagcctacatatatagttacagaagaacatcataagttttcatcaaaaaacaaaagaccaacataagttatccatttattatttcttgtgtagacgcatgcatgtttggcatatattgtttcaggtaaaatatttttttcaatggttttgttaatgccaacctttatttttttttttaaaataaaaacttttaacttttagtttcttaaaatcaattcagtgattggtgttaacaaaatctatttttaccttagaaaactatcaaacaagtttttaagttacaaccaggcttgccttcgcaattatgattttattttgtttctagatattacaaaaaattattgataaaagtggccaaaattaaagtaggatcgaaccataaaaaggtaaagcctaaaacaaaatttgagaaacttatttttactttaaagaataaaataatatatgggaccttttagcctacatgtaatgttttaaaaattagactggtctgaccggaaccagttggaccgggaaccggaggggcaccagggttggactttggatcattcatgcaattgaaccggtagcaaccggtgcaacccggccgttaagcggttaaaccagcaaaacggccgaaccggttcgtgcataagaaaacaaaaataagaaaatcaatagatgcgactatgctgtttgccggaaagggttcgctcccgtcaccggagggcttctaaattcgttgtcggacagctttctgcgtttgtcgtcaaacaaggtccacacacagtcatcanaaagcgccacgccatcgtagaaaaacagtgcgccgtcacaccaaact

SEQ ID NO: 1637 - DNA, 1434 bp, Glycine max
aaaaaactgtgaactccaaagctgaggcaatttgtaacattaagctaaaccttttcctaaaaagatctgcctttaggtttggaagttgtctcatagcaggtggcgttactatagagtcacatatgcttgtcgtgttctaaaaaaaaaggaaaaaatgcaaaaacagaattattgatgaaaatatttccagtatgggaacaattaattcactcaagtagctaattaagtcaatatattattattcatttacttatctttaacaactttatgtcaacctataaggcctggctctgctactggtgaaaagttatgctggactcattttcatcctctttgagtgcagttctctggtataaatggggtcctctactatacacctcaaattcttgagcaggcaggtgttggttatcttctttcaagcctaggccttggttctacttcttcatcctttcttattagtgcggtgacaaccttgttgatgcttccttgtatagccattgccatgaggctcatggatatttcaggcagaaggtattcatctccccattaccattttccattgacttctttatcaaatactaagaaatatgtttaaagagatgggtctagttgttgggggtgttttcctatgaattttttctattgcatttccccctttaacttacttttctaaaatcattcactttaaagtagatatctatgacaggtggatttgactttttcactccttgatgtatcatgcctgattaaaatgttcatgagattttttctggtttcaatgccccttttttctttttgtttttttcctcctgtataactataaggtgtaattttttacttatattttttttatcagcaaagataaaattatatattaatatgaaagaaatacaaggggtactgttatatgtacaagcaccagtctcccaagtggaggtttggtaccataatacatatttttttttttatcagcaaaagtatgtatattatatagaacattaaaatcagtacaagcggtactgttgtatatacatcctagtatttgcaaggtgtagaactatggtgacctaatacatgctaaccgacatgaattttccctaatacaaaactattcagcatgaattaaagaaccaaatctctgactgtataggttacatagatgattccagcatgtaaacctagtttcccctaattacaaaaaccttctctgatattgcttgaccaaaagtgaaaaggtgtgtcatatcccttttcaaggttcctcagccaagtccagcagaaaaatatagcgtcctccacccagcttgttggcgttgaagatgtcgtttgaaaaggccattctgtttctatggttccatacacaccatgttagggacacccaccaaatgagtcatctctttgatttgataccaagataggtagtgcagcatgagt

SEQ ID NO: 1638 - DNA, 811 bp, Glycine max
  misc_feature (770)..(770): n is a, c, g, or t
  misc_feature (772)..(772): n is a, c, g, or t
tccaaaaacaaaagatcagtataccactgtttcaagatataatacatagtaattactacatttctgcaatagagtttggtttgtactaaaatttgttcaatgctggtatgttattagttgtcaacaaaatgcattgttggtaataaatacttacaaagttccagcgatagctgtactaatgtggctcttatcttcttgaaaggacctggccaaaccaaaatcagcaattttagcacgaagctttgcatccaataagatgttgctggcttttatatctctgtggattatcctaatgttggagttttcatgcaggtaaaccaatccttcagctgttccgatgataatgtcatatctcttgtcccagtttagttctctacccttgtttttatctaacatgtgcatacaaagattgagaaaaaatatgaataagttggaatgtcttgactaaccatgaaatgaagggatttttaaatctgaaaggagacagtctattccatgagttgagttattaccaaatatgaagcgatctagacttctgttaggtagatattcatatataagaaggctttcaggtcctgaacaactgcatcctaagagtctgactagatttttgtgttccacactgctaattatgttgacttcgttgaaaaaatctgctgctctatgtcggttgttgaaatataatctcttaatagcaatctctcttccatcagccagaactccctgcataataaaattgttaagagtcgttttgagattcaaatatgggngngatgttaagtttgtagaagcaaaaatactttataaacgt

SEQ ID NO: 1639 - DNA, 1493 bp, Glycine max
attgaaagagtctacagtacattgttagctttaatgatgagaaggttagaaaataaaaatcttgtttgcatctagtagctaaacgattctatttgcaattaaaagcttccatcaagggctaattaaagcccaaattagatagatccagagccaacaagcccaattgggctacattattagccttgatcttgggcttcagctgtttagcccttgtcattagttgagttgaccccaaaaaaattaaaattcaccgtcaccgattgattattctcatcgccgcgctcttgaaagcttgaaccgagatacgattttttttttaaagcgtttaggcgaattcagcgagagtgggttaacttttgtactttgtttgttattaattgcgacgtggaaaattgaaagtgaacgtttccgatggtgtcgtggaacaggttgcggctgggaatggacggtgacggcgaggagttgacggcgcaggagaccgctttgtatgaccgtcaaattagggtttggggagctgatgctcaaagaaggttccttcttcttttacttttttaaattctgatttttcttatgcgcgatttgatttgcttttgttactttactattgtaacctaattgaattctgctaatttttgatcttcgttatatctaatctaataatagtttaaagaactactttacatagcattttaatgagacttttttgtgtccagattaagcaaatctcatgtcttagtctatggaatgaaaggaactgtagctgaggtaatcctagaacttgtctctctctggtatctcaaatttgactttggcaaacaaaaaaagagtaaaaaaatgggttccccccccccccccaatatgttgttgtaataatgtgtgaggaatttgagtttcctgctgttggttagttttgcaagaatattgttctggctggagtaggtagtctgactttagtagatgaccgggctgccacggaggaaatgctttcctccaactttctcatccctcccgatgagaatgtgtatagtggaaagacccttgcagagctttgttgtaattcacttaaagacttcaaccctatggttcatgtttccgttgagaaaggtttttgttgaacctgttcccttatatgtttggtttctgcttatgcattggtttcatgtggctcttgacattatgttttgtggttgttcttttctgttgtttgtcttggcctcaggtgatttgtcaagttttgatgttgaattcctcagcaagtttgatgttgttgtcgtcagttgttgcacgctttcggccaaagtaatgtggaaaacttgtgtgtgtgtgtgcatttctgagggtttacatagtcactgtgttctaaattactctacacctttctgatactgtaaattgtcttgcaacattcttcttggcctttactcttttgctgtagaaactggctaatggaaaatgcagaaagctatcaaaacgtgtagcattttatgctgttg

SEQ ID NO: 1640 - DNA, 1422 bp, Glycine max
cttaatgcttaaatttttacttttacaggataaagccaagaacccaagaatcagaagtgttctttcgcatgaatgcacttcaatctatttttccacaatctatcaagttggcacattccccactgtttgtggaagttcaagcttgggcaagagctcagaggcaaccttgtcaaatgagacaaggttgagacggtttttgtttccgttcataacatttgacaggtatgttatttcctgagcaaccacattcttttcaagtatttcaatccaaaattcatcatcttcgttgaggtttgatgatcttaatatatttactacattctccagtgttgctacattcctaccagcaccacagcccatggctgttgcagcacccactgcatttgcaattgccaatgtattaaccagtggcatattatgtataaaaccatagacaatagcagctacaaaactgtctccacatccgacagagtcaataacattcacctgataacattttagaaatccaattagtttatcacaaaaagatgaatcttgtcaaaggaaaaaaatagtcagacataagttcaataaatattattgtgagagacgatcatatttgaacaatcaataaagaaataacatcatatacctagagcataccaaacacttgagcttgactattcctttgaaattcatgtttgaatcattaaggggaaaaaatcttccagttgaagaaaccacagcaatgttcaggacatttttgttttgaaatatggtctttcaataaaaagtggttataggcttaattttcaatcttttcattaatttgtcttcaactgaaattttcaccattaagccaataatacccatgaaactctaaataacaaagtgggtcatagcactgttaagcagaatagcagtatataaagtgaaaaaaattattgtttcaaaattgctagaatgtaacgaaagcaatgaagaaattagaatgagaagataatgccttgaatgcaggtgcacaagctacactcgatgctgttataagaattgaacccttagaacccatttttacaatcacccattttgtgcgaatccctcttttgagaaactcctgccctgctaatattggatcgtttatgccggttaattcctcagcctgtcatgcaaaacaataaaatcaaagatgtcattaaattagaaagtagttgccttgcaaaaaaatataaataaaatagaaagtagtttgtaaaacaacctacaaatagcagaaacaaaaacatcattattttgcattacattattgttttttgggaataagagaaaatcaatatcttctatacatattgccaggacaaatctcaccaaaaaatgaaaactccaatagtcttttgcttaggcaggaatttgacaacaaatggacttgtaacaaaaataaaaatt

SEQ ID NO: 1641 - DNA, 884 bp, Glycine max
  misc_feature (850)..(851): n is a, c, g, or t
attcggactcgtacccgggaacctctaaatcgacctgcagccgtaatccaaatggagctagttttcatttgcatataacttccaagagcaagacttggcacaaagtaaccaatattacaaaataacttgggctatcataataattgaatcatacaaagttcatgatactattgtttctttattcatgactactcataattcttaagaatagaacggtattgacagattgattctgcattttataagagttggaatataaattattgctaaatgtctagaacttgcaatgcaggtttgaaccagagaacaagcccaatatgctttctccaatagatatcattgtcactactgtggatccaatcaaggaacctcctctagttacagccaacactgttctttcaatcttggccctggattaccctgctgacaaaatctcatgctatgtttctgatgatggagcttccatgctcacctttgaagctcttcaagaaactgctgagttttccagaaagtgggtacctttctgcaaaaaattttctgtagaacctagagcaccagaaaagtacttctctgagaagatagattttctaaaagataagcttcaatccacttatgtgaaagaacgccggactatgaaggttagcattaatcctcctaaagttaatgccttcttttaaagcagactaatttgaaattctggtctccatacttgacaccattactttttaaatttggtcccttcttgaaaaaaataattatattttagtctttacaagaaatatgataatgaattagtctctccccttaaaagatgatgactagtctaatgcttgtcatactcatacatggnnctttgtttaatcacatgctaaagctcccaacgt

SEQ ID NO: 1642 - DNA, 792 bp, Glycine max
taaatgtttgggaattgctgagcactagatcatactatgcttgtttttgtaaccaccaccagtttaatggcttaaaaatgtttcattgtttttatcttccattttgattttctgacaattttcggaggattaagcttttagacttctaggtgggagttgatgaatcattataatgtgaatgctattttgcttttgtctgtttttgtccagatggtgtcaatgttttatatgaatacacctacctttgttctctgttaacacctctgtatttggggacttctttcttacctggttgtaggttttcatgtgttgtgggtgagggctttcatagtcatagaaatgagagaatctgcttggggcaaaaacattgttagtgaagactagaacaagcagtgaacaattcttagtggtttaaaaaaaatgaaatggttggggatgcatattcttagtcttttgatgaattagtccacatgtgcagaagagagggcagtgttagctttccgtttatcttttgttcaagtcacttcctattcttaatgtttgagaaaaattattttaaattattttattttctctttgctatctatgagctaatgaattttttgcagcatggcagaaatttattccataagtgaactacatctatgtcatttgtttcccgctgtgcagcaattttagtacaatagattagactatcttctgttactggatatgaaattatgaaatatttttattttatcatcattctttagcatctttaatataactactggggtattggtaaggaagacc

SEQ ID NO: 1643 - DNA, 815 bp, Glycine max
ttccaaaaacaaatcctttaatatgtgaacaaaaatgttgaacgctttaaggatcgccacatccaaacatgagttaataaccagtaacatcatggtctagactagaaaaatattcctaggctatgtatgagatgtggaagagatactccatattgatggtaaatttcattgaaccaaaacttgaatcatacatatcatgaatacagcttatacacaacttggaacaacagaagataatgtgtcatctggaagctacaagtctacaacacctaacttcctaaccaatatgtaacagaactaacaaattacaataacttactagcaaaatcagaattgactatattatgcaacaatattgaacagaaacatgcatacacaaacttgcataaatacgtggaaaccaacagcatggcactgagaaacgaatagggttttttatagtttaatttaaatttttttttgaggaaaaaataaaagaaagatcctctcatgggccgacagtactgtaggagagctgagaaaatatcaaagttgcagacatctttagccataacaatacctgaactgagccaagaatgtacaacgccgaataatgccggccatggatcaccatgtcagccaacatagcaagaggaatggtgagtgacatgcccaaagtggccactaggggggttgtccatacaacacaaagtgccctggttagataaaataagctctaacgtaagagtttggataactgcatgcgtatgtatgcctaaattagtaagatttattctcatgtaccagaagtagtcctgagagaacacctaccacaa

SEQ ID NO: 1644 - DNA, 808 bp, Glycine max
aaccagtcctcaaacttctgaaactacttcacctccaagaacagtgaatgttcatcctatgcagaccaggtcaaagtctggtatctatcaacctagacttcatcctattgccctagttcctaaagtgccagaccctcaaaatcttaatgatttcagacctatttcattaataggctgtgtctacaagatcatggccaaacttttaactaatagactgaagagaatcatgccggaaatcattgatgaaagacaatctgcttttgtagttggaaggcagctattgcatagcacaattattgccaatgaagtggtggaggaagcaaagagaggcaagaaagcatgtctggtgtttaaagcagattttgaaagggcttatgactcagtttcttgggattttctaatatacatgatgcgtaggatgggcttctgcaataaatggatccagtggatccagggctgtatcaaatctgcctcgatatccatattggtaaatggtagccctactccccaatttactccacaaagaggtcttagataaggtgacccactagcacctttgctgtttaacattgtagcggaagccctaactggactcatgagagaagcaatccacaagaaactatacactgcatttgttgtggggaaagacaacattccagtcagcattttgcaatatgctgacgacactatattttttggggaggctacattgcaaaatatcaaggcaatcaaagcgatccctgcggagttttgaacttgcatctggccttaaaataaactttgcaagagctgttttatggcatttgaa

SEQ ID NO: 1645 - DNA, 818 bp, Glycine max
ctgcatgcctgcagaattgtttattgctgattatagcaccctgcaaaatatatattttatgcacccttgaaaaaacaactgtgcaactataaatgaattaaaacatcagtctgcttatattaattcacttcttctattttaatcaagtaatatgaccctcattttgggattcaaggcttactatggtgtagaatttcatttaactagtggaattgtggaagggaaatctaaattcaaaatacaaacagatagagtacacatatctaaggcccttcattttttatgttctgtgtattcaactttggatggcagcttctcttgtgggtgagccatatcataagttgcatggaggccaaagaaaaagtaatagatcagcattaccacagtgcacaccccaaatcttatgaaggcatcatactccaaagaccccatgaggaatacatttgttgcaattgacaaagatggcacccatggaacaagtggaacaccccaaactcttggcaccctttgctgagtcaaaaaaagttgcatccctagtgttgccaagaaccagataggaacagtcacagtgtatccaatccaaccattaggcctaagtccccaataagctgaaattccaattgaggaagcaataatgagcaccaaaaagataactagctttatcaaattctctcttggtgtgacccctctcacatagtacctcctcaccaaaagggcagcagagatcatcatgaacacgaagagcgcgctcaccgatatcaagcttgacaacacatccaagcctgtgaaaaaggctatggtggcacttgcaatggtaa

SEQ ID NO: 1646 - DNA, 1514 bp, Glycine max
aaacttctccaacaaaccttgttgagcacaaggaaacctactagtacaacaaaagtagctcagaaaggtaatttttcacatactttaaacacctccaaaggaaaaagaagatcctggattatagactctagagcttcagatcacatgactggagacataactgtttttgacaactattctccatgtcatgaacactctacagttcggatagcagacgatacactctcaaaagttgttggtaaaggttcagttgtgattttagaacatatcactttaaattttgtactttatgtacccaaacttgactgcaacttgctgttcatcagcaaattgataaatgatttgaactgtgtcactaaattttcccataatgtgtgtgtttttcagattttgaggtcgggaaagacgattggcagtgctgaagaatgtgatgggctctatcttcttcaggttaaagattccaataagaaacccgaagctaattcatgtatagtgatcccttcaaaaagtgaagagtctgtaatgttgtggcactatagattaggccacctaaattttatgtatttgaaaaaaatgttcccatcattattcaataaaagactaagaaattttcattgtgaaacttgtcaattatccaagcatactaggagcacttaccccccacaaccttacaaaccttcctaaccattctcgctaattcatagtgatgtattgggaccatcaagagcccagcaatattatcggctctagatggtttttgacgttcattgatgaccacacaagagtcacatgggtgttttcttatgaaggaaaagtcagaagtaggacaaatattagagatttttcatacaatggtgcaaacacaattccagaccaacattaaggtattgagaatagataatggtcgtgaatactataattccatgctgaatttctacctacagaaaaatggaattgtgcatcagagttcatgtgtagacactccacaacagaatggagtggcggagaggaaaaatagacacctactggaagtgacgagatcactgatgttggccacaaatgtaccaaaacaattttggggagaagttgtattgtccgcaacctatctcataaacagagtgccttctagtgtccttaatttcaacacccctcacacagtccttcagaccacctacccaaccaacaaaagcctcacctcaattcccttgaaagtgtttggttgttcatattttgttcgcaacctagacccacaccgtagtaaacttgatcccaactccatcaaaagcatattcctaggatactcacctcaccaaaaggggtaaaagtgctactctcccacaaccagaaaattctatcatacaatggatgtgacatttttcgagcatcggccttactatcccaaagttggcattcaaggggagaagatgccagttttgactgacatgacagaattccaacttttagacttagaaaaggatgagatggctgcacctttggagactacagaaactgct

SEQ ID NO: 1647 - DNA, 823 bp, Glycine max
ttctggaaatggtgcagttcaacaaaaacaatttattgaacctgatcaaaagaccaaagtggctcaatttgaagaagataatacagtatttcataattaactggtgggctacatgtttgatgcagaataaaaggagatatcaaaagtttctttgttattttctaacaagaaattatgtataacactataactgacaggaacactggtcttggaacatgaagatacttgcttcgacaggcaattcaagcattaggcaataaaaccctgaatcattggtcatctggggatggagcaacagcaggtgctggggaaggtacacttccttgattagtatttgaaagtccaaatttcttgatgagttcatttgcaattagctcattagcactgtctgtggggtggtactcatcccaaaagacatatttgcttctatctttgcacagacttgatgcaggtacacatgtaagggcgggtcgaatattccaaaaggaacaacagggcgagtctgcgttttggaatcctgcaaagcaaacgtagttacgatataaataactctcagcagtcagcagacaagctagagcaattattaattttctgttaatgcatgatatgtagccaattcttcagaaagtaacatacacaatgtgtgaaatcctaagttcattctttttaagtgtttcacatacacaacgagttatgttcatttagataattgctaatggtgcatgcatcctgtttgtgaaaaaataacattttacctaccatactatttggactgctaatcacatcataacacatcattgctctccaaattttaacttgatca

SEQ ID NO: 1648 - DNA, 785 bp, Glycine max
cttcttggtgcaaagtagggcaagaattcatagcaacagcatgagccaatgcaggcaaaacagttctaagcattgccccaatccttaggttcctgacctacacaggaagcaaagttcaaaaccaggactctagcatataaggataaaaatctacctacctacctatctatataaaggcgtttgagaagcataccaccagcctccattacatatgtacattcagaacagtaaatattgaaatgcaatgtgaagagaaagaaggccataaaatctagccagatatggctgctgacaaactaacttaaccacatataatgaaaaaaggcttatagtagaaaacagtgacaaatttaaagaatggaaattttaaatctgtttaggatttaattgcatacagtaaatggtggtccaagtgattcatgtccataactgaaacttttaacttcggtaacatgatgtatgattagcataagtcatcattcattaaagggtgttgggactattgaaactgtcagatatccaacttgaaggtggccagaagatagataaggcatgcaagggcattgccaacttcttattaccgtgtgcataaaatacaatttgttgcatctttccttggaatatttgtgagaaggggaagttgttatataaatataagcatactaagacacaaaaatattctgtttgtgtatatgctgatttcacccagtagccctctattctgtttctagctgtaactgactagctaatagttacttagatgagctgtcatgacattctcatct

SEQ ID NO: 1649 - DNA, 810 bp, Glycine max
tgcctgcagaaactggaacatatcgatggatggctcctgaggtatttgatcttctcatgttaccgccatcaagttgttcaaatagtttcgatgatattgtttagcttttcaacatctgttgtctgttttcttgttatattcccatatgcaaggataaggctgcgtacaatatccctcccccataccttcgcatagcgaagagcctctggacaatggagtacgctagttttttattcccataggagtttgcacttttttaattggttttttcaacctaaatagatgtctagtgtttatcttattttaatgtttgatgaattttgtgaacctgtcgttctggaaatttataacaaatgaaattgatgacattcctctagctaagtgtccagtcatatgtggtcatatttactgtagctaagtgtgtgtgtattttttttttctggatcgacaaatcttagttattaattgttagtttttttgttaggagaggagatcaaacccgtgacctttcccccttccctttttccttaaatcagccaaccgaccttatatctccactgtagcttagtatattgcattcatcatatcctaaactgatatgaagggtttggcttcgactttctatattgtctttcccctttcactttatgcaccaaattttatgagattaggttgtaccaatgcatttagtatgaagaaaagaattactgctgccttatatttcaaaatacaattaagttgagttcggtagaaaatgttcaagttaaacatggggcaaaagatatagtattaactcttttatatctgggg

SEQ ID NO: 1650 - DNA, 798 bp, Glycine max
cctgcagtacacttggccagggacttcaaactagcacctatcctggggaggttatcttttcaatagcactagctataagtggcctcatcctttttgcccttctgattggcaacatgcaggtatacttcaaatcattgagcactttatatttttaagttcaaaatattgtttcttgatatcgcagaatggccttgcaaataaatagctttgaagtttatgtcctaaagtatgatactaagatctctgtctttttcccatgattacagacatatcttcagtctctcaccattaggcttgaggaaatgagagtcaaaaggcgtgattcagaacagtggatgcaccatcgcttactcccacaagatcttagagagcgtgtgagacggtatgaccaatataagtggctggcaacgcgtggtgtagatgaagaaaatttagttcagagtctaccaaaggatcttcggagagatattaagcgtcatctctgtttggccttagtgaggagggtatgttttcaaagctatttcttgactaaataagaccactcttttctccggcaaactaagggccaacttattatacttaaaagaataaactaatcagttcaatatttatggttactggttatagtatttacagccaaacaaccacccaaagttgtgtatttggtccttttgcacaaggacactaatttggtttcttctctatttcactgactctgtagatttgcttttcaaattctttttaaaattacatcatggcagaagcctctctatgagaattttttgggaattgaatcct

SEQ ID NO: 1651 - DNA, 802 bp, Glycine max
  misc_feature (696)..(696): n is a, c, g, or t
  misc_feature (733)..(733): n is a, c, g, or t
  misc_feature (736)..(736): n is a, c, g, or t
tttcttttgcagatgcagacacagaaacagtttctaagcaatgttccccaacagaaatttcaaggatgaaaaagttaagtaataaggtagattcaagttaaggtgtggaatcattctatggatctgtttgtttaaatgtttcaataagatgatcaagcgttgaaggttcactgtgactgatatcggagttcgaaggataagatggtttttgggtttcttgtcaagtctctgtcaatgtcccagtgacgacaaaatcacggtaggttaaaagttaaaacagatcagaataacatttcttggaatagccataagaagattcaactgttggatcttttcagatgataacccaaataccctaacttaatccacactccagctccttgcttgaaaggaaacgggagtttaagtatgatatggttaaacctaccaaacttattccaatttagttttcatgacaatttctgtgaatataatgtggcccggctagacagctgccaaaactcatcactatcttctaagaaaatcattaaaaatgtaatagatttttatgccaaaccaaattgtactaatctctgaaatggaacttaagcaacaagtaattatgatgtactaaggaatttcacagctgagattcaaatcctcagggtcaatgggttaatgaacgcgaacctgaatttgagtgcaagacccaaacanaaagaaaaagagaattgtcccagacagacaaactganatntatctagcagacatctctttatatgtatcacatttcctttgacaacaagccaatctcaataactaa

SEQ ID NO: 1652 - DNA, 1289 bp, Glycine max
attcctgactaaatgcaggagaaacagtatcgggcagaacaggtagctcggagttaccaactgttggggtatcagaactactacggccaatataaactccagtccaaaagtcatccgtttgagcggcaacattttgattaacaccagtagagttcatacccaaggaagttaaatttggggagacaaaatgactatgaatagatgccgggggaggttttctttctacaatatcacaagagcccactgtatccaaaccatcatcatctttagtgaggtcaacagtactaggagggcaagtagattcttgtggttgagtttgttctttttcacaattgggtgccttcttctgcatcttatccacatcatgatccttttccaagactgccttccatgatccattagcaaagacaatcacttccgtaatgttctcaccaacatttttcaggatctttatttaaaaagaaaaatataataagagatttttatttttcacttcctttcctgttcaacctttcattaatccctagggtcaatttggtgtaaccttaaaattcagaagtgtgtggtggttgtatgaaattaatacaaaaaactataaaccaaatttttcactcccaatcttaaggtaataccaataaccaaactgactctaggtgtgagatgataaataacaatactcaattgaaggattgaagtaaatcaacttgcctcaaccatgtttcggtcaagacgaatatcagcataacagacattctgaatgcatctagggcagcgccaggatggcctttttgaatttatattaatgaagttgtcaaagtcaaaacactacagtaacgagagaagacaaatgtcaggcagaagggatgaaacagatgaggattatataaacatacacatacaaccacaccacagacagacttatagcaattaaacacgtcataaaattttcactttatcatgagaagatatgattctagatacatttaagcaaattttactattttagtacttttatccatactaaataccagagagagaaaggcataagttgcagcgacaatttgctgcacattaagtgatgctaatgcaggaatagtcacctggaaatgtttgcatgaatgccctttaacaggagtcttgatacgtgtaaagctgttttgcacagataaaacacaagaccatcaacttttatcaaaaacaacattaagaaaacagaaggacaattataaaaaaattgaaaatccaatgtactttatagataattgaacaaattatcttaagcataattt

SEQ ID NO: 1653 - DNA, 1410 bp, Glycine max
atttctaggaaactaaaattccaaagttctgatattgaatggtcaggcttttcttggttttgtgctaaacagctgaagcactactcagggttttgcaggaatggaacaaccataaatgtgagaaaattatttcattttccattatatcaatttttccccccactttcttggtatcatttactttttctgttttttggaggggtttaatttttattattctcaagatatttcttctaaaatttaggttcattcatttgtatatattatggctgaagaagaaaaccactatcttggttacttggaagatatgtatgaagacaagaagagacaaaagaaagtgaaggtacggtggtttcaccatggtcaggaagttaagcatgtgattgcacagctgaagctgcaagagggagaggttttcatcacacctcatgtgcaggtgattagtgctgagtgtgtcaatggtcctgcaacagttttgactcctaagcattatgagaaatacctagctgctgtgtctcatacctctttatctgagatccatatgtgctttaggcagtttaaaaacaataagcttaagccctttgcacttacaaagttgcgtggatatagtaaccaatctgttctttctagtttgaatagttctactcactccaagagaaaagcaaagttcgaaaaatcgcacacaggtgatgatgagaacttcactcaagatgatcctttaaggtccagcaataagagggttagaagttctaaggatcatgtacttgaaaagggtttttctggtctgcaaatctctcttcctacgaaagaaatggcaaaatgtgaaccaaaataccctagtttaaaattaaaactatcgagaaaaacaatgggtattaaggttattggaccaaagcctcaactgtcttttcaggtcggtgcaaagatagaggttctctgtcaagatagtggcatcagaggatgctggtttagatgtaaaatcttgagtatgtctccgaggttgctgaaggtccagtatgatgatttgctggaaatagatggaccacagaaactagaggtatgcaatgccttatgtttattttctctttattctatctatctatttttttctaacgttgtagaaatactgattgtggttatttttggacttagaagtccaatcatctccttaattgtctattgagcccttttggtgaagctagggaagagtatggttctcagcccagttgttcacactttgtaggaatgggtccctgcgtctagagtggcagctcctggcaaattgggaatgcgatgttcaggccgcttaacagtacgaccatgccctcctgaatataatacaggtcatacttttgaaattggagcaccagtggatgcatggtggtgtgatggatggtgggaaggtgtcat

SEQ ID NO: 1654 - DNA, 1324 bp, Glycine max
tgcatgcctgcagctgcctgctccccacccagtggagcaaattgccccaaatgcctataccttttgttaacaggtacaattcgtcagggataaagctaagggcataaaaacataattacctattatattatgtctttgattagacaaaaaaactaacccaaatggtaatctaaaccatcttttatcccaattagtgtttaatattgaatcatagccattatatgtgatgccccttatcttttggttagatgtccttttcacatcttattataaaatatatatatttaatcaaggaaagggttagttttggtcaaatattttaccaacataatatgatatggttgacaaataactatgtcccataaacatatgatcaggggtttgatttccaagttcgtatgtatgaaagaatatttgtttggagaagttattagtgtttgacaattggctagggaataccctggattcacccaaaaatataatgttttatcctttcacagatgtttaaagaaaaacacatttgttatattttgcttgaacagttgagcaataggtcaagtatagtcataactcatatgtaacagaccttaaagtccaacataggaatgtggtttcaaatagaaacaaaatgcttcatctcaaaaagtggcatagagcaaagagtgcacactttgcataattggacatctaatatcttaacttgtgtgccacagcaatgttgcttatcaacttctgctttcaaatttgaagcaatcactacataatggcattttatttacattcacatactgtagacaattttgcaatttccaccccatagacaggaaacacaactataatataagaaacatgaagtgcagtatttaccggaaggggagaaacctatgacgtccagatccgctaaatcgtcgaggaccttcaggattctcttcagtatgatccctgcgattaaagcacctagctagatatgctccctgttgggcagcaacctagatatatcgatacattaagaacttactgtgtataagatatgtgacagcaaaaaccatcagcataagaaagcattaagttactggtgaaatgatgtatacctgagcagttgctggcagactcttcacctgtgaatctgcatgagaaagggccagcttaaacgcttggatgtctatttccttgctttcattcccttgcaaatctttccacagagtggtaaaatcacgcagatgcttctgctttagatattgctcaacttgtggatatcttaagataatgtcatccatcacctcctggaattcttcaatagttaaggtgccggagttatttttgt

SEQ ID NO: 1655 - DNA, 691 bp, Glycine max
tgcctgcagcctcggccatggcctcaaaagttaaaagtgctcctccatcgtcagagacataacatgagagtttctcaacaggataatcagtagctagaatagagagaatggtatttgcggtaacaagtggtggttctttttctggatcagcagttgagacaaacatatctattcctggaagatcagatttcccagtaggattggtgggattaggagtttcaaacttttctttcaaaacatcaagatcggcaacacggtttacggggaagagcttaggaagctggtcaagcagccaggagaaggcaaaccagatttcacaaaccacagacatgccccacagccagattgcatcctcattggggttttcgaccctccactttaggaagaaaactagaaccactagccgaactaatatcatgagcctgaaagtcaaaacaacaagattacaaattaatatgttgattcaaatactgctactgccacgctagacgagagtactagaccatatttcacacagtgatcaattccagaagctagacaaataacattaatgataacgataacaagaaaaaagtcaaaattatgaatcggcatacaagcacattttctataacataataattttctcccattttatatgaagtagttgtttacgaaataaaccaattcctcaaaaaggggggaaggggga

SEQ ID NO: 1656 - DNA, 613 bp, Glycine max
gtggtgtggttcattgcattgccatggcttctaaattcaagagtgtgtcctccattcggaagatcacgcatctgagcggtgatatggatcaggaggatgcgaatgggggaagggctagtcttgataactactcagttcacattcctccaacgcctgataaccagcctatggagatttcgctggagaggtcgaattctcggagagtggaggaccaatacgcttctagttctttgttcaccggtggctttaatcagctcacacgtgctcatttgaaggacaaggtgactgagtcagaatccagccacccccagatggctggtgcaaaagggtcctcttgtgcagtgcctgggtgtgatggaagtctcatgactaatgagagagggttggatgtggttccttgtgagtgtaattacaagatttgtagggattgttatatggatgctttgagggctggtgaggggatttgccctggttgtaaggacccttacaaggagcctgaggttcaagggaggaggggtcaactcagagtcttgcccttttccttcgcttcgggggctaaagtgatggacagcacttgtcgttgtgtggcccatgaattttgatgatgtcctgt

SEQ ID NO: 1657 - DNA, 829 bp, Glycine max
  misc_feature (800)..(800): n is a, c, g, or t
  misc_feature (811)..(811): n is a, c, g, or t
attaattatagatattgaaatttgaacttgtgatttatatttaagcatggaaaaatacagcttcttcttgataaaataaaacagttgaagacatgtttcacactcatcatggtaatcacaacttgtgatatttatgtgcaaatgattatgctcctacatatgcttctgtattacacagaaaacatttacaatctatcttcaatctcataagtcttttaaaattggtgttctttgaatagaacttgtatggatgttggatgtatcttttatatggttgcagggatggttggcaggactgaagacagatgatgatgctcatcaattacccaccattgcaatagttgcatcatatgacacctttggggctgctcctgtatgttatttatgaattctacctataaaaccaaaccgtttgaaatgcatgattatgttaaaacatctgtaattgcaggcattatcagtgggaagcgatagtaatggaagtggcattgtggctcttcttgaagtagctaggttgttttctctcttatattctaatccaaagacaagaggtcaatacaatctgctgtttgggctaacttctggtggggcccttataactacaatggaacccataaggtaagatttcctgtttggaagttcatttatttgctgatagaactttaacacgtagtcaacctttccttttgtatgctttttggtacatacaattctgcttttttcagtggcttatgagctttgatcaacgtctgcgtgagagcattgactatgctatttgcttggatagtattggctcttgngaaaatgattngtgattcatgtgtctaag

SEQ ID NO: 1658 - DNA, 795 bp, Glycine max
aaaaggggtaccaaaaaatggtgagggaggtctggaaaaaggaccagcaggggggttgggggggcattgtccttaaaaataagttgaaaaacttaagagctgctataaaacagtggagtaaagcagaggggaatattaatcctaagaaggtccttaatattcagcagaagctaaatgaagtggaggatctagctgctcatcgaaatctgtctgatcaagagattaaggacagaatttcacttcagcaggagttatggaatgcctctaatgcttttgaatctttaatgagacaaaaatctagggcaagatggctgaaggagggggactacaacactgcttactttcacaaatacatgaacttcaggagagcttataataatattccaggtatttctataaatggggagtggatccagcaacctgatgcagtgaaaaatgaagctgccaacttcttccataatagattcactgagcagatgcattctagacctaccttggatggagttcacttcaaatctatttctcagaggcaaagagaacagctgattgccccattctctgaccaagagatcaaacaagcagtgtggagttgtggaggggataagtgtcctgggccctgatggccttaacttcaattttattaaggaattctgggatgtgctgaatcctgagtttagaaaattcgtggatgagttctatgctcatggaagctttcctagaggctccaatgcttcctttgtggctctaattccccaaatggactcatccacagtccctaaatggataccgaaccct

SEQ ID NO: 1659 - DNA, 1359 bp, Glycine max
  misc_feature (1347)..(1347): n is a, c, g, or t
  misc_feature (1356)..(1356): n is a, c, g, or t
ctcgtgtacccggggcatcctctaggatcgacctgcagaatattaacaggttctctcttctttccaactagatagcttctataaagattttttttaactgcttccctcatcataccagtgagtccttccccaattatattgaagagcaagggggctaaaggatctccttgcctcaagcctcttgaggggttgaactccttagatgggctaccattaatcaaaattgatatggttgctgaatgtaggcaagctgaaatccatcttctccatttttggcagaaacccaatctaagcaacatataatccaagaaggaccaagacacggagtcataggccttttcaaaatccaccttgaaaatcattgctggcttcttgcttctcattgcttcctccaccacctcattaagaatcaggatcccatgaagtatatgtcttcctttaatgaaagctgactgtctttcatcaatgagttcatccataacagaccttaatctattagataaaagcttagctatgactttatacatgcagcctatcaaggatatgggtctgtaatcatttagggactgtggttgagacattttgggaattaaagccacaaaggaagcattggtgcctctaggaaaggtaccatgagcatagaactcgtccacaaatcttctaaactctggattcagcacatcccagaattccttaataaaattgaagttaaggccatcaggcccaggacatttatcccctccacaactcccaaacatggaaatggaatacacttccaaagcccccaacctagaggaactccataaaagaacaaaacccctagctgaatgtcagatgaaattagcacctatcacacaataaagaaatacttactgtgttctaagtgacaaacttttaataattcaaaaactcagttgacaacatcaaacaagtaatcatgcaaccagaagccatataagaaccacagaaagtatactgggaaattcttttataagcaaatgcatttaatagcattgactgagctcttatgtctgtgtgtagtagcgtcctgcctgacaatgccttcttattactgacacaaaagaaaagcaaaagacactttaatgttactgctttacctgattaggttgtggacagtcaaccatgaatccaagtaaacatcggacatcatttgaggccaatgaaggaggtgctgccactatgagaagttcaactaccaccaagagctcatcaaccaaagcattgatttcacctactggacgtgtagccccagttagagaaacagtattcaacgaaccaattcaggaacagtccaataactcttctgcaggtcgatcctagaggatnccccgggtnacc

SEQ ID NO: 1660 - DNA, 1466 bp, Glycine max
tcgctcctgcgaaccaagaatagggtccactggtgttggtctaacttttgatacaaacaagcaagagttactatccgtcactctagaacagcaacctcctggtcaaccctccagtaatttgcatcattgaattcctttattccaggaccaccctcgtcagtactttccttttctggcactttagagaccatgtttcttttcaatggtcctgcctccccaactatcccttctttcagagcctgttccatagccttctcagtaccttctaattctacacctacaaactcaacatcttcttcaaagagtgatggtactgctactgctctttgattcaaatcaacacccccatcaatcgaatctttagttggcgacctgtttgaaggaacagattccccattcgaaggaggactaggattagggctacctatttgaggtttggtagtagaaaggttgctaccagaagaatcatcatgatctataaatggattcttgcttgacccggcatcttgcatgtctgaaggttcaccccatcccacccagtcaggcaaaggcctgtccccaaacaactcttcattgtccgatgcctcaaacctgaagaatcccatatcatgtgaagcgcttgcctttttgctttcaaagttcaaggtgtctccattcatggaatcactaccagttatcccatttaagtttgtgcttgagctagatgtaccattcagattatttttgctttcatccaattcttcatcctctccaaccacaacttcatcatcactactgttgccaccatttgcagcaccattcaagtttatctcatccatcatctccgatgatgttcccccagttgcaccaccaattctgtcatcttggaatgcaaaccagttggagtttgtaaacagactactgcaaaagacaaaaaaaaatcttatttgacattatagtgattaattaaatacagaaaccctgatggacttccataaaattccaatatcatccagacaacagaaataggaggacaaatgaagctttttgaatattttctacttttctatattcaacaagaaagcaaaaacatagatgtccaatggggacgttaatcacttaggtccctgtgctatctctacttctatcacactatttgtgtatataatggaagatttgaataaggaggcatagtgacagtgcaacaccatgaggcagaaaactgaaatcaaaaccaaaatatcttcggggttaaagaaatgaaaactcattctatttttaaatcaataacagcagtcccaacagtccggggggaggggaaggatgaggatctagtgaaaatgaagaaatccccttataagcaattcacaaagtaaagaaggctgatagagtatgctgtttcttaaatatctagtgcatatcttattcttctgtagttgcttttgaaggatatttctcttcctaatctgcaactagatcctacaaaa

SEQ ID NO: 1661 - DNA, 1536 bp, Glycine max
ttcggactcgtacccgggcatctctaaatcgacctgcagtgcaaacaatgaaggttatctgttggaaaattcttcctgtttcatacatctgtttggatcatgtgaaaagtttgtgtggaactacataatgaagcactagtagcatcctgagatattctttggatatagtaattagaaatataataataagaaatgctagctacacactttcagaaatgctcttttcaagtcacactctttactattgggtgcattgttttgtgggtactgctccctttctagtgggtcatgcataaatttcacccaataacaaaaggtgtgttgctacttgctagccgttctcatacataatatatggccataaattatgatttcctcattcacacaacttgtgctacttatatttgatttcatgaacattttggattcgacacagtgcaacatgcaattaacaagtatctgtaattgcattttctttattgacagggtttgtttttaccttcagtcatttctctagttgttcctctggttctgatctccttgactaggtagagactcttcttcctacactgcaaaagtcagctgcaaaagctgatttgaatagtaagatttagcttaacatataatgttaggaacttggcaatttctctattgaagtatcctaaaaaatagaaagaaaagaggaaagatttgaaaatatgatgaaagtgttattactgaataggaggtacaataagccttccgaggacaatttagatgatgctagttctttacttttttcagtggagttaatgggaaggaacaaaaggtctctggatgtctttgcctctgaaccgattgctcctcgagggcaacttgttttctcagtgagtttaggagctttgatttttgtcccagtgttcaggtccctcacaggtttacctccgtacatcggaatgctgctcggacttggcatgctttggattttcgttgatgctatccattatggtgaatctgaaaggcagaagctaaaagtgccacatgctctgtcaaggatagacactcaaggagcactatttttcttgggaattctattatccgttagcaggtagtgcggaaatatattttaatttttatgctgtgataagttttggacaataaccatgtattaatgcattaaaaacaattataaaatacatcaagtcatcgacaaaagtgtcattgtccctttgagtagtagggcatttgctatgacttaataggtctgatatccacaaagtctaacattctggaaagatgatatattaccttgtttttacctttttcctatattatgagatgcatatattgttcttttgcatgaactgtgattacatattcttttgctgacatatctttaaataacctagttacttatgttagccggttgtatttgatcaattttaaccatcatgttcggcagcctggaggtagcagggattcttcgggaaatagcaaattactttgatgcacatgtcccaagatgtgaactgattgcaagtgctattggactaatat

SEQ ID NO: 1662 - DNA, 1464 bp, Glycine max
atcggactcgtacccgggtacctctaagtcgacctgcagatcagcaacaccattcaacttccgtcgggtaaattttgtcctgttgaaaaaatccaccaatcaaattgcagctataagtttggttgcttgaatatctaaactccataatttactaagacagtaaccaagcaccccagttttgattactcaaactcttcaagtggtttggtaaatagtaacagtctgaacaatgctcagggaatattctttctctgagaggctcgcacgcttctggtgaaaccaagtcagagtatccttttacgtaagagcagttccatggcaattttttgctcacattaagggtgatgtttgataggcagatattgacaaagttgtcacctttaataccctgtataaggccggcacgtttgactttttcccctatcacatccttgatagtaatcctttctattaccggtagagcatctgggtcataagtgtcatctggatgttctccatataaaccagtgaacctaatagcaatatctacattaaccaagatcatgttagagatatagacatttctaacataaccacccctgccaggagaagtttttattctaattgcgctatgtgaatcaaaaatgtaaatatcttctgcatgaacttctgatactcctccagacatctcacttccgatagcaatccctgcgctcgttgtcttcccaatgagcctgcggatgttaatatttgtactgggtcgaccaaatgaaatgccatatccatcccatccacttttgatggaaattaaatcatcaccggtgcttatataacagtcttcaatgcatacattgtctgaagaatctggacacaattaggaggtatatgtgagaatatgattaatgttttgaaagaaaattgtgaaggacattggtgcagtttcaagtgtcaagtagagggcacagaagttaacccagacaagaaaaaacgcaactacagtaggagatacatatagctttatttctatgaatataggcaccactaccaacacaataacaacgatagcctaatcccactaggtgatgaatgtattgcaccacttttttagaaatttagacctcctttggtccagatgaaaatttccctttaaaacaaatcatgaaaacattggattgttgaaaattaatctagaatagatatgcattgttgattacacagggtatgacttttcagcttaagggagaaacctcacctggattaatgccatctgtatttggtgaactaagaggagcaatgattgtgacgttctgaattgttacatggctgttcatccagaaaaaacagtttcagatctccctccccctagtcatgaaagcttcactattgcataattttaaaacggtaatttaagtgcatgaagttcagcaaataagtatggataaattcaatccttcttaagggaacaaactgcaggcagcaatatgg

SEQ ID NO: 1663 - DNA, 727 bp, Glycine max
atgttacaatcactcaccctgaacttagttttgcagttaacaaagtatgtcagtttatggcttctcctcttgagtctcactggacagttgtgaaaaggattttgaggtgcacttcattctggtcttattctgtatcctacctctcttaataaccatctttctcttagaggcttttgtgactctgaccgggcttcagtcccagatgacagaagatctacatctggtgcagctgtctttgtttgtcctaacttggtggtctagaaggcaaaaagtggtttctaggtccattcagactcttctccaggaactagcagttcctcattctacacctgtcatgctttgtgattccagtgtggtgcagctagctcacaatccagttctccatgctagaactaaacatatggagttggatgccttttttgtccaagaaaaggttcttactaagcagctggtggttcagcatataactggaacagccccattgagtttccgaggggggggacggtggccatagtcagttgacagttataacttaatctcggcagtataaatactgctcttgtaagagatttcagtagctttgtattttcttcttccttcaataatacaagtcctgattctctctctatatcttctcaacaatagctacaaaggaatttgtgatctcaacacaacatttgggacaagattactttcttggcgagtctgtggtgttctgctccaagac

SEQ ID NO: 1664 - DNA, 1350 bp, Glycine max
catgcctgcacgcgaatcaggttattttctttggaggtgttatcgccagagtcattactgcaatatcagaaaaaaagttatcattaggtttccttccaattgcacatgtaaacacaattagtatatgatgagagaatactccaagtttacagctaaccttgtgtttgcccattcacctacccatccgaaaccttgatgtgctctgtcaggaatattaaaagagaaaacaaatgcataagcaattgcagggagttttagcctattttcataaaaggaaataaaaccagcaaggagagggggaaaaaagagcaagtataagtgaaattcaaacaaatatattacatatcttacttacttgactgtatttgtggcaagtggtgcaagccactgaagaatcttttccatttcagctttgatctgagtgatggagagctacagaaaattgctatgtcatttaacataattcaaaatgaaataaaaccctatcttcatgaagtaggtgtgactaagccccccaaaaaatgacacataaataggactagaaaatgaaaggcagtggatatctggtggagtgggggtgtacctctttcatgtcagcaacggtttgcaactgggatggaagagcagccttaatattgttgggcaaaccatgatacaatgtgtctcgggtgtttggaggaagagcagttgggcgagatgcctgatgtaaacaaaattgttttatcaaaaacatctataggtgaggtcattaaaaatttatcatcatgatacatacaatcatatttatctgactgatgatgttagcatagtgcagtgcaagaccagcttctcctagtctttcaggaccgtcactgtgcttggttgcagctgtacctgccatgaatccacaatttcacaagttcttatgacctgccaacgatctacatgacagatagcacacgaaacgtagattttcatacaagtcaatacatgacttgaaaacaaacataaataattaaggaattcatttttctcaaatgcttttactcaataagctaatccaagaaaaaaaaaattatttaggagcagatcagttgaaatctcattcaactgattagaattcacataactttttgttgtaagggatatataccatgtttccaaaatgagctttggcaataaattttacaatagacaatatgaagtgtttgatttcaagggtatattttctttgtaaatatgcatatgatgtctctaatttcaactcaaccacagagaaatgcagctggttatttcaagttacaattgaatagaaaacaagagcatacaaaagattgaaaaaattaatctgcagcgtcgactgtataggat

SEQ ID NO: 1665 - DNA, 1356 bp, Glycine max
tccatagattttgcacggaggtactccaacatcagcatggcttctctgcctttgcatggttcctataacaggtcatcactcggaattcaggcgcattctatgatcagcaaaccctcttatcaatcacaaacacccttttttggtttgtcccgttctcatgctcagaagcggcttatgttctcacaaccgccaattgggacagaaagtgaatcttctttgactggtggcatcccagtcccacggttagggaatttttctccgaggctggtgccagagggactcggaggttactggttggatagtgttaaccatttgaagactaaacaagaggagttgcacaagcttgacttgtccctcaaactctaagtgcaacccttcttcgtgttaaatcatatcccatattaattgtctttaatttgtcttttgaccaaaagctttttatattttttttctctgttttctttgtgttcatgtatcactagtatcagcagctgtaaatgcattttagccacataccagagttcgtgtcttgatattatttgccttgatttgtattaaatggattcttctgggcttatttctcgaacttcaaatttgtttatgtgtaatattagaatagccaattaaagctctcgtggcataaagctaaagctcatagacgtcgcagggtaggaaagttaggtaaacaacttcgaaactaaataatgcagccaaactttctcaattaactgcggagccaatcaatattcttcactgattttagccgtttaaaattggatggatttcacaaatatccattcaagggtctgcatgtgtcagcttggctaaaaaacacaagcaaggttctaaatatattaatatgtggagttgatttcacttggctaattaatgatgttttaagtatatcttggtcaagattctacttcattattattgtgttagcgctatcctacaagcttttggatactgtaggcgtcgtcttatactcccatgccagaaatgagatgtccatcactctgtacgtgtctttgggttattgaagtttcctttctcagtctcattaaggaaaaagataaaggtatgcaatgaggttgtcgctcagtgatggtagttatatttgacagtgcacttaattgtcaacctgggactgttgggattaaggtatatctgtctcacattatgggtgacaaaggtccacacaccatgtagaaacttgggtgctagtgactgacgctgttattaattcttatgcaagattggtcccccaaatgtacataaatttaatggttgtgattgtctaagtgactcctactttgacccactgcagtcgatttagaggatccccgggtaacgagt

SEQ ID NO: 1666 - DNA, 799 bp, Glycine max
aaaacaattttctgagaattatacacaacaagtctcatgaatttttttccaagtcagagatgatgctgacagtcctacacttagctgtcaaaacaaatataaacggcttaccaattgtttgttccatagaattaatcaaccaaacaacggaattttctagaccatgttgcaaatagttaagattacatattttgttattacaattagatagtaattagtgatttagtcattattactcattattagattgaacctatgtaatcaatattgatcctatttactcattataaataaaggttgtgtagtcatacacgacacacaacattacatagtaaaacgctatacggtagttagagcttaggttattcttgatagaggaataacgaaaattgtactccaccgcggacctactgtcactagtgaacctttctgctttgccctcttatccaacaacctgttttcgcttcccgacagagctttttcccgttttacattgccttctctaaccacaatcaccggttgtcggaaacttttccaacgacccttcgactgtcacctacctcgttcggtgcgccatccgccgagctacacagaccgtgtcggcacctcaccatcggacttgacatgtgctcccatgcacctcttttccagaaagctaaacagtgtgtggccgcgttcattcaggtcgcgctttgcatcgccccttttgtgggaccataccctagagtttgggccaattcgcgctgtttaggagggtgttcctttggatacttggtttactttggtttctctttttcgc

SEQ ID NO: 1667 - DNA, 1394 bp, Glycine max
ctctgtacccggggtatcctcttggatcgacctgcagcttgcatatgcagtaaatgccaaacaataaacaagcgaccagatcattcaaatgcattgtctcaatttcggatttacctcattttctaggtcattctttttaatgtttttaatgtatgaccttaaattaatgatcaatgtaaatcaacaaacaatgttacagtacattttagagccaatcttgtggctcttttttttctttttttttcttcaattctattatacgggctgcaaattgcaatgcaacattataagagtgttccaccaggttttctgataggttagtaacaacctaaacaagtctctttgcatcacactttccaccattagcattttaactattctaaagtaagaagtaggaaaaaacaagagttacaacttacaagtggttgtacattctaaaagctagcctccacataaaagttaatcttatccagtatagctagctattagatagagcttccaaaaggtagctacagtaacttcctccacatggaaggccaatgtggctccatgaggggtgaaggtgggcacatgtccgttcaaatttttaaaatcatatgaatactgtgatgtcgtattcggtccaatgctcaaactatttgtttggggtttgattccaataaaacaatgaggtatttttcttttttcaaaataaaaaacctaaatagaaggaaattatgcaagcaccaaacctactttcaaggataaattgttactgtgcctaggtgaggaaaatttggtagcatttgacccatttgataaaattttaaatggaatccagttgttaaagaaactcgtgaggaatctgtttttataatggccaaaggtggttaaaaacactatggttaaacaatgaaactcctttgtatccggtgtgtataacccgcataaaaacactttacattatccacatttttactcgtacagtagtacacgtaccagtctgatttatttatttctacttggaaaatagttattgcaggaaaatttttttaaaaaaaaaaattatcttgagcaaaggaatgtgtggattgaattacaagataggactcaaattcggttgtacagtttattgataactgaaaccaatgtttacaaggtttgcccagagaaagctggctctttctggggaagcactaactcatgtcatcatcatcgtcttacacaaagcaccaccagagactgctacttctccactatgaagaaccttttcttattctccacaaggattgctccacctggccaaactattcacaagacaacattcttctagaacaaccttgtcatgccatactgaacaggtccaacctttctatgagcagtggtactaatcccaccatattgatgagcctttg

SEQ ID NO: 1668 - DNA, 1446 bp, Glycine max
actccatatacgcacatatgtgcatatataatagagcgagtagaagtctagagaacaattgagcactctctgacacccttgaaatttttgtatagcctaaaaccctatgaattgaagacttcaaatttttttggacataatgtaaaaatggtacatatcatacccttcatgtgctgacatgcatgtgcatgcatcatgaggttaaaaaaaaatgctattgagtcacagataaaacagtagaattttagacatataaaaacaaaagatgtgtggattgtgtcttatgtttttgttgttaattgccgcacattcatttggcagttttaggattcaaaaacaggtaaagtttcagtcactcttgcaaattgacacttgtatatatatattagctgtgtccactttcatgcaacctgccataacacttgaacatttaaagcacaaggtaaattccagggcgaaatcgagcttaccgttctaatgcaagaacaaattatccactgagaaaaaaatcaagagaaacccttttgatatataaactagaattgacataaatcaagtaatatattagcacatattaaaattgctaagataatatacctggaaaaaagggttccacaatcacatctatattctctagtaccacaggttttggagtgagctttccaatctgactgaacagcatagatctttgagcacttttcacatttccacttcttctctccatgttttctgcaatagtgtttcttaattcctgtgagggtcccccaaagcccttgaagggttgtggtgaacgcatgaaagctcagggcaaacatatgccttctttttcacgtctttgttgctcctttgcttcagcttccatgggaggttatgccctctcctatgaagctgaaggttctgatctctctggaaacccttgttgcagatctcacacacaaatctattggtagctagaagagtcttcggtgacaaagcaatcacttcagcatctgggtctgaaacatgtcaaaaattaaattagaaaaataattaacctaactagcacaataattaattacacatcaattgaacaatttctttttaatccgtgaaaaataaaagcataagtcaggagatttatatcaagtcacatgtgttaatcaattaagttagatcaacttaatcaaatgaaggaatataaataaatatgttacatacatattaattatatatatatatatatataatctaaagttctaattaaactccaaagagtttatgaatgataataagttaattaattaccagggtttccagggaggtttctctttttcttgatcttttgaggttgttgtggagaaatggttgttgtgacaacgtgattgagtccagtgattcttgtaccacaggagacagtggcctcttcggaccaggaattggaattggacataactgcaggcatgcaaa

SEQ ID NO: 1669 - DNA, 1464 bp, Glycine max
aagtgagctctatgccttaacatgattttttgtttcaggaattataaactatatacctactatatctctgcgccaactgtctagcacttcattttagtgtttaactattcagttttcacaaattattttgcatgttttcttctgtcctcccctttgggttccctcttcttcttcacaggttggacttcggcataaaatcaatgataacttaatgatctacccaggttatgttcctcgcgagggaattgagccaattcttcttcactatgggttgccatttagtgttgggaattggtcattcaataaactggctcaccatgatgacggaattgtatatgaatgtaaccagctctttccagaacctccttacccaaaagaggtatgtaagcaattatacttgtttaaggaaactcacagtggtagaaaaaacaggttttttcccctcatggtgtgatcgtcttgtgggagaataaattcctgtgttatagaaaagcatgtgtgttgcattaatactttgtcatttgttaataagcaagcatatattcccatgacctatgcatttataatactcaacattttaacttcatcttttagtccaaatatactgaatttatgcaaataaatatggcatcaggtttttccagttttgctgaaattggaaagtatttattgcaggtaagacagttggaacttgatcctaatcgaaggcgaggactatttctaagcttagagtgcataaacattataaatgaaggtcttttattacaacatgcagcaaatggttgccctaaaccaaccatggtctaaatacttgagctttttgaaaagcaaagcttatgcagaactaactcagccaaaatatgtgaatcctgctactttacaaatgatggaggatatcaaagaagaacatatcgatgatggtgctggaaagccacatcccaaaatccataccattttttccacagaatgcaccacgtactttgattggcagactgtaggacttatgcacagtttccgtagaagtggacagcctggaaatatcactagacttctcagctgctctgatgaggacttacagcagtataaaggccatgatctggctcccacacattatgtcccttctatgagtcgacatccattaacaggagattggtaaaagaaaattttttggtcggtttctttcaattttcaattccattatgtgaactattcagttattgcctgttatttctgcactgacatttactgcatgattaggacaactttatgtgatgatcataaattgtgcttgatttgatgtcttaaaattaaggttctggttctgggtgtagtctatgagtgttatgatttaaaagttaaattgtgaaacttaaatttaacttattttttttaatactgtaaaacttctgagctttgccttatgtttgctataatatacaagatacctcatgcttcaacccgtat

SEQ ID NO: 1670 - DNA, 751 bp, Glycine max
tgtggcaataaatcatcttttgtgtatgtgcatgcaacttttcaggttaagaggcctcaagcgaaggaatattttgcaaaagcaatatctgatatgtacaatgagctctcaagaactgatgtttctcagaaaacgttgtgaaaattgagggtctccaccccatccccatttaccaaccacaacataaaagagagaggtaaacaaagactgtgactcatactcatcgtaagcaacatagcagaagcatccaatgggaacgatcttgcaacttattattttaaaaagcttacggtccgttaagttcaagttcacttatgcgatttttataattttttcttctgaatgttactttagtttttaatttaatatattcatttctattattattgtgaatcaatcaatagttcaatagctacccattcaatagcattttgatatttttttttttcttatatatgaattatttagtaatttaatttttaagtactagaattatttagtaaattaaattaaattcgtttagtattcttgaaatattaaaaagagctaaatatacttaaattagaagtaactggaaactaggaatacagggactttttttttggtaaacaacagggaatgtttttcatgttagtgagatgacattggcatgcatcaaagtttttttttttcttttgtcaaaaacatgccccgttttaaacagatttaaatagtacgccttgttgcgttacttggtcctcgcgaggctcca

SEQ ID NO: 1671 - DNA, 768 bp, Glycine max
  misc_feature (647)..(647): n is a, c, g, or t
tgcctgcacaggcacctactccttcaggttcagctttggcctctccaacagttcaaacctccactgtgcctgcaccttctcctagcaatgctaccccattgatttctctaaagggatcttttggttcggtgggttttaatatgacagtgttttgtttagtttggtttatgtactttttgcctagatcgttggcacgtttgtaaaccatttgaatgacaaagaaaacatttattagatatattacaatgtatttttcctccaaacatggttttgtatgtttagttacatatgtatggaaaaacatcggtcgagagatatcaatcccataaataaaatagattttagtattttgagtgtattttttctttgcatctatgattttaaagggttgaaataaataaataaataaataaatatgattctattgtctttgtcatactcataaatatcgggggaaggggggattaagtgaaaatctgatagtatggaagagggcttaaggggtttaaaaggaactaacaaaaatttgatcttttgttgttgaacaaaaaaaaggtaaagttagggtataaatgtatacatctatgatctcgacagagctcctattgttgcagttggagcctcgcgaggaccaagtaacgcaacanagcgtactatttaaatctgtttaaaacgggcatgtttttgacaaaagaaaaaaaaactttgatgcatgcccatgtcatctcactaacatgaaaaacatttcctgttgtttaccaaaaaaaa

SEQ ID NO: 1672 - DNA, 876 bp, Glycine max
  misc_feature (837)..(837): n is a, c, g, or t
cggtgacccgggggatcctctgaagatcgacctgcagtactaagtccttttactgagtttttaagaatttacgtcaaattatggttgagacttgaggcaacaatgtgaagatatgctttgggttgtagttgatatgttggtcaatattttgcattgtttcttaaacatttgatagatagtttcccatgagagtttcagaagatatgctttggacttctccctatttggttgaactaattgtgatttgaatgtacaactactgctactactacatttctcctgcttaattgtttctgttgttaataagagctttaacataatcatacaggtttggcgtgtgaatggtcaggaaaagattcttcttccagccactgatcagtcaaaattttataatggagattgctacatctttcaatattcatatcctggagaagataaggaagagcatcttataggaacatggattggaaagactagtgttgaggtgaaatatttatagagctttgtttcacttcgttttgctcatgtgtgtttataatgatttctttcatgtaaaaagaagaaagctaaaaatctgacttcaaattattcaccttaagctgaaaactatattagtgaattacagctaatacatttcattacactgtacacaactttggtaactcttttgggaccagaaagtgttgggtaaatgtgttagcctgcattccttacaagctttttttgttgaaattaggaagaaagagcttcagctctttcacttagcagcaagatggttgagtcaatgaagtttcttcctttccaagtatttttctttgaatgtgttattttcaattnggtgacagatatttatgctcattgctatatccttattga

SEQ ID NO: 1673 - DNA, 1562 bp, Glycine max
  misc_feature (727)..(727): n is a, c, g, or t
tactttccagctgatatgctcaccatattccttccacacatagcatacaactgttaaaaaaaaataaacaaaaaggggggaagtgtttttaatcaacatgttttgtctcgggaaaaataaaatacatgtgaagagaaaaattcagagcataataagaacctgttggcatctaagatcaggatcagaagagacccaataaaataatgcaccatcatctgtaagagccatgctgtgtaccattccagcagctatagaaaccacattaagtcgttccttgcggtgaaattttaaaggagtgcttccacttttctttaagtttctactaactactacacgttttggagtaacaagtcgatgaccccaggtaaatacctgcaaaatatggaaaatttgaacttaaagatgaaaactagaaagtacttttatttccaaaaaaaaatggaaaataaagtactaacaagttgaagaccccaggtatatgctcgtgataaaactaataatggaaaaaatgctatgtttcatatccatgtaccttaaaaaataaagcagttgaacttgaacataattttaggaaagaacaataatactataatagaactcaaacttaggtcttatccccctctgtaaaatgtatatattccaaaactatgtaatacaggagcagtagaaaagaaaataattaaaattgcagttagcttttataatttcaagatattttaattcattntgtgggcttcagtttatgagtaaaattttagtccagatttatgcatagtgttttaggtggtgccttatttgcaaggcccaaggaatttttcatgcccctttggttagcctttaactgaggctcaaatatgaagatggtaactagagtttcttaaaattaaaagaacttgaacttttaacaaaatgacaataatctgcaattagttacctctccgtcagatcctaatacaattgtgtgatattttgcagcagaaactctggtcaaagtcttccccttcaaggattcaaccacatgtggggtgtaattagatgctgagtttgaggtgccataaccaagctgaccctccctgttgcaaccccaagtaaaaacttcgcccaaatcagaaactacagcagtgtgtttgtttgcggcagcaacagcaacaattcttgacctcaaagaagatactctacgaggtgtgggttgtgtatcaacggaagggtatccaagctgtccctctgcacaacaatgaaacaagaaaatagacatgccaattatgtgtcattctcatttttcaaaaaatgcagaataaagcataaagaaaaactaattctttctcaattaatcagtgatgattggtagaaactagaaaaccataagtatacttgataaaacaaaaagtagggaagggatgcaggggaaaagattatttgattgcaatttagttaagtagtttacagtaacaactcacaagactcacaacttatacaaacatgaatatcgtcaagttttacctctattggatccccaggtgaacacttccccaccctgggtagaaataaccgtatgatgctta

SEQ ID NO: 1674 - DNA, 1436 bp, Glycine max
aaattagaaggtaagttcagggattaaaaataccttctttttcatacagtttaggaattaaattacatatacaaaaatatgtgagtaaaaatatcttcttaaaataagatgtaaatgatatgattatttttataaataagtgttgtctttgatctatatataagaaatagaagacaacatttttttttattaattataagaaatatatgattacttttttattaattttcttttttcaaaacatttaatgtagaaattataagagaatgaaaaaaatatcaatagtataatttttcatcttctaataaaaaatttcttactttaagttttttaaagaatattctaaaaacactaattaatattattcttaatcatatacaattattttctcataagagatggtgtatttattcagctttcaataaaataaaatatatgttgattgattaaaaattatctttttaaaaataaaaagatcctaaataatataatgtaaagtaaaattaaaatttatgataaattaactaatgtaatcatgaattagttactaattgtttcttaaagtccgtatagaattaggtaggactattagtactagcgtaggagactaggagtattagttttcttaagctttctctgtcttacttccatggagataaaactgaaaaaggaagctaccgctaccagtgtcggtacctctacgcagcacacagctatacctttttcctatcaaacacgtcttcacaatccaaatcaagtttcttctgctacattgttatcccccttcaacattatttatatcaacaaatgatagcaaatctgagcacccagttaagagaaaagaaaaggaacaaaagtgagtactactagaacactaaaactgataaaaatagtcagataagatctacactactggaaataaaatctgcacgctggaattaagaatctaactatataagcacaattgtccgctttgcattttgtttgaaaatccgtataatatttacaccaacacatactcaacaaccttaacagaagatccagaaaaaagaaaaagaggccaatctagtgatgattgtaatagaatgcagcttgcatatggtggggtatgaagggtgtccgacacagggggcacgttctttgatcgtaccccatccaacggtccagacaccctctgtggaatatgtggcgacagttcgtcagccgtctgatctcgtcctctccctcgaactcgtacaggcacaccgcgcagctctccgccgcctccaccgccatctccatctccgagaacttcaccaccggcaggatttccctcatcagcaccgccgacaccgccctctccggccccgcaatgtcggattcgaagaaatcgtggaagcccatgtagcacaagaggattgtgatgagtctcctgatgaaccccaataccgatagca

SEQ ID NO: 1675 - DNA, 758 bp, Glycine max
atgtacttaggtatgttagttgtttgctgaattagtttgaaccaatgtttgttgtttgagtaaattgttatctcctcctttgtattttgtgttactatgcctacctcccatctattatgcaaacctacaaaaagaacttactgtatttgcaaaacaaaactttacaactaactccaaaatgctggcaagactagtagatttgtcagatcaaggaagtttgttttatagtcaaatattattcctacactgttcaacctttcagttgagggaaaaaaggtaagaatacattcatctggcagtgcagcagatttgaatgttcttagtgtttaatcatgcctcttgtccctttttcttgttatataagtctcggaaagggtaggatttaatcatgagacattcatgataatgtattagttaaacaatctgttagacataatagtttattggatttagtttcagcattgctgtaaattcaatggaggtatttgcctgctttcataataaatggatgtctgtgttaggaacccaatgaataactctgttgattgaatgaaattgaacagaaacaaagagaaagaattctcctccaagggttttccctttcttacgaacttgctaattgtctgcatctccttcttccccctatttgtgtaattgatgccctttaatgaactaactgctgtatttgttgctaacaaatttcccctcccattctgttccaactcctatcaatctatgcagctgatgcttttgcactt

SEQ ID NO: 1676 - DNA, 734 bp, Glycine max
aacctccttgcctgcaacttcacatgaagcttaaaggtacgttggcaaagccaaataaatcaagtctatgcatccacttatccatctttttcatgtttttcctttcttttgactccctcacaagcaattatgttctcgatttcctcaccaaaaagtaaaaacaatgcagagcatgaagcatgacctttgttgataaccctcacaaggcattaagaaagctctccgagttcatttaagcagttgaagacgccacaaggatgagaccgaataaggaattgggctatatagccaaaaggaattgtatgaatccctgcttttcatcatatcatacccaccaatacttgacacatcttaaaaaatgtgaatttctatgtatagagaagtttttggaaaccaaattcagtaccttcttccttagtcaaataaattgctaaagcttccaccaagtaattgaagtgttctctattggcgcagaatgtattacacagaacctttcttggtttctagttattagttagtcattctactctataagagcaattaaacaagatgttcataaaatatatctaccatgatgatgataaaaaaatggcaaacttctcgccatgaattaatgaactgggatttctgtgaagcctaaagaaaaaaaatgtcaaagtatttggcttgatactccgatttatcatccctatccctcatgtattcctttctataatggttatggtgcctgggac

SEQ ID NO: 1677 - DNA, 853 bp, Glycine max
  misc_feature (803)..(803): n is a, c, g, or t
atacactattttcccataattttagcgaaacaattgaaaaaggaaaagcaaaaaaataaaataaagggaaagcatatgtgagattgaaaatcgatttttatctgaccaagcaagtgatttaaaacataataaccctttatttacataaaaaaaacaaaacaaaacttttccctccgttttctcaattctacaacaaataataagacatctcggtgaataaatagcgtcgttgcaaatttgattcttataaaacaagagaaaaatagaataaaaaagaaaagaaaaaaaggaaaggcttgtaagatcagtgaaaagtgcgtaaaggtgcagaacatatgattttttaggatatcagggtgacataagcgggcaagcaaggtattttttgcttgattaaggaaggaagcttgtttaggctgtcagtgtacacaaactctcttcctcacgtattcttccttttgtcctcttcaatcttactcttaaataacacaacccttcacaccacatcaaatgtcacataactaagagacaaagtgactgagggcattagcagatggctaatccacacattgcactgctgaaactcacctccatcttcattgtcatttttgcctcaggtaattcatttttaagctttatttaaagccggacaaaacttagatacagttccttaaatgtttttagtggttgttttctattcggaatttaagtttcacctaataaccctatgttgaccttcatatatataaatttttattatgtggattacccgagaaaaatttccaactctttatagagaccanaaaaaaacctggttttggcttttaaagactacatgttttttggggtttgg

SEQ ID NO: 1678 - DNA, 1691 bp, Glycine max
ctgcagcctgcattataactcttttgagacaaaaatctagatatcttggttgaaggagggggattgcaactctgggtactttcacagaataataaattataggagagctttcaatgcaatcccaggcatctctattgatggtaggtgggtccagcaacccaacatagtcaaagatgcagctgttaattatttccagaccagatttactgaacaggattattataggccttatttggatggggtcccctttaaatctatttctcaagggcaaagagagcagatgactgtccccttctctgaccaagagatcaaagaagctgtgtggagttgtggaggtgataaatgccctgggccagatggccttaacttcaattttataaaaaaattttgggatatcataagtccagaatttagaagatttgtggatgagttctatgctcatggcagctttcctagaggcagcaatgcttcctttgtggctttaattcctaagatgaaccatcctcagtccttcaatgattataggcctatatccttgataggctgtatgtataaagttatagccacgttgctgtctaacagattgaggtctgtaatggatgggttaattgatgaaaggcagtcagcctttattaaaggaaggcatattcttcatggtattttgattctcaatgaggtggttgaggaagcaaggagaaataagaaacctgtgatgatcttcaaggtggattttgaaaaggcctacgactcagtttcttggtcttttttggactgcatgctgtttaggttgggattctgctcaaaatggagatcatggatatcagcttgtctccactcagcatctatatcaattttgattaatggcagcccttctaaggaatttatccctacaaggggtttgagacaaggggatcccctagctcccttgcttttcaatattgtagctgaaggtattactggtatgatgagacaagccagtccaccaaaaacctctatagaagcttcttggttggaaagaaaaaggaacctatcaacattttgcagtatgctgatgatactgtctttgtaggagaggctgtgtggggaaatattcatgttataaaagccttattaagaggatatgaattagcttctggtttaaagattaactttgctaaaagtcagtttgggataatagggggtggagtcaactggtctttggaagcagccaatattctgcactgtcggcagctggagtatcctttcctctatttaggcttacctattggggctaatccttcaagccagctggtgtgggagcctctcatttctaaattcaagtctaaattagccaaatgggctcaaagagatatatccatggctgggaagatcacccttatcaattctgtccttaatgccctcccaatttatctcctctccttttttaaaattcctcagagggtagtcaaaaagttgatatccctccaaagactgaggggggcctggggataaaggatatctctaaattcaacttagctctgatgggaagatggatatgggcttttgcatctgatcaacagcagctctgggtcagaattttaacttaaaaatatggtggttggtcagaatttcaaaatggtagtgacaaaaggggcttttcccattggtggagagacattagaaatctgtatcaccagctggactgcaggcag

SEQ ID NO: 1679 - DNA, 1427 bp, Glycine max
tcgactcgtacccggggtatcctctaaatcgacctgcagcctgtgaaggtgctgaaaaagtgttggctgacactcgcaaagcctattgcttcggaactcgtcaaggcccagccattgcccccactttggacaagggtcaggctgccaaaattcaagaacaagagaatctactccgttctgctgtcaatgcaggtgatggattacggataccaggagaccagaggcacatcactcctgcacaacctccattgcatttggcagatgcacttcctgtcattgtcaatgaccctactgcacaaccacaactctcatcaaacaccatgcctgcccagaattccttgttacagacctcctccgcatcacaacttttgggaagatcggcagcatctccttctggtgcaaccagcaccacttcttttgacaatacaacagcttcaccaatcccatatgccaattcacctaggtcttctacaaacatgatgaatactccatcccctcagccacaaacaacccaacaacagccacaagtgcagcagcagcaacggcagaaactcatgcagttacctaaacaacagcagcagcaccaccaaattcttgctcagcagcaacagttcaggcagtctgcaatgcaaggactgggacaggtaatattttcaagttatgtattttgcattcatttaatcttaaagtctagttagaatatattatacatatggttcttgactttattaagtctcataatcattttgtgcactagcttctctctttggcacgagttaaggctgtttttcatatcaaattttgtccttttcatagagaaatcatagttttaaaacctagacctgttcagaccagtttgatcatgaagcagtcctttggctagtaaattttttcctcttttctatctctctctgcacttgtttgcttcaggacactagtaaattttgagtgatcaataaataaataaataaaaagagaaaaacttgaatatgcactgtttgggaagtttaaccaccatgattacatgcatggacacattaattgccaagtagaaattaaattagtgctatttgttgtatctttcaattctcttttttggtggtaacaagcttgcttgctttcatcatcagttgcatggacaacatcagatgcaattttctcaaccacttgggcatcaacaatttcagggtaggcagttgccttcaggacatgttcagcatggcattggtcaaagccaactcaatcaaggaaatcaaatgactcgattaagccagttttctggtcctgctaacagtgcactattcagtgctgctcaaacaacacctaatactcaaatggtatgatattcatgtaatataatttattcaaacagcaggcttttttactgattatatatattcatggacagctaactgcaggcatgcaaa

SEQ ID NO: 1680 - DNA, 778 bp, Glycine max
  misc_feature (755)..(755): n is a, c, g, or t
tcaaagctcccctacatttttttttttacatatgaaaattaaaatgaagagtaatgtatttcttcttcttcttattattattataaattaaaatgataaatggtgaaactaacgcattatataaaattaagtcaatagcatgataactctttcactttctgttcttctcctacaaattttggatgtatttatttcactttcaggacgagacgtagacttctgtcttttccctcttctttatttctttttttctttataaaatggtttaaagaaaatgttcttcgctaagtacgccttaggagttaggactactctaatttgaccatctacacgtgcacaacaccttttaagattagaatcatgttcatggctcatattgcatcaaatgatattcctttattgccaagtcacttctcaataaatattttaaaggtaaaatcatattttttcttaaacaatctaacttgaagttgctaatgtaataaatttcgatagttcataaataagagactaacttatatagtttcattactgctcaagtaaatattaaaatacgtactaatcagaatagtaattacatatttttaatattatgttaaaatatgttttttctctcttaaaaatagtgaataagttttttttttaatctatttttccgtctttttgcaaaattaaaaactacaatttttttgggtttgagattagactaattgatatccatacgtatggtggatttctcatgttcatggtgtatnttcccttgtaagttgattactat

SEQ ID NO: 1681 - DNA, 1559 bp, Glycine max
atttttcaatgagaggtttactgaacctgaacagcgcagaccagttttaaatggaactagatttcaaggaattggtctgcatcaaaatgaaatgctggtggcaaatttccttgaggatgaaattcaagcggctgtatgggaatgtggcagcgaaaaaagcccaggcccggatggtttgaattttaaattcatcaaacacttttggaggaccatgaagcccgacatcagcagattcctagctgaatttcatgcaaacggggccttcacgaggggcagcaacgcatctttcattgccttgatcccaaagaagagacaccctcaaaatcttaatgaatacaggccaatctctctaattggttgtatttataagatagtggctaagctccttgcaaataggctaaaaaagattcttccggagataattgatgtgcgacaatcagctttcataagtggaagacaattgcttcatagcgtagtcattgccaatgaggcggtcgaagaagctaaaagaaaacataaaccttgcttggtgttcaaagtggattacgaaagagcttatgactccatctcatgggagttcctttcctatatgatgaccagattaggtttttgccaaaaatggatttcctggatcgacaattgcctcaaatctgcaacagtttctgttcgagtaaatggcagccccactagtgagttcactcctcaaagaggccttagacaaggcgatccgttagcgcctttactcttcaacatagccgctgaaggattaaccggccttatgagagaagcattgcataagaatctctacaacagttttcatgtgggaacaaacagcgaaccggtcaatatcctccagtatgccgatgacaccatcttccttggtgatgccaccttgaagaatgtgaagacaatcaagtctctgttgaggagttttgaattagtatccggattaaagataaactttgcaaagagtagttttggggccattggaaaatctgctcagtggacaaaatcagcagctgattacctaaattgtaggaccttgtccttgccattcatttatctaggcatccccattggggctaacctaagacgtgcggagttttgggatcccataatctgtaaatgtgagagaaaacttgccgcttggaaacacagacacatatcctttggggggagagtgaccttaattaatgctgttttatcatctcttcctatctattacttttcttttttcagggtaccataaaaaataatagccaaacttgaaagcttgcagcgcagatttttgtggggtggggaagcggacaacaggaaaattgcttgggttaattggaaaactgtttgcttgccgaaagcaaagggtggtcttggtatcaaagatctcagaaccttcaacacaacattgttaggcaaatggcgatgggatctgttctacagccaacaggaaccatgggctaaagttctgcaatctaagtacggagggtggagagcattggaggaagggagtagtggaagcaaagattctgcatggtggaaggacctaatcaaaacacagc

SEQ ID NO: 1682 - DNA, 1392 bp, Glycine max
  misc_feature (1387)..(1387): n is a, c, g, or t
aggtgagcgagaaggcgaggaaaggggaatgtttcacatgtgagaagtataatccaatccatgtgtgcaaaaataaacaatttagactgatgatgatcatggaggaagaggatgaggaagagcctaagaaccagcagcaggaaaaggaggaggaagatatgggcaaatttcatcaattgtccttacatagcattgaagggttgccacccaaaaatctttgaaattgtggggacaaattaaaagtaagaagctgattgtgttaattgatcgtggagccagccacaacttcatatcagtgaagttagtgaaagagttgagattggaggtaacctctgcaaacccttatttggtagaagttggagatggacacaagattaggtgtcaaggagtatgtaaatcactgcctattgaactgcaagaattgaaattcacacagaattgttatctttttgaattaaggggtgctgatttggtgttaggagtggaatggttggctggattgggggaggttgaggccaactttgaaaaattgacattgacagtgaaatggcagaacaaaaaggtgactctaagagctgatccagagttggtaaaggctgccattagcatgaaaatggtcaagggtaccatgctggaaactgaccaaaggtttagggtggaaaaagggtagaagaagataagacaagggaagcagtgccctgaactagtggcccaggtattgcacagtttgagcatgttttccaggagcctcaagggctgccaccacatagagagagagatcatgctattaatatccaggagggcacaaggatacccaatttaaggcattacaaatacccccattaccagaaggattaaattgaaaagatggtaagggatatgctaattgctggaattattagaaccagtactagtccatatgctagtccagtgattttagttaagaaaaaggatgggagttggaggtcttgtgtagattatagggcactcaataagatcattgtgtctgacaggtttcctatacccattatagaagaattattggatgaaattggtggagctgaatgattttcaaaactggatttgcattctgggtaccatcaaattagaatgaaggaagaggacatccagaaaacagcttttagaacacatgagggtcattatgaatttttagtcatgccctttgggttgactaatgcaccgtcaacattttaggcactcatgaatggggtgcttaggcccttttaaggcaatttgccttggtattttttgatgacatactggtgtacagcaactgcttgagggaccatcagctgcatttgaagaccattttgcaagttttgcaggtcgatcctagaggattccccgggtaacgagctgcgatatncgtat

SEQ ID NO: 1683 - DNA, 842 bp, Glycine max
gcatgcctgcagatatttacatcctccttcatgcttcccacttgataactggtgaataaattcttagatatggctgtcctcataagacctgtgaggccttctgctactagattaaagagaaaaggggcaaggggatccccctgccttagtcctctctcggggataaactccctagtgggactgccattgattaaaatggatacagatgcactagagagacatccatggatccactttctccacctttcacaaaaacccatcctcatcatcatgtaattaagaaaaccccaagagagcaagtcataagctttttcaaaatcgaccttaaagaacatgcagggtttattttttgttttagcttcagctatgacctcattagcaatcatcactccatgcagaatatgtcttcctttgatgaaggctgtttgtctttaatcaatgagatgaggtagaacgagggtcaacctattagccaaaagcttggatacaactttatagacacaacctatgagagagattggtctataatcattgagagattggggatcatttcgcttggggataagagctataaaggaggcattgcttccttttgggaaagacccattgatataaaactcatccaagaacctcatgaaatcaggcttcaagatcttccaaaactgcttgataaaattgaagttaaggccatccgggccaggacttttgtctccaccacaatcccacacagctgctgtaatttctgcttttgtgaatctgggccacaaggtttcttttctctccttgagcaagagaaagtagctggacaccatcccaagttggccctggttaagattctgctc

SEQ ID NO: 1684 - DNA, 1254 bp, Glycine max
  misc_feature (1076)..(1076): n is a, c, g, or t
ggggggggtcaactaatggtgggttcatcaccatggaaatccaccagttaattttgtgcggctttctaatgtgtcgtgtccttccgctgtggtgtgtttggtactgccattcgacacgttcgatttttccgatgggtggtctgcttgttcttctttcaccacgctgatgttgtccatgttttcgggttgttcaggttcctggttgaatatagacaagtataaaatttgaaaccaagttaagaaaatattttatttttttatttttcttggcaagtgaatttatatgttatgttttacttgtttacttctctagtgcctaacctcaacaacagtggaccttccgccaatttcaatttctggagtgtcgatgttcttcgcaataccaatcacttctgaatcatcatccggcagtgtttgctgctgtggtatttgatcagtatcgccttggacaaaggcagtaatgggcaatgttgtgttgacttcttcctctggtaactgtgcttttgttgcttcttcaatccctttcgcttcttcttgatcgaattttccatcatcctcaatcccttgtttctcgtcggcgtgagatgctggaacctcttcctgtttctcagtatcatttgtgtttatttccacagtctcctcaatatcattttgtggagtcttcacctcttcgttaattttctctttaaattctgcttctggttgtctcttatctcgactagtctcagcaactgtttcgtttccgatcgatgtttcatcatgtgttggttgcagggatttatcttcatgcacacctgtagtagaaatgggatatagtaggctatcatttacagaaggctgtgtgtcttattaatttaatacatctaattgttctctagaaaattagaaagagtctcagtgcctgaataatattcttttgtgtgctacataattactatgtatatgctatcatccacatatactagtgactaaatcgttgtggttttttaaattcgatttgaaaatttcaaaacataattttgcctttcatcggaagtcatgagattttccttgccaggcatcaaataatgcactgngtatgtttctttttttggttttgaaattcgatttgaaaatttcaaaacttaattaccttcgttgtctgtcttttgagtctttcacatcgtcgattgatttgcatctgtttctttctctgctttaatttcacttgcatttctggtctctaaattctcttctgagcgcgtgtctactatg

SEQ ID NO: 1685 - DNA, 1345 bp, Glycine max
aaaaatgaaatttcagtgtcactgggaaaccaaagaaattgcacgataaataataccacaaactaaatgagttccttacaagaaaaatcaagtatacacaacccaaattggcttttcctcccagtcactcattgttcataataagtatacctctaatgaaggttagatccaagagcagaaagataataaacacttacctacaagcgataacactatcagaaagcatgcacccagttgaactgccctgcggcttcccattttagtcacagcaattgtgtgaacattttcagttaaagttgtagatccagttccagttccccagagaccagccaagacactggaaagaccttccaaaccaattcctcgactaagaactccaggagttggcggtctggatgctaccaataatgaagatgcatggtatgagccaacctataaaaagattaaagtaaatgaatatctatgacacagtacagtgattagttacaatactgcaagttgagaaaaatacaagtaacattattataattgagatattatacagttgttctctagaacatcaatacatattattatttgattaataacacagtggttgttcacagcatcaaaatctaaaaaatttagtaattaaagaattattgtcattgatccagtcatttcctaaatcttgaaccagcactacattactcacccttgtaattggtatctacttaatgtggaaaaaaggacagccaaaagataaggcattgatctacaaaacaatgtgacaactgacaagtagacaacaatggttttaaagtttggatctgataaagtatcattttaataacaaaagttttcaagcttcattgacaaagaatgcagttaaaatgaatttacaaatagttttaactcttaagaaaatagcatatgcaagtttcatatttcatcatccaaaccatatttttatcaaacatatatcatagtggtagcctggtaggtccaaatcataatttcccatcaaagcctgtatcacatccaagaaaaagaacaaccttataaatacaacatttctagaacatacttgtgaagttggtacaaaggccctgtagataattagcttttagctaaaataacacaagcaagtaaaaaaaaatacagctcaggaaccaaaacagagaaagacaagaaactaaccgaatccacagatgagattaaggaaaccacacacattacaatagccattttccaatggaagacaggagtaccccattgtagtggataaggaaacctaaaccatgtagaggatttcaatgcttgagaagtatcaacccgacagtgcctcatccttgaaaaatgcttt

SEQ ID NO: 1686 - DNA, 817 bp, Glycine max
agaaaaatcacatgtacatgattttaaaatttaaagagtcatgttaaactgtccaatatgtaactagttgattaggctccatttctttgttttggctttcccaaattaatgcaattatctttcatttcacccagaaagaagaaacgcagaagctctttgacattgttggtgtcataccggaaactttcttcatacttagatcccacatcggaaagaaaacgagacaacaaaatctttatatgccttctgacaaggatgtctaaatgccgagctgagttacgccagcttgtgacctaagtgggggcaccagggtgatggaacagctctttggctttgctgggttgggctgtggctgtaataagttggcctgtccgctccaagttgagagttaaatcatgggacttaggcgaaagcataggtctcctggtttatagagtggagggcaatgcgtgaggctggtttcacagagcagcgaatacttcccactcccggcagtggaaggataacaggctgctgcaaccatagtccataatggcctggtgagtctagatgcttggaccatcactttttactctttttttttgtgaaaaacacgatcttgatgcaatgtaacaatatccattagtcagaatggtcactgtagccaattgcaaattttccatattttgatgcactcaatatctctcccttaatcatatcctgcataagcatttttttggtgctgcaaccacatgattgtccaagatgactaagtctagtttgaagatatgatacggatatgaagccaacaacaatgcacatgcatcccaacagtccc

SEQ ID NO: 1687 - DNA, 710 bp, Glycine max
taaaattcattagtgtgatctgcataattctgattaacactaaacagttttatttgagttaagcttatctttcagctcgtgttctattgttctttgtcatgcagatgcaggtggtttcctttctctttgttcttgtgtttctgctgtctcaagggtcgtaaaaaaaattgaattagtgaattttttttatccgggttttctccttttttttcagttattttttttttatgttgtttctttcgatgatcatattgtattaatgtttttaaacaacagttagagataaaaatatatagaccattgtttgagctaaaatctaccttgatttaatcccaaccaattcaccgatttgttctagatcgttgtttttctagctattgtgttatgataatcaattttgttccaccattcgttattcttttttttacctccttttcttcttagctcgtcattgtcaagaacaaaatctgttgttgtttaatgcttttaatattctgtggcacttttttttttcgattttttatgcttaggttggtctcgtttcgctagacatgcttagatgcgtatcttctagttttggttatttattgatgcttaatcccgtttgattacggaaactgtgattcccttcgtttattaaataattaagaatattcccacaagagaattataaaatttttgttgaatacaatatttgattttgatttcac

SEQ ID NO: 1688 - DNA, 1409 bp, Glycine max
aaggactgaaagtgtagtatagttatagtaccctcagattttgttttaagttacacacaataagtcagaataatctatttattccttcaacagtttccaaaatgtttctttattcatttctaaattcttctttttccctttgaagggaaaccttaatcattctttttagtactctacttcagaagataagcaatgttccctcagagaatgttcaatttcaaccctcctcttctctttctcacaccaaatattcttcttcttccttttagtaccgcagtatcaactttgggcacactacacgacaaacactttgctcatgacacaaatcatcacatgctgcatacttagttcataggttttttttttctcttcaagtgtggctctctgctgcttctgttctgcatcatcatcattttcttcaataactatagttagttccctttgatatttgatctgggtcaccttctttttttcttctgggaccagttttcacccatcccattttgcactgcttgctttgtgtctgtgacttggtctcaccaaaacctcagaattcaagagaatttcgaaatttggtggtgcctagtttgttcattttggatgtaagtaaaacaaccactgcatcgacactttgcttttggttaattggttttgaggtcactttgtattgggatttatttgtatttgggaaatgaaacaacatatagagttgtagtagggtggttcataatgggatctcaaagtggggcaacccaagaccaagagccaaagactggttctttgaccagacaagggtctttgtacaatctcacccttgatgaggtgcaaaaccagcttggaaatttggggaaacccgtaggaagcatgaatcttgatgagcttctcaagagtgtgtggactgttgaatctggaacggatgcttacatgcatcatggtggtggtcaggtggtttctgctggctcatctttgaatccagaacaagggagcctaacattgagtggggatcttagcaagaaaactattgatgaggtttggagagatatgcaacaaaacaagagtgttggtaaggaaagacagcctacacttggtgagatgaccctggaggatttcttggtgaaggctggtgtgtctaccgaaccctttcctaatgaggatggtgctatggccatgtcaggggttgattcccaacataacacattacagcatgcccattggatgcaataccagctcacttcagtgcagcagcagcagcagccacaacaacagaatagtgtgatgccgggtttttcgggttttatggctggccatgtggttcaacagcctataccggtagtgttgaatacggttcgggatgcaggatactctgaagcattgccatcttctttgatggctgccttgtcagattcaca

SEQ ID NO: 1689 - DNA, 811 bp, Glycine max
  misc_feature (781)..(781): n is a, c, g, or t
  misc_feature (791)..(791): n is a, c, g, or t
tcgctgtcaatgagtgcttcatatgttttcaggtttaaaaaaataacagtgatggatctgagactggttccttgctgcaaattattaatatgaaaatatttagaattcttgtctgtaaaattcagtacttgttcttataaaattaaaatgtcattttttggttagacatacgttgtgaatttataataatgactttttaaattagttattcatataaatttatacaaaatataacatttattttttacatcaattatatatataatcaatgttaaaaaaataatgcagttaggttatgatcatcatcacactatggcaatgtgacggtttaatttgaagtttttacagtattattcatatggagtagcggatgtaagtaaattaaccattatttatttggacaataatttattttatttcaagtccatatcgggtctacacatagacacaacataactcatgttgctagagtagttttctcacaaccatcgtgcacacaggccaaaacatctctgtagtctcttgaaatggtaaaggagtcgtagacctctccatcactacttttcttgtactcaaacaagagatatgaatgattgaaagcagtcaatttgccaaacccatagtcaacgtccctataaagactccatatagggggtgaatggtggtgaaatctgacaggtgacttccccctccaccaacaaccacatgaattgttccattcacagtgccagagtagtgatgcttttcttcattccacattgattctgtacccatgcattangatgattaanaaaacatgttgaattgaaag

SEQ ID NO: 1690 - DNA, 771 bp, Glycine max
  misc_feature (718)..(718): n is a, c, g, or t
ataggttgatgtgcaattcaattatgtatcttatactgcaatgtttctttcacatggtcttctattttaaacatacttttttttcctttctgtttttgggtatttggcaggcttttagaagaaaatgatactgaaatacagatgagagttttggattgcctgttaatctggaaggatgattatattttaccatatgttgaacatttaagaaacttgattagttcaaaaaatttaagggaggaactgacaacatggagtttatcgagagaatctgaaataattgaagaatgccaccgggcttatcttgtgccattagttatccgtcttttgatgccgagagtaagaaagttgaaaggacttgcatctcgaaaggtatactcaatttgagtatcttgaggttgttttatatttctgtcatcctatttttttttttgtcacacatgcttttcatttgcctttaactttgtagactaatcatttgtcatttttttatttgtcagaaagcaagcatttgtcatcggaaatctattcttagtttcatagctggacttgatgttgttgagctgcctcttttctttgcactactgataaagcccttgcaaatagtgaagaaaactgatgggcctgctaacttgttttggacttcagataaagtttctattgatgaatttcaagctgatggctttggtggaatattttactttggacaatatagcanacctatcctggaaaaagaatatggttttttgcatgtcattgaagacattattg

SEQ ID NO: 1691 - DNA, 819 bp, Glycine max
  misc_feature (763)..(763): n is a, c, g, or t
ataaattaaactgtaaaggaatccagattttattttattattgatggtgagacacgacaatattgtcatttccacctcaggctcatgcatatataccctccctgaacgattaattatccatttacatttatctcgagcacatcaatttatcaagagcaaacgttacttaaaacaacagtaattatcactaatttctcgggaaaccaatattttattatctttcaatttaagaaaattgaaacaaccaaattgatatgacatgattagttgattacacacagtttctttattttttttttttgcaacgttttgagagttaaactacacgtgcgcatcaacctgagattcccttgtccctccttcgataaataacatcagaaccattcatatttcatcagtgtttttctcttctccaaattccaatccttcaattcaataatttagtaaaaatgttgtcttctctgctgaacccttccttcaccaccacccttccaatccattcaattttaatccctaataaccgccgcgcctccaccgtagtatcatgcacctcctcacacctgaccaccaacaaccactcccatgtttcttcgccgccgaacatcaaggacgaggcccgccgccgccccgcggcggagaacgacttcacggcgaagtacgtccccttcaacgccggcttcgactcgccggaaacctactcgctcgacgaaatcgtgtaccgcagccgttccggcgggactctcgacgtgcagcatgacatggnaggcttagggcgcttcgacggcgcgtactggcgcgcgctgttcgactcgcgcgtgg

SEQ ID NO: 1692 - DNA, 895 bp, Glycine max
ttcggactcgtacgggggacctctaaatcgacctgcagccgatgtaaagatcatatcctatctctttttaagttttacttgacctagctaaccatggcatattttgggcaatgacagcgtatttattattatgagctatagatttaagtagtttatagaacataaatccaaacaatttgctcagatttctaatatatattacgagattagaagcaagcaagtctacaattatcttagcgagtgtttggaactaattccacaacgcacatcatatctactagaagcaacaagaagtaatttctgcatcatatgggcttggtgacgtgatttttataggacgcaattccagtggaaattctgaatatacaagcagtcaatttttatagcatctaaagcgattcagtaaagcgcaacagcaaaacaccagtcttatatcatttatcgcttaatggtgaagctgaagaactctaaagaaacgcaatgtgaaaatagaatatttacataaataaaaaggctaaattgtttcttttgccccctcaaatatgagacaagaatcagtttaatcccataacatattgaagtcaaatcatgacgggtgcacagacgatgaccgtctattactttccgctctcctttttctcttggctggaaattgtggccaaaatacaatattttttttcttgtcaactcgaatggagtaagatgggatcaaatcaaattgacaatgttttgtgggatacaaaataattttacaagttacaaccacacacgcaagaaaagaaaagtgaagaatgggactaaaacgaaactggcctaatgaggataaaaaagaacacttcagtccaaaccaaataataaaagaagcttcaggttagcaaagccagtcttgatggca

SEQ ID NO: 1693 - DNA, 828 bp, Glycine max
acaaacatatcatttatcacttttacattcgtttggtccattatttcatatgacaaacagtaaacatacaatttctgaaaatttaggcctatagatgttctatactttacaatacttggtagctattcatatgtgtatatattgtctacatcactggccaataagatgttctcaacaactatttttcatttgttgcagggttaacgtacagagtgattgatcatatgttgatttggtaggtgaatacatttttacaagtgttcgttattttggacttgctgaattttaaaggagactctactgaaatttctataaatttgaaagtacagtctggaaatcattttgccaagtatgtttgtgatgcttaagcttgcctggctaaaatgtgtttaagttggtataacttgtaacagctcagttttggggccataacacattgtcaagaaagggagttgtgagaggagatgggagttaacaatcaatgactagagtcaagaaataggcaaatactcccttgaatcttgactagattcatgaaaagaatgataaaaatttataccttcttaggtattcgggtaagcgccgatgactcatccattgctcaacatcacggcttctaagttgcatttctagcctcctgtggagaaggaagaaaataaatcaagtgtgttacaacaccgaacacattaccacttgaccatcaaagtttgcttaaaactagcagtattagataaattctacctccgtccaaaccttgaaaaagttctgtatgtttccatgaggagtgcaaaaagaaaagtcccaatccacgatggccatagtaaaaga

SEQ ID NO: 1694 - DNA, 1356 bp, Glycine max
aaagattttatagaagatgggagacccatgctagtaaaaggaggcaaatacattgtcccaaatgttattaaggctgtggatgttgctaggcagcgtggaattctcatagtttgggtaacatcattctttttatgttgttccttgtctctggataatgatctttcatgttggggaaggtgggggtgatgtttcaaatgtaaaccaatgtcttcctttctatgaaatgaaacaaatattaatgagttacttgtttgcctgatgaatgcctccgtgcttggtgaagttgctagaaaaagtttaagaggaatgcactaaccaatcagaaataattattagtatgactttttaaatgtttattataaaagtcaataaaattaccatatattacagtttgtgattaaccgacaatgtaaagaatctttatactgtatatattattttttcattcaagtattgtttgatattagggaaagaatatcaaaatgtatataattaagtttgttttagttttcataattcattaggttcttgatttttaagattttatttatacatacccggatatgtgctctgaattttggatcagaggtttgttttttgcttgtcttcttgaatttgaagagacaaaattatctctttgcttatgttttcttacaaactaatggtgacatgacaaagttattttcccgtgggcaatgctctgcacatgtttagcagccaacacagagaaatcaaagtcttatactgttgttttcactggacatttcggtctgttgacattcaataaaatagttccatgatgttgaattctgtctcctaaaatgtttccaggtagtacgggaacatgatcccttaggaacagatgttgagctctttcgtcggcatcattatgcagcagggaaagttggtccaacttctaaaggaagtgaaggtgcagagttagttgatggactggtaattaaagaaggggattataaacttgagaaaaccaggttaagtgcattctttgctacacaccttcattaagtccttcaaggagcagaaattaatagtctggtggtcactggtgagtagtaatagttgtaatgcacaatgtcaacttacttacggttttatatttatgcattgacttcatatagttaaatctgtaggtgttcaaactccgaactgcattaggcaaactgtgtgtgatgccgtagcattggactatcagccggtaactgttattgttgatgctacagcagcagccacacctgatattcatctcggtatgtatatttcaatgtctcagatgtttttgcgattgacaggaactttatttgaataatcatcttagagaagatcttctctgcaggc

SEQ ID NO: 1695 - DNA, 1445 bp, Glycine max
tgcatgcctgcagtatatcatatcaagagagacgaatagcataagagacaaaatgtagcatggattgatatatttaagaacagaacagattaaaaaggaaactgtcacacaattataaaatgcgtaaataaaccaaccttaatattatgaaaaagtttatgattggaaataatggggtagttgctgtagctgccacgctgaaatctgttattccaccagcgaggaacaagtatatcaatggcattggggatgttgggtccaaacatatccctgagcactgccatagcttctctcaaggtctcttcatcagcttgagcttccacacgtttcgattcctcattagtcaatgtcaccactaacatattggacccaggatacgcgttctccatgtgctgtcaacaaatcaacaaatcagtagataaactaaaaagattttgatgaatgacccaagaaactagacaacttttctgattctgaataaagatttggatttcaatcattttcacttatcatacaagttcagatccaaaatcaatgcatcgttgcataggtttttagtattgacaagaatagaactaatatcctgtacaaaaattcaatagtccaaggaattagatttttaatcctccatcgtagaatactcttctatagtttgacatatgttatgttacctaatattctatatgaataagaaaccaatcatagctagtgtagacagtagttcccattaccaaactcaaacaaatgactccaagggaataccaacatcgtagaaagataatgaaccatttaatattaattaaccgtaacaaagaaaaaccattgctacaattaatatgatcataataagacaaatggaaataattgaagcaaaagtatttatacacctaatccaccttgcgtaaatcaggggaggggagggataatagcaaagctatttttccatatcaaacaaaagattcgttattatcaattaagtctagtatgttgaattacgacaagaataatagatgatattgaaagctagttttaaataaatccattatgaagttcagccgataattgactcaaatctggagattactaatgggatccgcattaggattctagtacattttacagggattgttattttacaaatatttaatgtttaaccagagtagtgtttaaccacaggaagggggtaaaaacaaaagacataatttaagctattttattgtaaatcaagataaaccacaagttaattgatagctagagattaagatgaaccatgtgacccacatgcacaacacaaaaattataacaaggtattatttaaatcctcagaatgccaaccattatctttggtttatactttaaatcatccaaaagcaagatacgtatgctcaatcgggttggtccctaaggttaggtaagtgactagtacgttcattggaaataaattg

SEQ ID NO: 1696 - DNA, 1524 bp, Glycine max
ccttacttgcatgcctgcagaaaatcaaaaggttatgaagataaacacaggtataagaaccagtgaaagttctaatccaaaacacgacatctcaaatgatgacttaactcttaaccaaaccaatatgtcttcaactttagaaagaaaaacaaaacagtagaacaaacaagacaagtaacagtgccaaaaaaacaaaactgaaacatattatactatggcttatcttaagaacgcatttataagatgctcggtgtcattgaaatgatagcaaaccaaactctaaggtacattatattatatcttaagaggcacacagaagcaaaataaaacagattataaagtgtgtgcttcaaggtttaaaacttattccaaaattgcaaagttgagaatgtaatatttcaatgttttttatgagctttaaaaattattcccaagaaacttttgttttaaggtttaaagatttgttcttgggaatataattaccatgtttgtcatgagttttaaaaatttatctccatgtattgttcatgtccgagaaagtaacaattccttattttgcttcattcttattctcgggatgaggggtgggaaaagttatattcccacaggaatatgggaatttattttctaatcaattattatttccattttttctaattgttttgcatttgaaaaaccattcctgggaataaataaaatttaatcaacatatttttaaaatattctgatgaataacattcctagtacaatattcctaagaatgtgattccgtaaaatggaatattataccttgaaacaaactttcctcaagtattgatcatgtctgagaaagtaataacgtgttgtttacttcatttttattcccatggtgagagatggaaaagctattatccaaaccaattataactcacatctctactcttatttttttattcgaaacattctgaattttaaaaaatatccctaggaatatttaaataataaaacctaaccaaaggtattcttgaatttactagggaataacattcctagtcataatattccgcgaaatgtcatttctgggaatgcgatagtatgtatacctttaaaacaaatgtcattgatttctacaactcaacaaataaggagtcatatatatcataaacacttccattcctgagtaaacaaggattaatgagaaactattacatggtggggactttctggtccaactaatcttcaccaaacatgtagttgagtattattgattatttatcgaattctcggattatttaataatttctctagatgaaaaaaaaaggactaagttagttactaacctctgtaaacagtaaagcaaccaaaaacgaaaacacagaggccaagggcaagcatgagaagcattgcgaccttgcctcttccaagtagccggcaaaagaaaaagaaacccctctctttctctctggggttgtagaggagcgtctttgaaggtctacgcacaagcagggttgggagaaacggtgccttttgctgcaggcatgcaag

SEQ ID NO: 1697 - DNA, 1380 bp, Glycine max
ataatcaaaaggttatgaagataaacaaaggcataagaaccagtgaaagttctaaaccaaaacatggcatctcaaatgatgtcttaactcttaaccaaaccaatatgtcttcaactttagaaagaaaaacaaaacagttgaacaaacaagaactaacagtgccagaaaaaccaaaactgaaacacattataccatggcttatttatcttaagaacgcatttgtaagatgctcggtgtcattgaaatgatagcaaaccaaactctaagctacattatattatatcttaagaggcacagattatgaagtgtgtgcttcaaggttttttatgagctttaaaacattactcccaagaaaattttgttttacggtttaaaggtttgttcttgagaatataattaccatgtttctcatgagttttaaaaatttatttccatgtattgttcatgtccgagaaagtaacaattccttattttgcttcatttgttatcctcaggatgagggatggaaagttatattcccacaggaatatgggaatttgttttctaatcaattattatatccattttttagtctaacttgtttgaattttaaaaacttatcctaggaaaaataaaatttaatcaaacatatttttaaatattctcgtgaataacattcctatgaatgtgattcccaaaatggaacattataccttgaaacaaacttccttcgagtattgatcatgtcagagaaagtaataacgtgttgttttacttcatttttattcccatggtgagagatggaaaagctacttattatctaactcaattataacttacttatctactcttattttctttattttgaatttttaaaaaatatccatagaaatactaaaataataaaatctaaccaaaggtattcctgaatttacgaaggaataataacattcctagtcatagtattccgcgaaatgtcatttcttggaatgcagtaatattattatagtacctttgaaacaaatgtcattgattcctacaactcaacgaggagtatcaatcataaacactttgattactgagtaaacaaggattaacgagaaattgttacatggtctgcaactatctagtcccaacttaattagtattttgtagaacttgacacttctcgtgataagaaaagagcgagtaagttaagtgactaacctctgtaaacagtaaagcaaccaaaaacgaaaacacagaggccaagggcgagcatgaggagcattgcgaccttccctcttccgagtagccggcaaacgaaaaagaaacccctctctttctctctggggttgtagaggagcgtctttgaaggtctacgcacaagcaacggcttcggcgaaacggtgccgttttgct

SEQ ID NO: 1698 - DNA, 642 bp, Glycine max
tagaaggaagaaactgtcactaatctttgtagttaaaatgtaatatatgttttgaaagtgatttacctttctgtttatttttaacatcaggagatgaagtagaagccttaggtatgggctgatggggctcgtctatttcaatgtcatctgtgccaaaatatagcatgttttgaggctttgttttttaaagttcaaacttcaaagtgtgaaagtattcaaattataaaaacttaaaaacactaaatgtttaaagaaaaatgtaaacctatatcaagctccacttctttattatctgggattgccactgttggaggtgaatcaggcaaggggggcttaaagaaaatgtcttccaaatgaccaaaattggaggttggaattttagtcacatctgttggagtggtttttcctcctttaaaccctttgacaataccacctagaatccccggcaccacagtctgtgccaaaacagttaagctaatcaaacagattttcaatggtgggaacattaggatgacaaataaggcaaatcagagaacctcatacctgttttttcttctgatttgaagagaatttaaaggcagcatcagcagcggctgcaagaactttatcatgaagacaaggcagatgctccggattactaat

SEQ ID NO: 1699 - DNA, 776 bp, Glycine max
cgatcgaagataatacattccagtctttagaccctttcatgaccaaacaaaaagcataaaattgatcagcaaacatttggcctaaaattccccaactgtgtaaagaataatgtaaatcaccaaggaaacaaaatagacaacatataacatttaaacccaactatatatttgtacatcctacataaatttatcttgcttcacacacacaagcaaaagcactgtgttgctaccttggaccatgcatagaaatgcaaggaagtcagctttccaaagttgggttgatccatgtgaatatttaaactttggctctgatctatgtagcatcctcgatcagcagccatatctaccaatgtcctttgtttaatctcccaaacagttctgttcaaacaaaatttagttagagtgaatacattgaagaaaaattcgggttaattaagaaatcataaatctcatacttgtatatactcttcagtacagcaggcatttctggaattttctgaacagagccatcttcatagataatcttattctttaatgtaggagaccacagtcccatttcagtcaagtcatgaagaagatgcttgttcacaacaacaaattcaccactagaaacaaacagttgcccaataagataggatcatgggaaaataatacaccaagacagaataacacgggcgaaaaagcaaaccttaaaactctacgactgtagatatttgaagtatatggttcaaaacactcattatttccaagatctggctagtggatgcagttggcat

SEQ ID NO: 1700 - DNA, 873 bp, Glycine max
ttcggactcgtacccggggcacctctaaatcgacctgcagaacagttcatgcatgagctcgggcactcaacatcacgttgttgtagcttcagtctcgtcggcaagcaatcctgacaagccctccataggaaatgtttgacattcgagggtaacttaagcttccacaaatgcttccagtttcctgtcaccttgtattggtcccttgctacctgactacgtacgagcactatggtaagctgtccgaactgaataatagccatccttgctccacctctagaccaacctatcttgaccctcaatattcccaagagggactctcaacactttatttgcatcttcaacattttattgttttgaattaaaatataataaaaaacttaatatataatttacttacaaataaaaataaattaaaattataaaaaatataataagttacccgctggtatatccaaacatgataaaacctgacgaagataaagatagatattaaaactttaaacctatctcttttatattcgtatttgtcccgtcttttgtgaggacaagaatgaggaaaacctatcggtgtctctctttatttaattctatataattaaattaaaaataataatgaatctgaccaaatacacattctcataattataggaaattgagattttttttaatcttttttaatacttttatttctttcaaaaggattattatattaaactttttgtttgggtttataagttttgagtttgcaattatattaaatatttagaggaataactttgtcacctaaaataatcatatttatctaacttaaataggattatctcatatagatgatacatgtgatttaaacaatttttttaaaatttttttatt

SEQ ID NO: 1701 - DNA, 856 bp, Glycine max
gtcctggagcgttatggggagctagatttggtcctgccggtaatgggagaggatgcttcagtgataccactccagatctctcgtttgtaatctcaggaggctttatgcagcccccttccgggtggcatccgttgtcaaatgttgtgttgaacttgagtagctgggaggtgctgtgactcctagagtatgaataatctcattagtaacgcagaaatgcgtaatttggaatgacatgcactcgcatttagttatatagttgccaataatatggtaacgcattggtgttttcgttgttgtgtttaagctctaccgtgtttaggacttattttatcattgaagaactttgcacaatcattgtaagtagaccggtaggacagtaggatatatacatggatgtatggttcgtgcctcaattcatccagaacagtatatttatcatacggaactcatcgatggtgtgaagtttgctgctcccgatgattggagttccattgcaatcgaaagtgattccaaaaaggtaggtaacattaatagaaatgtaacagattggtctgaactaggtgttatttatgagaggcataagattagcagtcattgtttgatgaatgtatttccaactttgttcctaggaaaggaactaaatttgcccaccaagttgacaatgggcacattcctcggttgaaagtttggcttgggggtttaattccttggtgatatactctgaatctgttgctggttaatgaatttgatggatatttgaaaaagaaaaatatgtagagatagctaaactaacctaaaaggggtttaagaattttagcttattgatgatcggatttatccaaaatatggccttttt

SEQ ID NO: 1702 - DNA, 838 bp, Glycine max
gcctgcagacaatgagacgtcggatagatcaactggcagtcaacgcaagaggaatcgagaaataatagtaatacactgtaacaacattttttgaacacactcttgtactcttttaaacaaactatttattatcattaactgaaatttattcaaatttataaaattttgcgatgtcaaactttatttgacaagtcttacgattttataatttttaataaattttaacctataaaatatatattaaaaatgtgttaaaaatgtattagaaagtgttattacttactagtattccttttatcttgtattttttaggcatggtttaaaaagcattctagctgccgattaatcttgtattaggcataatgcagaataaaatgaaaatgcacggttgagaaaataatgtacaagtaattcctttctgcttatgccctgtataaaatgagtgaaatgaattgtaatgttagttaaattagcctaccataccaaccaaatccatgcattcaaattgaaatgcccaaaaaagtaattaaaaattggagataagttagatgataaaatggcattattattggctaaatccgatcatcaattaaactaaaattccttaaacccattttatgttagttttactatctctaattatctttctttttcaaatatacatcaaattcattaaacagcaacagaatcagagtatatcaccaagaattaaacaccaagcccaaccttcaaccgaaattgtgcccattgtcaacttgtgggcaaattttagttcctttccttagaacaaagttggaaatacattcatcaaacaatgactgctaatcctatgccctca

SEQ ID NO: 1703 - DNA, 816 bp, Glycine max
actcatttcactgttgttttgtgtgggtttatgtgttttaaaaaggtttaaaaggaattgagctactctttggagctgatatattccttttcttgtttctttttatcagtcctttaatgtttttttgctggagacttatcctcactctttgtactcttttctgataaaatattctttaaaaataaaaagtattggttgatcatctcccttggaaaatgacaacattggagctttctgtagtattattcctagtataaacttctggttattattcctagtaaaactgagggaattgtgctagtgaggtgggttaacaacatacctccaaaatagatgaaaatgaaaacactattctgaaatagattgtttttactttgggttatctttctggtttgggatttttcaatgaacttgaaaaaatgaactaagaaattttaattttttaatgctatcagtttcttttaactatgcaataatattttagtttctacacttgagtttacaatttccactattcaggtttgacatgtttgcatgcttgtagatatgtgtgtgtgggtgggaatgtatatatttgtaattctcctgtctcctaaactgctatgtaaatgatgattttggtctatatattaaggtcattccaatattgcaggacagcaaaaagaaaccctcctgttacttttgccattgctgcatgcgagacacagaatgttaatgtttctgttttgccaagttttgggtttgtctgaaagaagtagcacaactgccaaaagcatgtggagtaaaatggggaaggactgattgctcctgtttttt

SEQ ID NO: 1704 - DNA, 809 bp, Glycine max
atacatacataggattcacaagttcgtaaatataacaagtttttacaaatttaatggaacaggttcaaaatgctattgattttctcaagatgattggagcattagatgaacaagaaaatcttacgaatcttggtgagtctattttttctgtcctatttgattggtttctcatgtgcctatatttttcttggttataagtaattcctctttgtttcctttttcattcaatcagggaagtttctttctatgcttcctgttgatcccaagcttggaaaaatgttaataatgggagctatatttcgatgctttgatcctgttcttacaatagttgctggccttagtgtcagggatccttttcttttgccccaagacaagagggatgtaagtcatctcattacctcttggtgcacagttgaatctaatctatatatatatatatatatattgaatagaaacttgtgcttcaatattttttgtcttttttgtaaatatttcatgaaccaactattaagctgttagttagaggctatgaagcacaaacacattggctgaaggatgtgttagggtgtccgacacgtttccaacaccgactcgcagtggacatgtttttacagtgtccattttttattttggctttgacactgctcggttgtatctttttttttaaaaaaataatcaacctaaagattaaattaacattagcaagctgtttctttttttcttttaaggactgtttctcttatattttttttggaatactctctattaaagaacttacaatttgttttaaattttttctttggaaaaaa

SEQ ID NO: 1705 - DNA, 802 bp, Glycine max
attataaactcacattattctaaaaataattgagcagaacaagttgtaatattaaaaagttggaatcagaacaaatactaatagaaacaatgacataggataataaactaaccatcctgtgtcacaagaggatagtctgaagcactaagattaataaaccaatcccagtctttacttctcttgagaagaatggcacaagcatgaagagtattagcaaccatcgttggtcctcggtaagtgaccatgttagcctttgtgattacaaaaacgtttccaacctcagcgaagacatgttgtctttcaattctatgtgcaatctccatcctttcctcaagcggcgactcaaggtccatatgaacaacataatggtttaggggatgataaagtgcatgaagggttctccaaagcttttccaaatcacctttggagcctgaaatcaaataagcgaaacgaggaagcacaggcctagccggcgctggagcaggagaagccttcctctccacaaaacccggctcagtttggtttgggcgtaaatgagatgggagaaagaaaaacagtgaattgatggagtgaattgaagagacaagatccatgttgaaggatgagactagtaagagcatgcatatggcaaaacacactatgaaaggatataaccatttcttctctacgtttaagaaccccataactgagaactatcatggatagtgatacttcacattctaaaattccatcaataactaaaacacaatttgccaatttcaccattcaaaacagccgctacaaaacacatatatttggcatc

SEQ ID NO: 1706 - DNA, 820 bp, Glycine max
aaagaaggttgtttggagtgctgttcaagctgcaccaaacaatgaagggtatgctagggaggaggtttttgtggcaggaacaacaaatgatgcagcttatgttctggctaattgttggaggagcttggacacaaggtcttgtagagcttgtcttgagaatgcatcttcttcgatattggggtgcttgccctggtcagaagggagagcattgaacactggatgcttcatgaggtactcagacacagattttcttaacaaggaacaggaaaatggaagttcaggaggtaaatgaattgcatttttattcttcgctgtcattgagtgttatggctattttgtaaggatccagcttttagcattgtgaaaaatttagacctaatagtatgagttcattttgctgacttgtgcaggtaatgtactggtgatagtggttgcagtagtcagttcagtgattgttttggtggttggaatagctattgtggtttatatccgcaaacacagatatattcaaatgaaacgaagaggtaaatgaccatcttatatattttaatgtaaaatgtcagacacagaagtcatatgagtcctagttacaaaacagaataacttggtaattgtttatacaatgtatttatatcatagtctacatctcatattcctctcagtcatatttaataaaatgtggaaccatcattgtattatagcacaaattttttcgacaaagtccttatctcaattgtcattctgctttctaggtcaatgatgcagaaagttagcccagagccttcacacaatagcttgaacttcagtattctacactgga

SEQ ID NO: 1707 - DNA, 792 bp, Glycine max
acccgctgtacgagcagctgctgtcggcgcacgtggcgtgcctccggatcgccacgccggtggaccagctgccgaggatcgacgcgcagctggcgcagtcgcagaatgtggtcgcgaaatacgcagcgttcggacacaacaacatcgtcgccgatgacaaagaactcgaccagttcatggtatataataatcaattatcaatttttttttttgctttccattttccttttatttattagacaattaatgattctcgttgttttttgttttgtttcttaattggcgtgaaaatctgaggatttggatttgtttcttgttgattttggattcatcatttaattaattgttatattttaattttgttttattttgattttttggtcttcggcgtgtcagtattggaattcgcgtggcctgcattattttatagtgctggagccagatgaaatttgcagcttttgttgcttgaaaaatgagactttaagtttatattgcaaaattaaggttttaaattatgttcgcagtagatattttttcgcaatctttaatattgtagaaaattgcagacaaacgaacaaatgaaactgatgggattgcaattttggattagaatgaaaaactgatctcgtgagaagtgaaattgtgattgtgaattgaatgaaaagatgctaatgggctcaaattttgagttatttgagatgggcttttgaaggggctgaatttaataattggggatgcttttaatttgatcacttttatgagctgctttggtatataagggtggggtttttt

SEQ ID NO: 1708 - DNA, 684 bp, Glycine max
gcctgcagcaccattttcaaggagaagggccacacattcctttctgccataaccagctgcataatggagagcagtgttcttattcttatccaaagcatccacttttgctccagcctcaaggagaacttgagcacatttcacctgaaatgatatcaagagcatgtcagccaggcgttagaaagagcccaattaggatctaaaattataattcctgacgagccattcactttgcttgacaccatgcaagagggggctgaaggaaggtagaacccaaatagcactatccattcaccactaacactgttgtcactctccaccaccacttctgccatcattgccactatccctcatcaacatcaccaccaccaatattacacattgccattgctacaactgccactgttatctccattctccactcctccataaatggaatcaaatctagacttttctgtgggaggaatatgaacattatttataaaactactaatgtaccatcctactttacacttgttagcaccagggttcttcatgacatgaatatacattgatgaatcacacccaaactttcttttccgtttgatgaatataataatttgaaagaataaaatggcattgcctaatctatataaggggatcccacctaaaagaatgtgtaataaaaaggaaaattactaggttagt

SEQ ID NO: 1709 - DNA, 811 bp, Glycine max
aagtctaaccggagtatttccatctttcatacactctgctagtgcaggaccgacaatagtgctgtgtgacataatggctgaaggatttgcctgtaatgttgcaggaatgtaggccatgtaaattttcaaccatataattctacaggtgatatcttggtcaaggcaagactgttcaagcacataccttggcaacagcttttatagcagataatgctcttcttctaacttcactggagtcatcatgtgtggatgatactagcaatgaaagaacatctttgtaaagaagtgtgtcagaaggatccacctgagatctataaagaaggagccttcccaatgccttggttgaagtttcgcgaagagggaactgttttatggaaaaattgaataaaatcggacaatagcaatataacaagaaacttgttagacttcagaaataaacacaatgaattctgaaaaaattatagaaataatctggattttagaccagatttgagatcaaaattaaacaacaaagggttttcccagagcaagagtttccaccttcaaaacacaagaaataataatctgacaccttaattgccatctacaagtctcacaacctatatatatcactataactatcacatcacaacatataattgccaaattcgaaattaatacacaaataactcctcaattacttccaaatacagaattaaggtgcttaattcagaaacatggcctaccaaaactaattgagtattaacataccttctcatccttcagggtgtctctaaggcaatcaacatagttgagaacaaggaagacgaac

SEQ ID NO: 1710 - DNA, 719 bp, Glycine max
agaaacaagagggtaattacagtggaagtggagtagtagtacactactggtttggagcaacagcataaaaaaaaagacacaaaagggcccacacccatgtggacaacgtaagtcactcactgttcatagaaacacgaaacttccgtttccatctctattctccgcttcaaacacttgtacaattgtacgtccaaaagggtattttggtcttctcacgttattctcaggggtaaacatgtcatcaatgtacaacacttagtgtgcacatgcgctgcacgtgcctcggcccgttacgaccattccaccgctgcggatagtggaaggggttacatggctgtgacggtagggagaatgacggccaatgaggttggtggttggagtaaaatctctgtgatgtgtagtgtgtacggtctatccatgtaagcgtccaaagccaaatgagaaagtatgtcccctgcgtacgttgcaaccacttctaatagttatattactatttttttgtttctatccgagaaacgatggttacgctgcaattaggtttgggtttggtgtatttcattcactatttctcacttctttgtatttattaaaaattgctattcttaattaggccatgggaagcttttattgtgagctcgtgcaaaattatactaacatggaagactatatatggtacgattatattcacgaaaatagtaaaatgtatgttggtattttgg

SEQ ID NO: 1711 - DNA, 816 bp, Glycine max
taagcataaaaaaaaataaaaattgttcatccccttattaataatgttgcaggtctcgaactttctttattgaaaaagaaataaattacattttggcccatgcaggtctcgaacctgcaaccttcgcgttattagcacgacactctaaccaactgagctaataggttaatcatattttattctttaataaataaaataattgaactataatatttactacaattttggacactactcaaacattgactatagttagatgataaatttttctctgtttttccatagttatgcacctgtgtatcatagagatcactgtaccccttttctgtgaacgctggatgactatattgagatttcaaagtctaaaattaatcgattccgtattgttaatttaagatttactattattattgtatttttaaatgtttcattttatctatattttataaaaagaatggtaagaaaactatgataagaaatgggtgattataacctttattatgtggaatgaatatattccccaaagtatattatgacgtgttgagatatgcggaaataaggaagtaaaagaaaaggaaaatattaaaatatttagagtaataaaaaaattttaaaaaaattgtctaaatcacatgtatcctctatatgagataatcctatttaagttagatatatatgattattttaggtgacaaagttattcatctaaatatttaatataattgcatactcaaaacttataaacccaaacaaaagtttaatataataattccttttgaaagaaattaaaagttttaaaaaagattaaaaaaaatc

SEQ ID NO: 1712 - DNA, 815 bp, Glycine max
tgcatgcctgcagaaaatgtgtttgatggcatcatcaaaaagtaaatcttgacgtgtttttagtgtccatcatattccatatgtctgtcaatgtcaaattccatgtgccagttactagcgtaaagaaattaatgtaaaatcagcaacaattttgggagtttcttaactttatggagctctttgtaactgccaatggctgatgagaaaggctacattaacttttgtttttgttgtccaatattcttggaattgatggttgccaacttgtcaaactgtggtttctttgcaaccctcaactcccttttgtctctgctcatgctctgaagcacgtaatttgtatatataacttgttatttcttgtaaaacatttcatccttcccctgattgctgttcaaacttggaaacactaaaacctctgaactttgatcttttcagaaggtttaggaagtgtagaagacttgttctctaacaatggcattggcaaggattgctagggccaacctgagaagatcaggaggtgcttttggcagttatgctcatgagaaggatacgttcaatgtaggaggatacacaagcagatgcaacataccttcccatgcaaattttgaatcagatggaaagttttcatatgctccaagaattaaggaacagaactacatgaactttttcaatgagggggaatatcaaggaacgccacaccatcagttttctttctgctagcacacagacgggtatagaaggatactgagtattgagtttgagaatgatccggcaaagatatgctgggactagaagcaacaaaacccaggtgaaaa

SEQ ID NO: 1713 - DNA, 823 bp, Glycine max
gcatgcctgcagcttcgttcctcagcgcctgggcagcaacatcaaggtattcaacaaataaagagttagtatttcaaaattgtaatttctttgctaatataaggtcactcttaaactatgggtttacttaatcctataattgtaatttcaaaattgttgtctttcttcaattcttaacttctttcttaatcaccaactcgatcttataacttttatcaccaaactttagtgagatttaaaaattatatataaattgttcagtttcagtcattaattttaattttttgcaggaaggaagacaacaacaaagtagtaccacctcaaatggaagaaggggcgctgctattcccgccaaggaacatagaaatggacatgacacgcggcatggtcggcgacaaagacattgtgacaaagaggttcgtgttcaacgattccaacatatctaaacttcggcaaaaaatggggtgcttcaatttcaatcccacgcgtgtggaagccgtgacagcactcatatggaaatcatcgttggaagcagcaaaagcaaactcagcagaaggaagatttccctcatccatgatatcacacgcagtgaacattcgccacagaataatggcctcatcagagcatcattcaattggaaatctatggcaacaagcagtgtctcagttggtggaagtggaagaagaaaggggttgtgtgatttggcggagagagtgagaaaaacaaccacagcagttgatggaaactatgtggctaaacttccggggcttgaggtttattaagggaatgaatcttttaaagaggcaagggtaatggccttcca

SEQ ID NO: 1714 - DNA, 1363 bp, Glycine max
acttgctgcctgcgttgcctgtaatgtaaaggttttcttactcgtcgcaaacgtaaactcgatcacaatttaaagccatgatttctaacaaactaacatttgtcgattgaaaaaaggctcgagtttttatgaggttttcttgaatgttgatgacgtggcagtgcacggaacgtgggtgtccgggaggaggatcgaaccgatggtgagcgtggagatgaaggaaggtgaaacgctgagggtcggggtttcgagtagggtttatcggctgcactggattccggttagtcgcgcgtatgatttggagaacccgtttgtggcgcaattggattcggttgcggaagaggaggaagaagaaaaagaagaggaggaagaaatgcaggtacgaatacgatttcattcgctatgtttgcggagattgttcttgattcttttttctttaattaatttactttgaattaaatgttttgtttgggagttttggtaattgaataggatgagaacattatttgaggttcataaataaaatgaatcgagcaaggaagcattcacatttcaaaattagttagtgcactaggtacaaacaagctcaacatagttgatagatagttgagtctcttgaacatgtgttagtgtacaggatttgattattagtcgtgtccatgaaaaatactttattaaagaaaggtaaaatcaacaaagataaaatctactttgttgatctctacatcacagttaaacattagtcttttaaccatgaactaggtaatacttttagtgtttataaaagtgaataccacacaagatgttttatttattttgagtgtattaccattattagataaaattaattataggattaaaatagtttgttttgttttgaatgatttgagttgtaattttcatagaaagttttattgcaagaagtaaaactcactttgttgatttccacgtctaaaagagattagacattattttctggctgtttgaatggagtacttttagtgctcatagaaaagataccacaaaaggtgtgggcatgtatttatgtctagcttcattttatagtttttttacacatttttttaaaatttttttaaattttatacaagtgcaaatgagcatattacaatgattaaaaaaatattataatattatattatttttctaattattcgtgtgatcaccttacaaaaatcagttctcttttttgattcatattaatttatactaattttatatgttttaatattagttaagtcttgtgttatatttttaaaaatttgccgtgttgattgatccatgtaccaggcttgctttttctgttttctgttgtaattataatatgtttttgggacctgcaggc

SEQ ID NO: 1715 - DNA, 706 bp, Glycine max
gttgcctagttggaggaagagaactctggcaacataaagaaatacggattcaccagtttcacaatgttaaattttctttgagtgaataaatatttttgtctttgtgatcattttttaagttaatctctatctttttaaaatttaattttcattatatgtctatgtcataaatttttattcatgtaaacaaaatccttaaacctctctttctaataatgtgactgacaagggatggggacaagtcactgttaaaaggagcgactttgatagcgtttaccaacgcaagcgtccactaatttttgtttcgcgtcaaattttttcaaacttaggattattaatacaagagtgatgcatattctcaaacaaaaaaattgagagtgatgatgcacttaattatagtccgacgtcatacataaaaaaaaattaaaattgtttttttatggattttataattgaaatttgaattatgaagcgcaataagcttaaaatatatacaaaagcccatgccacagattatgagtcgctgtactttgaagacttgcattcttaagattatttgaattgactatagcagcgaaaaaaaatagtccagaagcttcattttatgggggaaaaaataaaagtatgggtaattaatttatgtatcgctagagagcatcttgaaggaataaaaagatttctgtgcgccacatcttttgttgtttcg

SEQ ID NO: 1716 - DNA, 815 bp, Glycine max
ggtaccgggggatcttctaagtcgaccctgcgtttctttaacccaaaactccttattttatattttcggtgaatttgggtatccgtgtcttaggtcccctcaaaccaattcttgatattataatagaaactggttcagatgaagtacagaaattaatctttattggaaattcttcctctgacccagtgccagggtggtggcatagtagaggaaataataaaaaaaaacagtaaaccttactgatatttgagagaccagtgctctcctcaacaatgccctcctacagttttgatgccttccctccttcccattttttttaatttttaatattcttttttaccatattttgtaactaactactgttggtctgttaacatgattatgatctattttaagggaatgatcccttgtttcgcctctatgcctcctcagtcctcacataaaccttcttaatagggggtcggagtctatcagattaactttgatagttttagtagaaatgaagaggctaaaattttatggcaatgtgtgatctatgaataaggttagaatttgtgaaagtactttgaagtaagtacatgtttggttggggttgatatgtggaaataagcactttgtttatttaatctctgttatctaactggttctaagtatggcttcctttgatttgttggaaaatggggatttacaatttaacatcttagctttttttaaaatgtcaaacacaccccttttttagagatattgatgtctgattttaattgggaaactgtaactgccaccctatgattgcggactactggaattggactaaa

SEQ ID NO: 1717 - DNA, 816 bp, Glycine max
ttgcagctcacagccacaagtggatatacaaagagcctaatgatcaagaaatcaacttcttgacagcatggcacaattcagcagattcggtgagaaagaagaaccccacatatatcttgcagcgttaaatgccaaataaatgtttgttaacataatcatctaagttcattagtcattaatttcatgtcacataattaaaagacatgatttcatgtttaattaattatgtatgcttcccaaagaaaatctgcctgtatatatatatatatatatatatatccttattatatatgctcttttacagcaccctaggacttgggaagcccagttcctgtctggtataaaggtactatggcactcatatatgcaaaccccccttggttttcatacaaaatctcctttctctattaatttaatcaattatatatctttcagaccatagctctcattgctgtaagagaaggtgttgttcaattaggagctgttcacaaggttctccctcttcttctctctctctcacaattaacaaaaaattattttacaagtttttttaatcgataactattagttgtcgggattgttagtttttattggcaagagattctaacttacgacttttttcttatttctttcttttttttcaccactaaaccaatcttatatctaatttgttttgatggaactgaaggtgattgaagacctgagctatgtggtacttttgaaaaaaaaattcagctacattgaaacatcccttggtgtgctgttgccacacctttcatctttagcatacccctacaaatagaaagaggaggaggg

SEQ ID NO: 1718 - DNA, 603 bp, Glycine max
aaaaagaatcctccgatatttgaagggtactctacactttggtctcagatttctactagcctctcttcatcagcccttaagtctgcatgcttactatgatgctgactgggctgctgaccccgatgaccgaagatccacatctggtgcagctattttcttggacccaaatctgatctcctggtggtccagaaaacagtaagtggtagcctgctctagcacagaagcagagtacagaagcttaactcaaatttcagctgacatcatgtggcttcagagcttacttcaagaacttggtgttcctacttccaagcctctcattctctttgataaacaaagtgctgtggcactagcacataatcccgttcttcatgcaagaaccaaacatatggagattgatctcttctttgtaagagaaaaagttctgagcaacaaactctctgtggttcacataccagctctggaccagtgggcggaccttctcacaaatcccctctctcctaccagatttcagtttattaggaacaaactaaaggtgtttgagctctctcaagctcacccaccttaagtttgtggaggggggggggggggtatgtgagtattgaa

SEQ ID NO: 1719 - DNA, 798 bp, Glycine max
  misc_feature (716)..(717): n is a, c, g, or t
  misc_feature (722)..(722): n is a, c, g, or t
  misc_feature (728)..(728): n is a, c, g, or t
  misc_feature (733)..(733): n is a, c, g, or t
tcaagtttcggaacattggtattgatatatctgacattgagagtgaggcagagggctgatgggtttgctcttatttgaagttccaatctttgacaccttctgtttttagatttccaagcttctctgtttgtttaatttaagctttccccttgaattgtaattgagctccttgtggtgttgaagatggaatctaggaaatgttacttggcacaaaatatagtcgcgtttgtcttaaaactccctatgtttattaaattatctgccaaaatcatatatcagttcaatctaatgattaagccgagagagccaaactaagacattaaatggaaatgtaccaaacaaagacgattagatggagtgaagatgcagaagggaatgaacgttgtggagtggttgtgatcatatttttgtaatccttcagagtcaattatggaagccataaagatagaataactgatctcattgtgagaaaccaagattttgtctaatacaatttgtatctatgttcatagttcaaaaagttctagaactttgtctgaatcgaacagatctatatttgttatataagcagttttgacaggtcgtgtttctgcaatcaagtatgatatcattgtctaaaaaggccaaatgaactattggcttttttatcttatgtttatggctcaatttgatgttttattttttaaaatgttactatcatcttttatcttatattnnttagntctagnacttntatctttgaataatcattatatatgttgtttttcaatttaatccttcatgcatttgagctaaaca

SEQ ID NO: 1720 - DNA, 832 bp, Glycine max
  misc_feature (791)..(791): n is a, c, g, or t
agggatggaaacactttcttctacaaaacaggaagacatggttgatgtaaatttaaaacccaccgtgaattcatcccaggcagagcagcaaggaggaggttgctcttgctaaagaaaggctattcataacaagccaatataagtgtttcagtaagcacggtcatggaattggctactaaacggaaagatgcagctgaggtagacatgctttcataccaatgctcgtcagtgtttagttgggggagaggggtttgcagtaatagttttttatgtaagataaaaaaaaaatggtattcatctgtttcattttatagttagtccctttatgtaagaatgcacttgcaggttatatacttgtataaaaatttatttgctggatgacgtgaaggaggcatcaccgatttttaacttactactagttaagataaaaggatttaaactggagctttgttggaagtattttcggatgacttttttggtccttttttatttctttattcagcttacttatttatctttttaaaaagtatcaagtttgataatttttttttgttcaatttgacttttcagtctatttaagattaatgtttttaataatttaaaatttaacttttttattcaattttctctcctttccctccccttcattttaacaaaaaaaaaatcattcttaaataattaacaatgttaagctcaaatgaatttgaagattaaattgaaaaaaaaatatatactaaattattaaaagatacaaatgctaacactaaaaaatataagataaaagatatgtnacatttttaaaaataaaaccttcaattggacccttaaccta

SEQ ID NO: 1721 - DNA, 2169 bp, Glycine max
atttttttcgatcaatctcccatcagacatattctttcgccaaggtttggcagtgttttctcagccgataaaattagagccgacactttttggccgaaacacaacctcggttaaattcgcacgaaaaaccctacccgacctcgaccgtaaaaggtatattatcggctggcgttggtatcaattaagaaacattgcacaatgtgggccgaaaaaaaactatttttgggacattatttccggggatgtttctcgacaaatatcagtcgaggctattttacgaccgataccgcctatggttttttttgctcaatcattgaataaaaacaagttaggaaatattcaggtaatgcaatcatgtgattcttgttgggttacttgaaacggtcagcttcctcttgcaggattttttcgatcaatctcccatcaggcatattttttcgccaaggtttgccagtgttttcttagtcgataaaattagagccgacacttttaggccgaaacacaacctcggttaaattcgcacaaagaaccctactcgacctcgaggctactatttatgggtgacataagataataaaactttctcaaccataaaactatattatcgcccggcgttggtaaaaattacaaaaacgttgcacagtgtcggctgaaaaacaaccgttcttggtaaatgatttccggtgttgtttatcgagaaatatcagacgggtgtattttgcgaccaatgtcgcctatggttgttttcttcaatcccggaataactaatcggttaggaactattcggttaacgccatcatctgattcttgttaggagacatggaccggacatctttctctaatggatttttttcgatcaatctcacatcagacgtattctttagccaaggtttggcagtgttttctcagccgataaaattagagccgacactttttgtccgaaacacaacctcggttaaattcgcacaaaaaatccaacccgaactcgacgctactaattatgggagaaatcagacaataaaactttctcaaccgtaaaaatatattatcggccggcgttggtaaaaattacaaaaacgttgcagagtgtcggctgaaaaacaaccgttcttggtaaatgatttccgatgatgtttatcgacaaatatcagacgggtgtattttgcgaccgatgtcgcctatggttgttttcctcaatccctgaataatcaatcggttaggaactattcggttaacgccatcatgtgattcttgttaggagacacggaccggtcatctttctctgcaggatttttttcgatcaatctcccatcagacatattctttcgccaagttttggcagtgttttatcagccgataaaattagagccgacacttttcggccaaaacacaacctcggttaaattcccacaaaaaaccctacccgaacttgacgctactatttatgggagaaatcaaacaataaaactttctcaaccgtaaaaatatattatcggccggcattggtaaaaattacaataacgttgcacagtgtcggctataacaacaaccgttcttggtaaatgatttccggtgatgtttctcgacaaatatcagacgggtgtattttgcaaccgatgtcgcctatgattgttttgttcaatccctgattaatcaatcggttagaaactgttcggttaacgccatcatgtgattcttgttgggtgacttggaccggtcaattttctctgcaagatttttttcgatcaatgtccatcaggcatattttttcaccgcgtttgctagtgttttctcaaccgattaaattagagcagaccaatgtcggtcgaaacacaacctcggttgaactcccacaaaaaaccctatttgaccttgatgctaaaatttatgggtgacatcagacaagaaaactttctcgaccgtaaaaaatatattatcggtcggcgttggtgaaaattaaaaaacatttcacaatgtcggctgaaaaacaaccattcttgggacatgatttccggtgatgtttctcgacaaatattagtcaggtgcattttacaactgatattgcctatgaattttttgttcaatccctgattaatcaatctgttaggaacaattcgattaacgccatcatgtgattcttgttgggagacttggaccggtcatctttct

SEQ ID NO: 1722 - DNA, 805 bp, Glycine max
  misc_feature (787)..(787): n is a, c, g, or t
atttttttcgatcaatctcccatcaggcatattttttcgccaaggtttggcagtgttttctcagccgataaaattagagccgacacttttcggtcgaaacacaacctcggttaaatttgcacgaaaaaccctacccgacctcgagtatactatttatgggttacatcagacaatataactttctgaaccgtaaaaatatattatctcccggcgttggtaaaaattacaaaaacctttgcacaatgctggcggaaaaacaaccgttcttggtaaatgatttccggtgatgtttcttgacaaatatcagtcgggtgtatttgacgaccgatgtcgcctatggttgttttcctcaatccctgaataatgaatcggttaggaactattcggttaacgccatcatgtgatttttgttgggagacttggaccggtcatctttctctgcaggatttttttcgatcaatctcccataaggcatattttttcgccaaggtttggcagtgttttctcagccgataaaattagagccgacacttttcggtcgaaacacaacctcggttaaattcgcacgaaaaaccatacccgacctcgagtctactatttatgggtgacatcagatattaaaactttctcaaccgtaaaaatatattatcgcccggcgtgggtaaaaattactaaaacgttgcacaatatcggccgaacaagaaccgttcttgggaaatgatttccggggatgtttctcgacaatatcagtcgggtgtatttgacgaccgatgtcgcctatgggtgntttcctcaatccctgaat

SEQ ID NO: 1723 - DNA, 784 bp, Glycine max
agctttcatgcctgcagcagaagtataatcagcttttccacataagtagacagcaaaaggaccacatttctcaaatgggacattttaataataatagctggaggtgggacatgaggtggaggaggaatctctttgatcatgaaagccagttggctgtgcagtttatggaggaaattagttctgttcctattcaaaggcaggtgaaagataatatgctatggttggctgaatctaatggtcaatatactactagatcagtctatagcttatgcttgaacaccacttcagtattttctgatggcaatatctttaagactatatggcagctgaatattccccctagggctgtgatcttctgttggagattacttaaaaatagactacctaccaaggtcaaccttctaagaagaaatgctattactcaggaagacacctgttccttatgtggctgtgtgcaggaggatgtttatcatttgtttttaaactgtaagctgacaaatggcctgtggtgggaatctatgcgctgggttcgggtagtaggtccccttcccattaacccggttcaccatttttatcagttttgtgaggggtttggggcaaatgtgaatcacagtacaagatgtgggtggtggattgctttaattagttctatatggcagcataggaatctgttgattttccaaggaaaaccttttgatccctgtaaagtattggatcatgctattttcttaacttggtcatggttaaaggcttagataaaaagtttagtactagcttccctact

SEQ ID NO: 1724 - DNA, 720 bp, Glycine max
atgaatggaccgaatattttcagtgttatacgaaatggtcattttgatttagatgtcaatgatataaaatgattgcaatcaaaagaaccttgcaatcatgtatggtactgttgacgaaatttcttgcacttgagccgtgaagtggtcccactgtgagatatccatttgcgtaaggcatgtctcctatatggaaaacaatgtcataattgtccagatccttgatgagttggtctgtggtgttgagagaaccatgttgataacagcatatccatttgaaccatcacgctcaacctcaaggacaagcaaacaaaataaaattttttcccccattttgttaatcatacttaaaattagagttttcattcaatattttctttgtgaatactacctttcccgtgtcaccaaatatgataacacgttgcaaagagttttggccaggatatggggatgccttaaacgaatacttcttgctccatatgtaagaatcgttagacagcacatgctccaacctgtaagtgtacctgagaagaggagcaatacaaaacccttcagaaacaaatcatagtgccataaacataaagggttagttatatgaatgttagaaaataaaataaaaatgaaggaaaataatatacgaagaagatgcacagtcttgaattaaataacaaaataacagtagcaaaataaatttaattgacacacatgaataatgcattatta

SEQ ID NO: 1725 - DNA, 1299 bp, Glycine max
acttgctgcctgcagacaagagatgctcctttgccattgctggagcaacccctagtgtccttgcagcatcactagcacttattccagctcgaagggcgtcaggtttcaaaacaagcatcttgactttattgaaaacctacaccaaacaacagttagtcacttttggctaattagaccgccttccatctcaacattagtagaagttgatgtcaaaatgacaaaagcattaatgaagactgacatcttgaaaaacaaaaataaggcaaagttcccatcttatcaaaaaaaaaaaacagtgcagaaattgaaatcatctatctaaaatataatctcatgtccgcatagcaacctattaaaggtaagttataagcacattagccaaagaaatttatatggcagatggaagaaataatagaaaccaataaaattttgcagacgttgtatagtccattgcagataaaaaaatcaaaactaagaatgggagatccaaagttcaactttggaactaaaataacacgatgaaatgtttggtaaaagaacaaccacggctgaaatactttatgcttaagtaattggaaagagatatagtgctttactgctttgcacaaactagaccattgatcaacctagtcaaaaggccagatcacaggattaccggccgaattgctggtccagtgatccaaccagaagagatacaaacggcaaacaaccaagtttatgcaaagaggaaactagttatttcatcctctcatgctattttcttttcttttacttttgtaaaaaaggtaaccctattcaaaatatatactagcaaaacaaaaacccttgaggcaaccgaaataaagacgcttaaaggattttgataaaaatcaaccttaaaataaggataaactgatagtaaatataaataagaaaaaaaatgttagttggttagttaggcagctattgtttgttagaattttataactgtaagccgttgggtagctgccaataaataaagcatagttgttgtacattttagacagactgaaatgataatcaagaagtacaatgctcaatttctctgatctgtttctaatctctctctccctctgtcctctctgttctgttattcttctctcctcccctctttgtttctgtttatctttctcacctaaattcaatatcagtggtatcaagagcacagaaacatgatcacaggtgatgatgaatgaagtggaagaacaatatgttcaaactgagcagaggcttgcaaaggttgatagactaccagacatggaggagggcattcctaatcag

SEQ ID NO: 1726 - DNA, 710 bp, Glycine max
cacgcatgcatgaaatattggaacaaccttcctttgatactactacaatgatatagcaagaatcagaagcatctagaaaaagaaccaacaaagctcaaaacgcagtagttattattattattattattattgttattattattatcatatataataatactgatgaagctaacaactcactacaatgttaggacttgataattaattaggactaattttcattaatattgccaatgatgattcttccccatcattcggtgtttttgttttagaacggagtactaattaatggtactgaaattcaaaatccattgttggctccactcctagttacattattattattattattctgaacttgatggaagtgatgctgatgatgatgttgatgttgatgttggtgttggtggtggtaccctacttctggcatggagctgctactctcacctatgtcaagttctggtctgtacacctcttcttccaactcttcctttgccactttctgcattcccatgaactccaatggcctttgtgatggcaagagtgattgttgttgttgtgttgatggtggcaccactgaggggagcttggagagaagtgcctcaaggctactcattgaaggagttatcttgagtggcaagttgaagtggcctgcatggtgatcatatagttcagcttgttgggggtgatgatgaaaggtgggtgtgggg

SEQ ID NO: 1727 - DNA, 684 bp, Glycine max
ttgtagagcagcaagccaaagacaaccacagtaagtgctcacaccatggactgtccatgtatcgtatgtttgatcagggaacccatcattctcaataagaccatccccatctctatcaaattgttccatgtactccattgcagcacggacagcaggccacacatctactccaaattccaaatcacctgtggtagcaaaatctcgatacacctgaagaacaaattttgggttcaggtccttccacttgctagtatcatggatgttataggcattcatttcatgccatggatcatgtgtccccaaatcatgtggcactgctccataaaccttgcgaatgccccaatttccctctgccagaaactttacttttcttccatcttcacacaagacagctctagcaaagtcacgctgtatatttaattcaatcctaggaaagagctcaagaagggcaaatgacgcatagaagtgcacatcatatgtgcaccacatgatatattccactccttccaagtacaagaaccttccaacatcagcatcatcatctccagatagtttttcatccgcaggatcatgtcctgtaataacagcagaatcacaggtactatccattatacgctccacaactggcccttttctgacactcattttatcttcagtttctttcacaactgtattttccaactc

SEQ ID NO: 1728 - DNA, 856 bp, Glycine max
  misc_feature (19)..(19): n is a, c, g, or t
ttcggactcgtacccgggnacctctaaatcgacctgcagatttgggcatttgcaaaccaaagccagagtggtttccttgggcgggcagagttttacaatgcccttaagcttgttactgttgcacagagtaagcgggaactaactcccgaaatggtaaaagcagcattgtatggcccggcttcatctaagattcctgctcctcagattaatttcattgccacagtatctgcaccacagattagccctgctagtcctttatcccaacaaaatcttggaccaaggggggcagctccaaatttgagcgctaaccagcaaaccctcccttctcagggaaatcagtttccgaggcctccagcttctaatctaccacctgctgttgccactcaaggaatggctctccctgaaacccctggcatttccagttatggcaaggttggtggaactccagaagtaacttcctctccagtagcagttagaggaactagtcccccatcaatggaggaggggtttgggtttggatcaaatgtggcacggccacctggcacatatcctgcctcccccataaagtattccgatcaaatggttaaggattctaaaccagtggatacttctgttaacggtaattcttctgattcattttttggaggagatttgttctcagctagctcatttcagcccaagcaagcttcttctccacaaggattttcttctggcacttcagcactttcttcagctattgttcctgtatctggaggaaaccagcattctactaggactagcccccctgattctttgcagctctcacttgcagtccagccttgttggtgcacagctttagcaagcccagccggtggta

SEQ ID NO: 1729 - DNA, 754 bp, Glycine max
gagccagtataagacatttgtggtgatcgctctcgaccatgagaagcagaatgcaaagcattctttgacaaaaattcatccacaagtgtttgtaagtaattgataacatctttggtccaaacatcagagcgagacagctgaatcttgtcagcagccccagaagaaataccaacagaaccaggtcgaacctgaaaaagccaatcataatctacaaatattaaaaaatataaagcaattcatcataataggtaaatataccaacactgaagcatccctacctgattgaggtaagtaaccttgataaaccaggtggccctaagcaatggaacattattcctgataagaacctctaaaagtgatgtccttttataaccatgaggaacatgatcagccaaagagcgtaatcgcttgtgctgctgagataaaccctgtaataaaattttaactgagttactaaagatacattgaaacaccaagtaatgttcaaaaagtagtatttaaggattttacagccacaacaacctgtcagcatcaacaacaaaaaacctaaggccctattcggggtggctgagttttctgttttccgttttaaaatgctatttcaaaatggaaggtgttcggctaaaatggttgcgagttggatttttatctgtttttaaaacagttgtcaccccattttataaacaataaaaataggttttatgttttattattttaaggttacttctatccctacctcaacgatctacgctgc

SEQ ID NO: 1730 - DNA, 794 bp, Glycine max
aagtaatgtgctagtaccaaatttggagttggcagatgcagctgaggcatctgcatcattggcctcattaggtccattggagaaggcaaccaggaagtctccatcaccttttgttggggaagcaaaagggctatcagggagattatgctccaaactgcatttattcataaaccacttaaaatgctgacaaacaaattaagggaaaatgggaaaacctgaataaatgcacaattttcttttggcaaggactgaaaaaggaattgctgcaaaaagttgtttactattccggtgcccttttagctgttttaaatgagaaacaagttttataccattcttgcaaatcacaatcgtcatgactagagttctgcttgccattgccttcgttatatccattctctccattgacaaccacttccttgccaatagcaatgttgaccggctgttgaccagcagaaactgatgcagtactagctggagcagaagttgaaccactctctggaatgaaatagcataaataaaaaccaataaattacattataccaagttcaatcgaagaagcagcagcatttaaaaatgtgagagagagataccctttggggattctgaattgatgtgaaaagaaggaacaatattttggttgaacatgttaggagagtgagtgggggaaaggaattgggcttccagtggagagtgcacgctggtgatgcttcttgatgtcaagaagttgcagacccatttagcctactactttgcagctcaggagcttgctgcaaatcagcttgctcctccagctt

SEQ ID NO: 1731 - DNA, 854 bp, Glycine max
cttgcatgcctgcagcgcctttgcatctctgcccacgaagaaatacaacatttcaccacaaatcaacgttacacacaattaatttaaaaaaaaaaaatgagattgcaaagtatgtgtggtaaatcacaacaacccaacctttccctgcgctgttcaggggtcaatccatcatctttctgcttgcctttagcaccagttctagcctgagccctttcgcgatcacgatccctctggctaccgcgtgcgctttagagttaattgaaaacaataacaaacaaaacggcttaacaaaccaaaccacgaataccccgtctgtattgtggcaaaggaaacaaaatttgaaaagaaaaggacaaaaaaaggtaaaattattaaaattgtgttattcttgtgtttgtttccatggatccaaactgaatgaaactattaattgcggtaaaaccaaaaagatctacaacaaatgggggtagcggagggtgaaatgtgatttatttttttcctcgaattttctaacagaaagtcaaccctatccctaaattaacgacaatttgtgaaaaattagcagtaaaatttcaacggatcaaaggatatgagtcattatcgtagatcgattattcgagaacgaaacgagcccggagacgaggggaaaccctaaaatatcaaaatcgggggaaataaaaaatacaattaacgaattgaaacaaaaatcggagaaaggaacaaaatagaagaaagaaataacagaatgaaaaaaagttcctacctgatcgaaagaaagaagaaaacacgatggatgctgcaaagtatgaaaacgtggaaagagataaataggatgacatgtagcgggactaaaa

SEQ ID NO: 1732 - DNA, 841 bp, Glycine max
  misc_feature (786)..(786): n is a, c, g, or t
tctcctcctccggcgactcctccaccggcaactcctcctccggcgccggttcccgtgagctctccccccgctcccgtgccggtgagttctccacccgctcctgttccggtggcggcgccaaccacccctgtggctccctctccggctccgaagcataagaagaagggcaagaagcacggtgctccggctccttcaccgttgttaggacctcctgcgccacccaccggagctcctggacccagcgaggatgcttcttcccctggacctggcactgctgccaacgatgaggtacttcttgtctcttttgtacaatgtgcaatcagatctgagatttttttcgttggagatctcacattcatgagtaatataaacaaaataatgtatataagtgaaaaatattttaccatcgagtatgtgaatcaacttacacgaaaacatggatcaactcacatgaaattgtttaagctttttaaagcttaatccgtattcttaaatttgagtgattaggttaaatattttggaagggaaaatttgtgatttaaaaaaatgaaaaataatttttcactatgagttaaattattgaggatgagttcggttgaaatccaagtactgaaactcgtttgaacttaactgagtttagggttttacacttttactattactacaccaaactgaaagtgaactcagatgtatgcttacgatgtggccacgcgccaccattgacgcatggatttggttacaaatttagggagccttttaaaaaatttactactaatttattacagnggggagtaatctaagattttggttaatggtaatcaataaatattaattacttctt

SEQ ID NO: 1733 - DNA, 827 bp, Glycine max
  misc_feature (802)..(802): n is a, c, g, or t
ctggtactgatggcattagctctatagttaataacatgggtaattattgatcgtcgcagtcaatgacaacgactgagacatgcgatttgcgacaagagtgagaaaaaaaattatattatttatatttgtcattattttcttttttcttattctttttgaagatatctttcttcttactcaaattttactgttaagtgctaatggtaaaagcaataatgatagaaacaacaaaaataatagagataaaccactgcaaaacatgaaggtgcatccaagaataatgattcaaagataatgaattgaaaattaaattaagttttaattgtatgtaaagtgtgaattaaaaagtaagaatggttaattttactatctatattgtaattacataaaatcagctcctaaatttaatttcaattctactagaaaattcaaacataactttaatatttgaaggtataattgtgatctctaatctggtgaccactaacagaaaagccatcatccatctctcaagtctcaacaagtcccaaagagtaataatgatctaaacccaaaacgaacgagacaaaaggccaagcaaagaagcactagtaaggacaacgacagcaatcgaataataagggtctgaaggtaacaatgtaaataaatgtaatgtgtacccaatacaggctcaaaagataaaagaaaaaaaaaggaaataaatgatacaaatacaagaatttaataacagcacaaagcctgtctagaagaccaaaacaaggggtagcccaacccaaagctaggggcctcctagaaccttctncagcacatagggtggtctctgctcc

SEQ ID NO: 1734 - DNA, 843 bp, Glycine max
attgctctctattctagcatcttgtgagagtgcatctggctgggaaggacccacccaacctccttttacctcattcaacttcacttcttgaggatcagttatgctagtgtttccttttagctgagttttaattacagaatcacttgtgagagttacttcgaaatcatcctccgaaacatgtagcttttcctttctaagagaatttagattgctaagccctgttgtcttagataattgcattaaagggagaaacatagccatgagagaactgctagatgagttttcattatggttttcttggctttctgaatcaactgaatcaacaggatcagcaaacacataaatctcatcaacgtaaacacggcctttgttctgaagcgagagcagacgaagagtaacagaaatgcaaggatttgcatcattaatctctgctgtagcctcataaagatcctggagacaggaaaagagaacactgaaatcagaaaatcaaactaacattggaatgataccaccatctaatgtggcccatgagaatctaaaagttaggagaagaatgcatcatttgaggtatgtttgcgtacttttcaattttcaaaataacactcccctttcctaagagatgaaatgtaatactttcttttccattttgataaaatggaccttcacttttcatgatcgagcccaccaaaggatttttcctgactttgtcaaaaccttgcccgtagcatcgctaattttgaataacctactatcaagtagaggttcaagtctagctgctgctattgatgtagagagtaaaaagaaaattgttcctaagactagttgaagtagcaaaaaacgtag

SEQ ID NO: 1735 - DNA, 1471 bp, Glycine max
agtgtcaataatggcctctccatctttgtaggcacataccttcaagtgattatgcagaatttattaagacaactgaacaaatacagagctatttgattggctcttgacatcaatgcaaaaacaacaacaataagagacaagaagaacgtgaaccctttaaaacaaaatggaacacttggctcaacaacaacagtactggatcataccagtaatacatgtcaatgcaaagatagattctgctaactatggattcttgatcaatatataatatgtatccttaatatttgaggtaggaaagaatatgagagaataaaaacagaatttatatgaagggtgattataaaggaataaatgcagaatgcaatttataagaaaaaataattaagctaattatatttcttaagttgcaatgtacgttttcggacagtggaataattattattattatgttatcaccaatgtgatcccaatttctaacagtataaatgttcagatacaatcttaattcataaactgaaataagagatataagttccatgaaaatatggattattttggtttagtccatggtagtattgtaagaatggcacgagtcgtatctcgatacgcaacgaaatagagtctcagcaatacaaatcgcttgacgtatcgttttgaagcctgaatcggtgctaaatcgcatgaatcgcttctgaatcggttgattcgcgattctggaactgtctcgcacgattcaagttcgtgggtcgcacttaccaaccaggtcgggtttgcgcaacccgtttgtgcgaaaaggccttcgggtcgagttttgatacaggcttaggaaggtagttagttagttagacttgattctgttaacttctgttagttggaaagtagttaggcagttagtggttagaagctataagtagcaattggcggttagaaaacatttggaacatgtaatcaacctccttgtaatttcttcctctaataatgaaaagcatgaccaccatgctcatcggaattcattcgcttcattgagttcccttgtctgtccaagaacttagaatcctttagctgatttcctagttctgctatatcaattggtatcagagcctgttctttccttggtgatcaagcaatggcagagaacacgcgcacaatcaagcttcccttcgtgaaatggaagaacgtctcagcagcaaaatggaatcaagatttgtcgagctcgttgcttccatgcaacaaacaatacacggaatgtttcagcaaaggcaacaagattctccagcagcaagcaatccacctagaggtgagagatctagcccctattcttgtggcactcgattggctaggttggactttctaagattcaatggtgaaggaataaaacagtggctgatccaatgtgaaacttttttttcggttgataatacacctgatgaattcaaagtacgtttagcagtagttcattttgaagggaaag

SEQ ID NO: 1736 - DNA, 1667 bp, Glycine max
  misc_feature (1650)..(1650): n is a, c, g, or t
atgatttagttccatgagatttggagattcaagccaattataggcagaaacacacagagcaaaaaaaaaatcttgaaatacggaacgacaccaccaagtttcaagggaactcattagatcttacaacaataagttttgttttttttattatttagtacttttatttttcttacttattctgtttaactttttctttcttgagagtctatccttgtagtgttgaatttaagaaaaacttattccatgaaatttttttaaaaatggaagagctttttaaggtgtgtaatgaatttctcgatggcacacgatcaagggtgggaacaggagttaagtcctaacaatcaatatgaagaagaaagaactcctaatcttgaaagtgtgtttgaagaattcatgtcaaaccatgctagcgcaaaagctaattaaaattcaatgaaaaatcatgaaattcattttggcaagagctactcaatagaaaactttcaagggggacacgagttacaaccttactatcaaaatgaagcagaaagaggttccaatctggataaactgttgatgcaattcatggaaacaactaaatcaactcaacaagcactccaaagtgtagaaatccaggttggtgagatggcagaaacagtaactcaatttatgcccagacgagaaaaatcctttgtaggttgaagctcaagagaaaagccctgtaaaagagcatgagtcaagagaaaaaaatgaggagaaagatgaggaacaagcccaacaacaatgggagaagtattcaatagtagaaaaccaacaagaaagtattctccaaatcaataaccttcctcatcaactgattgacaagaaaagaaggcaaggagagcacgaggaaaccttaagtgccattctttctttaatcactaacacctttcttgaaatgatttggaatgtacttccagactacatgaagttcatggaatttcttgctaaaaggagaaactgcaaggacgatgtgttctatgtgactttcatgccaccttgaaggcattaagctatgcgtcaagctaataacgttaaagaagcgcttcctgggaggcaacccagttttaatttctgttatctttattattcatgcattatatcatgtggaacttgctttataatctgtacaatggagtatattagcttatccttgaatgttagatataagggtttcaatttgttaaggaagggactaaaaaatggattataaaacattttctgaaaaaatagtccttttgctaagcacaagccctcatgctaagcgcatctttggtcatgcactaagctgagagtccaaagcgcttagcgcccaacccttgcatctgaggctgatatgatccgctaagctagccaaggctgagctaagccaacttcaattcgacctgaattcggctaagctgcagtctaatcactaagcccatcatacactttggctaagcgcgagttgttgccgccaagctcatttttttgcggccagaactggggctcatgaagctaagcgccagtcatggcggcaatgtgagtgttaaacaagtccttatcagctaagcgcatgctcctctatacttaagatgctcattttagctaaaccagccagagccgggttagcgagagttacaatttttgtantgcaggctagcaagtat

SEQ ID NO: 1737 - DNA, 1039 bp, Glycine max
ataacaagaatttacataaaagaacttatgtctaaagcaaagtctgcctcttaacaaaaagaaggatataaagaggaagataggaagcattggaatgaaatacaaaggatcaggcacttccatttgttgaatcaaactatgatctgctgtggcttttattttctgaatgaaactgtgatctgctgggatgttcatttcctgaatgaaattgtgatatgctgtggtgtttatgtgtttcctgaaattgtgatatgctgaggtgtttattgggctgactccaaacccttttaaccccacgcccctctgatgagccaccgctgctgccattgcttcaaccttgattttaaaccttgtttgatttttgactctactgtttaggtagcgagaacatcgttggtcataaatcacacacacatgatctgatgcaacccagacaattgagtcagacatgtagatgtcgatactatcctttttattttcgtcctcatcatcactgacagtgatataaaatgtaaatctgtaacccattattgccttcaccataggaccagagataacaaagctgaaaatgaagcccaattgtgaggagtgtggagtagaagagagatcaacaattatataatcctttgttgttttatactccaatcactctggaacgcttcttcctggatacacatactttacctgatcagatccataagtacgatcataatcatcaaaattttcatctggtgcagataaatgttggtatgcaaatttcctcaaattaatatgtgtatttagtttaacagccttgagagaatcttcatccaatttcaagcaattccaaaacagaacttcttttctgttttcgttgaattgttgagcaactgatggaaacaatacagtcttcaatgctgtgcaatctgtggcgtcagaatttccagggaagttggaagctctgttagtgtacaaagctccttagacttgtatacattcagatattgcagtcttgtaagcttcttgaagcttgaaggcaagctttcgatgccactttctc

SEQ ID NO: 1738 - DNA, 842 bp, Glycine max
  misc_feature (18)..(18): n is a, c, g, or t
ttgaacatgctaacaaanacaggtcctttcctttttatgcaccatgccgttacagaaaatgtcaccgcgcttcctgcaatagcctgcaatattgttttccacacacgatacgaatgagcatagcaataaatcctcgagttggtttacaacttgttttaaaggtttctaatatgtgcttactgaatagaatatacagatgagcttatcgttggggcttattttccatacatttgaatctctgactacaaagagagaaagtatttcactttggatggttccaaacaggcaatagtaggctattatggttgattgagatgaatattctttcagaattactgcctgcaaacaagctcaaccacatcactaaaattaaagaccttcgcaactatttagcttagtggtctaaatattaggaatctcacctgagtaatattccaggctgcaaaagaaacagaggcaatggcaaatacgagacccccaatgacccagttactggtttcatccaacaaagatggttgaattcgaaaggtgatgataaaactacccttataaagggtaacaactaatgctccagagatggacagcactgcgcccatgaccttgatctggcttattgagcttccaattttcaacttctccatcatataagatatggtttttagtcaaggcagtaaagtaatccaattgttatgcttatataatatcatagtttctgtattgccaacaaccatggtaatgatagagagtgtgttgctagcatttacctgtacttatagttttagttctaatgttgaatgtaacaacatatgctttataaaacctggattgtaaatgtattataa

SEQ ID NO: 1739 - DNA, 753 bp, Glycine max
attcattttaggtatgaaatagagaaatcctctcttggtgactgtgcttgcaagtgtgatgcttacattggtattatgtggcttaagagctcgaagtttcagcagaggatcaacaggaacataactgccaagtttaaccttcgattgaaggaaatatttgaactggttcagaaagagattttattaatgtctcagaactctcatggataaggatatgttaggcagatagaataaactatatcacgccatagaagtgtttggagatctctaagtttatgactcgtttagtctgtggatttaacggcgggcaaacatgtagcaaattaagaaatcattaaggatcatcatgatctccaaaattcccaagaggtagttaatcctctaatatatcattcaccaaaaaaataatcatgatctccaaaaatcttctataactgaattttattaacccttttcttgtaaattgaaacatttaattaagctaagtcaactgaaaaatttagttaagccaagtcaatggatctacgtggtggtattaattggatcgtgtagtaagttctttatttttttgagagaaatatagtaagttcttatagcttctggttatagcacaaatgttgatctatatctataacaataccaaagaattttgtcaaaaaacacacaaagaaaataaccccattcttctactcttccaaaatttgcctactatttgggactttggtcaaagaaaaagggaaatggtagctttgg

SEQ ID NO: 1740 - DNA, 784 bp, Glycine max
ttagttgatcttcgaacagtgctttgcgaaaacgacttgaggtttttgcagtttgagttggaatgcatttcagtagtgccaaaagcagattgtcttatagttaaccttaggccctccaaaaaaaggtcctgaatttttttttactactaatatacctcaaaaaaaatttattgtaaaattatatttaaaaataaattttaattaaaatattataagtaactgtaaatttttttattgataccataaatattaatgagtaaaaactcttcactaatatcataacaaaaacagaaatttaatagttaacagttaaaaaaatttaaaagtgtttcttattttatgagtaaataaaagatatttagacctctaaactccatgagtcacccatttagttaacattgttcaagagttggaaactggttacaacgttgattacttaaattggctagattctcaaccagtcatgtctgcattatacatttctctcggtagtttcctttctgtgtcatgtacccaaatgaatgaaattgttacagctttgaacacgagtggtgtttgttacttgtgggtggttcgtggagaagtttcatggttaaaagagaaatgtggggataggggtttaagtggtgtgcctttggggtgaccaattgaaggttttgtcacatccttctgtgggcggggttttggagccattgtgggtggaattcaactctagaagctgttttttcctgggggtccaatgctgacatttcctctttactttgaccaagtcccaatagtaggc

SEQ ID NO: 1741 - DNA, 1491 bp, Glycine max
ttggaatggctgctacactagcatctgcttgttctgttcctttgacatcggttctacttctttttgagctgacaaaagattataggatactgcttccactcatggtaatccttcaatagaattctcttaccaaaaaaaggaaaattactgtttgttgcatgtgtagttttctgctgttctagtagttcctatgactaccaaaatgagttaattgtaaatatctttctttttggtagctgaattgttaaagatgattggcttactctgaccatgattcctttgtgtcactgatggttatccataattctatatgtctgatatttacaccatggcaagagaaattgtttctttatgaatccatggctttgttgtattttgatctggagttgaaagtcaaagtatattaacatttatatccatgcattgaaagaagaattgcatacttttctcttttttcaagttcatatgtatatgtgtagccattctggtatgcaacaattgcttatataaacaactctctttttaatgcaaccttctctctttttcacgctaacaactttaaccctacaattctttatgatttatgacagttgtttatttttatgctgctccctctaaaattgctctcaaatgatcttgcatgtttcttaaacttagtgtggttagacatgatctattgtctgtgaagtgcattagcttttatgtggtttgaattcataaattcatgcattattctctctttcaaaatatcagttgctttaggaagtttgttttgttacagtttatctgttgttttagaaaatgaaggtggtattaattggtatcttcactaaatggaatgagagggagcattaatggagtgatgggtgttttgaatattttagcaaaggataaattagtcaaatgcagttaaattaatcaaggctattttatagatttttttaattcttgtgtaattatctgaaacggcagatattttaaatcagagaaaatacttttttttcaactactccggctttgtaatgcatgtagaattttctatcaaccagaacttgtggctttaattttgaacttcaaccttcttgttttattcaggtttcccatctcccttaacttgcaaattgtgcatctttttattgtagtgaaaattgctaatatttaatgttctcatatttgtcgtgtgaaccttgcccttagggagctgttggattggcaatatgggtaccctcagtgacaaaccgggtgaaggagagtgagacacctgattcaagtaaatcagcaagaggatactctccaatttcacatgccggatatgataatgaagataactggagacaagccaatgatgggaatgatttagaactccgtattgttgatggcactaatcttgaaccaattgataaggaactgcttctggacaatcttcaggttgagaaaagatttttcgcatttccttctgatgactgtcatttccatcttctgatgttaact

SEQ ID NO: 1742 - DNA, 1553 bp, Glycine max
  misc_feature (1544)..(1544): n is a, c, g, or t
tatacgaatcggactcgtacccgggtacctctaaatcgacctgcagtcagctatgtaacagcaggaaaattcaagatccaatggtttaaatatttttgtgctaatattccattaactttttaatgtatgaaagataaaacttaagggtggagattttgtgcacatgcttttgacagcagggaatcccattccaacaagaaacaaagacagttgaagtcaatccaggtaaatggggcaaagcacaaccacacacaaaggaaggaggatgaggtatcaagaaacatccatattaccgattccaactatgactggtacacctttattctccaacaatgcctggaacaaagataaataagcatatagaattttatcaagcatataaatatgcatgtcctatggaattgttagcttcaaaacatgaggcacagaagaaatttacaggtttctgctccttacttgtattgcttgaactgccaaaagcaatcccctatccaagtcaaatgaatcaggcattgaagcaagcctaatactatccctgaaagatgaagggtctgtggttgcttcatgagagaagtcttgatataatggaaatcttaagtaagcatgaaggaaattatctccaaaaatagatacattctccaattcaaggaaaatacctaggactgagttgtcaggctgggaagaatctgaagatatgaaatgccattcagccgcaacaggttccattttagattttgtcggggatcgagtccacggctgaggtaaatcatctatcccagtaacaaggttaggggtaacacgaattggctttggtgcagcgatcacagtttcttgactaccagccacagttgtattagacacaagtggtggtgtactaagacgaggtacacctgcatgtgaaagtgagaaggcaaaacaacaatcgcacaattcattgttaaatacaagtcaatgaaacataaggaaattatttttgtttttatctataatctataatactataataaagggaataataccctttttggtcttccacaatttattggaccacttttccctttaagaactccctaaaccacccactacaccactcactatttattttctttcatactctcatgtcaaattaattatattaaactgttaaacaataaaaattgttttaaaaaaattagcatttataaaataaaattaaaataacaatgtgtacagacaggcactacatgcctgtctttccactgggcttgataataagataatctactgattagacaattcaagttgtcataaagctaacagaccaaaaatgttgtcctcactcatcaaatcaaacaaatattcctattatagcagtcatcatcacataaaagaaaaataacagaattaattaaatgtgcataaactgtattaaagggagagagcatccaaatccctaccttttctttcaagaatcatttccagatatgatttagtaatccaaggtccattaatacccatccttaatgcttctgttccaacagtctgcaggtcgatcctagaggatnccccgggta

SEQ ID NO: 1743 - DNA, 870 bp, Glycine max
  misc_feature (785)..(785): n is a, c, g, or t
cttccggcaaggcttctgttgtgttctgttctacatctgtcttttttctttgttttctgttcagtcacaatggcttcatctggccagccttagaggcttaagataatgatgatgatgatatttgaatggatttaatatttagtagttgttcttagcctagaggcttatactttgtttgatttgatttgatggttttgtttattgtaattcagtaattgacaatttgacttgctgtttgctgttttgattatgcaactttatattttaatcagaatgtcttatatttaggtgtttttactttatttttcagtggtttgattagagttctttttcattttgcagcctcatttttacattccaaaataactaactgtttacttagctagttgcaacatctgatagcattatttattttgtggtttgtgctttggtggggttttagttctcataatttgttctcttcataatggtcgatctaaatcctaggccgatgtaaaaattttcttgttagcagagaatttcttatcttagtttgtagatatttgatgctccatcatgagtatttctgtgactgcttatttatacagtgatttttttttatggagttataacttcctttcaacctatttgtgaagtttactccctcttttgtaaaactaatactagtgacttggcaggtaaaattgttcttgtctgacgattacccctcaatagtttggtcagaaatcacaagatcatcttcagccaagacatcatcaatgttactttctagtattaacaaactnatgatttgccccccgggtttgaaagcagtcatttcctaacccacccaaggttgaattatccaacattccctctgaaaaatgggaa

SEQ ID NO: 1744 - DNA, 1457 bp, Glycine max
aggatatgtatttgctgttagtgtccacagagttcagcttcttcttcaggtattaagtgtaaaacgctttcaccaacagcaacagcaacaacagcaaaattcaaatcccgcaccagaggaattaagtcaatctgaaataagtgaaatatgtgactacttcagccgtcgggtggcttcagaaccctatgatgcttctcgtgttgcatcattcataactatgctcactttacctgtggcagtactgagagaattcttgaaattaattgcttggaaaaagggattatcgcaggcacaagttggagatgttgtttcagctcaaaagccacggattgagttatgtcttgaaaatcattctgggttgaatatggatgagaactctgagagctcatctgcattcagaagcaacatccattatgatcgcctgcataattctgttgattttgcgcttactgttgttcttgattctgctcacatccctcatgtcaatgctgctggtggtgccgcatggttgccatactgtgtttcggtaagattgagatattcatttggtgaaagtcccaatgtatcatttattggcatgaatggtagccatggtggtagggcatgttggttacgtgttgatgattgggaaaaatgcaaacagagggtggcacgaacagtggaggttaatgggaactcagcagcagatgtaagtcaaggtaggctgaaattaattgcagatagtgtgcaaagaaatctgcatatgtgcattcaagggctaagagatggtagtggggtcacaaccagctctggagcaacgtgattttgttaatagcacaaatcatatccatctatctctttattttgggttagtgctgtcaatattgcgttttagtttaccatgatatgaaatggtgccatactcagtttaagcacgtccccaacatcctagcatgtctcttctgctcgtaggttatgcttatgcagttctattggagatgagcttttgctgtaatggaagaagtgcacaggtgattacagacaattttgattaaaaaaaatacttttcatagccaagcttagatttgcgggcaccaattttagattactaaccaaatatataaaacgagtattcaacgtttctatcttcagatcattaactaggttgtacaatatctttgctgatagtgtagtatcatggtataacttcttgggtggtggttattgttattgtacagatgacatcaaatgaatagattagtaaaggaaatttgttacgctcgatctccatcgacaatgaacacttgcaagataaagaccttgctgcgtatttaattttgaattcatcttgtctttggcatgctctgtctcaaccccggttgctttaatgttatctgtaataaccccattttgccagctgctccttaattgtgtaacgtgtatcgttttctgaccgttgaaatatctgcaggcatgca

SEQ ID NO: 1745 - DNA, 1554 bp, Glycine max
actaaagatttttggagagaggcacagattctgtcaactcttcaccatccaaatgtggtggcattttatggggtagttccagatgacccaggtggaacattggcaacagtaaccgaatacatggtgcatggatcactgaggaatgttctcatgaagaaggataagtaagctaacttacgtatctaacttgctaatgctaattgtaaaataggcatgcaatttatcactcttactctactatactttgtgcagagtgcttgaccgtcgtaaaaggctcctgattgcaattgatgcagcctttgggatggaatatttgcatttgaaaaatattgttcattttgatttgaagtgtgataatttacttgtcaatctgggcgatcctgaacgacctgtatgtaaggtattttgcagcagaaacaataactcttttttctgacttgtgaggttttaaacaagttattctcctaaacatttgttgtaatgataaataaaaacagaagttcacagctattgaaatcattttattgctttgttttacttgttaaaagtaacttttcccaattattgttacaaatttaatcctagttgttatccaacttccatactagttattagcttttctgattttctatatctgtctagtaatctgtattttctctatatccttcatatttcccatagaaaaaattttgaaagaaaaattattggaataacccccttggtggatgtctgttcataggttggagattttggcctatcccgaaattaaacgcaacacacttgtttccggtggtgttagaggaacccttccatggatggcacctgagttactggatggtaacagttgtagggtatctgagaaggttaggaacttcatctgtcttgtttatttactttgattttgaccaggcactcgcaggtggacagagcaagcactgtcttggagattgtaatattgagtgtctttctattcttatctcttgtaggttgatattttctcatttggcattgcaatgtgggaaatcttgaccggggaagaaccatattctaacatgcactgtggcgctatcataggtaaggttttgctatgcacaactaagacctctagatatcttctgtcatgattcgtgtggaagtcacttattacaggcaactgtagtttattttgcagtttagccttaataaacatattgcttgttataaaaaataaaaaaatacaatttgcttgccaagccagacatacctatatggttgttactttgtgcatttttagcataggtgtgatgatatgctccaaactatcatgagcatactgcttcatcattgaagcattgtatttattcttatcaccactcaacagaatatgtcttgcaacaaatctttgtttgaattctaatgatgtgtttgtttactttctaattatttaatgaaggtggtattgtcaataatacgctcaggcctccgattccaaaacgatgcgattccgagtggaaaaagctgatggaagaatgctggagtcccgatcctgcaggtcgatcttagaggattccccgg

SEQ ID NO: 1746 - DNA, 1345 bp, Glycine max
cttgcatgcctgcagttgctctcatacttaaggctctttccaggcatcctcagtgtacagttcttagtgtatgcacaagagtgtctttgaatatgggattcagtaattataatggataaaatataatgaatacttacaaactgttgggaaatcattcaattctttaatatgcataaggaagaagtctccaatgatcggaccatattaaccactaaaaccaggtgttaaacaggaaaaatcatatatgaaataaaataaaacagaataaacaacataaataataataaatgatagcatagacaatacacaaaccttttcaactcttgaggtaagctcttccagtctctcttcagcatcttgtgctttagattccaaaatatgaagatcaaagttgttccttctcaaggtatgccaaagaagttgtacctaagcatttccaatcctatttctcaaatcagttgaactttcaataaaatccagaaaacaaaaaagctgtaaattatccacttttacacgaacaatcaagagaagtaacaggggactggggagggaacaaagtaacatagctccaggaaccatggttggggaacaaatacctcttcctccagagctgtatactgtctctcagcatgcaatgaatcagcctgcaagaagaataacacatggttctcaaatattaaaaaaataaattaagaaggcatgccctccatctgaataaagaactaattgcaacttgccttggtcacatatactgggtcaagaaggtcaaattaagtgaataataaggtctagcaaaagatctactatctatgaataagaaaatgcactatgctttatttttattttcattgtagagactagagtggaagaaaaaccttcattgcagagagagtagaatgcagatggtgaattttttccgataattcattcattcgcctctcacactcttccaggtgcgcatccctttcctttaatcttgtgttactttcttcaagaaccgattctgcattcaaattattccaccgaatgaaacgcaaaagaacaaaaaaaagttctcaaacataaaatggaaatcgatatacaaaaaagaagcaaatataagcgcaccgcacataagatgaagtattgagaggagagtggttacctaagtgagcgattttgaggttgatttggctgatttgggaggcgtagtggtagtttggttgagtttgagcagaaacagaaagcgaagtgggaagaagaagaagaacaggaagaagcagcgccaacgccatagtgatgcagcagaagcttctctttcttctctagtcttcgctctttccctccctatgcaagagaagtgcac

SEQ ID NO: 1747 - DNA, 841 bp, Glycine max
taggggtgatattcccaaatcctagtggttttactgattaggatgacaccttcaatgcaatctagctcgttccagattcagtcattcgaggtataattcctcaatgaagattacatgtttcaaaacatgtaaaaagacacaatagataaccatacagcttgaatgttacctccaatcacaaattgtcacaaccatgtagatatattgtgcatctgttttatttgaaatcagatagacattagaagtcataaaccatcattcaccaagttaacattacaattccaatcaaaatttctaaggagggattaggagcaaagttgaatctcctctttccaggggttaatgatcctcaatcttcttcagacccttcatgtctgttgtttcaactctgcattatcagaaaattcatgcattaataatacttttatatggcctgaatagaagcccttaagatgtagataagattgtaaactagaaaatttgcacaaataagcctgctcaatttgtagtttttccaccatccaccccttttttcattccctaaagaaaaaaggtataatccacatgcaggtcaataaaatgcgtgtttggtttggcggtgagccaaccaaacgtgcgtattttatgcaaaaatcttgaagcagcataacgtaacttcagcttcagcataatgtaacttcagcttaaccaaacatgctataaagtgttaattccaaaatgacaaatgcttctgacacagcaatacacaaagtaatttgtaaattgtaatataaaattgcaactaaaattaaatgaatatcctggatcctggtagagttcccaattgacaataaaactacat

SEQ ID NO: 1748 - DNA, 1471 bp, Glycine max
ttttcaaatcacagtgcaatgcaatagcacgacacccccaacttctggcttgtgattctgcctttgctaccaagtgtttagctattccctttcgcctaaatttttcccggactgccacattcgatatgtatgcaactccagtcctacagtatttgaagaagaaaaaattacagctatcagcacaaattcagcagctaagtgaagcataaaccatgaatatcataatccaacatggtcatgtacagaattagaaaaatcagaagctaaccattttgaagggtaaaggattctaggccaatatatagagcataaaagaagatttttggcacattcagttgaaaggttacaaattaaccaaaaaagaaactgtggatgtgaaatttaacgagcatgtaatcagttatttaaccaacagctttatgctatgccgggatatcaaggctgtttattactctctttatccctaaatataagactttttttcagttttatttgtccttttttaaaagactctttccaagttctcttttgcattaattattttttaacccaaatgccctttattactttacaataaatgctatatatttaaaagataaatacattatatctcttataagaattggataaaaaaaactaacacacattagttaattaggtgtgaaagcaattaagtgaaaagagagattatgagtctcaacaaacttaaggggaattttggcaaaataatacaaattgttaacaaatttaatgttactaactatattaaccaactttcttaaagagtttgaattagttaaaagaattttatatttagggacggagggggtagttgttttgagacttaaaaaagggtaagctggatgtgcttagggtatgtatgatttagaacatgactgtggaatcaaatacttttcagaatattttatcatcttatcgatgcttggtgcagaggacattttctggacatcagttcctatgtttggtataacagtgaatatttatagacataggctatatagtttgacaaaagaggaagacataggcaaagttgcagaagtaaaaaaaaagaagatattcattaagaagcaacaagaacaagatggtgaatcatgaagttgacaaaatttaagatgcaaatcttaaagacacaatccagaagcaagcttcaactcaccttctctgtcgcaatggccccttcctaggaagaaagtctgcaacagtatccactgttaatataccagccacatatcccttgttgaggctgattttcccatcaaaaccaccaaccttgaaatcttcacttccaaataatacagtttcaccaaatgagttgccagtaacggcaaccaaacaaattctcttgcaaccgtttggtagagtgaatcctgccatcatggccaccaatctgtccattctcagcacaaaatctaatgggaaggaatattcagggaagaaggagctgcaggca

SEQ ID NO: 1749 - DNA, 792 bp, Glycine max
aatgcaaccctaaagaaactgtacccttgaggtacctcagaattctcgggttcacagattgcacagattcgaaaacaacatcactttcatgagacaaacttccaaaacagccttaagaaagagtaaacgagcctaagttttgagttaggttgatagaacctaaagcacgttttcgagaatgatcaatacacacctctcgcgcaagcaacagagtttcaacttcatcaacagagaatggatcaaatctactagtgatgagtgaaatcaatgattcatattaattagggagtccatcaagaatcaaattaagatgctcagaattggatactggttcactcttagaatgtgagtttgagtctaactcaatcccaaaagctagctcataggtgagggttgctccccacttatatactctattttggcattatatctaaccgatgtgggacttgggtttttttcaatacatcccttcacacccaacaattttggacttggtatatgaataatatgataggtgacccgttaatggatttaggataggctctgataccatcttagaatgtgagtttgagtctaactcaaccccaaaagctagttcataggtaagagttgttttccacttatatactctatcttggtactatctttagccgatgtggaaccttaggttttttttcaatattcaccaaaggaactgagcgcgttgactagattttgcacatgaagaagataataagagatggagcgattatcaagaagagatttcgaagctcattggcagcttgacaatct

SEQ ID NO: 1750 - DNA, 1293 bp, Glycine max
agttcatagccagtggactataaggaaccgatgcagccatgatttctgctgcatgtggctgccacagggaacttccacaagagggaggttcatcctcaattgatttgtggatgcatttctcatcctactatcacacacacacaaattactattgaggattcaaataaagactacattaaaaataagatttacaaattagtagttatatgaaatataaagtttaatagcatagttcgctacaaattaagtactgcatcatgaattcatgaactttgaagtcagagaaaaagaattttatggagcatatgactctgaggttcattataagtatagaggaggaaggtcttgcttcagttggtaggcctaagtttgtaacctgaaattaaatacactgaaaataaataaaataatattttgagtaaatgttgaaatagtttttatttggagctttacaggtgcattgtctgcaatcatccctaacatcaaaatagtagctaaaagttgggggcaaagagtaagacactatcttttctataaaagttaaatactacaaaagaaaaatgaaaaataattaacaacaaaacacttttaacaccataaccaaacaaccagccatcaaattagtcatagcatgaaacttcaattctctatatgctaactacttcaaatagcatagtaaagatcattatattgtcatatacacacaaaaaaaggtggcataaaaaatcatattctataggctaattaaatgctacggagatgggcttttatttaatgaaaaagatgctcttaatttgagtggaggtgctacaatctgaatatgtggggtgggaaggtcttctaaggggaggcttgaacagaaaagcctcaatttggtggagagatcaatatatcattgtcttgtgggggagatgatgaatctgagtggtctgatagtagctaaaattagtgacggtgagcaagcaaggttttttggtttgacacatggttaggtgattttagtcatgttgaaaaatttcccagattatatcttttatcaccaaatcaaaaggagagtgttaaggagttcatgtgcttttactgttaaatcagcgtatatgcagatgatctagtgggttcctctcaaattgaggtgagatgaaacaagtttggaagctatagtataaaaattcaaccaaaagggaattttcttctgtggagattcatctttacaagttacttacgaaagacaagatccacaattgcatttctggcaacacacactactacacattaatcatgtggagggtgatt

SEQ ID NO: 1751 - DNA, 1365 bp, Glycine max
aattgcggtcacccctagtctgccttaattgcagattctttggggttaactcaattgcagcctcaagggtatagtcctacatcagctacagttaaaggctttaaatagagtttataaagcttgggcaatcctcactttaaaagagttttgtgggattaagttatgccttaaacccaaattctaagagtgtgacactcaagattcataaaattgacaaatcataatattagtgcattagaaagaattttgaatagaaataagaagccctgtagggtagttatgtttccatttataaacactataaagccattaatagcaaaacgtggtagcgttttttgaacgtggtgggtgtgaccactatttgtgacaagttcgcaatagttgtgcacacgcgtagacacatttgcagcatcagagaagaaaatcaaatttgtcccttatttgcatcgagatcgcgacaattgtgcatacacacaggcacaattgcaacatcaaagaataaaatggaattcgtctcttttaacaccgttttgagtttctgtgtgtgtttgtgttttttttaatcttttaaagcttttcaattgcgcccctcccctctttttaagttctcactcccttctcaaattaaccattcttttcctatttcttctcaccattagtttcagctcttcacttctactttaagacctcttatttcttttcaccctagcatcatcttagccaccaaatgaacaaccaattcttggaaatgttgcttcatcaatcggttcagcgttggtcaagcttacaggtgacaaccttgatatggcttggaaatgaaattccttgaaggacattaacaataaaaaaggttgtcacttatgatttttgtattaagactacaaagggtggaataagtagagctatgaggcacttaatgggggtgaagggggatgttggtgcttgccagaaagttccacttgaaatcaaggaagcttctgagaaaaataaggttgtaaatgatgtagcagttgggcaggagaaagatgatgatgaggtagaagcattggaagaaatttacaacataagggttggaaaaagacttgcagcaacaggttctactcctgctgccaagggaaatactgtgaaagaccatatggatttgcatatgcctatagaagaaaacaggattgcttctttaatacaagtatcttgtatgctgttttccttttagcccttgcttctttaatacaagcattccgtatgcttgtttgtcttttagccattgtgagtttatttgatgcttctggacctttaagcatatgcaaatccatatggtcattctctgtatctctcttgacagcaagtgcaagggtagaacctgct

SEQ ID NO: 1752 - DNA, 894 bp, Glycine max
cttgctgcctgcagaagaaagcccaatccacgagtaatactcctgccatatatctcttaccctttcaaacaaattaattgtaaaagagaacttctaaagttttgcgcttggaatgatattggccgcattggacatctgccattgtttgtgggttcaattggaagattttcacagttcatagaaactatttgcatcagccccgaagaaaaaagtgatttctccatcaacaatatagagacttaacaattgtccacaatcaatatgcaacaaatatattagcagaagtgaaataggttataagctagtaattacccctgagagatggaggtgcaccagcacatagctgataaaatatatgatatgatctttccccttcattgcattggactactctagactgttcacataccaaataaaattagtgtcaactgatgtaacgagaacacaatgtagaacataaaactgttagaattgtaataaaaaaccattcatgtgtctccacctaaaagtttaagcttttgggatagatgatgcatgaaaaaattagctctgaagaagaagaattaccttttcaagcaaaactgtttatggtcatgccaggagaatcacgtagtgtcaacacatagatgcaaacatttaacattctggttagttgcaagcttttggtgggaacaaggacacatggttccaaccattaaagaggataaacttacaagtttgaatattagcaccgggagatttttccagtttcacctgaagtgaatctcaatgagctttccctgtcacatattcaacccaattattgagaaactttcagcatcaaaacatattggagatcccagctttatataaagagaatcaccacttggacctgacagcaacccttttactaag

SEQ ID NO: 1753 - DNA, 1530 bp, Glycine max
atcaataagaccttccctaccacccatggcatggaaaaagaactcttgaggggtaagtccacgtagatatgagttctccacaaagccacgactttcaggcccataatcatcttttgtgaagtgaggcaatgtacggtctatgaacccatatggaattcgcttaccctcaacgttttgttggcccacacaagcagtcatttgagaaatgttgataaaacttcctttggaaccagctgtcaccattgctttcagattgttgctctcagataaacttttttgagcactatttccagcatcatcacgagctctatttagagtctaaaattgtcaaatatgaaaattcgtcagatttacccaaaagaaaactttaataaatataacaatgtgacaagcaatccaaatgaaatacctggttcactctattttcaaatgaatccatcattgtccgaccaggttcagcctccaacttcttctcttgagcttccctaataagttgtttcactttctccttagctgctgaaatagtctgatttatggtttccatagtggaagcatcagcaattgtatcaccaattccaatgctaaaagcattctgcaaaagccagtagtttacaagccactgagtatgaccaagaaatttccgagcagcatcagggccaacctcttccctgtattcaagtagactttcagtgacgtaaacaaagaagaaaggaactgattgaaacagtttccagagccacaaagtttcacaactattatcagatagcactccataacattaaaatataaaattatttaacaaggttacttgacagttgaagtttggatcaatagaaaacaacccctctccttgggaagaggctgagctgtataggtagattgaccattacatgatccaattcatctagtaatttcaggtagaaatatttatataatttttattatactatatactgaagctgaaggaaagcattggtgcaactgttagagttgtttccatgtgactaagatgtcacatgttttaattgtggaatcaacctcttgcaaatgaaaggtaagtcagcctacaatagacctgtaatgggtccaacccttccctagaccatgtgatagttatagcaccaagtagcccattatatactgaagctgcataccaaatcacatgaatgagacttccagtagatgttccaagcgtctttttgcaaagtgttccagtaagtagctcccccttttcaattctgaccatggtatccccaggggttatggatcccctttcactctcactgtgccagctagaatatctaattagatttatttgtttaggaatgatgagattgaaaacttgcttccctgtccacaatggttctggctttaatattgcaggagcaggaactttcccatcaaaatcttcccaccacatcaatatgttcataaaaacatcctggttaaaaaagaagtttttatcagagatctaaacagcttgtacaagaaccatgaggctgaactaaactgcaggcatgcaagtcatgg

SEQ ID NO: 1754 - DNA, 816 bp, Glycine max
gtgctaaattgttgctcgtcgtctgcctgcagacagagattctggcattgcaaacagtgaaagagtttgtgaagagttcttatgataatgccattgccaggtactgggatactgatcagcagatccagggattacaagagaaagtgtccaatttgcaagatgaacttggagaaggtgttgctattgatgacgaggaagcacggtgtttgatggcagcagcagctcttaagtcatgccaagagacattgtcacagttggaactgaaacaggctatatcacttgatgagacgaaaattgagaccaaaagggtaaaggaagcgagggaaaagttaagttctctcatgaatgagttcaattatgatcaaatcaattccaaagagccaagggcaaaaggaggtgtaaaagaaatagctggaacaaaggacttggatgtagatgtggacaaaatgaatcagcagagacaggagttgcagcaattgcaggagaaaataaaagaacactttgaggctggatcctattcaactctaacagtgaaagatatggcagaaaagattgattcacttgtgaacaaagttatcaacttagaaagtgcagtttcttcccagacagctcttgtaaagagattaaaagtagaaactgatgaacttcataccgtgggttcgaactcttgaaggtgataaggaaggcttgatcagtgataaagctaaattgaacgagcaactgagagaaatggatgataagctgcgtgaggtacaggatctaaccaagttgttgaagatcagatacccaccttccaaccctttcactgaagcacat

SEQ ID NO: 1755 - DNA, 683 bp, Glycine max
tgcctgcagctgtgggatcatcaacttctatccatacagaaacatcagcaccttctctcctaaccccaggtcaattattgcagcctggaccaagtatagtttcttcagctcagccttcacaagcacctcataaggatgttgaagtggttcaggtatcgtcaacatcatctcctgagccatctgtgccattttctgctgaaactcaaccaccaatactgccattgccagtaacttcacggcccagttacagagtattcttcttctcttgatctatcagtttgttgcatgcagacacacgcacaattgaaatggttttgcttgtaattgtatgtttttatacaatatggtaacatgttggagatcagattctcataaattaaatggattaatctcattatctagagatatttagtgtgtttggacgagcgtttgtaaacttgattttagatgatctttgattttgcaaaattgattttggttagatttaagttggttttgatgagtgtttactgttttaaaaatttgattttgaatgaattaattttgtaaaattgatcatgaagtaacgagatttatttcgatgtttttatcttgataacaagtttgatgtaatttagatagtctacaaactcttcccttctgatcagcttctctggttttttttttttggagagaaataaaag

SEQ ID NO: 1756 - DNA, 797 bp, Glycine max
atgcctgcagcatggaattggtcacccagggctccagtttcttggtcatcctaatggcatgacccatggttctgatctgaagaagaattcatctcaaagtccccgttccatatttggtacaaggaatggacacttctgtgaggtatgatttttcttactacttcaatatcaatataatataaccattagaagttttacagctcttcggtattgtaattgaagattattgactgaatgtcatatacacgtaataactcaagttaaaactgcaacctgtactgcacaatgatctccaatatcccattgctcagttatgccattacctgttttaatcatctttgtgaaaatgacatcaatcatctaatcattaagttatagatagtgacaaactataatcatagcaacacgttgtttatgatttcatattatggaaatttttagtaatatttcaaaggcctgcccgtgcaaagacacatgcatattatatgggttgataccacccaaattgaactttgaaacaaattatgctcattgttgtattgacccatgctatgtataacagtatagatctgtatagagatggcttggataaaacatttttcctgtaaacctacatggtgaaattagcttttacaatgtctgtatgagcaaagagttttaaaaggtgttatgcttctactctaaaagtgaaagagcagacaattaaagtgctaagtttaaacctacttcatgctattcagcctgaaagttttcagcttcccaacaatgaaatgggagggtgcaacaaaatggggatc

SEQ ID NO: 1757 - DNA, 794 bp, Glycine max
aaagcacggcgagaagaagtggaaatgcgataagtgctccaagaagtacgcggttcagtccgattggaaggcgcactctaaagtctgcggcacaagagagtataagtgcgactgcggaaccgttttctccaggttcgtttccctttctctctcttgcttgattgtctaatttcttttgttttgtttcgctccactctaaaaaaagcctttgcttggttgttgggatttgaaggagggatagcttcatcacgcatagggcgttttgcgatgctttggcggaggagaacgccagatctcacactgttgtaaaagatatttcggagaatgattccaaggttttaatcggtgattcgccacccccgcagcctgttgcagccacggtggctgctactactgctgctgctaccaccaccaccaccactactactattacttctactacgcaggcaaatagtgttatgtcctcttgtttgcagacgcataacctaggttaggttggataattaataccttaattaggaaatcatgtgatttattttcttgtcgcctgtgatgtggttaaaagtagacaacaacatgaaagttttgttttttttgtttgtttatgtgactttggaggctagtagtttttttgtcccggattgttttttggggggacttgagagtgatctgagatttcaggggctaattaagtaatggcaatatccaacttaaaaggctttctgaattatgcattgatgaccagtgaggttcacagattcaaagcttaaaagaggaaaagatttgtttgtttt

SEQ ID NO: 1758 - DNA, 845 bp, Glycine max
gtctgcctgcagagataactgaggaaatgaagccagattactaacttgtgattgatttaaccttgaagaaatgccataagaatcaccaaactgagaaaaggaattcccaatttcagaaaatcgaaggtcttgctgtggtgagggagatctttgcatcaataattgaactctggcctcattttcaaagtagttaaactgttcagggcctttactaactgccaaaatagcaggatccataaattcaacgtcacctggaccaccaatatttccatttgagggtgtttgataagaatttctcagtaagaaagaagggtccagcaatgaattccctgtaacgggcataacattaaaatgaaaccaatatgcagaaagacatgtaaaagtagaaagaaacaataactaaccagagagggagtcaaaagcctgccccattctctcaactgaagagaaaccaggaggtggtgccctgttcggaacagagaatcctggcggtgctgaaatttgtgctcttgaaacagctgaaagtacatgataaaggaatgtcattacatctctaaacgaagaaaagacacttctataagctgtcatgccactttaacttggtgacttaactctcaaagtcagtgatctacaataaaccaccacaaaaattgaaaaaggtatgttatccaaacatttaacttgagtaaaacctgagaagtggacctttcatggggttttttgggcaatacaagtgtacttaagcaaatttttattctcccaaacgtgataaaaactcaatttttgttaatctacacacaagtttaatatttgaaattttgtggcagagtaccattagttaagtc

SEQ ID NO: 1759 - DNA, 1364 bp, Glycine max
tacaaatataagaaaaaagcaaggttaaaatggaagccgagctcaaaaaggacatgaactaagttggaaaagcataaaaaggaacgaacgggaatcttatttcacgaaagattttgccattattgactttatggtaaaagcaaaaagaaaaacttttttcaggaaacaaattttaaaaagaataatactattatggaaactttaaaaacaataaaacaaactgctggcctctttcaatgatgcatgtgctgtttagcatcaaatcaggcttatatttcggagaagaaaaaaaaatgatgtaaaattttaataatccatccagataatagggtattcctcaggagatgcaattgtattatcattatcattagtacatcccttgagttatatctttaaataaattttctcttgtcaaaagaaaaggtcagaattgatcaacatttgaattttgcatttcaggattcatcaccttgtacttgtagacttgaagttgttacaggaccacaagtagcacagaagcttagtttagtccacattgataatcattgtataagaagggattattattactaataataatcgattctttagccattcatcaagtaaatgatatatgatgattatttcatgcctagaagacacttagtcacttacatttgaaactttcactgatgttcgcagatttctgggaagagggctctcccatgtctttactttcctttgattccaaagtgcgtgcagctgccactgaacggggcacgatttcaggaggagggccaaatatgtcatttccactgagctccttggtcttggcatttgatatttgcttcttactctttgtgtccgaatcactttgcatagtcccactcagttcacgctgctttgctacctcaggtattgaggtaggttttttaggagaaatgctttcgtcagtgctgaatgatatctgactaattccattcatcgcttgctgagatgcaatgcaaccacagggaggaaaacaaatgaaaacaagaacattgttgtcagaatggagtttgattttacctttatgaaatactcatacatacagtcacatactgaaatactcatataaaattatctgttagtatacctgacacatgcgtatgcttgttctgttattcaaatttgcagaattggcttctgatgcagaatcttccccattggcagcaaatataccacttccagtcatttctttcattttataccctgagcatggtttgctgagagtgacaaatggaaggatatgttcaacatttttttttttaaataaaaattaattggtacgaacgcaacatcccctagccctaattaaataaacaataggtcctgaagaaatacat

SEQ ID NO: 1760 - DNA, 1395 bp, Glycine max
tacaaatataagaaaagcaaggttaaaatgaaagccgagatcaaaaaggacatgaactaagttgaaaaacataaaaaggaacgaacgggaatcttgttttacaaaagattttgccattattgactttattgtaaaagcaaaaacaaaaacttatttcgggaaacaaattttaaaaagaataatactattatggaaactttaaagacaatgagacaaactgctggcctttttcaatcatgcatgtgcggtttagcatcaaatcaggcttatatttcggaaaagaaaaaaaattatggaataaaattttaataaatccatccaaataatttggtattcctcaagagatgcaattgtattatgattatcttttagtacatcctttgagttatatcttaaataaaattcttgccaaaataaaaggtcagaactgatctacttctgaattttgcattacatgaaagtacaagttaatcattggtgaaccctcaaaggtcaaaattcatcaccatgaagaaccatgtagatattacagtcccacaattagcacagaagcttagttcagtccacattgataaccattttataagaagggattatacagtaacaaacaattctttagccaatcatatatatgacgattatttcatgcctggaagatacttacatttgaaactttcactgatgttcgcagatttctgggaagaggctctcccatgtctttactttcctttgattccaaagtgcgtgcagccgcaactgaacggggcaggatttcaggaggagggccaaatatgtcatttccactgagctccttggtcttggcatttgatatttgcttcttactctttgtgtccgaatcactttgcatagttccactcagttcacgctgctttgctacctcaggtattgaggtaggctttttaggagaaatgctttcgtcggtgctgaatgatatctgactaattccattcatcgcttgctgagatgcaatgcaaccacaagggaggaaaacaaattcataacaagaacatcgttgttagaatggagtttgattttaccttcatgaaatactcatacagtcacatactgaaatacttgcataaaattatctgttagtaatacctgacacatgcgtatgcttgttctgttattcaaatttgcagaattggcttctgatgcagaatcttccccattggcagaaaatataccacttccagtcatttctttcattttataccctgagcatggtttgctgagagtgaaaaatggaaggatatgttcaacattttttattaaaaaagtaaattggtatgaatgcaacatctcctagccctaattaatcataaaataaagagtaggttctgaagaaatacacatgcaggcagcaagtctggc

SEQ ID NO: 1761 - DNA, 1401 bp, Glycine max
ctgcctgcagggttgctgttaatgaagggcatgccaccacctttatccggcactaacggaattgtcactggcgaacctgcttgtgcttgtgcttgtggtgcaggaccaggtgaagaagcttcttgtccaggacgaaaaggccacggaaacgaaggagaagatggcacctctccaccagaagaaggagctggtgttgccactggagaatgttctggagccattgctgaagaagctacctctatggctagcttttgagaatcttggcatgccttgagtgacccattgtggaaggtaaagtagaaaaaaccaggccgagatggatgccactgaaagccattaactttgttaagaaaattggaaaattttcacactgctgaagataatgacaccgaaaaacattaactttgtcaacaaagttgggaaatttaacgttgctgaagacaaaggatgaggctttgagggccttactgtgaaggggttgctgagaagagtggcttgagtgatgttacagagcttgaaggctttctcgttcttgaaaatgtagaggttgtagtgttgcttgtgcttgaaaactgaaaacagaggagaggcagagtaattgttagatgctagctagtgttacctattgtctgtgaagattgcaaatctggccgttagtacttactgatggagtcaccgatggaaactgtggggctcttccactcggaagatccatctactagtattgtggttgaatgtgaaagcttgaagagtgaaggtaggagaaagagaaagagaatggggaagtgcattgtggcgaacgtggtttgttttttgaaggaaaattgcaaagagaagggtgaagaattagaggagggtttgtaggctgtgttgtatttatgtcgacaattatggaatagcaaaagaaaagggttgtggttactagttttcttagtatattaacgaatgaattaaaaagagaaaataattatttaaatattatagaagaacataaaaaaaattataaataatataatttgtatatgttaataattttttttttaattttgtaatcaatattctaaaaatactgattaagaaaaaaaggattttgaaaactgtgtttatttggtgtgtgcaagagagagagtgtgtggggaaggagactgttaaattgtcaggtgagtttggctttttgataagagtttgaatgggtgccagacatgggtgttgggatggtgtgctgatattattattttacacaggaaaaggtggtgtgattttgtttctgaaaaatctaccctcattgtgataaaagaggttaaaaaatggacaggggcacaatcacaaggaaaatttttggggcactgaagtatgatgatggggattataattctaaaatgattagtgcggtgattatat

SEQ ID NO: 1762 - DNA, 874 bp, Glycine max
  misc_feature (751)..(751): n is a, c, g, or t
  misc_feature (837)..(837): n is a, c, g, or t
  misc_feature (843)..(843): n is a, c, g, or t
aaatcgactcggtaccggggatcctctaaatcgaacctgcagttactgtttggagagttctctgaataaaacaaagagcaaaggcaaggttctggtgtgtagacatgcagagagttcaacagagtcaaaggtattaaagagcaagatagtgaaagctgcgggtggagttggcatgatacttattgatgagacagatcaagatgttgccataccatttgtgatcccttcagctattgttggaaacaaaataggagaaaagattctatcctatctcagaactacacggtttgttttctttttgttaatgaaagaaaatgagatttctgtgaagtactcttctactgtctccaaagtctaaccatgcatcctgttatgtactgaacagtaagcctgtatcaagaatatttggagcaaagacagttcttggagctcatcctgcaccacgtgtggctgcattttcttctaaaggccccaatgctttaaacccagaaattctgaaggtgacattctatttagtatgcaactgaatttctatgtatattctagatttgaaaactaatattcatcagctttaaaaaaaattgtccctcaaatttgcgtttagtttccttttagttccccaaatttagaagtgattattttcgtccagtaatttgaaaataacctacgagtcatgttttaaggttattttttgtgattttttatgtcccttgaggaccaaaagtgagttattttctaattagggaatganaatatcactttttaatttggtggacctaagagaaactaagcccaaatttgagagacaaaaatgtattcaaacctattcattattanttattnttacttcattcctggacttctgactgtgctg

SEQ ID NO: 1763 - DNA, 868 bp, Glycine max
attttttcattaatgacaagctctttcttggtgttccttaatcttttgtgccccttaattgtgtattgtgcttgaattgggacctataataatagttatcatgtacatgttcagtggggagagtggagcagggaagactgagacagcaaaaatagcaatgcagtacttggctgcccttggcggtggaagtggaatagagtatgagattttaaagactaatccaatactagaagcctttggcaatgcaaaaacattgagaaatgacaactcaagtcgttttgtaagattcctgacttgtgatgctaattctttaaattgccattcttgtgaattgctgctacattcccccactttcagtcacagaaatagttgatatatgtgaatgtgtgtagtattattcaagtatgatattgataaaacagagaatggatgaccctcagaagataaaaaatctccctgaaacttaagcttcatgcaaagacactcctttgtcatgatttaactaacagaatgaattcatgcaatcccctatcagattcccccctatattcctcaactcaattctctctcctaaatgtctaactgactagcaccctcccacttccttcacatacttctgtcccttccttttggcctaatacctctagcactttttacactttcccaaacttaggcctatgccaattacctactttggttattgatgtttaatccatttagtaatatgggttgctgtcagtttctagttgtgattctctttatattaagctgggatctcatattgttttgatgcttgaagttctcataaattggttgaatatgtggacagggaaagctcattgagattcactccagtgaaactggaaaa

SEQ ID NO: 1764 - DNA, 1450 bp, Glycine max
tctcttggcagccattgagatttttatcttgtttcttagggctgcctatttggtgattttgttctctccttgtatagctatggctcctttagttgatttttttggcactcaatttagaaaaacatggattcatgttgttcgagttacacttgaaaaagctggtccagcattcattaagtggggtcaatgggctgcaaccagacctgatctctttccaagggatctctgtgatgaacttgcagaatttcaaacgaaagcgccatcacataaatttagctatagcagaaaatgtattgaaaatgcatttggtcaaaaattatctgaaatctttgaaaattttgaggaggaacccatagcttcaggtagcattgctcaagttcatcgagctacactaaaatacaaattccctggtcagcaaaccaagcctgttgttgtagcagtgaaggtccgacatccaggggtttctgaagcaattaaaagggattttatccttatcaatcttgttgccaagatttcgtctttattccctaatttgaagtggctgagactagatgaaagtgtacaacaatttgcagtctttatgatgtctcaagttgatctttcaagggaagcggcacatcttagtcggtttatctataatttccggaggatggaaagatgtttcattcccgatgcccttgtatcccccttgtgcacccatctgttgttggtagaaacctttgaacaaggtgaaagtgttttgcactatgttgaccagcctgaaggacatgagcatttcaaaagcacccttgctcatattggaacacatgctcttttaaagatgcttttggtaaaatattctgaattctccatacaatttattttgtttgctttacttcataacttcatattggaacatctgatattaagaaaacaaaaagcaacattaacattctgaaattccttattgaaatattcttggggggtttaggactggaggatgaagttgtaaaagaataaatgatggatcctttgaggattttactaaagaagattcttgatcttcatttgaattttgaatggatgttttgttcaatttttttctttcttaaatgctttttagcatcatagagatccagaacgatccttccttttccttgcagttacaagttatatggctaatttttaatattatgaatataagcagacatttgagtgaaattatcaattgccttctcttagatatatctcttctttcaggtggataattttatccatgcagacatgcatcctggaaatattcttgtccgagtaggaaaaagcaaatcaactctcttgaagtcaaggcctcatgtcattttccttgatgtgggcatgactactgaactttctaagagagaacgagaatatttagtcgaattcttcaaggctatagcacttcaagatggccgcactgctgcaggcatgcaag

SEQ ID NO: 1765 - DNA, 1357 bp, Glycine max
gtttcagctatatggaaagaagagaatggctacacattttattaggactgtgaccaatgttggggaccctagttcagtgtacaaggtcactgttaagcccgccacgcggaacggtggtcaccgtgaagccggacaccttgaatttcaggagggtggggcagaagctcaactttcttgtcagggttcaaattagggctgttaagctttctccgggtggttctagtgtgaagagtggcttcatagtttggtctgatgggaagcatactgtcacaagtccccttgttgtgacgatgcagcagcctctggattagtggattgaggttttgggtgtagaaattttgggtatttatccatcttggataatatcgtattttaaaaataaaaaaaaaagctctatgtgcttaatagagaatgtgtttgtgaaggtgttccatttgtaagaactggaggaaggatggtttgttagagagagcgtgatggtggtgctgtcaaaaggggggaaagttattatcaaagacaaaggtatggtggaagtatatctttcatgttgtataattaagaatgtttgtagaaaatgttgtttttagaagaggataagaatattttggaaggttccttttcctttttgaatgatgctgtctgttgaatcctttgaaattttttaatatcttgttcagtcaaatatttggtaaacccatgtggatagagacggtagtgttatatcctgcaagaaacttagctggttgagcaaccaaatctttaaacgaagtgttttttgttttaaagtgggaaagaattgatttttgatggaattaattttgaattgtaaaatgattgacatgtgtatttaaattgatttcgataaatacatttcacataaaaatgtgtctatgatatagaaaattcattttggtgtaaaccaaacattccgtaggtactgcacagaagccacgctaggatcattacaacaggacaaaaaaaaactagacaaatatttggggttgtcttattttctttctttttcttcagcacttatcacgtgattgctgcaactgtgcgataaatccatggcaggatctatcaggatagatatgcattgtctgattggtgaagaatagacgtattcaggggtatctcatattctaaattttaagatcaagtattacaatgcagttaaaccaaagatatcaaaattctaaagttttagtcaccttgtaaacaataaatgaaaggttgcatattgatttcttataatatttcatatgtataatacggatccaaaaacaaaataaaatgtgtgtaattcagattagttaacgatatccaatgagtatccacctggaaccactgtgattcc

SEQ ID NO: 1766 - DNA, 1505 bp, Glycine max
gcctagacttggctgcctgcagctgctctagcttctgatgctgagcttgcaaaggcatagaatgtcctatgatgacacattcaacagtttgtttacgaaacttagaaagccagtgaatagggacaccataaataaacaggaggattgcagaagttgcttgagtggaactcgagcttggttggataatatattcttttaaagttcagacatcgtgtttccatttttcttaaatttgagtattttgaatttttaggaggatggttttgctcgcatcctcctcttgctgaaaactttgtaggtaggaatgatataattttgcatgctaggttctctacatgccattgtcaaacgggaatactcatttgttttcttgtctgtgcataagcacagacgcatttgcaaatgtctagattgagataatttttactccctttatttgattatttcttttggaaaatgttccttttttgttgtattgcaatcatcagctctcttaaacgactgttatcatgagtcaactactagctatttaatcccttttttgttgtgattagttccggggaaaatgcaaagattgttgctaggtgcacccagcattattgctggtgcacccaacattctttaaaaatgacaaaattgtctctgctaatttcttcccttacgaatcaagttgattcataagttgatttttaagacttacggatcaacttaatccgtaaaaagacttacagatcaagttgattcgtaaaagacttacggatcaagttgattcgtaaaagactacgggatcaagttgattcgtaaaagacttatggatcaagtcttgatccataagtcttaaatattaacttacgggatcaacttgatccgtaaagtgtatttttgtcttttcgtggttagtgctgggtgcatcagcaataatgctgggtgcacctaggcagcactcaaatacaaaattgatgggaatccagtcacctatcgcgatcgatatgttggacttctcgttatgggtcttaatgattttgaactgaatgcatatatatcaagattgcacactaaaagccacgaggcagctcaaaggtctactactgtaatgagtaagcttgaagtgaagagcttttgaaagttctctacgaaaagtactaaaacgttagaataatttattaataaaatatacgaggatagttaatcaagaaacctgctataactaacagtagtgagtgggtatagatagatgaaaactattggtaaacatcaaaacagaacaaaaaattgacctcttgattaagatgtattttttagaatatatgtatataataaacaaataattaaaaataattacatatgatatcacaaaaaaaaaatgtcaatcttataatattcaaataatttaaccgaaaaaagtaccccagaaaaacatctttaaatattgattaattgagaagtacaacaataaacaaccttattgcatccaagtaacagtttattattacactctgcgcaaa

SEQ ID NO: 1767 - DNA, 1433 bp, Glycine max
gacgcccaggaatatgcatcccctccccaaacatcctccgggagcttcgtcgtgtcgacgagacagctggcacccctcccgccgtgccctccgccacctccctcaaccccctgcggtgtcccactcgtctgcggcggaggatcccccgccatccccgtcgtgttcaccaccgactcgttcccaaaaacagcattctccgcctcgaactcaaaggctccggtcacaatcgacgagttgctacctaaactaaaattaccagtgacgttaaccgttaccatgcaccctggaatctcgcagtggaaccgtaccccagggaggatgttaaaattgcccttccctgctatgtacacgtcgcgggtgaggttcacgtcgttcacgatcttgcacgtcgtgtccagagtccccaccccgccgagatcgtccacgcacgacaccgacggcgggtgaggtggcggcggcggcggagccggcggggagtagtcctggtggaagaggttccaatccaaatcggtcaccgagagctcgcgctccgactccgattcgtcactcgcgaacaccacgacggcgacgacgaagatggcgaggaatcggaggcgccggaaacgaaatctagccattcaccggcggcgatagaactcatcacattgaaggaactgagattcggatttgcgaaagtggaatttgattcagacaccaatgcaatgagtcaccatcaatagaaagtatagaagaaaaataatactaatagaccaaacaaaaaccctagtatctgtgtatctctctgcgttcgtgcggaaattcaattcaatctcactgaaaaccctagaaatctatcggagacgcgcggagagaaagatcgaagcgaattggagagaagaagaaccacaatggtgaagagcgagctttatttaattctcgtggtaaaggagagggggtgttacagtacggtgcggttcatgtgaaccccagtgttttttatcaatgatctttattttctcgaatctgattggggagtgttggggactatagtggacgttaccgtgggggattttacctcggtttaccgaacctcacgccgctttaaaggagcgtccgagacacaccccgatttaagaaaataattaacggacgaaaccatgcagtgaagaggcataagttactagtcgcgttgagaacacgcgcgggagctggcgcgtgggtaacgtcgcgaggagagaggggagagcgacggcgccaccgtggagtggaggacgaatgaggttgtgccagcggaagggggattgttttgcgggggggttggttttagcacgcacgcacgcacgcatcacttgaaaattatatattattggtgagagatggttttattgaaaaataaaataaaatgcacacgcgtatgcatttggatgtgccaagacacgcagggctgcaaggtc

SEQ ID NO: 1768 - DNA, 716 bp, Glycine max
gtgttctgtttggtcctcagaagctaaagctaacaaaccaaatggccctattgtgccacttcttgttgcatactcttcactacacagcaagtggggatcaacttcactttcatctagccactccacattctctagttcgggtagctcaaacaacacttctacatcggccttaaaaaagtcgagttttaaagaaaaaccatcattcatgttgtatttaaaaaaatttgacaaattacagaaccattttacttacctgtgatgcagtgatacctgagacttcaataattgatccaccaaccagtttctcccccaatatgctaatttgtttgtcgcgtagtttttctatttcttcaattggccactgcatcaactgcttcccactttcatcaagccaaacttgccttggaatacactgcatagtacatagccaagatcattcatcatccaacaacatatgaacttctaatctatgaatatatagccctaaaataatatttaaccaaaagggttatacactgactcggtaaaaagttttacagagtcatccaatcacatttcatcatgtatgatgataagtttgttaatttttaaaataattatagtataaaactattttaaagcaattcaaatgttgattgataattaaatgatagtataaaattattttacacttgtagtactacttaggcattaaactcatatataaatacctgtag

SEQ ID NO: 1769 - DNA, 886 bp, Glycine max
tgtctgcctgcagctgtgaaacagataatcagacaagaaccacagaagaaacaaagcacacagtaaaagagagatattgtcataaaaaatgcctattcaataagtttttggaaaataattatgtagttatgtcatgtgtgtgcatcaatatacttgtgctatcctggatatttgcatcaatatccttccaaaagtttgaaaatcctggatatttgcaccaataaaaatcaaaacaacacatcggattttttctcccttttaatataattttacaacagcagttaacttaaaaggtttagtttataacatatctgatttttcagaagtttctaacaagcaaataacactcataaaaagttaaatttcattgaacaaaacaaagaaagacggattgtggacgtttagtttattgatgctcatcatgtagcagtcatgtgaaaagatgcaaattttgctttctaggactcagttgagcaatacaatcaacatatacaaattaagtcaataaacagctttagagatttttttgcaatcatcaaggttaatacctgtaaatcatgcaaacacatatttacccttattttaattaaccaggccaaaattttttactgcacagaagtccatgctcgttgaaaaaactaacaatacaatttaataaaaggaaatgtgatgtaaaacactaaaacctatcttcgcaccattgaaatctttgccctcagaaaccctgaaaatttgttttttttatgtcaaccctttccacattagcacctgagtccaaattatcttgcaaccgttccttaatttctgggattcgatccactatccaaaagtctgcaactgcattccgaaacacctcatctttctgaactaattaaaattttctcca

SEQ ID NO: 1770 - DNA, 800 bp, Glycine max
  misc_feature (700)..(700): n is a, c, g, or t
  misc_feature (719)..(719): n is a, c, g, or t
  misc_feature (729)..(729): n is a, c, g, or t
  misc_feature (739)..(739): n is a, c, g, or t
  misc_feature (750)..(750): n is a, c, g, or t
ttctgtgatctcttctgttttcaatttgagtgaatgtagtataatttgattggaaaatatcacttgctattgcttatgtgaattgcaacttatgacttatgttacttgcaagattttaaattgcagttgttttgtcgcaatcatagctaatgtaggaaactgattagagcgaatgtagtagaacttgatcctgaaatatcaattgcttgttgaacctgtgaattgaaccctgtgaaagtaggatactccaaattcgggagtccaatgcaatttatgatttacgttatttgcaaggttttaaattgcagttatggtcactgttttgtcgtgttccttgatattgaagaaaactgctgacaattgtgattactttgtggtcataggcacttcaaaaaaccctgattttgtgactgaaattgcagttgcagaccatcttttaaaaccttggttacttgtgttaccttgctagctgagagtttttgtttgtgaaaattggttcccgagagaggtaaatttgttaggaagatgatgagtgatgagccaatgacttattgtgtcatgatgacaaaggatctaaatgaatgggttttacagtttgcttcctgaaagttggcgtttgttgcagtgttgcgttggacaatttgtataggcaagagcttttaatggaccaatgcgacaaatgatgcctttttggaagcanaaattgtgtttatatttgntttacatttntagaattcanatccccatacnacggtaatgataatcattgaaggtggacatacatttgatataccatcttg

SEQ ID NO: 1771 - DNA, 733 bp, Glycine max
  misc_feature (721)..(721): n is a, c, g, or t
agagatctttcatgtcttcaacgcccaaagactcgcactgtcacagaaacagaaacagtgaaacactataaaatgctatacatctacagcaaataatgaactatatggaaatctcctgtattttacatctatatcaaacaatacacattgaaatagcaacaatgactatttcaaccattttttataagaaaaaattttacagataaaagggagaaaaaaaaaattggaaaggacaaggtatttcccaaaccaaggggaggtgtgggatactgaatcttcagcttaagcccaataattgagctgaataggataaggatatgttaagagtattataataaagggctttagaagttagttgtatgtacatttataaaaattttttttcacaatcttttctttatcaaaaattgagtgtgatcttttcattctaaatgacagcattactggaatattattaatattttttttggaaaatagattttgaaaaacttatatgggcttggcccacatgcctttatgtacataacctagtaatataaatatgagagtcactacacattggagtggagtggatcccattatagtttattgacacacctctttatctttctctctctctactctacatggtatcaagagccaggtagggtttggtgccatcttcagcagcctttctccacaaccctaaaaaactgccaaaggaggccaaccaagactgtanaggggggggggg

SEQ ID NO: 1772 - DNA, 785 bp, Glycine max
cgacttcgtagcctgcagcaagcaaaggcccaactccgtccagggacggtccagtacggtccaagatgatcaagctcaccactatgcacatttctttcgcctcccaaacctgaacttgctgcaacagttttaaaagaatattaatattaatattaatattaaagtttcctacagtaagttattatttagaataaacataaaaaaaatttatatgaatatttatttttaataaataaatagtattcataaaaatgctaaaatcaagcaagtaattttcctacaattttaaaatttgcaagaaaattacatacaaatttaaaatccacaagaaagataaactgtgtattttaaattcctgaaaaattaaatacaaatttaaattccgaaggaaaattactagcaaatttaaattctaccagaaaattatttgcaattcaccgaaaaattacttgcaaataaattatctgtgaaatttctagcagattcttttagtaaaactttatttatagacacaccactttttatgtaaaacattttgccgcagaaattgttgtatttgttctagaaaaattagcaagaaattttctatgagtttcaaaattttcaaaaaattaattatctactaaggtattatttaggaacccaagtattggaaattcacaggtaattagtaataagaaaaattctataagatatcgtaaaaatatagatcacaataaagcaagataaacgtacggggaaaaaaaaatgtaaaagggaatctatcttcgtataaactaacgtat

SEQ ID NO: 1773 - DNA, 805 bp, Glycine max
tattaggtcagccattatgacaacatcggatatattcgacaatactaaggaactcatcaaggacattgctgatgattacaaaccagcctctcctttagccttgggatctggtcatgtcaaccccaacaaagcccttgaccctggacttgtttacgatgtaggagttcaagattatgtcaatcttctctgtgcaatgagctccactcaacagaacatctcaatcatcactagatcgtctactaataattgctccaatccttccttggatctcaactacccttctttcattggtttcttcagtagcaatggttcttctaatgaatcaagggtagcttgggcatttcagagaacagtgaccaatgttggggagaaacaaacaatctattctgctaacgttacacccatcaaagggtttaatgttagtgttgttccaagcaagttggtgttcaaggagaagaacgagaagctaagttataagttaaggatagaaggtccaatggtcgaaggctttgggtatctgacttggacggacatgaagcatgcggtgaggagccctattgtggtcaccaatcaggcaccctcaaattcaatttccatatagatcaattttgtgatggataaatgtttttcatatgtttgaagttaaaaatatatattaatagaggaaatgttcgtacatgaatgattatcatttctgataataataataattttttttggaaaagttttaacaccaattttaattttttttttcttatcacgcacaccaattttaattgttacgtactgaaataatacgttagtt

SEQ ID NO: 1774 - DNA, 815 bp, Glycine max
tttgttctgatctccaaaaaattgagatgaagaaatagatttagcatttgagaacttccttcttgcttcgtcagtttcctgaatcttatggatacatagcaaagcaaaatatggtgcaggttaaatgaatttcttaaaaaaaaaaaaaccaagtagatgttttatagatgattggccacatctatttaagtcagacgagataataaaaaaatgtttacaggtaacaggaatatcaaccatgtagatataattttcaaaataagaaatagaacagttttaaccaatcagtatctttcaaccaatcattaatttaactaaaggtaatcagtatctttcaaccaatcattgatttaactaccagttttaacaactattaagatttggtagcaacattaatgtgcccaaacataatatcttttagtcagcccatgactgtaacattgcttacttcatgattatactaattcagttttaattactattaaaataggcaaattctaaatggtcctatctagtttaagttagtttctatcagtagcacttcccagtgatttcatggttatataatttcagttttaaagaatattgaactcaggtcaccatgataaacgatgcaacatagttctgatgatcatatcaagttataatacacaacttctgcaccctgaccaaaaacaagtctcctggtttttgaaattaaactgatatccctcataaaataaatttaggaagtccatgaatttttagacatacttgaaactctaatatttcatgtgattattaacatggaaagcatattaatacatgattctatc

SEQ ID NO: 1775 - DNA, 875 bp, Glycine max
tcttccccatccagttacacttggctgagaaacctcttgagaaatctgcctcaaatgacgtaaggcctgaatgacaattacaattacaattagaacaatccttggcaagtaaaaatacaaattaaggttaataaaaacagtacaatcacaggagtatagtgaaagctaataggcagaaacaatagtcttaccgccatagttgtcctttgagcaagcagcattgatgactcatacagtgggcgcaaaacttcaggtacactccatggctgaaccagcaagtcaattttaaattatcaagcaaggaacaaattcacatcttttaataaaggtattatttatttacaatacaaacctctagaaccatatgatcgacaatatgaataattgatccccctccttcgcagggtcttatcaaatacccgcttggcagcatgtctgctctaacaaaatgctgcactgggggcatagcaggaccattctgagtgttatttagtgatctttcacagacctaacattgtcacaatcacataagcatttgagttaggctgaaggagtgaaataaaactgaagaactattttgaaaataacaaataacaatgctacataccacaagactaccgtcctctaaaagtgatgtgtagcgcagcaaccagaagtcacgaccaggtgccaaagttgttggcgcatacaactaaaccatatgacacagggttgaaatgtttatttagcaagaatttcattccaaatactcatcacaattatactaatttattgagatacatcacatttagagcagctcaatgattccctatactaatttattgagaaacagattttatcattatatatattaactagactaaagtacctgcatg

SEQ ID NO: 1776 - DNA, 680 bp, Glycine max
atgagcatctggtagatcattttgttagaagtgactttctcaaaccaatagtagatgcctttgttgctaatggtaatcgctacaatctgctccattctgctgttcttgaacttttcgagtatattcgtaaggtatcattcttttatatgtatccattatggatatcattgcttcaagcaattttctactgatataacattgtataatgcaggagaatctgaaattattattgaagtatatagttgattctttctgggaccagttagtgaaatttgagtatttggtttccattcattcactgaaagtaaaatatgagcaggtattttcaaatttatatttacccagtccttacccaagcacatagttccgactcaagattatgtgattgcttgcagtgtttggataatgatgggacaaaaggtactgctattatgattgaccttcgaagacgacttgatgagcgtgctctggataaagaagaggaagactactttaatgacaggtatttatcttctctcacatgtattgttggagattttatacaactggcatggggtctcttgacatttggtagttaatcagtgacgaggaagatacaacctctgcatccatttcacataatcagaaagtgcagcaacaacaacctgtgctatccaatggagttgctgcaagctattcaa

SEQ ID NO: 1777 - DNA, 807 bp, Glycine max
tctacttgtaggagatatagaatctaagatgaaggggcaaccatggaaattttttggaaccgatgatatgccttacctggatcagctattgcagtcttctcctgtaacaccaataactaattctgactctgctcgcccccatctgagagcaataacagcatctaaacgcacaaaaccgggctctcgtcagatttggcatgttcttatatcaacttgcatttttgatatttttctttttctaattcttttatatttaagttcatgccacaataaatcttgcataatttatttttagccaaatgttatataaaaaagttgaatgatcacctgcattatagttaataaggttattgtgaaattaaagtacttacaatctaaaaccaatggtttatagaatattagattagcctgcaaaagacaaatgtattacattgtcatgtcctgtaggcttctatgaaaataaaaataaattttagtgtaagaattataattatccattgcttttaatgaacagaaaatttcttattgattaattgactgggggggaggtgctgatcttgttcttcccacttcataatatctttttattcttcaaagaaatagagcaagtaatctttatgcagtagtttggggttctgtttggttcattaaccactcattcccataaagactgtagtgttccatgaattatcgtttgtttatatggtcaaaattatgtgataagtatttatttgctactctacagtttgatactctctctttggggataaatgcttgagtactctttttcgcccaagatgcataaaa

SEQ ID NO: 1778 - DNA, 823 bp, Glycine max
  misc_feature (15)..(15): n is a, c, g, or t
ctcggtacccggggnatccctctaggatcgacctgcagtatagcacgacagggacaggattttgagacgtcttctgtttttgtttgaatcaaaaaccctaaaccgctaaacaactctcattcttcacttcttcctctgttggaatcaaaatcgaccgttgacaagtcggcttcattcgaaatccccttctccgtttggtatcgccgccgtcattaagctccgacagtgttcaattcaatgttggacgagagcaagttcgaggtacacttcaaactgtgggcccttcgaatcccttgccaacattgcaagctcgccacgcgaatcctcaacgggttactacttctctctatcttttctattcactcacccttttttttttttcctctttctgttttaactaactaaacctttcattcattctacagttacttgcttgacaagccccgagttaaacccatcaccgaggacccaacctgtgacaaaaaccgttaccttatactctccgacaatgttcacaatcaaggtatgtgtgtctcagcttttgcttctgtagaagaatatctttctttcagcggaaattcttattttttacttgatttgaattggtggttgagggcagatttatctgatattccaaaacaaaagctagatgagctcaagggcttgtgtgagattgaagttgtgccctattctttgactttagggtattcttactggagtgcaggtgagtaacagttttgttctcttaaaccataatgcagaagctgcctttcacttgggttttttttttatggttatgaaacagttgcttcaaaagtttgta

SEQ ID NO: 1779 - DNA, 1626 bp, Glycine max
  misc_feature (34)..(34): n is a, c, g, or t
  misc_feature (1603)..(1603): n is a, c, g, or t
aagtggagccttggctttataggataggcccccngagtaccaatccatgatagggattcccaccataattgctgtgttttgctgcattcaaagaagagatgagatgcagtttcctccttaatactacataaagggcacaggctgtcatttatatcaatttgcctttttcgcatattagacttagtcggtaatctatctctaattaacctccctgcaaaaattgatgctttagctgggatctttagcttccataagtccttgaatatatcatccatgtttccctcctctgagttcccttgcagcagaatgtaggcactcctagaagaatagtatccattggattcaggtttccatacccagctgtctgctgcatattgttggagtgcagtgtgtgatatatcttccaaaaaacctacagccgaggctacctcattgtcaaataggggccttctccaagaaaggttccattcccatgctgaatctttgaagctccccatttgcagaattaatttttgttgctgacgggatatctgaaatagcctagggtatttcagcattagtggttgaccgcttccagtccagcaatcctcccagaaatgaattttatccccgttgcccaccctccatactgttcactgttgaagtacattattgaattgttggtcatgggtcaccgccatcaaatcctgccaccacactgactcattattaacccttttagcatccaccagtgatctccacccaccatacttagaaaccaatattctggcccacaactccttgctttggtgaaacaaatcccatctctacttcccgagaagagctttgttgaaggcccttatgtcttttatacctaagccccctttatgttttgggaggcaaatagtttcccatttgacccacactattttcctttgctccgaccctcctccccataagaagctgcgctggattccaatgagcttatctgctacttttctgggcaacctgaaaaaggatagaaaataaatggggatcgatgataggatggactgaataagggtcactctccccccaaaggataaatggcgttgtttccatctagctagcttcctctcacactttctaattatcggatcccacagctcactccgccttgggtttgccccaatggggattcccaaatatttgaaaggcatggggaggattctgcagttcaacagttcagcagcctctctagtccattgttcagtttttcccactgcaccaaaacagcttttcgcgaaattgattttaagaccagacgccaactcgaatcccctcagaatggatttgatggtgacaacattttgcatagttgcctcgccaacaaagatggtgtcatcagcatattgaagaatgctaactgggacgctgtcttttcctactagaacttcagagaaatgattcttattaactgcttctctcatgagtccggttaggccttccgctgcgatattaaacagcaaaggagctagagggtcgccttgtcgtaggcctctttgcggagaaaattcagaggtaggacttccgtttaccaaaaccgaaatagaagcagactgagacagccatgaatccatggtanccacttactgcagggctgcaagt

SEQ ID NO: 1780 - DNA, 837 bp, Glycine max
  misc_feature (807)..(807): n is a, c, g, or t
  misc_feature (828)..(828): n is a, c, g, or t
aatgaaaaatgaactgtaagaggttgagaaggaaaggtaaaaagagaattactgctggtgaatgttacacaaaagcaacaattaccatgctctaagcccgaaaagcctacaaaagcataggattgaagttgctgtataatatcttgcccacttctcagtggcactgtacactatttccacatgtcctccacagaaggaatgaataatcagaacctaccactttgtagaatgcaatcctttgtttcacataggcacagcaaccactttgcaccagcaaatgcatatacgtcaaataacacaaacaatctgccttcctctgtatggtttgaaaatcttaagatccatttacggccatctctggggaggatttcggtgaaaccaatgtatgttcctcaccacccaactgtccattatctgaagtgccgtacagcccatcagaaaaatttctataggcggcagtctctttctctacatggttcgcttcagctgttgcattgctattctcacagcaatttctagaaacatttgactccttttctttattgtcttctctacaaggatcggtatgaacattgattgaaggtttcttaccaggtagcacagtctggctcaatgttgaacacaaggcagcaaaaacactatcttttgattttgagttttttgacaacttctttgcaagctcagggttcttaaaaggcaatttttcttttccgactgagagactccattgtcccttcatcctcttcagaagcttctggcttcttctttgggggaggcctggaatcttcatatcatcttcatcatagncaaccagtcccccgaactttnactgaaaat

SEQ ID NO: 1781 - DNA, 1629 bp, Glycine max
aaataaagaggaggaggctgcccacctatttttcagctgtagtaaaatccttcccctatggtgggagtcactgtcctgggttaacatcgcaacaacaatgccacaaaaccctcgggatcactacatgcaacatggaattagggctgctgagggaaagaagtacacaagatggaaatgctggtggattgctttaacatggactatttggcagcataggaataaaataattttccaaaatgcaacttttgatgaaaacaaaatgctggatgatgcagttcttttaatttggacgtggatcaaaaccatggaaaaggactttgcaatacattttaatcaatggtcatcaaatatcaaggatgggtttcgctcttagcagggaatgatgtgggtggcttatgtaacatattagttctgttccaagcttggtggttgtaaaaactggaaccagctaggttcataaacatttgtaactatagtaccactggtactaattttagatatatataattctatttttgctgagcaaaaaaaaaaaaaaaggtttcaatttaacatttctgaacctactttgtaaactaacaaatttcaatagctcgtaggattgttgacaacaagtttaagatagaactaataacaattttatgaccactgttcacaattaaatggcaaaagaatgaaaggtttctcaggagcctagttaaagaattcatttaaaaaaaaaaagtaaattactccaccttcccctttttttttcaagctccacttagatgtgacccacgagcaaaatcctcaaacactaactctcacgctttaaagtggcattaaatattggacaaaaggatatatgaaatatacagaattaaaaagtcccatactatttgttaggaaccaagaattgaaatgaggaagaaaataaaagattttattgactagtaagaaaagaacagaaaataggagagaaaactctcctccaagggcttccccttcacaaaggatttctcctttcccagagagctaatgctcaatctacacatgataagatctctctctctcctatccttatatcctaacactgttcttttaatatttataaaaattaaagctacttctgtgcagaaattaaagcaattagtcaatactaacctgacccgtagcaagaccaccttttcctttaccacatctcccttttagaggccccaaagcattactcagccaatctgccacatccagcttaccttgacctcctttctctggcaccccagcacaaactacagccttgttagtagattcatccgtgctaaaaaccatcacagataagccctgtttatcagccagcatcggtaaaagttagtgtttgaagttaacagaaaatgtaaatgccaaggacataaaatctcacaaagcatattcatcaatatgatgacagctactaaattggagctcccgaagcataaattgcattatatattcaacacagaatgaggccattaaatataatatgggaggctggaggcccagaaaaattcgtagtaaattaagaatcagcaattactttctggtccatgacttttgtaacagcctcacgaactgcaggtcgatttagaggagcccccgggtacgaggtccgaa

SEQ ID NO: 1782 - DNA, 1358 bp, Glycine max
tgcatgcctgcaggcgattctcgggaggttgattgccaatgacaggctggataggtgtgtggggatttatgttgaggtgaggagttcgaatgtgagggcgagtttgcaggcgctgaatttggattaccttgagatttctttgtcggagtttaatgatgtgcagagcattgaggggtatattgctcagtgggggaagcatttggagttcgcagtgaagcacttgtttgaggccgagtataagctttgcaatgatgtgtttgagaggattgggttggatgtgtggatgggttgcttttcgaagatcgctgcacaggctggtatactcgcttttcttcagtttgggaagacggtcacggagagtaagaaggaccctattaagcttttgaagttgttggatattttcgcgtcgttgaataagttgaggctggatttcaaccggctttttggtggtgcgccgtgtgttgagatacagaatttgacaagggatcttattaagagcgtgattgatggggctgcggagattttttgggagcttttggttcaggtggagttgcaaaggccgaatccacccccaatggatggtaatgtgccgagattggtgagctttatcactgattactgtaacaagctccttggggatgactataagccaatactgactcaggtcctgatcattcacagaagttggaagcgccaaagctttcaggagaaactccttgtcaacgagattttgaacatagtgaaggctgttgaacagaatgtggagacttggatcaaggcttatgatgatcctatactgtccaacttttttgctatgaacaatcactggcatctgtgcaagcatttgaaggggacaaaacttggggagctcttgggggattcttggttaagggagcacgaagagtataaggactattactctaccatcttcttgagggacagttggggaaagcttcctggacatttgagtagggaagggttgattcttttctcgggagggcgtgccactgcccgtgacctggtcaagaaaaggttgaagaagttcaatgaagttttcgatgagatgtatgcgaagcagacaagttggatcatgccagaacgagatctgagggagaagacatgccagcttatagtgcaagcggtggtgcctgtttaccgcagttacatgcagaattatggtcctttggttgagcaagatgctgctgtctctacaaaatatgcaaagtacacagtgcagaagctggaggaaatgcttttgtgtctatatcggccaagacctgtaagacatggcagcttgagaagttcaacatttagtgccaaatatgggaatggagtgcctgatcttcgcagaacagcat

SEQ ID NO: 1783 - DNA, 1465 bp, Glycine max
acctctaaatcgacctgcagcattaactccatactttgacttgtaaaccggtggtgtttcatcagcctcctcatatggagagtcttctcttccactgaaatccccattgccactatgcttctttgacttcgaagcaagagacagaaggtccttagtgcgtgattggacataagaagcagctgaggcagtaatatcataggcaagcttgatttgatgcttctgttcattatcatcacctttctctttctctgaatcatcttgagaggctgctgagtctgaggcatccataggcacacaaatggagtcctgatcaagttttgcttttatcttagtcacatcacctttcttttccaaagatgatgttacgaattcaagaccatagtttctccccaagtccttagcctacaaattatctggcaggggttacttttgtgtgtctcttttttagatcatctatatatatggagaaatattgttttaaaaactccacactactcaacaatcaaattctcaaccaaaatatattaagttttgaaaattgtttcccagacaagtgttttaaaaaccaaaaaacagaaacaactgatagatgttctctcatcttgttcaacttctccttcaattatacactctattttgtgccttgtactgccctcttgcagctatatgagcgaccttatttagttgcattttaaaaactaaaaccagctattgaaaatagaaatcaaacgccccttaaatctacaaacattgacaaatagttgataaaatatcctaccattctctgcataccttgatttgtggtatgacataagccatgctgcacaggaaagccagcttagagaatagtttggtatcaggccaaggaaccgggaccagaaactttgagaatgagtcacgatcacatgccacttcttgtccattttcctctttttcatctccttcttcataacctgccacacaaacactgtcatcttcatcacaatcacactcactattcgtgttgtgtttgcatattatatctgtttccatgctctctttaggtacttttcttctccagtatctcttaattcccgttaatctctgaacccagcgagctctatttatcatcacttcttcactgctttccaccatgttttccttaatattattgatacccttctgccccatgttcatttccctcctcgtttctgtgtcaaataagaaggagcgaagtggatttggaagaatggaaactgaaagttgaagtggaaatactattatggagttcctgcttttatgctttggttgcattgatgtggcttggatgcagttattgctagtagagtaagaccttacacttgttgaatgtttgcataataagcctttgttggagagtgaatggagaagaaatttattctcttttgtgatgtccatcgttgcagacgaagttatagagatgggaactgaaactgcaggcatgcaa

SEQ ID NO: 1784 - DNA, 801 bp, Glycine max
cccggggctcctctaaatcgacctgcagcaataaatgatttctatcccaatcccctgtatctcctttacagctctatttttccttcctcaaatgcaatatatccaagaatctgtttctaagaatagacaagacatttactccaaatatttctgtgtaaatgtgttttcaagataaagtacagtttacaactttacgcaaataatatgtagctgttttcagtgtcagtacatcatctaacaagaattttgacgtgattttatataaccacagagaacacagttagatggaaaggaatacaaataaagaaagaaaagtaaaaacaatgaaactatatgattgttatctgaattgagaattaaaaaaatactcacactaagaaacagactggagatgaatagccgaaatatggttgaggtctctgcaacgtctttagaagccattcttgtataagggcttctgacatgtaatttaaattttccattgcttccctcctggattgcatcaacaacggatctagaactgagaacttcaggatcaaacagaacatccaattcacctgaaacctgatcaaaatgaaactgtcttactccttttgtgctgctaagaatgccttctaaaacttgtgcgtcaatcagactgtacacaccaaccacccttaaaattattttatcctgctcattgctttgtataaatgaaccatcaaaaccagaatcttcaattgcgttgactatatcatctttactaattacactgggatcatattcaacttcacctgacgaagtagccaaagctaccacagc

SEQ ID NO: 1785 - DNA, 750 bp, Glycine max
ttagcctacaaacctacggattaagcgcgtgaagtcagcgagttttaagggtcatgcacaaaaatttgttataatttctcggataaacttagaaatctgcatgttacgaatttttttaacttttttttttcaaaaatatgttttaagaattatttgaacgcacaatgttgtagcaaattaaactaatatattaattatattataaaataattaatatcgttatatataatcttaaaatttttaatatatatttaatagatatgtaaaattaataataaatttgatgataattaattttaatctaataattaatttatttgcacatatgaatttttataaaacctgtaatttttatttaaaatttatatatataaaaaatatatattagatgaaaatcaattttaagtttttgcttttaattccataaacaaaaaaatgactgaagtattaattaggatattaaaaacatcaggagctaaactaagaccagtcaatttattaattaggatattaaaaagatgagaaaataaacataaaaattaaatatttattaaaaataaaaaatatatttaagtttactatttttatttttatgtggtgggatctatgtgccagtggggaacgaatcttttttagtccacgctatattggcatcccttatttattctcttttcaacgttttcatactttgcagcatccattcttggtctcttctttctttcgatcaggtaggaaacttttttcattctg

SEQ ID NO: 1786 - DNA, 1425 bp, Glycine max
ctgatcttgagccaaacatccctataaggttatcatatcggccactggcagcaattgaaccagcctgagtgtctctttaacaagctttcaggggacttgtcagtctttgtcaccacagccaacgtcctgagctcagttttctcaacactttgagacatcccgatggactcacaagtagtaaaatcaacactagcagagagaacagtcaataaaatacttgcttccggctttatatactccatgatcatatccttaatctgatcataaatattcttaggttgtccatgaactggaacctgaattatacaaggaagatcaaccggataaagatcaggaacaccattcttcttctccaacaatgtcaaagggttgttggaaatccctttgccatggcaagcaagctcttctgtggcagcagtggcagcacttatggcctgagaaatgtgtgcttcatctattgaaatggtctggccatagaactccaagacaagctctagggttgtaaaagggtgatttcggagcctcatgtccaaaggcaccctagtgcaagtaccttggccacgtggtagtttaatagcagccaaagattcaagaacactggatttacttgaagattgatcgccaataacatcaatgaaaggaagctgaatcacatgagaaccatggaagacatttcctcagcagcgaatttcttgtcctcacccttgtaattgaccacaatcataggtttgtcaggaggaccagggaaaaccttagatagccataactgcctatcactccgaatggaggcagcggaaaatctccttccacacaaacgcttagcattgaagatggtgttgatggggttgatggtgacgtagtacttggcggcgtcaccaatcaaacgttcggtgaaagcaaagtaagatgccgagcttctattacgctgatcagtggcgatgatttcgacatggtggtgctgccacaccttgacgcaagagtaggtggtgccggaattgattccgaccatggggggcagattcggcatgggtgcgtccggtggagcgagtgatttgggagaagatggagttggttggagagcagataaccagtcaaggatgacatcaagcttagcggccatctccagagacttggcggtcatggtggaaatgttctgggtgaggtgggacagtgcctcttcaaggcagtccatggtggtctcgtgactgttgtgagcgggcatggtcgaaggcaggggttccaacagggaaaacggcgaagggtggtgaaatggaagggatgggacctgtggggggtagaataagtgcagatgtgggtggtggtggatggctgggcggataggctgccaccgacagaggtggggatcagtcatgcttccagcaggttaccggcaggtcggaccaattgataggacacagaaatgga

SEQ ID NO: 1787 - DNA, 812 bp, Glycine max
  misc_feature (753)..(753): n is a, c, g, or t
  misc_feature (793)..(793): n is a, c, g, or t
cctgcaggctctgtcacaccaggggcggtttttcttttgtggtggtcgaggctggtttcctcttgctgccattgtcgagctctcaatggatggaactgatatggatgttcccagcatgagtttcctcctgctttcttcccttcttacttctgagaagacttcccgaattttgggaagtggtttggttccaagaatccttccacaaacttcatcaagatccttgtttagtcgcaataggaacttgtaaatcctatctttttccaccatttccttatacttcttcttatcttctgtacagcaccatgaaacttcttcatatatgtccagctgctgccaatgtctgtagagtatgttaaaatactccgtaacagaggactctccctatcgaaggtgatggaatatgctttttatctcaaaaacagcagatgtgttgtccacgtttgagtacatttccttcactgcatcccatatatcttttgcagtgtcatagaacataaaattttcaccaatttcatttgtcatggtgttgagtggccatgacattacttgactgttctcaagtttccatttttgaacatttgtgtcccctttcttaggacactctgaatctcctgtgatgtagccttcccttccttttccttgaagaaagatcttgactgaccttacctagttctgaccattcagtttatgatcaatgatgaggtgagtaagcccctcatgtgagctgggtcgtaatgatccaatctccccgtngacgattcatcagattttggtctcccctggcttggccggncctagtttagggatggttc

SEQ ID NO: 1788 - DNA, 1492 bp, Glycine max
caaatattgggaatgacttcccctcgcttttcattcacctcctcttcatccacattgcagccatgggtagaaattgtcaaagttctgtaaatctgtctctcatcaacagatttgatgaagatttggtctcttctcagtcttctcactcaattttcactcactgcaagtgatgatactggtcatatttctcttttttgcataaaagaggagtggtgctttgggtttgttctgaattcaaagcaaggttgtctagatcatgatttcactccagacttctggtttttgtaggaccagcagtcttgatcacactcactgacttgcattggtgagattggcataagattgccgagacgagagtgtttggttcagcgtccactacctatatatgcgcgtaaatggtgcagatctcagaagctatataaagctgcttatatgttaaattaggtagtgacgcgattttgcttttacatggacaagaaaccaaacgcgcatttaatgtttttgtgaggtgccattttggtggcgggtcaaaaaccaatttggaggcagagaaaaaaaaatagatccatctgaaccgcaatttcttgtttggtgtcatctctcaatatgtgttctgtaattggcctgtggttggtttgttcttgttgataacgggtgatgacatgtgggctggtggcagagtggtgattggaatttgtttgtgtatcagtgggtggttgaacacttgtctcattcaaactgggttggggctgactactgggtgtgaccccactgtttttttcttacattttgttaaataatctctcccctttttaactcgtttctatttgcttgctggttgtggctaattgttgatggtaggagttgtagaaaacagatgtttttcttttggatgcaaaaaattatgttgtgtatactttatttataaaatttatatatataaataaaattgtgtctttttatattatgtgctataattttaacttcatttgtgggtttcaactgacttatgcatttttcattgaattttgattaaatgttagtgatgaacaattgggtttaagattattttttcttatctatgttattgtgtgtgtgtgtgtgtgtttgcaagtgcacgcatgtatattttcattttaggtaggatcctaaagttgacaactttggattgaagtcaagctcacactgtaatgtccacacataggaaaggagagagagaagaatcagaagacagcttaaattgatttttttataacaaactaaatattatattacaacaatatccattagatgcaagttatataacaccaaaagaaactgccgtttctgtcaaaagttcattagaaggatgggtgcactattcgcccatggagtgtggagattactgtaatatgggactgacaaagttcattacttgcttgcatctataattacttgctatgatctgcaggtcgatttagaggtccccgggtacgagtccgaatcgtataaa

SEQ ID NO: 1789 - DNA, 783 bp, Glycine max
ttcctgcagaggaaaaaaaatctatagaaagatcttgctcaaaggaattcaactagaaaattaaagtatgtgtgctccctcttgtgagcatcaacatcacttagattgagaatttagcatagatattggaaagatttcaagttggacaaaggcatttacaagtttagtactacttgaagcatttaatgatccatggaatatttacttgagatgcttagtttggtcagagagattctttaaaacctactaactcatcatcaaatctaggcaatacccgcaaaatctcctaaaaaaaactgcctcgtgcttcttcagtttcgtgtaacatggaccatttaccgcattcgggataatgaaaaaagaaagaaagaaaaaaaaacaaaagtttccttcaagagagaagacgtggggagaggaagcatccagtgagattcatatcatgcaaggcccttggacacatcatatatgcccgttgacatagcaataagtggtctatagacagatataattccaattattctaatctatctccaactactagtacagctttttagaacaaccaactttacgaaaaactaaaggaaaaccgaaattaatatattattttcttcaactagttctaagaattggcctgcctatttaagaacatcttctgagattctggtatgcattgccagcactgtctactcctttctgcccattcttccctccttacccactttcttcatttatgggctctctgaaacctgtcccattccttttgttaatttttaataaacaaca

SEQ ID NO: 1790 - DNA, 1388 bp, Glycine max
acttgctgacctgcagggtctcctctccacaatcctggcaaaccaaagaatgccaccttcacttctccatcagcatgaatgccagttaaaaagcctcgagattcaggctgagctcctctccaaccccaccttggttccaccaaaccagttctgaacctaacatactgcccaactttaaagcaaggaaccttttcaacttcagtataatgagtcaacaacttcaatttacggaaacagcaagccaactccaagtacccagaatcctgtacactatgcacaacagctatacttctaacaccattcaagtcattgcttgatctgcttcccgggcttggttttgagcaaacccaatcaccaacttcaaatcctggaagttgttccacatctccaggagaaaccttccacaagctcttcctaccagggaccctcacctacaatgaaaccaacaaaatcatttatggccaatagtttaatgatgcaatcacaaataaccttgttaccaaaatgttgtatgtgaagtttagctttttgaacacacaagcagtggccaaaatttcatgtcagtataattttcacatcatgatgagatcagaaaagaaatgccagcaaagctagaaatggaaagcagttttataagaatgtctgattccttatactacaactttacatgtgaaaagttttctgacaaattccataaatatcctcaactcttaaccaacaagctacaccactaggatcagattgaataaataggcaatcaataatttgcagtcatggttcaattttgagcttggcatcattataattcaatagactcataatctatttgaagattacaatagggtttctatttgaaacttcaactttagcgtataaggtgaaaaaaatgaattgaatcagtccacccaaattaggtgaattgaatccatgttagaatatactccaatgaaggctaaatcctaggaatgtctatatggttttataagctttctagcaacagtggaaactgtactggttacacttttataagtatgatatcttgcgcaattttttaataaaaaaaaagtaaatacataaccttacattgagagcaccatccagatcaattcttgctatttttccaaaagtagagggtgattcatttgaccatccaagccgtggctggttaacagatggcatcacacgtatttcttgccccgcctcaaaatggggaactttctcaacatcagtgactgagcaaggaaaaagcttactcctgaagcaaaaggcaatacccatatcgccatcctcctccaagctatgaattactccaatgctgtttcttgtaacatcctcccatccatatcttggagcagacactgaagctttaactctgacccaatctccaa

SEQ ID NO: 1791 - DNA, 784 bp, Glycine max
atccttgatagctctacaggcgacctgcagagataaaaggtttaaaggtttaaaaccaaatgcaccagccgggaatcgaacccgggtcaggtttaaaggtttaaaaccaaatgcaccagccgggaatcgaacccgggtctgtaccgtggcagggtactattctaccactagaccactagtgcagtttgcttgtactccatatcttttgtatatatccaaaacagaagttgaaattatccttcctttccaactaaatgtgtagattaaccgacaaacaagttcaaactatccttgctttccctgttcatactgaacaaaaatcatacttggaatattttttttattgattttcagtataaaaattatcataagtctgtctctttatattaataatatataaagattaaactcaaaacttattatttataaacaagtttatcgaatataataaagattaagtaatttgagtgtaagaaaagcgcagagaaagtagcccaagggtgaaggaaatctctggaattttctttggcctaataaatatacgtttcttgttttccaaggcctgtgaatcggaattgggatttaaatttaatcattatgtctgtttcttcaatcggaatcacgaacaacatggaagtgagaattgggcaaagggtttctcgcggaatgctccctatcctcgctctccacacctttagcgagtattaccgctccgaccacaaacctccggtcaccggcgaccttataggcggcaaaacccttatgtacctccgccccttctttc

SEQ ID NO: 1792 - DNA, 759 bp, Glycine max
gcatgcctgcagttgatgtatttggatatttttttttatttgggatcaagcaaggttttaaattacgattgccgtcacagtttcatcgtgttacttggtattgccgaaaattgtagataagtgcagctggaattgtggtcacgatgcagtcgtcaagagccacggttttgccgcaatccttgatattgcggaaaatggcaattgtagataaatgcagccacaattgcagtcgcaacaaagagcccaaacaatttaacgttggggctgaaagcatggtcccagaccgctttttaaaaccttgggggtgaagagatttcttatgtcatgtatgcttgggatctgtgtgattcaatccaaggcatgtattgggagcagaaatgggtgctttgaaagtacattatttgaaccaatgatgcacatgaatgtcatgttttctaactgtttacaattagtattcgaattcaaaatacaacctgtactgagtctttgtgattttagtaacgtgagaggatggacacataacatagcagaacacatctgagttgattgtcctagttcttgaagtgttcaattttttttacttttttactctgaagtctgaaatcacattgttacgaattaaaagttatgacaaaccatggctcatgttggtctgaaaatactgctcgtgtgcaggtcaatctcatgatctcaaaaaagaagattgcaggaaacagatcactgtgttgcttggggaatgtataacttgttcacggggga

SEQ ID NO: 1793 - DNA, 1396 bp, Glycine max
ttgcctgcagatttctgtcaagcttctggttggaaaggtgggctgagtgagaacgcccaagaaggttctaattggggcatcaagaaatttggttcaggcactgtatctggtgattctggtggaaacctgggtaatgattggggtccgaaaagcaattggaactctggatctagaagtgggaatgagaaccagaattctcactggagttctgggcacactgagcctaggaatcaagattccaacttggacaagaaaaacaattggatctctgtaaatggtgcaaacctggcttctgatccgaaaagtaacaaatggaattctggatctggtaattccaatgaaaattctaactggggaaacaatggcaataacaaatcatcttggggtgctggaaatgaaaacaagaattccaactggagttctgggcgtaatggtcctggaaatcaagagtccaatcagggcaagaaaagcaattggaactctggggacagtgataaccaggcttctgatccaaacaatagcaattggaactctaacaaatcctcttggagtgctggaaatgaaaacaggaattctaactggagttctggggatcctggaaataaagattctaactggggcaagaaaagtaattggaattctggatctggtgatgcaaatcaaaacaccacttgtgggaagcaatagcagctggagcacagcaaatgcctcaagcgatgctggtgtaaatgaaggttcaaatgaaaattccgatggagtaggtggtgggaactggagaggtggttaccagggtagaggtagctcggacagaggtggctttagaggtagaggttttcggggtagaggagagcgtggtgggtttggtgcccgagcggagcgtgaagcgggctttggtggccgatgggaacgaggaggtggctttggtggtagaggtagatcagacagagaaggttgtggtggtaggtggggatcagaaggaggacgtggaggccgaggcaggggaaggaatgatcaatctggtggttggaacaacagaagggattctggtgaggatgggccctctgactggaagaagggggcagaaaatggtggatggaagaatggtaatggatctcaggcttggaaccaggatactggtgacaaggataggcaaagctggagccagggaaatgcagataaggagcgtcctagctggaaccaaggaagtggaagtaatcagagctggagttcagctagtgctggagctaacgataattggaacaacaatgggtctacacagaccgcagaagctagctggaaaaaatctactacaactgaagagaccaacatccaggacagtgggtggaacaagggatctagttcaaacactacttctcggggatggggtcaatcaagt

SEQ ID NO: 1794 - DNA, 1361 bp, Glycine max
aacctcatcgttccatctaacattatatttgcgtttcctctcatctttctcttctctctttctttgttcctcctgtgaaaaggcaccataacacaacaatcagcgcaacataagtataaatgtctgaataattacatctcaaaagattgaattctccagaaaaaagaatatactttacactagagatgaaaatccatatgccaaatcatgtcatctttgtttcaagaaattacatgcaatatttatatcttgaatctatggaatcttgaccttggtaattaggtcaacaaagttattggcacaaaaatataattaattccagggggggtacaataagacacaaataccaaacatgatagactgatatttaccttcttgagtgattcagcaagcaatttttcatctagaactagatcatcggggacatcagtaccccatgtagcaagctttttctcctccacaggtgcaggatcatctgtataggttcataaaaagaattagagattaataaatacatactaaatacaatcacagaaaattgtcaaagaaagaaaagaaagtaataacagcaacgaaaaaggaaggaagtagggacacatcataagtttggtgtatgttagtgtacgaacctgtagcagcctccttacgggcaatattagctttcataagatcacttgcagcctcagcagcctcaataccagcagcaccagtgcaatagctattgcgtattgtctgcttgcagcacttatagccccattgatgatccttccaccatgagccccaaacagtcgtgtggttgttaatgtaaacatcttcttcatacttgctcctggggagagctgcttcctgttggaaatatcagataaataactaaatctatcatctttaaaaaacagcaataaccctaaagctgaattcataaagttgaaactaaaactcatggtaaaaccctaaaatgttaacagatcatgtatgaaatcccactaccactacactaccaagaagaatatttaagatttatatacaaatgctgcaccgtaaagatttagaatgcatatcttacctggcccttaataattctacctgcacgatcatactcaacttgcctttcactttggcccagcagaagttctcttggaagtttgtcctcatcggctgcattgccatacttctcaataatggtttcctttgtttgatactttaacttctccttcatgaccttgaaattcttatagagtaattcagcttgggatggagctgcttgcatgtgaaacatcttgtcccttgtcaaaggcttcccaagcatggatgtttagttccttgaattctaaagcttgcccactatttctatattggttatc

SEQ ID NO: 1795 - DNA, 1418 bp, Glycine max
gacttggcatgcctgcaggaaaaaaaaaggagcagtaactccattggtcaatttttatatcaaaatagttagccaaacaaatgcaaaaagataggaaaacttccaaaatatgagaccatagttcgagtttggaagaagtgttgaacaagaatagaatgggcatcaaaacacagggatagtctgacgttgccttcataaattatacaaatgtttttcctgctatggataaaagccagaaaaattaatcataacttacctcagagcggacatcaataagtgcagcatttgcgtcctcagccaaaagctcgaaagctgatttaggggacaaatttcctgagtaacctccatatgtccacaaccaataaaaggccctgcatatctatgcaatctattacagagagcgtttgtgatggaaattttattcttcaatagacaaataacaaaattttacttttgaggaaggagaaattcacataccataatgtggctgaagagcctacaagaacaacaaatggaatgattgggtcatttggatccaagccaagactcttctccaatgaatagacagccatgtatatctgccgatggagcataaattgtcacaatacataaatagactagaaatagctaacaaatttagaatgtttgtgaaataaaacagcaaattgagagcatggattcagaatatttcaaccaccaataagggcaaggaacttcttaagcaaagctgatgaaaaggcacccatgaagaagatgatttgactcaacttattagataattcaaatcaagttcaaacaaacattaaccaatatgagatttcaagggaagttacgacttagaatcaggtaaagttgagtaaagtatctaattgaaacttctattattccataaaatgttaccctttgagttgctgacccaacaggcctcaagatttctgttgctttatcttcatatacattgactgtatccctaattcctgcgggaaggagctccttggctgagccatataagtagacaacataggaagccccacttgttagagaactctctacaactacaattgtgcggcgcaacacatcaatagccacggcaggtgctttatttgtgactccagtcagctcacttgaaaagctggttaattttttatttgctaactcccctgtttgatcaacagaagaaaatgccttgctaaaagtattatctacagattcagtagcagttttaacaatagaatctacaaaagaagtggctgtatccagtgagcttcgtaaagcattttgtccctcattgattgaggcattgaatgattcattgaatccagcaacaaggtctccaacacttgcttttgtactggctaatgattcattgtccacattaatagaactaggacttgatgtaaagttctcaggcattatat

SEQ ID NO: 1796 - DNA, 726 bp, Glycine max
attgtgtatgaatttctctttagatttgtggcttcacctgagatggatgctaagcttgctaaaagatacattgatcattcgtttgtgttgaggctgctttacctttttgactcggaagaccaaagagagagggattacctgaagactatccttcaccgcatttatgggaagttcatggtgcatcggccattcattagaaaagctatcaacaatatcttttacaggttcatatttgagacagagaaacacagtgggattgcagagttgcttgaaatattgggcagcataatcaatggttttgctttgcctttgaaggaagagcataagctgtttctggcccgtgcattgatcccgcttcacaagcctaagtgtgttgcactttatcatcaacagctttcttattgcattactcagtttgttgagaaggacgtcaaactagctgatactgtggtaagaggtcttttgaaatattggccgataactaatagtgcaaaggaggtaatgttccttagtgagttggaggaagttttagaggcaactcaagcagcagaatttcagcgatgtgtgatcccactatttcgacaaattggtagatgcctcaatagcttacactttcaggtgcttacaaaattcccccatattttttttttatttgggatgtcttctgtctgcattcatttattagcatttgctaacacctgtgacctcagctctctatctctattt

SEQ ID NO: 1797 - DNA, 872 bp, Glycine max
agctgctgaagaggaagaagtagtggaaacggcgagagccattgttggagaaggaatctaaggtagaaaaaaagagagtagattctgttggtttttttcagggacatgtaggagaatgaaggttacattataaagaggagtgcatttgaacctggacgcaattcttgctatcttcgttttgcttacgtggcgtgaagctattggattaacggaaacccgtggcgcgtggcctctcttcggtcgcgcggccaaattagactctcctgtcacttttaatctttcgttttcgttatcttccccgattcttcctcttcttttttactataagcacttactgcgtttaaaactggaatttattgatgcaaatttatccattttttaatactgaatttgattcttgagaaggacttgaatttgagcaagttgagacaagaagactgtactaaaagtaattagctatatttttaattaaaattaattatcaataaaaatagattaaattttaattttaattttttataattttaaatttacaattttattttcattatttctatatcaagatatttaattattctttcatcaattaacatgatatttatatttatgtgaaaaaaattaaataatataataaataataaatatttttatacaaatgaactcataatttttattttataataagataataaattataagaatttatttggttaagtaatatataatagtatctgatgatcactcaattaataagagtattgatttttcaataataatatctgataagatctgaattaattataatataaaacagtttatattatctttgtaaaagaatattaactaaaaatttttttttaaaatttttaag

SEQ ID NO: 1798 - DNA, 687 bp, Glycine max
aatgaacgaaggaaacggttcaaaagaccttcctgaacattcccactcgaatccttatgacccacagtgtgggcacccaagcctatattaccattaccagtctccttgtagtggtaagaagcaagagcttgcagagctctcagacacttactaaccacatctgcatcctgcaaaatcagtaaaggatatagttcttagccataaattctaagcacaatcataattaccagttgggggaaaaagaaattgatttgggaactgtcataaacagtggagaaatttatttaggagactggaagagaatgctaaactattgaaaaactcctcaagcttagaagtttctctgtcattgcagtttctcactgctttgatcatatattaatgattattaaagaaagagcacattccaaatattacctgatggtgaagaccaaaatcaagggttccaagtatatgagcgaaggcttcactatttagttgtgcaaatgtttcaggataaacctccaacatatgagtcaggagagaaaaatactgcgaataagttatacagtatcagctttggataacaatcagtctggtattatttccacagagcacaggaatatcttacatcatgacaaagttgggatatttcaggaggtccatagaaatcaatggtgtgaccatatgaagaccaaagtaaaccac

SEQ ID NO: 1799 - DNA, 1356 bp, Glycine max
  misc_feature (6)..(6): n is a, c, g, or t
atgagnaattggtggtatatgatttgcacaactcaatgacccgaaattccaacaagttccacaacacgggggaattggtgccttgagggtacacgattttgcgatcagatattggactcagcaaagtcaaggggtgattgtggttgtgattctttgattcctcaaccttgatcaaccaccctttggaagaaactggcaaaggctctaacttggaggctccatttgcatcggttggttcaataacataaaccgtggcttgattgagcaaggtttctatggaatggttcaaagggtgggggatttgcataggaaaagaaggagaatttggaagagggggaggcatggaagatcgacatgactcacacacactgcgaaaccgtacaatatccatgtggttctcgagagattttccaatctttggccatagctctatgggaagttcagaccaatctactttgccatccatggcttcaaagttcagacacttttttttttttgctttgtgtgttagattttgcagaaggaacttggtatgtgcccttgatcactctattgaaggcttttatcaaaagggtttttgttttggttcagagaagatacgggggagtttacatgaaggtgagaggcagattaaaccgaaagtacagagaagacttgaaggaagactttgatttcgtgtcggaaaagtttttcatcctagatttgtttgacgaaaaatcaggaaagtttgttttgttgggattggttgactgcaaaagtcgttttgatgaattaaaaatcaaagtcatatacatcaaataatgaataaataaataaatggaaatcctatttgttaggaggtgattggtaggaatctcgtgatggttacaaaataaactatgtgtaaagcaccataaatatatatttcctcttaaatataaatataagactctaattcaagatttaaaaaatattaacttggttgatattaataaatttattttagatttataatttttttttttaaaattattattatcattaatacttatattttcatctcttttaagtatttatcaatatattttgtctcttcttttagttagaagtatttctagtataaaaatagttaatactaaaaatattataaattaaattttataaaaataaataaatatcattttaaactttcatcatataaatagaaatatagagaatattaattacaatcaaggaggttctaatcatatttactctcaccataggatttagattttagagtacactacatattttgaaagttgagattgttttatttttttgacgagaaaaaaaaagtgagattgttactttccttatttttaattaatttattat

SEQ ID NO: 1800 - DNA, 1545 bp, Glycine max
tgaggtcgagctcagtcacgtgacgagagatatggtggcaggtgactccaggccaagagcaacaatctgtcccattttcccatgttgtggtctttgaataaccaggatgacaataataattgtgataactagtcttaatagcgaaggagttcttgaactgaagcaaggcaaagctgtcatgggggtggcataaggaatgagagggtgaaaagtaaaggatcagcaaatgccagcacagaaggaaccaccatatccatgattccattttttaactagtgtgcaactccaaagtttttaggtggacttagtataaagggaaaatatacatgaaagggtaattaaggaaccaaagattgctgcttatgtaagagaaggtctatatgatgatgcaataaagttattctatgaaatggaaagcaaaggggttagtccagatgtttattccatgaatagtgtccttcatgcttgtgcttgtagcaactcattggataaaggcagagatgtacacaattacattagaaaggacaacatgaccttgcgcttgcctgtgtctaatggtctcatggatatgtatgcaaaatgtggaagcatggaaaaagcttatttagtcttctctcaaattccagttaaagacattgtctcatggaataccatgattgggaggttattcaaaaaactctcctcctaatgaagctcctaaaagtttttgctgagatgcaaaaagaatcaagacctgatggcactacaatggcttgcgttcttccagcttgtggaagcctagctgctctagagataggcagagggatacatgggcgcatattgagaaatgggtactcatcagagttgcatgtagccaatgcacttatcgatatgtatgtaaagtgcgggtcactagttcatgcacgatagctctttgatatgattcctgagaaggatttgatcacttggactgttatgattgctgggtatggaatgcatgggtttggaaatgaagcaatcgccactttccaaatgatgagaattgcaggtattaagcctgatgcaattaccttcccttccatactttatgcttgcagtcattctggattactcaatgaggggtgggaattttttaattccctgatcagtgaatgcaacatggagcccaagtgagagcattatgcttgcatggtagatctccttgcccgcactggaaatcttttgaaggcccacagcttcattgagacaatgccaattaaaccagatgctacaatttggggtgccttattttgtgggtgcaggatccatcaccatcatgatgtggagctagcagaaaaagtggcagagcatgtttttgagctagagccagacaacacaggatattatgtacttcttgccaacatataagtagtggaagaaaagtgggaagaagtaaagaagttacgagagaggattggtaagcggggactaaaaaagagtccaggttgtagttgtatagaggtccaaggaaaatttaccacctttgttttgcaggtcgacttagaggatcccgggtacgagtccgaa

SEQ ID NO: 1801 - DNA, 849 bp, Glycine max
cacgtgatatatttttatttaaattttttaattaaactatttttagtcatttcaatttattaagttggacggttaagattttactctaactttttttcccaccatgattttagtctagcttaaacacctgcaaaatccatctgaatattagaacttgacttaatttttggtttgatgtattttttgtttcaactatatatattattcaagataaattgtgcaagactaattattataaaaaatgccgattcaaatagaaagtgaatcttatccccctcccttctctatctatacataagttcactgctcttttttttttctccaacttttcctctaaagaaagagaaaaaactaaatcaaatattggtgtattttttgtttaaaaaatttgataaaacattgacgttaaaagaattacttttttgaagggtaatgtataatcatgtttaagcataaacataggtatgtacttaaaaaatttaagaaattaacaatggataagttatttactttttaaagagattttctttaaatatatttgactcagcttcctattttaaaaacaaggataaaaaagaagaaaaaaaagtaaagtcaaacactattgtataatatttcttttcaaattttgattaaaaaacatttaaaataatgtataataatttttaaagcacaaatatagggtatgtttttaaaatttaataaatctgctatgtttaaaatttctattatactaaaaaaggtaatttttctattgaatttgaattcaaatttctagcgtagttttttttattttttattcatttattaattaatatcctaaaaatattatcaactaatgactctttt

SEQ ID NO: 1802 - DNA, 857 bp, Glycine max
cggtccccgtggttcctttaaagtcagcctgcaggttgttcaacctattctcatgtgccctaagtacacgtcatatgacacataccagaattgtacctatatgcaatctggacagttacctttgggcctcacgtgttgtaatcagcaatctgcgcaggcttctgagccttttcttgtatgctcaaaattcttgccgcaccaacattgtttcttgatgagatcaagacagttcttgatgacgagtatatggtctcctcttctccttttggctggtaacttgtgacgtggatgaagtatgctgatttggatcacatacatggtttgtagtactcttttccttgagcactattggatacttccatctcacgggatgatagaaaatgaatatgattttgatcagggtttcaatttggtaactggggtttctgatacaaggatctttaatttcccaggaattttatcctctttttaaataaggatatctgttatatgctttttattaatttatctcataattactgttttctgtttagggctataagcactactttcacaattttcagaaccttttgttttaagagtattggttcataaattgaagatagttgaatgcgaataattttgacaatattgctctccttaagtaaaaaaagtttgtataaacgaatgaagtcacataaaaaaatccaaatgaaattaacaataaaagaaatttatcaaaaaaataactctacattatttcattataattacttttatgaaaatcattaatttaatatcatgtaaaaaaatattgaaaacaaaatacgtaaatgaatgaaaaaaagttaatttaatatacatactaaagtgattga

SEQ ID NO: 1803 - DNA, 912 bp, Glycine max
agccggacccgtgatcctctatagtcaccctgcagctgccaagaaaagccctggtagctctatgcacaaaattaagttatgtatcagttatgcattttcctgcatttgtcaagtaagaaaactctgaaatcaataggaaaatacctgcaaaactagcaataaaaacactcttgtatctaacatcctgggacttctctgtctgcaatttatgctggcatgcatttactatgtccgtttaactcagtggtcaacaaaacaaggccataatacgaaaaagcattaccaaagaacacagcccataatagaagggttggccttgccaattttggtgagagaagcactaacaatgatgaaataccacctaaattggagactgttcctttaggatgttcaacttcatttgttcttggtgagagcaagcgtgtgtcctctgaagggttatcaattttgtgtaactcaatttcatggtcagaaacaaggttaccggaaggaagttctcttccatttactcttgctattttctccaaaacattaattgcatcagctgttctacctttcaagcacaggtatctaggtgactcaagagtcactttgtagaacagaagaaggaaagatgagggaagagacgacagtgcaagaagccatctccaacccagttttggcatcacaatctgcaaggaatgttacaccaggtgaaaccatcagctctataatttgtcggtcatgcagcaggaacagaaactaccacaataatatccaacctagaaaatttgtcataacatttgcaagatatttccaaattaagatacatttctaagaatgggaagtaaagcattagcactttcctcagtgaaatgaagaaagtacacatctctgggggaattgcatcttaaaaagaaagcttgcacttac

SEQ ID NO: 1804 - DNA, 1573 bp, Glycine max
tacccgggggttcctcttaagatcgacctgcagacgaaacctccatatactgtattcatgtccattatgtttcttattttgtcagtcccaagctcagggatcaacttcttgtagtacgcagcctgctttttccacttactgtcgtcatgtttgaatgtactatcacttccatgatgaagcattgaaatcctttctggtgtaacgtgcaatcgctcaggccacttagaaatggatgacagaccggatttcttaaacttaggatctggaactacaatacaggagcgaagtggagtataccatgcagaatccggttcaaggccgtcgtcacatttaggtggataggtatctctaaccagcttattataacaattgttgtcttgagacttctgccatacagcaatgtcaccctttgtattgaacattttaaagcacaatgaagtcagcaattcctgcaacttctcataatctgatctgtttgcatcaatggttgtgttccatccacgccacctgcgcttgtagttgatcggtggaccagacaagacccaaaatcctccaggacgaagtatccggtgaatttcaaggagataaattccacctaaaataagatacctcatcaaaaagaatgagaatttagagtgaacttctcagcactaagcataaagagattagcagaaaacaaataacaaatcattaaaacagtaaaattagagtgaacttgaaagcctgaaataaatgttggacctattcaagttcacgggcatactattcgggcaaggaaaacgcctcaaatagtgatgacttcatctttattaaaagcaaagtagtaaaaagttgctgattaagattcaaaaatccaggtgctcaatgaaaactagacaaagcctgattttatagaacccaatgtatttacagcagatgcatgaaatccaaaatttaagcatctacaaaatggtaatgtactaaagttcatgatcactagaaagagtctcacaaacaggaataaattctatttcttaaatactaaaagttcaaaatccagcaaaaaaggtaccaaattctgtccatgggattaggcatctggagcaatgagccatatcaaaggagtttgatgggaatggaagtctccgggtagaaaggacaccaagaattgcagggataccacgctctagagcaaattgaacctgagctcgatggttatctcttggtgcaagagacagagctagaatcccacgatccagcaagtcaccaccccagctagcaacctaatgtacaggtatgtggattaattgatgtgagtcttgtctataacatgtttgagtaataggactggttcagaattagagtcaagaaataggaaatatatcactggcacttccaaaacccctatttttgtatcaggaagatacaagaacattgatgtaagtgaagaatacaatgaaagtatttttaatacctcgttcctatccttatgcttcctaccataaaccctcttgataggtattttacttgcaaaatgaaaattaattgggttttctgtcttggggtacaaaataaaatgattttaaaatatatt

SEQ ID NO: 1805 - DNA, 1347 bp, Glycine max
gacttctttgcctgcagcaaactaaccataattagatggggaaataaaagacacacctcagcttccaaggatgttctagaatcagctttgaccgcacacaattgtgaaaacaaagtagcccattttactgctttccgcaacctaccaatcaaatatatgcgctgacgtgcatttgggccatttggaagctgccttttctccatggcatgactccaagctctctctgctgtatagagaattacatgaagaaacctgattcgaaaccataacacttccaatgttagacataaatgtataattgaaaaagttaccaggcagatgaaatatttattttccttttccaataaattattgaaaaaggttttgagaaaagcaagaggaataaagacaaaacaaggtctaaatgatggtttcatatatgtatttaaggattttttgattggctaactcatgggactattgtcgaaggaagaagaggaacaggggtaggatgggaagtgacagggaaggtagtggaaaattttctgttataccacatcctaacaaacattcaccgtggaagcagggcaagggaatagtagatgctggaatcggtggcatgaggcatgaatgtgagggaggggaaggggagaggggtcaaggacaacaaagatagaaaagcctgatagctaacaaccaattggagccaatccttttaatattcttgccttctataacaaaatctcaaactaagtcaactacaaaaaggtgccaaaacttatatcagaaaagaaaaataccgtacgtaaagcataccttacttcggtgacagtagactcagttaaggccctttttgcatatttgccacgaccatgggtaaacttcaacgatttatataacctcctcaaacgagctgtgcaatacctcctacaatattgagggaaaattatgtctattacaaatcggtataatgtttcaacatgatagctaaagcaacaagcagcttaaatcacataaattgaatggctggtccataatgctagaagactctaaagccatgaagccccaaggagcacaaaattataaaggaaaactgtcattcaaagcattcagaataaaagcgaaactgacacatcagtaaacatttttagctgtttagtaatagaactagcacattgagtctcccagatgaatcattcttagggatacagatttacaaaacacatctagatacacaaattaaattaaattaaattttaaaaaaattgaacgctatttgacatcatgttagctactatacaaatacatacctatagcgagtgtagtctccatgacgcaagccatgctgcatttgcgcagattttaaga

SEQ ID NO: 1806 - DNA, 1549 bp, Glycine max
aaaagagaataagaggcacagacaagttgaaatgaacaaagaaacaacattcaagggttttttccaagtgagttggggtgggttttgaatttttgtttttccagaaaatgggctttcctatgcacagtgggatcctccaattcctgagattctacatccaaaatcgtgcaatcccactgatcacaccaaatttcatttttcatgtagattgaattgcagggagcacgaaaaatcataggattgtgtgatactgctgctcccacaatcaaaattgcaattttgaccacaatacccatcagacaaaaacaagaacagccagcttccacccatttcaaaaaacatgtcatcgtggtatgtcaaggttattagaatttacaaatagcagagatagaccattcatgctagcaatagtaaacataattcttgagcaaacatacttcactgattatctatttttctactgcaccaccacacagaaacagcaaacaaaccttacaagtccgatcctttgaagctgacacgataatcgcattgcaccctccattaccaataacaacatcagtcacagtcagggtgtgctctgaaaaactatactcataaagactacttgcttgctgatttcgcaaatcatcaaatatcctgaaccacaaaaagtagagcagcatatgccatcgtaattagcactgcaagcacccaagcagcacgctatcctaaaaggaaaaatcactatgaaaggaaagaaaaatagaaaagggagagactagtacatgaagagagaccaaacttttacggatccatcttcagaaccagataccagcagcgagtcatcttcggaaaacaccaggcaagaaaccgtcctaaaatgagcacgccacttcttaagcagcctaccagtttcaaccttacaagaaatgcaagcaactcagcacagtagagtaaacagaaacattcataaactaattccaagtccctactttcagttcataactttaaaccttacaagcaatgcaagcaacacagcacagtacaataaacataaaacagtcacagacataaactacgtgagtgttatcaatggcagatggccaaaggtcaaaattccaccatatagactcaccagtacggcctatggcactgccatttaacaacaatgactacgtccccactttcattctccacaacctaatgccacaaatcttcaacacatgtttagattagatttggcttctctaaagtaaggatagagaaagtaatctcagtcaatcaatgattaacgactgagattacttactttaatctctagagtgaattgctcactaatccgtctagattaacctattttggaaaaataactcactctcgctctcttctcgatgcataatgattaccgaataactataaataaataaaaatttacctcccacaagtaaatgtcaccagatggagctccaccggctatataggttcccggatgattagcagcaataggtttgatttgttcagcaggaaaactcttcacttcaacttgaggctgcaggcagacgagttg

SEQ ID NO: 1807 - DNA, 1344 bp, Glycine max
attgatagtccaacaaagttgaatgcttccgggatggttaataatgaacaagtttacagagggatccttgattgtcttgcaaagacttgtagagagggcggcattaggggtctctatcgtggagtgggtatgactttaaatcaccttatatcttttgtatcgtatatcactcttgcattggtgatgcaacactcttcattttgttcatggcaacagctccaactcttattggaatattcccatatgcgggtttgaaattctacttctgagaggaaatgaagcgccatgtccccgaggagtccaataaaagtatcatggccaaactcacgtgtggatctgtggcagggttattgggtcagaccatcacgtatcctcttgaagtgattaggaggcaaatgcaggtaatttacttcatcttatcatccagataatgatttggtagatatcaaattaactaccatggtacaaagttgacaaccgtctggccaggttaaaaaactcctgccatctgattatgctgaattgaaggggactcttaaatctattgtttcgatttcccaaaagcaaggctggaagcaactgttttcagggctgagaatcaattacataaaggtgataaaaaaataatagcttattaatgtaaccgcccgacactctaaaatcattctgtatagctaagagatgatttttgtaattcaggttgttccatctgtggccatcggctttacagtttatgatactatgaaatcatacctgagagttccatcaagagatgaagctgcggttgaaaattgaaatggtaaccaacaaaggaatcagccagacatcctcgccgtaataatataaaatgatcccctttccatttcagcctgctaacaaccccatagacttcaaactggcttcttcatctctgtcaatttgactgttattcatacataattgtagctgcacactgcattctttcaagttgtacggcgagatggagcttatattccatctccaaataggatacaacatatacatctgtacaccttaccaaggaatgacccctttgattcaggtctcattcatttcatcatttgaagaaacatcgcgtatgttgtttagttaggacaaatcatgtacttataaataaaagattaattgacccttttggatgtgtaagtagagaatcatttagaaatgttgatatctaatatctcttcactgcatttggtttattctaagcactcaccagatttctattaccttccaattttcgtgggctattgttgttcttaatttaatacccaatggtaaataagatatctacaaattacttcggacagaaaatgtcttgcatat

SEQ ID NO: 1808 - DNA, 844 bp, Glycine max
tgtatgcctgcagcaaacactggcttcggatttatcacttgtaagtagagtttgctaactaaaatgctttgtcactctttattttcaggttttgttctgatatccaaaatcctggctatgttgattgccattcaaattgtaataagtctacatctcaagcgtctttgtttttgtgttccgactccaacagtagaagaaatggtgtttttggtagaccactttgtgtgaacccctctggcaggagaaacctagttggtccagctttttattctctggagactagtgcttatgacgtggctgctttagaatctccttcccgtgttgcagaagaaaaagttggtgtgctgcttctcaatctaggaggaccagagacattgagtgacgtccaaccttttctgtttaatctttttgcagatcctgtatgttagtttgtatttgtgctttttctactgttgatttttctttttcctgtctatgtaaattccattagcattagtacatgttcatatgatttgtatgctaatgtgtttcttgtattgacataggatatcattcgtcttccaaggttgttttcggtttctccagcgaccattggcaaaattgatttctgtacttcgggctcctaaatccaaggaagggtatgctgctattggtggtggctctcctttacgaaaaattacagatgaccaggtggagtttaaattttttgggttttcccattatctgctttggggaacctttatatcttctggaacatggaatcttttttggccttttcctgatacagtcattaaaaattctctgtattgggtaatgggcctggaactaaggagctttttagggg

SEQ ID NO: 1809 - DNA, 773 bp, Glycine max
atggaaggcagctcctagagtcatccaaaactgctttagacaagggaaagcttgaggatgcagttacctatggcacaaaggtatctacgtccagaaccctttgtttggaaatcttcaaagtgtcgacaaggtttttcaacagtctacacctttcatttcagaattgtcgtttgatatctgctataattcgttggtgacaggctcttgctaagctggtagcagtttgtggtccctatcatcggatgacagcgggagcctacagcctccttgctgtagttttatatcatactggagacttcaatcaggtcttatttgtctcatttatgttttggtagtggtggacattgtttcatcagaaaccattatttacataattatattcaccaataaaaaaattcgacattctgttgaaattttatcaaatggaagataattcaattaaaagtagagaaagagtaaagtccagagcaaactactggtgaaacctttaaaaggacctggctccatgtaatttggtttttaatagtgcccaatggtcaatgacattgtttggtccatgttattgacaccatccaatgggataaggcttgtttgttattgttttatgaaataggcattttaattaaatatttcagccattgtttatttgcacctatgccaaaatatcttttctcttttagatttagtaaagtttctggatttgatttcaattcatcaagttttttacttaaatcgcaggctaccatttatcaacaaaaagctttggatatcaa

SEQ ID NO: 1810 - DNA, 815 bp, Glycine max
  misc_feature (783)..(783): n is a, c, g, or t
agcagttgaaggtgctggcagataagacgaagaatgagttgagtgtggcagcgaaggaaatcactgacgaagggaaagagtatttgtccgcagtggcggatagttcaccagaggtgaaggagattgtggaaacgtttacctcgccacctgaggatatccagaaattgtctggagtgagggacttctatgttggtgtaccttatggtatgaaactatgaataactatgtgttttgtgtggttgaattttatatgggatgatattttggtgaatgttacacctcttttagagagtttatttcttatgatgatgcagaaagtatgttaagaggcatttgaatgtatgatgatgcatgattccttgatatagatgttgtttgttggaaaggtaccttaattgcagtcatccttggccctgccttaattacagctatcaaagttggttgccaatgccttgaaatgggctacttacgaagggattgaccagcaaggctgagtgaaatgtcgtattgtgcagctgttgagacattggctcataggggttgagatctcacatgaggctcaaataatgcttgtaaagctggacagtcctcactgtataagctggttttgtgggattgagttgggccctaaacccaaattgtaagattgttgttgtagctggacttgtgcaacgaaggaaaagtactatagttagcatatgttcaaggagattggtattaatgaagatagtatatgtttaactagaatcgagtaaatgagatagtatatattatgggaaaatnctgtttagtacaaacgctttttatgtggaaaa

SEQ ID NO: 1811 - DNA, 1516 bp, Glycine max
aatcaataaatttttgtcactataccagtctttgagctcaattttttcaagatggtaaggcatcaaactattcttaggaaacatgaatgacaagaaaaaaagaagaagaaattcttctatatcatctttaaagtgagtaggtaaggttgtactcatccataaatttcaatggtttaagatcttgttgcacttcaaattaaataacaaaactaactttagaaacaagttaatttagagcaaccttattccattatttctaaagaattgaaagaggattataaaggctgaaatagtcaatgtagtttgtatacagctagccctgaaagatgtcttgatgtggaaaaaataaaactttatttagactttcaaacaaactaggatgcttgttttcggattccaaaattaaggcattgaagaaaaaaaatgcttacagcagctagcaagtcacttgcggccatcatagatcttttaccaagctcacacccctgggaaaccagaagtcaacatctaaattaagcaggggtgctaaaaataacaaaaaatttaatgactgaataatagttttatgaagatatgcactcacgacaataatttcatcatctttcctaaactgtgaagacacctctctaataaagttgctgttctttgtcatccctgaatacatgaatggagaatatattaacaaattagacaaaataaaaaatacataggaccacaagactcatccctgtatataactttaccatattagagtattagttttaacactaaatatataaccttttcttgcaagtaaccactattgatattttaatttgaactttcaacaaaaagtaattgcatttcagggataggaaaaattgagtcacaattgacatcatcttgaagttgaaactatcaattgggtcggattcattggatgcataagatagtgaaaataaaatgccttggccaagtagttatataggaaatgctgaaaatagaaaataataaaatttattttgagtaatttctatataaatttttgaacatagaaacaagaaaatattttcccaaaccaaaatgtcaataaattaatagaagagtccaagtccaaagaacaagctatatcaggtagctatttttgttttgggaggcattaggaatcaacaaagcagctgctaacattgccactaagatgatagtatttataatttaatatacaattttgagaattgaaatagaacctgatccaactctgaacatataaggtatgttaattgcgccaggagcgtgtccagcatcgaactcttccggggtcctgcacacaaaatagaggaagaagaagagataaggttttaggctgattctgcaacatgattccaaaaacactctatgcgttatgttatgtatacgttactggtggtagtaactaatctcttacttaccttacatccaaatatcgatgaccagctagaagaagctcgtatgctacacgcacaggcaccgaagttgggactctaatagcctccaaatt

SEQ ID NO: 1812 - DNA, 793 bp, Glycine max
agaaaatatgtccactgttagattaaaaagaatgaaagatactaaaagctggggaaagtcatttagaataatttacaaagaattataatattcttaagtttaagttatagttctaatctaacatatttatatgattttctagattttaatattttctttttacaaaaagcatgccccctgcaaattttggctctagctctgccaccatgagcatagacaaaaaaataaaaatgaacaagggatttctcatcaatacaatgaaaattcagtgaagaaacctgataggattatggatctaattgggcccaataaggctctaggtttacttctttcagcctacacctaacttgcagggaactaacatgtatacataaaaataaaagggagaattagtgagagaagagagaaaacaaatctcagatctgtctaccttcaaagagggacagtgatcatgttagtattggcagtaggtaccaggtccacaggacctgtgagtgcaagccacacaagtatgacagaattgtttgtccagaatattgcctagttcccaaagccttgagttaattatggttgccctgaattgtttgtccaaatatgcacacattgcatacccttgaaacattttattaccaagactaataatgttgagatttttgttaaagtgatggtaagactacacaggtttcattgatctgtgatacatgatagaaatcctcctttcctaagtgatttttgggaagggctgatgatctgtttgaatacaagcagaaaaaaatgttaaaaataggtattt

SEQ ID NO: 1813 - DNA, 1349 bp, Glycine max
atcttgcatgcctgcagacaaatttttataaagcattttgatggtcacaattaagtcatcgacatgtgttagtaaccctaacatgtacaacatctaattccaaatttcatttagaaggtaattaatcatagcatttcatctttgaagctcttgaaaatgtagggataagagcaaacgaggaatagagagggaacacaagtgtaatttactaaaattctgggtagttgtaatacagaaccctcatctacaacctccatgtgtttatatactcaaactgtgaaaaaacatctattcctctattttggatgacaatatgtactttaccaagaaaactttcttaataataatttatatttatatttctcaactggatcctcgaatggtacaaactacagctattgacactgtaaatcgtggggaaacaattaagcaagcaattcaaaatcttcttcacagagtgcctttttatttgagatgatatactcaaggtgacacagcatttctaaaacacttacatggggtggaaagcaattgcattcacaggatagactatgtcccttccagcctctgattttctgtgacacttaaaagcatatctgcacaaaggtcagaaatcattaacagctagaagtcgatgaatatatgctattttcatatggactgaaacactgttatatgcatggacgagaagttcaaatatccacatcacagtagtattaagaatggaaaacatagagatagtgatagacagaaatttttacttttttgcttggctagcctctgagaggtcgaagaattccatagcaacccgcccttcaacagaactaagtgcatatcctgcataaagtagttatacaagtatgaagggaaatcttggctaagaaacatgatagaatgccttgttaatcattatagttgaagttcagagtctcatccttggaaaatcaatggttgagttataactattagttaaagttcacctgttccatttgggtaacagcgcacacatctggtttggtatttcagtgaggattctcttctttgttccggttgagacatgtttctcaaatcatagatattaacatgtcttccagctgttgctacaaccaggcgatgtccaaccagtgagagagagtagacacgctcaggttgtggatatgtcccaacaagtgtgcgctcttggccacttgcacctctagggtcccaacattttagggttttgtcccaactaccagtgatcaattgccctattgtgacagacaagatagaagtaaatatccttttaagagtaatttctttagttcaggaattaagtgccatggggacgaagatgagatagaaaagagaga

SEQ ID NO: 1814 - DNA, 665 bp, Glycine max
cttgaaaccatggctttggtagagagagttgtggttttgttcatagtgatggcatttgtgcaggtttcatttgcagctgtatacaaggttggagactctgccggttggactacccttggcaccatagactacaggaaatgggctgcaaccaagaacttccaaattggtgacactatcagtaagttttctcactctaattgcttgcatggtctgtttatgttactatgtaattgtgttggtttttgttcattgttagcagatgagttcaaatcatcttgtaaaaatggagaagtcctagccttttgacaattctgcatcctattctcagaatgataagaaaacaaacagtttttcaaatcaattgagcattttgcgattctttgattccttcttcttttttttctagctagaagagtgttaattgttaaagtacaagtgtgaagtaaagtctcacatatgagtaaaagtgaaaaacttgagcatcatataagtgaggagaaaactcataaacctaagccttaaagttttaagttaaagtgtggtatcaaatttccttatataattattcatgactcattaatgaaaatctgtgacaatgaaaacaggacctaatcagaaaatgaaaacaaaaaaatctcatttcagtgggaatgaatttgatttta

SEQ ID NO: 1815 - DNA, 1659 bp, Glycine max
  misc_feature (1637)..(1637): n is a, c, g, or t
agagagtaactatagctcacattgactcaccaatcaacatagatcatgtaaccaacaagcagactcataattttttttaaaaatggagaaattatgattcagccacaccccataccatttgatccttaaaatatgctttgaacagcacatgggttgtagcccagatgaggtcagaaagattcccaaccaatgttcacaagactcagatgcaactccaacaaagcctactacagccatactcctcatactcataaatttaccaacaataataattaatatccatgctttataaacattatagaattgctggtattagtattataccagaaatcctacaaatgcagcaacaacttaacaaagaccaagtctcatagtgttaatgcatgggactagtcagagcagtgaaccaacaacttacaaatatgcagaagtaggttttgtggcaaaggcttaattgccctactccaacccaaccaccacccaccttattataatacatagggttgggtacaccaatatgcattaatatcatcacatccatcttcaccaccaacaattaagacccatcaacacatgagcttttcaccaaaattagcactcctcagtgccctctatctaaggtgagtgaaaagctaacccatctgccccctgttgtctctctctaagggtgccccgtttaccattctgggaccaccctaattggcaggcatcttcatatgttttatgatccataagccaccttttttactttgcctacaagtttggctgtaaattttcatgttacatccaactagtatagtaaacatacaaattcacagaccaggaataagcttttatgactactaccaagataagaggttttaatttaagaattaatgatacatacactgaggaataagcttttatgactactaccaacataggaggttttaatttgagaattactaagtccaagagtgtaagaaaattttatattgtcatccaatcacaaaccgtaataagttcatggactttaataataactacctcaaaaagccatactaatattttactgacactgtaagcttgttaaactcttgatttaatgaggtaaccagtaaatctaatctgagccagagataccataccatgaaagctacttcatgctccaaaagaaaacaaatggttgggagtagtgaaggtaattgcaggacgaagaaagggtgtagtggaagcagcaaaatattactagcagatacgagaaatcagcattataatattcaataaaaaaatccctcaatagtgcaatctgcataagaacatcttatcgttaaaataaacaaatgaaataattaaagaaggaaatcacaagtcgtcataacaaaatgagaataagttgtaaagttgaatcatggtccaggccaaacgacaggctcactgagcacttgcattactataatcattcaaaaaagtgaaaaattatcatgaaccccagtatctccacataaagggacaacgttttcttgattccccatgtactacatataattatatcatatattgctattctgacaaatcagacaatgtgctatatctccaggcacccctaacaaatcccagtaagcactgcaggtcgatccagaggaattccccgggtnaccgaggtgcgttattcgtata

SEQ ID NO: 1816 - DNA, 828 bp, Glycine max
atgacagataagcctgtacatgaagctcaaacaagtcagaactaaagcaaaagaaagattgattatatgatgcaatttccaaagaatggaggaaaaaagaaaaaaatgagaagataggcaagatgatgctatatcttgacattttcattatacctctcgtttagtcacgtcaatatcttctacaggatctgtagaagctgtgttaacgcgttcatgcgggtaaactgggagaccttcatcgtcttcagcttctccctctttcgcatcctcctgtatggtaagagattctatcctgctgctcaaagaaccctcctcatcacttgtctcagggtttgatttgggggtaactgaattcgcttcacatcataacaatccagagaagaaaaataacattctgtatcagttcatattctaatactaataataacagcataaaatatcaacgcactcatctactgcatacctttttgtgactgaggaatcaaattttctagcgctgatgttagttcaaaactagaagtaagatgagctatggctgaagatttagttgccaattttgctgtatcctttgccacagattttgggtacagttttctaatcatcggaggtggagttgaaaggttccttgcatttgagctctcaaaattagctgctagtgcattaaaggccggagatctgcccctcacacgaacacgatcaggactgacagacatgctgcgggaacgctgggatttatctggggcaccactagaccttcccccaaaagttgctgatgctcttcgtttatggttctgaatatgtatcagatagtcaataaccagccgatag

SEQ ID NO: 1817 - DNA, 791 bp, Glycine max
aagcaaaatgagcattatgcatctgtaaccaataaattctacaagacaggtaaattttaagcaatactaattggcagtgaaagcttggatttaagctgaaccccaggccactcaggcaattcaattgtaacagtacaatctagcaccatttatatataataactgttcataaatacaagtatactaagtacacagatacctgagtgtgttcctcgaagtttaaaaaatatggggcagaatcggacagctacaacagctttgcttgcacagggaagctgtatagcaggcctgtataaaaggtcaaataataaagtaacacacatcacaaacacatacttttgtaacttgattcgttaacttcacatgaataattacgcatataaaagccagaaaattgtatagtttgtggcattgaaatttaactactcatctagaaagcaaaagattagaagtctgttttgggtttgcataaaatagctgaaatttttacctagaaagatcttttctagaaaatatgtaagccgcattcacagattcagatgcagtactaattttgtaagagcctgaaataggtaaagtgagacataaacttatcagtaagaaaccaagcatatggtaaatgttatgcaggaattcaggccttgaaaggaagaaatcaatagatatgattcaaccaatgaattgcaaataaattataaggatgtcaggtaaaacaggggaaaattgaaaaaacagtcggacatcaggacacaacccacaatacctatatcgaacattcaatctgctttgac

SEQ ID NO: 1818 - DNA, 757 bp, Glycine max
tccttatctcgccatcagagcccgtaaggacttctatggaacgcatttgcaccattgttagcattgctttgaaccatttcccttgtggtttgactggcgtgcgccacggtggttgatcaacccctcatagtacttgctgtccaaacgaatgggtgtggaagtggtgaaaggtggtgcagggcacttggttttcagtgcgccggcatatgaagagtccatagagggatctagtgtgagaaggcagaacaatgcgacacacctattgaatgcgctcctgaaagtgtgaccatttcatctgcactggaggttggtgcaggcagattctggggcacttcatcaccgtttgagggcatgcagcctctaattgggtcttggcctcctcgatcacctcgaagccatgcaagcttgggttgttcacgaaattgtctctctcggctattggattacccggtgcagatgctagtaacacagaaccatcacaaccctctacatacgtacgtagtagcaatcaatttccgagacttgatttaattgtaaccagaaactgatatattttaatatgcatacgaaattatggacttgaacttaccctcacaaagcaatcatggaaatgcattctaatgagtccagcagctatgcccgcgttgtctgaaattgctttgtttactgtgcttctcactatttcctcggcagatggacacgctgagctgtacaaacccactctcagatatgctgaagccaatgatgaaacacctat

SEQ ID NO: 1819 - DNA, 810 bp, Glycine max
tgagtttaatcatgtatcttctttttcaatgcttttggttggacattaaagccatatttgtttggattttgtgccatatactatcaatccaattttattaagaactaagacctactagtttttcaaacaaggtcagcaatactcaaaaataaattgccaagttggaccctgtagttttgtaaatgtatcccaacaattataattaaaaagtagttgtactgtataatatctagcaaattcaaaattctaaagtcaattttttactgtctaatccaaatggacgctaagatactagactattgatactcacagaacattatctgtagttaacatgaaaaatgtagtttgtggttttgatgcttccttttttattttatttaagtgacttagtttgtagattttactttgcagggagactatcatgttgacagtgaattttgtggtacggacagtgtacagctgaaaggatctgagattactgctgaacttaagtatctcttaaacttgttgacattgtgttggcacttttcgaagaagccctttcccttgtttttagaagaaactggctacagtgaagaaaacgttctccttcgagaagccaaagcaggagtaagtcttgtttgaattttaggaaaaaatgataataattcaatatctgtactgtgttgactaagtcattgatagttattaacacacattctcttttgaggaaggatggaaggctgaaagcacaagagatgttgttttatttagactgataaaatatgggataaaaaattgatgatagatgccttctttttgcttcacttt

SEQ ID NO: 1820 - DNA, 928 bp, Glycine max
ttgcctgcagggtaggtatggttgtcattaactataatttaattattagtgcacatgtatggtagattttgactttatttattttgtggactatgtgactaaaccgtaatatttattaacccctaagaccgaataaagcaatgtcgttagtgattgttatcaatgaccttcgtttaaattttgcaaaggttgaagtattctttatactccgttttaaaaaaaatgacttaccataaagaaaaattaattagctgcctgctgttattgtgaactattttaccgttaagagaatcatatgcttttaacttataactataatctgcgtaaccaaaattttctactatttagttggactaatagaagcttgacccaactggtagctaggattaggcttgttctgaacatgaaccaaggattattatgatatatgaaagagtcgtgaacaagaacccatatatagatgcgaagcgttgatggcattcaataaaatgcaagtctttgtgccgtaatcgtagcaataccaagagacgagtaatggaatcggttctaatccagagcgtgaagctgcacgttattattatatatattattgcgactaatccaagggatcggaagaagaaaagcaccaaaagaaattggcaatactaatcaatcccatagaagggaataattaatttaattatataaataggggcgcaaagatgatgttcgtttttttttgcgagagagagagagcaaagcaaattaaattgtgtagtttgtaaaaatgggctggggtttttaagcattgtttgctgcacaagcccagaaatggtggggaactcgggatcttttttcattccaaaaacatttttaacaaacaaactcccggttagttcaattaaaccaaccctctccaaaaaagaggtttttttgtggcttattttac

SEQ ID NO: 1821 - DNA, 873 bp, Glycine max
aaccccccctccaaattacaaaccaattttttttttttaatgagaatgctaacataatgacttcttaattcttactaatttccaccaggtgctgtgcttgtctgaaagtttctataagcgtacgagagagttccacgtttcaaatggataactgatactatgcagctcacaaacagaactatattgccaacaatagatcctctagctagcccaaagagccgaaacaatgatcaatgtgatagtctacgggaatgatttattgtaccttttggtggagtgtgcgacttcaaaccacttaaatggccacttgtgttgccaactgaattgatgtctaaacccataggacgaactggattacccccttccaacactctcaggatctacaatcacattaaaaaaaacaaaaaaaactttctcaatatattaaaaaggaaatttgtcagttatgcaaccagcttctcaattatgcaaatcatacctttgacattgggggtcttgcatcaggatccacacgtagacacaacgaaacagcccgtgccatggcttgcaactgaagattaaattccactgactccttagaatcaaagcatggtttgagagaacgaacgttttgtaagatatgaccgggctctaacatgcgtatgggatgaaaccattcagaaagatacgagtgtccattgaactgttccaactcgctaattcttcgacctgttattaactctaatatacaattccaaatgcatatacatctactttatatgtagggtttccagcgtaagatcctccggtgcaagatccctatgttatgtaaggaacccttgattaaatcaaactttgatgtccatttcttatgataagcaggaaaaaccccgg

SEQ ID NO: 1822 - DNA, 1452 bp, Glycine max
agcagtaacaagaaagtagtttttgcatcaattatatattatatgtataaccaatgtataaaatattttttttacagcggttataatttatactcaaaggtaatgtcacagggtacaggataaatgaacatctgaaacaatctttgtcgtggaaatagtagtacttctcagaaaaatccttttgcatatttaccttatccaaaatccccattttcgtcaaaaaagtctaggattagtgtgtccattgcatccaacacgtggcccaagaatacaatgatcaaagctcgaaaatcaccaagctttttaggtaaaacagacgaaaacatgttggacatggacagcgagtatcgcaattgtgcgatgcacctatcatgaattcatgataaaatgtatcaattattttgacacattgacatgtctaacgacctgtgtccacgtcgtgatttgaaagacacaggcacgaaaatggtgatcaagcgggggacaagtgtctagaacgacaatactccaataaggaattcaattagaattttgctagttatgcatgaattacagggcccccaaaaaaaaccaaccaattgatattatctgcgtgtgcttggaaatattttttgaagcaagcaacaaaggtccaactcgcagattgtgactagaggggtttgtttggcaggctgtaaggcttgaaaccctacttcatgcactactgataataatccatataaagggtcaatttctaacatgcacactttaacatctagtgaagcaaaaaagcaaaaaaaataaattgatcaggggcatttcaacgggattaaagtgacccttcattctttatatccaactattgattcttcactcatcaacaacctgagatcactccacaacacctgccttgctttcacatcatcatgaacggtaagaaaataagtgggtacactcatgaaccaataatacaggacaagacactccaaacatgccataatcaatttaaggaagacggtgcacaaacaaaaaaatatatataaagattttcggttgcaaactacaagcaatcagggcagttgacttcacattgtactctccacatgtaacaatagtatgtcaactgagcaagtggagatacatttgtatatgttgttcaattcatttcaagtcacaatagtgactcgtctaagcaatcaatcaagtgtagaacaaagatggtgggtttgattcctatttcttctgcactccaaaacccacaataatcttgtcaacatcaaaattcttcacaattgagaaacaatccacggcaatgaaatcatagaagcaatacctaagagaacggagaattcctcatccacaacacaccaatcatttgcccattagcaccatcaattaccagacgttacgacaacattatactcatttaagcgtctctgaaattgagccaactgtgtctgcaattgaaagatt

SEQ ID NO: 1823 - DNA, 838 bp, Glycine max
tgcatgcctgcagacaattatcaactgctaaaaattatttaatacttaataaaaaacttcaccgagccagaaaatgaatcattacaaatgtactaaaataataataaaattaattttacattctcatttaaaagacaaaaattaacatggactaaaattacagacgaagttaaagaacaattttaattgatcaaacttcactattacaaaagtagccttccacatcgcaatatctatatcgattattaaaaagtcgatgtagtaaatgatgtgattgcatttttgtaattaatgtcaactatattacgcctttaacaatgatttttataaaatcacctttgatgtgtatgttacgaaggtgattttataaaaatcgtctttgttcatatatagattactgcgattgaggatatcacttgtctttgaaatcataccatttttattttatttattttcactttcaaaggtgcataccttgttgaacgtgagttctacaccttaagcttgttgctgaatgtgtgtttgcattttcacctcgttccctctcccgtgccataagctccattgtcacctcgttcccttcgtcgtgacctcaatagtgtgttgcaagctccgccgtgacctcgataggagggttttaaccaccctctagctttagagctttatcaaatgtctctccaggttctgcatttaaagtagaggctcaacctcaacatgctagttttagtcatggcattctaagaaggtctttgacaaccgtcgtaaaatgacaactacttttgataatatctcttacgacgacggttataaatcaatgtagatgggtccatataacccg

SEQ ID NO: 1824 - DNA, 853 bp, Glycine max
tgcagttctatgtttctgttaacctttaaagaagggaaccccttcaataatagtttcctttcttgatattttcattgaaagacttacattacctcaaaatgattgtttcataagctaatttattaaaatcttatagtatttgagatatgttgatcgtcaaacaatatttttacgctgcaacctgaaacttgaataacaagggcagcatgttttctggcgaagactcgctgccactcatgatactggacacttgcttcagtgcacgtaaataaggttgtatactagattgagaattaaattcgattatacaatttttttttatcgtctaatcaatctagatgataacacattttggacataccttgcaagtgagtttgaaagtaggaatattcataaatcaatccaattcaatggaaattgtaaaattcatctttttataacaagtaataaatagctagtgtttggaaattgtacatcgcaatggatagaagtagataacttcaaattctaataagttatgcatcttctaggcaaattccatagataatatctgtgcaatcatgttaatataattgaagccggggatgtaaactatacatcgtaaacttcatatatacagcaatcatagaaacggcagtgctttgcagtcttgaaacgtgtccaatagccctcgccccatgcaaagaatttttttaaaaagatggggagttaaatttacaataatgcagtagagtattccaattctaaaaatcaccactaaaaaggggagaaatttattttaagacctaaaaattaggtttaccatgttcaaagatagaactatagtttggttgatcggacaaatgcctttggc

SEQ ID NO: 1825 - DNA, 836 bp, Glycine max
tgcatgcctgcaggatatatagctagctagctagctccactttagtgaataaacaagaaatctcagtaaccattctgtgattgcagtacaatggtgatgtactttgtctgagaggcactgagtcgttgtggcaggagagtaagatagcaagccacaaggactagtgcgtctggatattctctgaatcagagacactgcatgcaaacaaggattatcaaagatagtgattacttgtcagttgtgacgcaagtgtttactctcacggagatcaaagttttagaccacaaatgactaagcatgtggattaattattgttgagattattctttcagtttagtcttaagtatgcaattgcgataaatattctgaggaagaattttttcacttataatagtttcacctgctatctggcttgagcagaattacttccaataaaaaatatatgtaatcttaaaaaaatgttttagaccacaagcaccactttgaagcaattgcaaggtgaaaacacaaaggaaaagaagaaggtatgtgggtaacgacaccaagccaggatcctcatgagagaaagggcctcagagagcacatgtggtggcagtcaaagcaaatcagtgttgtttgcaatccaagttgaagactcaggactctgccattgccctgctacttttgcatccttttggtaagtgggttaataaaaaaagaaaaggttgcttagttttttgctgggtcataatatgttaaaagatgcaattgcaaacacttcttttgtcccccacttcatcacatatcatctggtttgggccaaggaaaataaactggtgcatcttgataccaaaaaa

SEQ ID NO: 1826 - DNA, 879 bp, Glycine max
tcaatctcagcccatggctgcacattccttgccaatgccacaacatcctaaaggacatccaactccccaaatggctctagtgtctcttccacaatcatcacaacttccaaacatacctccaccttctcttcaatcatcatcacagcctcttcatccaactcaaatggcaactgcttccagtcagttacagcaaccaatgcagacatcggggtttccacctctgcaaccaccgctgccaccgcagatcagaccaactgccttgccaaccttccatccccagtatcccccacaaatggttgcaaacatgggtttccaacatgctggtgcttctcacaatcttccgcaatcgatgtttcatgtaagtttaatatttctgtttacaattcataatctattgccatgtttcatgcaagttgcatattatgttattggggaaattttcagcctggtacaaaaccttctgctagtgttgggtccacattcccacaggggcagacaccacttccaggtcaaccatcatctcagccaccttatcaggtatgttgagctataactgatgcttaagacttaagattgtgtgctggtaccatgaactctgagggagcaattaggctctatggcacctgcattattggctttattaggatttcttgttatcattatgaatttatgattccttgtttcattggctagttaaatcctaatttgtctgcattatggctaattcttttgtttaaaaggggatgccgctactactttattattagtcatttagctatctgctactagtaatggcattgttactggcgaaagaggtgctggttattaatttgaagggaatgggaggggaattttttggtcctaaaaaaatcttaaata

SEQ ID NO: 1827 - DNA, 1234 bp, Glycine max
aaagagttggtcttaatcatgcttattaaataggaaaaagccttgtgctcattatgttgtgcgcaaaaacataagagtttctaacagtaacagtttgaaagacatcttcaatttttaattattattttgactgtttaaattctttatgatttacataatgtgatatctgcttcaatataaaataatatattttttaattttaagaagcaatgatttgtgtagctgtagtgacgggtaatttattatgaagcttatttatatatttatatatagttcttacatctgaatctgtctgacatctattggcagggtgcttctataccacagtgtgcgagtgggaccaaccttttaatacccttacctggggcaattaatgctgaagacatggctataactggagcaaattctcgtctacatgcccaagatgcatcacccttatcattactgtatgattttgaggaactcgagggaaagtgggatttccttactcgtgtagttgcgctaaccttttatccaactgtttctggaaggaaaccattaacacttggcgaggtagatattttggacaatttcataacttgatgatgagttgtggcttcattaagtataatattctttggcattttctttaattttcaatgtgggttgcatgaatgttctattttgtcttgcaacttaaaaaagccaatacagtgcaaaaatgttgcataatttaactgaattggtgagttgataatcagtaagtataggttgaaattcttcatgtaacttaactatttttagttgtaaatatccatccttctctttgtatgacattagtaaatatgacttagatccatttggaggcttcttggttataatgtattgggtgaaaattcatgactgaaattaaaatttattggttctttctgccccttttgttaactactggcagtaaagttttctagctaagtgaattgttgtttgtgggtgttaaatttggctgtatgtcaataataattaaaatccgttcctttctaaaatgatataatactaacatattttcattgtttcctttttttctactaatcaattttcaatttgatgaggcagaaatatcttctgaaatgtcaagatattggaattaaaatttgaaaatgttaatctggatgtgtgctccaaaagaaatgccacttaatttgtagtctccctccacttgttaccagaacaaactaactagagtaggctacctgag

SEQ ID NO: 1828 - DNA, 1400 bp, Glycine max
acttgctgcctgcagatgaaaaagaggcttctgttgtgtctgagatgaaaaacaatgcagtggagagtgaagctgaacactcaaagggtgcagtggagtgtgaagctcaaccttttgttgatgtgtctcagaagaaaactgacacaattgagggtgaagctgaactttcagtgaaaggtgggctttctgttgaaggtgaaggtagcaatcaaggagatgaagattcaagacctgcatcggatgctttggatggacagaatgtgggtgcagaggtagtgaaaaagccattctactatttgatcagggttcccagatatgatgatgatggaaacatgaaagagaagataagaaatgctcttcaccaagtagaggagaagtctaaaattcgagatgctattcgagctgaaagccagactataaaggtaacataaaagaagcttttctgtattccataagtctgagaccaatcttgataattattttgaattctactatgagcaggccagttgtaaggatttcgaccaagagtttagggctgcaattgcagctcatagagctgctcgggacttgctcaagtccaaacgccaggaaatggattcagttcaatccacaatgaacagattaaacaatgcaatttctgttggggatatagatggcaaggtatgccttcaattttcttctggagatatttataaggatttgattcttctgcctgttttgttgtgtttacttctctagatatatgatttattggcagataagaagcatggaacacatgatcgagcatgaaactttacctctaaataaagaaaagcaattgatacgcgagatcaaacaattgaagcagaatcgtgaggagttgtcttctaatatgaaaaggcaagatcaatcacaacaatctctagagaacaaggatgacaatattgaagagcactttaaggtatcatatgcatgcttctctttgatagattccctgaattaagtaactgactgcatttcccaggcactattgatatcaaatatgggtacttaaatttaggggattttaatatctttgacaaggtaccaatatttcactattttcagcatttacagcttttgaagaaggaaatggaagtgcttagaaataatgttctgaagtcagatgcagaaacgaaagccgcaaagaagaaatataatgatgaatgtgataagctgaatgagttgctcgctcgatttagggctgctgatgacactcgtcaagaggcatatgctaagttactggctttgaaaaaacaattgcatgagaaggtttgagttttccattctttccacattattcgttttctttttggttttttctcttagataaaacaattgcaaatgtcatgtacaaatattgatcctatttcggtactgat

SEQ ID NO: 1829 - DNA, 1463 bp, Glycine max
tatacgaatcggactcgtacccgggcacctctaaatcgcctgcagtcggaataatgctagagcagttggaagtaataacgttaatgagcacagcagtcgatctcactggtaccaagctcttgtattttttcttcatttatcatactaagaagatttcttgtctagaacctctgcatcaatatgctttttttcctacaatttttaacaattgcttatatctgtttcagcctgctttgtgtaacagtaaaggctaaaaatttgttgagtggcgaatctaccaagagcaagctttggcttgtggatttggcaggtagtgagagacttgcaaagactgatgtgcaaggggaacggcttaaggaagcacaaaatatcaatcgatctctttctgcccttggagatgtaatatccgctttagcagcgaaaagtagtcacattccatataggtatatctgcacctctttacttctaccgcatcttaatttataaataactaaatataagttttattcatgctctttcctttggtggtttcaggaactctaaactgacacatttacttcaagactcactaggtatgtctagtcacttcagctttttgtgtgtttgtgtttttgaggagtaagatcctgattatgcaagaatatattggtaacattccttgcttatttttcgtaaaacattgcagggtgactccaaaactttgatgtttgtacaaataagtccatcagaccaggacgtaggtgagacactgagctcacttaattttgcaactagagtgaggggtgttgagttaggtcctgttaagaagcaaattgatacaagtgaagttcaaaagatgaaagcaatggtaggttgctgatcctacttgaacacattaaaaattattttctatttcaccatgttctagaatacaagttaatgttttcttccttttacactttggctttagcttgaaaaagcacggagtgagtgcagaattaaagatgaatctatgcgaaaacttgaagaaaatttgcaaagcttggagagtaaggccaaaggcaaggatcaaatttacaaaaatctacaagaaaagattcaagaacttgagggacagattgagttgaaaagagccatgcaaaatgactcagagaaaaaaatctctcaattatctgccaaattgagagggaaagaagaaacctgcggtactcttcaacaaaaggttggtttcggtttgacattgccatttgaacttttttgctcatctacacattgttttagtaatgacaaggggatgcctatattgatgggccatttggctaactccacatataaacataccacaaaaaacaatgtgcttgtttgattttgtcattaaataaaatgaaatccttggttactctgttactcacattcatttctgacaaaacactgtctctatgaagggaagagtaagaaaagtgaaaaacaatgcaggctgcaag

SEQ ID NO: 1830 - DNA, 790 bp, Glycine max
attaagcggggccgattaaatagatcttgtcctcattgcatgtgcaaaccatgatattttaaaagtgacccgctactgaaatgtcttaatcacattttttttacagtatatttagtacatcttataaaatattcttttatatttttaatataatgaataccttttcattaaatatttttatttttatttccttaatcagtattataaaatacttattagcatttgctactttgaaatcatcgttccaaaacctcttgttaatttctgtgattttgattgactaattttgtttagtactggttataagacacgcaacacatggtcatgaatgattcttagcatgtccatgcgaaatcagatgtgtaattttactacattcgacattaaattagtgacggatttatgatattagtaagtagcaacgtaattttgatgacatgacaaatactcattcgatcaaaacatttcttaaagtttgtcaatatgaccaagttggtcaagttagtagagtaaattgatgaaatgaccaacttgatttaacaaaaacattttatagaaacaaataaaacttagaagaagacactaaaccaaaaagtatttatttttttagcaacaataatttaacttgagtttaataaaacaaaaaaagaattgggtacgtgatttcatgattttaaatttggtagacttgattaagaatactagttttaaaaaaatcagaagtcccattttaattaacctggttttattgattgtttaataagcccctttcccgaattggaattatttc

SEQ ID NO: 1831 - DNA, 1554 bp, Glycine max
  misc_feature (1544)..(1544): n is a, c, g, or t
acttgctgcctgcaggtaagctgcctcattcactgttgttgcatgatatatgaagttggtgctctgccattccttgtttcttacattagaatgtaactacaaaatttcggaattgtgtttagcccttatttgagatgctcctacagaaaatacaaaaatgattgatttttgatatcatatgtggcttatctgatatatccaagcactgcaaaaaaatactgtcacatccttggttatagagaaattatagttataatttatactagtgttttaatttttaaattatataactcagggaactcagtctctgacctatatgttattgttaatgtagatttaattgcagagaaatagatgacaacgttaactcaacgattaaactttaagtaatgaaatggataagctcatactattccaagattagtatatttgattctttgtaagagcaagcattggaatttatcttcaaaatctagtaacagatagtgtaaaacttctttagactcaagagtttaatggctatgcactgtcaactaatcaaaagtcactgttagtaacttggtataactttaagattgtaaaagtcaacaaatttatcatacatgatgatttatgattggatgtgtgtaaaacttctttacattgttagtgcatagactacttactctttcttaaccatttttgagatcactaaaagtgtggattttggttagtgaaaaaaaaatggtattatgtctgtgggcctcttgcgaaaggtctactttttctggttcacacttctgcttcttctagttgtactagcttctaataatgtatcctcactcttcttatctggattcattgcatgagatttttgtttctcataatgttaacaggtggctccctataatacattttatgcccaattggaggagcatatgaatgaagttggaattgtgcccacagtgaaccgatggaatgaacctctagcattaggcatggttgatccccatgattcattatctcatccagctggtgtctctgatgttcaagctgagtctgctacactggtggaccctgatcagttcactaattttgtggtaaggacattattcttatactgacttaaagggaaaatggagatatttattttaaattagtcacatttaatggacttcattatgttcactattggctggtatcttgtttggtaaattttctgggatgaagaatgttcaaggtttcatatttctttctttatctagtcacatgctttgtttttggtccatgctgttggcacacagattccaagctggcttggaggagagtccactgggtttaaaaaagacaatccattcacgttaccagatgcttatatggcatctcagcataaaaatgtatgtacggaatcaattgagtaatatatattagtgattgaatttccaaattttttggtgatgaaactgtaaaaagctgtattttaggtgaaatatattttcatttgaatgaagttgttcttctctgcaggtcgatcctagaggattccccgggttaccgagctacgntatgcgtata

SEQ ID NO: 1832 - DNA, 860 bp, Glycine max
ctagacttgctgcctgcgcatagagtccactcctggcttcgtagcgcttaacgaagggaactccctagattaagaaatgaatttccttcgtaattaagcagcatcctttaagtgagtaggggtgcgccggaccgccgacgaatgaataataggtagccccacaccccaggcagagttagtgagccgtgtaataggcgaccatttcgcgcggttcggggggcacttgagtcagccgccggcgcccgactgcgtcttgacccctatccaatttttgggccaattcccccttcgtactaccaaaaaatgagattcttgccgaatccgagtttgctgctccaaccattaccaaactaatacctattctgtttagtacttcaggtgcttctgttgcgtataatgtaaatcccgtagcggatcaattccaacgagcctttcaaacaagtactttttgtaatcgactctatagcttcttcaataaacgctggttcttcgatcaagttttgaatgactttctagtcagatcgttcctgcgtttcggatatgaagtctcattcgaagctttagacaaaggtgctattgagatattgggcccttatggtatatcgtacacattccgacgattggccgagcggataagtcaacttcaaagtggatttgttgtgcgaagagtgcgttatgacccgtggccgcctgcctggtcaggtggggtcctccgttgtgggtaaacgggaaacccgactctacgaacccgaggaaaggctgcacagcagtagtaggggcgttaagaccgggacttttttgtagtgctagcaggaatgcaagtgaatgaatcccatcccctagcgagtgaagtgcttacc

SEQ ID NO: 1833 - DNA, 820 bp, Glycine max
tgcctgcagtgatttagaactagtgttaatataaccttccaacatggcttatgcatttatttctaacttttctcttttgactatcaggaaagacttgctttctaaagctagtgttgcaatagatggatttagttcctctaaagcaagtatttccctttagatagaaaagtaaaacatctcaacccataatgagaaaattgagtatattttatcaaatccatgatttgttatgcatgtttaagtaatatcattatcaactatttttttttcattaatgattgagatttttctttttccctctgaagtaagaacttactttagatgagcaaaattaatcaatgttattcctatgagttgactgcttgaatttttttactaagtgatacccctgctaaaggattgcagcatttccctactttacatgaaatttccttgaattgatcgcttaatgtcaaaattctgatgtatattctaaatgaaggttgaagctattattggaaagaatgaagaggccattatgaattttgaaaaggtaatacagaattgtagcctattatgttaatatatttaattatttatccctacttccaaacctgcttatttacatatgtgcttattgagcttatattgtattgataatttggtgatcacaggcccgatcaattgatccatacatcgtaacatatatggatgagtatgcaatgcttctaaagctaaaatctgattatccaaagctgaataagttagtgcatgatttattgaatattgatcctgcaagaccagaagttttttgtagctttgtctggtttatgggaaagga

SEQ ID NO: 1834 - DNA, 837 bp, Glycine max
aagatctttctaatattatcatagaaattaaactcattaacaaattgattatgtagaacaatttatgattaaatagtcgtgcatgtctctttatacaattagtatatagactgtatactcataaattataaatgtattccgctaccaatgtttggtataaattttgacaaatgttggtgggtgttgtagctagtaaggaagactgagtcaaagagagtgtgaaaggtaagggagcaaagagacaaaaggaggaatagtgatttggcaagtgggattgagattgaagcaatgccgtggtggtctcaaacacccacacagcgattcgtgtctgtgtcaccaaaccaaaggaccataaaccccctctgagtcactagctgccgcccatgccaccactctctctgatcaaattacttcctcaattacacatgcttaaccgtctctactttaatcattttcctttccttttttcctttaataaaacatttctttttatgtcttttcattgttttctatatttttggatgcaatcaagacgacttctaaggtgaaaaactgttttgtgtcccaagtaagaaaacttttcaagacagttggatgaagataatctaaccgacagtagtagtgtttcttaaccggtggattaagcattaatgatgatggttaagaaagaaattaaaggtcttttattttatttttatatggcaagggtatatctcagctaagacaagtgtctttccatgtggaccacaatgttggtgtaggatttaccttatgtttgtcacccagaaattattcaaaaattgggggccctactgctgcaattttttttgctaaaag

SEQ ID NO: 1835 - DNA, 833 bp, Glycine max
acttggcatgcctgcagctctgctgcaagttcgtttcatgaacgattataatgtgttggctttaccatcaagtacgtggatgagctgatagacattgtatttagcttaattaataattttgagccttgaatatttgaagggttcaaacaaaattaccttctctatatatgtggaacttagaaaaaaaaatccggtacctctcactcgtactgtttcagaagcattaaggcgcacagggcgtataaggccttaaactaataagttttatgtattaggtattaattgaagttattaaatgataagttttattgaaaacaattcttattaagttcttttgttagattacaatgaattaggctaatatacttgtggtttcttatttttaagttaaattcattttaatcttttaattttttaaaatttattttggtcttttatctctaaagtttgggtcaatattatcctttcaaaatagtaatttttggattttggaatacgatttcaaatattttcttcacttatttaaaatgtaaatttgtcacattagatttaaaatatgaaaaattttctcgttagatttaatattctaatcaaattttttatgttgttccttcttttgtttataatgtctaaaagggcagatagtgcttgtgttaccttttccagaggtttgcagctgtgaaaaaaaaagtttccatttcaacaaaaaatgtatgcaaagggtcaaaaagaaataaaattagcccacgagtgcatgaaaaatatattccaaattcaatgttattgcacaagccataaaaataatatcactgcatggggcctatacatcatat

SEQ ID NO: 1836 - DNA, 846 bp, Glycine max
  misc_feature (819)..(819): n is a, c, g, or t
  misc_feature (836)..(836): n is a, c, g, or t
acaattggcaagtatatgttttgattaataaacagtaatatatattctttttaaaattggcatagttcccatgatgggtaatgtggcttgggtgaaatggcacctgcctggatcaaacccaggacccagaacaaagaggcaattctacctaggccaatggcaagtttagcaataaccagcatagttaaccatcttcaacatgaaaaaaatataagaacttcaacttttagctgcttgtctaacttgaatatgttgaccaaaaaaaacttttggtctttgttttgtacaaatcaaaattttcatattaagtatatttgggaacataacaaaccttaatcaaatccagcattctctcaacaagctcctggtcatctgaagttgctaaacctccagaccaaataaaaacagtgggtccgctatgaagtatgtagcaataagtggaattcaaggaggaagcaacctggttgacaaaaggaatgtgaaaagaaacattgtgattatttaaataaattatgtattgtatataaaaaaaagtttaaattgcccataaaaatatagtgggtagaggtagctgctataaacagacaagatgacttactggttcaacttgtatagcttgcatattgtctggtccagtgccctggatgcggaataatgcaacaccatcctcattgtatgtctcatctggaatttccttctccgcaatgtaattcttgtatccatcactaagtccaccctgatagacaattaaaataaatgtccaggattaaaataattatattcataaaaagaagttttttcttagttaacccaataccnatatcccacaaacttanaacaatacag

SEQ ID NO: 1837 - DNA, 868 bp, Glycine max
agcagagtgaggcttggacacagccacacgtgtggaattgggcattttgttgagaaaataacaatcatcaaaagagcaatagggcccaccattttgcctctgaacattgatcgggtatatatagttatgcgaccaagcaggcgttccatccaatccaacggtgaatatttcaccatatggcagggcgttatccgggttggagattggctcagccgaaatacccgcatagtccgtagcaaacgcaatgttcttcccgtcggggctgaaacacgggtggttcgacttcttacccgacccgttttcaatcagtttcctcaacccggttccgttggggtggatcaggtagagctggtagtatgcagtacccggttggaggcaaaaacgatccagtcaccatccggtgaccagttgcacatggtgtcattccacgcaccctccgtcttcctctctccatcaaccgcatccattacgtacaaattctttgaacccgatcgatacgtataccaaatattctccgtcgggggtaacactgggcttgtctttcaagagaggaatttggattctggctgggtgctccccaaggatgacgttgttctcaagcacccaagctcgattgtcagcggaatgctgcatttgtcgtccaacgtacttttctttagttacattcaggaactaccagttccacttgctacattcaggactagtagtttactctatttagaattcttgtatatgcttcgattaatgtgcatatagattatagatatgcccacatattcaaagaaaacaaggcttcaagaagcaacttgtattattagcatcattaatgggtaaatggaaccattgagccaatagtctaatttttgtt

SEQ ID NO: 1838 - DNA, 1527 bp, Glycine max
tttgcctccgcttgcaaccgagctttctctaattcaccataaacaaaattataaaatatcagttgaatcttgaaaacctgaagcagtattttataacagaaggacttttgaatttacagaacaaaaattacaatttacaagatttaaaataacaaactcaccttctttctgccgtctttcaagatcttctcgctcaatcctaagtttttcaggatcccgcttttcatcctgaggtcaagacgtagttaaaataccagatttttttattaaaaaaaattgcaatgatgttgggaaagttttcatgaaagacagcaatgatggtaaattggtaattactagatttggtgatataccttagcagtcacagatctgctctataggtgggaggaagaggcaaaaatactaaaaacttcaattttttttatgtttttcaaacatcagtgtttaacccaatagacctgttctattaatgcaggaaataaaagttgcaacacattacccccttaacaaaccttttcaagtgctttctcttgagctttaagtatggtgtcagcaaaacggctccttaacaaagctgcacggtagagcttttcgggagagacttgcctcttagatgcagcactctcccctaaaatgttacagcatgaacagtgagatcatacccccaaaacaaacagcagacagatttcttcaatttttcaagcttacccgtcttgatgactttctgggctcagtagcaacatgcctactctggggaactctgctcaacttgggcctcccacatttgttgaatctatataaaaaagagatcatgagctagaaagcaacagtggctgaggcatcctgatcaaaagtaatggcaataaaccataatatgcacatgattactgccataaactttggtactcaccctttccagtttctgaattaccaggatcccctttgttttgatctgaagtcaaatcaaatcctacgttttcctgcaatacacagttttgtttagacaaagatactggtcaaaccagaaaaaaaatattttgtcaaaataccacaacatctaccatatgtatcccaattaccttggtggcactaagaggttctgatgttttagccatatccaactcactaccagatgaactgcctgagtctgaatctgtcagcaacacaattgcactagtcattcgcatgagtcagacaagaataacaaattcgaacataaataattcattttcaagtcattaattttgccagaatcacgagccaaacaagcatagttgtcagtatccactgaatttataagaatagtgaaggaaaaacatcctgaaaagtgaaaaaatgtcaaaagtatgcactaacacgaaccactggatgaagagccagattcactactagagctgctcaagctactgcatttactgtttctattggtaacatctttttcaatctctaatggaggataatttgaaataggaggatcattcccaccaataatgtcaacatcctcctcaacctgttcttcgcctgcat

SEQ ID NO: 1839 - DNA, 827 bp, Glycine max
gcctgcagcgatatgggaaggcaaagtcaatcatattgttcatccaggccaattcaagagcaatgtctgcccggatcaaatcatagcaaacaaatagacacgaggcaaagcattctttctttccctgcataaccatgtggaaagaaatattagaatatattgaccctactcaattgtatgcgcattaacaaataagaaaattaaaatacatgggactgtaagataagaaaattaaaatacaacccccttcagtaagtgagtgttggcaataaaacttaacatgaaactggcagaatacatagtcaatataagcttgaataataaaacagtaaaaatgctagttgccaataatttctaactctgcatatgccatgatgagtactacaagtgtcaatattcaatacacaaaccatgacagtttagcatcttagtcttaaaataaaaaatgttaaatgagaatgagtcaacccaaatcataatgctggtctgctgggcaatgttgctaaaaaatgaattatatgccattgaaattgaatttggcacctgatcaatgaaataaacaagcaactcctcagcaagttcacggtcaccagattgcgaggctgtctccatggcatctttgtaaaggttatccttctttgacaaggcaatggactgcttccatctacctgccttcttgtaaatataagcagcaacacgtctcatctcaagaagctcatgcttttcaatctgcattccagataataataataatctatcgtttcctataattaactgaaaaatagtcaacatgaagaaatgaatgcagccaacccttctgtgctagc

SEQ ID NO: 1840 - DNA, 837 bp, Glycine max
tgttaccttatagtctttccaatgcttattatgtcaattttcattgtgaatttggtaggtggatgacttggaagaggtcagtgaatattaccaaaatagaggttgcttcaatgagctaatatcgcttatggagagtggtttaggattagaacgggcacatatgggtatctttacagagttaggagttctgtatgctagatatcgtcatgagaagcttatggagcatatcaaactatttgcgacccgactcaatattccaaaactcataagagcttgtgatgaacaacaacattggaaggagctgacatatttgtacatccaatatgatgagttcgataatgctgcaacaaccatcatgaaccattcacctgaagcatgggatcacatgcaattcaaagatgttgttgtcaaagttgctaatgtagagttgtattacaaggctgttcatttctatttacaagagcatccggatcttatcaatgatgttttgaatgtccttgcacttcgtgttgatcatgcacgtgttgttgacatcatgcgaaaggtagcattaatactgtcaacaatttcatcttaatttttactttataacctgttttccatttcactctatgaatattttccctgtgatgtattataggctggtcatctccgtcttgtcaagccttacatggttgcagttcagagtaacaatgtgtctgctgttaatgaagccctgaatgaaatatatgttgaggaggaagactttgatagattgcgcgagtcgattgatttgcatgataactttgaccaataggccttgcacagaaggtagctgcattattcttcatgtgactt

SEQ ID NO: 1841 - DNA, 677 bp, Glycine max
atccttgtaagggaaaggtgtattaattgtgatgagggctgaagttggagctaggagatgcttataaaggaaataatcaagttgcacgagcacaagtgtcacgtgacaacagctttcaaaagtgtagcactaacgtatgaagcaaacatactctaaatatgtgtttggaaccgtgtccctgcatgatgacgcaaaagctactatggttagcacccaggggaggcatctttaactttcaagtctgaacgaggtttcaaaaatgcggttagccaacaaacatatgcagtttgaactttaaaggcgttttacattaaatctagtaaagatagtaattgccgagaaaattatctgccaacttatgaatatggaagctgctggtcgttgtgaaaaggcaaagcaaagagaaaggagaatggatatgagagattcaaattttgttacaaatcaaacacgtggaaaaaataaaagagagtgtgaattgaaaaaaagaagtaaaaataaatctcgccggttaacaaacaggaccaaaaagaaaaagaaagatccaataaaggtagataggtagataaaactttaaaggtccactagaacaatgtgattacaaaacgggagtttctatttgcacccctctttttacttgtatactttcctttcctattactcttccaatacactcc

SEQ ID NO: 1842 - DNA, 843 bp, Glycine max
ttttagaatgattaacctcattcaaatgaaaactgattcaatacaatatgtggggccatgcatatttctgctcgtctcatcttttgaatttttttaatggaaattatatgttcatgtttggataattccctttccctttctgaatatttattcccttctcttagtttaattccgaagtattttcctttttgttttggagaaaaatcactaatctttagaattggttatttatgaagtttcttggaaattcttctaattgattacatcagttgttcattttttttctcataaaaaagaaaataagcagagagatgaattgtgttgacttggtatgagagtcaagttgttgataatacacggtagaaggagaagaagaagttgactaatgttaacagtgcgctgactctaaagagtgcctaatttctttaagacaaaaaattgcccttatattctggttgaatatttcagctattgctttctatctcttcaattcattgtatgcaagttgaaagttgatgatatgataacactgatgacaccgtgatttttccacgcagacagcagattatgtgaaaccagaagagagaaccttgagaagtcaggactatatctgtttccttggcatcagtatcaattaacagctttctctaagctactattgtccatttgttgtgcttctacatataatctgttggaaagaaatcagttgaagtactacaacacagttgagtccccggcaattctataatgcaagcatcagagcacatagaaaattcaagtttgtactatcaaccattacaacaaattggaacgtactgcttgccgcaatatcggacactaaat

SEQ ID NO: 1843 - DNA, 800 bp, Glycine max
aacagctgtgggatgtctcaactgcttatgaatctttgttgaggcagaaatctagggctaagtggatcaaggagggcgacagaaacacaacatactttcacaaactgataaattttagaagaagctcaggtgctgtccagggtatccttattgatggtgtgtgggtccaccaaccagaccttgttaagaaggcagtgttcaatttctttgctgagaggtttactgaacagaatcatcatagacctaccttggatggggtttgttttccctccatagatcaacatcaaagagtggggttgactgctcccttttctgacatagagctcaaggatgctgtttggagccgcgctggagataaatgcccgggcccggatggttttaattttaattttatcaagaaattttggggactgttgcaacctgattttagaagattcgtggatgaattccatgtccatggcacttttcctagagggagtaatgcatcttttgtggctcttatccccaagataacccaaccgcagtccttaaatgattataggcccatttcgctcattgggtgcatgtataaaatcatagctaagcttctagcaaacaggttgagggtggtgcttccagatctaatagatgaaaggcagtcagccttcataaagaataggcatatccttcatggaattcttactcttaatgagggtggtggatgaagctattcggaggaagaagcctgctttgatttttaaagtggactttgagaaagcctatgattcggtttcttggtcttttctggactatatgttgac

SEQ ID NO: 1844 - DNA, 764 bp, Glycine max
acatagcaaaacaacctctatttactgttctgaactctatgaagaaagagaattaatatagtttatagatgcttatttcaatcaaagtatgagttcatgtaaagacttactggtatactttcattgaggctaccaccgcctattatagaaccattctggaaatttttaggaaaaacatcacttccaaatttgtggtccctgtcactcttccatgagatgtctttcttgttcactgttaaattcttgctgttgcgtgagaagctgtatgtatcattgaacaagctccaagctataagaccacaaggtaaaattgcctttccatttacattattttcaggctcacaaccacttacggagtttgcttttccagaatccctcagctgatcatcgtttcggcttttaacatacctaaattacaaaagatgaacatatttataacaatacaaacaattatataaagtgaattatatgcattagattcctctattgaccaaccaggcttctaagacagaattattgaaggaaccagtcagtcgaagacattgaagtgatagactacttatacatatatattttttaaaaaggaaaactgttcagaatataagatgaatgcatgaaaagtaaagtacataacttcaaatcactggctcttcaaaattccttccatattcacatacaaaaagatcacttttatctttgatgcaattccctaaacttcttctaatttaaaacaaatctttgcttccacccttaaaaaatataaa

SEQ ID NO: 1845 - DNA, 880 bp, Glycine max
tttttggtgcctgcagttaggatgtttttatccttaatcagaccctgtaaattattcaatcaatattatatatatatatatatatatatattatgcagtggcctaatgaaagccaacttgagcaaagaataaaccattttttaacagataacatcttcagaaattagtcaatcaacatgttagtatttgaggaaaccatcttaattaggctgggagaagtactttgagcatgcaccctgtaaatgaaattgtgaacagaagaagctgacaatgtaggcactatgtcatagccatttatagtggaagtgataaagggcttcctgaattcggctaactccaatgtcatacacgcagctgaaaaaaaatacagttgtgaaaaaggataggtcagatcatatcagaacacatatataacctattgaattggatagatcagatcaatagaaaaattaaaactctagatgtaagttaaaaaagttagtataacatatataaccacatgcctggtccaaatgttacacaagtacatgaagagaactgcttcatttctctaagcattgtcaacagtgcagcagtaccaccaccaagtgaatgccaaccgatctatagaaagattattataacaataaaaaagggtcaaatataggttgagctacatgattgaataaaaagcatacagaaatttaatttataaaatattgaagcaagaatatggcatttaaagtaaaagagtacttataaacatacattcactgtagtccattaatctttttcctcattatatgatttatctccctggtactttttcttctacattttttctcctcatctgtctctacctccccactaattcactcaaatgtacttttatatgttctaa

SEQ ID NO: 1846 - DNA, 1304 bp, Glycine max
acacagaaatcacaaacaagtggtgactacttacccatattcaccaaagaaatggaaaaacttctagaacttgtgacaaaacaaaactgggggactcactctgagggcatgtcatcaacaacaaccactcctatctatggcttggcacaatgcttccaagacctttccagcattgattgccttcaatgctttgcagccagccgcaccaagctccctcgctgcctcccttcggtttcggctcgaatttaccttgatggctgcttccttcgctatgacaattacagtttctacactgaaaactatgaccctttgagggacacagtgaattgcacctcagagtatggttctgtggttggtgatggtgagaagttggtgtttgctgagagtgttggcaaagtggttgagagtgtggtgagggtggctgtgaataataatgagggaagaggcttttttgcagttggagaaggtgggggagtttatgcattggcacagtgctggaaaactgttggggtaaaagggtgtagtgattgcttgaggaaagctgaaaatgaggtcaaaggatgtttgcctaagagggaagggagggccttgaatactgggtgctatttgagatactcaactgttaagttctacaatcaaggaggtcaagatggtcaaggagatggtaagagctgttgctctagtttgaagtttttatattcttcattagtttcttggttccttttggataaacttctcaaccactagttataggagaaaaaaatgaattaaacatctcttgtaagttaaaatcaatttgtgcacttcgataagttttataaaaactctctcgtttaacttttccaaaagctgagatgtataagttaattttaacttacagaagaagtttgattcatttttgctttttatgttcttctcctttaagtatttattgagaagcttatcggttggaatttggaaactgaagctcaactgggaatttcaattgcatattgttaccatgcagtttcaaattccttgtgttgcttataggttaaatgacaaatggagaaggaaagaagtaaagatgaatgttactgtatcattgtgaatgaaatgctgcttttcaactttaactttgctataactcttaggttagttttggtgtctaaagtttgtcctgaatagaatcctaggtttcagttcatagatggcatagatacatgctagtcatttattttgtatacatgttgatgcaattgtccatgttttaatttttcagattcttccagaaaacgagtcattatagcagcagggtcagtctt

SEQ ID NO: 1847 - DNA, 736 bp, Glycine max
gatgcagaatcctatgtgaagctgtaagcagaagaaatgaagatgattagatttcttacagtttttaagcatagcttatgcacattaaaaagtacaatccatttaccagataaaacatgaaaaaccatccaaatttcaaagcactttcattcctgcaaaaaagaacagcatattcaagatcaacagtaagaccaaattttttttttttttgctcagcaaaaataaatattatatattaattgagtaccagaggtactaaattacagatattggattgcccatgccaatggttccaaagcagactaaaatggagtcgggagtggaaccacagtcgggctaccccagatttgagcaagctagaattagtctaaatattactgttacatgaaccctgctgtaatgttactagaccattttaaccaattggttaaaatgcatggaaaaatccttctctaaattccgcaaccatgtccaaagtaagaagactgcatcatccatgagtttgttgctgtcaaaaacatcattggagaatatcagcttatttcattgctgccaaatagtccacgtgacagctatccaccaccaccacttccatcttttagccctcaatccatcagccatggctagtccttgttgtagggaatgcatgcatagttgcctattggtctcatgaatgcttcaaagcataagcagattttctggacttggatgcctctcatataaattgtcacaacaa

SEQ ID NO: 1848 - DNA, 1358 bp, Glycine max
tgctatgagtatgagaggaaggatgggaatcaatcttgcccccagtgcaaaacccggtacaagaggcacaagggtaaatgaagctaacctagactccgttatgtcttgtgttaattttcactgttcttcattcatacagtgcaactggggaagctgcaaatgactataacaatggaagattcaaaatttgaatgtgaatgaattgggtagcatgtgatttgaatatggccttaggcttctattcggcccgaagcacatggtcttgtaataaaatttcacttggaagcaaattggccactttcctgtgaaccaaatgagagatatatgcttttgcttcaaaacatttactaaatgaactactgaattggaacttttttaaatgttggggtaggcaaacagagtagattagactaaacaaagcatgcaatcttagtacactctaggaatgaacaagtgagacagttttgattacatgttgagcacactcatactgtcactatttactgctctgcggggtatttctatattcttcaagtcaaatctgctgagtggatagatagtatatagaagataacatttatgatttgtgcattgttaagttttccaaatattttaattatctgtgattgtagtttcataatcaagtggacttgcattgctgttttccattttgcaaaatgttagtggggtttggaagggactgagttcttggttgctaagttattctaggcttattattcccccataaagtgcagacttcaatagataaccataaaatgcttagattaagaattctgttttcccttccttttgttttagtcatgaggattttatagttgcgagatatatatgttattcttgcacagtacactacttaaaaaatttcatgatttcacacctagttttgatctgcaatctctggtcaatatataaagaacttctactttctgactctatatagtgatcaaactacttatttaaatgattccaggaagtcctgcaattcttggagacatggaagaggatggtgctgctgctgctgatggtgccagtgacttcaattatgattcagaaaatcaaaatcaaaatcaaaaccaaaagcagaagatttcagagcgcatgttaagctggcaattgacatacccacgaggagaggaggttggtgctccaaattatgataaggatgtttctcacaaccacattcctctgctgaccagtggacaagaggtcattcagttagcttcctacattatagtctattagttttttccaacttttgcctttaattccgggtctctgatgaaatttggcatatcttttatttcaggtatctggagagttgtatgcaggcagcaagc

SEQ ID NO: 1849 - DNA, 825 bp, Glycine max
  misc_feature (801)..(801): n is a, c, g, or t
ttggtggcatccatgccaacaacacctaccctgctgatttcattgccatcaacctccaaatccagaccaatgtcatcgattctgcatatcgcaatggtgctaagaaactgttgtttttgggttcctcttgcatttaccccaaatttgcaccccaaccgattccggaagatgctttgcttactggacccttagagcccacaaatgaatggtatgccattgccaagattgctgggatcaaaatgtgccaggcttacagaattcagcataagtgggatgcaatttcgggaatgcccaccaacttatatggaccatatgacaattttcatcccgagaattcgcatgtgttacctgctctcatgagaaggtttcatgaggcaaaggtcaatggtgctaaggaggtggtggtgtggggcaccggaagtccattgagggagttcttgcacgttgacgatttggcagacgcggttgtcttcatgatggaaaagtatagcggactggagcatttgaatgtagggagtggaaaggaggttactattaaggaattggctgagttgatgaaggaagtggtgggatttgaaggggatcttgtttgggattctactaagcctgatgggactccaaggaagctgatggatagctccaaacttgcaagcctggggttggacaccaaaagtctcactcaaggatgggcttgctgatacctacaagtggtacttggaggacgtaaatctatgattcagatggttaagccagatgtgcccgtgtcaaattttataagtacttggtcatttcacaacgaangatttttttgttaaaaaaatatta

SEQ ID NO: 1850 - DNA, 1379 bp, Glycine max
  misc_feature (12)..(12): n is a, c, g, or t
tttacccggggnatcctctaggatcgacctgcagactttttcagcaagatagatgctaaccctgatttgtgcgttatttttttgtgcccttgtgcttttatacttccaattatcaaaatagagatattgatttggattactattgaaatgtggtaattgggggaaattttaattcaattaaactgttaccataagattttggggaaaatgcctgttattttactttctgccccttttctctctctttttttttttctgtagatatttgagttaaaggagacatttttcaaaacataaccagattttcagcacccttgcccaaaaacaataaatagtgcatataaatggatatctaattctaatggtgagtcttttctgttgtatagatatgggcttatatggatctcaacaacattggtttttgtgcttgcctcacttggaaatctggccacgttccttatgcaaaaacatgcagataacagtacctcttggagctttgatgtcagctatgtgaatgtggctgcatgctctatctatggctatgcaattgtggttccattggcatactacttcttccttcagtatatgggttcaaatgctagccttataaggttttggtgcttgtgggggtattccctcaccattttcatcatgtcttctgtaagtttctgctttctccaatgtgttaaattgtattatgcaattacttatactacaaataatgttgcacaattatttataccagtaccacacatgttcagtgtgggggatgtgggcctgaaggggaaaattggaatagacagtgcctcaacaaagtgaggccctcctcctttaaagatcaatggactttgagctcatcatccctcctcagtcctcagcatgaaaatatcagttagaaaccaaggtttgggtggtaatatattgcagtgactggatagcagtgtacaatgatttttttccccgagtctgtgcagcataattataatatatctcaatatccggattggatacacggcttcttttcacatgtttgttgttatcataaagttcgatttaagttgaagctgaatttttataaattgtggtaggaaattacgtcagtagtttgctaattatgctttaattttttggagtctttcaaactgttatctaattcgtatttcttgggatattttcagttcctgttgataattcctgttgagtttcttcggtgggttataatactccttacgggcgttgcctcggcaagctttgttgccttaaacctgagatcttatatagaaggcaatgaactttcagtggcgattattgcagcatttttcttgcaaatggctttggcaatcttcatcaaggtttggttctttccgtagctaaaatgc

SEQ ID NO: 1851 - DNA, 702 bp, Glycine max
aaactatcgcttgaagctctcccaccaagatggtggttggtggtggctatggtggttagtggtgatgcagtaaactgtcgctcgaagctctcccatcaccagatgctttacttttattgtgttttttctctgaaagatgttgtcatgataaatgttgttaacatgagaaacatagtggccttagagggcccttcatgtatagaaagaaaaacattcgaaacataaaattcagtaaacagactggatggtggcttgtagtgatgaagatgaaagcccacaacaacatggtgatgctgggtcgatggtttgaggctaaaacttcctgcacatccataaattgttttccgaaagcccagactctagggaaaataacggggtacaggaaatgcatatttgaaacaaaactactaacgcaagagatagagcctttaatatgattgtgaaataaaaactctgttcatagttttcaacaaatggttcttaatctcatgatcttttgaaaacacgaaaaaaagcactgaaattttcattgcacatgacataattggtacagaaaaattggtcaagtactgttctctggataattatttttttaacaaaaaattcttcgttgtgaaatgacaagtacctataaaatttgacatggcacattctgcttaaccatctgaatcatagatttacgttctccaagtaccacttgta

SEQ ID NO: 1852 - DNA, 834 bp, Glycine max
  misc_feature (7)..(7): n is a, c, g, or t
  misc_feature (771)..(771): n is a, c, g, or t
  misc_feature (782)..(782): n is a, c, g, or t
  misc_feature (792)..(792): n is a, c, g, or t
ctcggtnacccggggaatccctctaggatcgacctgcagaaaacacaaagcctgaactcagccctatcaaggcagtgcctatgtgtaatgcagctccactgccagatatggccagcaaaatgaatgcaattggtgttagcaccaaggctgctccaaaccatccagttcttgcaatgtgtatcttcctgcattgtcatacaacattagttgattttacgtgtaatgtttggtttcgtgtcatgttctccagaatcatgtatatgtgaagcaacgaagggttgattttacgttttggatctgaattttgatccgaatgtacataaccaatgcatttactttgtttgccaaatttgactgtatggtttgagaatttttttgcattcactttgtttcctgttttctgaagtttatacaggaaaaaatggaaacagaaaatgaaaaaaagaaaaaataaaaagttgtttttcactgttcttgtacaaaatctttaaaacatttgtttcctgttttctgaagtttatactggaaaaaatggcaacagaaaatgaaaaaaataaaaaaataaaaagttgttttcactgttcttgtacaaaatctttaaaacaagaaacaaagtgaaaacagaaaatgttttctcaaaccaaacggtgagtgacatgcttattacctctagaataaatcacattatgttatgtagcaatcactcttgaatctagttgaattctatcaaaattctagataattttattactatcaacagagaccctttanaatacctgctnaagaggtcangtgaagctgcaagaaggcgaccgaagaaggacatgttgagta

SEQ ID NO: 1853 - DNA, 799 bp, Glycine max
catgcctgcaggttctttgaatcacacatctagttttctttggtgagaagtaagaataagagaaagagagaatttttgaagatgggagagcgttgtagacatttttccattgaggaattgccatcacatttggttttagaaattctgtgctccggcaggctcagcgcaatggaccttgtttgtttagaattgacttccaaaacatttggtggtagtcatggtttgcaccctttcaagttcaagtccttggttgcctttgctgcatttcaattgtgtgcctcccatgttacctatgcaagaatgggtttgaattctcagagggagttgtatgatagatgtggaggaaattggaagcgagttttgaggttcttgcagtctgtggaacaatcctctcagatggtcgagacatcatcaggcaatgtactatttcattatatcaaattattacttttgtttgcttttggtcaaaaagaaaaaagtattttcctgcgtgaattatgagttgcctcttttattgagttcattaggcatgcaatgttagcgtctaaaagtttttacattatcaaccagttagaaataatcttttgtatgatttttaagatagctattattataaaattcagcaaatgtactgtacaccacgatttatgattggatacagtataaaaaaatttatactatcggtgcatggattatttatttatttttattttgatcttacaagaagtatgtttctcaagggtgggatattttcattttgcttttgaatcccagtgtttaacagatctatattgatgct

SEQ ID NO: 1854 - DNA, 790 bp, Glycine max
tcactgtttattagtaatagaagaagcattgcagtttatttcaattactaacatttttttccagaaaagtaacattcaagcatttaaccattacagcgaaaaggaagttcggaagcaagcttgatagtcgtaattaaattataatctattaaacccaattaacataatgaccaaaatatcttcctggcattccctaagcaagtataagcagtaacctatgatggttcatctcatttgattagtaaagtagaagagagtacacagactaggaaattcaatgagcctcttcacacttctacccaggcttaatctaacttcatccgctaataatttttatcaatcagtataacgaaattcaaaggcctaagaaattgctcatattcataactaactgaataaaagtttagctgctactaacctctccagattgcataacaaaagctgcatggttaaaggaggctgaaacgtgaaccactcgtgccaaaggtgggaaatcaatccgggtaaatgctacacacttgtgttgtttcagacccttgaccaagtacaccacacaaaccagaaccacaagaatagacagaagaattgctgatcaacaaggtgtgatactttccagttgttatttgcatctgccaataacatgtttttcatcattatttacaactccacaacttttccttcaaaaagacagtaagaagactaaaaaaatgcaagtaaaaaaaataaaaaatatccaaattatatataatgtttttaaaaaaatcgtaataatggttttaataaaaagctt

SEQ ID NO: 1855 - DNA, 1299 bp, Glycine max
atccctctggatcgacctcgcagggcttccatttgtttcctgctgaagggacttggaccagaacttacctctccttctttagaagtgttataagttgtgttgcctctggtttccttattccggaatgactttgcatctggtggtttaccatggatgtcccagcaggtttccttggtgtggcctagtttcctgcaatgatcacaccaggggcggttcttcttttgtagtggacgggtctgattccctcttgctgccaatgctgagttttcaatgtatggggctggcgcaatgttccccagcataaattttcttctgctctcttctcttcttacttctgagaatacttctcataattttggaagtggtttggttccaagtactcttccacatacttcatcaaggtccctattaagccccaacagaaatttgtagataatgtccttttccaccagctctctgtatttcttcttgtcttctggacaattccattctatttcttcgtaggtatccaattgccgccagtatctactcaaggtgttgaaaaattcagtgaccaatttttctccctgtcgcgggtcatggagcaggctcttgatctcaaatatggcagaagtgttgtcaatatttgagtatgtctccttcaccgcatcccatatctcctttttttttggaaggcagaaaatatatattattaatcagaaacacagcagcaccagaggtactgctggtaacatatacataagtacaagacacctattgtgacaccctccaaaacaagatttgagaaaacccaacactgaccccaccacataggatagatatgttcaacccatattaaccaaaatattccacaaggttggaagaccagtggttgaaagaagtactaaactttttctctctggtctttaaccatggccatgctaggaataaagcatcttccatcactttggaaggttcaaagtgattgccctgaaatatgaataaattcctatgctgccatatggagctggttagtgcaatccaccatccacaccatcgagtatgatttttccctgctccaaagtcatcaagaaattgggcaaagtgagttgctggagaagctgaaagtggtcctaccatctggttccacctcatggattcccaccatagtcctctggtcaatttgcaattgaaaaacaagtggccagcctcctcttggtaatacccacagagaggacattcattttcctgaatgggcacatttcttctaaggaggttatatctagtgggcaatctatctttgataagtctccaagagaa

SEQ ID NO: 1856 - DNA, 1396 bp, Glycine max
  misc_feature (1379)..(1379): n is a, c, g, or t
gtatgcctgcacatttgatttgttcttttctagcaacttaaaaggaacatggaatttcatatttaaatcttgtttcatccattcattttgtttccttggtgtctttaaaccaaaaacttgtaagagtttatcaagagtttgacagccatcttatgagttttaagtaaacacccacataatcggttaattatacacccaaatttatgaggctggatctacccatggtttttatctataagtcaaacttttgactgattttgctgggtacttgagttgaattgcatcttctattatttgtattatttttgaagataaaaaaaatttcaaaacaatgtcttataaaaagggacggagggagtactttcttttgctttgttgtagagttataatgtgaatatttctcatttatttaattttttttggttattaagataagttttataaatattatttttgaagatcataaactattttgagtttaatattcaaatatgctgaggtcccatgagtttgccactttacctaatctctcaaatttcacagccgtgcttttctctgaatttatttatatgctaattgactgcttcaatcttcattttcttgctatagctgtggagctatgacacatgattctaagtcatgcatggaaagaccacggagagtgggagcaaaatggacaaacaaacacattgctcctgatgaaaagatagaaacttttgagcttgactatgatggaaaacgggacagatggaatggctatgatgcatcaacgtatgctcgagtcattgagaggtatgaagctagagatgaagctcgaaagaagtacctgaaagaacagcagctgaagaaactggagaagagcaaccaaaatggtgaggatgctgcaagtgatggggatgaagaggaagaggaagatgaagatgaagatgatttaagggtagatgaggcaaaggttgatgagagcaaacaaatggactttgcaaaggttgagaagcgtgtgcgtacaacaggtggtgggagtacaggaactgtgaggtaatttttatgttaacatcattttaataatgcaaggccaagttaattaatcacatacttaagattctctctttcattatatgccttggaggaattggatctgaaacattttttcttcaggaatctacgtattcgagaggatactgcaaaatatcttcttaatcttgatgtcaattctgcacactatgatcccaagaccagatccatgcgtgaggatccacttccagatgcagatccaaatgaaaagttttatttggtaataacttgtctctagaatgaaaatttgtataaaacactagtttttactgccatatttaatctttatttggattaaaattttttgnatgcaggcagcaagtaa

SEQ ID NO: 1857 - DNA, 786 bp, Glycine max
tgcctgcacttgtgcagtgcaaagtgtgttagacaactaaaatattctttgcagctattttttcctttactttttgctttcatttattataacagaagtttgtggttgcaggcatccttctcactggggcaaggtttgtttcctctctaccccagatggtgaaaattgtggactagtaaaaaatttgtctgtcacaggattagtaagtactgatgtaactgacgtaactgaatctatactgccaaaattggtggattgtggaatgcaagaacttgttgatgatacttccactcatcttggcagcatggacaaagtcctcctaaatggtgattgggttggagtgtgtcccgattccagttcgtttgtggcagagctacgaagtagaagacgcagaaatgagctgcctcatcaggtttacttttaatatcccattttaagtggttttgtaggctctactagtcatttttttaatattttaaaacattcttttagtttgacccatgtagtggatctcaccttgtgagaaatggcttttgttattgttgtatgtttttaatttgagcattaaactgtaaaatctagttagtagcatttggaaacttaagtcaatattagctaataattttattgcttagtttatgtctttgtgagggctgtgattgccaatgactgacattgtatatggtttacctgctccacatgattggattaactgtttggacttcctttttttcattttttttttctggaatgatgctattgtttcctggcaccctgcctctgaat

SEQ ID NO: 1858 - DNA, 858 bp, Glycine max
  misc_feature (769)..(769): n is a, c, g, or t
  misc_feature (785)..(786): n is a, c, g, or t
aatcttataaagtcgacctgcagcagatgctgttaaaacatacaagaactaccagataaattacttccagatcctcatttttatgtgttaatcataatcctctcacgttaaactcatatcttggctacaccttcacattttggtaacccatacactcaccctcaacccctaatgtgcttggaaacgttctcatggtgtacgtacataaaataaagggcaaaagctatttgagtttggatctcctcatgtaacatttctgtcaagggaaacatcccttaattaaaaattagagagaaaatttaaataatagaaaaagagggacatgagattttgatagtagaaattttcatggaaaagaatccaagtaaaaatctcattgaagaatatccatttatgattaacttctgctcggacacacctatttaaaagtactatatgatttttttaatattgaaatttacttgtaaaaaattactaaacttcttatacaactaataataagaaaacataagagaaatcgccttgaggaagcagtgattgaagcaaactcttccgtcttctattttgaaactagaacaaaggaaaagacactctgtaaactcagcacactatacagacgaggcttttgggtcatggcatggcgttatatcactcactgattgcactgaaatagtgaaattaactttataatagacttcttttattgccttacaataagcaagctaacaagatcattacaatgaataatctaaatcgccgatgccactgncaatgaagagtcattnntggatgtttcattaacatgcatacaaatttttttttttttttggcattatgcaacacgtgaatatgatatca

SEQ ID NO: 1859 - DNA, 1451 bp, Glycine max
ctcggttacccgggggatccctctagtatcgacctgcagtagacagatcaccctgttcggctgcaactctagcctccgccattgcctcggccgctctaagcctgttccgctgtctgtctacctctatggacacaactagttctcctccaccaacatcaggtctcagaatttttacttcactgttttcttccaaagccaccatttcttttgttataggatctcggtaaagacatctcacggtcaacaacgacgtctcatcactcgattgatcaactggaacattaactgtcaccaaaaagtctctttcctcttcagcatacaaatctcctacactgatagtagccagtcttgcattccccatcaagcttgtttggtaacttcctgcttttactgaactaagttgcaattgagggtgaacacacctaacttgtacttgtaattcttgcaccaccacactcaagagtcccccaatacactgtgcaaatgcatcctgaatgacatcctcagcttcaatgaaagaaaacgtacctccagatatctcagatattgaatgcattgaagtagcatcatggtcagagccaaaaccaaatgcatgcactggtatctgcatgcccgtaccgttattacgatgaatggagtttggaacaagtgacaggtaatctgttccgacattaggcctgctattgactgtatatgtatcctgcccgtcagagagtaaaatgatgctgctaaccgagttcttccaccgtctgtcagaaaaaaccttggtgccttttctcaggccttcagcaatgtttgtcccaccatttgaaaccaaggaattcacagcctgtaatgcctgctgccgtccagtgtcagtcatcttccgaagaggaaatatgcggcgtgctgtggaggagaaggcaatgacagacagccggtctgatggaccaagattctgaatgacaaaacccatagctctttttagcagtgccagcttagtacccgccatgctaccactcacatcaagaactgtaacaaggtcaactgaggcacgcgagttttcaaccagaggaggtgattcggtattgttttctccaatattttgttttctccctgaatgaggagctttgagatgaattaatacagcaaaggcatcatgagaggcagattttggaacggatgaaacctcgggatatgttttgatctccactgtatttattacatcattatcaatctcgtttttaggatgggtaactgaagtttgttgatccagggcttcatcatcatcaaaaatagctggctcagtgacatgataaagtgatgaaatctgccgagcagcatcaccttgaggagaaggaagcctccgtaagacagtcgcccagccttcttcccgaggagatacttggttgagtcgatcatagggcatatttgaagcaggactctgaaaaggaacttctttccattttgct

SEQ ID NO: 1860 - DNA, 1428 bp, Glycine max
agcgagtcaagtggcgtggtgattctggtctccaagatggttttcaacaaagagtgagtccccatgataatattttcaagagattcaatgaattgtggtgttaagtcatgtttggacaaacttcttggtaaatacttgttgagaagaaaaagaaggtatataaaatgaatttaccttctggcacaagctaaaatcaacctatgtgactcaaattttggagaagttagaagagaaaacttctatcaaaattaaatgcataagttgattttagcatatatatatatatatatatataaagagaagctcaattcattttacttttttcttaatttctctctcttatgagtggtaaagaaaagtttatccaatcaagaacttagggtgtattttggttctgggttagagaccacgggtatcccccaacctacaggatcagaagttaatctcactagtggtgtgtgactaccggtggctcaagataattttacatactacatgagagaaatcaaacacgattttcttgctaaatagattattttcacttaattttgtttgtgtgttttcatttttgttgttgtgtgatgtgatgcaggtagacctggtgggtgggtactatgatgcaggagatcatgtgaagtttgggttgccaatggcctacagtgtcacaatgcttgcatggggggccattgagttcaacaaggaaatcacggacttgaaccaaatgggacacgcattatgggcaattaaatggggaactgactactttatcaaagcacacactcagcctaatgttctttggggacaggtaagcaagtgcaacagacagggatgattgagttctttaggtcggccaccaattttcatctgcttaagttaattattatatatagttctatacacaagtttcctaattaagaccatattaagttcttcattattatttgacagcattgccattatatatcattattattctaattcaaatctatatgtatcatttggtttgacaaactactttcatgagaggaaatcaataaactttttgataagtatatatatactagggaaaaaaaagataaaatgaactaaacttcccccagaagttaaaactaatttatacacatcaatttttataaaagttttctcacttcttcaaaaatggaagtgtgtatgttgattttaacttccgaaagaagtctgatttataattgaaaaggttatcctaacaaaaccttcaaaagtattattactctggtattgaatgttaagcatgcttacggtaatgtaagatatttctttgctatgagaaattcaggtgggagatggagtttctgatcattactgctgggagcgtgctgaagacatgacaacttcaagaggtgcctacaaaattgatgaacaacaccctggctcagatctggcaggtga

SEQ ID NO: 1861 - DNA, 797 bp, Glycine max
  misc_feature (759)..(759): n is a, c, g, or t
tgcctgcaggctcaattctacgcagcatgaaccctactcccctgcttgaaccatcttcatcatcatggtatgcataagcaaacccaccatgcctcgtcaaatccatccccgcagtctcatcatccctcgaaattctcaacagtttcatcttatgaagcccatagaacaacggcgccatggtcgccgtaacccacccgcacaccaccaatatctgaatcacctgcgccgccagcagcctccctccgccacccatcaaagccccgaacggccttccaccaccgtaaatctcctccacgtactctttcttcgcaaacaatcccgtgaagaaaaccccccacgctccgcacccgccgtgaagctgcgccgcctccaacggatcatcgtactctaccttcgcggcaagcttattaagcccaatcaaaacccacgccgccacaaacccacacacaatcgcggcccacggttccacaacggcacagcccgatgtaatggcagcgaacccgccaagcaggccgttacacacgtcaatcacgttccagtggccagccaataaccgcttgctgaacaacgtcgtcagagccgcagtgctcccagccaatgtcgtcgtgacagctgtcctccctatagcgctccattgaccataataccctccactttcataccccttggctattgtcagaaacgaaccagggttgaagcccgtaccagccgaaccataacaaaaaacgtaccaagcacaactaaagacgcgctgtgggncacgtaaaagcaaccgaccggcccgaacggtcgaaccg

SEQ ID NO: 1862 - DNA, 810 bp, Glycine max
  misc_feature (709)..(709): n is a, c, g, or t
  misc_feature (757)..(757): n is a, c, g, or t
tatacgattcggactcgtacccgggctcctctaaatcgacctgcagctgatgttaacatgatggggtatgccaacactgagcaaattgcatctggggttcacttcaggctgcgggctcgggctttcattgttgctcagccaaagggtaaccgggtagtgtttgtgaacctcgacgcttgcatggcttcacagctcgtagtcatcaaagtaattgagaggctgaaagcaaggtatcaataatgacttctttgctctcaagaaattactattatgataataacttgtagaaattatggaagattgattatatgggagattttcttatatatctgtgagtggcagctggaccacccggccaaataagcttctgtggcatagttgaccaaataactgcctacgcctttcaggctaggagcttgagggactatggaccatttggccgagtaagtaggtcgtagatggctgacctacacttgtaactccgaggagcatttactatggccaattcactctagggcactaacaatggagaggccctaaggctttaggagtcaacggacctctcggatcttaaggcccaatataataaaggtctagatcctcctcacgcatgactaaggcaccattcactccaccctccagaaaaaaaggcaggaaccatagaaggacacacttgttaaataggcatgactaacccaggtcacactanggtatgcttggtagagtctaccagggtttcttgagttacattgagctntggattctccgggattgcgttctctgcatgaaagcggctgatgtttccattaa

SEQ ID NO: 1863 - DNA, 1270 bp, Glycine max
tgcctgcagcaaagcagatggcttctgatcttgaggagcaggaattgaatctctctaatttccccatgcgtaaggagagtaacgtgccatgggaaaatatcacagaagatgaagaaactgaattggggactgttgttacttccaaggatgatggagctcgaaggcctgccataaagggatttgggtttgaagatgatcgccttatgaatggtaattggttgaaagaacccaatgccgatgtccttttgctgtttttccggatattagcagtttgccatacagccattcctgaactgaacgaggagactgacagttgtacatatgaagccgaatcacctgatgaaggggcttttctagtagcagcaagagaatttggttttgaattttataggagaactcaatcaagtgttgccatttgtgaaagattttttgctttgggtcaagtggttcaaaggtgaggtggacattcacaaactccatgatgcttatccttttcctattttttggggaggggttctgacatttgcttttgaattcttttatttatgatgccaaatttcttagcttttatttgtatatttatttatttaatttttgtgtttcggttgagttatacagagaatataaaattttgaatctgctggactttactagcaaaagaaagcgcatgtcagtcattgtgcgtgatgaggagggaagcatcattcttttctgcaaaggagctgacaggttagcatactaatgtgatttctgtctatattattgtcagctcagctgaacagatggtgttaatgatcaagtaggacactgggaccgtctatcagtttctacaatggaatcattaaaatcctattcatgcttgtggagtttatattctacttactactagcatactatataatcacaacaactccctgcttccagaggaagcttgtgaaaacacacatttatgctgtcatagagaggcttttgatgtccctctctaaactttgacgtccattatcttcttgcctggttgtgcagtatcatatttgatcgactgtctaagaatggaaaaatgtatttggaggctactactagacatttgaatgaatatggagaagctggtttgagaacgctagccctggcttacagaaagcttgatgaccaagagtactctgattggaataatgagtttcagaaggccaagacagctgttgggtctgagagagacacaatgcttgagcaggtttcagatgttatggaaagagagttgattcttgttggggct

SEQ ID NO: 1864 - DNA, 813 bp, Glycine max
gcaaactcaagcagccaaacgacatcgtttatcgacggcctgtgcgtcccatcttctaacaaacaactcatcccaatctcacaaaacttctcgaagcactcgggcgcgatagtccccttcaacgaggggtccacaatctgtgccatggtcccattttgataacagcacctggcccaattggcaagcgacacctgttccgtctctgcattgtggatcagaggcggtcgagcgcatagtatctcaaacagtactactccaaaagagtacacatcagacttctctgtcaaacggtaccttttataatactctgggtctaaatatccaaagcttcccttcacattggtgctgacatgggacttggacgtgtccgtgggcccaattctggaaagcccgaagtctgaaaccttggccacccatttatcatccaataagatgtttgtcgttttaacgtcgcggtggatgatcatgtgctttgcgcctgtgtgaagataatgcagcccacgcgcggcaccgatgcaaatctgcaaccgttgcttccacggtagagtggggttatcggtgttgtagagatggtcacggaggttgccacgtgtcatgaaatcatagaccaggatcatttccttattatcgttgcagtagccgatgagagagactaggtggcgatggcggagttgtgagagcatctcaatttcattcagaaactcgtgagcccccctgttgtgaaccccgtttcaggcgcttgatggcgacaggggtggaaccgtcatcgatgtagcccttgtacacgtgggccaatcccccgacacctacatg

SEQ ID NO: 1865 - DNA, 633 bp, Glycine max
ataggagaaaaagtacaaggcaaaattgcctaacccaactgaaaatacaggataacaatagataagccaaaaggaaatcatcccttaagacaactcctccctcaaactagtggaccattgattaaaatgaatatggaagtctttgtccatatattttaaccatgcccaagtgtggaataaagcttcgtccatgacttttccggagtcgaaaatctggttattaaaaaccattgaatttctatgcttcccaatagtcatggatagagctatccaaagcactgcccatctattatctatacatctattgctactccagcttgaaaattgaatgaagtggtctttgggatcagtggggaaaggacccactctgtcagcccatctcaaagcctcccaccaaagactcctagttcttgagcaagcaaacatgatatggccagcagattcctcctctccatcacataaaggacaagaatacgatggaaggcacacctgcctccttcttaggttagccttagtaggcaatctatctttaaaaattttccaagagaatgcagctgctcttggaggaattttcaatttccacataagcctggaagcattatcttcatattctgagctgccatcttccatgaa

SEQ ID NO: 1866 - DNA, 802 bp, Glycine max
ccaaaagaatatccatacatctcactgatccatcctttcccatagatgtcaccagttatgtttgtcgcccagtgagccctatcttcccgtacttcttcggtttttgaaagccacaagggggcaaaaactcgcaggtcatctatatgaaaggccaaaagcccaccaactttgtcacatagttctgggtgtttcgtgtgcaatttagccaaactgttgtcacaacctattaagtacctggagaaataatatagaatatatagcaagtttcaatggtgagccaaggaaagaaacactaatatgaaatacaagatataagtactcctttaagagatttaatcaagtttcataacttcaagaaaagctctctagcttgtgcattaaaaaaaacctattccctgattcatatcgtcgagtgaatgcattatgaccaatgtaaatgtagaaaaagggctaaggcatccagaatttccatattgttataaattgttaatagctaaatgtaagctgtattagtccattagcctccttccaaaatatctgaaatggaagtgatgggtaaatgtctagcggcttacactacatcactaaaagaaaaggtgtgaaaaagaaacaagtaaaaaattagtgaatacccataatatgctgcaacaggtcttcctttctctgcaccaagttcccaaagtataattggccctcggattatcatgtctgcatccagaatgacaacccaatcaacattttttgccttcttactatgtttaagcccagtgtacaaccccagcagggtttgtttattggcagg

SEQ ID NO: 1867 - DNA, 842 bp, Glycine max
tgaatcacccaagaggccaagtcgagtcactggtgccattaaacatagagggtttgttgcttatgagcgggagggtgttcagtatagggatcctaatgttcgcatgactgattggaaggaagtgatggaggagacaaagcctggtccccttttgaaaacacagtcagcgcgttgtatggactgtggtactcctttctgtcatcaggtgtgcttttcgacttccaagttttcatttttaatttacaacttacatcgtcccttcaatggttatttggacatgcatttaaactgaagatatttgcataaaatttcaggaaaattctggatgtcctcttggaaataaaataccagaatttaacgagttagtataccaaaataggtggcatgaagcattagagaggcttcttgaaacaaataactttccagagtttactggtcgggtgtgcccagcaccttgtgaaggttcttgtgtccttggtattattgagaatcccgtatccattaaaagcattgaatgtgccatcatagacaaggcttttgaggagggttggatggtgccacgacctcctgtcaagagaactgggtatgctgtttttctttctaatatctcatcagtttcattttcgttattctgctgttccttttcagccaaacatgcataccctccaagttgatgtgcagtaatttttctgtttttaatctgctcaactttgttacaataattagatttatttaactaatatctttactgatacaggaaaagagtagccatcgttggcagtggaccattctggcttggcagctgctgatcagctaaataaatgggtcatacagtaaccgtg

SEQ ID NO: 1868 - DNA, 864 bp, Glycine max
  misc_feature (761)..(761): n is a, c, g, or t
caagcttgtttgcctgcagcccttgtacagcagagaaagagtgcaaaataagaaagataataaaacatacacaaaaacacataaaaatacatattagtctaacaacacatggaaatgcttatatacttctcaacaaagtcttctcatctgtgacccaggatgaagtgtttaaagcaatatggaaattaaaaatctcaagtaaagcctcaatctatgcttggagattaattcgggatagattcctacaaggaataatttaagaagaggcgtggaaatcaatgatgctagtgccctttttgcagaagtcatgaggaggatgcatctcatttatttttcagttgtgatgaagtcttgccgttgtggtgggagtcaatgtcgtggataaatactgtgggggtattttcagaaactccgaaaaaccatttccttcaattttctaattgtaattctaatggttttaggggtcaacgatggcagagttggtggatcgcactcacgtggtgtacttggcatcataggaatagattgtattcctaaatgaaagctttaatggtcataaattgatggaggatgcattattcttctgctggacctggtttaaaaaaaaggatttgatatcccatttcactcatggtctagtagtattagggaggttttttgtactcgggggaatagtatataaaatgtacagttttgatggtggggtggttacctagctaatagccagatctttggttctctatacttattctgtatattgnattagctaaccataggtctgctctcgttgatgctaggctgtttgtatatcagtaccacttgtactgctttcattatatatatatctacttttgccgatcaaaa

SEQ ID NO: 1869 - DNA, 833 bp, Glycine max
aacctatggccattcagagtggacgagctaagagattcgaagcaattggtgaagaaactgagcatcccccaagacacgaagcaattcgtattcgcgctgcgtgatccccatacccaatccatcatttacattctctcctctctcaatttatcggagcgatcagcctccgatgccatgtgtctcatcaaggagatcaaacccgacgccgttttggtgcaagccgccgtttcccccttctccgagcttcagtccgaagaggactccgttccggtaccgacctcttctttcggggtaatcaaacgttgttttcttgataaaattggtagggacatgtacgagagtgttgcatgtaactttgtgttgagggagattttcgggaccagttttcatggtcccttgttggctgctaagagggctgctgaggatgttggatcttcgtttcttgttatagagtctccttcttcttggggtaatagtaataatagtgatagtgatagcaactcctatagggggagtcattttcggagtcttattaatagtttggttcctaagcagcatgctgcttcttgggctccttcggctttgaagaggttttctcttgataaggaacttaggatgatgttggccaaggctttatctggttctttggatccacttttgcttagtagtggtgctaatgctgggtctgttttggagaagggtaatgaggaaattcagccatcgaatagttatgagacccctgggtttgccaggtctatttattgcttgcttgaggatttgtataatatatttgggtgatccttcctcgcttgggaaggcactggcccatgtgc

SEQ ID NO: 1870 - DNA, 828 bp, Glycine max
atgttttcaattgcacaaatcctaacctttcaaaagattgttattttaattaaaaaaaattgacagttattttaattaaattgaaacatgaaatttccttttgaaaattaatcgcagttgaatttaaaactgcacctccaatgagcctgtttgaataacgaattaggagtttttctattagatttttttttggttagaaaagtttttaaaaacttttttaactttgtattcaaacaggtctaatatatagttgaatcactcaatgaaaagacgttaagttaaaaagagaaaatcaactggagaagtgaacactaagattatgatgaaattcctaaagaaatccatatatcgtaccttaattataattttatattatgattgattaaaatatgtaatttaattatttataggatttagctcatgaattataaattctttgatattgttttcaattcccatgaatatatttttcttttaattattatggttcaatcacgatacaactgcaaataaaccagtaaaatgtaagcaagtagtttcacttattccattaccagtccaaatttctaaaacaggccaaaaatcattttagtcatcaattgtttacataatacagcatacatccaagttggcaaagaaaaatacaatttctggtaacataggccactagttacagcccaattgcaagaccctaatcttttaaaacttcagcgtgggcgttactacataacaaactctgttcttggagaactatattgatggtaaatcaacaactaatgaactaacagtggattcactgttttgcacactcagtgtgcataatcattg

SEQ ID NO: 1871 - DNA, 842 bp, Glycine max
attcggactcgtacccgggcacctctatatcgacctgcagtattgccttttgtgaccatagataccacaaatcgcaaatttccaacatcaacaatcattcattaaccaactagctaggatcagaaccagtattacaaggactgttataaagttttgtatgtggtacatgttcaagtacacagcatgggactctttgtaataggcggtaccaaggagtagactaagtcagttcataaattagttaggattggaatttgctagaactgagtcactattcataaacttcaaagcacactaccaccaagtaaaaaaaccttcatattatctaatggcccaaaactgaagtttctgaatggccatggaagtttatttaacatggatatgtttcttttacaccactggttttaaactatttttattgaaaaaataaatttcagaatttttgcctctggactttctacaagttgcatctactaggcatattaaatcagaccactgttatctttctttctgcttagatatcacttaacttatagactgttcatttagattcactatattaaaaatattcaaaaaaatactacatagaaaaataacgaagaatggggattagaagtatcaccaaaagtatatttaaaaaacaatagaaatatatctttccgatgaatgaagacccacctcaacgtaaactcacataagaaaacaacacaaacaatatagaaacttctggtcatcatttctgtgaggatataaggagcagggaaagtcagttaacatagttagactattaataagttagttaattagtgagctaaaggggtttattagatataaataggggg

SEQ ID NO: 1872 - DNA, 810 bp, Glycine max
  misc_feature (775)..(775): n is a, c, g, or t
tgcctgcagtcttgatgtttaaataatgtaataatagattgaagttcacaggacacaggttctataatttatgtttccttccataaattttaggtgcacaatcaattcaaaattagctcttctattaatcaaaagatttgttcttcatatgtaatggtatttgatatacttctcctttttagcaatcaagttatgccttgttttatgatagcaaggcaaaaatcatttaccatgttcatcataacatcaaaaatagcaaaaagatcattttatgtcaatttgttcgaacaaaagtagaagtgtattccctaatttagtgtatttttaactttcccaaaatgtttttttattggcaaatgttagttgttaattgttaattttttgttagtgggaggattcgaacccacgacctccaactccaagccaaccttataactccaactttcccaaaatgttcaatattatgttttaacttttaactataactaaaccaacataaaattatcataaaaaatgcacacaaagactcaccacttatattcactcctactgtcaaagaactaattgttactattatttaaatatctgttttgttcagtttctaaaactttcgttattccaataaaatcgggttttttctttacaccagtatcaaggctgccttttctagaaagtaaaatgagggcatgttattatgcagctttttgtaggaattttgagggggaaaaaagttttagatgctcaaaagccaagcagtaaaaactgcaagatagcnaagaaaactcaccagtattgctctgactgttcact

SEQ ID NO: 1873 - DNA, 747 bp, Glycine max
atttattgctatcatagcgtcattctctaattttatatgataattcattactcctaatttggaatttcagacactagtttgtgtactttcaacctcaaaacagaaaaaaaccaaaaagatattctggttacgtaacttagctagctagtggctatttctgagttttttcttataaatcagtgagcagctatctagcttaagtggtgacagtaactttatgttcccaacctcactactttttaaaagataggggcaattcagagaggtccctataatattagataatcagttcaagaaatctttgctaaattttcggtataaagaaaataaactaaatttcagggttgaaaaacatccagcataagcacaataccatttacttcacttatttagtcaacacaaccaggaggataaatatttaaagttttgaacagttcttacaaattatagtataacaatctctagtgattagtgaataagtatgccactgttttgaagtatattaggatagaatatcaaaatagatttgaaacataaaccattctacagaaccaacatcatcaaagaaatagatatgggggctaaatatgggggctctttgggttgcaattttggaggctaaatatgggggctggagaggtctaactgaaaagggaagctcaagtttacagtcaatttggtgggagggatgaaaaaaaagttatccattagtcacaccatgggcaagactctacctcagcaaaatta

SEQ ID NO: 1874 - DNA, 825 bp, Glycine max
  misc_feature (790)..(790): n is a, c, g, or t
  misc_feature (802)..(802): n is a, c, g, or t
tcgacctgcagttggtagggatagcgaatctgggacggggaacatctccactttcccatggtctctcttcacaaaatcccctaggagaaggatgctggtggcttttacttgtaccatctgtggtcagcgaactacaagggctattaatccccatgcttacactgatggcactgtttttgtgcaggtaactttttttttttgttaatcttaacctccgccatatcacgtgtctcaataattttcttgggctgaatttggaaaccaatcctaaacttgtagtacgctgcaaaaccaaaccaattcatggtttaatgaattaactgtggttaaactggtatgcgtgtaaattaaatgaatctttatcttatatataaaaataaagtgtgtattgacaacatgtgtgctgctagactagtggtagatggcttgccacatatcgcaaaaactcgaaaagacaagttatcctgcacagccagtttcaagaatttttcagtgttaatacattgaactggttcatggacaaatggactggtttgtgtggttcaatggttctaatgccggttttaaattaatggtttgatcaaactgggcaatgtctttttcacggttgaacctgtcagactaattggtgcactctgttttttgaaagattgccttttatttattctatgttagactaatttgtttaatactaaaaaatgagtaatgttataactttaaaatatttaatattttgatacataattttattggcttaataacatgtgtatatgaattttcttaacattgntgcatagttatngtatataccatgaatgtacaact

SEQ ID NO: 1875 - DNA, 821 bp, Glycine max
atttggcatcttctgtttaatcaagcataaatgatatggttgattaattagtgatatatcatgttgggatgctgctaactgaacggttgaccactacacagtgtgatgttttaattaactttgcttcaacattaccttatatttaaagaattaggaatagatttaccagtaggcccttatgataagaaaaataaaataaatttactttctcctcaattaaaatcggcttctgcatttcattttttaagaggttaaatgagagaatttctctatataaaaatagataagttaatcacaaaatttcaatttctttttcttttcttcttttataattctgtttttatttaaacattattcttctgattaagtgggtttgtgaatatggattgcccaacctaatttacctaaaaatttggaataaactaagtaaacttattttgtcatcattaattagtttaatgtgcattactttgattacttgaggataaaagtgtgttttacatatctttatcatatagggaccattcgatgggcaaaataagataaggtttaataggataaattattatattctttttcagtcaatttttgatacactattaaaatataattagtttattttaccatctattatatcatgctgtatcagtgtagcttttatcccacccatcttaagaaaaaatatatgttggagaaaaaagaaaaatataagaaaaagtaatgacagaagtgataaattttgagaaaagttctttgatgttaatgaagaaattggtttaagtacaacttagaagtggcgtttgatttggtaaaaggtgtca

SEQ ID NO: 1876 - DNA, 785 bp, Glycine max
atcctctaggatcgacctgcagtggcacacatagtgacaggagtgatagggtcaggagtgttgtctttggcatggagcattgcacagcttggatggattggagggccactcactattgttttctttgctgccatcactctcctctcttctttccttcttagcaacacatatcgttctccagaccctgaacttggccctcataggagctcctcataccttgatgctgttaatttgcataagggtaagttctaacaatttcaatttcaacagcaccaacatgattcatatcgtgttatatttgttttgtttgttagtactatttccatgtacatgttatctgtttggatcacttcaatttgtgcgtgatctgataagataaagtggaggaaatcatggatgaagtttcttttcttgttgccttatattaacaaataaaattgtggtgaatgtgatggtgataagggaaaacgtggctttgacttggaccaatggtaacgtgagtgagtgtgatgtgtcccgtatctaactagttcagttgtgtcacggcaaccatatcctctgcttctgttgtgtgcagattgagatcacaatcgatccttttgaatgcttccacatggatcttgctcattacactttcatcattctctctctcttcattaggccacacggaaccacataaaaaagatagagaaatcattcactgcttgaaatgatattcattttcttaatattttacttggctctaccataatatatttcagtatctcttatacagaattttcttt

SEQ ID NO: 1877 - DNA, 1354 bp, Glycine max
  misc_feature (1339)..(1339): n is a, c, g, or t
agaataaaagagccaaagtaacaagccaaaaatgtgctggttctaatcaattaacttgaaatatatctaatagcagacaacaattaataagaatatttacaaatgcaaataggctattaatgtgaccttcggtgtgaccaggtgtggccaatatatgcacttcatggcctgcgaacatccagttatcaccatcactcaaatagatatcaataccaggaattctttccttgtctatttctgaaccaattacctgtaagacgaagaaatgttacgaataaatcaaagtaacctcacttcatatcttctctttacattttctgacaacacatttataatattaattaaaaatagaacaaacttcgacagaagatataaatatcatacctttgccccatacctttctttcaactctgcatttccaccagtgtgatcaggatggtggttggtgttcagtatgtaagtcaaatttaaatctttcttgctcaacgcatctatgataggcgcagcttcggaaggatcaacaacaccaactgtccccgtatccacatcgtgtaaaagatatgcataattgtccctaagacatggaacctaacaattaaagaaaaatgagataagaaactcagcacatgctaggatttcagcatatggctccagagcttattagcttgagcaacttgagtgactaaatactaatctaattgcatcacaaaagccttataaaaaggaagaagagatctgctcaccaattctatctgcaatgaggaagatagattcactacactgcaaaattgatccactctcaacgaccgactagctccgcgcaatgtttttaatggtattgaaaataatcgcataaatccatacagaagacctttccttaagcaaagttgtctcgcatctggccacacgcaaaacccacttctttcctaaagatagagaataagcaacacctattgccatatcataatcaatccaaaataaaagttcacagggaaccaaaatagaaagtacatacaaatacgagcacattcatctgaaccaaaactcgcaatgccagcgtgaataatactaatgccgtcgtagatgatacgaatttcactcaggaaacccttaaccccgtgccataaggccattaaattaaaccgaattatctataaataaaattactaaaatattatagtcatacatttccaaattacaaggccaattattgcttccaaccaaattgtaagagatctacactgaaaagatctgaacacgcggaaattcagcaaatcaaaataacgaacacggagattcattttcacacaggcactgcaggtcgatcttaagagggatnccccgggttaccgag

SEQ ID NO: 1878 - DNA, 1373 bp, Glycine max
ctgcaagactttttgaggaaaaatcaccaacagtatcaccattcaaagatgtgaatgccgatttacatccagttgaaagggctacaggtccaccaaaatgaaacaaggaaaaatcattgttattctcaagtgacttggcagaattatcatgcctaacttctccatgtgatgctggttttttggaaataggtccagctggaaagaccctttctgcaaaagatccattaagatgctctggcaaagaagctgtcttggaaactcgagtccgctcctctgcatttaagacattagcgctggcaactggctgataaactggaacaccagtgttgaataaggaggttggttgctgtaaggctccatactgcaagcagaagcgatggtcctcatttaagccatatccaagagggccggcatataaatagggatttgagtgtgggaagggtatcaacccatttgtgggagctgctggccatgaaactggattttgatggaaataacccattgctgaaggagcttgaaacactggaaaatgtatattttggtttgacaccggtggaagcatactttgagattgagaacacacattagtggtggaaaaacaattgtcaaaattttgggcagtttccacaataggattccccaatgcataatttcttgtaccatccaaggatgaactaattagtgagcttggatttcttgtcaaaccctcaccatttgcattctggctattcactatagaaacatcatgacaatgagacaagacagtttcgacgcaatccaaattatttcttaattcggattgccggctagcatcttctgaatctgatgtgattgaggattctgtattttcatggcttgatgaggttgtattattatcaccctcacttaggcatgatgagcagttatcagaactaaaagtgctactttgagttgaatcagaagaattatttaaggcaaagcctccagttggacatattccagattcctccaaagcaatttccgtagagctacaagaacctttagcttctacgtgaaaatcatcttgacagcgttcatccactccactaaatctttttgaattacattcctcgtcatcattttcacctgaatcaacagcttctccaatagacaacttgatcagatcagactgagctccttgaactttagtggccctcaaaataacatcagagtcagaattactgcgcagatatttcttttgagattctgtaggctcccaaactttcttcgattgaaacaaatccctgctggggtagttccccgagatgattttgcttttggctcttccattactctcatgcatatagtctacttgattattcttattaccacgacaaaattgcttggatgtatct

SEQ ID NO: 1879 - DNA, 828 bp, Glycine max
aggtggatcagttgaagacactgttgcagcattctttcagtctcttctttttctcatccagttttaatttcgcccatcatgttccctttttcactcccacccattactctctctctctctctcaaccaagttatttaataaataatactacaatgcaatctctctttgaatttgtccttttcttcttctgagggagaatggcgaaagagctttttctgcaactttgcttgctgcttcttctcaatccctcggatccatgttcaacttcaactcgcttctcgcaaccaccgactcactcaactcaggtgcattttctcttttcctttccttctacattatctttgtatcccaatttgttatgttttgaactcatggttattatacaattatttgataacaaaattggttggatccaattatgacaattagtatcattatctaagaattgttctcatgcataagatgcttaatatactaattgactatgagaatcaagttacctatgatctaataagtttatgtgcatatatgctttagaagcagtaacttattttccaaataaagtttctacaaaattagtatctacaattccatatgtgatatggaaagggttcgaatgaatctcaaacgaaaagccaacgccatgaaaaaaaagcgaaaaaccaactagctaattttgcaattctcaaaaagcctcctgctgttccatttatagttctctttttcatcatttgtaatgcaataatttaagggaatttagatgagagtttaatgggataattataaaggaagataatgctaatgaaaaaaaataaatggatttatttg

SEQ ID NO: 1880 - DNA, 850 bp, Glycine max
acccgggggatccttctgagtcgacctgcagttacttttgcggagaaacacgagctcagacaaatctacgttcggagcacggctcgcgtctacgagatttactatgcgcccaattctcgcaccaacaacgactatctctctactgtccgatgcggtatcgctgttagagacgatcaggttcttcgttctccttctattcaaaatctgagcgacgataacgttaataagactgaagatgattgggttgaagtcaaagttcctgattctccttcccaaaccaaaccctaccccaattccaccaaaacctctctgtctcagtctcaggtattcattccattgcacttcttctccttcaatgcttattatttcgattgttaaatgattgcaccatttggctcgctctcgtttaaattagcaaataaatagtacgcaattaatggatattccctatgaagtagaacacaatgttgcatcaattcagtaaaggagaacatagtgttgttcctctgtaaaacaaataaggacaagagagaagatattcaaggcactgaggtaatgaattctgtatattttcatttcagcaaaaaggtacaattttatatacacgtattaccctaaagggataaggtaaagaatgtcctttttgcctcacaaattacagctcatactattctagaatttactctaggatcataacagaaaaatattcacataaagagatatttacaaaaatgagagctattgggctgtacgggttttgggccattgttctgttactctggagccactaaaatccgctcagaggttaggtttagtagccgcgacagcaattgggtaaaattgcttgtag

SEQ ID NO: 1881 - DNA, 780 bp, Glycine max
ttagttcaagttcttctttaagctcatggcattacagctctacttgaaaggaggaggctaaagaaaagggttgagttgctgttagctgtatttttgtgtttttttaatgcttttagtgatccagggaacttggtattggaattgtatcatatagtcctcttggtcgtggtttctttggcggcaaaggaattctggaaaatgtgtctgcaagtagctccctggtatatagcattttagcatttacacgtgtgtttctgatgcttaccatggaattgttaatatgtgacaaactatcaaatagcaatgattaattctcaatcttgaattaaatattagttggtttattttctattcagttgcaaatacttgtgtttaagttgaggtagcaatgcagtggatggcatacttatttgtgttttttttttttccatgtaagagtataaaaattagacggtttcgtttgttaacgaatgtgtggttgttttgtgatgattatttcacttatcagaaagtacatccacgctttcaagccgagaacatggacaagaacaagaatatatatgaacgaattgaaagccttgcaaagatgcatcggatcactcctgctcagttggcattagcgtggctactccagcaaggcgaggatgttgtacctatccctggtgagtggaaaaatatttgatactcactagtctgagcagggtacctaattttcaagaatatggttttttatagtaaaatctgaacaaattattatgtacagtatgaactttgtgctat

SEQ ID NO: 1882 - DNA, 858 bp, Glycine max
ggaactcgttgcctgcggttgtggtccaacgccagaccaacactaactttttgttttacctctcaaattcataattagtgtcactaaggtcaacactaattacaaaaaaaaaatactttccgaaaaatatagtgagtcatggtcaatgttatttaattaaaaaataaaaagtgaaacaaaatggtattcgaaaagttgtgtttagctaacgttggcctgacaaactcttatagcgttagtgttatggctgatgctaattatcattaatgtatcttgtagtcactaatgtttcttgtagtcactaatgtatcttattaattatacacacctaatatatcatttgttgtcaatatactaataaggtatagttacacaaatatattggaatgaagtgaagcacatacttcattatcttggaggtttatttgttacaaacaaaatatttgtaaaactaaccataacagtggcatcatctaatcaagcataaattttagctttacacaagacataggggaatagagacctgggctacattattgatatttttatagcttgctgatattagcctttgtcagcctcgttagcctcattcacgacttagtggaattctctaacagaagttgaatgttgagtgcttcaggttgagatgctcgaatcttttggaggtgtgttagcatacttccaggtaatgtgttccagtccatagtagtgtattccgcctgctacatcaccaatgggaaccgcctcagaaatttctctcaggtccttctctgacagtttcactgctaaggcacctatattctgatccaggttcttaatcttaattgtcctgtaaataaattgaagaaatagttatgc

SEQ ID NO: 1883 - DNA, 838 bp, Glycine max
ccaaagcaacttgcaagggacttcaagtcccaaaagctatcttgttgtctatgttggagatgagatgagacggtttgtgattctagtatcatacttgaaccaaccttcatttcaagaattactaagtcaatttgatcatccaattggtggtctcacaattccatgcaaggaggatgagtttctaaacttcacttctcgcttgaatgagctataaatctattggagaatactagcattattttcctctctatagacttaaaataggcacgggacaaaataaattagcgtggaaaaccctttcaatgtgaaaggtaaaaaccacgggacaaaatatctctcaacttcatccaacaaggatgacttacaatttgtctcaactctcaccaagtgtggtgtaaactataactctctaacacaagatcagtcagagtcaggggtgggtgtttgtcaccacaaagcgaggactagcggaagcgtagtcccaagatcagaattgactctaataccatcttagaataaataatgtgaaaggcctaactcaatcccaaaagcttgctcaaggggtgagggttgcccctcacttatatattttagtgtagaattacttttagccgatgtgagacttggattatttccaacaatttcaatgtatgtctttgagatgaacatggaacaaagaaaacatttgttctgaaacagctctagacacatatttttttataacacgagctcatttagttcctacttgcaacatcacagaataatcttgagttaatttgatggtctttcctattctatcatcaatggaaaatcactcatttccaaagggtcattgatt

SEQ ID NO: 1884 - DNA, 688 bp, Glycine max
gcgattccactcgtacccgggggtcctctaaatcgacctgcagttgatgccatttattctactaaattggtttgtgcaatttttctcaacaagaatttttacaagtttgacactgttaagtaataaatctaaattgaaaagattttctgaaaaacccttaccaacacacaacaataacaataaaagtcagttacataaattacaccttgttaattaaattttaggagatatattatttactataagattcatctcccttttcatgaaataaacacaccatgtattctactctcgtcactcatgtcttgagtggtcttctttctgtatgtcgaaatcattttaaccccccttttttttccatatctttcaattagtattgcaccaaatatctcttcgtgtacaattcttgcccacacaacatgaacacaccattattaagattttgagttaaaaaaattctatttatagattctttaggtgtccttttaattagagcacttgataacaacattgttttgttaaatattcctcagaagcactcttcaaaagcaaaagaactccacagagcaagcaatgatattgttcggtacgaagagaccaaatgggcagcagaatctgcaaaagctcaagcagaagctgagctttccaatgctaaacagacagtgaaagattttttttctatgattgg

SEQ ID NO: 1885 - DNA, 822 bp, Glycine max
aatcaaatcagatgcattgtcaattgatgcagttgcttcatccagcaccaatatcctacttctccttaaaagaacacgccccaaacaaaataattgcctttgtcccatgctccagtttgatccatcttcaacaactatgtaacaacatattactagttttttatcaactaggaaaaaaagtacttgtgacatatagttaccataatgatgaaagtgtacctggggagttcaggccctcttctttctcttggacagcttctcgcaattgacacttcccaagaaccttcacattgagcaacaattaggctacatctgcaatcttaatcaaagacaagaagaatgtagttggttttacctcccatatctcgtgatcagagtgttgagataaagggtccaaattatatctaacagtcccattaaaaagggtaggatcctgaggtataacaccaaaacgtgacctcaaatcatgaagaccaatagaagatatatctacgccatcgactacaatttttccacctgctggctccacaagacgaaataaagcgcctataagagtggacttcccactgcctgtcctgccaacaattccaatcttgtgccctgctttgaatgtgcatgtgattccatgaagtacaagtggtccatcaggcctgtatcgtatctgtcttggtataaacaagcaaattatcaatttcatttcaatgactatttttatgaacattatgattccccatttaaataatacccattacctgcaagtcatttagttctactttaccagcaactgggccaattcgagggaggacgatttccttctattac

SEQ ID NO: 1886 - DNA, 846 bp, Glycine max
gccatacttgctgcctgcaaagactgctagtgacaggggtgacaacctagttgggatgcctgtctctattgagtcatgccattattgttccaaagaaaagcactatacaaatgtaccactgttttataacaaacaacaataatggatgttactcagatacgtaaacacaagcacaaatacctagaagtgaatcaaccacatgagaatctggctgtacatattctttgcatgcagggtggacttgttattagacatgaaatttccaaattggtataaatttgtcaacacatatattaagccataaattccattttcaggaaaatagtgaaagtgttcaatttattgcctagcaagaaaatatggtacaattgatgcattaatcaatcatgcatttgtttaagaaaaaaatcatattaataccttccatctcaacagaatcatctttactacttctatgcaaatcatcaattacatccttgtccagagatttttgaaatgctttctctttctcatgagaatcaaaaaccttaggaattggaagcaaggcatcctcagcattagctcggtctagtgcagttactgtcaaaatataggaacatcagttagtagtaacctacaacagcatcaggaatacaattactaagaaatataagatcagcttattttggggggataagttcaaaattagttataggatcagatagcaaaattatgtgcatcaaagcaagcatgtaaaataattgtaagatatataaacacatatttaggggttcccaactaatagctcaaacttttggaaatagtttattattgacaaaaaatagtcaaaataagagaatgctcgtg

SEQ ID NO: 1887 - DNA, 748 bp, Glycine max
acccttccctcctcctcgatctccaccttcacctcttccttcttcagccccggcaggtctgccttgaacacgtgcgcctccgccgtctccttccagtcgatacgcgtgttggcgaaggccgccgtctcggagcgcggagcggagagggcggtggtgccggggaagccatggaatgggtcccacacgtcgagggagaaggggtcgaagacgttggttcttcgcccggtgccgaagaaacttggaatcaacgacattgttatgttggttttcaattttctgttgagtatgagagaacggggaagttatatatatatattggaggatttttggtcattgggatgttcgcgatggttcacgatgaatgtgctctttgtttcgcaaacaaaaaaaataaagaggaagaaatgtttagagggttctggggaatgtttcggcatgagatggcatcgtggacctggtagaatgatgaagatgcttccggaacgaacaaataaggattgccacgtagaattatggagcctgaatccatgctctaactcttgccaccagtggaaataaaatatgaaagaaaacaaaattttaaaagcttaatataaaaaagtaaattaaaattttaaccaaggaatcggggtaattaaaaatttctcatttaactatatactattagattagattataaatcacgattctaaaagcccaccaagctaagtgaacaaattattaagggatgaaaaaatgtttttggaac

SEQ ID NO: 1888 - DNA, 794 bp, Glycine max
acgatacttcatattttggccaggaacaaactttagttattgttttgccgaataaaatttgtagaacaaagagacacttgtaatactattggatggggcactaatggcatgttgggctgtcagcaaagcctcacttaaagggttaatgtacaggatcgaagcacaagcaattatacttagttgtagttacttaactaacctgaaagtgttgggagattttcctgaaaaggattacttaccaagtggaaaaagtaacgttctagttatgtcaagtggaaattgaacattcactacgagtacataacaatgggattaagcggaaaaagataaaataaaattcacaatgcaggggcaaaaatgatttatcaaggcatcagtcattcctttcctcattctaggatgccaaaatccaaaggaacagattatttgcttgaattgcttctaaataataaatcaaatgaatggccaattgctgatagcttgaatgaacgcataaatttccaagatgatgccatctgggaatctgctttactagttttcctccctttgtctcttgcagcatcatgacttgtaaccgatccccaagattttgaatcaaatatggtagaagcagaagaagtttcagtggctccaaatgaaacagctcttttgtttgaatcatccagcggatatccaacagctccatcctgatgaaggaagtggaaatttctcactcttactttttgcatttgcatgggtcacaactctccacctctgaaaattagtgagaagaccatgtaatggtgctcaagaaa

SEQ ID NO: 1889 - DNA, 826 bp, Glycine max
  misc_feature (802)..(802): n is a, c, g, or t
aaggacaattaatgcacatcaattcactcaaatttggacttggagatgttcttcctttttttgaaccaagttacaaaacttgtttaacatttagttggttctatttacttgaaaaatcatcaactctctacgttattggttataacccatttatataaaatgataactacagaaaataggattttctaatagaaatttataaattatgtctgacatgcaaagattaataccacagaaaaatacaagttgcagtaaataactatcctgagggcatgcaaggtgcggaacctatcacaagtcacacacaagtcacaaatctgagcaaccctttgtaccaacagagctttatcacagtacacagatttgacagagtgggaaatcaaaacaaatcacatgaaagttaaaacacataataaccaaaaagttaagggactaagacctcacgaggtttaacaacaacggttagtaatgacaccaacaatagaaaaagcatgagaatcaaaagagcggtgactttcaagagagagtcatgataataaaaccctttcccttccacaacctcacatgactctcactccactgaaaaatgcaacaattttagcaaaacacaaacaatcacaagaaagtaaaaacgcataaacagaagaaattcagaaactaaaataaacaattcaaatgaaaagaaaataacataaaaaaataaaacaaacttatggaaattctcaaaatcattgcaacactggaatgcaacaccaaaaagttgactaaaattctattcaatattaacctttagcccctcctnctctgaaatatgtcattatgtgat

SEQ ID NO: 1890 - DNA, 1600 bp, Glycine max
  misc_feature (1583)..(1583): n is a, c, g, or t
agaattcacaaagctcaacctcagtctctcgagttgctcgaactcgccgcttcgaaagagtttccacgcgtgggactcagattcacgttccccgacgcgctctgccccttcgctttcatcggcaaaaatgaggttactttcttcttcaccactgttttttatatcggcaaatgtaaataatagctgttaattgttagcgggggaatcgaacccacgacccttccctccctcactcctttctcctcttaccaccaaatcaaccttgtaactccttcgcaatgttagttgttagttgtaaatgaggtttctttcttcttcactagtgttgattacggatttttttttcgcattcgcaattcatttggttttttttttttttttttggttgatgcagatttctggtgcttctagattcccttacttgctttacgtgttgactgtgtctggcgtggcttacctattgaaaattcgaaatgtttctgcgtatacgtccgtttctgttttccccgtggatgaacttttggaggttaatgtgcgtgattacattcccaatcacgccacggcgataaccaccgtgatggcaaccgttggaggtcttgttgttggcacgagtgatggttctgttttctgtttccagctgggtgtagttgaccctagtgctcccggtatggccattttctgtcttgtcacgtgtttcgtcttgcccatgtttcctattggtgagtaaattttagttgaatattttgtatgttcaacgggtacttaagattgtattcaaactgccccctatagggttgatgtaggctgggtttttgggttgttttgatggtggactagaaaatagggatgagttcaggtgtaaagcaacacaagtttgcctatgactgtgttgaatttctcctcttgtttcattatgtatatttcatcatttttcaatggtttgttatgaatttggttttttatctaaggtttcatgcatgagctgagagatgaagccggaatcagtcgcttgtggggtttaatatcacggtattttctttttaaattctcattcctgataagcatttgttgacatcttctccaattttcaaatttattgtctctttctcggattgaacctccctctgatatgagttataagacattccattgaattatagggggaaaatggtgggtactgtacaagagttggtaattttggagttgcacgagaaaaagtttgtgtttgtgcttcatttggacgggacgttacggatttgggatcttgcatctcgtagcagggtttttagtaataacatggggactgtgacaatggcagcaggtattgtctacctctcagatttaattcctatatttttttatattcatcatttaccacgctggccttcacaaacattaaagtggactgttaatctttatttttgcaatgttcatgtttatgtgaatggtgataaataaggaaacttgccagtggatttttatattcttttatattatgttatgcttgctccattactatgcaggccaccataaacattgaaaaggactgtttgttttgatttctgcaggtcgatttagaggtncccgggtacgagtccga

SEQ ID NO: 1891 - DNA, 778 bp, Glycine max
aactatcccggaggaaacttgtgaacgagtgtgcccggccaactgcaccaagttacctcgatctttcacagccagtgaaaaaaaaattcttcatctgatcaaacatgacaaggatacaaaaagaggaagcaagtttgggccccatatcagcgttcgctcgttttttgagtccttatctggaataaccaaccacaaacacccttctcattcaaaatggttcactcaccaatcaccatactatggtatgagtgctactttctctttagtctaagacacggaccaatgattcatacttcctttattgcgcttgatacactgaacacttccgtctttccttacacaatccaactcagaaagggcttcagaagacaactttactcagtatttcacacgtaacacctatatatgttgctgagcacaaacttcttgacaaccacgtccttgtttattttgcagactccatgaagtatgaacaacaagcaaatcaacagaacttacacaataaagtacacactatttagatgacaaatagcgacgtgtgtgggtaagaattctccaacttacaaggcatcaagtctgagcgcttgagccttgtgtttcaagtttttcaagcaatgtatggcatcatcgagaagcatggccggatccttatccttcccaccaggaattatgctccgccagaatactcaaaaacgtcgcgtatcttatcctttttcatcttcttattgccagacaggatcctttcgttgttattactagaacatctcgattctgcatc

SEQ ID NO: 1892 - DNA, 1409 bp, Glycine max
cttacttgctgcctgcagcggctaaggctagactgcaatattcagcctctgtactggaccttgcaacaacagactgtttctttgaccaccaagaaactaaatttgagccaaaaatgatggctgcaccagaagttgaccttctgttgtcatcatcacagtaagcattaactgtaaagggaggtccagtagaaggagggagaatcttccaaccaaagttgatggtaccagctagatacctgagaattcgttttactgctgcccaatgctgctcagttggatctgacatgtactggcagactttgttaacagtgaaactgatttcaggtcgagtgatggttgcatactgcaaggctcccacaataaacctgtctagagtggggtcaggcaaaggctcataccctgacttagttaacttgaagcctccaaccattggagaagaaataggattggcctcatccatttttttttttcccaataaatctctaatgtacctagactgagtcagaataagagcaccattggactgaggtctgacttcaattcccaggaaatagtcaagattccccaggtctttaagtgagaactcagtgttgagtttggttactaaggacttgatgaatataggattgttcccgtgacaataatgtcatctacatacacaagcatgtagataacagtattttttggaatcagtgtaaagaaaaagggaggtatcacacttgctggacctgaactgaaaccgaagaagagtggcctttagtttatcaaaccaagctcgaggagcttgtttgagaccatatattgccttatgcaacttacaaacaagttgtttgttgggatcttcaaatcctgggggctgactcatgtagatattctcttcaaaaacaccattgagaaaagcattattgacttctagctactgaagactccacttatgagttacagcaagaaaaagaagaattctgacagtaactggtttgatgacgggagaaaacgtcctattgtaatcaaaaccaggttgctggggaaaacctttagccactagtctggctttgtaacccactggggatctattggaaggaagagcagtgagggaccaagtaccatttttcatcaaagcctcacactcagttttcatagctgccagtcattgtggattagaaagagcagactttgtagatttgggctcagcatgagctaaaagaagagtgagctgcaacctaggtttaactacaccagccttggcttgagtgcacataggatgagtgttatcaggtctgacaagaactgctggagtgggtgctggtgctgaagctgattttgagtcaacatcagaaacagaatctgctcccactgaagttgaaatagctggtgaggaatcattatccacttgacctgcaggcatgcaa

SEQ ID NO: 1893 - DNA, 1595 bp, Glycine max
  misc_feature (1561)..(1561): n is a, c, g, or t
aacaagtagataatgattcctcaccagcaatttcaacttcagtgggagcaaattctgttttagataatgactctcggccaggtcaagcaccagcacccactccagcagttcttgtccaacctgataacactcatcccatgtatactagagccaaggctggtgtagttaaacccaagttgcagcatactcttcgtttagctcatgctgagcccagatctacaaagtctgctctttctaatccaacatggctggcagctacgaaaactgagtatgaggccataatgtaaaatggtacttggtctcacactgctcttccttccaataggtcccctgtgggttggaaatgggtttttcaagtcaaagaaaatcctgatggcactgtcagtaaatacaaagccagactagtggctaaaggctttgaccagcaacctggttatgactacaatgagacattgtctcctgtaatcaaaccagttactgtcagaatgcttccttctcttgctgtcactgacaagtggagtcttcagcagttagatgtcaataatgcttttctcaatggtgttcttgaagaggagtacatgagtcagcccctgaatttgaagatcccaacaaacagctattgggtaagttgcataaggcaatttatggtctcaaacaagctcctagaagcttggtttgataaactaaaggccactcttctttcggttttcagttcaggtccagcaagtgtgataccctccttttttctttacactgattccaaaaaatactgttatctacatgcttggggatgtagatgacatcattgtccccaggaacaatcctatattcatcaagtccgtcgtcaccaaactcaaaactgagttttcactcaaagaccaggggagtcttgactattttatgggaattgaagtcagacctcagcccaatggtgctctaattctgactcagtataagttttttttttttttgaacggccaaaaatatattatatatataataaaagatacatagtaccagaagtactacaaaaagccacaggaggtaagatctcctggaacagaaaggtaattaaaaactatccatcatcccaacagaaaggtaattatgactcagtataagtacattagagatttattgggaaaaacaaaaatggatgaggccaatcctatttcttctcgaatggttggaggctggctgcaagttgactaagtcagggtatgagcctttccctgaccccactcaatacaggtctattgtgggagccttgcagaatgccaccatcactcaacctgaaatcagtttctctgttaacaaaatctgccagtacatgtcagatccatcagaacagcattggagagcagtaaaacaaattctccctccctctactcgacctccctttacagttcatgctactatgatgctgacagggcatctgaccctgacgacagaatatctacttctggtgcagccatcttctttggctccaatttagtttattggtggtcaaagaaacaatttgttgttgcaaggtccagtacagaggctgagtatcacagtntagggtttgcccactgcagggcagccaagtctgg

SEQ ID NO: 1894 - DNA, 830 bp, Glycine max
  misc_feature (731)..(731): n is a, c, g, or t
  misc_feature (806)..(806): n is a, c, g, or t
tgattttaatttgtgttacattattaattaacgaatgatgaacttgcaagttgatgtgttttagtatgttgcaggatatattgtttgccatgcttgtggagataacggagctcattgtgacacaaaagatgttcttatatttggcggtgtggctcaagggggcgtgttgagagtcctacatcgggtggttaacgaacatgataagtactataatgatagcttatactggtctccttgaatttgctcatggtgcatcaactccactagaggattctacattcacccagcggttccggacaaatgaagtgaaagcaatatggagagaagaaaatttggcaaaattgaatgggcttgcagagaagagcacttgatttgtcaatcttgaggtgcactctcaaattaaacctttagtgtagaatatttagcgtgtatttgcaaatttgatgtgaagcaatttatgtttggatgtttgtgttctataagttaatagtaaaattcagtatgaaattttttatcaaacacaaaagctacctaaatttgtttcaatttataatcaattcttcaacattagactaaagatataaacatttatctacaattacattagctgtatttttacatgattatggatgacttaatgtagaatcaaacacggagtaaatttgtgcttagttttggcaaaaatttattttccatagtcaaacttaggcgggtaattttaatacattggntgtgttaaattcatatattaataaattaagatcaacgaccctgccttctttttctcagtttcagcatatttatgntcaaaaaggacttgactatatcat

SEQ ID NO: 1895 - DNA, 774 bp, Glycine max
aacatattttgggtgggattgagataagtatagcttgttggtaacttgttttctcttatttatatcttcattttgatttagataacttttatcctttgtttcccaatctcgttattcttgctctttatgtatttcctttatgcatcgttgtttgccgattaaaaaaacgttaataactacttacaaatcaggaagagaagtttacttaaataattttattttaaaaaaaagaggaagagtgtacttagaaaaaaaaatggggaggtgagtagatagatacaaatcacaatgtgacctaaaatgcatttggataaataacttaatactcaatcgataatttttttatcaaataaaaactttttcataaaattgactttaaaacttattagaataaattaaaatattttgataaacaagtctataaacataagctcaaataagttaaaatctaaaaaacacccctaagtacaatcacatcaaaacctttatgcacaaacccacatataatctaactcaacatttcttcatgcatagttagtgccaaggaagcgaggaatatgagtgaacactttcgcccaaagaaggcagcaaaaatgtctttcacgttaaatttgtgagtaaaaggaattccttccacataaaaaaaaaaaattaatgaaagactacaaaattggggttttacaaagatgaaataagctgcccaactaaacctcaaaagtgaataaaatgttcgaattccaagtccaccctataaaactcactcttgaccatact

SEQ ID NO: 1896 - DNA, 1431 bp, Glycine max
agtatctgaaggacaaggacatttaagaccaatcaactctatttttattttttaaaaataaaaaaacaataaattagttcccttcaaaaaatagaggcactagcatgaacacttgttaagataggaatacattaaaaatatatttgtgggttttatatgagactcattttcagtttaatatgaagttttcttggggttgatatcaagtttctggaaatatcggagttaaataataatagaaaaccattgtcacgtaagtcattaaatgtgattctttttcggtttgttccctacatttgtcagtgctataatttagctgacattattataacagcagcaaatagtgtgaatcaaattatatacaaagaaaagaaaaaaggacaacttggtgccataaagctcccccatgagagtctaggaaaggatagattattacatggtcttaataatgtcatattccttactaattttaatatgatatataactaaaattttcagtttacgaaaaaaattaataaaatttgattatgtgtcataaaaattaatcaattttcatatgacgactgaatttttcagtttacaagaaataatcaataaaacttggtgatgagttacgtaaaacatggtggtataagattatataataatttctaaaaaaaaaaaagggtaaatctcgctcatattatgagtttattgcaggtagccttaaaccttgcatttgtaagatgctgattccacaactaaaaatgtgacctaatttttcaatttgcactaaagaattaaaaaagaatcaacttgtgttacataaatactgaccaagatcatggtggtacgaaaccatgtaataatttcttaaaagaaaaaggccagtctcactcattatgagtttattgcaggtagccttacaccttgcatttgcaggaagctgattccaccacaactcaaatgtgacctagttacacaacaactctgatcgttacaccaaggctacccttcaatcaaataaaaaacaaatgtacatgtaaaaattgaatagaattttcttttcatatactgatcaaattggaaaagagtgttctcacatccaaacccaaattgaaaatgggtgtgaagtataaaatctgaaaatcagaatgaaactagttcctcatcagaaacgattctataatagttattcactataacctttaaagtataacaacgtctgtcacaagttatgagggagaaaaaacaagctataaattatgtagtcacttctgttgagaagtctaactcactggttctcagattcccccgagcatttcttgttccagctgcctgaacacgctttgcgctccccgcgttttcttttgttcttgagaatgttcccatctctatacatacaggacttcagagttgattgctcttgagacactgcaggtcgactctaga

SEQ ID NO: 1897 - DNA, 824 bp, Glycine max
  misc_feature (748)..(748): n is a, c, g, or t
tgtcatgcctgcagcaataacatcttgtacctcagcagggttcaatcgcagaggttgttgctcactggtcaggcataagagaacatttagatgtagaaacacaaataaatcaattaaaacagctagagtatgataaaaaaaaattataattcttcactgaatacatatgcagtatgtatgtttggaacccaggaaagaaaaatgagaaaatttatataaacaaacaattttattgaacaattgaaataagagagaattctccctcgagggtttctccttcatcatcccccccgcccccaaaaccccccaatttgtccaactgatccactccaactaactgctctaaaagacccaaacagtttttcccatcccttttgtcccaacaacaattcaaattcaggcaaatacaaaatcatttataccaatgtaaatcttggaaatcacttaaggaaacttagaagctttaattaaatgaatgcatttctgatgcaagttacaaaaacaaaaacagaataacaaaaaaaatctgaatcaaaattggaatcacagcaatttgacttgcaacaatgcaagattcaagctaaaacttgtattattgcatgaattttcagaggtagtaaaaacaggtgcaaacatttgctatctaattcctctgaagattctctaaagtcaataatgatctaaacctgtaatgacgatactggaaaagctgtcgagctctgggacggaatgtagtaacaggaaaatnctccctgtagaaatggagatgtccagaacagcaaatcaaatcatgaaaagcattcagcatgccaaagtagtgaaaa

SEQ ID NO: 1898 - DNA, 1583 bp, Glycine max
gccagcttgctgcctgcagcatgggggtggaaaatccacttcaattgtgtgacatgtgttgaacatagctggtgtttaaggtgtgtgcaataagagtaatcagaagaaagaaaagacgtagttgatgggtattgggaatgttagaagaggtagttgatggtctttgatctggtacatgagtatgtgcattataggaataatcagagggaagaaaagaggaagttgatgggtattgggaaaggttagaagaggcagttaatggtttttgatctgacacctaagtatgcttttcagttttcacctttagaattccagaaggataaatgcagtttttgatgcttgattacaatacactgcatcttacaaaaactctatagatgtatcttacaaaaactaaagctatatttagctttacatactaagctctcactggtgtggtcctgatcttaatttgcctaataaaatgccatatttgaagggttttgataatcaaagttctttgtatctatgaaattgatcaaatgcttttcttttaagaattaaatgttgtgcttacaggtaagtattaacagttgtctggaaatatttttgggctagtgtctctttgtttcttatctgcctcattcttgcaggctgagagtgcaattgcagctctgagctgtagcggtgtgatcttgggttcactgcctataaggttagattgacacatttcctttgatttcaactgtctgtcctaaaacctatggaaacttttttaatgtttcttcaaatattctctctggtaagcagggttagtccatcaaagacaccagtgcgccttcgtgctcctcgtccccccatgcactgaaccatccctttcacatgtttctggggatgctgcttcttggagatatatctacatatatacatacatagaaacagatatattctaagggtacctatggcgttttgttgatacttttgtccatgagacttgcagtatggtatctctttgtttcctgttggggtcatgagttatgtgtttagcttgtagagttggatggcgttttgaggatctccaaggcttaatttatgatggcttgatcttgcaggagaaaatttttagttggatttttttctagcatcttgaatttacttaaaaggaacacgttacaaagtcttcgttttagtcacgtgctgtttttgtttgtgatcttgcgtacactaaccatcacatcacctcactgtcgcaacttctacctggttttcatttaattttaattaataatggtgtgttttagaaataatgttttaaaagtaacgaatataattcatttgctagtatatgttgagggtttatggaagaagtttagtttgatttttacataatacatcttttaggagtgaagaattttaagtgtgattaaaccctaggtcaaatattagacttataattgactcaaaagaccaaaatttgtggaaattgatctgggtcttatcaaggcatcaaaggtcttgattacttaattaaggtaatgaagaaagagaatatattgctaccaatccctcttttagaaactagcatggccaatctgcagggcagc

SEQ ID NO: 1899 - DNA, 773 bp, Glycine max
ttctggtgatctggtacgatatcaagaattatgtcgggtgcataatgctgctttaagagcccaaccagcactagttcaaaatgagcaaaagttgttggaaaagatcaacattctgtgtctgatggagattatattcaggtgttgagattgtcattgttgtcacctgttgagatatatttaataactttttgttttatttccaactcaaactgattgcccttacttgcagtcggccttcggaagatcgaactattcccttgagtgtaattgcagagcgcacaaaactttctatagagaatgtggagcatctccttatgaaaagcctatctgtaagttctaggaaaaaaacaatgtaaaaagtacatttgattttctaacgcaatcatctaaagtagtagacttccaacctgtggatttgagtaatcatcgataactttgaatattttttctgtctcttctcattttcaattagtatatattattttctagtaaggcttgatctttaattataattaatcttgatattttaagcttaaattctgtttgggaatgggatataaacccataatctaactgatatttcttaaaattcttgagcttgagttgttgacatgtccatactcctcacttgaagaattatggtgttgccttgattgttacttaaaaaatgaatagttgatttttttgagttctagttgcacttggaagtaaattacccatgacttttgagcacacttattgatggtatttttctaagctgaaaccacctctct

SEQ ID NO: 1900 - DNA, 787 bp, Glycine max
  misc_feature (28)..(28): n is a, c, g, or t
cacctattaacatatattcttagataanaaaagtgttatcttcaagcacctgtgtcacatttgccccaggcatgtaattatactaacttcacaactgaagttattattgaattgagtaatgaacattactagttgttcaaattacattgaattacctttcatttgataatggtcaaatatgttggtgtttgaaatgagctggagctattgttataatcattaatcagtttgggctgtgatatgagatttcaaatttctcagtcaatcactattgttttgacatacaagcatgagatttatatatctatttagtgtgatatgtattgtaatttatgtgagaattaattattttgttacgagtaggaatgcctaattaatttgacatgatagttgcaaaattaaagttgaatatctattttctttcttcgaataaacttgaagaagatatgagtgaagtaagaatacctattttatcattatacattttgcttatggaattttctttacagcgttgaaatttctctaatattggagtcttgcctatgttgtaatcattactgctaagacatttcattgttgtcatttttgcagctgcttgtatgacatgggagttaggtgaatcagggaagcacttcatcactaccattataaatggttacgacttggtacccacattatcagcttcctctgttgatgatctccgatctgaggtgattagttagttctcccagatgattttggcaaatatcatcattgttaattagtttgtttctaatgttatttgtta

SEQ ID NO: 1901 - DNA, 1409 bp, Glycine max
attcaccatccagaagctcatgttcggctcggtgacggtgatcgacgaccagctaactgaagggcacgagcttgattctgctgtgattggaaaggcacaagggttctacttggcaagttcattggatggtagcagccagaccattttgttgacagttttggtgcatggtggtgaacatgatcaacatcatgatgtggtggatgacagtatcaatttctttgggattcataggacagcttcatcagaatctgaggtagcagtgattggtgggactggcaagtatgagaatgctagagggtatgcttcacttgagactcttctcaaggaggaccagcacaccactgatggggtggacaccatcctgcatttcaatgtctacctcactgagtagagagactagctacctgtcattgtgattgattgcctttcatatttagagtttgaatttgaatatttgtgtatggtttgttcaaattggtgctatatgtctctgttaatgcttcatcaagtttgaaacaaagctcattctgctttcttttactcacttttagctaatgtctcttttctttccccatttctactacataccataccatgagaacattctcttatgctacatatctcatatctgccatgccatcacctatatgtgtattatcattatcttataactaatacttcgtttaagtttactttttatatgatcatgattactatatatagttaccttcatgagagattattagtgtcataaagatttcaaaaattaaatatgatagttcaaacccgtaatatttaaagggtttaatattttttttaattcttaattttttttaatttctaaaactttttttagcattttttattcttataattttcttctttaacagttttagttttttctataacattaacaaatgacttaacaagtacaataacactaactaacctgtcgtgtatacctatagtaaataaatattattaattagccgcatctcagacgatccaaagaaagaacagggaaaataaacgaatacacaatattctggattttttgtcactaatttgagttgttaggtcaacaatgacttccagacatccttaatgatcttcatacaagataatatgacaaatatgatggacttttgtccctggcattagtgtatcaaataatgtcgccaccagtaatgccaacatagaaaagggagataaattagctgaaaaaagagagtaagagaagtaaattattcacgggctctcaaatgcccttgattagagtcataggaagcagtatatcaccttgtcaaaatgttttgattcaagccctaaaggagctaaagctcaataatggtggccaaagaaattatgtccatgtgctgcaggtcgatttagaggtccccgggtacgag

SEQ ID NO: 1902 - DNA, 764 bp, Glycine max
accctcccatcttcaacttcaaccttcacttcctccttcttcaacccgggaagatcaacgttgaacacgtgagccgccggagtctccttccagtccacgcgagtgttggctatggcactgctttccccaccagaggaaggcacgtgacctgtggaaaaaggaaacccctcgaaagggtcccatacgtccagagagaatgggtcgaagacgttgcttcgtctaccaccgaacaagtttgggatgatagacatggtgattttctttgtcaagttatctctgatgaagggctttcttacaatgctaaggagaaacagaggaagaagctttatatagaaaacaagaccagtgtctagtattttcgaggaattctattaaagatacccatgcatggagacacgtacattaattaccttctatagctttctaggggtttctacttctattaaagttgggttttgttcccataatttgtttaccattgtttgcttggtgaatccctaaagaatctaattcaaatatattgttatgatttttaattatgagttattatattaataaaaactattagtttatataataattatgtacaagtcataaagtaattttaattaatttttttggtacaaatgtaattttaattaattaattaatagttcaaaatctttatatttataatgtattgaaattaaactaaaaaacatagaggccatccctctcatttgaacatttgtgtatgatgtgggggtctgtaaaacgaatatatg

SEQ ID NO: 1903 - DNA, 789 bp, Glycine max
ttattgtattctatatcaaatcagacctgaatcttatagcattggagattttgatatacttgtactcaataaattatgtcaaattcatctacaagcctttattttattgacttatctattttaatgccatacacaggtcatattatttggacaaaagtatatttttggtaattttaatgccatacacaggtcaccttaataatctgcaaaataaatgcttgtattaaatgctagcatttttttattatcaaaatacaaccttttttttatctgaatcaaagacatataagaggatttataacaactcacgcatcatgtttaacaaactcaacaaaacctcagtaaaaaaaaaaaattaaaaatcactttgttccatagtcattttaaaccaaaatcatcttttcaaaattaagtttacatacacttgtccagacacaaactaaaggccaaatgcaaacaattattttcagtaaaccaagatctgcacacaaaattgaccacacagattctcgacagtttcttagcaagaaaattaaaattcaaactagaaatgtgacagaagggacaaaatgattattaatatggtaaataaagttcatcatccttcttatgttggggtgaactggaaatccaatcccagcgccactctaattgggacccaaaatttgcaacaaagactaatttcaatgtctaaaaacagttctttttcacccccaatcaagatacttctttgtttagaagaactatgaaactcattcttactgcttaactttcctccttggaaactac

SEQ ID NO: 1904 - DNA, 1569 bp, Glycine max
  misc_feature (1549)..(1549): n is a, c, g, or t
aggtttgtggttaatccaatcgttccgcctcaatttctcacagaagatgatcgaatcatggatcacgttaatcctgaatatgaagcatgggaagtacaggaccaaacactccttgtttggcttcaaccgacgctctcaaaatccgttctttcatgcgtgttaggctcgaatcactcctatcaggtgtgggagaagattcacgagcatttcagccttcacaccaagtcttgggcacgtcaattacggactgcgatgcgtgctgtctcactcgaagggaaaaagatggatgagtaccttcacaaaatcaaaagctacgtcgacgagcttgctggtgttggagttccaattcgccatgaggagcatgtcgatgctattcttgaaggtctaccttcggattatgcgccagtagtttccgtgattgaaagcaagaaacatacgccatccattgcagagattgagactctgctttatggccacgaaactcgccttgttcggtacaatcgagacactcagatgcttgcacctccatccctgaattacactcaaggttattcaagtactggttcttcatcttttgtgtctcctaatgactttcatattactttcaaacttaataagctattacatgttccttcaatttcaaaaaatttgttaagtgtcagtcaatttgctaaagataatgctgttttctttgagtttcatcctcactcatgttcatgtcttgtgaaatcacaggggacccaataaagtgctccttcaagggtgctgtaggtgttgacggcctctattcatttcatagcatcagacttcaggaccacaaacctcaattgttatcaacatcatcttctactgctaataaagattctgttgtttcacctcctagcactgttaatctttggcatgctaggttaggacaccccaatagtcatgtactgaaactagtttttgatcagtgtaatattttgttatctaataaaatgatttcagatttttgtgcctcttgttatatgggaaaatgtcataggttgtcttctcattcatctacttcagtttattcccctttagaacttatctttacagatttatggagaccttctcatttaacctcctactctagattcaaatattatgtgtcatttgtttatgctttttcaagatacagttggatatttcctattaaaaccaaagctgaaactacatctgtatttcaaaatttcaagtcatctgttgaacttcaacttaagactaaaataaaaagtgttcaatctgactgggtggatgaatacagacccttttctgctctattagcctcctattgtatttcacacagattaatttgcccacacactcatcatcaaaatgatgtagttgagagaaaacttagacacatagtagacctacgactcacattgctccatcatgcaacttttttttttttttggaaggcaaaaatatatattattgatatgaatcatagcagtaccagtgaattttatctctacagttttgggattatgcttttgtcactgcaggtcgatcctagaggatnccccgggacacgagtccgaa

SEQ ID NO: 1905 - DNA, 823 bp, Glycine max
ttttacttgcatgcctgcagaggtttgaatcctcttatggttgatgatgatgcactagcttcttatgccgagtcaattgaggtagtttaatttgattagtctatatggcccaaaaaaaattctacacaactttagtgtgataagaaaaaaaaaaacgttttcaattcttttggtaaccatgtttcaactttatcttcttggattcttctaaattctttcaattttcaaattttaacttatccaagcaattaagaataacaaaatttcaaattccacaaaaagattaaacccctcttcacatgtaatattttgtatctgtgtatttatgagtagagataaatattgtatatgtaataaaatatgccattatcgaatatatatttatattttaaaatacttgggccttgttccatctgtgggtctaaatccttggagtatccatatacatatcttcctctaaatctccatgcaagaattcattttttacatcaaacaggtgtctagttcccacccaaagtgggcagcaagaaagagtaaaatacaaacaatgttcattttgtcataagaggaaacatctcttcataatggaagccataagattgagtgcatgccttcgctacttgtctcgccttgtattgatcaagagtgccatcagatttatgcttgactatatagatccatcttcaactagtgggttttgtacaagagttttttttttgccctatattgtcaaaagttcttcttagtattcggcttaagacctaattcaatcccacaaaatcacttttaatatcctttagtcgatataggactatatataccc

SEQ ID NO: 1906 - DNA, 1501 bp, Glycine max
gtagtgttcggaatagtttcgtgtaatgttctgcgtagtgtgaagccgcctcgtcaatggtttggtggtgtctactagttgaatattcttggatttgtctctttgtttcaatgtttcacttagttttctaggtttaatttgctgtgacttgcgcttgggtcttacagggaagataagcaacggatgtgactggcatgggaggctgtggaaaagctgtgtggcggaagatttctgtgtgaagccttaggttttattacccttgcattcatcattttattgtttgtttgttttggactggctatgcctatccagtttattttggaatttgatctagttgtttgtcggtgtaagtataataacccctctgttagtgtgggagttcttgtgtgggtttgtaacaggaacaatcaaagtattatgcatttggggattgttacaatgtcacaggaagaatttgggacagtgtgattgggtggttgactctttgattggtttggagaaattctactgctccttttactgttttcttgataatggtgatgttcatattgcagtatgctggagtatcaattttgcattcattcttcatacagaagattagaactgctaacaaagtatagataatgtaatttttcttcgatggaatccctttgttttgtttctaggttcggtctgaatttgatcatgggggcatatggattgagttgttaacctcttttttcctggtgtagtgttttgaatggttttgcgtttacagcctcatgcttgatttggtggtctctactccctggattctgatttatcagattctgcctttcgtttgtaattttggtatgagcttttcttgatttacttctccattattttttctttgatctctctcgggaagatcagtgaatgggtggtgtgggttgtgtggaagcagtggctgtcgtcttgttacatgatttggtgttctctactccggattctgaatcttggatttgatttttgcttttcaatggttactgaaagctttatttatctctgcaattatgggtcaatgtgttctttcatctttggaaattatttctctcggttctatttttctttttccattaagtgtattgttatgcttcttgcttgttcctatcttaatcgagtttgtgtttttccgattgatacacatttattggaattgaagatcttaagaaattgatagtctagtgactttttacatcaattatttgaattatagagcatcattcttcattttgtcatggataatcatctatctaatagttgatggagtttgaactgttttagtttcatcggtttgcagcatgttaagattactgtgtcagattgaagattaaaatataaaaaagatatcatgcctgatacggtggatttaaacggctaactgttctcgataaacctaatttcttctttgattttcctctattgttcaatttccctggacttgatcacgaaacacacggattgaattgtaaacctgttt

SEQ ID NO: 1907 - DNA, 1650 bp, Glycine max
atgcagttccccggcatgtaccacactcctccacagccagcagccatggctagtcctcaccatttaggaccaccagccattggcaacaacgtcggagttggggtggctgcagtgtagtgtttggaatagtttcgtgtaatgttctgcgtagtgtgaagccacctcgtcaatggtttggtggtgtcgacttgttgaatattcttggatttgtctctttgtttcaatgtttcacttagttttctaggtttaatttgctgtgacttgcgcttgggtcttacagggaagataagcaacggatgtgactggcatgggaggctgtggaaaagctgtgtggcggaagatttctgtgtgaagccttaggttttattacccttgcattcatcattttattgtttgtttgttttggactggctatgcctatccagtttattttggaatttgatctagttgtttgtcggtgtaagtataataacccctctgttagtgtgggagttcttgtgtgggtttgtaacaggaacaatcaaagtattatgcatttggggattgttacaatgtcacaggaagaatttgggacagtgtgattgggtggttgactctttgattaaaaaaacttcgtaccccattgctcagaggctcttcgctatgcgaaggtatggttgactctttgattggtttggagaaattctactgctccttttactgttttcttgataatggtgatgttcatattgcagtatgctggagtatcaattttgcattcattcttcatacagaagattagaactgctaacaagtatagataatgtaatttttcttcgatggaatacctttggtttggttctagggctctgcctgaatttgatcatgggggcatatggattgagttgttaaccctcttttttcctggtgtaagtgtttgaatggttttgcgtttacagccctcatgctgatttggtggtctctactcccctggattctgatttatcagattctgcctttcgtttgtacttttggtatgagcttttcttgatttacttctcccattatttttctttgatttctctgggaagatcagtgaacggctgtcttattacatgatttggtgatctctactccggattctgaatcttggatttgatttttgcttttcaatggttactgcgagctttatttatctctgcaattatgggtcaatgtgttctttcatctttggaaattatttctctgggttctatttttctttttccattaagtggattgtaatgcttcttgcttgttcccatcttaatcgagtttgtgtttttccgattgatacacttttattggaattgaagatcttaagaaattgatagtctagtgactttttaagtcaattatttgaattatagagcatcattcttcattttgtcatggataatcatctatctaatagttgatggagttgaactgtttgtgtttcatcggtttgcagcatgttaagattactgtgtcagaatgaagattaaaatataaaaaagatatcatgcctgatacggtggatttaaacggctaactgttctcgattaacctaatttcttctttgattttcctctatttaatttcccctggacttgatcacgaaacacacggattgaattgtgaacctgtttt

SEQ ID NO: 1908 - DNA, 646 bp, Glycine max
ttatttcagcattcttgattgtcaccattgtgttcattcccattggagttgcttcattaattgcttcgcatgatgtatgcttgactgctgtactttccgaattttggttacctgttctttatattataaatagtgctgacttaaattttctttttatcatttatctatctatcaatcaggttgttgaaattatcgatcggtacgacttgcgctgcataccatcaaatgtgacagacaaggtggcatacattcagactcctggagaaaagcaatgcaacaggcagctaactgtaagttttcttgacactgatttctctttttgatgcttaaccattattttttctgttaactctgttcccataattgatgaattatggatttcaaattttgacaatagtttgttttcttaaacattactcttgtgaataataggtggacaagcgtatgaaatcccctatctatgtttactaccagcttgacaacttttaccagaatcatcgacggtatatactccttttatttctcgtgaatcatgcaactttttatccaattgatttgaatttcatgtttaccagccatgaggaaaattggtctcaagtgataagtatcggcaacgaccaatcaacaccattgggctctgagaaat

SEQ ID NO: 1909 - DNA, 851 bp, Glycine max
  misc_feature (756)..(756): n is a, c, g, or t
agtgcaaaaatctcaccacccttgtacttactaagaatttccgtggtgaggtaatttcagaaagtgtgacagtagaatttgagagccttatgattttagcacttgggaattgtggtcttaaaggccatattccttcttggttattcaattgcaggaagttggcagttcttgacttgtcttggaaccatttgaatggtagtgttccttcttggattggtcagatggacagcttgttctatttggatttctcaaataattctctcacaggagaaataccaataggtctgacagagttgaagggcctcatgtgtgcaaactgtaatagagaaaatcttgctgcttttgcattcattcctctctttgttaagagaaacacaagtgtaagtggactgcaatataaccaggcctcaagtttccctccttcaattctcttgagcaataacatattgagtggaaatatatggcctgaaattggtcaattgaaagcactgcatgccttggatttaagcaggaacaacatcactggtaccattcctagcacaatttcagagatggagaacttggaatcattagatttgtcttataatgatctttctggagaaattcctccatcatttaacaacctcacattcttgtcaaagttcagtgtggcacataatcacttagatggaccaattccaactggagggcagtttttaagcttccctagttcaagtttcgagggcaaccaggggctttgtagggaaattgattctncttgcaaattgtaacaatacaagtcccaacattcttctgttcttccaaaaacgtgtagaagcatgtccttggcatacaatcattaaggattggct

SEQ ID NO: 1910 - DNA, 757 bp, Glycine max
ggtggttgttctgagatcatatgagcaggatgaactagaataagtttgcaagttcatagtgttggattgtaactgttcttagtttagattgatttcaacagtcttctatccattgctagaaaattttgtttacacacaagtgtattgaatgagttaacatcccaaaaatatggtcataacttacaatcccttcaactcgtgcaattcatctatatatacaaagatagcctcacctagcttcttgtttaaaccatttttacaggattatatcccagaaatagttgcaaacttctccgattttgaagatcctccatcaccaccatcgagttatgataacacatacttaaatgaagaggagttcagcaagcccccgccagaattaccacctcaactaccagtggcaataagacatgaggcttcttcatccgcaagtggtagtcgttttgtccctaggcccacgcatttggaactgaatcatctatacatccacaaaactgataggggtcaatttgtggcactacgatcaacttacaagtttcaacacaaatatattactacggaactgtacaagtccttacgcagggaaagatgatgaagcattaagatttttgtctgctattgaacttgcctcgtctaagctgcccttatgagaacacttgttaaggtcattaatttaatgtgtagaaaattgattggaataggtaaatgaaaaattgcttttccatgtaaaaaacttaagggaatgttattttattct

SEQ ID NO: 1911 - DNA, 1353 bp, Glycine max
aacaaaactgatagtggctaacatgcatgcaccagaataggtgcaggggtgtggtgggacccacttcagtgtgagccgtcagatgcatggactcctccactgtgattaggaacacacacgtggtggtggtaccatgtgcctcccccattgcttccatccttgttgagccggattctctacggtcatggaattcatcaattcatcaatcagaatcgttggatgaaaatcataggccttataaaaatacacattttaatatcaagtatcttgttaacaagtgtcgttagaatctcttgaaatattggttaagaaattaaaagaaaaaattattaattgagaaaataatatgatagcataaaaaaattatatattagataattttacacatttcaataaaaatatttgatcttttaattccttaaaagcacttgtgaacatttgactgataaattatcctgtgtttcatccaacgatacatattcacgattgttgaattggtgaacgcaggaaatctttttaccattattcaatcatgttcagccgggtgccttgacatcaccggcgcacgttagaatgaggcaggaaacctagctgtcgtgtttgttttgttttctcacagccacacgagtctcggtaacgtgcgcgtacagtagtacaatgctctcagcgcagcgctttcaccgcaaaaacacagttacagtttctattatcatggtcatgatggtgcatgttagcctagtcttgtacaatacatatattgctgacttggatgttgccccacattatcacaaccaaaaccatactagaaaacattcttcaacttcaataatatatattaacatagtgtgggatagttgacagataagtatgttttttaattgggcgatcaagagattcaatttcagttgtgtattagaaaaagagtaatgatatatccacatttcattcaaaacactccaccaacatgtgttagatagtattgtgggtggtgtccatcaaatatttttcttaaaaaaaaaagttaacttgttaaatagagtgcatgtcatgcttaaaaagtttaccaaaagttcatctagattattatttttaattattgttattttatgaatagttgaatatttattattaatttgcattgtttcttaatttaacactaattatcggttaattacttgattatgattgatgggcaggaactcaaggaggaaaatggacaagggttggtgtttggaggtaaaatagaggtctcatcaatggggtgggataggaggcttctaggtgggcctgggtcatcgccacctcggtgcacctccaagtgtggcagatgtacacctgcaggcagcaagtagg

SEQ ID NO: 1912 - DNA, 680 bp, Glycine max
atatcggcagccatattatgaaaattccattcattggtttccaaatacttctttttatgcatttagaggtaggataattgctaacaaaaatgctgtcattatgttctcagagtttgtaggtttcctcaattttttttaattttctttcctctattttttttcatttaaattttagggaacaccatccagtgcaaaaaatctgccacactgggtcattatttccccactatttttgttgcaaggagctggggttttatttgcagcttatagattaatagagaagatagttcttttactctacattggagatattcctgaaagatactcagctatagcatcaaaatcccgtgagtgctttgggttctttcgacgtgggtcaaggtatcagtttagatgtgattggctagaaaaaggaatttgtcttcagtagattctctactgaacttagaaaaacttctcaagtttctgaactgacatggactgtttgtcattgcctgcactttccctcttaacaggttgcttggttggtggtcaatagatgaaggaagtagagaggaagaagctagacttttttgtgctgggagtcctgggtcagtactccaccctacattatggctctttatattgcatatctttaatgtcattagccattttcccccatgcttgagagctttttaaac

SEQ ID NO: 1913 - DNA, 845 bp, Glycine max
ttgcctgcaggcatagtccatctgaggatattactagtattttgtatgatgtgtttgactattttgaggatgtcagggagcaaggtgggagggtgtttgtgcactgttgtcaaggggtgtctaggtctacctccttggtcattgcttaccttatgtggagggaagggcagagttttgatgatgcttttcagtttgtgaaggcggcgagagggattgctgatccaaatatggggtttgcttgccagctgttgcagtgccagaagagggttcatgctgtccctcttagccctagctctttgctgaggatgtatagaattgctccccattcgccgtatgatcctttgcatcttgttccaaaaatgttggtggatccttcattagctgcattggactccagaggtgcgtttatcgtgcacattccttcagcaatatatgtttgggtgggtaagaactgtgaggccaccatggagagggacgccagaggggctgttggccagattgtccggtatgagaaggtacaagggcctattgtgatgattaaggaaggtgaggagcctgtttacttttgggatgctttttcagattttctgcccttaatggacaaatctggcaaatctggcagtaggatagaagatggaaaactatttgttttgcctggtaagaggagagtagatgcatacaatgttgattacgaagttttcacaaaagcaatcacgggagggcttcgtgccttcttttggttcattctggtgaacatgaaacccatttgcctgcaagggaaaatatttggagtgtaaggcgtaaagtttcccattggtacatggaaagagttgttacggtccctc

SEQ ID NO: 1914 - DNA, 853 bp, Glycine max
cccggggagcctctatagtgtaccacctgcagcccactcgagatgccattcaagttttcctaagagaggctgcaaagttggatgccatggctttatgtcatgccattgaacgaaagctccagtctccgatgtggcaggcatgtctgttgtgttgacgtttcttcaaaaataccgaattcaatcatacatgaatgcccatatgaattgctcaacgcttcatttgatatttgctgcatattattgatgtatttgccatcccatttttacctcttttgggaacaatattttcaggttcgtgtgaaagccgtttgtgtccttgagtccatcgtcagaaagaaagacgatgacgatcatttttcacgtatggcgtcttactttgctgaaaataatgatctggtgttgagatgttctgaatccccccaagcatctttgagggaaaaggcaaacaaggtaccctatttcaacttctcgttcatctcatattttcttcttatatcaattcatatcttcttttttgaattacttttatttcttttgacttgagcattattctgagcatgaagtaatttttaaccagagttattgaaccataattacattaaattggagtattggtgataggcatgtagttggaagtcctataatgagttatagattcatctttcatctttacattctcttaacatgatgttaacatttgcgtctgaagcacgcgtgggaaatgacatggacatagttagacagaataacgtaatatctaatgaataaagagatgtaatatgtgatgtttgatgagtgtaaaatagaaaaagactttcttggggcttaccaataggtaaagaccttggttttg

SEQ ID NO: 1915 - DNA, 877 bp, Glycine max
tgaccatctgtatgcctgcagcatttgcagagcagattcaaatcaattcagcaaccattttcaattcagcaaccatgacaatgtaattcaagttatttccacaagctcatcaactataaccgcaggaccaatgcaataaatggagtgatgattggagggtcatgggttgaggaaccaaatacagtaaaagaagcagtccacaatttctttgagagtagattcagtgagcccgattatgatagaccagaaattaatggggcacatttccgaactattggacagcagcaaaacgcaatgttggttaagcatccacaggccttcaatggcttcgggcctatttcattaataggttgtgtctacaagatcgtggcaaagattttggcaaatagattgaaaaaagtgctgtcgaatgtaattgatgagagacaaactgcattcctaaaagggtaggcatatgctgcatggtgtgctgattgccaatgaagttatggaggaggcaaaaaggtgtaaaaaaccttgtttggtgtttaaaggtagactatgaaaaagcctatgattctctctcgtggaagttcttaatttacatgatgtcaagactaggtttctgccccaaatggctacaatggatcacaggatgcctccatttagcctccatatctgttttggttaatggaagccatactagagaattttctcttgatagaggtctccgacaaaggagatcctcttgcacccctgttgttcacattgctactgaaggtcttactggcctaatgaaaagagctgtggctactaatcactataaaagcttcgctgtggggaaatataaggaaccatcagcattctacatacgccgatgacactattttcttcggga

SEQ ID NO: 1916 - DNA, 1525 bp, Glycine max
ggtacccggggtatcctctaggatcgacctgcagcacttcccacaaacttaaaaccagatcttctataacatttaataatacctaaacctgaagtaacttcaagtgacaaacaatatattcaacaatgtttgctaacaagagtgtgagaaattatttaatttcataaataaataacattaggcaacaggatgtaaaaggtaactaattagggaaaatgtgagcatgctttaaacacacaatatatcccatactacagcttccttttacaaattccaaaatagttttctagttaacttacgtatcttcaggtcttccatgagggtacgcaggtcctaaattcccattgaagtagaacagtgtcttccgcttctcatgagacctcaaaacaaattataacatggttgcattgtttgctttcaagaacttaaattaatagaataaaagattcaagcatgaccggaaaaacaaagcaaatgactaaggaaaaaaataatttttggacaaatatttaccgagcccaaagttttgaagtcaacacataagcatcaggaactttccaagcgggaagcacgagatctttgtcagggtcaaaacatggatgaattcctcttctgtcggaagagattttatcccagttgtctgcccaataggctgtggttgaatggttatgctttgtgtttgtgtttccccagtgaactagcatcatgctgttccatatctccttaggagcatagcaagcaccttcatcccatgaaaaagactgccttcagaaatagaagtgaaataattagcacatgcttctcacaagcaaataaagtaaaagttacttcgttaaaaagtcttcaacgtaagataaacaattctcattacccagatgtggtcccttcctgatgagtgactccaataaggatattgctcaacaatgtgagtatatgtattcttataatattccaaagtgagagagctcctcaatcccatatgctcctgaatgttataaaacaaaatgtaaggaaaagagaaaactaacagtgtaaacatggaatgacacacacacacacacacaagtaatagataactgaagatatttctatccttccatgcgaaaagggaaaaaacagcattacatgcaattgtctttcccattttgaaattatgactattcaagaaagttgatggaaggaaaatccatgcacatcatgacatagatgtcagtgttgactgccatgtcatccaattaatcacagatattgtaactcagaatgatctggaagcactactaacatgcataggctgaaacactaatgcagtcagcctttatatgcaggtcacatgcagcaatagatattctacaaatatattctggtaaaaataacagtaagtaaaatatacctgcatactcaagtgaggagcatcatcagcacgagttatgatacatgaatcaagaacaggaacaaagaaaaaatctgcctcttcaccatttagtgttcgatgaggactagctaacaaactctcataaagtgctat

SEQ ID NO: 1917 - DNA, 834 bp, Glycine max
  misc_feature (796)..(796): n is a, c, g, or t
tccatccaggcaactcccattgcttcagtaatattccatcttttaacccgctccatatcactagcactccttcgctgttcagatgtagccattgcaacagcactaagacctcttccagaaccaatccttgaaaaccgttgaagatcgcgagcagctgccaatgcagcatctttcgcagctgctttgctctttggtatctgtgatgttttgttagggactgccagaggtttttgaaagcttgaaaatgaatgaagcctagcatgtttccgttccagcaatgaggtttcacgcctaatctgcgcatttgacgaaggagcatgattttctgcacctgaagtaccagctgcaatcatagacaatgccatcgcagcaggtggagatgcaaaagcagcagcccaggttggagatatcatatcaagagcagcctgaaagaaattgtaagatgcataattaagttaattcaccaaaagtcatacaaatgaatagaaaatattagcaccatacaatagctctttatcagcacattactttaactaaactttgttgggcatgtattattggagggcaagcaaacaaatacaagtgttccacttttgattaagttaatgaaaaaatttattatttgaaaatggtagcagaaagtgttgaaatgtgatcaagaaaattgaatttattcttgtaattaggttgaagatttattcctataattaggttattttcatttcttagaataaggaatatttaatgtgatgtggtgtgatttgacttgtcttactaagagaatgttttgaccatntaggaaaaaaaacaaaacaataactcttgtacaaaacc

SEQ ID NO: 1918 - DNA, 696 bp, Glycine max
aactcgtatgcctgcacaatactagtggatcatgttttaaacagctccatttgagaaatagcctagcaaggctatggagagactgtatccaacttggtaactcttgtaaacgcccggacaaatacaagcgttgaagaaacggaggaggcgaacaaaggaacgcaagatcaatgactttattctcaccttcagaagcaacagaaagagcatggagattggttaatctctcaatggacaaacagaaagccttcccatcttcctctctaagtttcaagatgcctaaccttcttagttgacttagctcccctaactgccttattatcattccacaatcttggtttgcctccacaaaacaaagtttttgtagtgccttcaaatttcctatttcagtgggggccttaaaaccatgtttggagtagaactgtgcatagcctttgacattaaatttatacacaaggagatggcgaagcttttgaagctttagtatatctaaaggcaattctctgacagaagttttcttaagatccagtgtttctagattatgcaacttccctattatgtaacctggaaccattgtcacctttgtgttccttaagcttagatatcttaaatgatatagatcaacaactgctactggaaacttattcaaaggtgcatcttgataatctaaaacacctagcagtttacaaccaccag

SEQ ID NO: 1919 - DNA, 828 bp, Glycine max
  misc_feature (706)..(707): n is a, c, g, or t
  misc_feature (786)..(786): n is a, c, g, or t
aggaagaggtatctagtggtatttgatgatgtgtggcaaatgtatgaatgggaagctgtcaaatatgcattgcctaacaataactgtggcagcaggatcatgatcaccacacgaaaatccaatttagcctttacttccagcatagaatccaatggtaaggtgtataacttgcaacccttgaaagaagatgaggcttgggatctattttgtaggaacacttttcagggtcattcatgcccctcacatttgattgacatatgtaaatacatcttaagaaaatgtgggggtcttccccttgcaattgtggcaatcagtggtgtcctggctacaaaagacaagcacaggatcgatgaatgggacatgatttgccgtagtcttggagctgaaattcaaggcaatggtaaacttgataatttcaaaacagtactcaacctcagtttcaatgatttaccttaccatttgaaatactgtttcttgtacttgagcatctttcctgaggactatctgattcagcgcatgagattgattcgcttgtggatagcagaaggattcattaaagccaaagaaggaaaaacaaaggaagatgttgcagatgattacctcaaggagctcctgaacagaaacttgatacaggtagcagagataacatctgatggaagggtgaaaactttgcgaatccatgatcttctaagggagaatatcattnntgaagtccaaggaccaaaactttgttatccgttgtcaaagaacaaagcatggcatggccagaaaagaatcggagacttnttcgtgcacggcacattacccatgtcatcgcagcacatattc

SEQ ID NO: 1920 - DNA, 770 bp, Glycine max
taatgaacaaattcatatttgaaaatattttgatactgaaattatgtcttctattttgattagttagcattgagaaaaccatcaaatttaactaaataatgctcattgtccttcagcttttatctttaggcaactttttaataatttcttaatagaattcaaaatattcatggttggagagtaaataaggtatttgttttggaaactagagatactacttttccactgcaaaagaagtgatgcgcgtgaatggcacaacaaaatcctttgtagctaatcatatagctgaaactactgctggagttgtgacaataagagcctttgaagaagaagatcgtttctttgagaagaatcttgatctaattgacagcaatgctagtcctttcttccatagttttagctcaaatgagtggctgatccaaagattagaaatagttagtgcagtactgctttcctccgcagcgctatgcatggttatgcttccaccagagactttcagctctggtaagactttggtcattgtttcatgtaaaatgccatgcctttgagtattacaatgatcttcatattctattctttttatcctcaaaaagtaacattatctcttttgatgcaagtttcttaatttcagtaatattcttttcaggatttcttggcttgtctctctcttatggctttacactaaatgcttccttacaatttttaattcaaagccaatgcagtctagaaaattacataatatctgtagagaggctaaatcattatatgca

SEQ ID NO: 1921 - DNA, 835 bp, Glycine max
  misc_feature (746)..(746): n is a, c, g, or t
atgcctgcagcaggttgctgttaaaattctgatggaacaagacttcaaaggtgaacgcttcaaggaattcctgagggaggtatactctgaagttcttatcttgttttgtgcagcaaaaacaccaattgcactttaagttttgcttgctattgatttgagctgtatttttacctctttcactaggttgcaataatgaaaggcttacggcatccaaacattgttttacttatgggtgcagtcactaagcctcctaatctatcaattgtcacagaatatttgtcaaggttttacaatatctcatctaccggttcctttacctttcctcctataagagggatctcttttcatggctataaaatatcttacacttgagacctaaaggatttgattgaactgtgcaggggtagcttgtataggctgttgcataaacctggtgccacagagatgttggatgagagacgtaggcttagtatggcttatgatgtggtaaactttaagaaaataaacatcaattgttttcagttctatttattttttgaattaatatgatgtcataacctttgtacccattggttaagtatttgtcattttcatgtgcaggctaaggggatgaattatcttcataaacgcaatcctcccattgttcatagagatctgaaatctccaaaccttcttgttgacaagaatatacagtgaaggtaagaatgaaattttctcatgtctgaaaaatgtttgagtttcatttnatcccgtaagtcccctttcgtagatcttgttccacttctctggcacttcacaatttccttctaccaatcacagtcatggtttgggtatg

SEQ ID NO: 1922 - DNA, 862 bp, Glycine max
tgcctgcaggttcatgtctctggagcttaattgttttattaagaaataagttttgttttacttctggtgtgtttattctctttctctagtatatatagtgtgtttgatcttttgttggaatgaaatggtctatctctctctcttttaaggaaaatgtttgaatccaaagcttgctttcatagcccccttcatttttgtttatccgtttctaagtaggaactccttgacagacatgcacagggattggagttctctctttttattaatgtccttgctttgtatgtgttgttcttgtgattcttttttttcctttatcatttgatttctttttcttcagagaataactttttctcctttttcgttatatttcttatttattttgttccaataattttctaaatttattaaaaaaatattatggtgattttgcagttatcttatataggacaattgtcctgaatgaaataattggccctttctacttggtgattcatcttaaacacatgttctgccttattatgtagttttcaaggctcgccttgtgaagaccgaaattttaggagtgatgttgatgataatgagacagaagaagcatctttctccggccaagaggatttaaacgacttaaatgatattcttgaatgggccaaggtttgtagtttgacaagcacatatagctgtttttgccttgtcagttgtcattcatgaggatattttgtagctgacggtaatttatcaattctcaagaaaataaccacggaccactacaattgtaagcgagttttaccgttttaagttgccctgccaggggctcatcacttacatttcatcctttggagcacttgcatcccttggatatcac

SEQ ID NO: 1923 - DNA, 837 bp, Glycine max
  misc_feature (772)..(772): n is a, c, g, or t
aggagatagcatgcattcaagaggtaatatttcaactgcattttggatttgaaatttttctgctagatagcattatgacttgctaatgtatgacaaaaaatacacagggacttaagctttataaatgtgattggacgttagtatggcaatatattgttccacatagagatccatccttgcttccacgccagtggcgcattgctcttggcactcaaaagtcatacaagatagatgcatcaaaaagggagaagcggagattgtatgagtcaaacagaagaaagtcgaaggcattagaaagttggcgagctatatctgataaagaggttttttactatctgaagcttagaaacatgtgatgaattttatctccctggtcttactcttacatgtgtatgagatgccatcattgttcttttaaatgttgcttctgttaactacctgaaggacttaggattttagtgacatacagatgcacaatatacagtttttgatttacttttatgaaatctttgttcacgtgtataagaaattataaatcattggaaattgagggtgtgcttattcatttactaatatatatttctaacatttcttaattgtgtgtttgacatgtaagaaacatctcacctctagaccagtacactgtcagtttatctttcaccagtttgagtgcatgccgcatagcttattctggcttttctatgggttattgagaattatgattcacagattttggatttacttttattggattttttggaatttattgcangattgtgatgctgaaattgctggctcaattgcatgtttcagaaatgtcccgtatgccaccagcgt

SEQ ID NO: 1924 - DNA, 815 bp, Glycine max
tgcctgcacacatgaacagcgagaatgagaaaatgaatcttagaacaataatcgtcattgctctatcttctgttgtactcttgttggttttggttggagcattttacatcattttgaaatggaggaaaattaggagaccatcaagtgctgttggccctgcattcacatcatgtctaaacaagagatctggtatagctttgaactttactgtgtgtgtgtgtgtgttttttttttcaaaataattttcagatgcttatatagaattggtagaatttgtcatttgattgctaagcattttattgtaaattatactcaactaaattgttgcctaaaatattatttctttggttgagtacagttccctttgcaatttcatctatgctttccttatcatgtgccaaagattatattgtttagtcatatctgtttcttggaaaagtaaatatatatttttgttttacactatacaaatttgcagtatgttgatctctaggtcttgaagattgactcctcattaaattgttttgtgtcacagttaaattaggtttctgtgatttacatgagtgctttttgtgcttgacttttatatgataattgtaaaacagatttttttcccatcaatatatactagcaaggggatacacctattgtccagaggttagttgagttacctttcttacatgggaaaaaaatgctttcaaggcatcctttggtgggcctttgcctgctcctctgggatactatgcctgtcattgatactttgacttgggatctaagaccaggaagtacatatccttatatcatattttcaaact

SEQ ID NO: 1925 - DNA, 1448 bp, Glycine max
aacagaactctatggccgcaagacaagatagaccaaagaggaaggacccggcatattaaaagcagtgacaaagtaggaaaattgcactcatttacgatcaacccaggttcttgtagatctagagtactagtaaggttctctaatcacttatggctcttaatgttgaatagccagaagtgataaaatcaaatcaaataaccccctagggtcggcctagtgacggggtttttggtagcatgcacaaagtcttagattgtaatcttgttgagtcattgtacaccaaataaataaataaataaaattaaaattaatgtaaaatatgataaatgcaagtggaatttatttccaactaatttatgctcgttctcaacataaaaaatcaagagatttgttgtgcataactctttcttaagccatatatcatgactcttacctgcttagctgtcgcaaaattcagtagcgcttcacattcatcaagcatggctttttccctagctgatacaacagcaacttcagacattaaactattcatgccctccacctattccagacacacacacaaaaaaaaaaaatggtgtcagccttaaggctttagggatttaccattgaatcaaaaaggaaaatcattaggaagaaaaaacatacagttagtagaagaaaaaaagtttgatactaaatgtgtaggcctagaaaatagcaaatgctagtgtgatattgtgagtcaaaccagtagaactcctaaaaaagtaacacaccccgtgacagcaaagggcagatagcagatcccattgcttgcatggcatcaacagctgaatagatagcatgcttcaaatgttcaatatctgcctgaaaaagtgtaaacacagtaatgatgttagtgtctctttgcacgcatcgaaccaaaagaacagaaaccaccatacatacctttgcccctccagttagaggaagacgaagagtacttgcctccaagtcttctacagccccggataaggcatcaatatgatcactttcaagtacagcccagtcatcaaggtaggccatctgtgtcattaattgtaaaaggactacaatttaaaaaagtatcaaaaaaaagttgaatcatttaaataagaaaatggtttcatatatgacttgtaatcatatccaccattaataatatgagttatgaataccatgttatgacagactagcataaacaattaaacataacttttcaatgtgcagggccaacatcttgctgagtatattttcctcatttataaacttcacaataaatatctctagttaaattaccaaaaatgaaaatcgggaaaaaaaaaaaagaaagaaagaaaaagtaattgtaatgtatcatcaacaataatatcgcacatagaatgataaatatttcaggcaagagagaagtattacttgatcattcaaaatagaattcagcttcagctcaa

SEQ ID NO: 1926 - DNA, 1240 bp, Glycine max
ttaaattctatctgcacactaagccacacacttatagaaccaagagcttgcatgaatgattctgaatggaaagcaaatgattccaatagcgtggctttggagaagttcaaaagagacagcgtttatattgacaaaaatggcagattaaggaacttcaatcacaaaaaagtgtcaaggaaaaaatgtaattaacacatcatggaacatgagtttcctcactagttcattgaaacgtgtgtgtcatgtttgaaaagtgtgttgttttacatatggacaggtggttctttgagaggacgaggatggaaatacggttctgggtttgttgatgggatttttcctgtgctgagtccaactgcacagcagattctggactatgttgaaaagggtgtggagagtgagagcatttggggttctttggacatgcttcctcccactcttgatgcatgggatgatattttcactgtggctgttcaacttcggatgaggaaacagtgggattcaatcatttcggtgagaaactcatccctgattgcccttctaacttcttaacttcaaaaactaatttatctcttttcagaattattcaatggaatgcctaatgatttttctgaaaatctataacaatatataaagataatacggataccaattcttagtgtagacatttcttaacccattttatcttcaactggtagtgatgtattgtaactccacactcaaattttagttttctttttgaagtagtgctaccttgtaaattaattattctcaaaaaaaatgtggtgtctgtctttctgatagtgtttagtaatgatgatatttgtttcactcgcttctagcaaatttaccttactggtacagtttttatcagtcgaattatttgaagcgtgaaggttgacttatctcttgtaacgtttcaccattgaatccatcatgcattcatgttcatgtgtcacttgtcaacgtctatttcataggacttatgtgacaataatagaagtacacatgactacttgggcaatattatgacactaattttttgtttttgtttattgcaattcttaatttattttgggattggctagtggatttgtgttgcccgtcataacagaaaaaaactgtacagatatgtagatggatactgctaaggagctcctttaagccagatgtaatctgctataatttactcatagaagcttttgggcaaaagcttctatacaaggaggcagaatccacctat

SEQ ID NO: 1927 - DNA, 1337 bp, Glycine max
cttgcatgcctgcacactagaattgaatatctcacatgtattgtttcatatgttgtgcactttgggtattatactgaaatgggctttgtccatgcttgcttgggtcaattattcaagtactcccaagcctgacaattgattgtcttgtcttcaaatgagtaatatgaccttcaaactcagcaacagtagtggatttagcacattgtagacaaggggcctaagtcaaaattacaaggggcctaagtcaaaatttattattaatttatttttctaatttattatagtgttttttggatacaaggggcctaagtcaaaattacaaaagtactttaggcagaaacaaaatacctacaaatttattatagtatttgaatatgtaaaaacttgcaaaactcaaatttgtgtcagttcagaataatatttggcttgttcttctagtaatgtacacgattaattcatcagaaaagtttatgataggaaaaaaaaaagtaaaaaatatcttttacctaagtaattgcagagaacccgtgtagaataagaagaaaggtatgactaaatattttataaaactgataacttattattttcacaaaataaatttcacatcctaaacctgaaaattgagatcaattttttattttattttataaaggaggaagactaatgtctcattttattttaatattgagacaaaattgtagatagagtaaaataggaatattaaaattacattttatcctattttaatttttgtttgaaaaattaaaaaaaaaaagactgaagaaatatattcattcagattcatccataatcaacaattaaatcatttctcatgtcaaatactccgtgtttatctaattataagatttttataaaaaaatatttatacttttttataaaaaaaattaatttttagatatattaattattttatatatatatattattacttaattattctctgaccaaacattaataaaaaaaataagtaattgaataaaaaaaataattttaaaatcataatataaataattaacaaatttaattcgataattacttttaaatattctacaaagcctaaatgaaaagcagttgggttactcgtgtagtcggagttttcacgcaaatgatttccccaaataacaacgcggcttcccttgatgcctcttcttctttacctttttcattgtaattctctctcttcactttctttatcttttcggtttacccttacacacgtgcattttctccttactttttccaccaccttaattcgttatggcaccactattcaaggccttcgctctcttctccggcgccgtcgcctgtagccggag

SEQ ID NO: 1928 - DNA, 870 bp, Glycine max
  misc_feature (776)..(776): n is a, c, g, or t
  misc_feature (845)..(845): n is a, c, g, or t
tgatcaatacccttggagtagcaaaacgctatgatgttgcaaatgagctattccaggagttgaaagagaactgtggatgttcaagcgctcgtgtatatgctgtaatgattaagcattttggaaaatgtgggcgactcaatgaagctatcaatctgtttaatgagatgaaaaaacttggatgcacccctgatgtttatgcttataatgctctcatgacaggaatggtaagggcagaaagaatggatgaagctttctccttgtttagaactatggaagaaaatggttgcaccccagatataaattctcataatattatcctaaatggcttggctaggacaggtggaccaaagggtgctttggaaatgtttacaaaaatgaagaactctactattaagccagatgtggtttctttcaacacgattcttggttgtcttagccgagcaggtctgtttgaagaggctgcaaaacttatgcaagaaatgagttctaaaggattccagtatgacctcatcacctactcttcaatacttgaggcagtcggtaaggttgatgattgtaaaatggtagagtcatgagagcaatccggttttacctttttgactgagtctgtcattgattattaatcaataccttgaattttttgaaggtaaggtttaggaacaaccattgaaatttgtgtataatatgtttcaaaactacatattaaaaaaatgctccacatatttagaaaccttgaaaaatatagtagatctcaatctgaataagaaagtattgangaaatttttgttttaacagtataactccttttaatttcgagtaatgatacatctagagactgagaattntcattttttttatttatttttgagt

SEQ ID NO: 1929 - DNA, 795 bp, Glycine max
  misc_feature (784)..(784): n is a, c, g, or t
tgttgttggttgtcaaacttgctttagttttttttttatcttgtaagttctgttatatatatatatatatatataacgtttcaattatttaatttttgcagttactttttttttttcgtcgttatagaacaaaatatgtgatattattgtttttttaattagttcataagtgatttttttttttgcctaagttaaaaaaatatggaaaaaatatgcttgctatttgttattttgtagtaataaactataatcaagtgaagccacccaatatgacgccacttgtgtgaaggcatgcagggtgacattactaagtcaggaactagtaaaccttccggtctgatgccacttggatgaaatcactcaggatgacgccaccaagtcacttagtcacttgaactagtgacactctacataatagtgacacctaggaggagaagagttgaatcatccatcttggtatttagtttcgaaaaacaaccccattttggtcaattaccctgaaagttgcatgacagcatgagtatgggtagacattacaaattttgacctaataaaaagttaagcagaatttcattgttcttcaattaaccaaaaaacaggatgtgtaaataatctgtttgtatttgtatcattactcaaaataaataaaaaaaatgaaaattctcagtctctagatgtatcattactcgaattaaaaggagttatactgttaaaacaaaatttcctcatactttcttattcagattgagatctactatatttttcaaggtttctaaatatgtgnagcattttttt

SEQ ID NO: 1930 - DNA, 1494 bp, Glycine max
acgatcgacctgcaggtctaggttttttatgttctgtaggcttgatattatttgtggaatttcaccctgtaaaaggttactgtgtaaatcaagttggacaagagttttgctgagattaaatagccatgaagggatttgctgattgagattgttatttgaaagatcaaggacttggagatgtgtgaagttggtttttccttttggtggtcctaagttatcaatttggcagctctccaagtgtagttctgaaagagatggaagtgcactcagtacttgaagccagttaccttgtttatgaaggtctgaaccactcaaatcaaggtactccaaggaagatagccttgatatccaattaaggttatctatctgaagagcataattgtatccaagattaaggtgctaggtttgagaggtttcctagttgatgagggattaatcccatgaacccacttaagctaaggtccaagtatctcagactctccaatgagcctaggaagcttggtgttggagtaagaacaaaataatttgaactcaagtccaaatgattcaaatattttagtccaagcaaagaaggactaatctctccactcaactccctatagggagagcccacaggtgtgtcaagattgatttccatgacttgaccagtgttgttgcagtgaacccctggccatgtacagcaatccgacatgatgaaagcctgtttgaagggtctgctagtccatgcttgaagctgagagtgcattcctttccatctcactgcaagtcatattgagccttgctgccttgcttgcactgaagtggagagttgttgcagtggacaatatcaagagaagaacatgagttgcaaatagcactgccatgaagaagaaggaagacgaaaaaggttgaatccacaattttctggttcacggttgctatttactactaacaatgcctatgtaggatatataccgtagaagggttagcatttaaaattttactccactaatggtggtggttgcaaaatgcacacatatgtagaagtatatatgtcaacaacgagacatttaggattaaaagtgtctaaccacaccaccattattttgcactagtttattttattttgatttaattactcttttaatccttatagttgtgataattttttttagtccctataatttaagatattcattttggttcctatatttatattttttttacctttttgtcctcgcggggaagattcaactcacacataaacatgaagaaaattaataaaaatagggaagcaagctcaggtacaactgaagtgtaatggaggtatgagacaaagccactacacattccattattcttgagtctgccaccgacctctgaaagcttagcatttgccaattgccatgatgtaatctccttctttactgtgtctcatcaagttggagtggtatcacagcattgaactaagttgatcgttccaatgggatgatggttttgattgctgcaggcaac

SEQ ID NO: 1931 - DNA, 788 bp, Glycine max
ttgcacacgagtggcttgttgctgtttttaaaacccggaggttgagtcatgtaaatatcctattcaagaatgccattaagaaggcattgttgacatctaaccgttgaagactccatttgtgagtaatagcaagagacaaaagaattctaacagttactggtttgattatagaagaaaatgtctcatagtaatcataaccaagtttctgatgaaatccctttgctacaagccttgctttgtacttgttgatagtgccatcaggattctccttcaccctaaacacccattttcagccaataggagccctagatggaggtagatcagtaagagtcccatgccattcttcatcaaagcctcatactcagccttcattgctgccaaccaagtaggattggaaagagcagttttggtggacttagtctcagaatgagcaagaagaattgtaggatgaagcctaggcttgacaacactagctttggctcttgtgcacatagagtgcacattatcatgtctgacaagagcattttgagaagcagggacaggagctacagaaacagtggcaggggaagataaagatacctcagcagtagtgacctcaacattggatgatgcatctgaagaaacagaagatactgttgccggtggagtattaggtaattcagaatttcctttgtggcaaagggagaagattagatgttgataagggttggtgttgtagcttcaggtgaattgacagatgctacagctgtttgtgaaagcagtagcagaatagcatggcacccgcgcgg

SEQ ID NO: 1932 - DNA, 792 bp, Glycine max
gtagtatccaaccaccacacaacacatctgataacatctacaaagaaattccaccaatcaagaattcacaaccaagcttagaaatgtaactaacatctgcttccatcatacccgctgcataagaatgtccttgcctatgaatattgtcccttttcattagctgttataagattcttggcaataagcttgcctactcatatcatcttaaaatcatgagacaactccacttccgcttcatacacttcttagtgcttttgattaaagaaacctgttccagtcaatgtgtgggctgtagcataagcaactcctaaaaataaattagacacaaaatgttattatattttatcaaaaaggagaaacaaaattcaaaatgagccgtgatggatatcccaaaagaaacattatggaattcaacaataagacaaggcattctttacctttcttgacctttctcattaacaaaattcaatgaaaaattgtagatccagcttataacatgcaagccagtaataacaaacacataaaacattgctttaaacagagagtttcttgcccacaagaaaacccaacaatggacaacaaatcataaacaaaaatagcaagatagtgaaagaaaatcccccaatttggtacaaaaccaaaacctccaatttacttccccattatgcacaccacacacggtgtgagaaagagagacagatcagtgtacaagagggtaaagagtactcacggatttgaaagagggaggcattgccaggggattggggattggcggcgagcgacaagtgaaat

SEQ ID NO: 1933 - DNA, 821 bp, Glycine max
aatgaagctcagtcagcaaaaatgtacagaaataataaaattctggcatttaggtccagagatgaacctgccatcaaccaaaccaccagtcttccctagcaattcaggtgctgtagagagttcagaaagggtggccgcagtaactctcagccttgaaaactgttcatgctcccaagctacctacagcagatgaccatctttaataactattagaggtagcatttggacaaaatgctggaagcatgtgcttgctatcgggaaatatttcaataaaacatgaagcacaagctgatatgactgagaacaggaagtgaaaggcagctgtagaaaattagaagacaagatacattgcagtttccaaacctttttttataaaatgtgtaaaccatatataaggtgtttgtacatggtaatattgtaataaaataatgggacaatggcaattgtctgaaaatacaaccacattgagattgagcaaaagctaagtataactataaattactaaagagctaggcaggtgaaacagaacattgagaatatatcacttactcgaggattggaaatgttaattttcttatgcttcagattcactttaaagcctaattctgctgcaacccttgaaaaatcctacaatattttccattaagtcatgaagataaaactgtaagaaactccatttagtaaagcctgcaccactttgactactcacttacttcatgaattttcttaataaaggcattttccgggagcttagacacatgaatccacaattcattttcccaagagccatactatccagcaaatagcatagtcaatgctct

SEQ ID NO: 1934 - DNA, 749 bp, Glycine max
aagtctcaattataagcatctacaacgtcaacatttgttttttaaagcaacattaaattttttgaaaggattcacattgtcgaagtcccgatttggctgctgcctcgtgctactaccactatttgaccggcgcaccactgtatcccatctatttgcacagtgcaacaaagtattacacttgatgggaacaatagagagacgcaaaagaatttgcttgcacggtgacctttcaatctaagccattggtttaaaataaaataaaggatccagattaagagtaagttttaaaatttattcttagaataagtggatctgttatgtataatttctatctttatcaagggagtgaatgataatttagtaaataaaaaaacatttttaacatatattttgatttaaaatattttaaatcttatagtaaatattatttagtgatattaaattaaataaactaaattatatatattaatacaagagaggagacacgaaacctattggattagtggagtgatgtatacatcacatgtgagaggaaataatttatttaacatgaaaaaaattattcaattctttccatatttaattttgttggcctacaactgttgcacaatacaaatacgattagtcaataaaccaatgtgttaagaaatcataatctttttggatcagaaagagaaaaaaaaagaagaacactataataatacatcttccaaggataaaaaatataatttattctacaacttaacaca

SEQ ID NO: 1935 - DNA, 816 bp, Glycine max
atgcctgcagccgcttgaaaccttgcagttgccacttgggaattttctgcatagacaaaaccattagagtatcagcatgacctaaaccagaatagtaaatactaaatataagtgtatactgtacctcaagtatttttacttactacagttaggttttgttagtttgttaactatagttagttgtcagttaggatagttgacaattctcactgtcaactatatatactcttcttataactgttttcaattaggttgaataacaatccgtttctcaatctctctcttctctctctctctctctcacacagtttctctgaattgtaaaatggtatacagagcttaggtcaaaaccaagcttttttcgtggcttccgcatcgactcctccttcctcctcaccgctgccatcgtcattggctagttcttccaaaatgttcacgcaatcaatttctcagaagttgaatgcaaagaactaccttctttggattcaacaggtgggatctgttattcatggtcatcatcttgaaggctacatcattaatcctcaaatttctcctaaatatgcttcggttgaagatcgcaattcagataaagtcaccagtgagtatcgtgtttggtacgaatagaatcagtttcttcttgtgtggttgtaatccattatttctggtgaaattcttcctcgcattgttggttgtcaatcgccgtggcagttatgggatcgcatccaatcacattttcaatctcactcacgcgaagatttgtcaagcttgcaatgagcttcgaaatctctcttgataatcgctccatctcttattatc

SEQ ID NO: 1936 - DNA, 877 bp, Glycine max
tgcctgcaggagattaagagtgctggtagtagcttcacatggatcaggcccaatggtagtgtgaagagtaggcttgatagattcctggtttcagaccagtggctgtctacttggcctgatagctgtcaacatgtcctcccaagggacttttctgatcattgcccaaccatcttgcagactaagctggtggattggggtcctaagccatttagggtagctgattggtggattcatcaaaaaggatatcaaaaactagtgaaggagacttggagtaatgcccagcaggggggttgggggggtattgttctaaaaaacaagctgaggtatctaaaggaggtcataaggcagtgatgtaaagaatatgggttcattaatgacaaaggaattcagaaaatccagcaaaagctcaatgaagtggaagatatagcatcctttagaaatctatccgaggaagatatcaggaacaggagagagttacaacagcaactgtgggaggcctcaaatgcttttgaatcccttttaagacagaaatccagagaaaaatggttgaaacaaggggattgcaattcagcttatttccataaagccataaatttcagaagaaactataatagtatgcaaggagttctcattggtgatgtatgggttcaggatccttttgtagtcaagaatgaagctgtgaaatatttccaaaatagattttctgaaatgcataagttcagacctacccttgatggagatcaatttccatctatcaatcagaggcagagggatattctgtctgctcctttctcagaccaggaaatcaaagaggcagtgtggaatttgggtggggaaaaatgccctggaccagacggatttaattttaattttttaa

SEQ ID NO: 1937 - DNA, 1408 bp, Glycine max
cacgaagacacctttatagtaatataggaatgaagactttcaatgcaacaataaacacagctttaagtgagctgtcattgcttacttagccacacaataaatattcacagcatggaaaatctgtaactaaagttttacaacaacactgtattatggcctagagaaacagaagctcaattacctaatttacttgtaggccagagtccattctattcattccattagaaattgaagcatagtaatagtacctgaagaagagtgactgttatcttgtattgagcacagattgatgcttgagcttttatatcacttccacgagattgttctttagctaatgcaagaaaagattcatcaaagcaagacaaagtatctgaaagatgatttaattcaaggtgagcaagtccagtcttgaagcatacagaagcagcagcttctcggggaacctgtcaagtgagccatgagatggggaaccaaaaaataaattatacaaactcagagataggaaactagaactataacacagttttattgaaggaatctctacaaggtcctttagcttctggtattagtgtcatataaggatttgtgtaaaataaaatatcaaagataaaggctcaaacagaagaaaaattgcagatgccaagactcttcaagggctttgcttcctcctttctcaatcccactcatctcccttctctgtattctaattcactaaagtcacttccccacctgtcatctgtggagttgttacaatacactctcccaaaccaattaggaacacctttaccaaaaatagtaaaaaataaaaatgatgcagcagaacaaaaaaaaaaggtaagtctagtccacacggtcaattcacaagagcgcaggaaaccaatgactcagatgtattgggtcaacgaggaggattgcttttattagtacattccttcagaaatgaaagattcaagagtaagttaagaaatgtttaccaggcattgccattgtggtggtttacactttacaaaaagttatgtactttttagtgaacaatgacttcaaaggctagcaagcatcaaattggatatcattgttttagtttatttatgaatgaagtaactaattcttccatcaagacaaatagctcatgtttgtgctcatgatgtattgcttctcacgagtcacgagtttgttgtctgttttaacagcataaaaacaaaagcagttgtaagtcaagaaggagtatggaatacaattaaacgtgacgagaactcaaggtaaggagcaatatgatggaaagattctcaatacaaacacgagaaggagagttactcaccgactatgaaggttccaatggcgacggcaacgagtgcttggtgaggatggaaggtagctgcatgtggctgcagggcagcatagtcaaagc

SEQ ID NO: 1938 - DNA, 810 bp, Glycine max
aatttgaattttaatagacatgctaacttcaacttgtccgtttacacttaacagtctcaaaaagacaaaaaaaagtaatatgcatgtttgaatttcaattgagagagctaagaagtactttttactccgaaaatggcaatgtttgccttcttcatttttcactggaattcagaagaattagcaaaagtaatttctctaacttttatccaaacattacttcaatcgtttgatttacaaaagacagaaaaacatttctaaaacgtaataaatgcaaattcacatccctaattccttcttttttttaatggtaaagttgattagaaagcaattgagccctattcgcagtaaagtgtagctcagaaaattaataagagctctggcgattcattaaacgaaaaataaacaaagaaataatagatgagcgattgggtctaagctgcgagaacttacagaagaaatcgacgatttcgggttgaaaattgcaaaggttggctttccaagattgaaactgaaaatcactacccacacaaaagagaatagaaaagaaaagaagacacagaaaaagtgacaaaacacaaaatgccactctggcacggaaaggatcctctacagtttccataatattgtagccgatccccacctttaattttacataaaaattgtgaaccataggatctcttagaacggcacgattcgcttcgcccctggtgagtggtgaatgggggattgttacagccaccccatgtgatggactttccacttaatgacatgtatgcccctcttttctgttcttatgcccactggcatagc

SEQ ID NO: 1939 - DNA, 888 bp, Glycine max
  misc_feature (795)..(795): n is a, c, g, or t
atgcctgcagcaaccgacagaaatgactgtaccacaatgagatttgagacccaattcacagtagcagacatgcctccacatattcctcggtattcttcagggtatacttctgagttaactgtccaaggcacaggtcccatccctggggagaagaaagcaatgtacagggccaaaccaagaattgcaagccatccatacaaaccactttcagatgattggttaaaaaatgacaaggccaagatgatcagagatgctattaccccccctaagctatatagggccaattttctccgtcctgcatggtcaataaggtaaatgccaagaaccgatccggcagcattcatgccggcaactatgagagaaaggagaagagccaactcattagattgaaagccagccatttggacaattgttgggctgtagtacatcactgtgtttatgcctatgaattgctgaaaagcctgtacaaccatgggatgatataattaacacatttccttttgcatgtttaaaaaatacagaacataatccctcaatatgtttcaaaattgagttatggcttgatcactgatatattgtattcaaaactgccagcaagcaaagaataatgcaaccacaaagatgacacgtgatattttctctcacatcaaacaaaccatacatcacacatcatgcaatgagactgaagattttattttatcagtcacacaggacaataagctgaaagctgaacatttagcatttaagaaagaaaaaaaagttattggtgttaaaccaatctcaatctgagctcancaaataaaagttatgaaacaattcagtgctttcaggtataacattgcgtatcagtccagaacttctgtttacagcaatacgaaatggtgaaca

SEQ ID NO: 1940 - DNA, 1866 bp, Glycine max
  misc_feature (1551)..(1551): n is a, c, g, or t
tctcttgaggccaaaacattgtcatgtatatgcctgcatgttcactggcatgattcaatgagtacatggcttcagtcaaagtcaactcctcacatgcactactgctactactactactacttttgtgtcccaaagaaagattctaacttgacaaacaaggaacgatgagagtagtgccatgaccaaaaagggagacaaggatgattttgcagaacacagcagcttcttggtgcaggaagtgttagggttctgattaattttgaggatattcagtgatttgcttataatgttaaccaaattggattaccgattaactgttttaaaaaactaatccaggttcttgaactgtttcaaaaggtttagttcagtttagttcacagtctggtttggttctttgcacaagcctacaccatacagggagatgctatagataaatgacagataaaagcaaaaatacataaattactaaccaatcataacaggtgtactttggttttcaaagtgcaacgctagctctcgacatctttccggaagctcagctccagatctaacattgatgactttgcacgtaacctgttaaaaaaagtacaccacccaatcaaatcattaagaactcaattaggttcacaagcaatgcatacttcatggactgtgtacagtaatggatcaagaatttagactcaagccttttttggggtgagaggctcaacatatcttgtcatgattctagccagagaacacaagcaagatgtctagttgggcccaaaagcccaactgcatctacaatatacagtttagtaataaatctacagttggacattaagaaatgctaagaggagcgactacttacacccagaagtttgtccaaaacaaagctcaattcaatggcaccgatccaatctcgtgatccaacaaaagaagggtctttatcaccaatttcaacaagagtctgctgtatttccctgagaaggttgtagtttgtcaggccaaataatgatcatatgcatgaatatgacaaaacaagaagattttgacaagagtgaacttcagccagacaaactgattcattaaatttccttaaatgaaaaacaagaaactctttaaaagaccaatctaataatccattacacaagaaaaataaaaacgtgacccaatttaaacctgaagggacaataagaaaataacggaaggaatggtatctgccctcgaaagaaaattcacaatcgcaggagagtgaaatgtaaatacctatgagaaggaacttctatggatgtgtagttttgaagtctgaaccatgaaatgatagtctggagagagcggtaagcacaaccccacccctagaaaaattaaattaatttagttttttttgctcagcaaaattaaatatattatagatgagtaccagaggtactaaaatatacagatttagagccatattacaagtagttttggacagacaatgatacagtagctgaaatatcccaaaaactactcaaataagacttggagctatactctaaacctatgatgctgtcctaagaaaagcatctntgagatttgaagaccattgattgaaatgtagagagaaatctttttcaaaacatctgagccatgtccataaaataaacactgcatcatccatcaatttatgagcgtcaaaaatagcaatggagaaaaagaagctgttcctaagctttccaatcaagtagtgagaggaacccaccaccatgccatctttttccctggcaaccctacggaagcttcaaagataaggtggattaaaatgctgatcgggttgaaaagggaaaccacccatcatatttacccaagactgtgactcccaccacagaggactaacgtgcgcag

SEQ ID NO: 1941 - DNA, 765 bp, Glycine max
  misc_feature (750)..(750): n is a, c, g, or t
aaagataataaagagagaaatagagagaagtaaaggtaactcctaaaagctagtcactgtactgtatgagagacatccaatccctttgcatatttgaaaggctaaactatgtttttcgttcgtataaaattaacataagttcagttttcatcttgtaaaattttttgttcatttttcgtcgttgcaaaattaaaatgtgattttttggctctgacctaggtttggatccaaccctatgcaaacctacatggcattttttaaaatgttaaaatgcaatttcgggggattaaaattgtcacaaattgcagaataaaaataaaataaaaaataaaacacgattttttagggttaaaaactgccacaaattacaggaaaaaattaaaaaaacaaaaaacccctttctcctaaacccaggtcggactcctaatcaaactatgaggaacccaggcaataccactttcctaactataaatttttattggcttctcaaaagggtggcaattctgaaacaaaacccatctaatttcaaatggtccatgtaataaaacaagttttttcaacatcaaaactaaaacaaagtattgtcagaacagttgtgaaacaaaaacggatccttccaatacaagttttttcaaatggtccgagaaacaaaaccattgtcaacatgctcaaaaccaacatacaactcttgtgcatcataaacatctcccccctattacaagattccatacaagcataatggcaaccaanatggatctctctaac

SEQ ID NO: 1942 - DNA, 1374 bp, Glycine max
aatcacacacttcttgcgggttatctggtttaacttttatttttaccggattcccaatctttgatttatcttccattctagcaatttctaaagcttttgtacaaactggaaaattctgatcatcccagaactccaaaatcacaccagaacctatgcatgttcttccctcatagaatgccgcaaactgcccagctgctaggccttgatcatcttcagatatgcggacaacagcagagtgacattggccatcagcttcgacttccatttgtaagctacaatcataaaatccaggaccatgtctcacctgaaaaggttaagataccattagtaatttactatgagtactacaaaaaaatggaaaacgtttttaataacagggaagagaatttgatattcaagtaatccaccttgcattggagctgagttgtctggcctgggggcaacccgctaagccatttaaaagagccaacacggaatacacgccttcttttgtcaaaggaaaagtaatttcttgacacaaaaactacattgtttttaacatccttctcaacaacatacctgcataagataaaaaaaaatgggatgaatttctttcttgtttttttaatccaagtccaaatttgacatctggataggaatgcattgaaataatattttgaaatgactcaaggtggagaaaataattaagggaaaaaatgctcccttccaagtgaatggtcaaaaaatttgtacaacgcagattgtattcataatctcatatttctgcacctacaacgtggatatatattcaatacaaaaaggattgtataattacatgattggaaacttgtaagacaaatacaactaacgtcaaaaagataacaaacccatgggcctccaggtagtcgtagaccctggcgctgaccaatagtataaaaccaaaatcctcgatgtttgccaaggaaatctcctgtctcagcttctagtatgacaccttctctctccccaatatgtcttgcaacaaattcactgaatcttatctataactcaaaaagggaacagagatagaaacagaaaagaaatcaaacttcaagacttgcttccaaacagtaaacaataatatggcaccattaatattttaaaatagaaaagtcaagaatggttacaataattcataatgtacactgccataagtgtcatttttattttattcttccacttttagaaccatctgaaagttcaaaagtgatttgtaaagacttctcatcaccatgaaatagatatgatgtaaaggagctgctcactccacataccttgcccaaaaagcatattccttgggaatcctttctatccttatttggtagatcaaattttgtggcaagcttgcggacttct

SEQ ID NO: 1943 - DNA, 724 bp, Glycine max
accctgtatgcctgcagttccctgtgccattaatagctttcactactataggcaagttgaagccatccacaaggctaacatcatagaaatcaggttcaccaagggtgaagtcagcacttgttgctggagggcttccagggccagtgcagtttatgctggtgccacagccacctgttttgcactttccattgccgttgttgtcaaagtcgcagcctgttctagcccatatcctcccactccatccatctggagcagtatatacagttgtttgtcctgatttcaatgcgaagccgtcgccactgtggttgtcactgcgcgttatgccaggccatattgtctccttgcagtaatttactagagtgaaagtcttattgctttcacacagttcaggtgctgccaaccaacacatcaaattagcaagcataaaagtaaatttccatctaagagagccaatttgtttgttttttttttttaattttaaaaaactgaaggagctctttgttttaagaacttagaaatttggttcaaaactcaatggcgagaatttagtatgcatggcaatggcagtggattactagttaccaaattgtgttagtgatgaaccaagaaaactattcagtagaaatattttttttagtatattaatcccaaataggaatattgacagttgggaatagaggaaactctacacacaggaccagtctcatttgtgcaaaacccaaaa

SEQ ID NO: 1944 - DNA, 657 bp, Glycine max
agcaatggaaatgacgagttgcggtctgttcctgcccttgaggatattcctgaaagggtgcttgactcctttagccacatgacttgcttcaagtagctccaagaactcaggttcaatgttgtcaatgccacgaatctttctcagcacagcttttccttcttccaagtgaccacgctcgatcagactatttggtgtgtccaccagcaagaaagcccccaacgtcagaagcaacgctggtaaaccacccaaacctagagatagcctccatccccatccacctttgattcagttgttgctcgatcaacaatagtcagcatctccaacaatgaactacaacccaatgtatatcaaaacaaaacaaatggaacatgcttttgaaatcgattatctacaagactacactaaattgaaaatgattttgcatgaaaatcaattaccatgcattttttttaatattcatatgctcaaaataatttatgattagttgaggagagattaaaaataaaaaaatttaccaaaaaagtagacgtgaatcgtgacaaatcaatattactggactattgttattcaaccacaaaaattaaaagaaaaaaataatttttcaagaattcaaaaataaatttgaagaactaaaagatagagtattttagagggact

SEQ ID NO: 1945 - DNA, 831 bp, Glycine max
aacagtcttccatttagaacccagcatggtagaaatttccttaaattctgcctctgagttcgctttcttgatctgcaccaagccatcaatacataaaaaccattgaatttaactaaaaccaacaaataaaagagagaaaataagaaaaatttaattatcccaaatgattttacctcattccattggtctttcatccacaaaatgtaaggtggagaaggccttttcttctcagagcaccccttcttcttcttatccttcttttcttcattatctttcaacacaggcaaattctacacaaaaaagagaagaaagatgaggaggatgcccaaatgccctaaattttccacaatcacaatttaggtcaagggtttttgtggtctctgaaaccatgggtcccaaatgccctaaattttccacaatatcaaagatggcgatgaactcaccatggtaggtttaaactccttcaacttctgcaattttttgagctcggactgaagcttctcttgctcgcggccgcggtttttgagctcttcgtctttctgcttgagagcctcgtccttgagcttcaagagctcttcggtcttctccttctcgaggcgcatctgctgcaacatttcctgcatctcaagcaattctttctcgaaagattgctgcttcttggaatcttggtttttctttgaaggaacttgtgccttatcggatgatggcgaaattggtgtggctatgatgatgttggcatcgttcgttgatggggttttctccttcagggcccttctgccccttcccctctttgcgggtacttcaccaacaacagtgtcggccatcgatgaa

SEQ ID NO: 1946 - DNA, 831 bp, Glycine max
tcaatgttccacccgtattccaactaccatttgtttaggaaccaagaatacaacaagcaggggaaatttttgagattgacagatttcttgaacttgataaaaggtcagacttccctattaggtgctgtgatcatcattgaggtgcgttcttcttatgcctgttatttaagtaatccagtcttcaatcattccattagctgtagattatgtgaacatgtaatattcctgccgccttcacaattatcctgatcaaactataataaaagaaatgtgcttctaattgtagctctagaaacacattgtgggctttacatttaatatttcttctctctgctgctaaattattttgaacaaagatttgtgggatacatggctttgtgacccagtagcacttgccctggtcacaaggagtctgtggggggaattcaatccctgcactccccagtttcctatctagatcccatcgggaatttcaaatcactaatagtttttaacatgttgtagaataaaataataaatatttataaagttatcttctctcattgctttttattgaaattatgttgttttctactattgtcatttgtcagaatgcagactatcttgcaagagaaaaaaacttaagtgtgactgatgctgtcattgatactttgagcaaagcaggctatgataaacaaggggctcccaaatgttatgattcaatccactaatagttcagtactactgaaattcaggagaaaaccaattatgaacttgtctacaggattgatgagatagttggtgatgcagttgattcagctttccggatatcaaagatttgctcattctggg

SEQ ID NO: 1947 - DNA, 699 bp, Glycine max
tgcatgcctgcagcaatctcagctaaacaagacaggtttcagcgaaaaacaaatttccattgctcacaacacacagttcggcaaaaaagcttcattaaactcaaccatgccatcaccacttcattctgtgtagctttgttttttcattcatggaaattctcagcatttcaaaccccactctttgcctcccccaaaccctcactttaaaattcccaccaaaccactccaaacccacatccccatttctcagaactccattttcactctacctatcacgcttcgccgtcataaagtttcaaacttgggcgcattccgggcgacccagcaaccgccgcaactccttttggaagaagctcctccgtgatcgcaaggtaaactctaatcagattcccaacgaccctttctctgtttcgggcaatggcgttgaagagagtggtgttggtgatcagggggttgacaatgtggttgaagttgaaaaaccaaagtctaagcttttgcgtgagtctgttttgtggaataagttggagaattgggctgaccagtacaagagggatgttgagtattggggtgtaggatctggtcctatattcactgtttatgaagattccattggaggtgtcaagagggtggttgtttatgtagaccagattctgaaaagaagcaaggtaaacatggctagggagatggagagtgggaata

SEQ ID NO: 1948 - DNA, 753 bp, Glycine max
ctgttgttcacccaataccgcaaaatattctgccattgttagaagggaatctatatgataaggacggtgctgtaatatgctcgctatgccatttatgtcattaattgctttggcagcttcaaatgctctctgagattgggagtaggatagcgagtgtacatatctacattgtaaaaatgcccaataagggaaaatgaacagaagttaaaaggattacaaaaggatgcaattattattattattattattattgttataatcattatcatcagtattattctgatgatgattcacacatctcaataatttttaactataaaggctaaaatatgaaatcagataccaagtacaaaaggcatattcaatttttaacttcacaaataaaccaaaaaatcataaaccagccaggttgagaacctcagacccctttctccagtcccgttctgaaagaggattgacaatttccactaacccaaaggtcattgacaataaaaatgaataataataaaagcacaaagtaatggactaaattatgcatgcccttcaattaaaatgaaagaaacatcaagaattaaaaggcattgcgagagagtcagtaatgaaagtaatcaataattaagcaaaagtaggtaatttttctaggctatacctgtaatctgcataaatttccccctcttgtctctatttatcataactcgccctttaggggactttgatagttttgatttgtctcaaatatgtacatgacatgtc

SEQ ID NO: 1949 - DNA, 1366 bp, Glycine max
atccctcgatgctgatcaaggaggccattcatgtaattagctgtggatatgaagaaaagactttatggggaaaagaggtttggctttaaaatgataatgtttttgtacaaagtctttcaggttcttagtttcctattctctcttccaatgatatttttcttaatgtacttataccaattaaaatctcattctagatgcacagtctttactttttgaactcaatttcttcgttggttaaataaaacatcatcttgtctttccagattggttggatttatggttccgtcactgaggatatcttatcggggttcaagatgcaatgtcgaggatggaagtcaatatactgcatgcccttgaggcctgcattcaaagggtctgcacctatcaacttgtctgatagattgcaccaagtccttcgatgggcccttggatcaattgaaattttcctaagtaggcactgccccctctggtatggattttctggaggccgtctcaaatggctacaaagaatggcttatataaacaccattgtctaccctttcacatcccttcctctcattgcttactgttctctgcctgcaatttgcctcctcacaggaaaatttatcataccaacggtaatttcctcatctttattttttgtttcaggatatatagttagagagagagtagttatcaattcagcttaatccgcatgtataacaattacgaaatataaatgatttgtagcataacaaaacaaaattattgaggttaaactatttacttgatccctatagttgtctccattttatgttttagtccttttataagaaaacagtaaggtttggtctctacataattttttttttgacagtttaaaaccgccagaaatttttgtaacaatttttacattgtcaaaaaatgctctctggggtgagtaatagtgaccaaaacttaactttatatgtgcatgtgtagcgactaaaacttacaatttattcatataaggagtagaacttgaaatggagacaattacatggaccaaataaatagtttgaccaactatttatgacaatagttatagtcttattatagaccagtatataacagttttactaagaatcaccaatgccttacatcatgttgttctatacaatttgccacagctttccaacgttgcaagtgttctctttcttggacttttcctctcaattataataaccagtgtgctggagctgcgttggagtggtgttagtatagaagatttgtggcgtaatgagcagttctgggttattggaggtgtttcagcccatctgtttgccgtgttccaaggacttcttaagatgttggctggtgttgacaccaacttcaccgtcactgctaa

SEQ ID NO: 1950 - DNA, 1450 bp, Glycine max
agttgttacttggagcagacaacccagcaatcaaacagcaaagagtatgtagttgatacagaaaatatagatgatttgaaatttgaagcacattgcaatttattggttatgatttattttttttcatttcttacttacattatttagttgcatccaggttgccactgtccaaggtctttctggaactggttctctgcgactaggtgcagctctgatagagcgatattttcctggggcaaaagttttgatatcagctcctacctggggtatgcattttactgcttccctgattaacttggtcgtgatatttgtttgggagttcaaacatccctggtaacattattgtcttgtaggtaatcacaagaatattttcaatgatgctagtgtcccatggtctgagtaccgatattatgatcccaagacagttgggttggattttgagggcatgattgaagatataaaggttaggttgtgatctagaatttagaaagtgaaatggtctatgaacagttttgtagttaactgctttgtttgacctagaaatcaatatacacgaatgttctatttgaatttttttcctcttgatctttcattgtaggtcccaacacttgtcatcttttctcaaaatgcatgtttccaaaaatatctttcacttgaaatacaactgatgtaattgttatgattaacatggcccgttgcggtgtaatggtatttgatgcttaattgatgtagtacttaacgtcttgttatatgaaggccgacatatagaatcataaattttcatttaatttaaaagattcccttcaattctaatataaaattgaacagtgcctaattgtacatttctacattttttcagtcagctccggaaggatcttttatcttacttcatggatgtgctcataatcctactggtattgatccaacacctgaacagtgggaaaaaatagctgatttaattgaagaaaagaaccacattcccttttttgatgttgcttaccaggtaccaatctttgggtaaaggagaaatttctggatagcatatattaaaaaccattagcatattaagaattatgacttaaagtgtgtttggatagctaccagaattgattgacccatctaaaatcatggtgaaaaattgaaaaagtggaagcaactattttttgctatgagtttcaacgtggaattggagttgattctagaaaaattaaatctaatccaaacacacactattaatctttatagagacctagaacctatttagcaacatgctgaactcctcattaattttaggggtttgctagtggaagccttgatgaagatgcagcttctgtgagactgtttgtggcacgtggcatggaggttcttgtagctcaatcttacagtaaaaatctcggtctctatgctgaaaggattggagcaatcaatgtgatttcatcgtcaccagaat

SEQ ID NO: 1951 - DNA, 1401 bp, Glycine max
ttgagcagtgatgttggcattgtagtattctcttggcactagagtcactagaccctgtcaccctgaacacaaagccaacccacgtggtggaatgctatggtctgtcggagtcccagttgttgttatagtgggcttcataagggtacgtatggccttgagctatttacctcttcccctcaactggtgaattttctgggtgaagtctctgaaggttatattatcggtggctttgatgctttgtcagtttttgctatgcttctccttgccaatcttaggtttacctatagccaaaaaattattcttaggtgtgtgtcttgcccttggtcctatgaaaaattccaatcaacttaagatcaaaagtatctcttcttttgtcaaccatgatgtggttgaatgacatcatactcttaaattcaaatgccacagggtgtatgtgtctgtttgctgttttttttcccatcaaacttcggcattttgggactaaatctaagaattaagattaagtgactaatctaactctaaattagaaagtgtgtttgcatgatgtgcaaattcttttaataatgtagtagttgttgattatcctatgctaacatcttggtttctatttcaggcattaatagatgctacatcttctgacagcagtcttgaggaaagagtcaggtgttagaatggtggctttatttgaccatgaggaagttggatctaactctgcccaaggagctggctctcctgttatgctaaatgctgtgactagggttaccaattccttcagctccaatcccaacgtatgattcctttaatttttttttacccctttttatgcctaagaactacatcgatgactcttacttcttacagtgagttaaatctaggtaggggctgtggtcatgcacttatgccagccctcataatttacagcaccattccactatttagcattttagatatttcaacggtggaaagtggaataaccacactctaattttgctttcagtatctaactagtttttgttatggtgatttgttttagcttctggagaaagcagcacaattaagctaccttgtatctgccgacatggcacatgcactacacccaaattacatggtacatcttcttatgtgccttgatttacttttgccaataattcaatgttgatccttatcaaggcctaatttcttacaggacaagcatgaagcaaaccatcagcccaaactacatggaggacttgtcattaaaaccaatgcaagccaacgctatgcaaccaatgttgtcacatccttcatattcagggagatagcatcaaaacataaacttcccgttcaggttagttcagtgaacaattttatctctcttttcttcctttctgattggaattggaactgattgcttctgcaggc

SEQ ID NO: 1952 - DNA, 682 bp, Glycine max
tttgcatgcctgcaggcttttgagataattcattgatgttgtgatatcttcatctcatctatgcaagttttctcctttgcatgattcttatactgcttgctgtattttattaatggggataaaaaatctacacaatttggcttctggttatctcaagtatctacaagtacaactactaccctgcttgttctcgtctattcaagttttcctttacatgattctcgtactgctaaatgctaattgtattgaaattaaataatgggaatgaaaaatctacacaattttcttctggttatctcaagtctctacaactacccctcttgttttcatgtagttttgctgtacgtgcatagcttgcttgatgtacacactttcctattccagtagttaattccatcactttgctctctcttcttcccttgaaagcttcctacaccaatcaaattacatgaaaaatgatgaaggtctgaattattttatactggagtgggtattacacaaatagaagtaataaatgattaattcctataaactcaatcaaaataaaagaggatttatctcttggtgactcaatcgatgtacatttatatgtctgccatgatcaggacgatggttgtagttgggcgatcaatttcaattgcacttatactcattatatgatatatatgaacatatactatcg

SEQ ID NO: 1953 - DNA, 814 bp, Glycine max
tctaattcttgcttgaattgattaattttgagaggaatttcttttttttttcttcaaaagcttagcaaaattatgattataaggtatattttgtcaaaataagctaacccgaatacatactaaatacctcaaggagtttcattaagatagttccattagacctgctttctaacttgcaacatgaagaaacataacctatgaggttggcaagtactactagcaatataacaaagaccatgctaggaaccttcctatgcttgatcatgcggggaatgagatatcagatggacgaaaagggtaagtctgaattttggagagtgaaattcggataggttgagtataagagagaaggaggggagataaagggggcacaaaaaggttgagtgtagttttggccttttgggcagtgaggaagcaagccctctaagtgtctatagtgtctctatccttttcttcttgttatttcttttacttctttttacagtagcttttaacccattttctggactagaatcacactaatatttgatcagattcagaaacatacagagtatattcagtgaataatacatatttttaattccattttcaatcagtaataactgaatatagtgacaagaaaaggaaaagtcaatgaaagagattaaacaattagatctgaaattgctttctgacaacaacctacacaagttatctttgaatagcaaaggcagcactgcaccatttgatggagcatgaatttcttgcacgcaattattagcttattactttcagtcgtgtaagaacgtataaacttactgtgggactccctcct

SEQ ID NO: 1954 - DNA, 1423 bp, Glycine max
aatgtatgtgacaactagaagagaagcttttacttgaattttaacagcctgacaacgcatgttgagaaattctttacgaatcttccatgtacggtatgtacactgtatgcgagcagcagctgccatcactttctttgtcttgtggttcctaaaggcatgctgaatcttcattgctgcaactattttgcgtgcttgagcctctggatgggaagatgcaaccgccttagttctcagttttagagagtgttccctaaatgcagcatgtatgcgggaagctgcctcagcagcagttcggtaagctgccaatgtatccttcaggttctgctggtcctccgtaaggtttgcagaaattaccggatcagtcgtgctagtttcaagtgagccgctgatatttccagctaagctcatgtcattgaagtgctgaaccagagatttttctgaaagataagctgctaagccatcatgacccctcatataagcaagatcagcagcagtgcatccaccaggattttggggagtaggatcagtgaccaaatttggcttcgccccagcagacaacagagttgcaaccattttctccctgaagatacaaattttaaatcaaaatgtataagaaaatttcaattcaaagttcaagcagcctactttacccaaaatcatgctaaattcacattgattatgttaatgtggaagtgtatgaaggaaaaaaaaaacagaaaagaatgtgaatggtgaaaccacgccaaaaaaggatttttaggtcaatgtagttacagaagagctaatggtttaaacaagtggaatgtctgtgtattataccttccacaatatgctgcccaatgaagagctgtccatccagacctatcacggaaatccaatgacaagcctgaccatgaaaacaaggaaacagcccaagtatatcccaaaattgcacacaaatggattacactttggccatgagcatcatattcagtagtcttgcagcctaaaacaattctttccaaaagccattcctttagtctgcttttcaatgcaattccgaatagagcatcttttgcttgtgaaaatggaatttggttgtcttcagttgacttgattaagtattgccaactattggaaataaatgatgttttgagggcgaattgtctagcctctttaagtctattgggtgatactttagtggagataacatcaaggttcaattgtttaaagagcaaatatgcaagcctcatttgtagttgaaactcatcccaattgtcactctcttccattgaaacggcgggatcatgcaaagcaggagtacgatattcaaaattaacaacttggctaataggcttatggccatcaatgctcatgtagagattcacgaatcctggagaatgtggtgatacccagcaccggtagaccccaacctgaacaattt

SEQ ID NO: 1955 - DNA, 803 bp, Glycine max
atttctatatgccgactactgtattgggggatcctctaagatcgacctgcagtcacaaatacccatagcagtccaaattaatgacattaatctttagccatattggtatagtgagattccaggaacaacttcatatattcctggtggagtacaagtgataaatcttgtttgcaaatagtagtattccatggatgaatgtagggaaagtagagcaaagataagaaaataacaaaacgagagaaaccagtgtgataagttactgaactcacctcatgctgatagcagcagtaatgacataagcaattccaaaaccatataagcttacgttcacaaaaacagcacagaagcgactattcccttcccctgcaatgtaaccatccaattaggatcatccgtagagcagttttgccactagaaacatatcaagatgctgttccaaatatgctagcatatttaatcaaaattgttataaaaaacttactagatgaaattttaacacttggtaaactgacactaatacatgttaagcttcaatgctatgaaaggaaagaagccaaaagaaactatgttcactaattaaagagtaacttctaacctaccatagctccgcacaactatcaatatcaccatggctcatctgccattctcaccaccaccatcaccatgatgccttttacccgacctctcattaatcataaccacaatgttaaccttgtgaggatatatctcaatattaaattagtaaaagtaacttggataattctcttaattttttaactcagcatcaacagttgatgattaaa

SEQ ID NO: 1956 - DNA, 798 bp, Glycine max
atatgctccaccatatgaggtgcttgatggccgaagactttgcatgttatactgatatcgttgctgatgggcattaagtagcaagctgtgagcatggggaccatctccaagttttttaagggcagaaactgatgcacggagttccgcaccacgtgttgagggctgacaagcagcttcagcaagctgatcagctaacttttgtctacgttcaccaatggagttctgtagagacaaaagtacagatgggttgatagatttcatctcttttgcctcagaaactacacattctccttcatcaagagcagccaaagcttcttccactcgcctttcagccaagagaacatccaagagatcaggaaactctaccaaccatttgtctaggtctgatatctccttatcttcagaatctgatgtggcatttacagaaaaatcatcagaatttgagattgataatgaatcaatgtgaactccttcagccaaaccatgtatcaaggcagcttgtgtagagagcaggtttctaatagatgaaagctccccctctaaatcagatatctccttagatgttctgtaacgtttaaatattgcttagattcaaaatatgaccaacaatatatcagctaactaacattagctaaaacatattgcagcagctattatttaaggtccaaatatagaagaggtaaaataaaaaaaaaaagagtaaatcactcggatctcctattttgcacttcttacacaaaactccctctatttcttaaacctacacaaaatccctctattttataaatatgttaattt

SEQ ID NO: 1957 - DNA, 796 bp, Glycine max
cacctcgtctgcctgcagtccatttcaaaggttactcaaagtaaaaagtaaaaacatagttgggcagccatgatggctgcccatcacagccccatttcctttgcaagttttggttgggaagaactttgaccgtgcttggttgtgcatgcacttacctgcacattttaacagcgagagttggttcaatccttaatttgacttttccttttgtaaaatttataaactttgaattacataattgcaactgactttcaaatcgtaaaatttgttgaatcttttctctaacctcgttcttgtaagtattatttcaaatgaaaaaagttgtaacagttacataattttcatacaagaattttctgcatgacgttaaaattggtaactaaatttagctaatgtcataagatttaaatatatttttaatcatttaaatgtaagtaattttatttttagtccttccacatttaaagttggttttttcagtcattgaaatccaccaaatacttttttttagttctgctacacaatgcagccaaatatgaaaaagaaattcgtgatttgtaacaattttttaccctcaaaatttgattttctattttaaaatacatttctgggaggttaaacattaactactttaaaaattgcattaattttttttattggacttgactctgaccatttaaaacccgtaaaaaaattgtattttaaaattaaaaattaaaaataaatttcttaatggtaaaaaaatgacaaaaattattttcttatttgacttcacttttacaaaagggactataaa

SEQ ID NO: 1958 - DNA, 820 bp, Glycine max
  misc_feature (763)..(763): n is a, c, g, or t
  misc_feature (792)..(792): n is a, c, g, or t
acttggcatgcctgcagttatttttatcgtgtgctcgaagtgaagtctctgaaatttgtgctttctctgtgttcttcgattttggatttggcttctgtcgaattgaattagggtttgtatggcgagaagaagcagcagcgagtctgaggatgacgcgaggaagcgcagtggcagcgaatctgaggatgaggagaggtataggtatcggcggcgcggtgctgagaatggtaagaagagttccggtcaccgtgatgacggtcattcgggggaagaacgaagcggagccaagagggatggtggaatgcgaggtgataggaaaagtacgagtagggacagaaaggaggagtctgagagctctgaggaggagggtcagattgtgaacaaagaaggggttagggaagagaagggagaggatgagagattgcggcgtggagggagagaagatgaaggagatggctggggtggtagggattctcgtccagggaatgaccagggtgaaaggcgggggaagaaggagagtcacagattgcatcatggcgatagatggcgtggaggtgaggaggacagatggagatttaaggattgccacccgcatagtgattcgaaggaggaggatcacagggagctggccaggaaatcagaaagggatagagatagggataggaagcggaaagttgaaaggggtggagacaatgagagggatcgccatgcatgtcatgattcggatgaagaagatataagggagtttgctaggaaatcaganaggggtagggatagggataggaggcgtanagttgaaaagatggtgacaatgagagga

SEQ ID NO: 1959 - DNA, 639 bp, Glycine max
ttgttcctgccggggacactgagtttgccaaagatgcttcctttggctacaaatcttcaaacctgtgtgatgtaaaacctctaatccctttattgactaaacattgtagtttttttatttttcataatttggacaaattcttaattttgagatgctttttttccaaatatagtgggagaggagaaaacaaatggccgaatacttggaagtagggttgcatcgatttctatccaacttttgaggaaaggtggtccagacgcagtttgtcggcatctatgcagtttgcagaaggtatacagataagagataagagatatagttaatgcatctttgtttgtacatttttaagttctaaaaaagaacacgtggctttactttgtctaggtaagaaattacaaatacgaaggtatattgaattcactcactatgtctgtatctattgtattaagcaggggtcaatatgcatagttaatgcagctagtgaaagagacatgactgtatttgcacttggaatgatcaaggcaaaactttcttctcgttcatgcttttttgtccctttttgctcgttttgttactaatgcaaatgtaattggactgttttgtcttattaacaggcaggattgatgggaaaacgtttct

SEQ ID NO: 1960 - DNA, 664 bp, Glycine max
agagaaaaccagatattcatcaatatgtagttcttacttcttatataaaacccgtaattcatgggagataacaatgcataaattcaatgaataattacttctgaaaactaaaatttgataatcagaagaaaaaaaaagagatcaattggcctccctaccaaattgaaatattttaaaaacccaatcccttgagttccccaactaggaattattgcatttcaatttgaaacaaatattagattgactactaaccaaaaggccataagctacagctatcagtcagtgcttaaacctttcaagttagcagcaccaacacaagtgacacaatgaacaatcaattaaactctaacccacctaggtgttgctcgcacaacacaatatgttggcccaaagccaacaatcttacaatcccctttccagttcagcctcatacagttcaacaccatttcagaaatataactcctaaactcagcctgatagcacttgcttaccattgaattaaaagactacagcgcaatcttacaacaatccacctaggccttgtcaaggcaagatgctgacccaaaaccttaactcagcacatctttttttttttgctcagtaaaaatagataatatatattaattgagtaccagaggtactaaattacagatattggattgcc

SEQ ID NO: 1961 - DNA, 878 bp, Glycine max
  misc_feature (700)..(700): n is a, c, g, or t
  misc_feature (751)..(751): n is a, c, g, or t
tttatactgaaatttaatgaatgaacagtttaaagttacttgtgaatgccatgctctccttttgctttcataacatgtaattaatctttgattttgtttttctcagttaagctccttgactggggggaagaaggccatcggtcagatgctgaaatagcttctttgagagcggcttttacacaggaagttgctgtttggcacaagcttgaacatcctaatgtaaccaaggtaatatttgggccttcattagtttctttgtgttatccatgtttttcctttgagggcaagccctggtgcaatggtaaagttgcgccttggtgaccagttggtcatgggctcgaattcgaaaacaacctctttgcgaaggggaaggcttcatacaattaccctcccccgtaccttcgtgaagcaatgagcttctggcattggggtatgtgtatgatcattccatgtttctcctttttcttgtgttgtggaacaatctgatagcttactacaacaggtttctaacgtgctatcattttccactattaatcaaatcatataagaatggaaagtaaataaacaaaaataaggaaaggggaaagataaatgacaaagaagattgtgagatttaatgcattcctttaagcaaattttggaatgcatttcaagtggaaatattgccgaaccctaaatagtttcttttcatagatgatgngatgcctgatcttgctcattatgcaaaggattttgttaagttatttcatgngccgttcttgtttttgggatacaaaatatatggactggggtgaacccttaaatccctgggaaacctcagggcatcagattgcgctaagcccccaaaactaatgcttattaattttggaaattttttt

SEQ ID NO: 1962 - DNA, 639 bp, Glycine max
gtggataggcttgaggtgttcgaagttggaccatgcaaagatggttaccaaatgggtctcttaattggccaaagattctccgaaaccataaggagtagagtggcctcagacctcattctacaaaaccagcttcgaccctttgcccactcccctcattcacagtcacttctcaaaccacttttttataacaatcaaaccaaattcccaaggtattgggatgaacttttggggacagcagcaggaagcggtgtgccatttcttgatgtaaatattgcaaaatcatattattatacataactaaaatgcagcagcaacattaatatttagtgtcttatgtatgtgtgtttttttatcagcaaacattagtttattataagggtagtttttgttagcagagaggattgaactcgtcatcttttattttattttttttaaccatgcaaccctcttagatctcctgtcttgtgtgtgcgtgttagcagatattgcttatcaacttaaggaaggagattctggcgtttattcaaaaagaaggagcaaaaagtgccaactccgatacctcggatgattgctccgatgttcttgttgtcagtgaatctatggctattgcggcgcacaacgaaaaaggcaatggtggcc

SEQ ID NO: 1963 - DNA, 659 bp, Glycine max
ggttcggatgttgtcgtgaagaagagttccttcccttgaggaagatcctcgtacacgtctcttcggagaggaaaacgtaggtcttcgggtgggggttcttgcaagtgacgcttaagctccaagaggcttgggagggtttgcggggacgcacgtaggaagcattccatgtagtaatcgcttgggtctcggaaatccaatgtagcaattgctgcaacatcaataataatgcaagaaaaaagagagaaaaaaagtaattctaccaaacttagaacaacaataatgcattatagtattatacatgctgcttcaatgtgtttggtgtcacttatagatttaattcgactttttagattgtcaatgaagctaataaatgtgcatcattagtctaataattttactctattatcaattaatggtgaaaaagttttattatgaatagaaataaagtagtttttatttatccatcttcattttgaaggttctgaattgttgaatgcgttaagaactgagtgcagagaatccaaatgctactatagatttattatagattttgatctaaattataattaatcatatatgtaacaatttgtaattaaatagagtgcatgctattattattcataatatgtgagcacaagggcatacaaatcaaataaaaa

SEQ ID NO: 1964 - DNA, 852 bp, Glycine max
  misc_feature (827)..(827): n is a, c, g, or t
tatctataacaacgttcttcatcgcttcaaatttttgtatgtaggcttttggtatagggccgctgaagttgttgaaagagacatcaaagatgactaaacgggggaatccatgcttgatctttaaaccggcaatgggaccgtacaacttgttggctcgcaaaaccaatactttcaattctggtagagtttgaagccaatggggaaacacatcctttatttgattgtttccaagatctaaaacctccagatgaatgcaattggacaaagattctggcaaaagaccttctaataattggttgccattgagatccagagttctgagctgacagttctttgtaaaggtacttggcaaagggccatgaagcttgttcagttgtagatccaaaacttgaagggatgatgagtttgcaaggcattgtggaatggttcctgtcaacttgttgtgagacaagttgagaatctcaattgcacttgcattgcaaattgaggaagagaagtctccagtgattgagttaaaactaagatcaaggtaaccgagttgttggttccacgagaataggtgcaatgattgtgtcaataggttatgagagaggtccaattcatataacgatatttcatgcaaccaatttggcactctacctttaagtttgttattggacaaatggagtgattctaaaattgggacttttcccgataattttggaaattcagttaaaaccatagaagataagttcaagaactttaaattagagaaaactatattgacattggattcgaaattagtgataactgatcattccatgaaaggtgaaattctttcaaaattngaagcttggagaaacgatgaaaatt

SEQ ID NO: 1965 - DNA, 1212 bp, Glycine max
  misc_feature (1110)..(1110): n is a, c, g, or t
aatacatatactcatggcaggaaaagaaagataaacacatgtctttagacgaaagaaaaatacttttatccacataatatttaaaaaattagagtttttagatgacaaacagttttacccactactatatgtggatgataaaatacacataataaatctggagcccaataaagcagcattttcaggtactggaacatctttatttataaaagaacacattgatgtattatattaataaaatacacagccttctgtaaatgatagcttactatatctcatttctaacacaacaggtgcgtatgaagataaatccctgcaaccaacacttgacgaagcatcgatcggagacaatacagttgttgagagaagtcaagatgaaagacagccagaagcagaatttaaagagaagattaacctagagatgaagactccacaaaatgataccaaggagacggcagaaataaataccaatgatactgagaaacaggaagaggttccagcatctcaggccaaagagaaaatagggattgaggatgatggcaaattcaatcaagaagaagcaaaagggattgaagaagaaacaaaaacacagttaccagaggaagaagtcaagacaacattgcccactgctgcctttgtccaaggcgatactgatcaaataccacagcagcaaacactgcatgatgatgattcagaagtgattgatattgcaaagaacattgacactccagaaattgaacttggcggatggtccactgttgtggaggttagccagtagtgaagtaaacaagtaaaacataacatatatattcgcttgtcgagaataataaaagaaactattttctaaacttgtttacaaattttatacttgtatatattcaaccaggaacccgaacaacccgaaaaaaccgacaacatcggcgtggtgaaagatgtaaaagcagaccaccaatttgaagaatctaacgtgttgaatggaagtacaaattatacaacaccgggaggacacatcacatcagaaagcagcaaaaactcaactggtgatgtggacatcgatgaacagataatagtagacacgtgctcagaagggaatttagagaacaagtatgncagcgaaaatacagcagagaaagaaacagatgcaaatcaattgaccgatgtggagataccaaagacagaaaccgaagtaaataagttttgaattttcaaatg

SEQ ID NO: 1966 - DNA, 652 bp, Glycine max
tgcattatctcacggcctgtttgtgttgaaccaataaagatcacatgataatttaaaagtgtccgtgcttcttttagtcaccaagatagattaagcagtcttataatatttaagatcttggtacttctaaatatttgacatgtaaatttaattaccttatatgcactcttacctaataaattttgtgacaattaattttattttaatttatttaatacacaaaaattaattatcacaaaattaattatataaatttacgtatacattaaatatatattaaaattattgcaccaaaattaattaccacaaaatttatcatataaatttacatgtacaataaatatacattaaaaattttaatattacatataataacattaattattttataatataattgacctattaacttaattaattagagcgttgtgttaataatttaaaagtcacatgttatcttatattagttcatatggattacatatctataaatttataattttgaaaaaatgaaaaaaaatttattaatgcacaaaacaattacctaaaaagactaccaataaaaagtatagtgagcctaatatgattatatgcatatttatatcgcagtttacaaaaatgtttcaatagttgcttctgctaaattgaattg

SEQ ID NO: 1967 - DNA, 785 bp, Glycine max
atgtcgaccttctcttcaagctcaccaaggcgtttcaaagcagatgagatgagttctgtctttgttaatctgggaactggcgatgggggacgagattcttccttggttattgaatcaacagtcgtgttaggcagcatatttttggcagaatcagatttggtgtcttgtattcccttagtcacacgaagtgctaatgaacgaacaaaagtaaagatggcaacaaagaagccgacaataacagccaagatatatgcacagtttccaccagactttccagtactcagtaggaaattttctgcaatgaataacaaatacgttacaattatactttttcgtgggtagtaaaatgaaaatcccaatctaaaatcgactacctcaatttgttctatttatctagaagaaaattatgaatttcttatctttctattatgaagaaatatttactttcttagacaagtgttaaatatttttgcattcatttctatatgcattggtaaatacctatcaatgaatcccaaatatgtggaaaataacattaagtattattctggtagccacaaagtcccacgtcacttaggagttgaggccattgacctttttctctcaacccaccaatgtgccttttacaatgacaaaatcgtgatgatgcaccaaacacctaagcggacaatacctcggatacaggaatcctaatgacgtctcaagagttgaggttaagaagtcggttataaacacactctcctgctcagtctcaccccactaagtacctagacagataatacctc

SEQ ID NO: 1968 - DNA, 865 bp, Glycine max
aacaggattacaggtgttggggatgcaaaaataatgaagtgaattgtgcaccgaagagcagccataccagagaaagagtggcatatgagtccttgccttcagttgcatcactagccgcgcggagagtttcttttgccttcacccaatcatcatttttcaactccaactcaccaagcatagataatgcattgggacacttgttattcaccttcaaggcatcattaacctacagaaaggagtgtcaaatagtaaatttatataatatataatttatttataaataagaaaagcaagaagaccatagggataatagtaaccagttcaatgcttaacagaatgttgttccgagcttttgcaattgcagctagcctcagatacgcatcaatatagtcaggatactggagacaaaagataataaaattgaatgaaatatataagccaaatgttaatcatgtcccatgtaataaaatagtcatcaaatatagttatccaggtgaacttttgcacaatataggcactctgtaattgaactatacatgataatcatattgtactgcaacaataaaggcattaacagattttttcagtgtgagcaggaaataacaaacattatttattcaaaaggaaaatttcaattcaagtctgctgggagcaaagcaagaacttgctgaatctgatggagtgagggaggaaattttaaaataaatttgtggggtgaccaaaataaaacattttgaacataaaatttgcaacattaaatttgtcacccataaattaggaaggctagcctgtcctgggggccgaggttcaacctttccgttaaggaagaataccgtttcctcacattactatttactggaaaggg

SEQ ID NO: 1969 - DNA, 672 bp, Glycine max
ctgcctgcaggaacatcaatccattgattttcatgaagaacttgaaggccaccaatttggtcttgcaaaagtattgtcatgaagttaccctctgtgtgcctgctagtgcccatagttaattcgggctcagggcatccaggttaatagtgacacagatgaagaagcccttcatcacaacccatttctttacggtaaaaacgattaaggccaagagctttaggtactaactcaaatgataatggttaaatatgagttattttgataataaaaatatattgaaaatatctttaaaaatatttatttaacatttatctttgacttaaagattaagttgcaaatatgaaaatgagatattaaaaaagaaaaagatagagaaaatatccaaaatatcaagaagtctaagaactatgattaaaagcaaaataaatctaaaaaaaatatcaagaaagaagatgtctatcatcaggcccaagtccactacaataaccataaaaaaggagtcaaaccaagcaagaacaacactacataaccccctctcctaggggtttcatttactctctttcatggtttatctttatatattctggcaagagttagatgctcgggggagaataacttctaatagaacaaaaagaaacgatttcataatataagactagaatgataatttta

SEQ ID NO: 1970 - DNA, 744 bp, Glycine max
  misc_feature (719)..(719): n is a, c, g, or t
agaaacccaagacaaattattttcttttacacaaagagatctgaccaatataaggatttaaatttttattggggtaaagaaaaacctgaagagtgaaagccagtgatgaattcacattacaatcttcaggtggatgaagcaattccacaggacaattttcaacttcacagtagagttgtggagtcctaccattttacataataacacaaaaggaaatattaaaccaaataaagaaatgcacaccaaagctttcttaacatgcactgcataaacttacatatcatcaccagaagcctctaacggtcctcttagaacagatccaggtccaacctttgcgtttcaaagatgatagttaatgcattagcacagaaatagtaatacatttacacagtttaaaggtcaagaaatcaattttaagaatttcaaaattggaagtcgcataaatatacaaggaacgagaagacaatacttaagttatgcatgtcaattgttgtatgtgccaaaagggcagagatttctttactacaaatttatcaaattcaatcttctttgctcttaacatggtaaaaatatttaaattaaaaagggtagttgatggatattacaacggcaaatgtgtgcatcaaagtgaaccacgtgactatcccagctaacattatcagtgtgcatatatattcaagccacttagagaaagattgacattcttccaatagtcgttnaaatgggtctaaagaaacggtaaaa

SEQ ID NO: 1971 - DNA, 784 bp, Glycine max
aagtcattatggcagattttatggcagctggtgaccaatgaggatgagagcttttgagcaaagcagctatgccactaagatgtgggcatgacattgatgtgccagacataaagttgaaagtggattttgaatcagtatcgttattcagggggaatggccaggcagctaggatgttcacgcctggtcctatgatgtctggtttcaaaataccaggacttggcaagttgggacctcttgaagagaaggatgtaacagcaggagctaaggagtttccaattatagtccccttgaataaaatggttgctataggtattgcagtggaatttatataggctttaatcttaagtccagcatcgtagcttacatgtgttgcaggtagaacatgcacatcagctgagagactgaagccattgctttcatcattcatgagaatcatggctgcaccacctactctttttacttcctctcctttgggaattcttcctatacctcctcctctctcacacaaaacaaccttgcctctgaaatcacaatcattcaaggacccattagcacaaaatgcagcttcttgtttgccattctttccagcatatgccaagggtagcaatgttggagaaaaatcagaaggctggaaaacagattccccatcaaattcttgcccatttcccagcttcgctgttgctgcaatgcttctgtcaatattgcttgctccaactgtgaagacccaagggctccattaattaagaacccatggaagggccagagttcctgctgacaacttaca

SEQ ID NO: 1972 - DNA, 678 bp, Glycine max
ccagctggacgacgcgctgggtcgactcaacgacgcgctgtcggccgcggcggcgctgacggaggcgaagatctccgacgttcagacgtgggtgagcgcggcgatcaccgaccaacaaacgtgcctcgacggattggaagaggtcggtgacgtggcagcgatggaagagatgaagaaaatgatgaagaggtcgaacgagtacaccagtaacagtttggctattgtcgctaatattcgcaacttgttacaacggttccacatggcgctacattgaagttgaagttgaagattttcaattcgttacatttttttttgtggttttatatatatatatatatatatatatggattttgtgtattgggtgggtgaatatgtgatgcttaattagtcatttaattgtataatatgtatgtggctatacgaaaaatgttgtattaacacttttaattaatttctcttgatttattacattgtgtgatgacaatggacagaaattagaaatctgaagttactcgttatataaacaattttaccagaatgcacagtgaagaacagtaaagagttttaaaccagaatgtcaccaacgaagagaattgggtcagtattttaagtggacaacagaacaacgcaagtatgtctgtgaatttgaatggttggccttactaaattgcaaagtt

SEQ ID NO: 1973 - DNA, 835 bp, Glycine max
atgcttccttctacagtccattgttggtgccttacaatatgttacttaccctgagcagctgatgctctcctttaataaacatggaagtaattgatccttgctactgtatctcttatttataatgatgacattaattatagagagatcatttttactttataatatgaataattatatttattatatacagtatataattatttgtaataatattaattattaaatttaatatatttattccatggtcaataaataaattaaacacatttattaaatgtatgaatggtcaaatgaatctctctctctctctacacactacattcccccctccccaaagaatataataagcactttaggagataaatataatttatctcttgttttaatatgcacaagtgtgtatatgtgtatatgtgtgcacacagagagagatatgacaatccatacatcaaataattaaatttaataaatgggtttaattattcattgaccatgaaataaatgtattgaatttgatagttaatattattaaaattaattatatattatatataataaatataacaattgatattataaaataaaatttatctctctataattaatatcatcattataaataagagagtaacaagggtcaattatttctctttatcaaaggaaagcgtacccctctattgacttttatcttcgccaaaaaagaggatgcatgattccctctattaattgtcttcactaaactgcggtgatcaattgcctcccgtctctctgacattgctaactcttttcacatgatttgttatcctgtcaggcatttgatttacttaatctcact

SEQ ID NO: 1974 - DNA, 639 bp, Glycine max
caaaggtcaccgatggatttgcacgcatgcttgttacttctgtgggaatgaatactgcatggggtaccatgatgggtttcataaccaataaagaggttaataatgaggagacacctttgcaagtgcgtctcaataagttgacttctgctattggcaaggttgggttgttggtggctgcacttgtcttggtggtgtctatggcacgttacttcgcgggttgcacgagagatgactttgggaaccgtgaatttgttcggggaaggaccgagtctgatgatgttgtgaatgcggttgtggcgattgttgccgcggcggtgacaattgtggtggtggcgatccctgaagggttgccgcttgctgttactctgagtctggctttttccatgaagaagatgatgagggacaatgccatggttaggagaatctctgcctgtgagacgatgggatcagcaacaacaatctgcactgataaaacaggtaatacacttacatatgctaatttttgttagcagagtgatcgaggactcgctgccttttccctttttccttttctcttaacatctaacccatcttatatatatttccatatataaaacaggtacacttacgttgaatgagatgaaggtgacagaggtgtgg

SEQ ID NO: 1975 - DNA, 941 bp, Glycine max
caagcttgttgcctgcagaaaaagcacatgggatagttgttaatagttttgaagagttggaagcagaatatgttgaagagtgtcaaagatttacggaccatagggtatggtgtgttgggcctgtgtcgctgtcaaataaggatgacaaggacaaggctatgagaagtaagagaaactcaagtgatattgagagtgagtatgtgaagtggcttgattcatggcctccgaggtcagtgatttatgtttgccttggtagcctaaaccgtgcaacgccagagcagttgatagagctcgggttaggattggaagcgacaaaaaggccattcatttgggtgcttagaggtgcatatggaagagaggagatggagaagtggctgttggaagatgggtttgaagagagggtgaaagggagagggcttttgatcaagggttgggtgccacaagtgttgatcttatcacatagagcaataggagcgttcatgacacattgcggatggaattccacactcgaagggatttgtgctggcgtgccgttggtaacttttcctctgtttgctgagcagttcatcaatgagaaacttgtacaagtggtgaagattggcgtgagtgtgggagctgaatctgttgttcacttgggtgaagaagataagtctcgggttcaggtgaccagagaaaatgttctggattctattgaaaggtaatgggagaatggccaaaaaaaaaaaaaatataggaaagggctttaaagtattccgccattggcagggaaagcaaaaaaaaaagtgggttttttttctcacatggtcctactcattgggccatatacctttggagggttaaccaagtttaaccagggttctattttttgttttcaacaccaattgcttttctcaagggtcaaccttaaacccaatttgtcttccgaaagaatttttttttta

SEQ ID NO: 1976 - DNA, 865 bp, Glycine max
  misc_feature (723)..(723): n is a, c, g, or t
aattctctcttgaatttttatgccgtagaatggggctttgtgggtgcctgagcttgaccggttatatcacattaacactaatgataccttttttttgctaacaccaactggaacttttctaagtctgctaccgacaacttcatcctattagcctcattcgcatcttattttgaaaggcgtgtgtttgagtgactttgcaaatttgattttggatgatcttgatttgttttaattaaaataatctcaatgaaagttgaattttgaaaaaaggaatttatatttagaatcatctcaaccaaacttgtaatataagtacaaattttcaatcgaagtaacgcctgccaaagtcacatggttttgtgaatttattacagtattgaaaaacaactgagggatgcttaaaaaaccacactaaatgaaatattattgagcagagctccttagttcccaaaagtgtttactacaaattttactaagctcagatatctcttattaacatttattttctaacccatgtcgagtttattttccaatgcattttttcatatttaggccaaaccaaacgcagcttcgtacttcccaattcaagcgttttcaagttcattctgaaggttttgattccctcaattccatactccgaaattgttatctggaacatccgtattcatacttcctagtttttagtaatgtctcttttccagatagccttgcttgcaatagttnttacgagttttggcacttgcaccaaacttgcacccaacactgatgataataaacttaaacaaggcgcaaaaaatcgcgaaataatcacatcgattcccagaatgaagcggattgcaaaaacatacgaggggtacgtttttac

SEQ ID NO: 1977 - DNA, 612 bp, Glycine max
  misc_feature (581)..(581): n is a, c, g, or t
aaggtacaagttatgttgaagtaggcatgcagatgcagttacatgacaccaagaaaacttgcattcattcacaatgcttttcttcactatcttccttctctgctgttctctgatgttcatcatcaaacagtattccaatgcagcaaccaccaaaaattcaccctcttcacttccaaggttacctctagtgggaaatctgcaccaacttggtttgttcctacaccgcacactccaaactttggctaaaaaatatggccctctaatgctacttcattttggagaggtagcagtacttgtggtctcatctgctgatgcagcgcgtgagttgatgaaaactcatgacctggtcttctctgacaggccacatcttaagatgaatgatgtcctcatgtacggttccaaagacctcgcatgttccatgcacgtacgaagaatattggaggcaagtacggagtttgagtgtgtcacaccttctcagcaccaaaatggttcaatcctatcgcggtttgagagaggaggaaacagtgttgtagtgatttgttgcatgtgaatttgactgatatgtttgctgcacttacgantgacctgacgtgtagagtggctctgggaaag

SEQ ID NO: 1978 - DNA, 669 bp, Glycine max
acgtttggaggtgctgataggaggcttccatgaatttcctaagcttctgtcctgaactgtgctagaactagaactcgctttcctcccaagttttggtgactggggcagtgtaagtgagatctggaaaagaacaaataaataaaattaaaggtcaaaacaaaagaaaatggaaatacaatattataaatcacaagttgaaagcatcacccagaatcaaagaaaatgcaatacaataatataaatcacaagttgaaagcatctccaggtaggaatgaaccgacagagattaatggttgacagattatgtggaactgtgatgatcattggtcataaagcctttgtaaagtgaacagaattgattgacaagcaacatcctttagaacataaataaaaaatccacaaacaaggatttatggctaatccagcactgaagcatccagatgagtaaacaaaagtgcatttagtcaacggttcaacaaaatttatggttgtggttgctgttaaatagcatttagtcgatggaattactttcaacaacagaagtaataagtaaatatacctttctagtctgattgcttggagattgtgatccaccaggcttggcttcgtttagtttggatatagagccactgcgctgccgcagcttcttgtgatcatgctctgttttac

SEQ ID NO: 1979 - DNA, 793 bp, Glycine max
  misc_feature (745)..(745): n is a, c, g, or t
aatctatctgatgattttttttcatatgatttgccaaagaattatatggttaaaggtaaggtagttgtagcaaaaaacccctgcttgcacccaggtgatgtgcgtgttttacaagctgtggatgtgccagatttgtaccacatggtggactgtgttgttttccctcaaaaaggaccaaggtaaatatgcttcttaaatatttctatttttatgcatgttcaacactattttatagagtgatctaacatttaaaagttttatccaataaaaaaattagtctctgaaattgaaataaatgaaactggtgaaataatggttacttagctactgtctacattgcttttgtatgtttatgggtgttaataatatgtatgtgataggtacctcttttatatatcttgaagactgggactagaacttagaatttactggaattaaaaggatttagagaaggaacagaaattaaagataacccaagcttgagagaggcagaggctttaaaaatcttaattcaatctttgcatctttgttccgaacactttcctctcactaacactcctgtctccactgccaggtgtgtctaggaagatacaagaaaataccttcgcataaacctttcaatttatttttcctctgatagactctagaaatgggagatagccattagtgtgcttaatggatacatgaccttactgcctaatatggatgacttttccttattgaaatatttctaaataatttgatnggccgggttgctgctactggagaattggataaaagtatggtccttgaa

SEQ ID NO: 1980 - DNA, 726 bp, Glycine max
aattttgtaaggaccacctaatatttgaattactgaccagaaaattatcaaaatgatttgtacttacttattgacatggttcagttgtttcaaaagagaatcaaaataaaactgtgaagtatccatactttcaagaactccgtagaaatgaagaaactagaaacatttaggtgcattttgcttgtggaaatgttttactttatcattctaaactaggaaataaagtgacatttttgtaagactaggaaataaagtgaaaacaaagtgacaattttgtaaaactaggaaaagtggaaaataaaaacagaagatttccaccaaccaaaaccacctaagtgacactaagtccaaaattcttttatataaacaaggcaaaattgtaaaattggtctcccactttatctccaattacggatttggtccccctataatctaattcacaaatttgatcccccagttttataaatccctgcaaaattggtcctgaaagcctaatttggacgttgaccgttaacctcaaacattgactgccacatgtcaatgccacatgtcaacatcttgagggttccctgtaaaggcttcattttttgaggtaaaattacacctttggtcttcccagtttactccaatttccaatttggcccccctatagttaattcacactttagtcccccagttttataaatcctttataaatggttccttgcaaaattgggtcttttgaat

SEQ ID NO: 1981 - DNA, 769 bp, Glycine max
tccttagccttctgcctctgaaactctaatgtaatgacattcttatcatccccagcaacaggagaagccttcaggggtggaacctgagaaggagctgaaggcttcagtggctgagggacactacttgatggttctctcactgaaggagccactggtcttctcagaggcccttcagtctgggagttccttatagaaacagcagcatgaggcttggaagaagaaaatctaaatgatgaagttgatgaagatgtgcatgatggagaggaggaacaagctgggactttgatgcatggaaatgaagatgccacagacattttttttttgttggattggggatactcaatccttatattttattttttgttaatttttaactttttttatgcatttaactttttcttcaacaattggccttgtttgaaccttagagttggacatgtcttatcaaaatcagagggtgggtttgtggacaaggtttggccaagtatccactggaaggtggctccagttctgtggagggatgcaagggccttaacttgcaccatcaatgtcgtgtttatgctttatacctctcaagtgagtaaacgtcaaccattgggttttgctagtgtttgacttgagagaatatgcggtagaagtgtagaactcatattttattttattttttaattcctctttatattcccatcattttttaaaacttgaaaatatttaacttaaaaaaaatgtggaatccgcttagctaaagaaagtggggggccccttaaaa

SEQ ID NO: 1982 - DNA, 642 bp, Glycine max
ataattagggtgctgactgctgacaaatctcagtttggatcaccaaacacccaagactgagcaacctaccttgcccagttccaatgcctgaaggagcaattcttcttttacgttagtttcgttttcaatgacttgacttttaccaaacactacatagcttcaacaggactctgcaatcaatgtggtctaaacaaaaatgcatcccgaaaataagagacagatgattcacacaaacctcaaaaagccatcagcaaacagcaaaacatcttccaatagagctcattatggaccacaaaaataaattattgcataagatatacagcaatcaaacaccaattaaccaacaataaagcactaagccattattgaccaactcttcaattttacaatcaattgaggctttagggctttagcacttcctaaaaggaaaacgaacatatctaaaagaatgaaaccgcaaaaccgaaaatccaaaagcgtttcttcatagttcaatcaatcgagaaaacctgtttggcgccaaaccgcattgcgaacctgacgcaagtctctcccctttagcgttctccctactccttcaagaaccgaataagccagcatcggcgactgaagcgattccgcgccacaatctcgtgcggcggg

SEQ ID NO: 1983 - DNA, 674 bp, Glycine max
tgtgcaaacaaacgtccagaagtttgtgcacacatattgtggtccctttcaaaagagaaaagaagataattaatataaaagaccagtcacaatatcaaatgcaataatttccattctaggttctgaagaacgcaatcaaaatgctctaaaagtttgctagaaattaacaacacttaaagtctacaaaatgattataaaagaatttgatcagagacccaaattatattcatgttaaggatcctgttttcgcatggaatctagggcatgactgatagaagatgggaactgttaccatccttgcaattttatagtctacatgctacaaacatgatattaaatacaaatgaaaacaatgaactgcctggcaataaaataaaatccatcagccacaggctatgggttatacaaaatctgtaagattgagattataccctcaaacaccacattgaccttttcctataaatctattaaatgcttgatattcaatcatattcagtcctaaagcaaaggatcaaacaatttagacacatccttaaataacttaatattcaactttatttgatcgatacacatttcccaacatgcactagaaattttaacctttattagagaccttgaaaattagtaggattttttttttttttgaaaaacaaaccgttccttagaacccatat

SEQ ID NO: 1984 - DNA, 624 bp, Glycine max
atcatctcccattccaatatccctgattcccttgcttaaagatataggatgtcttaatgtgtgcgtgtggaaaaacatttttgggaagacatcaatccttaaataaattttaatacctagaaattagccctcagttttctggtgaggagtttcctattttagcacaagaaaaaaagatatacatgtagtttcttattggagttgcattcccacgttttctctattttctgtttgggccttgtgcctcgcaattaagtgaaaaaaaatatacatttactttatttttttgttttaagaaaagaaaaacattaaaattaaaattaaatagtacactaatttgtttaaaaaactgaatgcgaaagatatggcgtgcatgattctcgtttgactcttaacgtctttttattctttgacttattatttaagtaacacaatccttaatggattggtacggatttttttttaaagatatacaaaagtaatcgtgtgatacctagtactcatcatggacatctagagagagaatagatatgataagtaaactttactataatattttttttcttataggaattgaagtacccataagatggtaagcagagagatcatagagtgactgagtaa

SEQ ID NO: 1985 - DNA, 690 bp, Glycine max
agcttcaaaggcttctaacaatagatggaaaatgtggtgggtagcagctacaatctcaatttggagactcaggaatgatatgatattccataatcaatcctttgacatctctaagttgacagatagtatcttattccttttatggacttggctgaggggtttggaaaaagatttcaagactcatttccattgctggtcttcaggaatgtctctagcttttagctagtgtgacccctagtagggtgttgtttctgtagggtggttgttttttctgttttacagacctagctacttgtatcttgtagtacctctggtaattttttaatcaatatatatatatctttgctttccaaaaaaaaaagcttcacattaggatccacaagagtgtcgcttgggcgacaatcgagcatactagtctcagtcagaatgtctatatcatacttccgttgggaaatgactgccagatgaggattgggtaacttcaatgccctggaagtacctgagtggacccaagtccttggtctgaaactgattgtggaggtgagacttgaggcgaagaataccattagagtcatcgccagtgatgacgatgtcatcaacataaacaactagatagatgcataagctagacggggaatggggggaaaatacccagtgatcagtttcacgagttattccaaactcaaccaa

SEQ ID NO: 1986 - DNA, 1337 bp, Glycine max
catgagacttctaacctagttaggtcccaaatcttaccataggctttgcggaaggcttaccgttgaagttgacccataattgccccaactctcttaaaatagtgacttctaagctcttgattttgacttgatagaactctttttaagcgaaggcttttgacttgatcccatgttttactacagtgaaataaaatctagtgcgaatcacaactctgacatctatcatgggtggaatggatgaatgcatgaagaaatgcatatgacacagatgcaatttacgaatatgggagcccgagaaactgtctccttcttagatacaacgtctaggggtagcaaagtgccccaacgtatgtatttaaaacggtgacacggacccttcgttggtttgtttacagaggggatcaagacagaacccatgtgcgatgcatatgcgaaaggcgcaacacgggaatgtacatagtatgacaatactcactgaatataagtaaaagggtatatgacacttatgcatggcagtgtgaaaaatggcacgcagcgtgtttgctccgtgcccctatttaagggacctataagggagagagctaactaggcttttagtaataacccccaaggtagtcatatctcttttgatagtttctagaggtatcattatcttcgaaaaacatattgcagcagtagggactactagcaacaatatgttttcaaagagaaaaactctagatgagggttcactgtaatcaagcaagtcggagacctagcatgatcacggattcacctccactccttatgttcccatgaacccgggtatagggcccttttctcaactcacagtgtgtgcaaatagtgttagtgtttgtgtgcatcaaatgaataaatatttacctcatgcatacattttaaaacgcactaaaagcatcaaagagttttatatacacaagaacataagacaaataaagggaaaccaacaaaggagtaagtcatggcaaaacattgcacaagattaaatggcctaactctctaaaaacattccccagtggagtcgccaactgtcgcaacctacccttcggcgggagggcgacgcgtgactcgcgggatgcgtgttccacgaaaggaatacgcgcggagtcgccaccaacgtttatttgaggaaaacgtcggaaaaaccggaaaagacgcgatctacgaacttttaagtgaaaggttcgggagttgtatttacgcacggggaaggtattagcaccccacacgtccgtcacaagggacgggcagcctttaatcgaatgtgcaaacatgactctgatttttacgttccctttatggccttacattctttatcc

SEQ ID NO: 1987 - DNA, 835 bp, Glycine max
  misc_feature (692)..(692): n is a, c, g, or t
gagaaactgccttagcaagaaatatggcacggagagcaaactgagctgtatgttgttgggatggctccaattgccaatcatactctgtaactgaatatgtgaagagaacgaggttgaaaatatagaaaaccactttccacgtggcaaatgagcagaggtatagtattcgatcaagcacaatcaagaagaagatagcctgaacagaagaagtaactcttattaggagtgtatatgacatgacaactctagccacacttataaatgaaacatgcaataaatcattgcgtcactctaacatatgtattcaacaaagaaacgtggataagaaatgtttcctaaacatgtcaatgatgaattacagtcattctctttcgaagtgctacaaattttaacctccaaattatgaaaaggaaaacaaaatcttaatgtttcattccatttggaaaacaaaatgtatcataaatgaaatcatttcaaaggttctggacaatttcttggcattataaacaacatgaattttatattagatctctaacatcccccctgtacaggccctttgggtttgaaaaagggaatatgctgacctaccatgtgctgaaattcaacatttttttagaatgacagacaacaaggatcaaactctagactacatacttggtcaaagaacctctaataccacatcaggaaccaancactccataagcttaagctgttagatgaagagatatgaatagttgtacactacgtctctaacaattggcacacttgacctgctttgtttaccccataaaagtcaaatttgtctgaatgaattaaattctttttaagccctgtt

SEQ ID NO: 1988 - DNA, 640 bp, Glycine max
atcctgcatacaccacaattcaaataataaaaaagttgtaagcaaacaaagcatataatttccatccaaggaaatggcatatgagaattgacaaataaaagtgtctagtgtcaagagcacacaaagaatatcttatatttaaagatttgtctgcaacactgcattcagaaaaaactttttgtcttccgcatttgctaagtttaatttaacacaagacattttcatctcttagtgtatacctatgcatgagtatgagagagaggttttgaggaaactgttgcatgcatgcttacaatagtttagttattctttctgattacattattttcattatgtgatgaactaaatgattctgtccatcaacatatactgtatattgataatgtttcacaaataatgatatcaaatgcaattctatgatatgcccaaaccaacttcaacccaagaatttctcccttgattattattaagcacttacccatattgcctctgagttctcatcattcaagatcttcaaagtaggctgaacaactttcacagcacaggaagatgaatctttcttgatcttaggatatccacctaacctattttgcaacagagagttagtacaggtagctgcaagctattttaatgaagacag

SEQ ID NO: 1989 - DNA, 876 bp, Glycine max
  misc_feature (609)..(609): n is a, c, g, or t
  misc_feature (797)..(797): n is a, c, g, or t
  misc_feature (865)..(865): n is a, c, g, or t
gaataatctgggtgaaaatgagcaagtatggcttgaaccttaggccgcctaagccaaagaagcagccaccaagaccttccctctccaccccttttggctttaatgaagatgatgagaatgacattgagagagaaattgctctccaggctagcaagaataaacgtctcaaggaagtatgttgatcttgctgtagtaatttccttggtgttttgatacttttaaaccagtgtttgttattgtgactgttgtattttgtttgtttatgttatgatctcactttccatttggtttttccttttttaaggttgaggagcagcaaaagaaagccctggaggaagatccatctgtatttgattatgatggagtctatgaccaaatgaaagagaaagttgctcgtccattggtacaagatcgtgaagagagaaaggtatggttgcagttctaataatcttttcttaattacaatcaaacaaccattgtgttatttttacaactctatagaatcatataaatataatgagaaactgagaatctctgccaacttacatcataattatgatgactctgggattagcaacatatagatccactggtaccttttcttttggnataaaatttcctttcattttatttaaattaaaatagtggtttggactaagatactatgaagtcttttcattttgtatcagatacattctgtgggtggcctcgatttcatgagtaacatgggttatgtacaaaattgcagtcccttgtggttgggagtaggtattctctagaatgcgagaccaggcccnaaaactttataaaagctttccggtagagggtctcgggcttggacaataaatttgggggaaggtttttnaatgggttttt

SEQ ID NO: 1990 - DNA, 669 bp, Glycine max
tatcccagtatcatcttccggagataaggtagatgctgctacaaaaatctctcatgcctcacctcaatcaactagcacggaaatcagaaatctcatcggctttgattttagacctaatgtaattcgagaattccacccatcagtaattagggaattatgggatgatttccctcataattgcaaagtttgtggtattaagcttaaacaagaactgtttaatagacacttggagtggcatgccgcaagagaacatggtccaattaaggcatcaagaagttggtatgctaagtcaattgattggattgctggcaggacagaatattcatctgagtccgagtttactgactctgttgatttacaagacaaaaaaatagacagcagtcaattggatacgatggttctagcagatgaaaaccagtgtctgtgtgtattgtgtggcgagctatttgaagatgtgtactgtcatgacaggaacgagtggatgttcaaaggggccgtttacatgaacttttcagatgtcaattgtgagatggaaagtagaaatgtgggtcccatcattcatgccaaatgcttatcagagaactcagtgatcaccaattcggtaaggcctattatctgatattagtggacgtcttccagttgaaaaatgcatgttaggatagtaaaatt

SEQ ID NO: 1991 - DNA, 999 bp, Glycine max
caagcttgcatgcctgcagctccagttttgagagatcgccgtcatagtttttaagttttatctcttcctctttagtaggagccatcttcactagggtttccaatagctcagtgcccaaaccttcaggattccctgtttcataaaaaaaataacacccccggttagcaaagtgaaaatacagaatgtagataagcaattggttcaaggtaaaaacaaacaatagacatgccaaggaaacaacctgatacattactttatgtaaatatatattcagatattttgcatgttatataaccttctgtatgtccctgtaaacacatccaagactatatattaaacaaataaagactcaagattgagtcataatgtaaacctatccttataggaacgccctaagtcttgcctccatgagttttcatactagtaattaccctattatacatgtcttgtatagcctagatataagccacataaacacttttctttaacaaaaccttctacaacacttctcttgactcactattgtaattttttttttcaagtcaataaaaaaccttatggctggctctttcttttacttgggacctttttattaacccttcattaaagataaacaccatttagaaattaaaattgcctttatggtaaaatctatattatgggattaaacctccgaatttaatggccttacaaaataacttggggtcatattgagggggaaagtggcaaaaggaaaggggggtccccctgttttaaaatattggaagggattgaatagggggggggggggccccaggggaaaaaaccaaaattgatcttgtccccatttaaatttttaggcgcgcaaggcttccaagggcccttaaaacggttaagaggggggcccccctttttagctttatgttttaatacccggggcatttttaaccaaaaaggggggcgggatatgaaaaaaaacccccggtttccccgttataaagggtcttaaaaaaacgcaaa

SEQ ID NO: 1992 - DNA, 662 bp, Glycine max
tcaaccgtgaacttggatcccctgcacatttaaaggaactaaggattcgaaaattgttaaattcagttcaaaaggataagcttatcatgcaataaaataaagttaacggatgtgatttataaagttcacaagagaactcgacgatcgtgatctctccaaccattgcttttaaaagttaaaagtagacaagaaagagtgagaaaaattgataatagagattattccctttttattttttgaagaaaaagcttttgtagtgtaagattgcaataatgttactcctcaacttcttttcttatgctttaattttttacaaaaagaaatgatgaagtgtaaaagagaagtgtatgaattaaactacagcaataacattactgagatgattagtagaaaaattgtttccctccctgagtatgtctatagagtgcttatgtatggcctgtagtgaatccatgtttctcttttgatatgggcaggtttgaattcaaaggatggtagcaaagaagagaatgatttgagttgtttaagcagcaaggtgtcctcttcagctatgcttctaactcctcaaagtgaggatgagatattgcaggccagcaatttgaagaacttcacattcaatgagctaagaactgctacaaggaactttcgtccggatagtatgg

SEQ ID NO: 1993 - DNA, 654 bp, Glycine max
tgttgatttagagattaatgattactatggagaggagtaacagcacaccatagatggggaggggaagtgtaactaatttacttaaaatgagaggttctggtcaagctaaggctttgaaatttgaagttactttctggatttgagttgaattgtggagagcatgagaaatctaaatgcagttaagaaaactccaatttttaattgggaaagcaggaggttgtcatacacctactattcctaaagttcaagttgttaagtgaagacatgtgaatgattaatattacatattataacatatccctacattcaagttccctttagatttgaagtgaagataacgtagaggtccacttgtgttgaaatttagctttttattggaagacacttggttatatatgctctgatactatatcatgcaccaatattccaaaaactcaagttgtacgcggaaagaactaaattgaacagatgcagaccaactttttcctattagtctaaacatattggaaatgcaagtacaatcaacattttggttacacactattcaggtttctgcattaaacccccaagtttaaatgaatatcgactaatgcaaggtatgatcataggatgaaatgtgatactgacttgaagaagatttaaaatacctgtggc

SEQ ID NO: 1994 - DNA, 694 bp, Glycine max
agtttgcatgcctgcagaaatgggtactatgttcccagaaactggtggctatgtggcttgggtttcatctaactgggctttccaactaggttgaaagaaatggctcagtggagtcattgacaatgcttgatatccagttctatttttggattaccttaagtcagctatcccagctttaggaggtggctttccaaggatcatagcagtggttgttttagttttagctctcacatgaactataggggcttaaccgtagtgggttgggctgcaatattgttgggaatcttttcattacttcctttcatggttatgggaattatagcaattcctagaataaaaccaactaggtggatcatggtggatttgaacaaagtgaactggggtttgtacatgaacactctcttctggaatttgaactattgggactcaattagtaccctttcaggagaagtggataatcctggtaaaaccctcccaagatctcttttctatgctgttatgttggttgttttggggtactttttaccacttctggtgggaactggagttatgctagttaaccgtgagatatggtatgatggttacttctcagaagttgctagagtgattggaggggtttggttaaggagttgggttcatgcagcatctgctttgtcaaatatggggatgtttgtggctgagatattttgggaat

SEQ ID NO: 1995 - DNA, 751 bp, Glycine max
gctcgaatatctcgctgctgaggtttgttttgggtttccgattaggtttagatttgattagtcatcgtgttttttgtcaatctgttttttcttgttttaatttttgttttaagggtctgatttttaattgtgttctgattgacctaatttatttttgaatcaattgttgatgatgtgtgtttttttatttttttaggttttggaattggctgggaatgctgctagggataacaagaagaatcgtattgttcctaggcacattcagcttgctgtgaggaacgatgaggaactgagcaagcttttggggtctgttaccattgccaacggaggtgtcttgccgaacattcaccagactctgcttcccaagaaggctggaaaggggaagggcgaaattggatctgcctctcaagagttttagggtttttgttttacccatttggactatagttttgattttattgcgtttgtaacatacatgtttcggttattttctacatgtcttctctgagaaattaggtgcttctcagtctgatgaactggatggtgtattatcacttttgaatcagatgtgaatgtgaagtgctatttggattatctgtcgaattaatttattttataacgatagtgtttcataagctggcgcacattgctttttgaactttgaacagtcaattgattattctatatctcctaaatatatggtgcgattttagcttcttaatacgagtgtgactgtgctgaaaactgtagt

SEQ ID NO: 1996 - DNA, 694 bp, Glycine max
aagctccttctttgggagaagaaactctttaacgaagttaaggtatggatcttaaatcaccaatctcattcattccattgctttcagttttttccacttttaatttttaatctctgtgaggcaatttaatcctgctgcattcacatcagttcttgtatattctattgtaaccaacctgtgctgataatttgaaagaaaccaactgatcagaagtcttttatgccataagtaaaacattgttaaccagtgtttacaggtttccacattttttttttccaacgttcatttgtttgcaggcagaggaaaagatgcgtgttatgcatgataggaagtgtcgcaagctgaagcgtttggatgataggggtgctgattttcataaagttgattcaactcgaactttggttaggaatctgtccacaaaaattagaatggcaattcaggtggttgataagatttctatgactataaacaagataagggatgaagaactgtggccacagctgaaggaattaatccaggggtatgtgatgttaaaaactaaccattcttgttatttgttcaagtcctaaatgtctctctgttaatgatgggcaacactgtatgtaaggatggatggaaaaataattcccatatctatgctccataatccaatccttcaattccccccaatccattgaatattgaattttgaaaa

SEQ ID NO: 1997 - DNA, 769 bp, Glycine max
tactccgcgggcttcgcgaacccgaacgggtcgaacccgcggtcgccgatcatgcttccatcgagccactccggcggctccgcattcgggaaccacaccagccggtctccggagggtttcactttcacttcctttttcttcggcggcggctgcggcgccgtcttctttttgccgaagttcaagagcgcgtggaatcttccgttgtttaaggttgtcgtgttaacgttgtttagacgggtgccgaaaaagtatgacgtggcggcggcggcggtggcagtggccatggcggagtttggaatagtagttacgtgtttgtgggtggaaaaagtgtgggaaagggatgtatatatatgtaagtgtgtttatgtatttgtgtttcagtgtgggggtgagttaattttgtgatggatggagtgtgtgagcataaaatgtggcttatctctcagccttatctgcatggttgtgcctgaatggttggttgattgttgcttcacatttattctgtggacctcaaggaaaaacaccattttttacattttcacatttttgttggtttcctttgatttattttatgctaagaaattaaaaacttaaaaaaaacaaacttgtgttagcattatccttgcgtgtatacactgtattcactattcacaaacataacatcagttgcgtaaagtaatgcaattttatgacactaaaattcaaatttggaaacatcaggtcaggtcactatgagaagaatttattcaatctatccctttgccaccat

SEQ ID NO: 1998 - DNA, 876 bp, Glycine max
atgaagacaagagtgaagctgtagttattgatattgagcgagaaaattgtgctccaagaattgaacttcaaggtacttcaagattcctatcaatatttgtagcatgattcacaataaaactgtggtatcgttttatttgatcaatgtagctgactccccttagtgggaaaatgcttagttgttcatgtacttgtaacatgcttggcaagaaaattcattgatctgaaaagatgaaaattacaaggaatttggaggacagggatcctttattaattaaaaaaaaaaacatcaaaacaaaattgagaatgctaatcagtgggaaagtgcaacatttaatgttagcaatgcattccatggtgacttccaccaataaaaatcttctatcaaatgatttcttaatcagaattcttaggatacttattagcaagacccaaacaaaaataagataagcaaggaaaggagcaaagcttccaaatccctctgcaaatctttgggtaaatctacttcaaaaatcaccagcttgttttacccaaatcaggtgcctagccaaagatgcctccattgaatttgctatgagttcttatgctgctgttattggaaggagtgcatatgtttgcacttataaagacttaaggtgcactgatgggttctcggacagtaaatgcattggctgtgggattgctttggaccccccaaataacctttgattggattctgggactattcatggggctatttgtaaaaagcctatctcttccaaaataacacagctatttctttatagagaaaatcccccttgaataggaaaggtgttttaaaaggccacatttaaaattgtgtctccggggaggaaaaataaatgctttgaggggattc

SEQ ID NO: 1999 - DNA, 625 bp, Glycine max
agttttagcaggcttaatgaagggtggagatgaagatcttgctagagatttccgtgatagagcttatagggaggcaaatattgtacagaagagaagaaagtcgaggttattctttgcctcttctttctttgaaatttagtgcttttcttacagaaatgggccttgaagcaagcctaaattctggttcatttcttttaatttaaaacatcatctttatccattgtgcatggccttgtggattatatctgtagttttaattttggaccttcatgaaaatactattaatgctaagtatactaggtttctattaggaactccgatatgagtaaggaaaaaagagggattgcatagggtataacgaacttgcatatgaggcaacaagtgtgagaactgggaagcattgtggtaaggttaaaggctgtgtgggatacaagggaagaaggggggaatgagagaggatgacattcaattgggtagttttggctggctcttgccatacggcaaaaaagtttttcttccctgggttctattcttttatgcctagctttctatgtactgcatttttcctctggaaccagatctttggtctctggaatttgccctattaattctggaataaaataat

SEQ ID NO: 2000 - DNA, 694 bp, Glycine max
  misc_feature (680)..(680): n is a, c, g, or t
attctactgtatgtctatgcttcctctccaccactccattttggtgatgagtatgtggacatatcaacctatgatttatgccaagtttagctagaaaaggggcaataggtctgaactctcctccccaatcagtttgaagactcttaattttggcattaaactgaagttctaccatagctttgaactgttgaaaaatactaaaagtttcagatttgctcttttaagagataaatccaagtgtatttagagaaagcatcaacaaatgttatgtaatacaagtagccattggtagaaataacatgagagggaccccaaaggtcaccaaaaatcaactctaaaggagcagaatagacagtattggacagagaaggaagtctatgagacttatctacacagcaagatgcacagaaatccacagcattttgattgaaaagaggtatattacattgctgtagtacaagtttcattacatagaaatttggatggccaagtctagcatgccataggttgctggacttgggttccatagatgcaacagaaatagaacaattaggaaaaacagaattagaattgctagaattagaaacaaaacatgaagctgaagacttgactgggaagctttgaagctttaaagtgggaaaggagtagagtccatcaggtccaatagagccttgaagcangatctcattggaaa

SEQ ID NO: 2001 - DNA, 798 bp, Glycine max
  misc_feature (706)..(706): n is a, c, g, or t
atctcgagctgattttgcagaatctgtaggttcttcaaaatcatgaaaactcaatctttgccaaaccattttaatcagtgaatgagaccacgcaacgaaaacattgatgcagtgcaatcctacttgtatgcattcatttgttatgtctcagtacttataaaagcctaattaattgtgatggttatttataataatatcagttaatgtcccttttcggggtgccagaatttagcatgcatacaggagaagggttcatttggtggtcatcataatcatcaaatttgatcttttatattcaggtaaaaccaaggtgacacatcacttactgtgtgggtaaaagaaaaaagagcacacattacctgaatctggcattgaagaagttttctataagcttcaagctgagagcttgggatatttggatcattttcaaacccctctccatagttcacaggggatgcatgtgcttgggaaggtagaaaatggaagttttgcattggaggaaaggatagatttggtggtctaccagcgataagaaactgcttttgtgcttcttcactggaagtttgctctccattacggtccgtattagaagattcagccatagatatttgaactgggggatgaagagtgtatccaggagagctgtgagtttgagaacaagccttgtcaattaaacactttatagactaattcagtattatcattnttttaacaaagctttgatatgagagtaagatcacaaaattggtactttgcccaaatcagtcatcttagcaaatggtgaactaagagaagaat

SEQ ID NO: 2002 - DNA, 1485 bp, Glycine max
  misc_feature (1471)..(1471): n is a, c, g, or t
tggcaaaaaggaaatttcttgagaaatataaataggttaaggacccaaagcaatggagtcaaatttagtagcttacccattggaatagttttaggagcccatgaaatgcatgaaatgtcacctgcgagtgaagaaaataatcaaggacttgaagatggcagatagaaaataacttaaaggaaaaatcaaagggtggatgcttggacatactatcatgggctttttcagctgtatccagaacctttccagtctcaacacataaccactgcaatgtggagccatgggtcgcagccaaaaaatttccatcaggggaaacactcatgcgatcatagtgcagtgtagtaccggaagaatcatgaagaggaattaggaacaccttcagcgtcttcggatcctcatcaagatgataacgaacttcaggatagaaggaaaataaaggtgagaggagttgaattaattaacaacctagtccttaagacagcacatatgaacatttggaaccccggagaggaaagaatacccttaattgatcaaataacaagcccatttatcaggccaaataaaataacatgcaaaagaaaacatgccccttttcagtcatagattctcatcgaagtactgtttgaattcttcattaataacatggccacatatcttgtctagaaccattaagactatttgcaactccaggccgacttcgacatcaagtgtttgctagaaaaataaaaccaattcgataagtaaaaaataatcatctttcaaaacttgcttaccattgatattccatagtctcattgaaccatccttggatgcagtgattatttgctcagagtttggcgtaaagcataaccaagtcacagcactctgacacacaagcaataaacatataaatcatagtcaaaaagatgataataggaacatcatctttattatttttgtttaaattgtaaatttctctctcacacacacacatagagagagctaatatgcttgcatgtaaaaatagaccatctttattcttttgtttaaattgaaaatcacacacatgtgtgcacatcatgctcatgaaatttccattaatccaagatattctaatgtaatacatgaaaatataagactgtactgcatcatgaaaattaatgtataatatacctcttacataaacaaaaatgcaatgcatttgaaggaaaatatagtctttaaattttttggcttgaaaagtctatatatgtaaaaatgggagccttaactaaattttaaataactcaaaataataatgctaatattaaaccttatgccccttaagctgcataacattttaaaacttccttcacagatccatcctttgcatatacaatctcccagatctgccaaacatagtaaacaagaaaagggggagaatacattaaggatctttttaaaacaagagcaggtaccttctgataaaagtggccattcagaaatttaatanaggcccttttatgt

SEQ ID NO: 2003 - DNA, 794 bp, Glycine max
ggatttgttgaaagtactggaaaaacaccactaccggctttagcccaagtacgtgacattggattcattagtttctcccacagacaaattcatttcttaaattccttttcatttgtagttctgattttacactaaggtcattgtccctgacacatttcattctaaatgtgtaactgctatatttactgttagtggttcatgagggaagtgatgttgcatgtttcatatgtgcctgaaagcttattcttgccaatttaatgcattggcatgtgaaattaaaccacaggtggcagaaaggcaaggtaaatatttaggaatcttactaaacaaaataggtaaagccaatggaggccgtgcaaacagtgcaaaagatgtagactttggggatcagtttgtttacaagcacatgggaagcatggcatctatagggagttacaaggctctagtggacctcagacagaacaaggtgactttcatttctaagcttttactggtgctttaaaaacttatgtatggtttgattcattcatgtatctcctacaggagggcaaagggttatccctggcaggttttgtcagttggtttatttggcgctcggcatatctaactcgagtcatcagctggaggaacagattctatgtagctatcaactgggctactactcttgtgtttggccgtgatataagcagaatatgaaaactttttaggtaaataaactctgcgtgtaatttttatggtaaatcatgaaagtgtgagagagtgcaaatgaaaatcaaaattagtcttcgagttac

SEQ ID NO: 2004 - DNA, 682 bp, Glycine max
aagatattgtgaaaaagtgggcagactttggggaattggggcctatcatccatcccagctaaataaagcacgtctttgttaccttgagccaaataactccatggtggtcccattgatatttttatacgaacttttgtagtttggaacatctactttccgattacaattatattatatatctatatgccttttctgggtgattggggagagcttttacatactttgcattcaacattcaacttgcaactctcaattcatttagtatttggctttgtaacattattttgattattaggtttcttgcagtcagtgttttaaagtgtagctccaaagaaatatcatctattctgtttaaagattttttatctgaacgatcttttcataagccccttgcctctcttcagactctagagtttacttagatgatggttatagatggaaggtactgtaatatgtcattttcaatgcttttgaatttttactcatttcttcaaactcttctgcccttgaaggttttctctaaactgaaggagggaaggtttcctggagagatcgagttgaaggatctgattaccaaaaagatgacaaattctatacgtgtcaatggtgtgtcagaattgacctcttagtgccttttgtggagacatattttgagctgtcataaattatgtaactgggcctg

SEQ ID NO: 2005 - DNA, 953 bp, Glycine max
  misc_feature (707)..(707): n is a, c, g, or t
  misc_feature (789)..(789): n is a, c, g, or t
aggactcgtaagactctgagagaaatgagtttaccatcataaattggacaatttcttctgtccccggggtaggttgggtgccagatggagaagagggtctgagatctgatgaagaagaggatatgtatgctgatacggcccttgccatggttcgacgctgggaggggtttccttgatctaggagatggcgtgccatttggatcataaatgggaggaatcgggaattactttcccgtcctccacctcggctatctgcactgaatgatgctcctgttgcaaaccgagctaacatctacaaagatgggggaaaaaaatgcatgaacaccagagtgagacaaaatcacttgatttaagcagtataaagataactgtagttatattctagagaaattatttgaaaccagggacgttagttgtctaaatgaaccatttacatcagctgtaaatgtcataaacaagatttcttatcagttttttattatcatattgtcagtcaaattcaacaaacaggaaagagagaatatatggaagctgaataaaataccagaacaatgtcataagtcagcaggcggagtctactttcatcagcacgtccaagaccattaaggttgtcccaatactggtcaacatagcgaacatactgtgccagaggaacccgatggacctctggccgggaataagaattccgagagatccttgtttctaanggtggttctccccctttttcttggattttaaagcgcattactcttgggctctgtaggctggaaggatattttgatactccgnggtaaacctttctccagcttttgaaacaacctatttccctctttgaaagaccaaataagggtaagttttctgtcagtgagcacccttttgatttatggacgcgaaaaggggctctatttaaattgtgaacgggcctgatgaagggactttggaaatctcttggt

SEQ ID NO: 2006 - DNA, 700 bp, Glycine max
tttctattgatacgtgcacagttctttgcaacttcgaagaaaatccatataataacagcctaacctccatcctcccttgtgacgaattgcgctcagcgaaagcaattctccctgaagttggtgcagggatctccttcctcatcactaaggtagcctttgcatagtctcagacacgaatttcttcttaaggagtgctagcaacacaaatgctccttctgacccacattttactattgttaagaatttattgaagagtataaaataataaaaagacacattaaataagaagtcaaaccacaaaaaattgtaatttctaaaaaatttcagctaattgtaagaaatgtgttcaaaagagggtgtgttataataattaggtgacctagactatcatggtccctgctaatctttgtatgacatcaagtgttattaattttttttttcctccattaggatcatgaatagatggtgtggtctagaaccatctaataatttcttgtgttagttagtgtattattaatatttctcctttttctttcaccttttaagtattatgacaatagtctaaaacaatccgacaaagaagaccaaactatatctcccaagccatacgggtaatgtttctatttttctatagtcttcattttgtgttggtggttaatcgaacatattagagcctacatgtcatagacgactaatatgt

SEQ ID NO: 2007 - DNA, 789 bp, Glycine max
attcgtccttgtaacgaggcattggagaattaactgttcagagggaaaagaaaaattaaggtttatatgaagagagtaaacggcaatcgtggaaactagggttgggttaggaaactgaaaaattagcgtatgttataagatccatgcatgtgaaaattcagggatcgaattaggttttagaactcagcaaattgattaaggacaaaccaatcaaggcttgtttatatatgaacggcaaaagttacgcggtggtgacaacgacgacggaagaacactgccgcagtcaggaacgagaaatgcattgatggtggtttatggttaacccaagaaaaaccggtctagtgagtcattgatttaaattaaattaaattattattttctaaattttttatctttgcttatttttatataaaacataaaattttgaaatttatattatatataactattataaagaaaataatctcatttcttatttttcttctgaaatatttttaccctcaatattataaatcattataatattttatttcaaccacgattacatctttcaaaaaaaatcacatctaattacatcatagtggtttttttactagttgtaaataataataaaaactgttttcttcaataattttaggtcaaagacattagacggggaaatactcaagatggagggaaaaaagggaaccaaatagagggagaggtctaaataatagaatctaaaatatcctaattttaaaattaaaagattcctttattctctggtggtaaaaaatgatttaatggatg

SEQ ID NO: 2008 - DNA, 645 bp, Glycine max
gaacattggtgactacaagtttaccaacaataatagtatgcatactttagatctgattaaaataataaccaaacatgcacttttaatgtaaagggtttttacaccttcagtcgatcataaattgtgagatatgataagtttgtcaactttttataataattatcttaaaagtcatatctcttatgatttctgattagatgatggtgtaaaactctcaaagggatagtacattgaaattaaacttctcaacatagagtaaataatttgttcactttttaactatcattcaatcataaattgtcatatatgataagttagttaactactgcaataattatatttaaggtcataactagatggtttctgatttgttgaatgtgtagattcttcgtagtgtataaaaaataaactcttctttgaaagcttgaacatgatgggagtaatgttcaccttaaggaagatgtcaacagctctatagagtccatcactaacgatacgtgcatgatctggaagcagttctgcaagtgctgtgaattttgacggcaacaagtttgagtctagtgctacttcagcgagataactgtccagcaatttggatacctttatgattgagctttgtttaggagatccaggactgtcaaaatc

SEQ ID NO: 2009 - DNA, 822 bp, Glycine max
aagatccaagtaagtctttggtgggaaaagagatcgagtaaagttctaggcttaaaagatagatgaagattgaagagagtacttacgacttagatattgcaaagccaaggtaaacaggaaattatacaaaaatacataaccaattaatgctcctactccaatccaataccaataagcttctgggaaaaatcctcgagttttcagtatcaaaactcctagtgtttcattggaattaggtgtaacctacagtaataacaaattatctcatgaatatatcattccaaggctcattatttgtttctcacgaaacttattcaccattggaaacaaagaggatttacctttctccaactatgaccaagaaattcattcacagctatagcattctgtccatacatcagtggtgaggaccagtaaccccacacaaaccatttgtgcacattctctggcacatagaacagaattatcataataaaggttcattacactaaccaactttgaagttacattaccattttcttacctcgcgaaatcacaaatcctcccaaaaccagaactataagtaatgcaaaacttccaacagtatttgcaactataacatcccttccgaatgctgccatcaaccgaaatagcgaagatgccatctggttaatgcacaggattatcaggtactgttttaaaagcctgccaatagaacttctcattagattccaaaatcagtaactgatagcttaattaatcatttgtgatgatgtggcctcttgcctcacaaattaggatcaaagccaatggcatagtaagagagcccttcccaatagctac

SEQ ID NO: 2010 - DNA, 792 bp, Glycine max
actaggaagacagcggacgagcgtggtcaccgattatattctcaaggtaaaagtccggattcttcaaagttcaaataaaggaaatatagatgacttgtaaaacaacaacttgcatagggtttttcatgtttcccccttttaaatgatgtagattttgggacttgaagtgtgtgctgacattatggtaggagatggaatgataagaggtatctcaggagggcagaaaaagagagtcacaacaggtaatttctttttatcaagaacagcttggcaaaaaaagcttaaaaccagaatttggaacttataaagtgtttgattaataaaaagtttctgcggaataatgaaggggagatgctggttggacctataaaggtgttattcatggatgagatatcaactggtttggacagttccacaacttttcaaataatcaattctatccggcaatccatccatattctgaatggaactgcacttgtgtctctgctacagccagcaccagaaacttatgaactatttgatgatataatactattaacggatggacaaatcgtgtaccaagggccaagagaaaatgtggtagagtttttcgaatcaatgggtttcaagtgtcctgaaagaaaaggagttgctgacttcttgcaagaagtatgagtgtgattcacttgctgttgcttttaaagcttttctattcttgattttctttatagaaaggtaatttaggtattgtggggggtgcaacaggtgacatcaataaaggatcaatgcatatgggcacgtaagatgacctta

SEQ ID NO: 2011 - DNA, 729 bp, Glycine max
gatcgacctgcagaatgccacacttctagttaagacaattctcttgataagatactagattattaataaaagtataccatattaaaaaaaaaaggagaaataacttttcaattgcagatttactaaacatttagtctactaaatttatgatatcaaataaatcccccaaatattaaaacacacacgaaccatcattacctttgtttgatatcacatgtctttgaaggattcaatgtctaggggactcaataactagttttgttttatttaaatgaataataatactgaagtttcgaatatataacttgaataaaatttgttaaaagtaataaattttaaatgtttaatatcacaaatagaagaatacatacactttgggtacatgtaaggtacaaaatctagttacactaatcacagcttaactcatcagtaactgactgactagtggcaacagcttgggcagtacatctaaacaatgtgggcaatattgtcctctgaatgaatgacatactaagatcaaattgttgggcataaaggtttatacgttacctttttctgaatcttcctatcagttgtatcagcatcaacgtgataccctgcttggtggatctgatctcgcacctagaaaattgcagtgcaagaatgttacacaatcaacaagcccttgcttttcacatatcataatatagtagtacaagtatcctaacaaaaattagtatggaacatgaa

SEQ ID NO: 2012 - DNA, 746 bp, Glycine max
aacaaagttacccaatttcaacatgggttggggcttatacataattacatcactaggtgaagggtaaaaagtaataatctccccctgtcaatatctagttattaaccatctaaactaactaacgtgattacatattggtacaaatttccactataatcagtgagtaagaattatatctgttctgctcctaataccatggccctagattttctgactacataatgaatacagtttgcatcatcatgtcatgctctcttgaaaaatttaccacctttctttcccatgcttacacccacatcagaagggaaaagatattttgtgtctggcctccatttcaactctttgagagtggaaaataaggttgcaagttcaggagagatatcactatcttttatgtttttacatgagtctactctaaggcactctagctccttccagtgctcaattacggactccaaaccttctgttgtaagcaatgagcatccttctacgtaaaacaattttacccgcctgaaaatagaccaacaacaactgttatgcaacttgcaaataaccccaatatttagggacacatccatataacttatcaactaaggatacccataacataactacttttaaacatgataaataactaagatatcaaaagtatgttcttaaatgctgcaagaaagtagaaacctacgtttaatataaggatccccactgagatacaatatgaaaatcaaataaccctacaacactga

SEQ ID NO: 2013 - DNA, 797 bp, Glycine max
accagctcttttgatgactgtgggagggatatttcttcctgacactccaaatagcttaattgaacgaggattggcggaaaaaggaaggaagctgctggagaaaatccgaggaaccaaggaagttgatgcagagttccaagatatggttgatgcaagcgagttggcaaagtccataaagcacccatttcgtaacatccttgaaagaaggtacaggccagagttggtgatggcaatcttcatgcctacctttcagatcctgactggcataaattccattctcttctatgctccagtgctgtttcaaagcatgggatttggaggagatgcatcactcatctcttcagctttaaccggtggagttcttgctagttcaacattcatttccatagcaacagtagataggttgggcaggagagttcttcttgtcagtggtggactacaaatgatcacatgccaagtaagaaaaactttctcatgcaaactcttaagcatgtttaaaataataaaatatccatgaaggtgggaaataatgctagaagccagaccaaaacaccatcctgtttatatgatgattaacttcagaactcatgttagatgaagatctaaagggtcattttatgatatcttaagatagggttctctaaatagtatgaaatatgatgttgatattagcatacagatataatttgcaaaagtcaatattcttgctgtttgccaagtggttatatatcataaaatgtttactatccggagagaggtgcagtctactaaattttgcaaggcatttgattttactt

SEQ ID NO: 2014 - DNA, 668 bp, Glycine max
tctacatgccaaatgtggttaacaaatgtaagatatgaaatttaccaaaaagaaactcttggtgaaaatatttcagtttatgaacaattaaacactccaccattcattaagaatgtttaaagagtggcataagtaaccatttgactggttaagtcttcttaaaacatagcagcatagaactatgcactaaaactttaaccataaaatagaactgtgctatactaagtttattcataacacaagattactgttctactaaaaaaaataagtattcatcatgcaaaattggcatgcaaagtgtcacttgctaataatcagcacccctttgagtccaagaaaacttttaccaggttctgtagaaagtgcaattcgatcctttaaaattgtaagttcaggcgacagttcttcagaacccaaaagttttaaatactccatcgctgtagtcaacagcccttgacttgctaaaatttcagcatatttctcaacaagcttgcacagagaagcactaaaccgcttctgcccagttgccaaggcaagaacaatagtcttttccattaaatcctaacaatagataatcatgtcaattttctagcagcaatattggtaaatgagaattttataacagttacaggtcaatcttacctgaagaagtcaacataggatttcct

SEQ ID NO: 2015 - DNA, 850 bp, Glycine max
tgcctgcagctgcagcttcagccataaaattctgcaccacatattcataattgtttcagttgattaccatgcaaactaaacacgcaacgcaagtgcatgtttggtttaacttattttgaagaaataaggactcagtttgtttaaacttatttattgaaataagtgtttattttaataaaataagcagttttctatttttttagtgtgtttaactaaactgtttctgcttaaaaaaaataattttatgtttattttaagaagtaaatcttatctgtttcttaaaaaatcgcttataaaaaaagcacttattttaaagttgttatttttaagtttaaacaaagtcacccaataacttattcttactaatagaaatttttgaaaaataagcgactgttatctaaatttaagtattacaaacattcattaaatcagttcaaacattgacaacataatccagaaaaattagcaacaagctcagagaaccttcagtgtctctatgggaacaaaataagaaaggatagaaaatgaaatgagtaagcaatgataattttctcacgtcatacaaatgaggggggtgaataggaagaattgaataaaaacattttacaattacaaatttactcccaacttttttgattgggacaatactttgggaaagacaactttgtaatttagaaattcaacaagctaatacccctacacttcctctccatttttagttaaaaaattagtcttgatgaaaacgaactctggtgcaaaatgaatattttatgtcccaatgaagactacaaacagattttactgaataatgtcatattaagattaaaaaaactgcagcatcttacggatg

SEQ ID NO: 2016 - DNA, 883 bp, Glycine max
cacaaggctcactctcaagatagtatccatcaaattccactaagccactcaaagtattatatatgcgagaatttggatggttagctaacagctcattctgtgaatggagtgtctcaaagatgcatttaattacatcaggtgtcaagcatcggcccacaagttcagaaatcttgtgttttgaactagtatcagaggatcttccaagcaaccaagtaacaagttctgtatactccacaatattctgaccatacattgggaggaacttaactttctgcaagagtgccactagaatggtttccttaaatgttggcttggcatgatgccagacaccaaataaaactaacttagcctctgcacgcacagtaattgaattccactccagaaggaaaccatcaatgagctgtttcaaaatattgctactcttgtcagtgaagacatctactgctgcctccatatccaaataggacttctctgaaccagattcacctccatcttcacctttctttttcttctttgattcttgagatatggtacctgatttgcttgaacttatgtctcctgactccattttttgtggagtgtgaccaacatcttttcctgtatagaaggcaaaattgagaagtttaagagtctgaataacagactcttcaccgaaataaaatattccattcatcaagatagacataatatctccatgccttatacagtacttttgccagttacgatgacgtgcagctgcaacttcagccatagtggataagcatttcacaatctttacacttctttcatatgggataggattattttgaaaacaccagattggtgtgagtgttataaaggctttggctgagtagaaactgccaagatctcgacacggtatatg

SEQ ID NO: 2017 - DNA, 813 bp, Glycine max
ttcacaaagcttatttaatgctttctccaaggaaccttcaatgcccttagttatatcaaaaaatgttggtaatacttgtggttttaagtaggagtcttttagtaatgactcaagctccccttcattcaatactggactagataacataacctgcttcaaaatatatcatcatcttgtgggcaagaaaaggcaacaaaatcatgggtattatatgacaatgacaaactaaatattacagatgtttgctaaaatacctgtgaagcattctctggcccaatttccaatatattccttctcttcccaatattcacttcaagagacataaccaatccttctcgaagaggatcaattgcaggatttgtaacctgtacttcgaaagatgaagaaaattggagcagtggcatcagagtgaattaaagagcaacataaagagatttaaaaatagatatggatatgcatagagcctaagcagtgacatacaatgaatcccatatagaaacaacaaacaataccatgcatctcatgacattgtgaacaaacaataaacatattaagtaaactaaacatgatccagatgtgatgagataagtaactttgcactgcatagcaaaactatgtcagaagacagggcaaattaatttcaaaaataaattttaggaaagtactctctaacttgcctgtgcaaaccgttgcttgaaataatcaaaaagcatgtgaagtttctgagacaatgctgccaatggaatatcatctcccatgcaaaacgtgggctcctttccttgacagccatactctcgatcaccatctggacat

SEQ ID NO: 2018 - DNA, 663 bp, Glycine max
aaagagttgttgtctcgtccggggcatgctaatatttgtgtggggatctattcctaagccaagctatacctgcacactaatcatagccatactatcaatatgaaatgattaatttcattttcaatttttttatattaaaaaattagcttactttttattggatcataaaatgcatataagaacttgtcttttatactaatcagaatgaaaatcaaacttagctttcctgtggtggttccgttagcggctacgagatgctttggggttccgatttggattcttgattttgattttgtgttgatgagttattttgttacttcttatttttcttttgttagattttgtcacataggttttgggatttgggagtgaatgattttgtggagttaatggggtttggggaatgttcggtgtttaagatgttatcgggattagttgtttttgtcacatcttatccaaagggggggggagtgcattgtttttggtagcaaggaggggggaagaggaggagtgtgttttagagggtagttgggaaaaaagaagcataggaaagtgtacaagtaaaaaatggtagtgtaaataataactgccaaaaaatcccaacaaaatataggtttgaagcccattgggcctgaataaacactatgagccgtctgattcgaa

SEQ ID NO: 2019 - DNA, 689 bp, Glycine max
atacggtttttgaagtgattttgagcactaaacaacagaaaagatatgagtaagtttcctatgaaaggtgcttgagtgtcttgataacaaattggggaaattagtctcttttatgtttattttttgtaggtgggatacattgatgtgtgacttggagctgatagattcatatgatggacactacgatgttgtttatgggacatatgattctaagtatctatctcggtaatctattgatgttaaccttttcaaaaactataacattgtaacaactggattggtgtaatgatatgctctgtttaggaaaattcattattgtgtggattttttcaatgatagagatttctcatttgtgtggactttttcagtcataaaaaattgcatgtctggctaatttgattttcctattgactttggctttcattattctaaattcttcatattacacacgtgctaacaaatttggggtgtgtatgtgtgttagtgtaacatcccggatgaatcacactagaaagagagacatttagaggttgtgtagggatgaaactgtacagttgagtatgatttaattggtactacttataccaacaaaatatatctacttttcggtagcctatcacttaagaactccacaattaaacgtccttgatgcttggcttggagtaattgtgggttggatgatcctctgg

SEQ ID NO: 2020 - DNA, 657 bp, Glycine max
aattagggaggaggatgcatcccacatattttttgaatgcaataaaatactacctctatggtgggaatctcaaacttgggtgagatccttgggggtgtctccaatgaacacaagacaacactttttgcaacatgtacatgggaagccaggattgcagaggtataacagatggaagacttggtggatagccttaacttggtctatatggaagcataggaatggggtcatttttcagaatgcacaattcaatggaatcaagctgctggaggatgctatgtttttgcactggacgtggctcagagctatggagaaagatttttctatgcactataatcagtggtctagcaacctaatagatggtttttgtaattaggaaacaaaaacctatggggcaaggtgttgtattggatgttgagaattctggactgatcagactgatatatagcctgattttttatagctattagtctatctaaaactataactatcttgtatctttagtacctctggtacttttatctataaaatatacttttgctgtccaaaaaaaaaaaaaactatagaatggactaacaaactctaccatctctgattgttgacttttcggcgactctcacactacgacatttcatacggtgacattttactcaactcctt

SEQ ID NO: 2021 - DNA, 759 bp, Glycine max
agaaacttggccaccctataaacatgttttagaaattcaattatcaccactcacattgaaatctttctagagcattctatattatataactgaagttaaaaaaaatccctgtgttcattaacatgcgagagcattctcaaatgatccgttatacttttactttcatagttagatttgattttctcatttaccatcattgaatgaattgtttttgagtgaaactaagaattacttgccacttttcattagagagatgaagatcaagatgatagagatgaaagatgggatcctgattctgacagggaggctgacaatgacaggtatgtttttgtgattttacagtgcatcatgacattgtcttttgaggctcttaacagatctgtttttacagcaatcctgttcgcagaagggtgaaaagtgaatgtgttgaagctgaggataaagatgcagtatgtccgacctgttttctttgcccttgtaacagtagaaaatgtttccaataataatctaaaatgaaatggactaaagcatcagtacaagtaatgagtaaaatatagtgaatttaattagaattatatttcatttctattttttgctggatgatttgtcactgaagtttagaatttacagccacgaaaaggatttgtccaacatcttggattcttaataaagatgcaagtttctatgagtatagctttattatttttgtgacacatgtcatttctaacaaatcaaaagaatattttataaaacaaatcc

SEQ ID NO: 2022 - DNA, 736 bp, Glycine max
ctgaaggaaggctgctgggttttgctggatgagattaatcttgctccacaatctgttttagaagtatttctctcatgaatcttaatctgcatttgttctcatttattttcctttataaaccttatttattgctgctttctttgtttcctctttctatgtctctttgctgtaacaaagttcttcgtatcagggtttgaatgctattctggaccacagagctgaggtgtttataccagagttgggtaatacttataaatgcccaccatcatttagagtttttgcttgtcagaatccatcacatcaaggtggtggccgaaaaggccttccaaagtcatttcttaatagatttaccaaggtatgctggtagtatgttatttttgtatttattttgagcccatgaactgaggaatccaatgtccaaaatccaaaatcctctatgtagtagttagaatcgtgtatttaccttaagggactctaattagctttctgttctgctctgtctagtaaaggtgtcctttttcagagtatttttcctctattgtctatgataaatattgtcaggcaaatatttttcttttgtactcaatatgcaagatttatcaaatctgtgttttttggttgttgactacaggtgtatgttgaccagttagttgaggaagactacctatccatttgtgaatcaaaattttcgactatacctagaactttactcacaaagttactcttattcataaaa

SEQ ID NO: 2023 - DNA, 777 bp, Glycine max
aatcaccgatttcagcgcaagtagggttttcgcaggctttggcgaggccaatgcgtcttccttcggccatcgtttttttggagtttatgtaaacaggatacatcacaatccatttctttatgttggacaattcggcaccgtccatgttccctcactcacgcgctgcaaattgaggacgaagcgcaaaaatcccgaactgaatcttcagttctacgatggcacacaccgaaacggaaagaaggaggaatgaagaagaagacggtcttcgatactggtcggcccagtcaacccacccatgctccatctagagcacggcccaaaataaacgaataataaaatctagatccactattgctatttgcataccccacaatactaatacaccctccttttcataaacactaaatgtcactttcggcatcttatattttaaaagcttcattttaattttaattctttgtgtttatgaaactttaattttgatacattatggtttaaaatttttattttagtcttttatgtttttaaaagtttcatttggatcttttgttttgttttttgttaagagcattagtgtttcatcaatgtttcaaatttttaaatataaactattttagccatcactattttaaattaattaactcttaaaattacacttgaagtaacttgataaaagttttgtcacattcacatccttgttatatttcaagccaaagaatagatgcagtgatgtaatgtcttagttgcatttatatgaatgtgaacaatttatttaac

SEQ ID NO: 2024 - DNA, 803 bp, Glycine max
ggaaaaataaatgccctgcgtcttcgtcctcaaggttgcagaaagggcatcgcccatcatttatcacaatttggcgtgattgtaggtttcttcttgttggtaatctatccctgagtaatctccatgcaaaaactgtgaatttgcttggtacctttaatttccacagttcaacaaaagctgcatccattgtcccttccgatgtattccccctcaacaaattataagcgcttttgaccgatagaaatgatactctgaataataagattagattgatgatattattcaataccctatcttatttatagttttatactaattatgaggttttgtactagtgttactagtgcatgcccaagcctgctaaaaataagactaacattaaccccaatattttaacaataagtttgttatttcatgtatgctaaatgctttaatgtaaaaaagaataattttttttttttgatcagcaaaaaaaaaaaaaagaataatattgtcggcacacttaatgtgatagcctgtatggtctcgcagcacaaaaagcctctttagatatccaattatagatgaagatatatctagttctagtctgttccaagcttcttacatgataatatttctcagaggctcattaggatttggtgaggaaaccttgcaatctcttccagggaaagctggatctcaggtacatggtgatttttttcttttaattctttagttgatatagtttttatccaacacagctttttgtgaaagcagttccatttccaaactatgtcatatttggcctattttttttagtggtg

SEQ ID NO: 2025 - DNA, 898 bp, Glycine max
gaatccttttagaagctagttccaaacgcccagaatcagatttggcattctgaatgagaatctctaaggacttttccatgttagaagagttggaggcttcaaagagtaactgaagtgtatcttctgatatggggtgctccaaaaatgctgtatcaccacccattgcttgattgaaaaaagagaaaaatgtgaaatttcaaaataaaaatttgattttgatgaaaaattcaaacaccccacaatctaattggtcaaaattgtagcagaacagtgaaaaattccagaaaatgaaaaaaaaaaaataatagatgaaatatggttgagattggcggtgccaattaccatctagagatctatgaaagttttgcccatactacaatccaatacaaaaataaaagatccaagcaattcaatttagaaattaaagaaagtaatcttactcatgaatgaaaaaaatgtaactgtttacaaacatattaagactattagccaatttgaaaatctattacatattaaataggccaagagacctatctttaaataggccaatggacctctaaacaagctaagttaggcatatgagctaataggctaaagcatgtaaataggtcactagtgcatgaaacacttttgaaaaacatgtggacctgtttacagtggcaataatccaaaaagcttaaaattaaaatcaaaggggagtgaattgtaaggcttaaatcatggatttcaccattcagttatagacagcacaaagtgaattacgcccggaaattgaatgaatcttgtaaaggctggtttgttgtaccatgaaataaaataacccttgttgtcccaaactaaaaaaatttctcatggagattttggttttttaaccaaaggaaagtggtttttttttaac

SEQ ID NO: 2026 - DNA, 657 bp, Glycine max
aaaacacaaagcctgaacttagccctatcaaggcagtgcctatgtgtaatgctgctccactgccagatatggccagcaaaatgaatgcaattggtgttggcaccaaggctgctgcaaaccatccagttcttgcaatgtgtatcctcctgcattgtcatacaacattagttgattaatatttttgttaatagaaaaaaatactaactgcatgtttggtttcacagcatgtgctcttacgtggtcgttaaccacacatgttggcgaccatatcaccacacccactgtcaaccgccacaaccaccgaccatatcaccataccgcgaccaccaactaccttatccatcattaacgttggcgaccataaaccgcaaccataaatgtttctctccaaccaaaatagagagaacatgaaaaaaaacaacatagaagaagaaaaacaccatgagagagaaacaagtagagagagtgtatgagaaagggaaggtgatggtgaataaagagaaggagagagaaatacacgaattgcttgttgttaggtatggatccagcgattatcggagttagatactccaacgcgaaatcaaatcttttcgtcatttgaacactaaattgggggaacgacttctctacttcatccttgcccaaattaagaaggaa

SEQ ID NO: 2027 - DNA, 841 bp, Glycine max
gaccgcttgcatgcctgcaggttttttcttgtcggcagcctatctctcaataatctcgacccaaacaccagaaacctagctggaacctttatcctccaaagcttctcaaaacattcctcctgactgctatctcttgcgtcttctccaatcaagtcataggcactgcgagttgaatagtgtccctctgaatctgcagaccactcccaattgtctgaaatctgttgctggattttaatttctgcaatatctttgagaaagttagctgctgaggtgatctcattgtcaaacaaggctcttctccaagcaaagttccactcccaccccatgtcttgatacattcccatggatctgatgagttgatgctgctgcaatgagattgaatacagcctagggtacttctctgctaatgagtcctcctccccaatccatttatcctcccaaaatttgatgtggttaccactccccaccttccacttgaatcctttttgaataagctgtccactatttgtactaaaaagaaccttttgtaaatccctccaccaaattgattgatgacccaccctatccacttcagccaagcctctccaacccccatattttgaatccaacacctttgcccacaactctcctttatggtgcattaaattccactcccattttccaagtaatgccgtattgaaacttgtgatgtcctttaaacccaaaccacccttctcttttggcaagcacactgatttccagctgacccatgcaattttattttgatcgggtcctcccccccaaaggaatcgacgctgtaaacgcaccaacttatcttccactgatttaggcaccctgaaaa

SEQ ID NO: 2028 - DNA, 811 bp, Glycine max
tcctgatgatagatattcaatcgagtttcatttataacttacacaaagtttattggccggggcaccttttagaatgctcttgatgtttttctttttcttttctgtggtgaaactatgaattgtgctactgtagtttttttctagtatgactaaatctcaacgaggacgtgtcttttcaggtgttactcttctcgctattatgttcacacaagttattttggatagactgctgatattttgagaagtggcaaacctgattatccttgaacattattttcttggtgcaaatacctgttttgaaagacgttatagacaatttttcttgcttggttggaggggaaggggtttagtgacattttgtatagcttttcccttgaaacttgtttaaacttcaaaccagtcatttgatgcgttttttctgttccaacagtttgaggattgtaccttcgaatggctttattggcctcaagctcgccagccatactctccagagatcattgactatataaagtcactggatgctgatgaagatattgcccttttgaagtttcatggatggaatctgccagttgaatgcgcgcgcactcttcaaatctcaaccatgcttctgaagaaaggagtgaagagagggatgaccccctttgccattggaagccttatgtgcagggaatccttgaacaaggagttgtgattgagggaatttaaaggagctctgatctgtcttctgccactgaacccattttggactgttccaaaatgacacccctttagaaaccggttcttttatttgtaaaaaagtttaatgtttaaa

SEQ ID NO: 2029 - DNA, 688 bp, Glycine max
ataggaagaaacctctttgcaagacacaaaatgctgtccactggggctgcggaatacacaatagccctaattaaggaacaaaaacagcaagaaaagaaaaagcacagagtgatagaggaagaagaaacctaatgtatctgcggcaatagatccatgcacggccatcctttctcttcaaaccgagaagaatcttccagctaagaggcaagacgtcgccgccgaaatccgcggcgtcgacgatcctccgcttcttcctccggctcccccactgtccgggcaagtctctcagaaaccctagcagctcctcttcgttgtgcaaaccctcggtgcgtctcttgagttcctcagcgaaggggtcttgggagttggcgagttggtggagatccacagcgacgccgtttggattgacaattatgtcgataccgcggtagcaggggtccaagtggagtttgactttgggctttctgccacgcttcctcttgagttgggggagagaaggagaaggagaaggggaagggggagtgagttggacttggtcgaacttggggtcgtctctgatgagttgtttgaggtagtcgatgatgaggcggttttcggggaggggagggaggttgttggggaggaggccggcgaggcggcggcggcggccggtgggggaggactgctgggggcgggagtaggtttggcg

SEQ ID NO: 2030 - DNA, 782 bp, Glycine max
tgaggttgaccagaaattgtgcttatgttggaccctaaggattaagttctggaccttcaaaactgtagaccttttagagtctaaaactagtaatgtactagccacgttagtattttattccatctaatctgtctacattaaactctggattaattacaattatggttcacctgtgtttggtagtgaaataatatcatattattgattgtttggttcgtttacccttcagttcttcacctctaaagcccttgtgatatgttttgaatttctatagaaatgtagcaaaaaagcagtgaatttcctttgacctcccaagttctttctacatttcttgggtttatgtttgaagtcttacattacatttaccaaaatgatgttagacattatattggtggttgttaaaaacatctaacaagttcgattcttatcaatatcattattacatcagagttggtttattgactggatttatttgttacttgttaagaaaatccatgtgccattttagcattctatcatcttggcaacttaaaacttatcaaactttgggctgttcaaaccaggaagtttggtaagtacagctatacaagtcatgggattagttaaatttaatgaatgctaaatgatgaagttttggacttgtttggagttaagttatttatgttatcactcttctgcatctatatttctaaatgggtgatcaagaaacagattttctttcttctttaaacctgattgaatgtttctggtataaacacgggtttttttcataaatggttaaa

SEQ ID NO: 2031 - DNA, 655 bp, Glycine max
aaccatttgtttggccagtaattggtccttgaagtgctgaaacgtctccattgttgacactggtgatatcgtgtatgctggatcgccttctgtctttattcatggagttcaagcgaataaagtatttttgggcgtggcttgctacttgtgtaggtgttcttgtcaccacaaagtttcttgatatacttcgccagtcaccttttccatacttttccaagccaaggaggaataacctgttaaagcaatttgaattttttttaaaaacaagtaattagataaaagaaagtttagcatatggaagctagtcaagataacataagaaaaagtaccaatcaaatgaacatcagtagccataaaattgtataaccctcatgcaactacagatcctcaatttttaacttccaacagaagaaaacctctagaatgattgaagtctttaatgtatcttgtagacaaaaattcatgatagcattattccctaatcccctattaatttgctttgacaggtatggtaccttaagctgcattttattctttagtagctatatggttaatatgacactgacagtcattatttttaatctctatgactaatattactggcaataatattagcatcgctattggctaaacatcacacttaaagccataaaga

SEQ ID NO: 2032 - DNA, 686 bp, Glycine max
tatgtgtgctgatttgcatggttctgttataagacttatagaaccataatggaagatcttggcctgccagaaagaaataatagaacaatattactagaatttatgaattgagtcaaagtggaaaatatcaaaaggaaatagacttagcaatcattttgatgttttacctgatattaaggaaacctgaaagtgagttcttaaactacagaaacaataatgctatataagtaatcaaaaacatggtttagattagatccttacacagtgagttctaatgtttaaaaaattcacaaagtactggttcaatgaagtaactttgagtaacggaacaaagattacttgagaaaagtgcaacataaagaatgtggctcaatagtggtctgatttcccttcgattaactcatggattatggcatacattttgctttagtttgactaccacaaattctgcttttgtttttacctttctgattaggtccaaatcaagttcatcttcttggagcagcatatcagcactgggattacgataaaacatgaactctcgctctccatcactcctcaatgtaacaaatgctaaagcagttcgtgcaccagggtcaaaacgcatcccttcattgtttacattattttccttgagtatattggcaagcatatatccaaattcatcctcaccaacctgttcatgt

SEQ ID NO: 2033 - DNA, 644 bp, Glycine max
ctgctaatgttgcagtaggcatatccagattaggaggttcatcagcttttattggaaaggtgttgtataaatacttaataaggttttttctatacttttgataggtgtaggaaacatcatattttaatgtgcaacttaggcatacagccaacgtttactttgcttgtaaacttgaaattgtcccatcatctcatattcttgtgctatcaaacttttttcccataccaaggggtttactttgttaatcccatcatgcttgttttcataatcagttttaatgaaaaagaagataaggttgatcaagagttaactcccattttggtccttgaaatgtttgtaggatgttaaattagtccttaaaagatttgtgtcattagtataatccctccataatggaatttatcaccatgatagttcctatgttagcctctgtaaaaaagatttactaatggattccaaagtgacctgttaagtgctaatatggctttttaatgccatctaagcatttatgtggcaacatcacctaagcattcaattggtggcaaaaaaatgattatctgataagacatcgatttttcagaattaaagtctgacatgtgaatctttgagtgacacaaacaggggttaactttttttttttccca

SEQ ID NO: 2034 - DNA, 834 bp, Glycine max
cttttgatgttactctctaatcagaattgaagttatgcaaatctctattaagcagattattgattaaaagaacctgtaatttgatttaagaataataatatcaaaaacacctcataaactgcatctaaattttgtttttttccgaatcaaaagggcaataactgaatttcaatagatagctctgtcacttaaaagttataatatctcatcgtgtatttataaattttgtttgtcctatgaaataaacatggcaagcaaagtataatatcaaaggttgtgatttgtgtgagttaaggtacctatagctccaaccacaatttgccatgtgacttgcactggagctgggtcaagtactgtggttacatcatccacattcacaggcacagcacccacccttcttcttcttgcattcttaacacaaacattattcaaaccttgtctttttttgagtcacgtgacagttctgtgcgacgctgctgctgcttccatggtacggtaactaactgcccaagcccgttcatttcacacttcacaacaacaacccaaccgttataataatgccacgtgggcttttttagcccatgggctcgcgccacatacgcgttacttcgtgtgactcatgtttcagatgtggttttaagtaaaaaacgacaccgtttcagatagaaaagaagataaacctctggaagtgcagatattctgattattaaggttggagtatattcttttttctgtttctctctctccacaatggctgctattctgcctctctatccttataatccattgctatacttgtcgactctttcgagttttcgttctcaattttggatt

SEQ ID NO: 2035 - DNA, 793 bp, Glycine max
  misc_feature (722)..(722): n is a, c, g, or t
tgctctagcagggtcctgcacggctgaaaagtcagcggtggtggcagtagggtccacacatcattccacaaacacacaagttcatcatcagattactattactgccagtaacatgtgcaccaccaccacccccaccatcgaaagcaaatgtataactcgaagaaatagttttaaacgatcttcttcatggctccttgatcctaaaagagtccttcttttctttgccaccttgtaagattcagctccgatacttggtttctgttctgtcttttcatccaatgttatgtgtcttaatttccctacactgaaacaggtcaagcatgggaacaatgttgctgatatacttcactcttactctcagcaagcaaaatgcagatgaatatgggggtgactggcagcagtgactgatgccactgatttatattggacaaatgagataatgggtcgtgtaaattataaatcctaggattggagcaaaactcaggaacaagaagttgaggacaaatttgcagaactacctgtcagactcaattacctatttgggagctacaaaaggcaaatacaatgacacaatgcactatgatagagaggaaggaatatatttcttttatctgaatggaagccagcaagttagcaacagataaaaaagatcacatgtaagagagtgctctgtagtttattgggagtgtcatttaaaggcattaccgaggtgggaggatcanaaagtcactgtttcgctctttctactcagatcttatttttatcccccgtatcttttgttttgctcttgcat

SEQ ID NO: 2036 - DNA, 860 bp, Glycine max
ataaaacacaaaaagtattaaaatagaatttttttgttgttgaagaaaacatgagtaaatgatggatagagagaaagagtaattagagaaaagcagagaagatggaggaaaactgaaaggaactgttggaaaggttccacatccacacatcaactgagaagttagtttttctttattttttttagtccatgagctgtggactaatcaccattcaaaatttaaaattttggcatattggaattgtggtgggcatgggatctcacagacaatccaagtcctttgtctgttaattaggcaaaaagatcccgacaaagtggtatttgtagatcataaccagatatctcaagaccaaaatgaaccggtgaatattcaaaatatacagtaaacaagataggaggatcacagcagttcctttctgtctctatacaccaactgtcttgttaagtagccaaaggcaaagagccaattgaatgccaaaaatggagtgaagccaagttctgtcaagcatgaatccgaacactgtgattcctgctctattgttctccaagtatgtcactgcatcaaaagctagataactaaggacaaaacacaattggactaatactttgacaagaaaaataccactaaaaaaaatccccatttacctagagcctgcctcttatggaatgagatagtttgggtgtaaattggcagcaacaatttggtgttatctaaatcatcctcctcatctgctacctcatcatcattgcgagatccccaactaatattggtagcaatagcttgagctgaaattgcatgtgcagttgttggtgtctctccctccatgttggcaaacgatttatggtagcacatatgtgcca

SEQ ID NO: 2037 - DNA, 1001 bp, Glycine max
aatctaacaaagtatttttggcgccgttgccggggaactagattttagaagagtttagttcagttttacaacattgctttatatttttctctttaattcattgattatttttgttaatattttagttaccgtatattcattgttcttttgaactggataattgttgttctgttttcttgtatgcaaagaagatctactacaggtgatttgattcccattgatttggagattaacgccacttgtagaaggcgtaattcaaagagaatcagaaaattttttgcaggatttagaagcagcaacaactccaaaagaagaaccttgatcttccgaggcatcttctagttttcctattgcagggcattctcatatagaatttgttgaagatacaatcatggttgaagagccaagaagagtaaccctggaggattattcaagttctactgtgccacaatttttcactagtattgcacagccagaagttcaagctcagaccattacatatcctccttctttgatacagctgattcaaaataatttgtttcatggtttacccaatgaagacccttatgctcacttagctacctatatagagatatgcaatattattaggttggcaggtgtgcctgcggatgcaatcaggttgagtttgttctcattttcattatctggagaagctaagagatggcttcattcttttaaaggaaacagtatgaagtcatgggatgaaatgatagaaaagttcttaaaaaagtacttccctaaatctaagactatagaaggcaaagctaccatctcttccttccaccagtttccagatgaatcgttgagtgaggcacttgagagatttagaggtttattgcggaagactcccactcatgatttttcagaaccaatagagctcaacatattcatagatggggttgagaccacaatctaagcagctcttggatgcttcagctggggggtaaagatcaaaatgaagacccctgacgaagcaatgg

SEQ ID NO: 2038 - DNA, 657 bp, Glycine max
atcttgaaccttccaagaactcagagctttcatgcgtttgtgttcactttgttttgtttttcttgataatgaatttgtgtagaaagcgttagtgaatcaatgtttcgaaacttacattgtgttaacattgtaagtgatagacactcttgatgataggctatgtaattttgagaatgaagaatcaaaccgattgctggaaaagaaagttttttacattttttaaattgttttgttggttgtgtatttgatcttggtatgaatttgtactcgttcttattctggttttgattttgaatctaggttagatttaaacttgggcttcccctgattaaactagaaaagacaaaaataatttatttgaaagtttttagccgctgtttttttttaaaaatcattttaacaaaataattcatgacaattttaaactgtcagaaaattaactgtcactaaacataataaaattaaagtcatcatttaacggtgttttttttacaatagggacaaaaagtattaacaaaataaaagttcaaggaccaaaattagtaaaaaaattattgaagactaaaagtgaaaattccaaaaaattaagggactgtacctcactgaaagcaagaggctgtcatgcacaagtgaggagaatgaaaggtcgaggggttt

SEQ ID NO: 2039 - DNA, 701 bp, Glycine max
acaagagcattcatggtttgtgctgaacctggtaaacattcaattcatgaggaagtctaacatccatgggtggatatgtcggccagtacctgcactcatccaataattgcaattagattcactggaaagaaaaaatagtacataaaaattatcaataatgagaaagggaaaacacggtttacccagttgtcaagacatgaacactcatttcaatccctgatgggagttttgtcctagcctgggatgactgcttgaaggactcgtttatttcttttgataattcaatgtcctgaattaggaaaaaaaaaataacgtagttataaaaagcaacagataaataaaagctataataattcataaagcttgtcagatcatcattacggcatagttgtacaaaactactacctccggtcttatatataagaaacaaatatttaattcatcaagagcattaaaagtagttaaattagatcattttaattaataatgccataaattttaattttattctaaataaaagtacccatagaattaaatggtttaggtgggagttatatttaatggcattactagtaattaaaaaaaactaacatttgccaattaaaaaagaaaaactagtaattcaagatttttttaactaatgggtgtgactatgtgacttacctaatgaatgctttcactttcatgggaaatgaatgaaa

SEQ ID NO: 2040 - DNA, 723 bp, Glycine max
cttgcatgcctgcagagaatcttttcttttgcttttctttatgaagatagggcttccctttaggactcttccataacaaaagagaagaaaaaatggatgaaaaatttctaccttcatttattaatgaactgtttttgtttgtgaaatagtgcagagcaaggttttaaatatcggtcatcatcacgttgcagtttcgttgcgattgttgatatcgcggcaaattaggacaaatgtggccgaggtcccagttgtgatcatggacaattaaaaaaaaatcttgatgttgcaaccgcagaccgttcttggtgcagagtgtgagttttggcactttcattttgctttctcgacccgtgccacctgtttgtcttggtgtgtgaagagaaaaaggtgacacctggaaaaaaacggtttctctgtgggtcagcaagttttggagatttgctattgatgagtttctgaatgtatggcagaagaaattttgatttcattcaattgggtccactgtgcaagttctcaaggtgcctaaagactcatgcttttttttcttctttttttttcttttggatactttggtgtgagtcagttcgacttatttgttcttcatattttgaattagccttgaaaaaatgtaatgtattgacaagaatgtcagattttcttacctacattggactcttatgtcgttatggagagtcgctgtgtctgtttagctgtattatatgt

SEQ ID NO: 2041 - DNA, 815 bp, Glycine max
gaattcatttcccgccaacgcacgcccttttctctttttgattttctaaaatcccaatctccgctcagtactcagttactcactcgcttctcttccccctttcacctccgagtcgactcgtccgcgccaatggccccgcacgccgagtccgcacccgactcagccactcgccgccgctcctccgctcggccaaggctcttcataaaggagatggtcatgcgcaacttcaaatcctacgccggcgaacagcgcgtcggtcccttccacaaggttacttagggtttctctctctctctctctctctctcttctcaaccttcaatttctctctccaattgcagtgcgaacttcgatttggttcaatttcactttctagctttttaattgcttcggtttcactttcactttagaacttcgattttacttacggacttttgaattgctttggtttaacttgcgaccttttgaattgcttcgatttggcttgcgaacttttgaactgcgtggatttatttcacttgcgaacttctaattgcttcgatttcagagtttctccgccgtggtgggacctaacgggagcgggaagagcaacgtcatagatgcgatgctgtttgtgttcgggaagcgagccaagcaggtgcgattgtagaatgttctagaaactaatgagtgttttggaattggagtgttctttttattttttttaaatgttgttttttttgaaatttggaaactgatgtggttgttgcaaatgcggctgaacaaagtttcggagctaatacacaattccaccaatcaccagaatttggatagtgc

SEQ ID NO: 2042 - DNA, 671 bp, Glycine max
aaggattgatgtataaagctattgctgttgccaacaatgctgctgagaatgacactgcaaagctcacatagaaaacatacatgtccaccaaactaccatcgtctacatgagtgtgtgaatcatttggtataatactaggtggaggattgcaactttttgacagtggaggtccacaaaggaaggggttaccttcatagctgctattttcaaaggtcgagaattgtcctttccattcaggtgttgtgcccgataagttgttgtgtgccacactgaatacttcaagggaggttagcttactcagttgaggaggaatttgaccactcaacttgttaaatgaaaggtctaaactctctgtttgtaccaaattggagaatgtagctggaatttgcccaatcaaatcattatgagacaagttcaatgctcgaattcttgtcaaatttccaagatcaaatgggatattcccattcagtttattgtgggacaagtcaattccagacatataagcaaggatgctccttgtgtaagtgtcggttctcttctttgaagtgaaatttactttctcttccacatttggtaattgtgatgggaaaattttattttggcctgtagaaccccaaccggacaatctttccaaaaaccgttcaggatccttattctcaaaagacattttt

SEQ ID NO: 2043 - DNA, 652 bp, Glycine max
taattatattatttgattttttttattcatgacatttattttatataattttttcttagtttggtcaaatattatcatccttttcattatctcactaataaggtggattttttttgtttgacaaaatttcttttttcagattggtcaaagctaaagaagatagaggagttagatttatccggcaacgaatttaagggaccacttccctcgtcttttgttaacatgacatctcttcgggagttggaaatttctcataatcacttcattggaaatttcgattctaacattgcaagccttacatcacttgaatattttggttttacagaaaaccaatttgaagttcctgtttctttctcaacatttgccaatcattcaaagatcaagttgatcgacggtggaggaaacagattcatattggactcacaacatagtttaccaacttggattccaaaatttcagttacaagagcttagtgtgtcttcaacaactgaaactaagtctcttccactccccaattttcttctataccaaaacagtttaatcagcctagacttcagtagttggaagttggaaggagactttccttattggttgttggaaaacaacacaaaaatgactgaagctctgtttagaaattgctctttcactggtg

SEQ ID NO: 2044 - DNA, 631 bp, Glycine max
atggccagaatcgtagaagttcagctcattctctgttgaagaggcattgatctggaaaaaaaaaatgccaacaaaaacgtggaaaaggaaacattagtttttctaaatagattttcaaaggggcttcaaggctttgatgtattactcttctattgctataggaggatttatgtcatttatatttggattatttgggtttcataggcaatctataaccatcgaatgcaaaaattaacatggatagtatgtttgtataacaatatatgtaaggactatatcatatataatttaagttggaagaattatagcttttgctcgtattaaaaaaaatgttcacatccttctacactcttacaaagaaacaaaagctataagattatgatgtctaaaataaaaaagcttagggggcgtttgttcgatggaatgatgttttattcccaagagttacattctcaggaatattataagcagaaatgttattcgcaggaactgcatgagcatactgtaagccttgtcagagagcagttctaaactaactcaatttgttagggtacagctgtcagtaagacagctctctataaatacatctgtaaggagtagggataaggaagagagagtatgtcataccgag

SEQ ID NO: 2045 - DNA, 807 bp, Glycine max
aagatgctattggactgttcctgaaaaagattcagtaaataatttttcactaattggatcaacaagaccggtgggtgagatcaatgctttggttgacgaactcttagtggtaattgaacttctaatagtggcaggatctccttcattggtctcggatgatgtccgatgtttacttggattcgtgattgactgtcgacaaccaggtcaggtatgtagtgagatgggatgcttttattctctcttttttgtgggatagtgaaaataaagtaaaatcttaggaaagatgctaatgatgcacacaaatacaacattttagaatatattattatgtcatataatagagaaatactggatttctaagtaacatccttctaattttaaaacccaaattgatatcataaaagtcaatggttttgttcttttaggctagtcctgttgtcgttatccaaattccagaggttaatcactttgcttgtgtatttcttgtttatgacgggtttctcttgtaattttttattttctactttagttttgtgtttgaagattttttagtaagttttttattttttaattctctgttttcatattgttttctatttctaaagtttatacagtaaaaacaactgataaattattttaaacgtttattataaagatagtcttgcaattttaagagaagaaaatgatctttcttattagtgattgatcagaattacgtgagagttatataggaagaaatggtaaggagagatcctaaccacctgtgcctgaacacaaatttaatgatctttcttattattctgctgg

SEQ ID NO: 2046 - DNA, 936 bp, Glycine max
tgcgtttcccacctgggtaaaaaaggtaaattagaaagtctataaagggactagaaaattatgaatcatgattaaagaatcttaaaatgctccaaaattaaaattggtacctatccgcattggaggtactccttcaccccctaaaatcccctgatccagtcccttgattacctggaatcgattgatacactctgataagttacaacatagcaaaacgatgttagaaaatactttaggataaaaagaattgtataccttgcccacaccaatgcgcatggtgagaggtctagcacgtttatagctgctatcgaatactatcccatcagcgaatctcgcagtatagtgaacctgtagtgtataaatatatatagcattcattcataacaaacgaactaagaaacatgtttgcatgctgaaagtgagtgagtaactaacattgataagctcacccagtggagcttcgtcaccgaagccctcagcaatatcgcagtagccgaggccagacttaacatagttgtactcacacaaaggctctgccactgttgcgtagtattcgattctcgtggcgtccgcatccaatgcagttaaacccatcacacaagacgttacaaccccaataccgattccaaccaacggattcttattatcattgggagctgcacatggaaacctagtacgctctttgcaactcttgccatttgttttccaaaacatgaaaggacccgtcgcctgagggtgaagagactgagatgcctttttccttcattcacgttattggatctctataatcactcttctatgctcgccagaaatcaacccacctgggccacctcgacacaataacccttttttattcttatacaaaatatcttttttgcccaactattgggccgccccccaaattttttttttttaaaaccaccgccccggcccccc

SEQ ID NO: 2047 - DNA, 725 bp, Glycine max
atcttgaacctgtcactgattctgtgccttcgttctctcgccgccacgctttgttggtcagtggagagcctcactcctttgcattttctggcaccaccctttttctctttgtttaaacttttgtttgattttgaagaagagaattgagataaggtagggttagtggaaggagtgtggtgatccattggagaagatgatggaagtggtgatgctgagatgaggggagaaggtagtggaatggaatgagttggtttttggacttggtggggattaggttcactttcaaggaggatttatatcgatagaagagtatgaccgtggtacaatgatttcgattttgatctttgaatgaatgaaaaaggagagatgtggacgtgtgagtctgccagtttttggcgtaggaggtggatgcatgacgcatggatagtaaatgaagtatttcttgtttgaggtcagtataattttgatccaaattttaaagtaccccttggtttaattaagtctaggtgcatttgataaagaagttttaaaaattgatgtgtattgtatatttttatattttgctttaatttaaatatattttatctttttacattttaatttattttcgcatttcttttgttcattcaaatcaaacgaatcttaattattgtttgttcaaaggtcttaaattatcaatagttgcatcctcaatttactttactgtgattcacgggatatgaaaa

SEQ ID NO: 2048 - DNA, 742 bp, Glycine max
gttttggtgctttctccactataattaaagtctctttcacagctagaaatagaatccaaagacatggaaaagagaatcgatttgctctttcctgagctatttcctactaaccatttgacaacttaattaatttctctattagtatgtacctgttagttagtctgctatgctatgcatgtgctgattggagctcgcattttgttactggtggtcaataacttttccatgtttgattgagattatttatatggaaataattacttttttagttaacaaattatataaaaaaaaagctataaaaaatcttcaaattaaattaattaatataaaactcgtattcattgacagagggagccaaaaagtaagagaccatggagttcttcctttagcccatatatatacgagtgacactacaatgtctctatgactctttgtttctggtttgaacaagagacgtgagcattttggaaacaactaaagcatccaaatgagtcttgataattgcacatccaaatattttaaacatttcattgacacggttgatatgtgtgtttttttcttattaatatcagatatttattacatttatctttttcattattttgttaacttttgagtgtataaatgtatattagcatacaaagtgtttatttaatattttgagcaaattagattcatttttcttgaacttaagacttattaccctcacacttattcatggttggttccaagaggtgggggg

SEQ ID NO: 2049 - DNA, 690 bp, Glycine max
cttgggatttgttccatctttcgtaaatttgttttcatcattggaggccttaggcttccggctttcgcggccaaatacaaaccttccttcacattgatcccctgaaaccagctcctgaacagcaagcatcaagtatttcccttccttgtgaatgtcaatgctaggatcttccagctgcattattacaaacccaatatcattttatttatcttcaaccaacattacacaaacactatgtttaattcaactaataatagtcaatagcttctagaaaaagttaaagctcacatcatgcagcaacctatcatattggttagtaaacaaggaatattattacaaggaaaataatatctgctaaccttcttctggataagcttattgagctcttccttaagcttcacatagctgtcagctaaattatgatccatgaagaagtcaacatacccatctaacattttcagatgcccagcctaaacccatgagaagggagaagaaagaaaaagggcatgttactgtattgaaatccatggagatattctaccagaagaagcatgtgtatcaactaattaatcacctgtatcccattacttagagcaccaccaaaaaggataagtattgaatcagatacaccagtggaatcacggatgaaaacagcattgaccttaactttctcaccaaaaaccaaccaag

SEQ ID NO: 2050 - DNA, 655 bp, Glycine max
tgctgctggtgacggcggttgagaaggagccggtggtggaagagcagaagactcggcaacggtaaaaaaatggccctgcgagtgggtggagcaagtgttacctcctgttacaatgctgaaattggatgaaccctgcaaatcaaaccaacacgttttgcaacagcacccagagcaggaagtttgacatggtggaacttgaccttgatagggactggagccagagcaggaattaacatggagcattggtaaattagtagctgacaaattggaggcattgtaagccatgagtcccaggactggagccaagtatgtgtaattgtgcaaagggtagtagctgatgggccaattccctaaatattggttcaccaaaaccagcctctttacatatggtttggtaatgacccctatgggaatctcaaacttgttgtaaatgggaaacccccttctcctcatggtgccactccttaatctcaattcggcaatcttaaccccagtcaaattggaaggaagctgagttgttgcatttctttctgttacatcacattaacaatcatatcaaaaaaaattctttctttctccaatctctgtgttatgatgcagagagcacaggggtatccaagaatatttttcttttatttaattttctcaataactc

SEQ ID NO: 2051 - DNA, 641 bp, Glycine max
attcggagcgcgcacgctctggcggatccggagctgcgccgcaccgccgatagcgacgactccgaagtgctcctagaagccgtcgcaatgtccggactcgtcggctttctccgccagctcggcgacctcgctcagtcagttcgcattctctctctctctaacttctctctctaaaaccgcttccgtcgtcgttgcggtggttacgcaattcgagctgcgctcgtggtttgcttgatcgcgattagtttaacagtgtgttgctgggtttgatgaaataaaaaaatttctcgtttaatgcagtgtttaaagtttaattcttgttcagtttaaagttcatggagtttgttaatggagcgtgagttgattcagctagtgttttttttttttttttttttttgcatttccttttctcttttgtctgtgtttggagctttttagttcgttcggtggatggagttggtggctgataagagcttcttcttcttctcttctttttttaacttttttgtaatgttttgtgatcgttgtttatttttgtttccgttttgattataattattgccttttatttgggttttttccttgatttttcattagcttttggttctttttctttgtatgtagctactttttgggaggag

SEQ ID NO: 2052 - DNA, 657 bp, Glycine max
aagatttaccatgcatacaaagcactcacaagagttgtagtcaccaagtcaagagaaaaacaaacataaacaaaaacaagtattcttaagtaataaaagaataaagaatagacacctaaaaactagctaacttcccaaataaaaagaagttccccgagtatcgaacactcggggaacttgtgttatttggtaagctatttcagcaaataggtgtctagtgtgtgtaaatgtaagtgtgagtatgaataggtgtatagagtatctatgcaaaaagaaagaaaatcacgggagacaaatgatgtgtaaaaacaactagagaacacgttggtcttcctaataggtgcttgatgctaaagagatattctctatctaacaatgcccatgtgttcttatggaatctcctgagatactaaaccccgattcctcatgatagtttagcctaatcctgatcaagcatcgtccgcagatttcttgtaagactaaactcaaccaggaccatattaagacacacatactcaactaaattatcgcaccccaattcctcgtgaaagcacgacaacccagccctgctctatcaaggactttagagttagaccagtttccactgttgaatggctctgacacagcatgcatctacgtgatcaaggtaaaggcata

SEQ ID NO: 2053 - DNA, 680 bp, Glycine max
agaattgcattaaaaaaaaaaatagcgtgttaagttatgataattagttaaaaattgaatttttattttattatttataattttttatgcatatatgcttgtatcacaatattaacctttttttctaagttataatttgataccaatattctaaactgcatttatcaagtgatatcggacttgatttctttaaataagatctcaaattcaaaccttatggaaaaaatataattgggaaaaaaaaatcttgatcaaaactacactaaaggttgcactagtgaaagtattcacagctcagctacgatccagccaatcattataaaatatttgcttaatattatattagataataaaccaacataaaattataagaaaattaagttaaataaattttaaattaatataaaatcatattacttattctacaagataaaaagctcacaataaataattaaacaataatagtacatacctaagtctcatacaaagttctatttattttataaatgctttttgccattaattattaccctattatagttaatttttaattaatttttacttcatcaatattatggaagacctaaccaattgtcgactcattgacaaattgagcaattcggaaatttttttctttctttatacatgaaaaatgtccaatcttactcccatggagaaac

SEQ ID NO: 2054 - DNA, 806 bp, Glycine max
aaggattggcgaggatgttccctcttatcataaatcaggtgtaatctcttggctttgcagcaatctgccaactcaagaaggtcaaacagtaaaaactcactgtctccatactgggccaaaagttcatttactttattgtagtccatgcatggcagatctttggtcaaatcatcaccgactaaagagaggcatcgaactgactgaactcccagcttgtctgccaaatcattgcttataattggatgcacaaaatgtctcccaataagagaactgttttccaaccaaggcgcatcattatatacaagatcacctgcttgcatcagaactccaaaatcattaggaatcaacaagggattatcaaaaggctcaaagagtggcttctccaggcaacattctgctatggcttcaaggacacgatggacaaaatttaactgatcagtagacagaggaatcccatgcacatcattctgcaacctttgtaatacatgaagatagtctgaaataccaaaactcaatctaacacctaactttatcaacaaatctttatactctgacagttcagatggaacaacatacaaataaggcgtaaattttacaggtgaatcaaatgcaagtgcatttggtgatacaaaatcatcaccaatccaaacccatgaaacaccatccaaccctgttttcagtttattgaaatcatcagtattaatgtattcttgcaattttgaataaaggcaaggtatttccttttgcaactgagcatcaaaaccaggatccagcagtgaatgtatcttatgctgttgataggacta

SEQ ID NO: 2055 - DNA, 667 bp, Glycine max
attctttcctgtctgtatatttgcattggtgcagttccctctatatgttgccatgaaaggatgtgtgcggagcatgcttaggaaccttaagaagatcattcctcgtttcctcctcaacttgctcaaaaagagcaggagaaagaaattgtgggacatttgaattggaaattctattttgtgcccccctccccttccttttttttttcatattttatcttcaattgtagtttcttttgtttttgtgcatttggctattggctatgccactttacttttttaaggtcgtcaacatgcagtgattgtatagccgtatgggttatttgtggtaaaataaccattggacatggatgtccatgaataagagcatattacgtctttatcgtgacttttggtaacatgaaacagcaataggtattttaaacataacatttacggtcatctggtgttgttaaatgaacgctagtaaagtctggcatccactctagcagctctctctatcccttctacgacaaaaaatctgaaccatacactgcatcaccttgagacaataattaatatcatcaaatgcatgattttttttatttgttttacaatgacagcagtgaaaaacaatcctacattctcagatgccctatgaatagtaatattataaaaattaattaattat

SEQ ID NO: 2056 - DNA, 676 bp, Glycine max
aaaggtatgtttcttatttgtggtcatctagtatactgaaacctttgtttttgcaacagtatgcaacttgatcttttctttttgttattcaatgtaaatatttcttagtctggtagttcaacttcaatatactctgtgtagtctctgcctataggatcatatgactcttttgtttttatcaactaccaatgaatatatatatatataatatatatatatgtttgaactggaatgactgtaaactatttctctgctgtttgtgaaaatttagtaactgaagatgctatcattgtcataattatctaagtattgatttgtagataaaattcttcaatagaaacgtgtgcagctaatgttccactcttaagtgagcacagttcagtaaaaggttttcttgagggtggaagaagggagaggaaaacataatctgagactaaccttgactgctaaattccatttggcattgatgtagctcaatttcttaattaattgattgctacagaaaatatgagagcaaataagcaaagaattctctcttctatttttcattttatctttcctcttcatacaatcttcaggtatttgtgatcacatggtggttaaaattgacttaaatatggaacccatggaaggctggttgaggggacttgattgttctcacttaacaagacacact

SEQ ID NO: 2057 - DNA, 684 bp, Glycine max
gaaaaactgactgccagcttctgcctgcaggcccattcacagaaaaccatcactatatcattcaggaatacaacatcatttaactattacaaaagagagccatgttatataaggcctaggaagaaagtagcaacgagtagaatccctacttataacttttctttttctttttcttcaatgattgatcaaatgttaaaaagtctccattatccttgccccttcatgacggcttcattttagttcaggtagcctacaatgactatttcttatgtgttggaaagtcaccttaattgtggtcactcctagcccaccttagttgtggcaggtagccgtgggcaaagaggaatgtgttgaagtcccacatcatggcaggtagccttgggcaaaataggggcatattaaagtcccacatggctagagatagtgccagaacaaagtatatatgtggggagcaatcaattcctcaccttacaaatcagtttcctagggttgagttagatccaaacccaaattgtaacatggtatcacaatctgtcttagattcattaaggcattaagtgggagaaatcatcaccttaaaaaccgattttgtaggattgagttaagccgaaacccaaattgtaacattaagcacacaattctttggataaaagaagacatctttctaaatcaatttaaatagtc

SEQ ID NO: 2058 - DNA, 668 bp, Glycine max
acttttgtacaagctcatcaatgtatatcatagtttttgaaatcggtaatgaaccaatgcaaaaaatggtttaaacccgtatttctttaggagatattaggtgaattggatgattaaggaaaaatggaaggaaaaaatatcacaagtttaattcctgctaataaaattaatattttaacaactaacatttgctcatataaaaaaccccaatattttttaaaatttaatctaaagcatttttaagttaactaaaaacatatttaataagaattaaaatagttgtaaattattttattaattattattaattactcttataaaacatataatttaatcattatatcaatttgcaattttttatatcttgatttcacataatcttatattaacttcttgttttcttttttattctagatgtaaacttgttatgaagtgattttactgggttttgaccagttttgattcttcgccaattccttgaacgattttgtagtttatttatatcaaacactaaatcaattcatcagttttctgggtcaaaccaacaaatttgatctggcatcttataacacaattgtttatggaaaacacatctaatgtgattaaacaaggacatcacgcaacttggcagttaccacttctttgcctttgctccaatatttttattt

SEQ ID NO: 2059 - DNA, 787 bp, Glycine max
  misc_feature (739)..(739): n is a, c, g, or t
tgcatgcctgcagaattgggtgaacttcattaggataaaagcctgtaggtgtaaagttcataataataccatgagctcaaaaaggtcacaatatctgtaagatatgttattaataaatcaaaacaaggccaagatggaagaaggacaaatcttcatgaagaatttgcatccccagatagaagatagaacacacaaatttacaaaggccatatctagaatcataccaaacttaataggaaaatggaagcaattcattgattcaaacagtagaatgcaatcaccttgaatcttatacatatgaactcaacatagccgttttatagagtaaatcacaatatgaatatgaaaaaaaccggtagcagtgaagtaaagaatggaacacaatgaatttcccatatgcagttttgcactgatggcagcttgtatgtattattaacaaatagtctttcactcttcagcagttcccatcaaattgggaactttacaagattttttttttcaagttttgaagaagattagcttacccttttatgattttcattcaattcataaaatacaaagaaaccagaatccataactcccccacccctaatcaaattactcagaaagaaaaaaaaactttaggggccacagtataccaatttatggttttcaaatgacgggtctgtcctcgaatacagcaaacaagaacaaaatgataaatcagtagcaccattcagaaaattaaaaaaaaatttanaaaattagaagaaagaatacttgtcccagttgatctcggtctggccca

SEQ ID NO: 2060 - DNA, 1186 bp, Glycine max
ttcacaagctaaacttttggttactcctttacactgatctccgattgtgttaattgatagtccaattctacaactgcttgatccaatgcagacctgttaagtaatactcgttagagtcagtatgatccaaatgataaaaaagtcaaattaactacaaaaacaaactcatgatatgtgaacttcttatttgaagaggaagcaggacaacaccttttgcacaatggatagagccttattacttctgcaccatccatgtttgaagttcccgcaagtcccataaggcgttcgaaaacttgcaaatttaatggaagagatcacctgattaggataaggacactccagtgccaatacaggccagacttttcttcctttatctgaattccacaagtctacaggtggagggtgagattcagatacatgtgaacacacgcttcctatctgctttgtagcgaaagagatttgcgtagggtcgcctccactctcctcaaacaatacaagtgtgttggtatctggttgtaaccatgattgtggtacatggtatctgaaggattagttactcaattagtatctaacaagattgctttcaattccttcaaacaattcaggattgttttctttctagtttcaacttctcttatgcagaatatctaacacttacaatgtctgtgatggttttccgcagttcttgagacatttggatgaactataggcccctctataattgcatgagtcggtacaaccaccattcggagaaacatatgtaggccagtaccttccaatgctctgtccattcacccaagcctcaccttttcccatccccgtgaagtcaattgcaactggattacttccagagggagcaacaaagtttgtctaatacaacatgtttttaccattagttttcagcaaaatcattttttcctataatagcattcccttaattttctttgtagtatgtgattgtgagtatatcagatgcatacacagttgagtaaacacgaaattggacactccataaaccaacaaagggaaccaaataagtgcaaagagacattgtccacttatgcagttataataatgagaatataattaagaactcaagaatttctatagatgcaatattttactaaagattaccttgtaccaaatcaaggattgatttgtaggtaaggtagattgtgaattccct

SEQ ID NO: 2061 - DNA, 705 bp, Glycine max
atgataagatgagggcaatctaagcataactagtctgcttctttattcaaggatatatctttcaatctttaaatattttaattcatgactcataagtagcttccttttcttaatattggctattttttaaaaaaagataatgttattggaggataacaaaattaaataaaatctctcaacttaaattgaaatgttagtttatcatattatgaaaaataacagcatcttgtagacttgacatccgttgggtatgtctaatctttatagctttcaactctgatgattgtcctacctaattaaggaaaatgacacattaaatattatcctcacactactagtattaattaggtggaaaaactaaagagaatcattgttattgattcatcgatccaactgcatgcagtggtaccacacggactgcaattctcagtatcagaagaatttagagcgaaaccctcctccataccaaaaaataaaaaataaaaattcagaaccaaaaattaagagcaaaacagcaactgtaccttagcttgccacactctaactagccaacctattatacgtggcaactaaatttaaaatttaaaataaaaataatgccttatattaattttctcatgtggaaaattaaaaatatttttaaaaattatgatatttaacatcaacatgtatcaaatatatatgtccaatatgtgtcgaatatgt

SEQ ID NO: 2062 - DNA, 683 bp, Glycine max
agtaaaaccaataggaaaacaagtttcaagtcaaataaagttgtactcagtagcagtgcgtttttagacatagtagcacaatattttatttacaagtaagaaaatatttttttatttatttatggacaaatgttaatttattagttttgtttgaaataatacaagaaagactaataacaaatctatatctatgatcctttaatttacaagtgagtgttgaaagttgaaattgcgatagctggcgggaagagatgaaggagtgatatgatccttatcaaggagaatgtgaagagaaatgaggacgagggagagacccttgcagtggcgcgtgaacccagacaacctcgtaccctgtcactcgtgaaattcaaacatcacattctcaattactattatcttctcaaaaacacagaaagaaagaaagagatagagagatagtggtggcgtgctcatggagaccagatccgggattcgaatctcaagaggacgacgagatcaactatatatatactactttacgtaataattgtaattctcatcataattactgtcactttttaattttgttggatagtgaagtggaaacaatagcatatatagtacaacgcaacacgtcaattcactttcatgccactcttctgcaatgcagccatcaaacaaacgtttatagttccacgtcaaaa

SEQ ID NO: 2063 - DNA, 687 bp, Glycine max
gcatgcctgcagatgagactggaacatgataatggtgtagaactccagttgctggaagaaaccctttttgaacattttcagcatagattcgagcttcaaaagcatgacctgccatcacaaaaagagttataatatactgaatctttaaggcctctacataatagatggatggaactttacacatgatagtaaaattttctatgtgctctttattttcagaaataacagttcagtttgcctcattatggggtatacttttgagaatgtcattaagatgacttccaccaattactaattagtcataaatattggtaggagtttttttcctccttgcagagtatataacagaatttaggcctatgtacttatacatgacttccaatcaccctagtttacaaaaaaaataattatatcttaaacctattggtaccagttatacagattactttactctttaagtgatgttttctgttttttggctcaggagctttagtcaaccacacactgacccaactgtcaacttcaattcataaaaaaatcattaagtttaatatggaactaagcagagaaaaccccaaactcaccctcacccacacacacaataaatgaaaaattaaggggtaggaagaaactaaagataggaaaagcagcatcaccctgtaaagggtacttgtgattgactcaatg

SEQ ID NO: 2064 - DNA, 683 bp, Glycine max
agcttctccgcacgccgcttcgacgccgagggagcttccagctccgccaacctctcgccgcggcccgtcgctgctcactttaacttcccgccggcacaggtaatgcttcccgtcattggcggcaaagacgtcgtcgtttgggatcacaagcgtgacctcgatctgtcgggtactctttcctctcccttctacgcaaatagcttcttcttttctttctttttttgtcctttaaccgactgataatgttgaatttgaagagcaattgcattttgcagaagtggaaatgatgaaggagaggtttgctaagctgcttctgggagaggacatgtctggaggcggaaaaggggtgtgtactgcacttgcaatctccaatgcaataactaatctctctggttagtgactctcttatgtgctaattaagtaattagtttgcacaacgttgtagatacatttgaccataaccacttgtaaaacaacaataataagatgttaaaatgatttgatattctatcgaagcctataattaacttataaacttcagattttttagaatttagatgaaagagattctataaatattaagtgtgtaagttgattttggtttactaaagaaacttgattttttttcctcctacaagtgcttagggagaagtttatgtaaatagagcttaaaaatgattttc

SEQ ID NO: 2065 - DNA, 731 bp, Glycine max
ttggctcctatttgagcaaaacaaaaatgtgatgctatgagtttccttatagtagccagcagccacaatgctccattaccgcacaatagcagcactatttgctgctattgataactatgagtgtctcaattagcaagctgagcttccatatgggcagactttatctacagagcaaggatatgaatcctattggaagccgtgtccaggacaaaagctatgcccaagtagggaatagaggaatatccagtattgtaataaagataatagcagtggtaataatatgaacattgttacagaaaaaaaaaaaaagagagaaaattgtaccagagaacatcaaccatgaaaacaaataacaatgctgaatatacacgaagatatgtccagggtgtagcagccggagatgcattcagccgttccaaacgatccctagccaaagcttgaaacatctatgcaatatgttaaccgtgtcagaacaagttactaaacactggttttgtttatatatatcaaatctctacagaattatttccatttgttggtttttactataacatataccttcaaagaacaaagcacagtcaaccaagttgaccaaaggcctgcttgataaattgttgggggcacaatcaatggtagaaacattccctgtcatccacattacctttactataaatacaattaaagatggcattatgactaaaaaccttcacggtcccaaatacatttaactt

SEQ ID NO: 2066 - DNA, 821 bp, Glycine max
  misc_feature (777)..(777): n is a, c, g, or t
  misc_feature (784)..(784): n is a, c, g, or t
agtaatcctgctactgaattgttcctcaaacctattatttattccttagatacttgtatgtgtctttgttctaagtttgtctcacaggcatcttatgttttttctgtataataaatcaagcaaaatatagatgtaattggttagagttggaaccactttgttatgtgcattttgaattttatcatgctgttcatcatttttgattcacccctcttaatttggctgcaaaacacatcagatagggagcgttattgtgggacatggaatcttcttttaattattgatgtacagatgcatttcttgcgtttctaatatctagtgtttatcagtctacttctataaatcttaaatctgccgaatttacaaatgatagtgtaaggtgttgacattatttttgtccaggtgcaagtcaggtgttcattggtttacatggattttgaaggacgttcagatggaagatccattaaaaatattctctctcatgtggctcccttgaagctggtatggatctctttggtgtttttcagttaactgaagcacaccattaaatcttctgtaaattatatttggatgttcatgattttttaaatggaacagcttcaattaggtagtttatcttgccacctttaataccatggtatcttgagcaaaagcatactttgaccagggctgcatttaattgagtggtgcaaggagttaggacattactggtagtggtatgatggatagataaaggagctggaaaaaatatgtaaattgtgggcttacttgatgggntttttgngggttgggaggctgaataaaactcaagctggtggaat

SEQ ID NO: 2067 - DNA, 685 bp, Glycine max
ctgtcactacattttatgtatgactatcttgttccaagttaacccatcattcacttgcctgttctctcccatccatgcatgcacacatatgcgcacacacacgtaaacacattataacatacacatatactacataatattcatgcatattactttttcatatatatatatatatatatatatatatatatatatgcagctaagctctcaagggccaaaccatgatgagattgatttggagttcttgggcaacttatccggtgatccatacattctctcaaccaattattatgccaatggtactggtggtcgtgagatgcagttctatctttggtttgatcctacacaggacttccacacctattccattgattggaacactcagcgcataatgtaagtaacaaaataaattaatgtataaaattaagaatttaatttatatgcactcgtcgttgtaaagcttttttatacatagacatccagttcattaatatggcctagtcatagactaaatttcaaggtgcaaaaaattattaggcatacctgtttatggtgacaatctttgtatgtaacatgtatttaagttatttaatttataatacttaatatacatatatcatgtaaaaattaattgaataatttttctgaagattaaatgtgtatatgtaaaaaaaaatattctatc

SEQ ID NO: 2068 - DNA, 764 bp, Glycine max
acaccctgtactctccgatcacgtcactgggtgactaactgctaacatcatcactttgcttttgttgtggataacaccatgctacaaccacaacatcacaacttcggattaaggaatcaaaaataacaaattttttgaaaatattattaatatatttttattataattttaataaaaaaattatttactttttaagttaatgttcttaaggcatttgttaatagagttatattattaaatccagtacataatattacattagctgtctatcaaattgaaaagacatgaataatttatatggtgaaaatgatatatatgttgcaggccgggagcacttgagagtttctcttgtttgcactctttaattaatagcgtaggagaataaactaacaattcaacggcacgttggcagagtcacccattaggattcggtgtatatagatagatacatagagagagaaaaagagagagtttggttttgcaattaattaaaaattctaaatcctaatttcagggtgaggaacagaatactagtagggtttattggtcaacatttttttttgttttattaccattaaaaacgtgaggattcacaaaaactagtcagtgtttggggtgtgtgtaaagaaaactgcgcttgggcagtttgaaagctgtagactggcgtttactcaacgtgagtttgccaaatcgagcaaaattgatgaaacattccacaaaatctggcgaaattgttcccttttcattcgacttataaagggctt

SEQ ID NO: 2069 - DNA, 730 bp, Glycine max
ttttattttcaaattcttcttgttacaaaaactttttaactttttgatgggtaaaatgtacaaataaaccattaattttgagcacttattgatccttcacgaggttttcttctaaataaagttatacacaggtatggatcgttgtatgcaagaccacttcttgagaagcttagggaagatggtgtatacatgaggcctctgggtaatgtcatttatctgttgtgtggaccctgcacatctccagaagtttgcaatcaactactcgtcaaacttcttaggcggcttgaagaatttgacgtatgtaagaattgaagtggatgaagtggataagtctaatattcctgctatggattttggctaagtttattgctactattattttttgtgggggaggaggaaggggcatgaattgtaaatccaagggttgcaattagcttggttttttttcaattcagttgatgtattttatttataaataaaaaatgtatcttatttcaattcccaccctccccccatttttaagatgttattaataaaaatgttaaagtatttaatcattttctttcaatatttttggaaaaaaaatcaagttatgtaattaaaaatatatattaactggaaacaaaaccagaataaattaaatagtcaataggtctagtaacaattgaatagagtgtgagtaattgtaaatttttggaaataattttttaattttatgggataaaaaaat

SEQ ID NO: 2070 - DNA, 635 bp, Glycine max
agtgttttaggtatgaaacaaaattttgtattgaatatttccctctataaagaggatttttattttttcttatatataatatatttttgtgattgagagctttttttttgcttgttgagccaaaggggtttggtatcttcaacatgtcaggttctcaaatgtagccccattgcagtgtttcttcttctctgatatagagtgggtgcattttggaagtttttaccaaaatgggttattttgcaaaattaattaccaaagtgagtgttttataaaactatttacttgtcatggatgatttaacaggtaaataggtttgtaaaacatccactttgacaattagttttgtgaactaatccattttggtaaaaaattatgcattttgtttcagggagaggttatgtttggaaaaaaaatataagtaaaaggggttttatttagcaattgcctaaaaaagacatgggtcattgatctatgccttgtgcttgtttatgggctttggtcgaacggtttagtggataatccaatttgatggcccgtatccgaattggaaattcgggttagggtttcagttccaagccaaaataaaaagagatcatcactctctaatttccactatttccgtctctcgctgtgct

SEQ ID NO: 2071 - DNA, 794 bp, Glycine max
agggggagttgcaacaggctctgcaactagagatccctcaacaataacaccagatccctcgccagtaacaccactgtagagtttagacacaaaataggtataaaaaatagtaactgaaaattagtatagtaactgaaaaaaaaagtatgaacgaatgaaaaatatgactaagtcactccaaatcatcatactatctcagcacaacagaataaataatgccatgatccaagaagataaaatcattgcataagacaccaacacgaactatcacactattatgtttaattattcattaaattacatgtcacctattacatataattggcatgtaagtcatgggaagtgaacttacgagattctcaacaaagcatcaatgtgcttgtaccacctggaaacatttccatattcatctgatggagcagttggcaaagctgcataaacagtaagatcatcctttgtagcttggtacctaaaaagaaaatgcaaaagggacaatacataagaaataaggatttgaaaaggaaaaaaaaaataatagaagttgatataacctaccaatataaaccaccataaatcaactgctgcacaatttctcttttcaaacaaatttatgtaaaaagcaagcaatgattttataaacctgtctaagatcttaaaatattcatcataggccctctggaattttctatagctttaagttaattaccctacatttatatcagtaatttgcactatttaacttgttcaaacaaacatatcaatcaatttttagtctcttttttttatctcattgc

SEQ ID NO: 2072 - DNA, 712 bp, Glycine max
aaataatatttcaggataattatagactgtttttgcaattctgttcacaaaatcaccctggatattttttcctaacttccttattgtttttcaaactatacggaaaatgattaattatccttcccagatatatacataatacatgcttggagttatttgaaggatgttataccagattcaagtgatgaacatgagttaagaccttcaactcgcaaagaaattctgttgatgcttgcacgtccatcttcttgattgcagttttctgcatagaaatgaattatatgagaggatatccaggaatagagtaaaaaaggtaaagggttaacctgaaatggcataaaagccagaaacttgccaatccacccttgacaatattatcaactaataagtgaacaattccataggtacctttcagttcaatgaattgtcttatactattaactaaattatataacttatatatcacacaatgaactgaaagccttacaatttaaacatatcagtacttttctgatgtaaaatagcaatagcatgggaaaactgtatgtgtcagtaatagcaacacacgagtaaaagtaaaaacttctatcctccaattttgttttccttctttccattaataattctttgtctggatatgttatagaactgaatatacatgtaacttctacctcgcctctagtttggtaatagacaattcaatcaacttgac

SEQ ID NO: 2073 - DNA, 671 bp, Glycine max
tctatttacttaattatcataatctgctatctgcctgagttatttagtaattataattcgtttgtttatgaaggccacttgtctggcgacaattctgcttaagctatcaaggacagaaattagtctcggaatcggattatattagagattttggcatcgaggatggtgaccaggtttgtgtcggatttattcaagtgctagcttgatctccctgtagtgcttaatttactcagattatgattatatgattcgtgtgactttgtttgatgtggctacagtacaaactaagtaatattaagtctcaacttgttcgttattactttagccctagtttcattcttataaaatgttggtctcatgactcttaagtcatggtaattatttttgttttggccttttcagcttcatttcgtgcaccatgtatctgacacttgcagtttcgagggaaagcagtccaagaaacaagctgtcaatttgaaacaacacaggaggtaccgagttttcaatataaccatgcaaatattctggttacctgcattctgtttaccatgtttgttgcattagatgatctttggtctttatactggcattgtagagaatcagctctatcagctgtatctactttatgatttttatctcatttttaattatatatgttgtgaaattcactt

SEQ ID NO: 2074 - DNA, 678 bp, Glycine max
aatggtttgccaaatggcaaggaaacacacaatttataatggaccacaattttttttaaccattgtccaattttgttcaaatttttgtttgctaattggggcccgaaaccttttcgggttctagactattggttaggggacagatcatttaggaaggtggtccatgatagttggatagcgactccttagcgactccagtaagtggctaggggggttttgtcttaaaagaaaaaattgggagactaaaacaaaggctaaaagaatggaacaaaacccagtttgatgacatccaacagaaaataagaagttaaagtgggagattaacaagctggaagtagaaggtgatgacagacaactgacggctgaagaaataaaattgagaaggcaactacaagaggatttatgggtagcagcacactgaaatgcgtcaattttgaggcaaaaagcaaggactacatggattaaggaaggtgactacaattcatggttcttccacatgactgtaaattggaagcgtagaagcaatacgattaaaggtgtggtgtgtttgttaatggttgctggatagtggagccatgtagggtcaaagaagaaattcagaatttcttcgagatttgaggaatctgagtaggagagaccgaaattagatggggtcagttttaaatccattggacagca

SEQ ID NO: 2075 - DNA, 670 bp, Glycine max
tatttctgcttccagtaaaaacctcctccactggagttgccattcccaacctgtgtttgttgttatccccatttgctgaacttgttgttgagaaatctgatacaatcttggatacttctccttcagcgacacttcatcctccttccaagcatcttcccaaaacagcacctttgaaccacttcctattttccattttatgtttctattaaaccagctcccttccttcgtcaaattgaaaatgaagcttaggtccctccaccttataaattctctattgaatcttcttgtctcatctagattccgccatcctccatattttgaattcagaacttgtgcccacagtccaccttgacggtgaaacaagttccaatgccatttcccaagtaaagcgtagttgaacttgctcaaatccctaatacccatgccccttgcctcctttggcatatagactattccccagctcacccaagtgatatttttatgatctaagtttcctcccaacaagaaccacctctgtagctttaccatcttgtccatcaccttcttcagcaccctgaaaaaagagaagtagaaaattgggatcgagttcaagattgactttatcaaagtcactcctcccccgaaagagagatatttttgtttccattttgacaattttctttcacatttt

SEQ ID NO: 2076 - DNA, 762 bp, Glycine max
attctgtttactgtcccattacaagactgttttatggttgagttgcaattttccatttcaggactatttctgctgtcacttatctggcagatatatttggcatacatttatatgtgatcgttgatcaatgttttcaaattgcactagcttctttttccttgcagaattttgtcatgtgactttctcaattctcaaagatctactctgcccagaagctcttctagaaacaattctatttttttttacaatctgaattgctggtattcccctttacatataattgcttgtggacccaaaagctaaggtgacataaatatgaagacatgatactgatttcaaatatttttattaatgaggagttgaggtctttattgacatttcaatggtctatattaaatgaatcacctccaataataataataataattcaaagaatgacattaacctgcaacctaaatttcattggaaactagtcatgctttcatttgacatgacatcattatattttgcacttctgttgaagtttgactcatccaaaacaggttatggatacttatttgataaaattgtactgcaatcatacatcaaagcatttgtaaattattccaagttatttatgtaaataaacattgaatttcaggtgcagctttcttgtactgatgttttatccttgaaaggttgagctgcttgattaatatcagaattatatttattctcctatttattattagaaagacttagggatttagtccgtatacacat

SEQ ID NO: 2077 - DNA, 666 bp, Glycine max
ttgttgtttgaacatgcttgaactatgaatttcacgtggctctttcctgtcttactccgctcccattctccttctcattgtaacggatagaacaatgaataatgtggatttgcgttctctaagtcatgtgacaatgtaatcagtttccgtaagggccattaatgctacagcccacaatcatgtctttctctttttgcttgatttccttatacttcatttgggattgtatttcaagttttggaagttctaatacttcaaatgttaaaagtacttagtgcggttgaagtcaagtaaaaaagagatcagatcaaaggattcttgtgttagtgactgagaatcgttggcaataaaacatattcaaagaatggtcttacttggaagtctccgagactgaggcttatttaacagtgaaagtataatcttgagggttcctaaagaaaatcagactaaaaagtttatattatctgtggaagcgcttgtggctaaagttgaaatggatttaataataaaaaagaatgacatggattcatgtatgctggtttgaaaaattttatgcgagtctcttatcacatgcaaaattttaccccaacaggacttggctagtatttaatgcgagtctctttaagtcttaccacaaggaaaatttacctaaatccggacgtgttg

SEQ ID NO: 2078 - DNA, 658 bp, Glycine max
  misc_feature (644)..(644): n is a, c, g, or t
aactaatttctgttagcagatatactggaatttagaggtccctccgtcccaaaataagtgttgcatctgggaaaaaaaattgtaccaaacaaagtgtattatttggcttttaaacataacattatatgctattttttcaccaatacccttaataaatgttaaatgttatgaactaaaaagataagtacattttctctaaggaaaggagtaagaaaagaaaagataaattggaacctcaattttatccatggagcgattgatgtcctgttcatcaaaaagcatatcttcgacggagaccttgctgactttgacaaagtcagacaagaggagcttgtagatggccttagtggcgtaggtcatgaaaacgcggcctctgaaggtggttttctcgaggaagtagggcaaggacgcagcatgatccaagtgaaagtgagtgatgagaagaacatcgagggtggaagggtcaatctcgtcgaaatagggcaaggcggacatgcctgaaaaacctaggtgtattccacagtcgaacaatacggatttacccttataggacatgtacacacatgaacgacccacttcgtttccagcccccaatggtgttactatcatcacttcatcatcttcctctctcacactctcacgtntcttcactccacaa

SEQ ID NO: 2079 - DNA, 708 bp, Glycine max
ggtttttagatgcagtgaaggagcttcctaatgagctcaaacttgtaggggcccactgtcatcttggttcaacaattaccaaggtcagatggaaattctttactttttctgttgcttcttttttgctttgctactttgagatataccttttttttttcaatttatgttttcttgctttattatgcgttcaatgtttcttagctcaatttgtagttctgcactactttatgttgattctcaatctttatctaaatataaatgttgaaataattgttgcattcttttttctttctttttcaggtagacattttcagggatgcagccaccattatgatcaactacattgaccaaatccgagatcagggttttgaagttgattacttaaatattggtggaggacttgggatagattattatcattctggtgccattcttcctacacctagagatctcattgacactgtgaggacttcattgtttcatttttatatgttattaagtttgcaattgcttacaagcataatgaatatcactaatgagtacaacaacaacaacaacaacgccttatcccactaggtggggtcgactacatggatcaacttccgccataatgttctatcaagtaccatacttttatccaaatcattaagttccagatccttcttgataacctctcttatagtctttttgggtcttcctctgcctcga

SEQ ID NO: 2080 - DNA, 675 bp, Glycine max
ctgcctgcaggatcacatacattaaacactgacaattgagattaaaaaaacgaaggagtataggagaagacaacaaacaacaaaaattcgcatctcactaggtgaggtcggctacatagattgcatgatgccattgagctcaactaaagaacaaattttcaggaatattattcgccatgggatccctctttacaattttctccaatgtccttggtttccctctcccccttttcacaaggataaaacaataaaatctactctcctcagtagagcttctagtaaccttctttgcacatgttcaaaccactttaaccgattttgtcatcttttggtcataccaatatcttctcatatataagcatttcatatcatgtcctttattgtgtggtcacacatccatcttcatattctcatttctattactcccacctttttcttttgttgtccctttaaaacacagcattcactatcatagaatatagctgcacatatagtagtacaataaaagattactttgagtttggtaggtactttacaatcgcataatccttgacatctttctccattttaaccatccagctcgtatcatatgtgcttcatctttattaatttccccatcatttttgtaattttgatcccatatatttacacttagaatgctaaggtatggcatct

SEQ ID NO: 2081 - DNA, 762 bp, Glycine max
tgtagattgatatgtcttatttgaagcaaggttaatgtgaacgacaaaagaatagatgtctaaaacctccccgagattaaataaataaattctcttactaacattgtatggctttgaaataaaatctgaaaagtttgtcataaagaaacaacaccttgcaatggcatgtatggttatggggtcattaactagtgaaattagggctaggagattggttgtggggttgggaaaataatcaaataagtagggtttgaatttaaaaactacgtaaaagaaccttggagaaaaaaactgcaaaacataataacattaagacagaaaaagataaaggcactaaataacatttatatcatcaacttgaatttgctaactcctactttgaaacataattaaaatgtaaagtttgttgatactccaactctagtgaaatcaccaccaacatagacactagttttgcacgaacacgagatgatttaacatcataaatatatatatgccagtctcttccaagtgccatgctttctgatagcagtgtcaccaattgaaggaaagtgacatcaagctaaactgtacatttgtactatcattttaaatttttttttatatctctttatttatttaattgggttttattaatggtttttatatctcataattaatacatctaaaaattaaaaaaaaatcttattaagatgaataaataaatttctgaattttttttttttttatattaagacccaaagaataccagtttgccccaat

SEQ ID NO: 2082 - DNA, 720 bp, Glycine max
ttgcctgcacaagcgagatttcaattcgaggagtaaaatgcgaacatgggtgcgagaattggaatttgcttacacacaacaacaacacggtaccatcggatgcaaaaactggtgccgatgattgtgagtgtcgtgtgtcatttcggttgcatctggtcttttggtccacgagtgcggttttttacggtgtatgggtttgatttgtttttgtgttacacaaaggtcttgcagagttgcaggtgccttgccacttgccactaacaataaggataaaaagcttctttttttttttttcaagcatttaagatgtgtattaactatccactgatattactttttattttttatttttacggaaatattacctaatttctatccacggttttttctttttttaggaatccactgttttttcctaaaaatagttaaatataattttaacatgattatattacaattttcataaaaaaataattataataaaaattaataaatttattatatatatataaatttgtaattaaataatgagaaaataatctacatgtacaataaaccataattttatattattattcaatcataaattaccttaataattatcttataagccatcttactaataatttatgattatttaatgctaacaaaatgtttatactaataatatatgagcattaaaatcttaaataatagcataaaaatctttctcaatttcaa

SEQ ID NO: 2083 - DNA, 755 bp, Glycine max
ttgtgcacaaatgaatgaaaaggaggatgcgaggagtgtgatttctggacacccttttgatagattgaacaaggttcagtattggattcccaccccttctcagattctcattggtcctactcagtttttgtgtcatgtgtgctctaagagtttcaacagatataataatcttcaggtatgcaataggttgttgttttccttgtactctttattatatattaacatttgaaagaataaaataaaatcatggctgctttacatacatgtacagtatttttatttcctttgtgttgttctctttcatgtaaagtccctaagtttcatctctttttggtttgttatatatctatcccttgtgcatggtgttctcgatctttctcttatctactacacacacatatttatatgaacatgattaattagctatttggtatattagacacaagcttgattttataaatttgttttctcaaaaaataaagtgatttttttttacatgaatttataatactattctgcgcaggattgaaaatgagtggaaagtaaaacgaattatgaaatttataatagcagcgcttctttctggatatttatatgttcttaatttatcagcatctcacctcatttcaggtgtataaaacacagtaaaaatgttcaaagccctgtctgtgataagattcatatatggaatcgcattgagatctcgtgtgattaattaaagagcagtcccactataccccatgaaactaattggg

SEQ ID NO: 2084 - DNA, 647 bp, Glycine max
ctgtttagtgaggcttttaagccaattgaagtgaatataaaagttcaaatcacatgatttgtgcactgtcttaatgtgaatgctaagccttaaaatttttacagagctgatcacacaaaacttgatcttgtttgtgtcttgacatacagcctttgagatttgggactaccatgacattactttcagtttgggatcataatggctagattattttgtacaatgtatacacaaacgagttgaaatagcattgaaattttgatctgataagagttttaccaacattttccttttctttttcaggtcctttgtactgtatacaatggagcatgtagataaaggaaaagaatcatcaaatagtgacaatgaagtagaagccacaaattctccaattatttgtggccttccagatgatatttctcttatgtgcctggcaagaattcctagaaaatatcattctgtcctgaagtgtgtctcaaagagatggagggacttaatttgcagtgaagagtggatctgttatcgccgaaagcacaaactcgatgaaacctggatttatgctttgtgcaaggacaaatcaaaggagattttctgttatgttttggatccaactgaccccataagatattggaagctcgttggtggtcttc

SEQ ID NO: 2085 - DNA, 1058 bp, Glycine max
tgtatcatcctccaggacctccactaaatatgggataagtgagtgaaactcctctctctccccccccccccccccttaaggatggtgcagccagctggagagaaactacgtccaatttgggtgtgatgttaatgtgttcttgccaacccaactttcacccctctctaccaaggcacgtgcacttcgcatattaagatataaacaatccagttgtttccaatagttgaaggcctttatgaaacaaattcaaatactagaaaagtggcatgctgcccttctcatgcatagaaaccttaatgggaagaaggaaaaaagtaatagctagtaaacaaaattaaacgcaaaattatgtgtccacgtgaataatttggatcattctgaagaaatagtgatgggacacaatgttatttcgtgacatatgcagaagtagtcatacgcaattaccattacttgaaaaaaatgattacccgagttggatgggtaccgtgtttcactcgtgttatttttagatgactaaaagcgaaattcaaggatatcttctgcatggagttatgtcccagacccagttcggcaaattttagaatggttgcacagcagagcccaagtctgacaattgctaaataagataactgcgtatagtcttaattacttgtgctttttttaccagataacaagggtagcttgagatatactgttcgtttctcactgatttcataaactagatctcgagaatataattttatttgaatttaattctaatttttaactctcgtattatttaaagaagatttgttgaaattagtttaagtgaaaagtccactttttaaccttgccacatttttattgtaataaaatcaaaacaagcttaagatatatttccttttccaaggtcttaaatacgcagggtacccatcctaaaattaatattggtttttttagaagactttgaaggggattttgcctccttgccaaggctatttgtaacaatacctaaaactccctgagtatacaatattcctgatttgtttggtgaactcctaaatcatttcttaaattct

SEQ ID NO: 2086 - DNA, 707 bp, Glycine max
tactcccgaagacactacaacagaatttctttttgtttttcttctcctttgtcgcattaaacgtacaagccttaattactttcttttcaataaggtaatcataatcctatttattttgccatgtcccatcaatctaaacttttttttcttctttcattgaatcccatcaatctaaaccgcctctatagttaaacttgttacggtacgtactgtacaaattaactaactatctgtttattgattgaatgtatagttctcttttttatattaaaaataaaaaatatgttacaaattgttggtagttatctacactacacatgcacatgcttcaccccaaaagcacaaaatggttttgacattcttccaattgatgttgaaaataccttttacttccagaaggcatcttcaagtaaatggcaactatggaacacgtggcttctgtacctgtaattctgtcaacacataaaaacaagaacgaatttttttttaatctcagtattttctagttttaaaccgtgacacatgatgaccactttggtgcaaattaagaaggtagatttatgtatttaattggacttttttttttgcaagttatctagctttgatttgcggataattcctattcaatagttgaatctactggaaaatttgtaccttccactcttggtcagcataccttcatggtttctttttatttctttaagcaa

SEQ ID NO: 2087 - DNA, 635 bp, Glycine max
gtgatgaaggggtggctggaagattgatagaagatgtttgggagattggggtggtaatggaaggaaaggtgttcacaaaaaatggagtgcttaaaagcttgaatctgattctggcgcaggaagagggaaagaagattagagacaatgctcttaaggtgaagcagactgtgcaagatgcaactaggcctgaaggacaagcagcacgggatttgaagactttgattgaaataatttctactacatcttaatgtatggcacagttaattggttgtaataatttgagttgcaatattaaattaacccaaatgaaaaaaaaaaggaataggtacaatagtgatatagataccagcattaataaattattaagagtggtttagtttagttttttttcttatagagattacatgtacttttaaagagagaatctttgctcaattcgaatttgttagagtttatatttcgataatttccattaaatcccacttttatgacctgaggttgttgctaccctatcaactactaaaacattcctattaagaaagactcatgcaacaaactaaagatagacaattaatgtcactagaacaatatgttgaaggtaaacccctgataagatgaatttttaatgataagac

SEQ ID NO: 2088 - DNA, 766 bp, Glycine max
aggcattgatatctaatgggaggagtgtagaatagtacatgctctgctctttataattattagtaaattataattattatatacttttaggaaaccaattagactagattgataatgtaaaataatgctctgctctttaattataaattatatttgtgataaattctttaaaagtagtatttaaggttgtcgttaacaaattcattagccgaaataattcaatcttctccttcatctagtgttatatgatctccgatttcctttttcagtacacagtgaaagtacctatcaaaaaactttaaatcaaattaattaagttagagatgtttatgtgtatgagaatgaataagatgtaaattttcttttctctatgtgagtatatgagttaagggaggaggttacaactcagtaactgctcctcaccagtttgaactatactcctttagtggggatcatgcgtttggtcttgctcgagtatatgacatgtgtgttgagtacctactgagtttatgacctgtaggcacataggtgtttcttttttaattagacagtatttgattcaatttttttaaaaaagaaatgttgaatcaaacaatttttatataacaattgttaactaaaaataaatagcttatgtttaaaagaaattatgagagtaatgaagttttagaaaagttaattggataaactatctaaacttttggagaaaatagtatgaaaatatgttgctttaaattcttacctgcaatgaacacttcaaatgtga

SEQ ID NO: 2089 - DNA, 875 bp, Glycine max
  misc_feature (735)..(735): n is a, c, g, or t
  misc_feature (773)..(773): n is a, c, g, or t
  misc_feature (815)..(816): n is a, c, g, or t
ttggaaaaagtaatgaggaagcacttgcctgacttatttgaggaacaaccaaatctactcaatgatctggtataatgctaccacttgtactttctttgttgcttgcatatgttgactagtattttcagttaccagttgctttagtgcttctttattgtttctacagagaagaaatatatcttaatgttgtgcatctcaggtatgcacatgtgtactatagtaacatattagagtacaaagggagtcgatcttaaatacaaatcaaatccctaattacaataatggctatcttactgatattaaaaccttgtgtaaaatatttgggtaatgcaatcagcttttgcatgccctttattttaaaaaatataaccatgtgacatgtgtataatatgctatttaacacactctcccatcaaggtgaaacatatatggtgtgtactaagcttcttacaagtatattcaacctgagaacatcaaagaaacttggcaaacatgcaagccagctgattactggattttttttttatcagcaaaacacacacacgcacacacacacacacattaaataaaagatagaaaaataatataaggtaacaggggtaccccaatactgtatcattgcagactcctaccacccagctcacgggtatacgttatttatgcaccaaatctgcataagtatcatctaaccacttgcatattacagatcccattcgaccaatactaatacacatngtcgtgtagctgcatattacagattactatgtgctcanatatcatacaaacaaactaactcccaagacttttgctgcccnnctgcacagcatgcgaaccccatgcatcacttcgtacccttcacttataccactttccct

SEQ ID NO: 2090 - DNA, 669 bp, Glycine max
ttccttttctactgaaaacttcaccaactttcttgtataatgctataaatacattggtcagcaacaagaaaaaaaagttgctgcctcactgtactgcctttaaaaagccagaacaaaaatagattatctgatgtgtaaacacaaatcatgccatggcatcagcctgttttctggttaaccgtgcatacaaaccatcttttaagagaagttccctgtgacttcccatctgcttgaacagaagttaatgaaaattatgtttccgattagggcaaagaaaggataagcatagcttctcattcaaacacataaaatccaaacagtttcagtaatgcttgggatgttaaagaagccttattctacttgtaagttcagtgagggcaacttgatgcgagttttatgtgcacattatcgaacaaacagataaaaataaaaaggatgatccaatgcacgaggttcccaccatatggggtctaggaagggtagatatatgcagtctttttccagtaagaagaaaagctgtttccaggatttgaatcagtgacctctagctcacaaggcaacaaccttgctgatgcaccaaggctcagcctaaaccaaataaaaatatggctacatacaattactgttttcatggtcctatcctatgccatatccatcatgatccagtag

SEQ ID NO: 2091 - DNA, 692 bp, Glycine max
ggtacaacaaccaatgtcaaacagcagacatgtagtgttgtaaatgatgtgtctagtctttgaatgttttgttgccaagagactaatcaacaaccattcaaggatgtgggattgaatacaagctatatttccataaacactttttaattataggctgtattgttatgaaatataaagagataaaaatatcagattctttaaagtactaaccatcttgtcaacctagtagtgcctatactatgtcaaagcataccaacaaaaactttaaactgtatcaagttactattacaataacagatacagctcagaaacagggtcctctcctagaacagggattctatatgatattacattatcacacagcatactttctaatttaaataaaatatgctgatgctccacaagaactgtttggcactctttaagctacgagaacaagctatagatcaacacaatttaattagtttaattttctacaagctatttagtaacggaagtttgattagaacctcttctttggcagccaacaattcagcatctctcatattgaggattcttgtttgtgtggatacctctgattccagctgacctgagcattgtcaaaagcataaatatgcatattaaaatgaatatgagaaagcttacaaaaggattaatatgtacttcttaattttgctacttcaacttctgac

SEQ ID NO: 2092 - DNA, 705 bp, Glycine max
aagtcacatgagacatgccaccttattgcatgcactttcacatgcaaaaaacaaatacctacacagtgcaactagtgctacaaaaacatacatgcttcagggtttgaaacaacaaacggcaacacactttcgccaaataattcaaccactgatgacaccaaatttcctgtatcaatgtcatccttccaagcctgagcaagagtggacgacaacttcctttgttgatctccaacctccctccccggcacattgtcgatggatatttgacgagccattgacattgaagaaacccccatcatggaggaatatccacctgttgaaccttgcatgtcaactaacatggagttcattgctaccacacccccagggccatccgttgcaagtttcttcattggaggcagctgctgctgctgctgcatcagattgtcagtgctggcttttcgtttgccttcattagggtaaagatagaatgattatcagaagataaaattaacgattgcattgctacaaatgtgtctaaaagagcattctgatggaaagcttttgtcaactggggaagcacattcagaaactcaggcttccagtgcaacttcaatatatatattggaaatgtatcatgttactgtttcagaagatctaattttgacccatttaatattgcaagaatggtcaaaatcattttacttgaaatcaatattgaatttc

SEQ ID NO: 2093 - DNA, 659 bp, Glycine max
acgtgtgacaaagacatttcttcattctttcttggaccctacaaaagctttgcctcaacactatggtgcaattaaagggatagaagctctcggatcaagactggtatgttttgaccaccgtgttttaatttcaggccagtagattgttcgatggcttctggttgttaaattggtttcatattaattatttgatgatctcttgcggataataactaatgaagacagctctacttttcccttttagattatatatgattattttttataaaaacactattctttaccatctgtttagttctcatggataataataatgaagaattattacttttttttatatgatgtttcttaaatatttgcaactgtttttaatgcatgtctttgtatggggttcacaggtcacttttatgctttgtgatttagaacctctagttgtattggtgtcaactaatgtgtatattccttcactttgagtagattcgcttgcttatacttccaaatctcgagccatatttgcatcttcttgagccagaaatgcaacctgagaagcaaaaaaatgaaatgaagaggcatgaagcttggcaagtttatggggctttgttggtgagttgtaatgttttagctgtgtttaattttgacaaataatctaaaaaattgac

SEQ ID NO: 2094 - DNA, 689 bp, Glycine max
atgaaatctaagaaaggcattgatgtattagccaaatgaaatagcacaggaaaaatatcagttgatattctacattaatactcatgagtcacaacaagcactattacagaagctgcattgatacatgtcactcttttctgaacaatagtgtaatgatatcaaatcgtattttgaacacattactactcttcaaggtaaatatcttcttgatctaaaaattacaagaaaaagaagcaagccatacacactcacctgaaatccatggaatgtcttgcactgcatgccagaagcaagaagaaccaggcgactttcatgggtgtaaacataccaactcacattcagtttctttgtttgcaccagttgcagtgattttgactctgaattatatgcgtacaagtctacaccactgttgaggaagtttgtaatttagtatatccttatactcaaaaaataaaaaaaggaggaaatggaaacattgataaaaaaaaataaaaaaataaaaaaaattggaaaatcacaccacaaaagctagtcattgttggaaagctcaaggacatataaaccccacactaaaatctcataattgtaatgtgggactcaagtcacatttctacaaattggatcctagcatcctaccacactctggagtcttagtgcccacgtgggctcaggctggttgtgcactagtc

SEQ ID NO: 2095 - DNA, 685 bp, Glycine max
ctctctacccggtgagcctatagagctcacctgcagttatggtaagagtggtcacagtgcatccttcccttccagagtcactgtgatccaattcgactgaagtgaacggtggatttgaactctgtaaatttcaggcatcagtaaacatttaaatgcaaagggatggacaatccatgaaaataacaagagaaaagggatttatattgggaaatttgagtatgtatgattgaaaaatgaaatccacagaatggaatcacttgttatctctgtcaataacttggacatactttatagaaaactgagtataattacaggaaaattaggatcagtttcgttagaagaaacattttctatttctatttcttgttttcactaaaaatcacaaaaatgttatattattttcaattatcaaatatttatacaagaaatggtgaatacaacaaaatcacatgataaatgccaaatgaattcctacactagtcataaaaaagacaggattgagaaatagaaccgatgcagatacaaagaatttcatctcaccttatatcttgtattaattcgaaaatgaagagcagacaaaaatattcttttcatcaagacctggcgcaagtctctgtatgtttgaaccttattcactggaatctgcaaaagatataaaaaacataattaatagaggaaacataaa

SEQ ID NO: 2096 - DNA, 744 bp, Glycine max
actgaaacaaattttaagcatcgcagtttgatgtctctgcgatttgctccattcctttctctctctctgattcatttcccctgtttggttagaagaaagtgggaaggagaaggaaaatgttttttttttattttatttatttaatttttacctagctagtttgttaaaattttttgaagcagaaaatagggttaaaattgcttccctcttatttagaggtctctcttccagtaaggagttcagttttattttatgtgctaccttctttattgctatttatataaaaaaataataatatattatttacatttttctcttccctcactttacgaacaaatgtgatgttttctctccttctcttgaaataaatcaaagaaagagacctctctttcctctccttgtcatctaacaacacttttaaaacctatattgtaccctcccaaactccaatcctattctaagaagttaagacttcatataatttcagtcttttcaggagatagtagttagttggtacatacatggtagaaaacaaattatatgtgacggataattagctatttaaactagaagtttaatttccaataaatttgtatgttttcctgattgattttcaaatcacatatcattttggcttttgggagttttgtttcgttttaaaacttctgtcattttaataatctccaacaaattaataacatttgaggttataaaaaagaggaaaaaataacttttaaaaattgt

SEQ ID NO: 2097 - DNA, 681 bp, Glycine max
tctctactattgatattggtctgggagttactatactgttatgaagttagtttgcctacagttcttacagttgggtaccattagcttatgtcaattgtacagtggtgtacagctgttattattttaggaaagtaattatgtttctttgagtgtataatttagtgcctctgaacagtttcaaataatcaaataatagaaaagggctactcaatgtacaaggctcccatcaagaggagtcagggaagggtagatgtacacagccttacctttatcacaagacagcaactttactgttgcgaaaaggctcgcccttttaaaactataaaaaatatctaagacttcatttctacaattttctcaagtactcagatcctgtagttacctcaggcaccaacatgaggacatgcagtatttgtaagcctggaacaaatagttttttatatggattatatagaaaagtaagataaaatccatttctggaattttaatttgatagcttcagcttttggatatatagttacatgataacaatcaagttcagaatccaaaagtaactcaatcataattcttactgtatatccttcctaaaagagcctgtgattaaaacttatagagatctgaaatagtcactcttcaacaaacataaaatacaagggaaaatatatgatttatacacatgtg

SEQ ID NO: 2098 - DNA, 748 bp, Glycine max
gaatggaataacttctgaagcattcggccttgaatctgcttcgacaacttcaggcaatttctttgaggatctgacttcttctcaactatataagaacaccaaggttgtatattagccttatcaatgtaaactaagaactgattttgttttaattggttcttgttgcagttgttcacttagtttgatttgatctaatttatttatgtcagtagctaatgctttagcaaacaggttcgtgacatttcagggtcattccgctgggctccatttctcgctctggagagatcaaactcatttttgaccatgcttttgctgctttccaagtacaagatgaagagtattcctgtggtggacttgggtgcaggtcgaattgacaacattattacacagtcttctgtaattcacatgttggcagaatgtgctggtcttcagtggtttgagagttggggaaccaagaaactgtctgaagttggtcttcccatggtgacaccaaatcatattatcaaggtgagtaactatcttaagttgaatttctgcatcatggtgggaaataatgtacaccagcttatgcctcaccttaattagtaataaagcccttccatattgtaatgcgtctgctacaacacaaaaggttattggcataactatacaaaacctcaatactttgcaattatttctacgttaggctttcttacaatatgccattgccaattggcacagcttaccaactttaatacattatgcctta

SEQ ID NO: 2099 - DNA, 637 bp, Glycine max
gaagtttatttcatgtctgatacataaagctgatggttatttcagattgatttgatttgattttctctggtataacaggaggacataaatgaaagacctaggcagggggaatcaaaacttgatcgatctttggcggggagttgtgttatcattcgggctaaagcctcaactgaccagatcatttactattctttatttaaaaaagaaaaactgttaatagtgttatgctttttggatcagaaaattccagtgcaaataagaaactcttttggtcatggatatgacaacctcatatgtaacttaatgcaagtcagtttttcacttgattttccttttgttttctcaagtgaactggtgcaaacacaagcaagatgcttgcacatccattgtggattactttgcagctgtaaaacataatgtgcattggattactggtttaaagttaatagttatgcttttaaaacttggaacataagttgcaaatgttcaaaacaaaatgtcagagtatgaatttccctcttgtaacacggtggtataatttttacctttaattgtggatgtcccaaacgaacactcaagaataactgcgatagggtaccaaatgttggtattcgggggcaccaacttgggtttccgc

SEQ ID NO: 2100 - DNA, 685 bp, Glycine max
aaaaatatattggcagcaaacttaacaaaaaattcaccattggctccataattacaaatccaggggtgatgcaaaatgatcacgtaccaaagatatgatgagttccagcagtgcatccataatatcaattccacaattccagaggctcattctcgaaacctggacaaaaaaattatcaaaatcaatcatatccttaaatcaccaaccatagagaaataaatttgaagtctcaaacacatccaccgaaaaaaaaatcttacagcaaagagcagggattcatgatgaacagaatctatataggacactgctccagaaagcgccttcaaagttgtctgcaaccatgagatataataaaagtataatggtcagcacggtggcataaatttaagctcaatatatcaatgcaacattgcacttcattatgaactttaaattaagaacctaccacaagtatagcaacctcatcaggattaagatgcttcttcgggtgcaaataaccaacgagctcatcgtaattctctcgatcaccctgagccacaacaatccaaattatattttcttcgacaataggaaacatcaacatcgaattgagcaaaactcgtggcaatttttcttttctagaatagcttaccgttgtcactgcaacaagcacacctctgaagtgatgaactaactgcgaatcact

SEQ ID NO: 2101 - DNA, 676 bp, Glycine max
aagactgggcccaagaaggtggtgatccatgtttgcctgttccatggtcatgggttcgatgtaactctgatccacaaccaagaatagtttcaatgtaaaggttaattttttttaggttttagttttgcttaagtatggtttccttctctagcccaaaaaggaaaagagaaaggaaaagttcagtttatatatgttttaaaacttgaaagagaagtgcaaggaatcttatatatagttaatttgttttcctggtggtgacagattgttatccaataaaaacttgactggaaatattcctatggatatcaccaagttggttggtttggttgaactgtaagtttcatcatcttaatttataatattttggtactgagctgtcaatgtctcatgtttgatccattatatgatttaatcctttaatgcagatggcttgatggaaatatgttgactggtccatttccagattttactggatgcatggacttaaagatcatgtaatccctgataacttcttccgcttgtcgtgttatggagttatgtaatagttacctaagtgcaattttttcctttgcagtcatcttgaaaacaatcaattgacaggcgtgctcccaacctctttgacaaacctttctagcttgagagaactgtaagaattttaaaactttatatatcaatt

SEQ ID NO: 2102 - DNA, 792 bp, Glycine max
ataaaccacaaattgaagaactgcatcaatttttggagttccagcttccaaggcaatgggcccctgtatttggtgagcttgcccttggtcctgaaaggaagccacaaaatgctgcttctttacagtttagtttcatgggtcccaagctctatgtaaacacaacaccggtaatgctacttgttttatgttgaactttttgtatccagttggtttgttgttatctttggttccatgatttatgtaattgtgctcaccccccccccccccccttttccctattgaataacagtgatagagggggaagatggtctatccaagatgtgttgtaattttaaaattgagactcaggatattaagattattgttgtgtaagaagtgttgctgcgctaggtttgtgctagttgctcttgtactggacctagagcatcagtctaaataggaatattatgtcaatttttgtatcatcacaacattgcatttttgcagaattatagtaatcaaatatactgagggtgagccctggcataacagtaaagttgtgccttggtgaccggtcatgggttgaaatccagaaacagtttctttgcatatgcaagagtaaagctgcatacaatgatcctccctcataccttcgcatagtgaggagcctctgggcattagggaacactagttttatagtaatcaaaataccctatctttcccacttttccatttggtctaaaccaccaacaaagttttggaactaaagaaattttagccttaaagttagggatcatagtttgcttttttaga

SEQ ID NO: 2103 - DNA, 662 bp, Glycine max
  misc_feature (590)..(590): n is a, c, g, or t
ttcatcacccaaaaccttctcaccctcccccacaactaatccgtctgtggccaattcagaagactcagcctgtctatcaagaaatgagttccacctatctgacctttcctcctcttcctcctgaaatagcaataaaagcttgttacacttagaacaacaccatcgatacgaaattaagtgcttctagctttggcttttgaggatgaaaacaaaaacaatttccaccaacaagtagtacaatctcgtaagattcttcaatttagcaggaagtgaattttctttcacatcactctcctaatccttccagaaaaaacttaaaaagtggcaaggctggaatcataaacccaaagcatgacaagacggaccttgtaaatgttagcatattcacggtatctttgcaggtgctgaggccgcacagtaaacccataggcatccctgttcacaccaaacacgcattaatttccaaaaataaaaaacagaatccaacaataaaaagataaaaaaaaaatcaacagagactcaaaataattaactgcacacaaacaagtagtacgaaacgaaacaacgaattaaagcaaaacgcaactaanatcgcccatcgtcgcccccaaagctaaaacgacgacacattccgcacaaaacgcaatttcgcacagcacttc

SEQ ID NO: 2104 - DNA, 694 bp, Glycine max
atttgctcactgggatgcttgctatctgggagagacaacaatgttttataatgagtctaaaatgatcagagacaagaattggtacaaataagctgcaaaatggagaacaatccaaaatcattgtagagattgaaggggaacactcaataaccaaggtcaacagtaagacacatgtggaaaatgatgatgcaaaaagagagtttgatcaaattgaagaaatggtattggttgtggagaagaaggaatcaccgcccaattatccaagccagcaagaacagatcagaagccactaaagcaaaaacaccaggaattccattgttggagtggccacaagcagaagtacttccaccttcagcaattgggaagatagtgacaccatggcatccaatgaaaaaggaaaaatccatatctgtcctattgtgaagtctgaaaccattgaagcagaagtgaaaggtaaactgatatggattgattctgaataacagacagactagaggaaggttatctaattgagattcgacttgtgaatcagaagacctacattccgaaacgtgaattgaatcttattatgaatcataagttcataacatacatgatcaataaataaaaataacaaaaaatatattttcacataaagaaaatagtattattttttttaagaggaagaatttagtatttataagtcaaacaagag

SEQ ID NO: 2105 - DNA, 814 bp, Glycine max
aagatctgaaactcggaagcgaagtaactgccaaagtctcgcaaattggtgcacatgggttagtgttggatttgggtggaggacttagaggaatttaccggtttgaggtaggagtcatttttgtatcctcttttctcatgatttcatgttaaggagatattctctagtcatttggcattttttagttaaccataatatatgttttttagtggccataatgatgtatttattaatcattatctgtttgtcaatggaattgctttgctgatcattcatacgcacaagttcacaggcttaaaaaattgatgcctttcttcttgttttccatttctgcaactattgatctatttttctttgtagcattacttcacacataagctcaagaattcctttatgttctaaaacccacaccactattattaaattgtatttattctcttcctcttcatgtataattgcctaaccaactttttcatctgcaccatgaaccatccagttcacttgctaacctattcttgttttgtcatgcaggaaaataacaaaaggcactttaaaataggcgatgagatgcgagttgtgtgctcaagcttttctagcaagggagttccagtattgtcttttgtggatgatcaataacttcctaacggtaattcctttcgttagcccatggatttatactcccatggtttggaaaaaagttcttccagcagtgtaagcaacatcaatgggttttattgaaaatctggtattcggtagagcttaatagcacaatttgatccatgtaacctgccttggcacgatgatgcttatattt

SEQ ID NO: 2106 - DNA, 799 bp, Glycine max
  misc_feature (727)..(727): n is a, c, g, or t
  misc_feature (749)..(749): n is a, c, g, or t
  misc_feature (782)..(782): n is a, c, g, or t
gcctgcacttgttatgcgtgcagtgaagaatgttgttgccactggcaggacgacggtttgcactatacaccaaccaagcatcgacatatttgagacttttgatgaggtagtccaaagtgccttctgttgataatatttgtgaaataacagctttggaaatttataataagtctctatcttacgtacagaataagatagtatatttactgaagtctaaaaccctacaaaataaataaatgcatgcatctctttctgtgatttagtaaatatcttgatttttttgcttctagaattggaagtggcaagaagcaaaagctgacttcccttctttgcaaatgtagaaataaaatgcatgatgttaccttctttagcatgtagacaagggaaataatatacaggtcagcaactaaaaagaagttatttttcatgcagttgattctaatgaaatctggaggacggattatttatagtggaatgctaggccatcattcaagtagactgattgaatattttcaggtatgctcaaacccagcagtaaagtacacagcattttatattctggacaaatcaatgatcgtcttattttcaaatgtccttttcttacaatagtcttagacatgcaagtgactgctatcaaactggtcacaagactaatattcaaaactgcccttaggggagtatttaccctttatctctcacttcttcacttatgttgttggaatttggnatctaatttcactgtccatcanaatataccttggggtgccaaagatcaagggcanttataatcctgcaacct

SEQ ID NO: 2107 - DNA, 864 bp, Glycine max
  misc_feature (761)..(761): n is a, c, g, or t
gctctctgcatgtgccaccattggcgctctggatttggggaaacagattgatgaatatgcatcacaaagaggatttcagcatgatatttttgtggctactgcgttaattgatatgtatgctaagtctgggagtttggacaatgcacagagagttttcaaagaaatgccccaaaaaaatgaagcttcttggaatgcaatgatctcagcacttgcttctcatggaaaagccaaggaggcgctatcactatttcagtgcatgtcagatgagggtggaggtgcccatcctaatgatataacatttgtagggttgctttctgcttgtgtgcatgcaggccttgttgatgaaggatatagattgtttgatatgatgagcacattgtttggattggtacctaaaattgagcactactcttgtatggttgatcttttggctcgtgctggtcatttatacgaggcatgggatctaattcggaaaatgcccgaaaaaccagacaaggttacattaggtgctttgcttggtgcctgtcgaagtaaaaaaaatgtagatataggtgagcgggttatgcggatgattctggaggtggatccttcaaattctgggaattatattatctcatcaaaaatatatgctaatctgaacatgtgggaagattcagcaaggatgagattgttgatgagacagaaggtattactaaaacctccggtgagctggatgagtgagatcactgctgaattccgctgtgatgtatgcctgactctanatcatacatatgtgccttagactaaggaagttgccaatgtgatacttatgggacaaatgtttgatttagagaatgcaaggcccccccccttcttttttttttt

SEQ ID NO: 2108 - DNA, 827 bp, Glycine max
tcagatccatgacaaggcggtgggtaattgcttcaacgtcgtttatcaagaataatctcgtgaagtcgcattcagtcatggcccctttacacgtgatttcacgtttgaactttgggccttgacaacaacggtggtaccattagaaaaagcatggtaacagtgaagcatcatattagggcccattaagtttgaactattggatgtttcccttgacaatcattggacaaccaattttaggatgagcgatcgtgcattttcatctaattataaaccactgtaagtagtcagttaattcatttttatagtaatttttcattggttgtagtgtaaaaatttaaattagagatgcatgaacattaaacctaaactatttcaccaaaatcatacatactgaatatacgtgacaatgatagaacagaatgaaaacaaaaatcatggtaggaataagtgaaaaactccatatgaaagaaaaacaacttgttgttcataaaatgaaaacacttaaattttgcaattggctttcataaaatttagcatttctatttgttaacaacttgttgttcataaaatgaaagcccaataatctcataaaagtacgatgaaagtccactatgaatattatatcactagctaaaccaatctcataattttgaataattttatcgcattatagaacaagaaaatgaaagtagaaaattaaataggacataaaagaaatgaagtgataaatgttgctaacctctatcacctcatacaaacaaattcattgattgtgccttgtggcaagaaaacttaatctctattggaaaaattttgttcatcttaat

SEQ ID NO: 2109 - DNA, 666 bp, Glycine max
agctcatgcagctgcaacaaatagtcgtttcaccatcttctataatccacggtataagtagtacactttcgttaaattttcaagtcatggaaatattttctttgaatgacattgttttcttcttcatacattcagtgctagcccttcagaatttgtcataccattagcgaagtatgttaaagctgtgtatcatactcgagtttcagttggtatgcggttcaggatgctgtttgaaacagaggagtcaagtgtgcggaggtaggtttttaaaacttctattaagttggtattgtatatacactttccgttctgatgtttgatatgttagttaagaatacagcattacttcttaaaacaaacatggttgtcttttccttgttgctacaagtattggcataaatttatagaaagtgctggcttctttagaaaagtgattgtaatttttcatgtgaagtgctttaaatctgaagcaagatgctaaggggacctgagtattctaaaaattataataacgtgaagaacactaatcttgtcattatgaacttaaatcacaaatattagattagtgaatttcaactgtacttgttctgtgcttcaatttatcaaataaataggagggttttgttctaacttctaaggtgtggaataacatgtctaagacgtgat

SEQ ID NO: 2110 - DNA, 644 bp, Glycine max
aaacccgagtcgcctatgttgggggtcattccatgattcaatgaagaatcagtccgtgtggtagtattcagataattagaagattgatatggcaaggttgaggagccattgtttccacagacccccttaaggcttgacattccattaggcatgagaagggacgagggctctatattaacaccaaataagagatggttttgtggatcattgctcccttcttggtctattgagcactccctaccaggaaaaggtggtaaagaaatagcattttgagacatggtactctgtggctgccctagctgctccacctgaggtagaacacattgagaggctccggaagaaaggagaggatccactgcaacacgcttcgagggccacccacttgaattttgaacaggaatccaagagcttgttctaggaaggttcaggaggtgagatgtttcatcctggggaaaagaacccaagatactgtgcaggggagaaacaatagtagtcacagtgttcccgtttgaatcagaaaagttttgctgttggcacatggaagagatagcttgcataggtggtgattgaggttgaggagctgaaacaaactgagacattgtagagactgcactagaaatctgttgattatctaccacttgaag

SEQ ID NO: 2111 - DNA, 700 bp, Glycine max
ctgtgatcgtaacctggtcgcaggctccccggacaagaaggcagtgcagacactcaagactccactattcacctgcacaaagagaagtgtgctgacagaattgaaagaccaaaagtaaaatattcaaatctgggaggccaaaaatagaattatcaaccaatgtttttaaaaccggttaggtcattgaaccagatatggtatgggttcagaaccctggccaaacaagtaataataataataatatcataactaaaaaataaataaagtttcaaaaatacacaaaaatattcattaacagtaacaagtttacatctagaaccaaaaaacaaaatgacaaatactttaggttgatctttcattttttttttaaaaaaaataaagaaattttcattggctcgtgaagaaccaaggttttgccaggttttgactggttctctgattatttgaccagtttttgtcaagaccggttcagtactttattgaaaggacactgaaccgattcaccagttttccagtcagacgggcagacctggtctagttttcagaacacaacttgtaaccacaattaaaaaatgcataatgtaataagaaccaacagtaaaacatacttgtactgcaacactgccttgtaggattctttgtagactctggagtcttgggaagtgatccccctctgaacttcgaggctcttcaggctcat

SEQ ID NO: 2112 - DNA, 668 bp, Glycine max
tgggagctacaagtgtttcagtattgcaaagtatgtggcagactttctggctaagtgagaactgggatggctaactttttgtgcacaaataaacagcaaaagcacatgactctttttgcaattggaggagtactaaagtgatactagtatttttttttttatcacatggtgcatgatttaacaggagtttcacccggggaaggtatgggagcaacaacgtctgatgacgaagatgagcaagtagatagtgatgccaatctgtttgatggtgctttggatggtcctgatagcatgggattcggtcctcttattcccacagagaatgagaggtccctcatggaacgtgtaagacatgaagtaaagcacgaattgaaacaggtaagggattaaatgttaatagcttttaaaagtttgcattcgagtcccatcattttgaatctcttcccccatgattgacctcaatgtctttttaaaaaaaattatgtagggttataaagagaaaattgtggacataagataggaaattttacgcaagagatgagttgggaaactttctggtggcacgacctctgtccttaaagcttggtggcaatcacattccaagtggccttaccctacagtaagaacccaagactttactatatatttttttctttcaggaaaccctg

SEQ ID NO: 2113 - DNA, 902 bp, Glycine max
  misc_feature (893)..(893): n is a, c, g, or t
gaagtaatcccttttggtggtgttgtgggtaatgcttctcagcaattctagtccaccattttcatttgtctcaggaatcactatgagtacgactacgggaataactccaagagattctcttttgcttaagcccaaccctttatcttctattagttcactccattgtctccaggtgagctttatttattttcctcatttcaggtgggaaagaagtagagggcaacgtggtttgctttatccagtattttgcccaaacctaaattggttcaacttttgattcggtgtttctcattttccctaaaataattgcttcattgcgtaagtgttctctgttcaattggtaaccgttaatggcctttgggaatttcatgaaataattttggtgcgaggtctctgaatttcgtgaaatgattcttctcattttatcccacaggttttaacccttgaatttcctatatatatatatatatatatatatatatatatatatatatatatatatatatatatatactttattggtgtttattgctttctgattttgtctttttaaccagcatggtaacaatacgattagagttcctgtgactataagaattcaaccagagaggtttgtcatggcgcgctaaccatcgggaatgagtgccacaaaatgctgattttcctcggagttttccagaaaagaaagaacctttccgtttctattgaaactgcgacagcaggggaggagaaaataagatggccataacatgtacactaaaagggtggtggagagctaaccccggataaaggatagctcggaccttgacaaatgaaaactttaaggccggcgctgggatatttttattttcacccacaggggggggaggtggaaaaaaaaatttttttttttnttagaaaat

SEQ ID NO: 2114 - DNA, 677 bp, Glycine max
gtgactagaagtgatagagaaagcaattttttttcgaagatagagagaaacaactagttttacttgaaattcaatttttgaacgaaattaatttcattcaaaacgtactttgcaagcatcgaaacacccaagtattgttactaacacgaagacgcaacgaagttttgggtacacgctgttgaatgactttatcaaaattcctaacgacttaccaaattttatgaaatttgtaataatatttctctactaaatctaatcaaaagtagcgtatttatgactatatacctggcgggctatttatttatttatttatttttgttgatcatagaaaaagattgaacttgaatttgtaaatgtgttaagattcctttttgctacatgcaaagggatttatcaagaacgcaagacatttgttgtggagactggatttcttgatcgcattcatatttttggtatattggatctttaaaatgagtacaagtcaataaaagagaataacaatggcatgaacgaagaacaagactctgcttaaggaagttcctatctgttgatattaactgtactgcattggacattaggtagaaatatcaaatacagcaaaggcttctgacaaatattgacgaaataacaatgagggtataaaaaactgatgaacttgcaagtgctttttttgaacc

SEQ ID NO: 2115 - DNA, 678 bp, Glycine max
ataaaactctcttaattagattagcatgtttgtcttttaagttagtaaacaaaagtcttggaactactaatcgtatctttacagttattatgtcatgcatgatgcatgtccagggatagttaaattaccttgaaatcgaaaactctcaataaaataaagcacatgggcgtttgagtgagtgagtaattcatcctaatcatgttccaacagcatccagccaaaaccgcccactggttcgattcgctcgacccacattccctttctacattttgcctcttaatttgaatgcaaccttttcgatgacactgcccctagttattgatttaccagagaaagaagcaggcttacccataatggcttaaattggcttttagttgaaagtattagttaagaattttttatgtgtaaatcaataaccacgactaaaattggacttgaagtaaggtggagataagaaattaaaccaaaactttgtgtacaagcgaaattcggttaaccattggaacagaagaataaaaaattgtacatgatcacatgatggcagtgaaatagcttttgcatcattctagctagccttttctcttacaatttttgacgtagatttagatcttatttttcgccctatatataccccatcctctgtaacaaaccttctacaaagaaacattaagtatctat

SEQ ID NO: 2116 - DNA, 846 bp, Glycine max
atttggtatgtaattgcagctataacctgcaaaacataagttaatcataatttaagatgtaattatacatatactactatatttctctaatttccactgcaaagctttgttgtatagctcacattggaaggtggtaagaaacattttttccttttacttctaagcttgatggttgataagatgaaaagtgagagtattggcaaagatcaatcagggcacttgtcgagacaatgtcaacttgcttatagaaccaaatgattcgtcaataatgatgactaaatatattctgtaatttgattaccaatccaacagactccacggaatctgagctgaaattgttaaattttctctattaagaaatatagacatgctcttctatatgttgtactcaaacagactagagaatctcagggagaaacttgttacactttttctttaaaatattgacacatgctttactgtaaatttttaaaaatattactatgaccaaaagcattttccttaaatttaatttataggaagggataggataatgcagcatacattgcttatagctgctccctagaagaccaaagaaatgtaggcttagaaatataacaccgatataaaacatgctccaatttgtgacttaagtataattgactagcaaatatatatacctttcctgaaattccaacagaagtggatttgataagtagtgtacgatatttcctgcaagacaaaacctaccgttaaaccaggtaaaatatgttaaaagaaaaacatatatccaacttgggagaaaaactgttaaaacatgtcggcatgaactaacggcaccacaccattgaagcttttatcttgtaa

SEQ ID NO: 2117 - DNA, 652 bp, Glycine max
attctcatttagtgagggtagctgcttgtgcttcgatgtctgatttatttgcaaggttagagtatttcttttcccaccaaaagagtttcctattaattgaatcccttgctataaatttctctttctctctctgtttgtctgcaagctgttgtgtggttgccacatacattgcccgtaattaatttactattctgtgtatgcattatactctataatcaataggatgaggtcaaggttgtcaaacttgagtctgcctaaacacttggagggttcataaacttgactcataaatttacaagagtttacttaattaaaaaacaatatttcaaaaattaatcatagtatctaaattaaatataataccttaaattatactcaatgtaaaaagggagggttcatagggttgtgttaggccctcaacaaccaatgtgaaacttgccgttatacttatcacattttgtaaattataaactaaacaaactggggatatcatttatcacagttcacactttcagagtgatctcagttctcaattctcaacaaatactgcaagtccagaaagaaaaaaagggaacaaaggcaccttgttcatgtagagggcagagggaaccttgttcacaatttcagtttcagaattgtagtcaagcaaccg

SEQ ID NO: 2118 - DNA, 663 bp, Glycine max
aacaatgacccaactagttgacgtggactttatttttaaattattatatagaaagaatatacctgaatggtgtgttgtatgtccaaacaagcatcttatttatactcacattaggttacaacaaaatcaatcataaatacataagaataaattaaacccctaaattgtagtaacaacatcctttatttctagtgatatttatttccatatttctatctaacactcttcctcaagttaagacaaatatataataatatataaatatataaacagaatatttataaataaaaatgaaataaaaaaattaatatcacttcacttcacttcgtaccccattgcccagaggctcttcgcaatgcgaaggtatgggggagggatgttgtacgcagccttacccttgcatatgcaaagaggctgtttccggattcgaacccatgaccaacaagtcaccaaggcacaactttaccgctgtaccagggctcgcgcgtgcgtatgcatgcacacatttatatgtgtagggggggggggtagcaagaagaccatttttatttgtgtggagtaaatctacttcatgcacctatgcatggattgtcaagattgaatgtcatgtgagtttttaaaaaattcacatgacctcttattgttggatcttaaacattcttg

SEQ ID NO: 2119 - DNA, 622 bp, Glycine max
ataatgcaaagtaccatttagatctgccaaagtgccaataaaatcatacaccacaaatccaaatggtaatgaatccaaatacgatatacaacataggataaacatcttaagtccctattaaacaacagtatcaagacaggttaaacttgttatagcatataagatataaaatacaagacacgcttcagaattcatatgcataaaaagagacatgaactactcaatggtgcccccccacaatacattgaacatataccattgtcatgtcaaccaccagattaaactacagtatccctcttatcaattcttttcttcccaacatgcctaatatttttcattttcaggcttaaaggaagactaaaataagatttgacactttaagcaatcattactaaagatcatggagcacaaaaagcaaataacttaaaggtcatgacttttttagatgacactttgcagcaagataaaaattacagcatacataatgaaaattttatatattacatacaagtcaaaaaggttgatactcttaaagatgagcatggaataccttgaccacctagctttatcctctatcaacttcccaaagctgcttcttctttcctccacaaaacgacggcaa

SEQ ID NO: 2120 - DNA, 741 bp, Glycine max
attggtgatttggacacaaaaaaagtttcaaacttttcagttctctgagcttctggtaagagctggattcgtttccttgtgtgatcctcagaatttgaatctactcttttgtgtatgataattgtaaaaatacaatcttttttgtgatatgttttgtgggtgttgacctaaccacactttagttgtgcttgtgcatgtgtgcgtgtgctttctgggaatcttattttaatgatggatgtttgttgaatcgatcttgcctatattgttgctctgaagcgttgtgttttgaatcccatgtcttattgggcattttcacaaatgaaaaatctaatagttgtgacttgtgaatactcatttcttgttctggtttctgagctggtttagccacattgtttagcccaagttcaatttgactcaatgtcagttatgattttacttttacttttgaaaagcaggcctggaactggaattaagaatgtgtgtttttattgtatccatggctttagattcagaagtggacatctttgtggtgtgtatgtgcgttttttaatcagtcagtgagtcagaggctggctatgttgatttcagattcaggactgtagtcatgatattataaaatatactacatcttggaaatagttgctcctgcttttcctttttgacttttttgtttagtaattggcaattgtttttagttggtagttttattagaaatactaattgggggattttacccgtaac

SEQ ID NO: 2121 - DNA, 683 bp, Glycine max
ggaggaggttttttgtagagggagaaatagttacaactgcaaattttatggatgatatacagggtttggtagtacaagtgcagcaacaagtcacttggacttggggaggtgattcaagtgggaagtattcagtcggaaatgcttatatacttctcaacagagtcgtggaaatcaatgatgctagctgctctttttgcagaagtcatgaggaggatgcatctcatttattttccagttgtgataaagtcttgctgttgtggtgagagtcgatgtcgtggataaatactgtgggggcattttcagaaactccgaaaaaccatttccttcaattttctaattgtaattctgatggttttaggggtcaacgatggcagagttggtgaattgcactcacttggtgtacttggcatcataggaataggattgtattcctaaatgaaagctttaatggtcataaattgatggaggatgcattattcttctgctagacctggtttaaaaacctggaaagaggatttgatatcccatttcactcatggtctagcagtatttgggatgttttttgtactcaaggggtgaatagtatataaaatgtacagttttgaggttgggtggttacctagctaatagccagatctttggttctctaatacttattctgtatattgcattagctaaccata

SEQ ID NO: 2122 - DNA, 611 bp, Glycine max
aacagctttgggtagcagcccaagctcatgagtctattttgcgacaaaaatcaaggtcaaggtggattaaggagggagattgcaattccaaatttttccatatgttgataaatgcaaatcggagcagaaactctctaaaaggggttatggtggatggcgcttggacaactgaacctcttaaagtgaaggaggaagctaaggcttatttctctcaaagattcagagaatcagatctgcacaggcctaaattggatggcattcattttccatctattacccatcatcagaactgcttgctagtggcaccttttttggaggaggaagtgaggtcggcagtttgggattgcggtagtgacaagagtccgggtcctgatggacttaattttaaattcatcaagtatttttggcagctgattaaacctgatgtccttaggtttttagatgaatttcatgtcaacggggtcttccctaggggttgtaatgcatccttcctagccctaattcctaaggtggctgacccgctttatttgaatgattacagacctatatctcttataggctgtatgtacaaaatcgtggcaaaagattttggctaacagattgaagaaagt

SEQ ID NO: 2123 - DNA, 688 bp, Glycine max
ggataaaaaggtgggaagcatcctcctccatccttccacaaaagggacaatttaaatcaggaatctgcacttgtctagcctgcaagtttgattttgtaggtaacctatccctaaggagcctccaagcaaaaaccgctatcttacttggaatcctaattttccataacacccggaaacaatcctctaaattctcctctgcaaccccttcccataacacttcataagcactttgagtagagtaaatactcgactgatctgctacccacacccacctatcagccccatgagtgagaataacttgaccatcaacttcagagaggaaagtgatggccaagtcaacttcactatcaaacagcggtcttctccaaataaaacgccactcccaagaggagttaatatgctcccccacttgaccaattagctgctgctgctgggaagaaatcagatatagcctaggatacttttcagctagagattgatcatgacaaatccatctatcttcccaaaattttaccttatccccagcttctaccttccatttgaattgctggtgaagactttataccatggtgagagtgctgaattgatctttttaaatcccctccacaaagggactgcgtggtggctttttactcttcaattaaaccttccaacccgcttattaaggctaccaaaatgctacccaaag

SEQ ID NO: 2124 - DNA, 830 bp, Glycine max
atgcaaagggaattattgtggttcaaggtcattgttcaatcattattctgttgtcagctttctcaatttagtttctcattgagtatctaatgttgttttgacacattttatttcttgcatttgcaggaggtggaaaagatcatacagcctctattcaaggagattaaggattctcaaggtaggacacctcaaatgttattcactgaggaacacaaggagttggccaaagaaggagagaagtggctgaagaacactgcttcatcatgcatgctagttgcaacacttattaccactgtgatgtttgcagcaatctttacagtaccaggcgggaacaacaacaataatggatatcccatttttatgcacactacatccttcaaagttttcgctctctcagatgctcttgcattgttctcctcagtaatatctgtattgatgtttttgtccatactcacctcaagatatgcacaggaagatttccttgtgtcactacctagaaggttgagtgttggcattgcaacccttttcttctccatcattacaatgctcatagcttttggtgcaacatttttcattgtacttggacatcaattggcttggattgtcattccaacaacccttgttgcttgtatccctgcaatattgtttgcccttttacagtttcctcttcttgttgatacaatctcatgtacatatggagctggcgtattttctcgttgaggtaattaggtaaatagaatttgatagtttaagttttcattttagttgaggcctaaattctggggctgctaactctgcctctgcgtaaatgtgctgaatgctcatgttct

SEQ ID NO: 2125 - DNA, 674 bp, Glycine max
tcccttaccaagctcacaagcaattcccattcacccaacttcagtgatcttaatcttcaagattacatgaatcttagggaattcttgttgatatcagataatatgaaagtactgaaattacaatggacaaaggtcaaagcactttcctcatcatttgaacatcatagaaagcttaaatggctacatctcaaaggaagtcactttgagaggttaccttcgttgatcaataatcttatacaacagcaacatctacatgcaattagttgtagggagctccaaacaataccagagcttcccctgttccttgaaactctatatgccgattcttgcacttcacttcaaactctgctggagtttcccccatcccttaaaacactaaatatcaagaaatgcagatcccttcagactctaccagagattctcctgttccttgaaactctagatgttgcatatggcacttcacttaagactttattaggccttcctccgttcctcaaaacactaaatactggagaatgcaaatcccttcagagtctaacagaacttcctctgttccttaaaactctaagtaccacatcgtgcatttcacttaagactctagccaaccttcctcccttgctggaaactctagatactgaaggttacacatcactttggactctatcagagcttaa

SEQ ID NO: 2126 - DNA, 805 bp, Glycine max
tatttgtttgtatttggtctacctatccataagaggaggggaggtattgtaggcaacttttgttcttattattagtaatattggatattatccttgttaacaaatcaataattttagcttgtcaatttggataacttgactactaaagtaaaccccttgataataactatgacttttttttttaaaagtagaatatggaaatgcttctctctctagtatatgcttttgcttaattatattttggtactgctacatgtatgtgcaggagggaacaggctagtcagtttgcttaattatatttttgtctggttataatacaaatttggccaagacttttttagaatctttgttagcttaaaggccttttagttttaggctggatgggttgtcctatttaattaaataatatactatataaaatatattactactactattgctactcattagactacttaaagatgccttttagcctaattaagaccccattgctaagtaagcctttaaaataggctttcaggcctaaccatactttcaaaaggccttgttaggtaaatatgtcaagcttactccttgtgtttgggaaataggccatttctgtttaacaaaacttatgtgtatgagtgtatcaagtgattttgttttcaatcctacataccctgatgtgtatcaaatggttattgcacacatgggcccatagctatatctatcatcaaacatctcttgggtttaaaagtgaacaaattcttttttccaatgagggagaaccattccgggggaaaagcttaaacaccccacaccaatg

SEQ ID NO: 2127 - DNA, 770 bp, Glycine max
acgaagatgtcaatcatgttaattttcacatcaccaatattagatttaaacacaaaaaatccagctttctcaatccatagatctatatccctcaggctattttaaagcacaaaattcactaaccacatagaagactaggacttaggagtctgtcaaactttgttcagttttcatttaaactaccaacttctcacccaacaatactaatggatggcaaaacttggaatcccaaagcatacatcatatcaccccaatatatctactcttaaattccatgtgcagcattaccacccatgtatcacccaagatcattttattccagacatggatgtgtattatggagaaacttatttagtatagatacatatatattgcagtatcatttaacttttgattacctgaaaggaaatcatatgttgtttacaaattaagatctgaaatattatctgaatccagcagacaaaaatgccataaagatataacagtaaaagcatcaatatgagcaaacttcaatgcttacatcctctgttcgcaacattgaatcgcgaatgctgcccatggcagtgttaggaccaactcccaccacaacagctcttgccctaccagcaaccataaccgtaccctgccagtcaaaataaactcttatatatatatatatatatatataattaaaaaaaaaggtttaaaagagaaacatctcaatggccaaggctttccccccagactacaaaacgggtctttattatgccttttaaattccaaaccggtgt

SEQ ID NO: 2128 - DNA, 934 bp, Glycine max
ttttcactttatctgtccctagtgtgttgttgttattgattggtttatggtggtattggaatgttgaccacttgtcttgacttgagttttgactgtgtataatggttaactccggtctctctgttgaatgttgttgagttattccaagatttgtgtgctgctttttttttttttttttttggagtggttaggtgtaacctttgtacttatttttggatgcagacaaggagaaacttggctaaactggagctctaccgaaagtttacaaacacgctcgcggtgtctgtgttgctgtccattgcgtggattggctttgaggtagttcttggaaaaaatattttgatgctcagaaatatgcaaatttaggagatttgctctatctgtaggagtttccaaacattttcatttatgtatttttatgcgagttgatgatgctcactaagcgttcttactgtgttcaaccagctatacttcaatgccactgatccattgagtgaattgtggcaaattgcttggattattccagctttctggtgtctgctttcatatgctctcttggtggtgatatgcatcctttgggctccatcacggaaccctactaggtacttgttcttcccatggtcttggggggtgaatggtatttttttagagtttacctggtggttttatgcttatgtagttagcccttttattgaaaggtggttaattttttgaaattaaactagttttgcattacaaagtgcttggggctcatttgccgattttttccttcatgcaactggattatgtccgccacttagggggggggtattttgcttgtaaatatacacagcaagtgtcttcctttaaaaaagaaaaactaacccccttactcttctttttattgggtagagagagaaaaaacataaacaattttatggggggtacattgttt

SEQ ID NO: 2129 - DNA, 820 bp, Glycine max
  misc_feature (760)..(760): n is a, c, g, or t
  misc_feature (808)..(808): n is a, c, g, or t
attgctcctatatatttaacatcatgcatgaagcaaggaatgggcttgttagagaatttattgtacaggcaatctgctcaacataatgatgtgttgcttaaggtaactgttttaacttcttattgattgttactatctgtttcacaagtcatatcctcattgtttagtatgtttttgatatacttgcgagtgacagacaaataattgttactcatgcagaacattgagatatgccgtttgtatgagcttgatcatattagttcaaatatcatgaaggtaacctgcacctcttgatcgtgtgcctggcttggggattagaaaatctttcactgttctttcattatatagtatactagacctgacctgcataagaaatatatagattgctggagtacatcactggaagcatggccataagggtgctggagtattctggcttcaacaagcccaagacgcaagttgtcttgataagattgcccaacagttatttgattctgttggaaagtctatatctgatgaaagcttcaaggtagttctcataatacctcaataaacaacatgctgaaaggttttcatatatattttattcctatttatgaaattttgttttcttaataattatttagatttctaactttttccattcttttacagcaatgggaaggcatgattgaactattgggttctgaatctaagcctgctgggggacttgaatttttgcacaagtatgaatgtgctattcagtgcattttcatcttgntttcattgaattatatatcatgttatttaaatattaactaaatatcangtataggggatt

SEQ ID NO: 2130 - DNA, 675 bp, Glycine max
ctcatgtatatcttgtgtaaatagcttaagctctctgaaatacttttatattcttataaataactcataataaagttgtagctcaaatgtaacaatatgtattgattattcaatcaaattcaatgagtaaatccagctaatgacaaaagaaaggtaatacataccaaaatagctatgtggttattgtggttatccaactttttcctcaaagatacattttaagaatcgggcatggtggttgtcaaagttcctttccggactttcttcaggtctaatagtgtgtttagtttaacactggtgcactttccaaagcagttgaatgtggaagcaataaattattgaattgctgttctacatgggtttaaatgaaaaaaataaacatgttcttagcaattacagaaaaacaatgaatttcttgtgtagtatggcaataattaatttgaaaattttcctcttatttttatcttaaaaaaattttaatcagaaaaaaaaacaatatacttattttttattccaattaaataacataaaaacggcttactacacgtgaaacaatttttcagaaattttaaattgtgttcatggttatataatacgaaatcattaaatatactccattaaatattttaaataaattaaattaaaaggtatagtaacacttcgtgaaataaaaat

SEQ ID NO: 2131 - DNA, 692 bp, Glycine max
aaggtccaaataggtatcccatttgtttccaatgacctaaatcggagaaaacgaaacaaaatgatcattaattaaccaaaaccctaaaccataatcccacataaaggcccaaacttttttgtttttaatttacgaaatagagtgaaaagaggaagaaacagagtgtttgggaagcgaatagacctttccgcaggtgaaacaacgaacggggatgatcatcttcctttctctcagcgtgctcttctctgccaagtgctcaaaacccacctaaacccttcttcaccatatttatattggtttttaacatgtaagaaaggaaataaaagattatataaaaagggggggaaaaaaaataaagataaagattttaggtggatatttcacttagaaaaaaatcaattgattatttatctgctgaataaggctcttcttgacggaaaagtttaccttttcatttttctttgcaaaaactcagtaatatttcattacaggtgtgtttcattcgtaaaaaataaataaaataaaacactgagcaatataaaaatatttatgtaatatttgatttaaaaaatactcacaaacaatacaaaataaagaatgatggaatgaacaaatataaaaaaatttgtaacttcttaaatggtataactttttgtcagtatccaacaaaagtaaaaatataatattatcca

SEQ ID NO: 2132 - DNA, 694 bp, Glycine max
tacttgaaaaggggtgtgaatgatcgggggagggttgctaatgatgttgagacagagcagattgtccttgatgaagaatcaggctcttgcaagggaaagatgagttcagttgtgcaaatgcgtggatcaataccacttttctggtcacaagaagcatcaagatttagccccaagcctgacataatttgtatgaaaatagttgagattaatatttatcctgttcattattaaattttatgaacttataatacatctagctctcttttgacgccccccctgttttgacttccagtgcagaggtatgatccaacataccaagcaacaaaattgcattttgaagacctagctaagagatatggcaatccaattattgttcttaatttgattaaggtaattcctcatataaaaatacttagtgctgaaaaagttaacaaatatgaatttacatgttttttgtatccttcctcattttttttctttgcattattgaattgcttcttttataaaagggataatttatactttcttgttgctcatttaaatgatgaaatacagacagttgagaagcggcctcgagaaatgatgctgaggcgtgaatttgcaaatgctgttgggtatctgaaccaaattctaccagtagagaaccatcttagatttattcactgggattttcacaagtttgcaaagaggtaag

SEQ ID NO: 2133 - DNA, 692 bp, Glycine max
atccatattctggaaaagtataaaagattgtctcttatcagtagataccattatcagaacaactataaataccacaatcacatgaaaaagatcaatgcaacagtgctgcccacccccccacacaagaaaggaggaaaggaggaaaggagaggaagttcttatccaagctatagcttgacaaccacaatatttcaccttcgtgctgaatctgaggagcataaattatttgggtttcgtattctacatctataatccatggagaagtattttgactaaaagagaatcaagagagaacaaatggctgagagaataatgcatcatagaagatagcaagttattatcctaaatccattattatattttagaaaataggataaccactctacatcttctcacagtcatatgttttccccattttgtgacacgtctttcaaacttttaaatttaataaaaccaatatttttttcctctgtaattaggtattcaatcaaatgatactttcgtgtttcttaatttttttccatcagtaccaaattttctctgatcaacattaagcatattgggttgtttgaaaatcatcattaaaatattattatattaattaaactgacttttaagttttttcaaagttacaagtttcaaacaattatattttggtttagtttatgttagtttattaccaagaaaaataa

SEQ ID NO: 2134 - DNA, 685 bp, Glycine max
agtgtctatagataacttttctaaaagcacaacaacgaacactgaccaatatgcagtgactagctagtgagttttcttctttctttttctctttttttttttcttcagtttttatacaaatttcgtgctaatgtctctgtcttgccttggcaactagcttggaattttactagtttcttttaaaagaatacaataacgattagaaattgtaatcatcaatatattgtgataaatgtcattgtgttgctcatctatatgcatgcgtttactatgtactatatagaaataaaaaatagaaatagaaatagaaattattcttattataagaaaaaacaccaaagcaaggattttaaaaacgcgtcaaacttgggaacaattttatttcttattgcttctgaatgaaatcacaactttcatttaaaaaaaaaaaacgcgtcaaacttttggtgaattgtacgtacgggaacatgacagtaaaaggttggtcaatgtccgtgattggtcttactacatactctacactagtattaaaaaaacccaaacaatgtactataatggaactagagttattgaaaactcatacttaaatatttcataataggacttgagttaaaatacacaccaacatagtgcttgtttgggctggcgcgtcaatccacgtttaataacttttttgagtaaaaaa

SEQ ID NO: 2135 - DNA, 812 bp, Glycine max
aaacagcaagcattctaaaaatcaaacaaaattaggaatgtaaggaacctaagggagtcaggggttcgcgacggtgcctctttgatgcttgagccggtgagggttttttgagttcacacttcacacagaaaataggagaggacgagggttcagagtttttgggttttttttttttttttttccaatttaaaacgacgtcgttttggtgtattgaaaaaaataaataaataaaaagaactggggatatgccatgcaatgcaacaaataacgtggaggagcgcaaaaaccatgtaaaccaatagacaacataaaatttgcaatcaaacctgcaactgtgtgtgttgatttgtgattttattcgttaatttgataattgaatgaacacaaagtgctgctgccaatggtgtgtgtgttttcaaggtacctgccatcccttgaagagcttggtaagcttttgaaactctgtgctgatgtcaaatggcttccctttggcaaagccatgcatgcccagtttctgatccgcaaccaaacatcaaaccactctcacatcagtcacctcaactccctcgtccatctgtatgtcaaatgtggccaactaggtcttgctcgaaacctgtttgatgcaatgccccttagaaatgtggtttcttggaatgttttgatggcagggtatctgatgggggggaaccactgggaaatccttgggctcttcaaaaacatggtttcattggcaaatgcctgccccaaagaatttgggttcccactgctctttccgcttgttctctggtggaaaatccagaaaagattccatg

SEQ ID NO: 2136 - DNA, 655 bp, Glycine max
aggttaaaatagcttctgctaaacgtggaaagacaaagatgattaaagggaagaaggatacatcttctaagggcaaatcttctgtcagtgtcaatagtagctcacacaatgatcaattatctttaaagaataaagctggtcgaaaagtgttgaagttttcaggtgacgttcaaagtatttttcctagttaatttgttggtactggtttcataattataacttgtaaagtaattacagctgttcacttttccttatttagatgatgttaaggattttgtaaaatccaatgtaaagaagctttcagtgtcaactaataatagtgttggcatgaagaaggttgccaaaagtgatggctgtgatcgtgatgacactgttaaagagaagaccacaagtcattgctccagagagatacaaaatggtaggttaatgatatattctcactggagtcttgtatttttctcagcttcttgtttgttgtcaaatcttatctgactgttgtagaatgtctttattcaatgttcagtcttcacacacacacaacaacaaaaacaaatgccttatataactaagtgaggtggctacatagatcacatgatgccattcggcttggttaaagaccaaatcttcagagatatttatcatgagatctctctta

SEQ ID NO: 2137 - DNA, 669 bp, Glycine max
  misc_feature (449)..(449): n is a, c, g, or t
  misc_feature (452)..(453): n is a, c, g, or t
  misc_feature (455)..(462): n is a, c, g, or t
  misc_feature (464)..(467): n is a, c, g, or t
  misc_feature (469)..(469): n is a, c, g, or t
  misc_feature (486)..(486): n is a, c, g, or t
  misc_feature (490)..(490): n is a, c, g, or t
  misc_feature (492)..(492): n is a, c, g, or t
aatgatctgaaaattcaacctcttaatcaagaatctatttattattactacattaattaaataagactcaagaggaagccacagtgtgcattcagctacagataggatatacaatcacggttaattagcatcctgctaccaaataacatcaattgtagcttaataaaccatctctaaattaaattatcattatactttaaaggaaaaaccatgcatgaaggatttaagggtcaataattggacaaaacacatatgtagttcgttaggtgtttttagtgttggccaatcaaaattgaacttttatgtcagtaatacattcctagattcctacacctgaaaaggcaaatgtattttcaaaagcaacaactgcttcatatccaaaatttaaaactagttctttagcttaaagaacactaattcagtcctgggggggggggggggggggggtntgnntnnnnnnnntnnnntnatttttccactgcgaantcgntntcttttcttgataactcaatgatttcaaatggcgaacttggtctcatattaaacaatacaattcttttcaaaagcccaagggcggtctccttatcatataattggccaattactttcaaatggcccctttgggtgttccaattcttgggatgaaaaacaccacccaggcctttttaa

SEQ ID NO: 2138 - DNA, 677 bp, Glycine max
ctgccagtattttcacacaaaagcataaggctttggcaaggttacttattcccagtgggatagaaaagcttctgtcggcgagtctttagaataaatatggaatagataaaataatgtcgaaatgttaaaactcttgtttatcatccattgaatgtggaatagacgatttgaactagttccggaagaatattggtaaccaacttacatctaagagtatgattggataaaagattttaactgaggaaagtaatttatcagagaatttaaatttttgtaatttagaattcattgtttgaatgttttttttatgaaaaatttaaaattttgaaattttaaaacataattttaaacaattaaaaatctagaattttacttttcttctaaaaggtaaaaaattgaaattctcttcttaaagtctttttcaagaaacatgtatgaaatggaacatagatcggatctaaacataaaagaacatgtataactaacacaccaatcatatcttttcttttttttttccacatttttttccaccctcataattttaacttttttttttccaaacataaaattttaaaaataaaaaaaatttcaattgaagtatttaaaattcttagaatttaaaatttctcagattttaaattcctccatccaacccgctctaatatttagattctaat

SEQ ID NO: 2139 - DNA, 618 bp, Glycine max
gatcgactttggagtcgacaacggcgattttgtagtagagggcgcgaatggggaattggtgtggaagttgaattggaaaatggtttcatgtgagtgagaaaagaatgaaattgaatggtattggcatgtagatgttgtgaaatgtgacggatgatgagtttgatagtcacacattggacatggtttgtgtattgtgtgattgtaatatgaatcggtaattggtttctgagaatgggtttcaatattaaggatttttgggaatgagttggattttttttataaattaaaattattataatgacggttaaaatgtcacaatgtttaaattatttttttttatactgagacttttatccgtgaaaattttattatatatagtgacagtttttagttattatattaaattaattattttaaaatttaaaaatttaagtgaatattaatgtttctaatgaaaaattaaaaaacctaagggatattagttctaaaaaatataacaaatgagaggatatgattttttttaactggaaaatgagaggaaatgaatgatacaaactaaaacttaatcaaaagtcataaaaaaaaacttttcgagacagtaatattaccgtagtccac

SEQ ID NO: 2140 - DNA, 685 bp, Glycine max
aacagcatgagacatcggaatgattgtattatttttaatatttaaatatagcttacgtgccttatatcaattaggtttgaatggcgtttgagccattcggatccttttatattatctgattttggcctcaatttatgaccattgtaatttatgtctagttcttcacagttattgttttggtcttctgaacatttctcctcaatattgagttatttagattattcaaactcaactactaaaatatatttgttgatgataatcaacatttgaaatataacttttcttatatgtttcatgtgtgcatcaagaatatctcagtcaacacttcaaaacataaagaccattacagcccccaacaaaaaaaaaaggcttaaataaggggattagaacaaaaaaaataaaaagtgcagatacaattactggagaaataaatttacaataacaatatttataatgtgaaaaaccaaaaaagctttctggtgttttgaaactctagcgtgtgaatattggaagccagtgtctctttaagaactgccagtaccagaatctgaacatctcaagtgctccaaaacttcatcatacaaaatctgatgagccctgatatcatgccatgtgtctatggtttcaactgccaacttcagcaaattactaaatttaacctaacaatattagaagaaaagaagaa

SEQ ID NO: 2141 - DNA, 928 bp, Glycine max
ttttgcttcagatgcaggcgatggggtgttcgcccaacgatgtcacgtataatgttttggtaaatggtttgtctcacagtggggagttggagcaggccaaggagctgatccaggatatgttgagattggggctcgaggtttccgtgtacacatatgaccccttgattcgcggatactgcgagaaagggcagattgaggaagcctcgaggcttggggaggagatgttgagtagaggagctgtgcctactgtggtgacctacaatacgattatgtatggcctttgcaagtgggggagagtgagtgatgctaggaagttgcttgatgttatggtgaacaagaatctgatgccggatttggtttcgtataacactctgatttatggttacaccagattgggaaacataggggaggcttttctcttgtttgctgagttaagatacagaagtcttgctcccagtgttgtgacctataatacacttatcgacggtctttgcagattgggggacttggatgttgccatgcggctaaaagatgaaatgatcaaacatgggcctgatcctgatgtatttacttttacgacttttgttagaggattttgcaagatggggaacttgccaatggctaaagaattatttgatgagatgcttaatagaagattgcagccagaatcttttgcgacattaaccgaataagtagtgaactggagctcggcgacccatttaggcttttggattgcaaagaaatgttagccaaggctttcctcgagatgacacttaaaagagttattgagggctcccaattgggcatttgaaaagcagtgacttggaaaaagccttcagggttgtccaacaggaataaaacattcctctcctgggtggattaaaggtaaactttcttgatggccagggtttttttcgctccttctttt

SEQ ID NO: 2142 - DNA, 675 bp, Glycine max
aaacctgtcacaagttattccacccaaacagtccttatagaaaacaataaatacctatgccattttaaattttaaaattgacaacaaaacagagaaaatcaaagaaacatctagcaagaatacctatatacttcaatgcatcaggaatcaattatgattaaatcttttctgattgtttggcttctgtatttgaattgagcaccaactatgcaggtccagtatctatgtcagaagtcacataacagctgaagaaaagttagcagttacacactgctgaaatagccacaaagcaaattgattcccctgactgcaagaaaaaaactaaaataatatatacaaaatctatagcttatacaaccatgaaaatcttttgtactattcattcatttcattattattttattttaacaaaataaccatactgtctacacttacaatatatttgaataagatactacaccatttactctacatccattaataattgaaaaatgccttgatgtgtgttaccattaccatatacacataatatcatccttatattcaacatgaagtaaggggctcatgttaaggagagtgagtggaaaaacataaaataagccacaagcagaaatataagttggtcaacagtttttttttttttctagatcattttgggataaacatggttatatg

SEQ ID NO: 2143 - DNA, 777 bp, Glycine max
tcatgaagatggttatgctaaggttgagagcctcaatgaacgacatgaagatcttaatgcaaccaaagtatcactcggtgtgttgggagttatttcacaggtaccatctatccttaattttgtttcctaccaaaatatttggtctttgtttgatttgttgttttctctttttatgtgcataaactatgtcaaatgtaatcaattttaagcaaaaatatccaaaatcggaaccaggctgtgaaaatgaagtcgtatgatcgtcccgataaaaaaaaaaaaactttaatgttatggctacaattgaggtcacaaaccattttttaaaacattgatccaaacttgtaaccaaagttttatcaagaagggtgtgcttaacattcttctaataaaatgattcatggacactcatgtgccaatctacacccaataagagaaatagataaaaaaaaaaaaagtgacaagtctaatataaatgtaaaaaaaaaaatattttgacatccaaatgctaatagacacctagtgagagagaaaaaaaaagaaaaaaaatataagtataataagtaatatgatacgataagaagaaaaagataaaaaaaaaaaaatatttggagtgtcaaaatatcatcactcttagatgtaataagtaagatgatattataaaaaaaatagattaatcaaaagtaaggaagtctttagtcctctcctctaccttctctaacacttttatttgccacttatttctttcaaactttttaaaaaaattcttcaacatctctc

SEQ ID NO: 2144 - DNA, 732 bp, Glycine max
  misc_feature (669)..(669): n is a, c, g, or t
aatgaccttcccaaagagaagtcacagtcaccttttgtaattttttggctcgggtaagagaccgtattagcaatactgcattatacttaaatatttccatttcaaagaagtccacagcttcacaaaaattatttaaccattaactggccatctaaacatttattcagagtgtattctttcaggtacaattcccaaaactataatcacacgcgtcacttgaaaatgagatacaaatacaataattgctccaatgcagcattaatacaataataaataagtaaaatttctacttagtatatacaccaagccatagcaaaactgagtttatcttaccgttcccctaagcagaaacctaatctgaatactgctcatgaacatctctggatgcaagaagatacaattcacattcgaggttgacaaaacaaataatatggagttaataaccaatttggcccttgaaagtggaagcttgtgctgtcttttttctttttcttgaaagtggccacctatacaaattggttctttaaagtttcaacttgctagaaaggttacccttctaagttataaatttctaaaaaatttcatccatcaaaggcctaatttgtaaaaacaaaacttttaaacacccaaggaacacaagtggccacatctaaggaccaaattatattntaacaatctcagttttaagcagtgttatcaatggcagaaggacggcagacggctccctttaca

SEQ ID NO: 2145 - DNA, 838 bp, Glycine max
  misc_feature (685)..(685): n is a, c, g, or t
gtctcttccttacttgaatattcctcttcctctttcagtgaaataagcttgaatattaagcttcttttatccatatcaccctcaaacacttgatttaaagtgtgcattgagtttaaagaaagtaaccccaccagtcgcaaatgaagcaccatttcagttgaattgttaaaacaatctgcaaattgtatatttctatcaaagccctctctgtactcaaattcccgaacttcactacaagcaaacctattggaacatgttacatagaagggaacccgtccaatcttatgaggtggagcttgacagcacaaaattccatcagctaaaacctcagcaggaacctccacttccccaaacatacaggaccagttacattttgccaccacaggttgactcttcaaaaatgttccaacaatcaacacctgtataattttgaataggataagatatcagtcaaattacagctgacttctcttcatttcatgttgtggtagaaaaccatagaaaaatgagtaaaccataagtataaaactccaaagcaaataaagaatataaacaggatatatcatgaaatacaagaaatattcattaacaaagagaacagacacacattgggaatatccaaataaataaagaacaaaactatatgcatctgacctcaaaaaaaagccgtcaatatccgaggcanaagatattaatctaaagtagattccaagtgccatacatacgctcacgactttacagaaaagaaaaccaacagccaaccataagaatatatattataattgggtgaatcttaaacaaagtacctcaatttctgattcagcataagcccatttag

SEQ ID NO: 2146 - DNA, 796 bp, Glycine max
  misc_feature (723)..(723): n is a, c, g, or t
  misc_feature (741)..(741): n is a, c, g, or t
gtcattacgtttgcagttgctcctgagatttcttcctattctttgcactgacaggtaataagactggatattgcaatgtgtaattagctttctcgttataggattcttgatgcacttgtcaagtgaaaaaaaaatccacgatccttctctgttttcttgaaatggagaaaagattggagctaattgcaatatgattattttcagtttcagaaatacaattctctatcatgtattaattgtcgtgggtcccagctgctgctactgaaagtggtagtttttccttgtaacaaaatggatttgagctttaaattttgagagttggcaatcaattaaatgagtcatgacctctctttagaagtgaaaatacggatatttttgccatgaaggcattgaccttgttttattttttatgcgtgcttgtgatggaactattaaatcctaggatgttagaagctattcttgagttctatttatttcaattttgcagggagccatctgtgcggagcatgagacaatttcttgccactgtaatttttcgtctccttggtagccgggttgtgcatgaggatgtggacatttcggtgaatgctgtgccatctctgtcgataagggaagcggagtcatcttctgaagttgcttctgctgcttttgtggattcttcttctgggagtctgtttgatcgtttgttgttggttttgcatggattattaagtagttatcctnccagttggcttaaggcanagcctgtttcaagaccatcagtgaacctacgagggaattttctggaattgaccga

SEQ ID NO: 2147 - DNA, 744 bp, Glycine max
agaaaacttctctccgttcatcttctttctactcaatggcatcctcttatcaacaaagcccttccatgaagcaacaagatgcttccaccaacactgataggagcacccaaatcccagcatctacagtgacgactgttacgaacagaggacaaagctagctatgctaaactacactaatggttaccttcgtaattcttccttccttcttatttcattactgccatatttataatgatttcaacaaaagataatatatggcattccaaatggccataacagaaaggaaaatatcctaataacagagtgagatgaagtttgttataacagaaaggtattttggggcaataacagaattagtggagtgagtggtggaatatcctgaagttggtgcccatgctgtttatcctacacttgagtcatagcagcgttgctatcaacgacgcaaagagaaaggggctttgaattaatacttattcctggtcatgaagaggaacgcaaaaagtatgcgaaacacaggtactaattccagcttctcttaacaataaaaacatatgttttgaatgtccttattgtccacaggtggatttagagtccattaaaagttggttcccaacacatgatggagaacaccctataattcataaagatactaccattaggagtgattttttgaaagaaaaaagtgggattttagaactcttcccccaaaaaagaaagaatggtaaaactttggaacccaaaaag

SEQ ID NO: 2148 - DNA, 757 bp, Glycine max
aagaattgtgaaacatttattttgaaatgggaattttgacaccgggtattatgatgtatacattctttaaaatggaaaattactggaccttatctctaaattgattttacttagaaaaatcagagtgtaggaatcatttttgttacatgtgctttcaagtttaatgttttggcccgcaagtgtgaacaattattaagctaatttaatttttacttatacagataaatgttatttgtacaatacatttgagagaaaaagagaggagaaagaaaacaaaaaaagtattaaatgtaattaataatgttatggtgagagagagaaaaattactgttgtaccaataacaatataagagtattagattagatgtataaaacaaaaaggtttgggctcaaaaaccgcgaggaagcaacccgcgttataacgtcttaagaaaacgtgtgcttttcttacggaataaattagaacttatccaaaactttttcttcacatcgtacttctcttcattttggtccaacgactcatcactcgaagatattctctgttctttattttacgacctaaaatcagaacttcgaaataaaccagactttttccctcgaaccatcaaacaattggcacagtacagtcctagcatagatacaggcattcaacccagatggtattccagcacttacatccaactttcacaaatttcaaccaaaattgatcgataagatatagaatgagtgccagaatcaaatgatatatctacatttt

SEQ ID NO: 2149 - DNA, 693 bp, Glycine max
acacctacagttgacttgttttccattcctgaactggcagtgcagccaaacaacaagtcggagaagtctgttcctatgaataacagctctatcgatccctttgctgctgttcctcttaataattttgatggatctgatatttttggtgattttacttctcaatctgattctgtgtcttcacagccctccaataatgttgtcagtgatggcaagcatgataatgtgactggtaaatctttagcagactctaaagtttcccctaaaaaggatgcttttcaggtgaagtctggcgtctgggctgattcactaagccgtggactgattgatctcaatataactgctcgtaagttaattatctcgactactttgtcggctttcctcagcataatatgtttgtgataagtcaatgttttatttcctatatctgctagtgcttactataaattatctgttgttttacggtccattttggtccaagagtatgttcaagcatttctgggacaccatattgtgcctctaacagagattaatgtattgcattcttgtatattatatcttaaagaggcacaaatcccttgccaaaagatacgcacatcggtacatggattgggttggatgatctcagtaaactggtgattcattcccttccccttgctttacttcatggccctatgataatgcgctcatgaaaaa

SEQ ID NO: 2150 - DNA, 887 bp, Glycine max
cccacctccaacctgcgccactgccacctgcacctctttggctctatgaagtgagaactacaaacaattggttaacaacttgctctacttatgttttgtgaatgcattatgaacatgttttatattaatttgttcaattgtattttttaaactattgtatttggatcttatgacatattatgattatgattcttcaatttaagtttgttcaatgttgtgatttagaggttattagctttatctatgatgtttgttaatgcatatgcaagtatgattttgcatttcaagaggatcatgtgattcgtgttatgatccctgagttacaaggttccgccctcctcttgatcctaagtagaatctcaagtttaacaacattggtgaatacccaatggacccactatccattggtgatatttttttcagaaattgtattttctctccaatttccagtccccctcttcatctacagcagtgtttctctttttggccacctttttctctagtttccaatgtctccaccactgctcagtgctcaaccctggcaaccacagggaccacctgctagaacaagttgcatgcccaaaactggccacacccctaagtttcacaaccttcagacgatgacatgcctgccacattgcaaagcctttttgttttttttaacttgccgaattctgcatgtacatttcagtcatagtcctgccccacccttaccctccattatgtatgttgatgtgtcactcctttgcccttgatttggaatatttttgctttttgcagtacactcaacattattttttttttgtcgggataatcctccaaatggcacattcctgtttgttttttgaaatgaagggtaaataaatgggttaataactgtataaaaa

SEQ ID NO: 2151 - DNA, 1060 bp, Glycine max
caatgttgcaaacacccttaaacccactccagcagcagcagcaacagaggcaacagcagctgcctgtaccacaaaacctgtcacaaccacagcagcaacagccccaaatgcctcaacagagagcacaacagccacaacaacagcaacagcagtcgtgtcaacagaccatcatgagtaacgggacagttgcttctaaccagattccaaatcagtgtgtacaacaaccagtaacatactcacaacttcagcaacaacaattactctcaggaagtatcccaccccaacaaagttttcaatcacccaataagaatgcattgttgatgacatccttaccacaagactcacagtttcagcaacaaatagaccagcaagctagtctcttacagaggcagcagcagcaacagacacagttgcaatcatctccgttgcagttattgcaacaaagcttgtcacagagggcaccacagcaaccacaaatgactcaaatgtcacagcaaaacagctcagaccaacaaccacagttacagatgctacagaaattgcagcagcaacaacagcagcagcagcagcaacaacaacagaaacccctttccacttctagcccacttttgcagtctcagcttctacagcagcaaaatactcatcaacaaaaccagcaatttccacagctgcctctatcacagggtcatcagcctcaacagcttggcaacaatgctttctcaatggagaagcttctcaatggcaacaactactcttcttcatctctgatgcaaacacagcagctttcggtgaaccaaccccataatacacagaaatcactaactaatactagagctccctctactcttacagatggagatgccccatcatgctcaacttcaccatctactaataactgccagatatctccgaatctgatgaaaagaaatcaacaagtatcagccacattaggaggaccttcggtagttgaacccaccaatcatctgatgcaggagcttcatagcaagtctgagatgcagatcaaacatgaattgcccagtgtaagaagaactgatcagct

SEQ ID NO: 2152 - DNA, 806 bp, Glycine max
aaggggcaagtcatatccggaatctgcacttgcctagcccttaaattagattttgtgggtaatctgtcccacagcatcctccaagcaaacaccccaattttacttgggatcttgatcttccaaaggtcctcataacaatcatgaaggttttcaacagctacctcctcccaaaacgatgagtaagcactacgggtagtgtaaatacccgacacatctgctgcccaaacccaagtatctgaaccaaaattctgaatggatttaccttcaacttctgagagaaaagagatggctaaatcgatttcactatcaaacagctgtcttctccaactaaagttccattcccacccaaagttattatgcttccccaagaaagcaatcagctggtgttgatgagcagaattcaaatataaccgggggtacttctcagctaaagattgatcatgatctatccacttgtcctcccaaaatcttaccttatccccagcttctaccttccaattaatctgctgatgaagagtcttgccattatgggactgatggataactctttttaaatccctccatcagattgactgaaaacttgaaattccctcttcagttaggcctttccatcccccatatttagctaccaaaactgcaacccaaagagccccttgctggtgcatgatattccacattcatttaccgaggatggccaaattaaacgtacggatgtctttaatgcctaaacctcctttgtctttagataagcaaactgtctggcatgatatccatgccatctttttggtatcatgacctactcccca

SEQ ID NO: 2153 - DNA, 649 bp, Glycine max
gagtaacaactttgtttattaacccaagaaatgcttgtatttaattcactttttcttgacttttttattaatccaagtcctgaagaatttttaccatgaaggaactaaatagccacatgtattttattttggaaaaactagtccagtttcaactagagttgtaacgattcatatatatatatatatatatatataatgtcttttgttcacaggtttctaacaataccaggcagcataggcaaaacaggggaaggttgaatgggaatccaatagcacagggaaatactcactctgttacttatttaccacaagcccagcagatttctcagccagtgatctcttcaagtactcagcaggtttgctttttcttttttgtttatttgccccccctcccatatatataacatgtgattcctaatatattacccctttctatttgcagtaataaatgtttatgtagtgaacattctctagtctcttggtggtgctagtgccacttgtttcatccaacggcacttttaaaattctctaaacatatccacaaactgaacttaaaatctggactagtaaaaaaaatgttttctgtcgagttttcaatataaaataatgatagttgaatttcgtttcaaaatttgtgtttttaatccct

SEQ ID NO: 2154 - DNA, 741 bp, Glycine max
  misc_feature (678)..(678): n is a, c, g, or t
  misc_feature (680)..(680): n is a, c, g, or t
ttttgaaccttaaagaactttaaaaggagaaatgaccagtatccaagtgaggttatgctttttattttatgtttattcaaaatattttctcatttattgagaaaggaaacaccggcgcaatagttagaggtgctactgtgtgattaggttattggttcaatttgtgaaatcagtctctaaaaaatagaatataaggctgcctatagtataaccataacggatttgacccttccccgaaccctatcatgatgagagctttatagatccaggatgctctttattctctcacctatggtccgtttggtggcatggattggggagagaagggaaaatgataaaacagcatgaaggttagaaattatgatcgtttggtaacttgaaataaggaggaagaaaaaataaaacatgtgaatcccacatatttttttatttctcttcaaaagggcacaaaaataacatttctggaaaaaaataatcagtggaacacatttcttgcaaaaaataatcaattaattttgtttataattaattatcattagttataaaaattgaatttcatacgtatctgatttcgaatattcaataatcgattatttttaaaacaataatcaatatacacttgcaaaaatcaattatgtgctgcacagtacacacacaactgcttcagtaatcaatcgntntattaaataattttttattcataattctatggttttttcttctctatttctttttatttct

SEQ ID NO: 2155 - DNA, 856 bp, Glycine max
ttaattctcttgctccatatcaaacattttctgaatgaattgaacagtttagcaaccaaaaaaaaatttcatacaagatcagaattttaattgcggtctcaatggtgtgcaacattttagttttactaattgcgcgatctcaacttcagttgtgatattatttgagaatgtagtcgtcctaattcttttgtttttccaatagaaaggcatttgatgtgagcgatgaaggaccaatactcaacagattgtggctcacatttctgacacaattcatacaaccatctatgctcaaatcttcaagggtactgaggcgatgcttgtcacttaagagattcaacagttgaggacagtttacaatatgaagcatcttaagatgagtcattgttgtcagccactctggaagcatcttaagactatcacaatttaaaattaataatgtctgcatagtgtcagcggctccttgaatccattgaggcaatgtctcttgccctgcacaatgctcaatatgcagaaatttcatcctcaatcgttggattgtgcttgcacagtacaatgacagatttagcatctggcaacgtatcacatacaaaacctccagcttatggagaatatgaagaggtatggacttcaaccctccgcatgattcatgagcaaacttcaagggaaggagtctgtcatctaacaaaacttaagtgtacacatttaaaataagtttgaatgtaagctgaaatcatcttgcccaatgatggttaggttttccatttcaaggtgttactccccaacctaacaagttaagtcctacgtcttgaaataaaatataaattgagtcgctttgaaaataaggtttttttttttt

SEQ ID NO: 2156 - DNA, 661 bp, Glycine max
gcaacaccaaatagaccctacaattaagaatgtaaaagtggaagcaaaatgaactttgtaatggcttgtgaacaaccttaatgctctcttcttccattttcttcttctatctcttttctcagtcgtgggttagaggattttggtgcactgattggaagcataatggttataaagcattggccagactttatgtgcagtgcagcaattggcttttatttagaagaatgatgactagatgatgaacaactttggttttggtgaaagaaatcttaggaatttggttttgacctctctgtaagccatatattctcaggttcactatgttctatcaagttgcaacgaaatagtagaaaaatgaaagcctgaaaacaaggaaatggaaaaagaaaacgggtttcactactgtgagccagctagccacataaaagatctttgttttgggaattactttttacatcactatttttttattacatcactatttttttgttagtcccaccttccttttttagcataataaattaaattttggaagagtatttaatatttttattctgcaattaaatttcgataaataatgcaaagaagggtggtgaaactaaaaaaagaacggtgcaaaaagtaatttccatcttcttacatccattctaatggtggtggg

SEQ ID NO: 2157 - DNA, 623 bp, Glycine max
ataaaatgtaatgattttttttttaaacatctttattgtttgtaagaaaaaacattcatattgttgtaattagtattaaaataaagttataatcttgcttaaaaaactaaacgaaatatgtatactatttagtgtcagtttgagggtaaaagaaattagaaaacggggtgtcatttatttatttaagactactagttgagtacgattaccgttgataaatacattatcataaacaaactacaagttaaaattggatctccaatagagatgcgataaagaaaataaataattataaaaaatataaatataaacattcaattaaatattaaactcccacgttctcataaatttggatggtaatgagaagaaaatttttgctctttcaaatgtgtgaaattgagatttatccacatctgacaaattttcattcttatattatacaaacttctatattttttttaaaaaatagtgaaaaataaataaaaaataaagcataaacttagaaatatgtggattaagctcaccaagttaattactatagctaggcccaaaatttactatagctatgtggacagaaaaagagatccgtaggtttaaagggtcggtttgggaatcctggccca

SEQ ID NO: 2158 - DNA, 772 bp, Glycine max
cggcacccgctgatcctttagagccgacctgcagacacaaaaacatgaacataatctgttaaacttaattgttaaatttatcattaattaacatagacaatgaactcctcagatgctagtggacctataaacaagtgcatcacaatacgtactattctgcacaattcaagaatacacaggcaatgtatatcattatatcaaagttagactaccaaaacattagttctggttcttctatcaaccaccgatcattatataactggatttcaggtgcccattagcaagcttctacttcctattttttatctttcacattacacgcctacactgctggaattttatgttctatgactgagatgtatgtaactcacggcaatttggttactccaggttaagaaaggatacagtatctagggaaattggcattgttgcaagtcttaagttactaggtaaacacaaaaggatgtgatgaggcaaggatcacagattcacagccttctgacgaaagggtatgacaaaggatcagcaacctccatgtttctttcaatatgtaattaaatggggttaacattcttcatgtcactaatcatagcattaaacacattgattggctaatgaacatattttgcctaaactacaattatgtaaattaatcatttatgttaagcttcaactttccttaacctctttcatcaaccctgaaaaaaatataataaatctcggcttttagaacaccaccacctatttaatcatatgtacatggaaacttgcc

SEQ ID NO: 2159 - DNA, 662 bp, Glycine max
tctcaacatttaaatgtatatgaatacttaaatggttcagacatacatggctgaatcctaccataaagcaatagatacgataaaacaagttaaagatttcagacttcagtttccaagaaatacatatattataaaatttaggcattcactacaaaattgtaaaacttacttgagtagatgatatcatatgaacttcatttccaccatccactgtccatatcaaagtgctatgtggctccagataaaagtgttcctgacctcccatctgaacttccccttcaattattcggtcacactgacctgattgaaaacagtgatcaacatcacctttgctcaaacacttttctgtattggggtgaaaacttctagcattgacggcatcccgtattgaaaggatggctgggagctcttcatactcaacatgaactcttcttgctgcaatctttgcattttcatgagtatcagctacaactactcctataacctggaaacatacatatatatctcattgactaataatgacaaaaggctagtacaagactaaatattccaagagaattcatcaccaatgcttgtaaatcatccttcaattttgagatttggacaaaagtagacagaaagtgaaaggaaaacattaggaggctaattcagcgttccagtgg

SEQ ID NO: 2160 - DNA, 795 bp, Glycine max
tgcatgcctgcaggcataacatggcctcagggaacaaacataacaagaatatcatactgagggctgtgatagaattgacataagttgaaaccaaactatataaggtcaggtgctaatgcatagacacaccacaaatagaagtactaccaagctgctgataacaagaaaatgtgtattaatatgcgagcacaaaattagagggctgcttacgctacataaggagaaagaggcttctccactttagatgacgatgttgtctgagagatgccatctactcctggcacactacttggagtatctgaagcacttggttttggcactgtctcactgatctttgttggtttcccaccaccaggctgagatggagaaggagatgatggtggcttcaaatcatcataactgataaaataaacatcaaattagtttatgcctcctcagtccacaatgaaaaaaattggttgtatcctaatccttattagttattacataatcagaaagactaacaagtttcactgcataacattttaatatctgttgccaaggcaatatatggaatttggcttacacgatataaggagaaagtggttgttttgccactggtttaggttgtgcagtttcttggtgagtggcaactttaggttccacagtcacaacattagcaaggggatcttgaacactgacaagtgcaatatctggtttcttgaccattccataaacaatgaataaactaatatacctgtagcatagcaagtagaatagatggtaatatgatagaaccccattgcagttgacagt

SEQ ID NO: 2161 - DNA, 852 bp, Glycine max
  misc_feature (758)..(758): n is a, c, g, or t
  misc_feature (765)..(765): n is a, c, g, or t
aatatctgaactgtttaagtaggcatcctgtaaccgatgatcatataacagtgaagacatatcaacaagcagctcctcaaggccctggtgtatgtatacaaattgcaacattttaagttgttaacactaaaaatgcccacaaaatcaggtcaagaactccaatcaagtaaagcttacatccagatatttttctatgcgatcaactaattcatgtgggaagggttctggcaaattagtagttttcttgtagaacttctctaaccacagttcagtgtttgacttttctttctttccctttactggttcaccaaggggagttttcagatactctgctacaaaagtttggacagtctgcacagagttggcaggtatccataatcagggaatcaagtactggtatttatattaactcgaatgaagcatgaattacctctgacgtatcacgaattttatgaagcacagaatccacacgggcatatattgagttcctctgtcgacaaacaaaaagctgatttgagaaatacctcttggtaaataaaaagcattttggcatattgagagagcattcaccaaagcaacatctaggagcatttgactgatgtgagatgtattagagaatggtccaaatggatgacaaccagcagcccaaagccaattcacaacgggcctctcatgtacatgagaagccttctcatatggcgcacttaaaccaccaacaactgatgcaagtccagccaatatatgccgctgtgcctganatggaanatcatgccttctttgtgtttccgaaaccgtactgcataagacaattaaaaatggtggtgaatttttgcatgacaaaagtgataaata

SEQ ID NO: 2162 - DNA, 815 bp, Glycine max
aacatatttctgggggcatgatttctgagcatttgcagttgcatcagatgatgaggtttctgccccatcattttgcccccgaccatggaacttggcaaatcgattgatgacagaaaatctttctaaatcctgacattccagtcttaagtccaaaactgaggctctgctatccaatctgcgtcatagagattaaaaatggtaaaaaaaataagtaaaaggagaatgacattgcagctatcatgtaaagataaacaaaagcaacagacaggaaaaactaataacctaaacctgaagacataacagtggtaggcaaccgaaataaagataacacaaagaaggccaatgattcacatcccagtatatgagcgatgggatattgcaaatatcatcattaccatgtaaaatcaaactgtaaaggcaaaccaaaaaaagcaggtggctcgtgcgtactgctacgtcaaaagtttgagtaaattcacagtccataagaacaagcatcataataccctttttcctcacaacaaatcggtatgaattatctctatgaactcattgatataattttgcttctagaccttttaatcattcattttgcatgaaaacaaatacaagttagaaagatcaaaggctgaaaacttcaccatcataaacacttcttgattctttctaccctaagtgaaataggatatctaacctaaattttccagagagtccctaagtcagcaaaactactatttacaagccatgaaccattcttcgagcaaaagtaaaaggtcagaaaatggtctggtcacttgcaatcactgttcatgatt

SEQ ID NO: 2163 - DNA, 710 bp, Glycine max
gaacctgatctgtctagtatgcgaccaaagaagcgtaaaacttccacatctaaactcataccatggcataaagagctgagtcagggttctgaaaggcttcaagacatcaggtgttgaaaaaattatgtgattttatagcacgtgctcgttatagattaatttacaccaaacatcttttcagtctcatgttctctgatgattttgattataagatcttaacactaagtaagctaatctaaacatgtatttaatgcacatgtaattttttattgctattgttgatgactagatgttgcaaaagatcctgtctctttcagcagttgctagatctgttttcaatttcttaaaaagtatttcaagtcttgtgtttttgctatataaatatattttaatcctgtctaatattcatcaatttgttatgctttttttttctttctaacttataagattgaggtttcttattatttggcagtgtggcagaattagactgggcacaagctgcaaatagattggttgagaaggtttgttaataatttagtctaaaccaaatctcttaattcattggctactaggagttcacattgctccatatatgactttaggttgaggatgatgctgaggtagttgaagaattgccaatgatgaagtcaaaaaaaaagacttgtgttaacgacacagcttatgcagcactacttaaccccctccagctg

SEQ ID NO: 2164 - DNA, 653 bp, Glycine max
aaatacaaatatcaactcagtttctcactgtcttgctttcacaccacacaaaaaatgtggatttctattctgtgcacatgggcacatggtgtgcaaacattggaaaactttaatgtttttcgatataccaatactttcttttctattaaaaatttggggcatttgcttgcacttctattgcctgttttctttaattacaaaaatgtcaacttgttttcaatttgtttcctattctcatagatttgtacaggaaatggagaaaaaaaagcttttagcatttcctgtacaaatacatgaaaacagggaacagattgaaaacaaggtggtatttttgtaattaaaaagtgaaaaccgaaaatgaaaacaggaaataaaagtgcaagtaatcgtcccccttagtatttttggcttcttatcatgtgcttatgcacacacattaaaaggcaaataaataatttaccaagatgtgtggtcaatacaaactaaacaatttacagtctatatacaactaacggtattcataacatatgttaatataactcaataatcatcatatgataaaagaataaatgaccattgtgtatacccaccaaattaagtaaacatcttgaaaatcaggatgtttaatagaatactacaaagcagataaagac

SEQ ID NO: 2165 - DNA, 741 bp, Glycine max
ttattgtcatataaattattggcagcaccaaggatgtcaaaattgtaaatcccatcttggttcaaacatggaagatagaaacataaaaggtaaagtctgagatcataacacaagatagaagatcctataaggggggacattaagtgagtgtgtgaagatcttggctttctggttaaggactagatgtagccctgggtttatgagatgaactagtataaattattgtgtgttcatcatcttctctctgtgtgctcttactaacactcattggggacttgatttgagattttgtcttaaagaaaatcttattaaaaaaatccttttcaagatatctactatgaagataaaccactagtctgcctgatcaaatgcttgtctaaatgctgctttgcaaaaggttttttgtcttgattgtttttatttgaaatagtattaaagaggagaaaaacttaattcaataatccttctagtgtttttctgctttcttccttttcaattattttactcttgatcattcattttggttgctatgtcaagattagcatacacaaacaaccacttgaagagacaaagatactactaatgttgatgtgaaacctatagaagtttaaccaacgtttgtcatcattcactttgatttcatactcatgaggaagtttaaaatcaaaagctgtaattgtgtttcttccacataccagttggccccttttattataaaacaagaatttattaggaaaaaaa

SEQ ID NO: 2166 - DNA, 744 bp, Glycine max
attgtttcccttgcgatgcttccaagactttaaacgggttaagaattccatttactggtgtaatcatggccattcttatgggagtgataacgatgatccgcatgacacggaacatgccagggaaagtcactgaagctgccatgtatggtaacccaatatatcgttatgttaacatgatgaaagcacctgccaattccatggatgatcaaatgtgcctgatgaagcacatggctgagctagaagacaaggtgaatgtcctttctatgaaacctgccatgtcatctgagatggaagaattgctgaataatgctcttaacagagccagcacgctcgaacaagagttggatactaccaaaaaggtattattggttttccttgatacttgaatgtcatcatcatttgagaataatatatgataaaagcatcttacatattttgcaatttttgtttcctttagtcacttgatgatgcccttgctcgagaagtggagcttcaagctcaccttgacaaaaagaaaaagaagaaattggtaggtcgtctgaactttgccatgcatatcaataggtaattacttggacgtagtgttatggcttacacaagattttgggtttgtgattgcagttctgctggtaaggtgggtagtatctatttggtgctgaccccaaatcttgacattagcaaaagttgtgaaatggttgggggggtttctttttcatcagcccatcggatgctattggattcacc

SEQ ID NO: 2167 - DNA, 796 bp, Glycine max
  misc_feature (757)..(757): n is a, c, g, or t
tacaaaaatgacaaggaaagaagtcagctgtaaatgttcaaacaaataaataactcataaaagctaggatattgtcactcatgctccagctccatttctaaaaacggtttgacaaaatggatccatgccataaaacctctatgatatggcatccaccagaacgaaagtagcaaacttgcatatttcactacatcttttcaatgacagggcttgagattttaaggggcttaagggtcattcggccatgtggatgaaaattatacagcctatatggttgaaaataatattccttttgagtattgtaatgtggagattactaattgtctgggggtgttctcggtcttaactcttaaggctctccaaactgtggccaaatgaccagctggagacaatgggtgcactcaaaatgtgacttggcgcaactttgggaaggaagtcctcaagcagttccaacctcgatacacataagattcattgatagcaatttgggatgaagaatttgaatcttgggtaaatttcttgagtgcaagaaaacagaaaagatgaaggtttggagagcaaagaaccagcagcttgaatgtaaacaatgtgcaattttccaggcagacgaaacatagaagtctcacccaaaagcagcagtgagaattatcgaaacacactccctgcattacataatagcccctattttttgtggatgcacaactcaagcatcacacaagattgtctcacagatagaagatgaaagagtccgggacanaagcatattttgatgtgatgttgccataggggatgcatg

SEQ ID NO: 2168 - DNA, 798 bp, Glycine max
aattattaaaactaagtcctacatttcctagaatagactttcctagtaattggtcttggtgggtgccgtgtctgatgccttatcatttgctgtgcatttttttttcagtgtgttttaaacttttccagccacttctattcatttttttcgccaatatttggtttatctcttttgtcccatgatctctgctacttaaatcacacctctttggtattgtgcactatgagagaaatcagcctgtcctcatggctttcctagaattattagtctggctcctcaacttcactagaattattagttgaccctgctgcttttccagataaatcagctgccatgactttcacaggaccccatgactttccctgagaaatcaacatgggtgccgtagtttcaccagaattatctgttgctatcatggcattcctagagaatcatccttggtccattttacccatcgtggtcatgagtattcttcaactaaattttgaattcaattattgttcaatggtctttatgtggcaatattttatgcattgttatttcaatgtgtttgtaagaagcagctgggttgctcactttccaacatcatttgcaataattaatattgttactattttttaagtaatctaagaacaagcaacatcaagggtcttactatttcaaacatagaaagatgcttatttttttcacttcttgcgataatatagatatatgtatctgattaatcttggagtatctgctcatgttgataacctgagataagaggaatctcttttggctacctctgaagatagtggc

SEQ ID NO: 2169 - DNA, 684 bp, Glycine max
cttgcatgcctgcagtcttttcagaatattttttgaccttccgaaagccaaaaagatagtgttttctagaatgtaattatacattttggattgaccaattaaaaagtagtgcaggaatcaacgagaaagtgtagcaagcaatagcctcaaaagaagaaagtgacccaaattgcaataggccttatagtttcaaggctaaaacaaacttcagttagtttgggctttacgaaaactttgggtctatgagcctttgagggaaaaagaaacattatcttcgaagatactagtacgagactttgagggaaaaagaaacattattaatgtattttcgctatgatatatcccatacatttcgaatataatttataacgacacatttatattgttaatttttcatttaataccttaagaatgttagttaaagagactaaaataatattaaatattttacttttcaacatatatttttacttttgagtccttaattttgcaatggttgacataatagttattgcaaattgcaagttgagtttagccaacatccacaactttatctcattgacttgtactaagaaatagtgttaaatatattttttagtccttacttatcgaatctaatgcttaacaactgtaaacaaaatcaaattgaaacctttctagtaagtgcaaattgaaatttgagtt

SEQ ID NO: 2170 - DNA, 690 bp, Glycine max
tgcctgcagatccgggcattatgtctaaatttgaccctagagtgggaaataagttcaattctgctcacaatttatcagggaagcatcttggttctgaacatgaacacgttgctgctagagagcaatattctccatcatctgctgcttccaaaaggtctatgacaaatatcagcaagaagagctcagtggaagatcttgacagagtagatagttcaaggaaagagaataaccaaaactcatgtaatgcaattggaggaattttctgcatattattttcacatgaagattgccggaaacaggaagcaacggctgatgagcagggtggtggtgaagatgctctgttctgcactttgtgcaatgctgaggtattgcattgtgatttgtagctcttgacacattgcatcatatatttaaattttagttctttctattcctagtcatgttggatgtaagtgatatctgttatattttattttatccctgaattgatattaattgcatatactaatgtcaccagtacaataataaatcatgtgtacattgagaataattttcaaaattagaatttcttttctttgagaaatgccatgatttgttgatataaattgagtctgagcaaaacattaagatagcttggttttttggaactgttttgcttcttttggcagagttgtaactttgatgatttat

SEQ ID NO: 2171 - DNA, 682 bp, Glycine max
atattgactggacataaaaatgaagtttggtttgttcaattttctaataatggggagtacctggtctcttcatccaatgattgcacagccatcatatggaaggtattatgctgttgtcattgtaagaagttttagctttagattattcatccaatattaatggcttctttcttaaatgtcaatttgtgtttaagctcccaatatatatgagaaaaaagtcttatagctattactactctatttgagatctctgaccaatatacatttcctatactatctggcaaattactatattttatgcctggttctatatcctaaataccagacacctattataagatcagagtaatacctatacaatatctgtattccgtcactggtgtcctatctgatatccatggatatatggatggatactcaaaatatccacccaaattatcatcgagagaacctattgagtttagactgatgggtttatcttttgaagtagggttccatgtcagttttggtcttactagttactagatagaaagatagaaatggtcaatgcttgtaggtcactagatgagccgacttcaatagccaacccacagaaatgctatctcataagtgccctgattgggtaccttccaaaagaaggttggaacacttttctgagctgaaattcccaatgaaaaaaata

SEQ ID NO: 2172 - DNA, 671 bp, Glycine max
tcgcatgcgcaggccgcgcagcatgacgccaggcaagaagctgcccacatcgatccttcttcttctgaggaggaggatatcgaattagggtttcaagaacgagccttggattttgatgagaagagtttgaattgaatttggttagggcgcagacgaagacgacgagtgagaatatttggtgtcgtgtcgtgacttggtgaggaatgaggattacccgtcacttaacctttttggggcatgaaaaaatatgcaagtaggaaagaaaaatagaaaataccccattttctaattgttaaacaaacatttgaataaatcatcaataacgttttataagaaaaaatcatcagtaattaaaaataattttttttatcacaatataagttatgtgctactactaaatattatttaatatgattttttattaaattattgatggttatttatatgatttttaaaaaaatatataaaaacacgaatattatttatgttaaaaattattgaatatgctttttaatttaaaaaaaatataatttatatagttaaaatgacttatttattaaaaaaagttatttatataaacatgaatattatcccatacattgttaaaagactaaatttatgtttatttctcatttatttaaaaatattaaatcaaaattactcgccgtaag

SEQ ID NO: 2173 - DNA, 829 bp, Glycine max
gttgaagtcatggcaaggttgaatccttaaccttccttcttcattaacataacccgggttggtgttaatctccgaaaagtattcccttattcccaagtgcttcagaatggtctcaataaaaaacacgtttgcatcactcacaatcctcaaatcacacctgaaaaaccaaatcccacaataaatttcctccctaaatcatatttaacaaaaataaattgtaagagatgcacaattacgtaccctaaagcatgagctgcttgaatagcaggtataactctggggtgcaagggaatcctatgcaaaacctcttcaatgtcctctatggttttaccatttgaatgaagctccatcatcatcctatcctataaatccaaaaccgaaaaacaaaaaagactcggttaatcatgccattaaaattaaaaccatgcattatgcaaagttaaatatttcagattaaaaaaaaaataaagagcatgtgagtgatgtgacatgacacaaaatgcttaccatgagagagttccaaggcatggtgggaaggagctggttaaacaaatcggtgaaacccaaatcatcgatgacccagttgtcactgtcgacatcgacgatggtcttgtcaaagtcgaaaacaaccacaattccagacatggttgttgtttttttttggataatggacaaaatctcaatgacccagatgaagaaacctccttctcgagaattagactcaatttgagtgtctagtagtgctctcaagatagaatcttgactatgatttgtagcccagatgatgaaggtatttatagagaatgtgggggtaagcctatacctaaaa

SEQ ID NO: 2174 - DNA, 957 bp, Glycine max
  misc_feature (862)..(862): n is a, c, g, or t
tcattaatggatgtgaattggtaacattacgaccaatgtcaactgaaacatcaaccacagcccataaaccttcagcgtgcttcttgcaaaacctgaggaaactcaatgaacgagcagggactagtggagaaagcaattgaacctcagcaagcatctgaaaagcattccataatcagttgaagccaaatatagcaaaggccaaacacacatcagagaaacataccacttgcaaagctccacttctgctttcacccatgccactagacagtacttccaaagtggcagcactagcaatcatagatgaaaacatctccgcccatcgatcctgttggcataaatgataaattaaaaaaaaaaaaaaaaatcaactgagacaaatttaagatcaaataatcatcatagtcaatcacaagttattaacatatcatattgttctacaataaaatttctttgaattatatgccatattttatgaactttgaagataaatatggcatacaatacagtgaagcttcttttgaatttattcttgatttgtaaatgactggtctaaatctccaataaaatcaattaaacttcaactaagactaagatattaggtgtcataccacatccatcaatgtttcaacaatgcccaaactgctggctggtactactccggtccctcttgtagcttcagtcacataaccagcagggtttgatccaacataaggagaaaacaggcttgcttactcatcatggttgaatacttcatttctgccatcagagctcttaattccaaaaagttatttgctggacctcttaataatcattctacattaaggcaggctaaaactaaattttaagcggttttttccatctnccatggacaaccccccaaattcaggagacctaattctgccataacctggggatgcaatgttgaaccatatttttccagaacttctaaaaaggggg

SEQ ID NO: 2175 - DNA, 641 bp, Glycine max
aacctccttccacacgctactgacaacagcaacgatacagaaacttcgtcaacaagatttctatcaagttgtgcgcaaacaagaatgacgccatcgttttgagggagagaattcatagaagaggcaccactacgaagtgagataaatgcctcgaggaaaatgggccacgcaaatacgagaccagccacagaaataaatggagtgaaatcagatagatgagaaaaaaaatatataaagttttttggtttaaaagaaatgaaaaaaggaaagtagattataaataaaaatgttggtttacccttataatattaacatttttttttctttacttcaacacgactaaaattacgtgctatttgaaattcatttttgacaggttccacttttaaaagttagacttaatgcatttttgaaaataagttatacttttatgtcatatcagtttggttcagtattttatatttttttaatgttatttaacactatatactaataaataaaactttgtacaatatctatatttatattatttatttgaaaatatatttgtaaaatgaaccttatatatgtaatttatagtttttttaaactccataatctaaaaatatataataagataatgagtgaaatttatccctaaa

SEQ ID NO: 2176 - DNA, 672 bp, Glycine max
aggaccacgtgacgttccccaccaatgtcttataaagcggaaccagaagacctcaacgttttatttatatcttgcccttacaccatgtaagtaagtattgtattggtaaaaggttttaatttttcttgtctgttctggaaatggatgaatatgaattatggcggagttgaatgatctcctgtgctctttggcttgtcctatggagtagagcgttgacaatgcaaagtctaatgatatgcttgtatagactagatctgggcacggggcactgtcttattatcggtcaagcataacaccaggcctttcttgtttgactggacatgtttttcttttgtgcttcaaagccccacaagtttaaatggctttttagtttgttaacatgccaattgacttctatttatatttataaatgtacatggaaaatatttgtgaaactgcatgactctaaccactttgttgaccggactaagtccaatatgattagatttaacccatttatggaactttcattgtgcaatttattcctctcaagtagtttgattacccaaaaataagaaatgagagaagcaaacaagagttagacttatgtttatgaacaataactggaggtttttttcaaagatagaagtggaagaaggatctatgacttggggtgtgcttgtggaaatataa

SEQ ID NO: 2177 - DNA, 664 bp, Glycine max
attcagaaggctgttaaaaccccctcaggtcaccaccactaaacaagacaacaagacaataacagataaaagcctagtttgtcttgcatgcacttacatgcacctttcatttttttttcttgcatgcatcatggtcccctactaataccatttatcttcaactattcccccctctcccaaaatcattccttgcccttcaacttttcataattgtcttaattaaatgtttggattaaagtctataaaagtatcacaaggcttactttttcaaaactggatatctaggtaaaattttactctcaaacatagttttgggagtaaccaaacattaccctaaactgattttaatttcaaacatatacttttaaaccctcccactggaaatccgaacacatcctaagatgacttattatatttgcatctatctaataataataataaaagtaaatgatttttatattgatacttaattatgagttgttttatgatatgtttattgacttttatagtgattagtatctactttaaaaatcatatctattttggactagctgagagtgtttatattgacaatacatagaaattaaattttaagaataagaaaatgataatcatattttaggatattggttaagaataaaataaaaagttttattgaaaaaat

SEQ ID NO: 2178 - DNA, 671 bp, Glycine max
atcaaggtggtggtggtgctgctgctgtagaccaaggtggttctcctatggacatttgataatttaaaattaagtactagaggtgttgaataccaatatttaaagacgagtaggtttcatgtgtcatgggacaagatatttctttgatggaatttttttccccttattcctgtttgttttttcaattcatccatgcctgatcattgtaaacgattttatagctgtttgatgaacttgaatgcatgatttacaaaaattaattgaaattcaggctgaaaaaaatgttgggcaaactctttagagactaaggattatatatttatattataaaaataatttcacattattatttaattattataataattatttatatataataagtttgttgatttttataataattttttgtaaagtcatatcaataattacttatacttgaatgataatgtatgaccattaaacttgaaaaaatttaattatttttaaagaaaaaaaattatacattgataacgtaaaacatttttatgttgtgatgtactttatatgggaagtttgttgaaagtaagtctgtcttacaccatgtagagatattaaacatataactttatgtgcaacacaatttcttaaattatgaaaaagtatttatttgagggcgagccctggtgcac

SEQ ID NO: 2179 - DNA, 621 bp, Glycine max
agcatcatcacaaggtcagagagggagaaagatcgattaaagagacacgggagagataaggcaaagagcgagaagaggctggagtgtgtgactggaaacattggttcaattttgagtgggaaaattttggtgatgtgctgtaggtaacttttgggtgaaggaatattggaggagacaggagaaatattaagaggaaaaggttaaaaaatttaaattttgaaaagttaaaatatgaaagagggaaattttttgtgatgtaaatgacaagaaaaaatatacaagttacattttttatagattatataatgacacagataattttaacataatttgtgttgttgtgaacaattcacaccacaacaactgcaatctacatcacaacatccgcaatattcataattgcaaaaaaagtaatgtgaccacaaccacaaattaaaaccttggttctaacactaattatagcaccatcatacatatatttgttggcccaatatatgtgatacaaaatcctttcttctttagagccttatagaaaacttctttgggcatctagtcatcctcttgtaattcaatgaaaaacatgcagctctttttgcttcctccggaattcttcatcaattt

SEQ ID NO: 2180 - DNA, 952 bp, Glycine max
  misc_feature (917)..(930): n is a, c, g, or t
aagcagggtaccatcattgcatttatcagtaacacgtgtcctcacatagaaaggatatgtaaaatgcactgctagtgtcctgggtatcaaggtaagatattattaagtaactagtggcagagtatgcaaaagccagatgcatggcacgcttaattcaaagctgtatgatatatattatgatgattaaaacataagaatgacagaaaatggaaaacctttcgaatatctgattgtggaatgctccaaatacaagtttcagagctattgttctcattccatctacaatactttctctccttgttgtggctgaaaagagaaaccaaaataagtacatatagtaaaatttaaaaagtacatgtatgaagccaccaaaacttgtgtcaccatcttaacctgaagaagatcctctgctgagtgtgtcactgatggcacaaaccagaacccaaagaatagaaggagtgtcacttgcccaatttggaaatttgattttaccatcatgaagagtcaaacgttcaaattttttatcagaatttagagttcttatctgagcaccatcattctgtacatcagcatcggtttccatctcaattacgtgcgactctttaatctccaaccctggaccagtatcaatatgcaagacagccagctttgagggaataatttaatgggtcggaactaaaataaccaaccccaatgggcctgcatttattcaacaaaagccaataaaaccactgctttcaggaatcaacaaggctcttaggtttggaacctcaaaaatgaaaaaggacattttggataattaatttaaatttttgtttggccttaaagataaccgctctgcataaggggtttatttcgaaaattttaacttggtcatttttgcccaggaccccgcgggggattttaaaacctctttnnnnnnnnnnnnnnttaaaaacaaacaaaaaaaaaa

SEQ ID NO: 2181 - DNA, 894 bp, Glycine max
aacttaaaagctagatatgaattgaatgaaatatatgtaaggctttcttccctttaatgagatgagattcagcatattttatcagtgaaaaagttgttacctaatgttttggcagacttatactggaaatattctgattgcaataaatccattccaaagactacctcatatttatggtgcgcacatgatgcaacaatacaagggagcaccatttggagaattaagtcctcatgtgtttgcagttgctgatgttgcatataggtaatcctatattttttcttaagatccaagtttcatttctctaagtgaagcaaatattgaattgatgattttattaatatcagggcgatgattaacgaaaaaaaaagcaattcaattctagtcagtggggaaagtggagctggtaaaactgaaactacaaaaatgcttatgcaataccttgctttcttaagtggtagggctggtaccgaagggcgaacagttgaacaacaagttcttgaagtatgatctaattaattacactcatttttgaactcttaacagaattcccgtccccgccctccccaatgaataacattccattttcttatcttttaatatgaactcattcaagacttccatattaactgatttgagtgcagtcaaatacagtactggaagcatttgggaatgctaaaactgtcaggataacaattcttgtgagtgtatttatatgtgtaaataaagatctgggggttaatcctatgattctgatgtaaaaacctgtataacctttgacagggcacaaagatcctgggctatctaccgtggcgaaaaaaaaactctttccgtgttctttttcctatatacttatgaaacatctttttaagcgtgaatgctttttttaggggggaa

SEQ ID NO: 2182 - DNA, 842 bp, Glycine max
tgattctacaaacaacttctagaatcaagcactttggtatccagaggaaacccctccctcttgaacctactgttcttctacgagaggccaacaggcggagggcttcactttcagctggaaatgtgcctgaaatgtttgacagtcgccagggtccaatggatgggtaatgaaatgctatatattgttacagatggattcatttttagtgaactgttcagaaatcccatattttgttacaatttgggttttaccaatctgatttgtatgctgacagatcaggtttcgatgcatccacaagaatgtcaccacaaaaagcacttgcaagtaccatgtcacgtacaaattcttcgccaggaaactttgatagctcaattgaccaaccgatgaggcttgctgagatttttattgctgctgagcatgctttgaagcaaacaatttctcatacagagctgtggaaatcattatcatcatctgaggagtttgaggtatcatcttggcctgatagatagcaaaatatcattggaatgattttccagaatccctcaatctctgattgtgttttacatttcccccctaatgaatacatctcaaatacttgtaaatatgtttggtagcattttaatgctatttaacttgataatttcattacttgtttatctcttgtgggcagcaaaatattttaagctaactaaagggcccctgacaatattatggttctgggggaaaaacattgggtggtcttgatggaaaaaacactttggctttaaacatggcatttttacaacttcaaactattaaaagttgttccttttctttaaagaacaaaaatttgctgaggcctc

SEQ ID NO: 2183 - DNA, 885 bp, Glycine max
  misc_feature (765)..(765): n is a, c, g, or t
aactttaatttcaattattatagcagtagagaagggtaaaaatcaagctaagaaccacttggttaaaaagactcaaggtatcccaaaagtttaacgtgcaaggagaagggcctaaaatggttttgatctacatctctaacaacattattaccctgggactccgaagttatcaaactaatgattttgatctatgtcgtgttttagtccttatcattaagtattattgttaattaatgatatgataattacatgacttatcagataatctactaatataataatatgatgtgataattatgtgacttattaaataaaccattaatatgatgtgacaatcaaatgatgaattattgattgaaaatactttatgatgatttgatcctacatccactaccatctatcaaaactccaagcacccccaccataatcctcttgcatccaccatcaaaattcattttattttctattggctctgtacctttcttgcgtaaccattatcttcacttttccctctatttgctttcttctctaacggacccatcaaacttcgtcagccattgtcatttttaaggaatagaaccatcgtcctttccctacatggaccatttgagtattttacatctcaaaaatttgaacacttaaaatggaaagttttatttttaaccttaaatacattctttcaattatttatcccaagtttaaaaaaatttaaacaaaaaacattcagggttatatggagatacttaaacttttttttaaaccatnctaaaaagtgttttgttgcggtttttcaaaaagggggtttttttttggggagccgaacccctttttttttttaagccccccgggggttttttccccgaaaaaaccccccccccccccccc

SEQ ID NO: 2184 - DNA, 792 bp, Glycine max
agcttgcatgcctgcaggtgaaaaaagcacaattgtatgcaacttataaacaatgtgtctgtctctatataaacaaaatatgtaagctaaccattatgacataaatagctgatctgcacaagttctcgtgcagatacacaaccatattagatcattcacataaagtatgtcacaaaagtttggagcagaaacagcttcatgacataagttactggtgtcaatagtatcccatatccaaagttgttaaatagagtgcattcaaattaacatccaaaatacagccataaaaatgaaggttgaattacctgaagacttataaaagatctcggtagtattgctggagctatcagagcccgcagctcttcactaatatatatatcttggactgtgatctgccagatataaattggatgtttcaactgatgttataacagcattacggcaaataaagaagaaaacgttgtattcgaacccatataccaatagcaaatgtgatctttttctcaatctaagatagtgcagaagtattaagtcttagttcagtataaattatgctaggctacttctgccatggaaaaaatgttacaacttataaggaataccaaaaatgaatttaaatgtggacgatcaccccaacctttggtgtttgggaccattttttattaacaagaaaagagaaattatgcattaggtcctaaaaaaacccactatgtttgatagatttgcccctaccttagtaaaatgagcttagggaaagattcctttgaatgaggtgatttcggcggtcacttt

SEQ ID NO: 2185 - DNA, 645 bp, Glycine max
cctgcacggtattatgtggttagagttagacaaataccaaaattagtatatgccaatggcaatgaatagttcagcttctcaaatagtattagtttagacaatggaatcaaaatactaaacgaataatttccgtatacaaccctgtagaattactgcatggaagttaatctactggcatagggccatgttataaccatactgaccttgccaagcaatggatattgttactaaaaccctctgtgtcaacattaaatgctgtggtggaccaaatattagatgtcatgaatgtggcaaataagtatggtaacaagccccatgatccatcacttgcaccaccaacctcctccaaaattgatcttacccaaactgaatcatgatcattaacaacacctacagtatttgccactgttctcattctcctgatttcttccttttctggtactccatcaggtagatgcttaatcaccccatccagcaacgaatgtatcaagggagcaccttcttcaagtatagcaccagaagcctcagctagtagccgatcaaaagccagtgcaaggccagcctgaacacaaaaaccaatcacagtttccagatcaactatttgcttcacagaagcttctctttcaattctatcaccagcatgca

SEQ ID NO: 2186 - DNA, 818 bp, Glycine max
  misc_feature (736)..(736): n is a, c, g, or t
ttgatgagtggtgggagcagccagcatcgacagttgttgactgggtaacagtggatgggcaaaatgtaactgcctggcataatcatgtgaaacagcttctggcattttgtgacaaggagctattgtgatttgtgattagaattgtaaagcacgtggagtgaacaaagttttgtgaagtcttgttcatctttagatttttagtagtggggtggtttgttcatgttaattggcagtgattaatggcattgaatcttatgattgtagagctttgtaatgtaatttgatttattatctggctgtgattaattgaagtttatttactgatggcttcatttactgaactctggtttcgtctggtgtatacaattagaaccgatgaggaaaaagaaaagattaagttgactgaatttgctgaggggatcctagtgcagtattatattttcttttatttgaaaatcacaaggtgtaataacccaaaaaactatgggtgatcacgggttaaatccgatcaaaattttactgtttgagttgggcttgagttgcatttgtgtgtgtgtttttaagatccaatccaaaataaatcgattattggattgaattaattgggtgtaaatatttttaaaaaaatatttttttagaataataatttatttttatctaaaattttataagtatgtaatgatgataatatttgtataaacaaataagcgaaagcagttcaccaattaagtaaagntatatattgatttgtcaagtacttcagaaaaaagtgacgacattatttgtataaacaaagcaagttgtaataaaatgatgta

SEQ ID NO: 2187 - DNA, 697 bp, Glycine max
cttggggtttgatcaacttctgtatcgatagggatctggctaaagggtacgttatgatggtgttatcagttgatctgatcatattcctttaccaacctgtcaagcaaagagaggctttttgtggagtaatataacctatcaaactgctagcaaaatagtttatgaaagtaaactttgtaactaaaaataaagttttggaattgccactgcctctgtaaaatgttaaactttatgcagagaagccattgttactaaaaaaacagtatatatctactcgagattttgaatcatgtggcttgtttcttgatagccaattttaccgagcaaggaaggagcagcaagagacacataaataattgtcactatcactgccactctcccagtgccagctttcacgtgatgggatccaagaaacaaagaactcttgccttttggaattgcaaactgaaacccacttaacttgctaaacccacaaggaatgaaggatttaatttttttttctaaaattcagattggcattcataaattttaagacataaggagtctagttatacgtaagtcacatatgaaaaaaatttgagacacaaaataaagaaaaaataatttgttattaaaaaaatcaactctcctaacttgcatgcaaacatacacttaatgaggtaaaaaccatgcttttttgacgtttcctatatacaaa

SEQ ID NO: 2188 - DNA, 689 bp, Glycine max
ttcaccggcaataaagtataaaaaagctgagaatgcaacctcaacatcaacttatcctgataagaaataacatacaaggcaagttctaggatatccacatgctatattataacattacaaatactactattaaaatcttttagaagagaaaggaatgggaatataaatctaaaatgggtctagattgcaaatgaaataaatgtgacaccaacttaagctgcacatattggtggttgaagttgggcaccatagtgcgtcaaaattgagcaacagaagaattaaacagctttaattttggctagagacactggaaaaccgcgttattattagaagatgaaaggttcggtaattgttattgcctgaactccaaactccaaacaaagaacaaaaggaaataggagaacattaagtcttcatgaatgcagaaactttgcaggtttctcacgcatcagagatggccaataaactaggatgaaaaggacagacatacaatgatggtgacgttacagcaacttctaatgctcaagctaagtctaacatagcagctacttgtaaaatcaacatttatttattccacaatatttaaaacaaactgagccatcacaaagtggcaatttaatattagcatatagaactaaggaattaaaaagtgtattatggttatgtctatccaaaaaaaagaggaactt

SEQ ID NO: 2189 - DNA, 668 bp, Glycine max
gaccagcagcagggtcttgttgaccataatagtaacaccagttcggggaatttgattcagaacagtggcgaggtaactgcttctggaactagtagcggcggaacaacgtgccaagattgtggaaaccaggcaaagaaagattgtaccaacagaaggtgtagaacctgttgcaaaagccgaggctttgattgtcctacccacgttaagagcacttgggtccccgccgcacgccggagagagcgccagctaatgacgtcggccaccgcagctgtcgccggttctagtggctccacttcgggcactaaaaaacctaggctcattgcttcacaaaccacaacaacttcccacacttccacttccaacaccacccctcctagaagctttgacactagctctagccatcaaggtttgtgctttcttttcataataatgaaatgattttattttgcatgaatacacatatattaacataaactcttgcgttagcgtcagggggtctggtgttgagcagggtgcgtgatgcatgagttattgtaaaatctcttgagactatcttcgattctcacggagaaaaaactcatgcattagcttcttttgggttggtgcattggcatggggtttgggagttgaaagggtttttatagttgtttaattgtgttgtgcattgt

SEQ ID NO: 2190 - DNA, 662 bp, Glycine max
gttgggattccttataaggaagaaattctaaggttttgtgatgaagtccatccgcttgctcaggttggcttattctcccatgcaacatatggaagtgtttcatagtggttgccttttaccaacatcatggctcaatctgtacttccataatagttcttcctgtgctaagatataaatcatggttttttaaactagagcgaaccagccagtttaaccgcttgaatgggaaaccagtgactagtccagagactctaaaaaatcagagcattgcagaaccagtggaaatcggtcaaacaggtataaaaccagggttgaatcaatttttattttattttatttttttgttttttttattctaaaatatttttaagataaataaaaaatattcttaaatatttcatataagtatcaattattttctcaactattattaatttttatcttataaaacatataatttagtcatttatactaatttatcatttttttagatcctaatttttaattatatattattttattacttaaaatattatataatattaaaaaatataaaaccagttcaactacagttgaatcattgaaccttgaactagtgtcttcactagtccaattttaaaaatattgatataaattgaaaaacttagacctaaatgactctt

SEQ ID NO: 2191 - DNA, 733 bp, Glycine max
tgtaggtttgtgattatttgattatactatttttaaaatggacaaaacttggatacatgcaatatcttaggtactgttggttggtgttgttctccaatcaaatttaaagtttcacttcaataatatgcgaaacaaaggaatatctattaaatgacattacgcattcctgaggtgaaactccaaatcggattgaagaacagtgctaacagtaagtaactcgtaatgtatctaagttttttccttttggcattggccttagacatgttgtgaattgaacttagtttatggggatgaatgactaatctcttaggatatctcttattggtgatgatatctacataacaattttaatttggtgatgggaacataataaataatctatcactagtttgcatccttctgtcattaattgccttggtaagtgtcttgctgttttctcatttgttgcagaaattcttggttagattttggtcctctttgcataaattctcttgtaaacacttataggaaaatgaaattaagaacttctcgtatgagctaaaatcaacttatatacttcaaattttagagaaattagatgagaaaatttctatcaaaatttaaatgcataagtgatttagctcacgccattcattttacctctattttcttttctttaaaagctggtttatcaacaaacctatctttgaagaaaagtcctattgcttatttaatttgtccaatgtgattgaca

SEQ ID NO: 2192 - DNA, 662 bp, Glycine max
tcagcctcgactttcttcctcccctcagcaatcttctgctccacctcagcctgcgtctccttcttcatggtgttcagcgccgctgcaatctccgctcgagcagccgccatgacagcattggccttctcctccagctgcttcacctcctccgacgtgtccttcacgctgctcagcttctccctgatcgccgcgtccctctcgtccatgaatttcccaagtggggtgaaccatatcttgtccaaggcaaccatcagcagcagaaactccaccattattatgggcagggtgaggttgaagtcaaagagtgctgctttctcaaattcttctgctagggagggtctggccaagaccagtggtgctatccctcccaggagggacagcatctggggctttgaaattgggagtttcagtttcaaggttggggctttggggagtgaaatttggagaatggggagttttggtgtgggggaacgggaactggtgcagactggaaccagaggttttgtggaagccataatcatgtttgccatggccaccgcttttgtgattaggatgtgtttgcgtctaagatcagtctgagaggattggatggaagagaagaagaggatttgagagctagactatctaaattctttgccacacaaattgatgaggttgtgtgg

SEQ ID NO: 2193 - DNA, 813 bp, Glycine max
  misc_feature (670)..(670): n is a, c, g, or t
agattaattataattatgacttcactggtagcatatttaaatttctaaagatatatagaattttgattggcattcctcatgtattgctaataactagccagtgaatcactttttaagtaacttggatcaaattttgcatgatcaatgcattcattattatatgtattattagttttttggtatgataactttatgaggggacttttattatagttccatcacttccatgtagcactgaatcactgatacttgtataaatttctttagcaaatttctcttgtctttgtatcctggttcccagttaaggaaaaatagaaagtttttgcaaaccaatacttgtttttttttttttctcatttaaagataacatctgtttaataacgttttgttatttgtttttttgcatgtgttgaatacttgagtagaggccagagaaatacctaggagatattgcaacttgggacaaagctgaaagtgctcttaaagaagctttagatgattttggcaagccttggcaggtaattatttcctcttctatatgtcttctagaatgtttcatgccagcgatatatagttaaagatattgttttgaacatatggcttctgattagaattcaaatggatatcacaaagtgtaatttgcgtatctaatttcaattcaattttattnctttgtaaaaccttggcattgaaatgaagggatggtggcattctccggaccaaaaataacatcaaggtttctgatcctttgagtaggaaattcccatgggcaactttgcgggttgcaccttttagctggattttatttccatg

SEQ ID NO: 2194 - DNA, 790 bp, Glycine max
  misc_feature (750)..(750): n is a, c, g, or t
  misc_feature (766)..(766): n is a, c, g, or t
tgatcatcatcactttcttcatctgatgttgacgaatcagcagtaattgcatcataaaactcatcctgcatttcatcctcatattcagcactagaaatagaagcatcagacaatttggaatgaacaattgtggtggcattttcatggtggagtgcaggattggctgcaatgtattccttcagacctgaaacattatttagcaaaatatattaaatgcctctggaatggtattcactccaaataagaacataattcgagcaagacttgagaacttcaccaaaaagtggtcaatttaaactacctagatgtagtacaatactaaaaatacttaacctgacacttggcacaatagtgcatatggaatgctcctctcaaattttgagctcttgttcttcttccatcgacaccaggacgtagagtgtatctctaaagtgtgggtcactaaacatcttgggctatttgatgccatagatgtgttcaaatttctaatctcccatgaagatgctaaagccaaaatacaacacatacagagataaaattagtcaatggataaaaatacaaaaatcagtggtcatattttctttcttctaatcagttgccagagttctgaaattaaaagaagagttatagttcccatcaaagagaaatcaacacactcttctcaatacactctccaccattgggtgaaattaatgtggataccacaaaatagtaaataccaccaagcatcactagtcaattcctaagatntaacacaaaattgctnatctacgattaacttttgcacgtc

SEQ ID NO: 2195 - DNA, 710 bp, Glycine max
aatggacagagggtatcttccagcaccacttgtcttctatgcaggttcgacttagtcggtagtcgatctctaattagcctccaagcaaagattgatgcctttgcaggaatctttagtttccataaatcttgaaatgctccatgctgatcttcaccctctaaatgaccttgcagcaatttatatacactccttgtcgaataaagtccattaggctcatgtttccatacccagctatcaggtacttgttgttgaattaccagctgtgagagctccctcatgaattcgtatgcagagtcagcttcattatcaaataattgccttctctaggtcagattccattcccaggatgtatcagaaaaacttcccacttgctggatgaggttgtgttgctgtctagatatctgatacagccttggaaatttctgcattaatgcaactccttcaccattccagcaatcttcccaaaatttgattttatcacccgaccccacattccatgataatccagattgcatcacattattcaactgctgttcctgtgtgaccaccattagatcctgccaccacaatgactcattagtgcctcttttaccttcagccaatgctctccacccgccatacttagactccaatattcttacccacaactctctttcttggtgaatcatatcccacttccactttccgagtaatgctttgttgaagttacg

SEQ ID NO: 2196 - DNA, 781 bp, Glycine max
aaaacttgttattaaaattattgcttgctcccctaaaaataaaaataaaaataaaaattcagcgtgtccttctaaaattgttaatttagaataaaattatgtattaacatataatataaaaaacgagtttttatacaaatttcatgattaaaaaaatataatgacctgataacacattactaataatatacaataaactactagcatattaaaattaagaaataagtaaaaatttatgcatatcatttcagttttcaacatgaagacatacaaattaaaactctcaagaaccaaaatttccaaaagaatattttttcatcttaaatactcatacttatttttttgactgcaaatacttatacttatttagtatttttttgtggtttttgaaattggaattggattttaaatacaatgtcatttttttaaaaataaaaaattgctttcatgtttgtgttgacaaaaatgtccccgcaatttgaccacattctcggcgcgcactgtccctccattttctatataaaccattcactctcgagtttcttcgccaacttaaaccaaaaatatagaagaaaaaaaaaaatggcgccaaaacgaaaaccttcgtctccaatctccatcggtgattcttcaaaccctagaatttacgctttcgattccagtgctcactcctaacttcgatttccactttctcattacgcaggcaactgcgagattacggtggaggccaaccgcttcacctgcaactccgattcaaacggcgtcgtaatctctcttcccc

SEQ ID NO: 2197 - DNA, 650 bp, Glycine max
aatgaatctttcaatgacaattcatatgataaaccatcaagatcattaacttgagcaatgttttggactctttggactacttttgctccggaattttctcctgcgtccctgttcaaatcgagagttgtgaggtgtgcacttagtgaagactcagcaagataccctgcaattcctttgtgtccatttgcagaagctaggtcagctggtgttctaccagaaggatgttctggacatggatcagtcagtgctccaggtgctgcgccgagagagatgaggaaagcaactgtgcgctccctgataaagtaagatgcaagaacttaatgaaagatgaagtaagcaagaaaatgaaaaagaaactcaaagcagtaacaatatattgattctttctagtcagtttatcctagacgttttcattcatgacaaaagactcaggtgcgtccaatcatagtatactataggttttttcagtagattttttcttatagtttcttcatcaatggcgttccatcctgcaaacctataatgaagtatattgagtatcaacaagtaagaacattctaacttctttttaggcacatttcacatattttctctcagcactaatctattttttctcacatactatcactcttgcaaagttgcaattaata

SEQ ID NO: 2198 - DNA, 690 bp, Glycine max
aacaagttgatccaattatataaacaaattttacaaagcatatgtaaatatgcacccatctaaagtacgaatcaacaacttgacaaaatacaaaagtgacttaaaacttcaaaaagtgtttttttttttaaaaaacatattgtataataatgaaaacatattcactcgtgataaacagaacttaacttgtaagaattcagaaaaacaaaaattactgaaacattctatcaagactattttttgtccaccagcaaggcattgccacattggtcatcttagattatctagctgctaatgttacaaagatttatgtgcctgaaactgaatatattggcaattatatgaaagggataactagatatcatacatggcatatcaagaatatgtcatggaactaacataatgatattgtgacatcatcatcatcagaaaattgctaacttcatcacaaatgtaatcaagggcatggaccggagaatgagtcagcagacataaacccaacaatgtctgctaacttctcattgaataaattcatttcttttgttgaaaagatatacttcaaaagttgaaaaggacaaaaaaacagtacaacttagaagaacagcaagggtttgaggtgtgggacccaaatgtaggtccttttggtctatattttaaacacttgattcaaatctcccttgacacaataca

SEQ ID NO: 2199 - DNA, 831 bp, Glycine max
gcagacccttgcatcaaccgcactatgtggcattattcattcagtcttaggagggcagcccctcctcatactaggcgtagccgagccaacagttctgatgtatacattcctgtatgacttcgcaaaaggtagaaaggatttggggcacaaactattcctgccttggactggatggtatctctttatttccttgagtggttagttatttattaaaaggaaattactgttgaattgaaccaattttctccaccttttgatttttagggtgtgtgtttggaccgccgtgttgctcttcttgctggccattcttggtgcatgctccataatcaacagattcacacgccttgcaggtgaactatttggtctgctaatagcaatgctctttatgcagcaggctataagggtgagtatgcaccaaacatgaacaatttttcttaagtaaaatgaaaattggagatatttggatcatatataggtgtcctttatttacaattaccaaaataaaaactcctgtttaataatgtcagtaatctctttcttaaagggactagtggaagagtttggtgtgccccagtcccagagagaaggtaccaatcagattgcactccaatcctcttggctgtttggcaatggaatgtttgctttggttttgtcatttggcctgctgtttactgcacttaaaagccgtaaagctagatcctggcgatatggggcaagtattggttatacttctgaatcctgatgttaagtttcaccaaagaattttatacattacaagatatactaaagtttggtatgacttagataaaccagtttgtgtccttgcgtgct

SEQ ID NO: 2200 - DNA, 671 bp, Glycine max
cagcagcaactactgatgctagttgtgattcggtggttaccactcctcagcataccctgagagatgctagtaaccctgctgggtaattctgagcttcatgaagtgaagttgcttcttttgtggtgaagttttgctcaaattggtttttctgttgtgatccttgcagactcctatcaattgcagaggaaactttgacagagttcctttcaaaggctacaggaactgctgtagattgggtccagatgcctgggatgaaggtttttttttttcttttctgttccttgcaatgaatttgttaagaaattggtgacctttggcatctaaaggacagcttttgtgaatttcgttgtgataccccgttttgaattttctaaatttgtcaattatctcttcatctaagaaaaagttctttttgccagcctggtccggattcggttgggatctttgccatttcacaaagttgcagtggagtggcagctcgagcctgtggtcttgctagtttaaaacctacaaaggtaaattgacttataagaatggtttggatttttttttcatttcctggcctgccattgaatgtctgtaagctgcttggaatttgaatttctgaatgccctgattttcacagattgcagagagccctaaagacgccatttggttcccgactgtccgac

SEQ ID NO: 2201 - DNA, 825 bp, Glycine max
acatttggttaattttgttgttagttgtacttataattatcctacttctgttatttgtgcttggcacttaccaaaagggaaatatattgaaccgtcagaggtgatgaagatgatagtaccaaatataaaacagccaggtagttgaaagaaagcataaaaatatttgacttgaaatatatttatgtatacagtgtaccattgaaggcctttatatttattgaagttccattatgtgtacaggaccaatggagttcattagtgggaaccttcggacaattagctactttgacttccggacattgaggagagccactaagaatttccatcctcgaaatcttcttggaagtggtggatttgggcctgtctatcaggtataggtactaaatctaatgtcacttgctttaataggcaattttgtttgttgattttgagaacctgatctcttaatcatggtgcacctatgttagatatgagtccttttaaagaatgccctaagggcttgattaaggaataataaatagaaaaattttaacagaaatcaggtggacttgtactggaaatcatggtcgtgtgtgttagtaacactttttccataaaagcttttcagttttgattcattaagaagagcactaaaagcacttggtaatattctcctaactatattaagaaagcagtggaccattttgttgaaattcacattaatggggtgttaaaagaactatgtttggtagttgagcctgacataatgtatgttctcctatagtgggtaccgtactggaattcaattgttttgacaggggaagttggcagaatggaagcttattg

SEQ ID NO: 2202 - DNA, 685 bp, Glycine max
aaacttgctcagggcttgagctttcaggcaaagcagtagatacaacctgatcaataagttgccttctatattcattatcaggatcaagaactttagcccacaaatcaccatccattctctcaacaacatatctgtcatcaaaatataagtatgtgaatgttgaattaaagaaaattgatttggtggattaaggaccacaaatagagctcctctaaagtgacggagtatactttaaactataaagtgcagttataaccattgattagaaaattcatggttgagaatatgataaaatacaagtacagcaaacttcgaagttgtaacaataataacaataatcaatggttgtaactacactttatcctgcaaagtatactctcactttagaggagccaatatacaccacaaaccttgcttgcagtttgaacaaagaatttttgttggtgacattgataagttcatcgtcacattgtcctcgccgataagctacaactgctaaggtgggatcacgtttctcacaatacttgcccacaactcgagaatcatagtatgggttggttgtgaggaaatgttctgggttgttgttgctatcaatgataattttacccagtgcattgtgaacatgtacatgctggcttgcctcacttacaagatgttccaagaactgtgtgagcaacgaagccga

SEQ ID NO: 2203 - DNA, 753 bp, Glycine max
  misc_feature (675)..(675): n is a, c, g, or t
  misc_feature (682)..(683): n is a, c, g, or t
tgttgattctaaagagctgaatgcttgcttgttagcatggtcattgatattttcttcaagtatcttaacatattttgagttgaagggagagtatagataggaataacactagtaaccttgtttgaagttagctattgtatatacatgacaaacaataccagatgaacatttctttaggcttgaaatgttctgctagttgattgtctatttaaggtgtttattgagttggttggaagctttttagtgttaatagaattgcttgttgatcacattcataatgtagaccctaaaatgaccatacccgccattttaccactacttgtttgtcctcttcactattatgcgtatcattcttggccttcctcaattgatttttctacatgcaatgtttcatttctagtaacatctgatttttagtctttgtaaccgcaatgttcaatttatgctgggattcacttagggctacattcatttcaaagtggtataactttaaacgtcaacctgatatagcttgaaacagtgatgagtttgataactgcgtgaaatttcatccacgttaattaacatttatattgacgtacgtttcatgtttttactcctggatctaattgtttggcaaagggcagtgttacttcagatgtcgaacaaaccatgtatacaaaactttctcattanggaatgnncacttacattttctgttaatctaattaattactataaggcatatcttgttttgatgatcgacgattcaaa

SEQ ID NO: 2204 - DNA, 637 bp, Glycine max
gaaagtcaagagcagaccatactggatacaattggtatgctgcacgtcagtcggtcctcggtgaaggtagaaaattactaggttctgataatgcttccactcagctctccactctgatggattcttgttattgacatgctatttgcagtatttttctgtttttagtttgtctttaggtgcatattttgatcatgtgtcttctgttcattttggtagcctcctaggagtttggttttatatgttgaccatcttcagttattatttcatccttgcaatcatacatttttactatacttagtaacctatcattattttggcctggacctatattttagtccggtcttagttcttgaaattttggtcccaagggtcggggcatattgtctctgtcttagattaagtctcataataacttgcagtttctgccttttacattgggattcattcttgttaaatcctttaatagtagaagccctaatgagagaaatgggattgagggattctgctttaaggatctcattaatacctgtatatagagtagactcaatcatgcatgtgtgcatgaaggaggaattcgctttcagaaatagctgtaaaaggcgggagaataaattgactctgaaaaaagttcacataa

SEQ ID NO: 2205 - DNA, 822 bp, Glycine max
  misc_feature (760)..(760): n is a, c, g, or t
aatatctcagaatttgagtacactgctaatgtccagatggaattggagtaaaatgtggataacaaacactttaaatagaagttactgacatttgttgttccaaaaaagagagaaataattttggtgttgtttgcatatattcaaagaaccagttacttttcaaatgcaaatgtctcagaaacataaaatgtcctatgactctagcaggttcaccagtgagcctgtgcaaaatctggggtcatgttgcttcctgcaaagtgggaacctagactactactcatcctctgataacagtagccatgcaacctacccttctgtttgtactttcgaacaatattgcacccttgaatcttctacaaacaacaatttaccttccctaaattcttcatctactgtcagtttctcacctaacaatagcccagtctcaaagctgcaatcaaaatcaaacgtattgagttcgcagaattctcttgaacttgttaatgattcgctagaaaacgaatcttgtttgacacttaacaatgacgagctgaggcacaagataagagagcttgaaagtgctttgttgggacatgatacatatattctggatacttatgataccataattccagaagaatctgattcatttatgttagaggcagaaagatggaagataatgatggaaatgatatctagaggggatttgaaagatatgctctgtacatgtgcaaaaacagtggcaggaaatgatatggagacaaactgatggttgatgtcngagttgcgtaaaatggtctccgtgtctggcgatccaatccacgactgggagcatacatgttg

SEQ ID NO: 2206 - DNA, 644 bp, Glycine max
gcatgcctgcagggcagcatggatcacagtcagatgtccatcaacggggtaatcatatgataatcactcactagagttaaatagtgtgttcatggaacgtcttataaatgtacatgatgtcagaaatgaactgatattatttccagaaacagtgtctttggaaacaaagacggaaaaatagagttggaagcatgactctgacaaacactttgctatctgcaccttccaccacatttttttaattcattttcatttttctatttattttgtaatgtgtaatttcttttttattcacgtgaagattttctcattcattatgaagctcttaaagatcctattttatacatttttgcacatattagttaacttttaagacattgttttcttttaattttgggtgattatgttgcttgcctgagtccaatacaattagactgtttaaaatattttgaatgtaatttctgttagattaaataagcatattgacacttgtagttttaaatgactctgtatatatgtttgttcggtgtattatttaatattgttttattttcacctggaacaggaacaactgggacaggcagtggaagcacagctcagactgaagctactgatagtttgagtcgacatcaagctagactcca

SEQ ID NO: 2207 - DNA, 673 bp, Glycine max
  misc_feature (630)..(630): n is a, c, g, or t
ttgctcctctcttattagctaatgttttaagtcaagaagttgcattattaatgtataattgtttaaaaattatatattttaaaaacatataatattagatcgaattagaataatctgaagtataattaaaacttgttctcaaaatgctttaagtaattttttaatcttaaacccgtcaaaattttcaaggagtccagttgagtcaactgggacatgaggagtgataataccccttattagagttctaggaattttattttgtttttttattcataaatatttattttttaaaactaaatagatacagttatttttcaaaagtcaagatttatcactaaattattattaatttaataatttatgaaaataatactatattaatagtgttatataactaacaataataataaatattcacaaaggaagaaaataaacaaacaaaaaataagaaaaaataaaaaggaaaagaaagaggaaaagtggtaactgtccatttaaccagtgttcacggcacccacaaaccctaccctataaaccaaattcgcaatcccgtgttatctacacttccctttccattcctttcaatttggagaggaattcatttgaattaggggttctcttttcctttgnttcattatggacgctcagaaggctttactcgacgaactcatgg

SEQ ID NO: 2208 - DNA, 658 bp, Glycine max
ctagtttctccattgagaagttcattaaaaaagaagaggaattactggaagatcaccaagataatttgtgctcacctgacacttcaaacaagtctgctaagaatggtgggcaggtaggaaaggcaatcaggctcttctcattgtgctcgccatgccatatatggttctgtttactttggtttattttttcattatcttggttcatttgttttccctgattgtattggaattagtttgtaacgtgcttgtacttttcattggtgtagagtttgtcaccttgtaaaaatagccaatccatatgcaatagagaaccacagaatggcgctgaaccacaggaagcaaaatgggatctttggaaaactttgaattatttagcagaggctgcaagtaggagtaagccttttaagtctaatgtgcaagcgtctgatgctaaactagaatctatgaaaatgactgatagtgatgctaaagtgctgaaagccaaaattaaggaaaagaagcgcaaggcaaaagttgaagaagaaaagattagcactgatcatgcctcttcagatacatcaaaacccaacaaattgcgaagagttcgccaaaaaaaggaacctgtttttggagaatctagaatatcacctcaggctgttctggatgctaccgacagaaa

SEQ ID NO: 2209 - DNA, 629 bp, Glycine max
ctgcctgcacattttatacaatatacccagtgttgtcaaaagtaaaactcatgattgactattggtctgtttgtaattcgtttgtagtagagttaactggaattgaatcagtgcattgtttagtaggatgaaatgaacttgtgtttgtgtagtgtagaatctggtgtttgcttctaactatattttattctcttctcttggtttccttgtttttctttctagattgggcaaggaacttatagtaatgtgtacaaagctaaagacatgatgacaggtaaaattgttgccctaaagaaggttcgatttgacaatttggaacctgagagtgtaaaattcatggcgagagagattcttattttgcgaaggttggatcatcccaatgttgtaaagttgcaaggtttagttacgtcaaggatgtcctgtagtttgtatttggtgttcgattatatggagcatgatttggctggacttgctgcaagcccaggaatcaggttcacagagcctcaggttagatcaggtttgccttaaaattacttgtatcatttggtaattggtacattttcttttcaaggagtaggatttgatgtcccctaatactgtgccttcattgcaggttaaatgttacatgc

SEQ ID NO: 2210 - DNA, 690 bp, Glycine max
gaattgacaagttaggattcagcttaaatagaaaataagtcaatagattaattatttcttcggataatggcaatcgtgaataattatcgttatcaataatgtgcccgttcccatgtgtagaaaaataaaagatgggtaataaggaatttttttaagcaatatccaaggtaattaaaaaagattcagttaattttttttttttaaattgtccctataatatctttattatttaatgttttgttagggattttttgacttacaaaacattttatattaaaattatttttttcagttgttcactatactattttttatatgctttttaatcatgtttggcctttttttttattggtacacaagagtataatttttatggaagtggatctaatgaactaattttcaagtctcgtgagttagtcccaaaaaaaattaaaattgtgtactaaaattaaaaaaaaaattattattttgtgatgataattttgactcactttaaaaacataatcactaaattaaagtttttacatgtaagaaactaaaccgaaacataaaagaagaaacatataatttagcctagtaaaaaagaataataagaaaaaaaataatagagagcaagtgtttttgttttgtaagaaaaataaaagagagaaaaggataaaagaaaattggttttgttccttgtattcccta

SEQ ID NO: 2211 - DNA, 821 bp, Glycine max
  misc_feature (798)..(798): n is a, c, g, or t
attccataacggtttgcaactcttgaagatcgtgactctggtcgtgtcactcctgcgtatcgcgcctgggagcaacaagattagttgttcctctcatggcttcaatccaccgtttctgctcccattcttcgaaatttcatcggctgcactagtttgtggcttctctaggacaaaatccacaactattttcatgctcatacaaatgcaaaggcacggccacttcgtacagagctgcatcaactcactcttgaaggtcgtactatttctgattatttgactgagattcagaatcttgttgattcttttactgctattggtgatccaatttctatttgcgaacatgttgacattattattgaagaatgtgtaccagaaaactatgagtcctctgtttcgcacatcaataatagatctgaacctctcactattgatgaaatcaaaactgttcttctcggtcatgaggctcagattgacaaattcaggaagaaggcagtggtttcggttaatgttgcttccacatccactgtgtcttctgtgactaatccatctcatgctaattttggaggtttcagaatcagaatcagagtcagtataaaaacagaggacgtagcagtattcagtgttacatctgtcagaagtttggtcatgatgttgccaactgctggcacaggccctcaacttcctatgctctgctccttatcctatgttggcacaatttcccaccatgcctcagctttattccaatttctttggagctgctctgcatttccctcttatctgtttatgcaggctcctgtntctcaacaatgccagcagccact

SEQ ID NO: 2212 - DNA, 875 bp, Glycine max
tgctgccccctaagtccaaaactttttaaatatttcctaataaataaataaatcaccccctctaatatttttcattcatgagtaaatctatatttttgccccattcccactcaaaacattatctgttggttctgtccatcggggagattataacggtctaacctatcataagttgatggattaaacaagtttacttatctaaaactgaaatattaaaaaaaatatttttaaaaaaatgtataacataggaaataatacaacaaaaacatgaaaatacgaaaaacatacaactgcaataaaataatacaatgaaaataaaataacccaaacttttattgacaattgaatcatgacacttaaacaaaacattaagatgaaagaaaagtgaatcaatctgattcattacagatttaacaagttttagtcggatcaatttttttttataactgaagtagactaatttttatcaatccgatcaggcgcaaacccgtaattagtttgttgtgactcacaggttttaactcactttataataaatacatttctactattcatcaactcatttttacgattggtctctattttgaaaccaagtatcaattttttttagaggagtattaatttatcttcttaatcctagctacgagtattggtgaaaaatgcttaatttttttagaaactattattttggatttttaaaaaaagattatttttgtacaaagaaaaatatgagactgtattttttctacaactctaattaagctttcttaaaccaattggctaaccaaggtcaacctgaaagaaattttaaaaagtccccccttttttaacaaatggcctttcccgaagaattgtaattaattttttttattttt

SEQ ID NO: 2213 - DNA, 826 bp, Glycine max
  misc_feature (735)..(735): n is a, c, g, or t
  misc_feature (786)..(788): n is a, c, g, or t
aaatgaagttgatggtgaatatgaagggtctcactcaactggttaaggagaaatgtagtttagcttagaaaactttgtagtaagaaatcccagttccattcttccttgttttgtaataattttcagctaacatgtttttgtaggtgtaaattgtcattattcttttatctttgtaaggggtatcatagcaaaatacagaatacatagtgctgcttgcttcttcttctacttttgatgagttcctgcttgctggtactggcattattaacataaatctagtgtttcttttttttattttattttataacaaactacagagtaacttgactatgaattctgcgtaagaagattatgatgatacataaactaactaaaagtctgaaataacaaaaatgaaccagttgccattggatcatcacctccaagcacaagaggtaataagaacttgattcatccaaccaagacacagagccccatctctctcctctagagtgtaatgtcctcggtagcttcgctgaagattttttattgaacaagtaataaacgagttcagtggatatggtgcgaatccagccatagtaaaacgcgatctccacttcttcagaagctcgtgacgttccactctttcctgcccttcacatgctattaagttgacaacttctcgagccaaacaatgctgctccacattaatcctttctttgtgctccctcggcagagcaacatcaattgattcanaaatagccaagtagtagttcatcgtctcaacgaaacgggggataatgggannngtgtggtatgtgattcttgctcaactagtgtcacaatc

SEQ ID NO: 2214 - DNA, 661 bp, Glycine max
attatttgttatgtgtttttggaagatcaccttctaacatatgaatgcatggcaggacattgcatacgcaaagcttgcaaatttggaaccccaatatgcactatgtgagcatcttaatttattttaagaaagcaaaacttggatatattagttcttcagttgtgttttgacttggctttccttcactctgtgcagacaccagctttgtgtgtcctcttgtgtatgctttcatgggaagctcaagagatattgccatcgggcccgtagctgtggtgtccctcttgcttgggactatgctaaccgatgagatcagtgacttcaaaagtcatgaatacctgcgtcttgcatttactgctaccttcttcgcaggagtcactcaaatggcacttggtgttctcaggtatagtatatatacaacttttggcaaaccaaaaggctagtgcagtggtttaagcccccaatgtgttcacataagtaagaacaattaatttagtgagagaatccgtatttaatttttatcatatgtaaaatttccatgcgcgaacaacaatcatgcaccatgagcggaattaacctctgaccagagggttgaaggacaccagtaacctctgacccagaccaaaaaaaataaaaatacactactgttggcaatgatactctt

SEQ ID NO: 2215 - DNA, 668 bp, Glycine max
aaaattgatggtgactactatccagaagtatgtgactttagtcataattattgtggtagtttttagttcttctaggtttctggacttattgttctggtatctgttctaacctataaatgattctgtgcagacattatgtcgaatgtttataatcaatgctggtcccggttttaagctgctttggaacacagtgaaatcatttcttgatcccaaaactacttcaaagataaatgtatgtgtcaattatttgatctgtttttgatttttataggctttcaatgaaataatcatccttttcagtttacagagataatctgttggtatagtattaattaattgatacttcaatgttccattaggttcttggaaacaagttccagaacagattactagaaattattgatgcaaggtaactatgcattaatttttgttaatggtgttatttacttatttatcaatcagcttgtattgttatttggaaattctgactatctgcgtggtttgtttagcgagctgcctgaatttctaggtggtagttgcacttgtatagatcaaggtggttgtatgaggtctgataaagggccatggcaggatccaaacattttaaaggtttgctgcttaaaatgtaatacttagagtctgattttaactaaatattaagtatgctt

SEQ ID NO: 2216 - DNA, 866 bp, Glycine max
aaatgtcatgtataaaaaaactcttggccaagtgactaataataagtattttcttactgtcatgatatgaaaaatatatagattttgtgaataattaatcctgatgagaaaatttgattaatcttttaagatattttcctctaaccacaagactaataagtgtatgatctaaatgtgcacactctataactacaaacaacgctcattttaatagtttttaaattctatttatctccttatcctgttagatatacatttacttctttatcttttaagctgtcaaatttggacaatcgttcaacctaacataagaagtcgaaaagtctaagacagggatagaacgaccatgcgaaattggtggtctttatgggccgatggttagcaccttctctgggtgctttgcatcccattttgaaaaatatttcataaacatccataatactatcttacacttagacagagaattaaaaaagagacaaaattataaatatgatagaatttataacatgaagaaagaaatagaaaaaaaataaaagatattgatggaatatttagattatgtatgtatatcattactctatctatttaaagatattcaaagctaatcttctaatattttttagatgagtgaacaaaataaagatcttctactctatcgaaattgattttttaaggggattactttattgccttcaaccatattgactggtaataggttaatgttaacctataaaaggtgtgcttttgcgggaggaacgtgatggaaactctatttggttaaaaaagatattccagttcggtcacttaagattcataagggccgattattttttataaattggcttgtttaaaaaaatttttttttt

SEQ ID NO: 2217 - DNA, 795 bp, Glycine max
  misc_feature (742)..(742): n is a, c, g, or t
agtccctccgcacccgcggcggcgcggagtccgggccgagccggtggacgagcccgggccacgaagaaaggcccaagggttacctcttcaaccggacgcctccgcccccgggccaggcccgcaagtgggaggactgggagctcccctgctacgtcaccagcttcctcaccatcgtcatcctcggcgtgggcctcaacgccaagcccgatctcaccatcgaaacctgggcccacgaaaaagcccttgaacgcctcaagatcgagaactccctcgctgccgccgctacaactaataacaacaacgacgagtcatcctcctccgacgaatcggactgagtcgactcggatccctccaagttaggttttgttaaagtgaaaagaaaataggtttcttcgctgtaataagggtataacaactctttgaatttgaactccttggttacacttaattatttttcttgtgttttgaattttgcattgtgatgatgatgatgatgagattgtcgactcgcttgttattggtggtattgactctttcttgaatgtggataaagctttcctgcgttaccttgcgattttttttttttttttatggtttggtatttaatggtgggttaagggaatggtgggggtggtggtggtgttatctgaattttgctgtgatcggggagggtgcaatagttgaattgaacgtagaattgtcttgattttcaatgggattcccgaaatgaaatggatcgttnactgtagtctaggtggaagttacatgatcattgaattttaagaggcggaatgg

SEQ ID NO: 2218 - DNA, 812 bp, Glycine max
  misc_feature (683)..(683): n is a, c, g, or t
  misc_feature (724)..(724): n is a, c, g, or t
  misc_feature (738)..(738): n is a, c, g, or t
  misc_feature (743)..(743): n is a, c, g, or t
tctgggaattcgttgtttccttcttcaagtcctgccacatcttttgaacttggcacctctgctccctcttcgccggtctaatctgttagctccaatgtggtccaagttctactttagttggcagcccaccaagtctgaatttggttccacatttagtacatcatcgtcatccactgcgtctgttacttctgccagttctccctcaatgttttaattaaccaccagtgcatcaactcctcaattcattcactccagcagcagcagcctctacctccacacaagtcagcaacctgccccagttcaatcaagttttgtatttggaagcatcaactacatcaggagggagccctttccagtttggcagtcaactgagtttcagtcatgggtttcaatcaagcaatcaagcttcaccgcagcatctaacttagaagaagaatctttcttatgcttcagctcatgttccaagtttggagcatttaatttatatgctctagcttgagggggagtgttaaatatatattgtagacagctgtattgtgtagacagctgtgtaggtaaaaggctgttttgagtgtgtgtgaagttgagtgtgtattaagctttatgtgttgtcatgttgagtgtgtgggaagctgagtatctaatccttatccaaaggcagccccctctctctctttctctgnactatatatatgtataagcaatgactgagaaaaaaacttancacttctctattgncttgnttatctcaaatctttcagcaatgtagtcctatatttttaacagtaagaaaagggtgtatctgctattga

SEQ ID NO: 2219 - DNA, 718 bp, Glycine max
agattagaatgcccaatttattcccagtggaagaaacatatatatttctcttcactgaatatatattttctgagtttaattttctgactataattataaatgtaatttataattaggtctaccttgtttttctttcctgtttgtttcttctattttcccactaataaaaaaatcaattataaattactttaaattattttcaaattaatttttatagaaaattaataattgtttacattgtgttaccaatgatattttcgaacacatgaataaattaacatggaattaagttttgaatatacaattatgataaataattaaaaaatatttttaccatattaatttaattgaaagattttttcccacttttttgacagtaaaaaagatttttcttttctttctgtggtggcaggaagttacaaagtgagttgaataatgaactgactcgcttaccctacctataatgtaagacttgagtacgtggggttgactacattgttgaaataccaacttaattgattgccagtgaaagcaatgaagatgatgctaatctaacctaaccctatcttaaaattgaaggtgagcctttcattatgataatgtcacttttttatactaattttttttaggtttaatttttagaataaaaataaagataattttttttttttttgacagaaaaaaaaagatagtttaaacttcttttaaaaaataacat

SEQ ID NO: 2220 - DNA, 758 bp, Glycine max
catcctttcttcaattaaaggacaaggaaaacaaaatgtgtcttaacatatgaagcaagggatttgaaataaacatactaaattctaaaaattgcaagatatacactgataccccctcacgctatgtatgtagtatgtacatatatgttgcatcgttcctataagacataattaactaacttacacttagtaaaaaagttagttaatttagttattagcattaaatttataatatttttaaaaatttatccttaactttattagaaacttgttcatattttttaatcttcatgggagagagaaaagagacaattcagggtattttaataaaaaaaatagttaatacacaagagagatgaaatgaaatctcataacaaaagacaaaaaaattgttaattatgtcttataaataggcgcctaaagaactcttgtatttcggattagtccatttggtcaacccactgcatgctaacatatttttttcaggttaagttgaactgaatggattgagctgtggactaaaaattgttatttcagaagagtcttttatgagctataggtcggacagagcagcccattaccccatttgattatttaaaattaagttttacataaatttttatgttgaaaaaacttgcactctctaaactttggtaaggcttaatctaaatctaagagcctgctccaagaaagaggtagattttaactttcatataaaactaaagactgttatctcataaatattaaaagaactttta

SEQ ID NO: 2221 - DNA, 704 bp, Glycine max
tgtatgctcgcatgcctgcagacgtgaaggtgagctttaatgtgcaaatctatttaatttattattaattactaatatatcttatgtatgcacaacaccttttactttaattttatcaacagtcaatcaacaattttttcgggcccaaatgatttttaatattgtgtggccactggccaatgataaaaaaatggatacaaggaagaaacttgactttagagactcaagtggtctgttttcatctatttaacaaatgtaaaagtcgggattgcaaagaatattttccataaagcaaaaaggagagaaaagggggcatgtgatatataacactctgcattagacatgggtccttccccatttaagccaatagacatggcccaccaagttgagctcaacccacagaccatccaacatgcacccttgattgggtgactcatcgagttgaccctgacctacaaacccaacatgcacccttgtgactctttggttttattaggataacttgctgacatgtagcagtgagtctgttagatgatgactgaagactaggggatgaaggaagaatatggattctttcagtactattcttgatgtcagaacacataatgtttcaggcagtgcatggatctctttagacaaaaaaaaaattgatgttccagtccaattgaaaatttagaataatttcagataatagcctgttaaag

SEQ ID NO: 2222 - DNA, 658 bp, Glycine max
actcgctacttatatattgcattgtgtaagaaatttaagcttaaaaaactacctcttcaacttcaattatctcagatccagcaggtaatgagggtgcttcatatatgctcctctcctgtacaatgtctggctgagaagtcctatcttggagtgaatcttcaagtaatttaaccttggtcgttaattcatcaataaccttctgacttccaactaacttaatatcaagttcctgagccttggattttgaattttcagattctgaaagaatggcaatgatatgcttctccaatgctggtattaattccttcgaacctttagatttcctatctacaacccattcaccagctcccaaaatatccataattttttctaatacataggtgagctcagacaattcattcttgatcattttagagtcttcacagattctattgagttgtttgacttcatccttcagatccttaatgtcaagatccctagtttcaaggattgattgcagcttttctttatcatgagacagagagtttatttgatcatgcaacctaggaacactatcaataatataaaagagttttctcataggggctgaagtatgtggctccaaatcatcttctttggactctacaatagggattttgatcctatctatcttgtcaaa

SEQ ID NO: 2223 - DNA, 837 bp, Glycine max
  misc_feature (705)..(705): n is a, c, g, or t
aaaagagtggtcattatctgctcgatgaaatgagtttgtatatggagaatttgactaatttagatcttggtggtgatgatcttccatgtcacttccaaactgattcaggagcattggcttgtgttggttgtggaatccttggttttccatttatgactgtgatacaaccaaccgagaaattgataatggaacttcttcctgataatcatcatctagttcaagtttcctctccggactctactgcttgcgttaatagttccatctcaagtaatgccttcatactttttcatattgtctatatttatatttattctctatcacattttcatttgtaggtttttatgccttttttgtgtttagtggtaaaattgaacttgccaactactatggatgtgggtaggtagaaaagttataacttctagagttattatgatgctgctgctggtatctaaattcagatcttgtaaattcctggatctgaatagaatattaatactattgaggaaatcaattgtgtcgtggatctcttacagcttgctagacaccttatttctatcattcctgcactttttctttagtggtatttgatatgtggctataattttgatatattgaattggttcttctatgtaataaggaaccaaaataccaaattactttaaccaaaatatttttttattctcttgcatttaatggaaattcagnatactccttatctcattttttaaaggctaagatgaaatttataaggcatacctctttctcagatagggaaaatatggaaagataatcacctttccatttgatgcgtttcctttatatttgaatctgaatgct

SEQ ID NO: 2224 - DNA, 821 bp, Glycine max
aaggtcaaagtaagtcatcatgaaataaaaggaagttccacagtaagagcattgtttcccaaattcacatttgtttaaatatgaatactcttccaaattttccagtgataaaaatgcatgcaccaaaataaatataaagccttcagattgattcttgaggaaatcaataatgatgaactccagaaagtagggaaacccaagcaagaattcacacaacgaacccacatcacttaaactagcttttaattgctgaacatgaaagcatattcgatcaatttgataacaaaaacgcaattaaatttccaccagagatcctgaaaccacttgctcttgcaccctcacacattaacggacctgattaacaaataactagagcttgaacccaaagcactggcggatgaatacccacctccacaacaggccttgccacaacttcataaacgcgtttttgtgatgaaaattcagtgagcacctcatcaaattcataagtatccgcatcccaattgtttttccgaagtttcaacctcttgagctgcaattgagccagataaacaagttcgattaacaatccaacaaccgcataaagatacgaacagcagccagaagagagttctgaaacaagcaacaagatgttaagaaagttacgggatatatttactatacctctggctgcaattcaacacagtcagcaaaatcagcatccgccaccgattcctctgcattccgtggccgcaatctaacagccactctaactcttgcggggacttcacccaaacatataagcacgtggaatgttaggaccaacccaaggtgagaacact

SEQ ID NO: 2225 - DNA, 692 bp, Glycine max
ttgaaaggaaccttgttataaaaccattcagtccaagaaggagatttgcaaaagggagatacaagtattaaaccaagaacacgctccctatatttcgtctgcatcaaaataggaaaaaataacaaaaaaataagattgacttcatatcaaaacttattacccataattaggtttttaaataataaaaaaaaaactactaagaattggttaaacaggctcctcccccctctcttcaaagtcaaataaggtacatactgcaaacagcgaaaggatataagcaccagacgatattcccatgcacatcactgcaccaagcctggacaaggaaatagttcatgaaatcagtaaaatatcacacacattagattttcccaaaatatatgcaatgttctcttgctcccttttaattttagggcataactatgaaaagaaccacaaaagatcgatcactttctatgttggatgtgttctcaaatacacggaacaatttcaaaaaatgaaagctaacaatacaaaaaaataaaacagagaagttatatggtagttaccgaaaataattgagatcctcaattatttgatctgctaagtcttcagcagaaggaactggatcatcaggacaaattgcagcagctcccaactacaagaactcttgtggaatttccagataaactatgtaaataataatattcagt

SEQ ID NO: 2226 - DNA, 640 bp, Glycine max
tctaatgcaaataattggtataaataaatgaatgcatatggcaaaacctttccctccagtttctaaccccccaataaagagatgataagatacttcttttcgatctgagacaatatcaaaaaatttataataattcacgctgttcaactaactgatttagatcccgctgataaagataagatactttacctgataagctaacttggttcaagtcaagtcaagtggataggtgaaaagtacagctgtccctccagagagtgagcctgccacaaggtcaagggtagggcctttccaaacatgagtaaaagtttgtataatccgtctgcggtattcctcatatgacatataatgaatagctgcgtaaggaataatccttgcaacacttctccatttcctctgcaattcatgaccaagaagatggttaattcaattgatacatgaaaattgcagttgttgttgtgatcaattgaagtcagaaaaacctgtagaaacccaaaaggccttcggttttggcaattatgacagttgatccaatcagccctgtgctctgaaactcggcccttcgtgtctgcaataaaagagtcaattgaaaattaagctgttgtgttgatcaattttaaagtaaatactaattataatt

SEQ ID NO: 2227 - DNA, 643 bp, Glycine max
atttcaatctgtcggcagcactgtaagagtaagaaagtagctagaatagaagactactagtgagaaaggagcttatttcagtagttgtgacagcaaatggagaaaataatatcagtctgcgtattattagcaatttagggaattgttaacttttagctttcttctgttacctcctccttatgctttgttatcataggggtgtcaaaatggctcaaacgcaatagactgactcgattaacccaatataaaatacaagttggactaaaaaaatttaagctcaaaaacattttggcacaacccatcccaacctggtagcctgacactgattagaaaaattaaaaataaaaattgagcttttatttatttatttattttgtgatgttctatactttttgtgatatcataaactcctacgttattttgtaatgagtttctaattttttattatattgagctctgatttttttaatgaaattcatcaagttgcgacctgtgaatatattacgtattgaataactatatttaatggattaatttaaaagtatgataatgttatcgttagttattaaaatagtataatgtatttaaaaaatgatcattgtacataaacaatatcatttatgttgttaagaaattaacaagg

SEQ ID NO: 2228 - DNA, 879 bp, Glycine max
ttcatgcctgcagcagtgtagaatcgtaacagattctgtaatgaaatggaagaaaacttggaacacttgttgtttacgtgtagattcgcatcgttagtttggagccaatgctattcgtggcttggtattgagactgcacagcacaaggaaccacaaaaacatttttttcagcatgattgtagctgtttgggaaggaaggaaaacaaggagtggaaatcagattggtgtgcggttgtctagacattgtggaacatcagaaacagtatcatctttgatgggaaaacctgggatttggattatgctttggagatgatcaaatacaaatcttgggcatggctggaagcaaaggtggaagcatttcatttctctttttctgaatggtattcaaaccccagggtgtgtcttcaaacttcacggatttaatacactcttgtaacaatctactggtttatcaaagggacagggttgattttgttctaggaggtaattatgaaaaggataaatgtgtcccgtagctatgactcgggtgataatctattttccgtaatttgtcatgttttggatcctgtaactatcattggtattgctggtaccgtgttaataataatgttttgcttatccacaaaaaaatatttttttaaaatttattgttttgatttaatttagtcttttattttattttttgattcaatttgtttttctaatttctaaaaagagttcaatttaatcagtcattttattccatcaaaattgttaatggtgaaattcatgtaacaaataacatatcctttccttgagtagacatgtgaatacaaacttaatggagattagatgcaaatggatgatgagaatcaaattggatccaaaaaaaattaaaga

SEQ ID NO: 2229 - DNA, 720 bp, Glycine max
accgtgccagttgatttctgctgattatgttcctcaagaagggttgaggctactgcaactatatccctgagcttagaagcagttttgtgcgtgatgttaagatcagccagcagttcatagaggtaaggcccaggtttggtgtaccccaactccttagattcaataggcacctcagcaatacgcttttcaagttttagaagaagtgctgcaataaagaaaatatcaatctgtacctgagatgcaagaaaatatatggcagaccagaatctagaaaaaaagagactgcatgtgtacacaattggctgcctattcagaaaatccagtaaacacaaatgatttttattagataacatttccttaataatgttgtcaaaatgagtgaaaacatgcatcatgagattgtcacagagaaattggaatttggacaggcattctgtaagattaaataagttcacctctaaggatagcaaaatcatctggattttgtgacttatcatttgatttatctcttctttctattgaaaggtcaatacaactttctgcctcagaaatgcaagcagttagaagccaagaaggcaagtcaaaggaggctgcatcagcacatatgctttccttgcagtaataaaaagcaaattgaatcgcttggataaatttcaataacacatatagcagactgaagtggcgcaataaacttaatacatgataatttcatatttacct

SEQ ID NO: 2230 - DNA, 702 bp, Glycine max
caattatatccacatgaaatgctgtaattttcagttctaaagtttctttgggatagatagttttgcttctttctcctcatgtttcttttgattgatgcttgtcacgtctcctttttatgtgcttttttggaggatttggatcttcctgttccatgttcttcttctgttttaatcaattgatttctgccaaaaaatggtcagtctcaattatacatgtgttgaatggttcatttgaagttaggttaggactcttgttaattcttccgaccatggttatcaaattctcgagttaactcgttaactcttatgagtttatgagtctatttatcctttgtgagttgactcttgagtaaattctttttttagtagactttgggtagactctttaaactttaagtaaactcggtagactcttgagtttatcaccgagtcaacgagttaagaagttaaaaaaattagaccaaaatgtaagtcattttggattgttttttgtctgtttagtattttcaacataccttcatttagtgtgttattctcaaatacaaaaattctcacctttaataacatcaaacccttattctctataacatcaaatcctcgatggaaatgatctaccactactataacatctgcaaattattatctagtagtgatacagctgagcaaaaaaaaaaaatctagtagtgatgcattactagattt

SEQ ID NO: 2231 - DNA, 686 bp, Glycine max
agctaattctttgactggtgatgtgcctgtaactcttggaactctctcaaatttagtaatgttagacctttcatctaatttgttagaaggatctataaaagagtcaaattttgtaaaacttttgaaattaaaggaactacgtttgtcttggacaaacttgttcctcagtgtcaactctggatgggctcctccttttcagcttgaatatgttttactgagctcctttggaataggtcctaagtttccagaatggctaaaaaggcaaagttctgtgaaggttttgacaatgtctaaggcaggtattgcagacttggttccaagttggttttggaattggactttgcaaattgaattcctggatctgtcaaacaatctgttaagtggagacctatctaacatctttctaaattgcagcgtcataattttgagttctaatttgttcaagggtagattgccaagtgtgtctgcaaatgttgaagtgctgaatgttgccaataactcaatttccggaacaatttctccctttttatgtggaaaggaaaatgctactaataagttaagtgtgcttgatttttcaaataatgtcttgtctgatgatcttggtcactgttgggtgcattggcaagctttggtgcatgtgaacttgggtagtaacaatttgtctggtgttattccaaactccatgg

SEQ ID NO: 2232 - DNA, 848 bp, Glycine max
gttgtgatattttcttcactttttcttggttttcgatatttagatcaaagtaaatttttatactgtccatttggtttgtggcatctaggcatctggctcttctgctgttaatgttagtcctgtcaactgtaaagtagaaaggagctcaccagtcaggccttctccaattcttgtatgaatttgtccctgcaaactctgtatgcctgattatgatattagcatgatgactatgatatactagtcatagcttaacaattagaaattaatatttaagtattataactaatgcttcatttcttttaatatttacacaagcatgttggaccagcttgttattttcctaatttctcctggtatccttaattccactatgacatacccttgcataccgtggaggacttaacatcttttggacatctttattatttgatgtctgtatttctttgtgaaattatttggtttaattaattttttgaagttactttatagtcatgaatttatactgcatcttaatacttgttcacaactcattgattggttatgccgttttcaacgaagaatggagttgatcccatgggtcgaaatgtggagaaacctagaactgtggaagatggaatagataaagctaaaccatggcagctgtctgaaattgtggatgctgtccaatgtcggttagttacaacgcctgacagtacagattcttccagcaaggtttgttgattttatgaaattgagattgccattttctattgtaaactgtgtactgtgaactgctttaactctaaagtcatacatagggttgttcgacttttatatacaaactctggtgctggtcttttggcacttgg

SEQ ID NO: 2233 - DNA, 704 bp, Glycine max
ttcccttttcctggagagagtttaagataaaggttgtggatgatgaggatagagttaatggctccaagtaagatttattattgcatagtaatttcatacttctatttggcttcaacacataagcatgatggactatatgtatgtgtgtgtgtgtgtgtgtatctataagcatttgaattaagttcaatttccaactgacacttgcaccatttttcagaagggaaagagattatagagtggtgatcaagtttgttgccagggcaaatttgcaccacttgggccagtttctagcgggtaaatgtgctgatgctccacaagaggcactccaaattcttgacattgtattaagagagctatcatctaagaggtagttttgcaaaataattgaaagaaaatgtgaaacttgaagttctttttcccccctcacaaaagcttcattttataaaggttttgcccaattgggaggtccttcttttcacctgatattagaacaccacaacggcttggagagggtttggaatcatggtgtggattttaccaaagcataaggcctactcagatgggtctttcactcaatattggtatattactcaccatagatatcatttgctgataggagtacagtttttaacttctaatttctctttttactctttctgcatttcatagatatggcttcttgtgcgttcattgaaccttcttca

SEQ ID NO: 2234 - DNA, 702 bp, Glycine max
gctgttggtcaggaagttttaactttgtctgtcaagggaagagaagcaaactcttctccgaaattatcaaccaaaactgtggttgccaaacattctcgttctcctgatgaaaggaaggctgctgtgctacccagaagcggaataaacagtggtccaaaagttaagaagtctgttggagactcagttgagaagaagagactaattgcacagtcagtccgcatgtcaatcaatcttccatctggcagcggtgaaacacgcaaaagaactgccactgcttcacagtccagaaatggcacaaacaatttttcaacaagtaagaagtctgttagagggttggttgagaagaaaagaataactgcaccatcacttcgcatgtcaatcaatctcccatctggtgccggtatgacaagcaaaacagatactgtagctgctaaacccagaaatggaataaactttgctgcaaaaagtatgaaatctgttggaaactcagtggagaagagaccaactaaaaggtcactccacatgtcaatcaatctgccttctggtgcaggtgaaacaagtaaaacagctttagtgttggaacagaacggaattaaaaaaaatcattctaacatttccaaaaataatccagggggtgtttgcagacatgcactaaaggtaattgacattatccacttttttgttttgtaccctacaatttac

SEQ ID NO: 2235 - DNA, 699 bp, Glycine max
aaccaatgcatcatatccaaatttaattaccactgcagcaccacactaaacgggaaaaatcagactattgtccccaattctgtgtatcaaatatactcatctaattacacttcacaatccatttgtgctgaaccgataatactgtcaaaaagtgccaaacttgttttcttattagacactaagctgacttcaactgctatatcataatcgttgcaattagtaaatgttaggattaacttattttgtatttgaaaaagttataatcaaaattttgtggggaactttctagctgacaattgatttttctataaaaattaagcaaacataataattttcagatagattttatttttggtatacagactaaataattttgcaattataaagcttaatattttagaagattcgatgcaaaaggaacaagaaaaggagagttggaactcaccctaagctttgattaccaatgagtgggaaaaatattgtgaaaaaaggaggaaattgcaaggaagaagacaaaagaattaagcaactgtaaaatgttaatggcgagttcttttaaaagatggacctttcgatatcaaatggtccaattttaatacctaggctggcactaatttgatactcccactgcaatattcaaggaaaaataatgagaaaactgagttcataaattggtaagctttaaattgaaaaaaaaaa

SEQ ID NO: 2236 - DNA, 633 bp, Glycine max
aaaaggcacaaattagactgccaatttatattacagaggacttgaacaaaattaaagtgcaaaactcctacctactccaagacttctatatgcttccactactccaagcgtcagaacatagactaaagtttggtcagatttagctgagtcatatccaagcatatccactatctacaagaataagatccatgcaataaaattcacaaatcatcagcaaaaaaaaaaaaaaaaaactttcaaacatttacactttaagtatggcatggcatatttgacagtttgaacaagtttattacaaattaagtttaagtgagacgttatcaaaaaattatcaacagaaaaataataaaacaatcgagccacatgagcagactgtggatatcaagaagtacgtgacactacaagtttgtgatggttgtcttcagatcaagatgattggttgaataagactatagatattaagatatgcatttccatcatgtttgtcttggtgtgtgtccacagcttgttcattagagtttagacaactgaacggatttattggaaggtacttttccatcatcattgcgttaagaagattgattgaacacgcatttcaaataaattttcaaacaagaactagctacataatat

SEQ ID NO: 2237 - DNA, 665 bp, Glycine max
ccttagttggtttgtccaccacatggttgcaatcctttcttatcccatttggggagaccaccttcattccacaagtgctggtaatataccattttgtgaaatgcgtgtataattgtaatttacaaaagacaacattgaatgtgtaatcttttgatttttttaagtaagactaaactttactaacttctattgtgcagattaattatcaaaagaaattataattttgatttaaaatgtaaatttatataaatgcttacacaagtgttttagagaaatgttaacctcatactttactacactctttcagacatatctttttattgattaaaatttgttgaaaattataaaaaaattatgaattctacatcttattaaatgggtttctctcatatgatttggttgtttctaataaattttaaccaataataataagatgtgttaggggtatgttagagaatatattagctaatactaattaatttggttgtggaaatgtatttactcagggagggttgctgacggggccatcaatactgggacaaattaaaaatcttgacaagttgctcttcgctccaaaacctttctacgtgtgtgaggcaatctctctttacgggacctttgtgttcctgttcttgatgggagtcaaaatagacatatctgtgcta

SEQ ID NO: 2238 - DNA, 666 bp, Glycine max
aataagttgaaggcacaaagttaatatggacaaatatcaagggaagaagcttaaggatacaccaagtaggaaatacattgactcattcatgacacaagtaagcatgtgttttgagttactttcccctacttgcctacacatccaacacaaccaaacacataaggaagagcacattacaaaattatgcccccacactacattttcctccacaatagacctctttattttttcctatgacagaacacaagcacaaccaactggtggatctaatcagccacacttggatcccatattgtccactgtctattgcactctcaccataactaccattactaatcaaatgaaacctctttatttagcatgcccatgaacctttccattttagtacatttctttaatctttacatattaagcaaaaagaatgttgtgctacagcaaatgcctcaaccagcatcatgtcagtccctgctattttgctaagctaggaatcgttttttacaagaacatgttattttgtctacaactaaaaaccacaatgcaatgtagcatttcaattagaaaatgattttatttgcaacaactcaattacaattaactttgcaatttattgtatattgaataatgttcttatgcttaatttcgcgcatctcatttgtattattcgtc

SEQ ID NO: 2239 - DNA, 627 bp, Glycine max
aaaaaatccttaacatttttcattttaatcatttaacattttattattaatgcaaactaggtggaacttggaacttggaacttggaagtgtactgtcacaaaattccatggagcagttggtgacatggcaaaagcagaacagattagggattgccattggtgaatcctattagtattgctgatctgattcaatcccttatctttcctcccttccccaatccatacccatatcatatcgcattcttcaaacttactgcattcaatttctctctctctacaacgcaacacacacacacacacacaaagagaacttttcagcttcactcttcatttcagttcaattttaaacatgctttgcgtcaacactgccttcacctctttcttacccagaaaatcaacttgcgtcttttcctccaaatcaaccaccccaatttcctgcaccctccaaggtattatttttattattagggcttttactttcagggcatttgttgcccattttcagtgttcttctcttgacatcgtggagctcttaaatttttttgcccccgaattaaataaaattttcttttttattatagtttaaagcccagaactcatagttgacgattttcattactaccattt

SEQ ID NO: 2240 - DNA, 667 bp, Glycine max
ggaacatgggtggtggggccactcagctcataatgcctatggtttatgagttgattagaagagctggggctactccctttacggcttggaggattgctttcttcgtccctggttggatgcatgtggtcatggggatcttggtcctaaccctaggccaagatttacctgatggaaaccttggtgccttgcagaagaagggtaatgttgccaaagacaaattctccaaggttagactctttcttccgtatatgtttgaggacacaaatcaatatattaaatttcttaagaggtatttcatatttggtttgtgaaaatgttttcagaaatcatttcttatttttataaataattatgaaattattgcattattttttatttattttctattttttcaaaaatttatataaacaataatcttgttttaactttttttgttttatatatatatatatatatatatatatatatatatatatatatatattcaatctttgaaaataaaaaaaaaagatgtaatatttttattattaattatgaaaatagaaaatggaaacacactaataaatgctccttactttggttaccaagatcatcaaattttgaattaggcaaaaatagggaaatattttgggaagaaaagaaaatcaagtattgataactcattact

SEQ ID NO: 2241 - DNA, 756 bp, Glycine max
tcatgcctgcagaattttgtctttgccatttaagtatctgggcatccccattggggataatccaaggcgtagtgtgttttgggatcctatattcagaaaatgtgagggaaagttagctacatggaaacacagacacatatccttcggggggagagtgattctcattaattctgtcctaacagcaattcccatctattttctcttttttcagggtcccgtcaaaagtaatagcaaaactggaagccattcagcgaaaattcctatggggaggaggtccggagcaaaggaagatagcttgggtcaattggaagacagtgtgtttaccaaaagagaaaggtggcctcgacatcaaagatctcaagacttttaattcagctttgctagggaaatggcgttgggagctcttccacaagcagaaagatcaatgggtcaagctactcaactcaaagtatggcgggtagaggacacttgaggaaggaacaaggagcagatatgattctacttggtggaaggtgggcggggagataaatttagattttgggaggaccgctggctggaatcttaagcaccactgatggagaaatacccaaggttataccagatctcatgccagcaaaatcaaaccatcatgcagccgaggagtaactttatcagcggatgggaatggaagcttaactggaagagaaccctttttgaccgtgaaatggcaatggcagatatccttttcggggagaaatcgaacaagcactccccctt

SEQ ID NO: 2242 - DNA, 808 bp, Glycine max
tgaaaagtatgtggatagtgcaatacggcatcttagtctcaagctgtcggcatcaaaaaccccagtgttgccatcagaaaatgtagcataaattaactgactgttgcaggaataagctgcatatgatatgggagcagccagaacatcttgtggaacccactgcaacaaattaatttataaggatgtctccattttaatatttttgacagcaacaagcagcaataccaatactagatagaaaatcctcttacctgcctaatgcgatccatcttagaggcatcatatattgccaactgagtctcatgggctaccagtaaccggatttggtctaaatggaactgcacacgagtgtcaccaacaggagcctttcctgcgggtagttgtatgggaactgattttcttttctcccatgtatcaatgctccatacacaaagctgtatggaaattatttcaattaagttgttatgggaaggcacaccatatactcacagaaacaaaacaaaacaaaaaattatattgaacaacaaattaagtatcggcaccttcttgtaaaataatttcaatgaagtaaattgtgatttaatttcataatagtctagaaaatacaagcaaggctaccctgttatcctttacatagggaagcaaatttaaagtaacattggataattacaaataaaccaaagaaagataactaacagagatctccaaaacaaattattatgcacaaagttttccaaatcaccctaaatctaaaatgataggaacacgcttaaaagacatacttgagcatcagcaccagatgaaacca

SEQ ID NO: 2243 - DNA, 641 bp, Glycine max
atactagtaatgggttttaacatttaaggtttaaggattaagaaagtgaaatgaaacaagcacaatagggtatgaatacgaatcgagggacagttatgaagcgggtttggaccaaacccgatccatttgcttcttgacgggttacaagggttataaggtggagagaaattaagaccgtgatatttagcatagactctttgggtcgttgttttctgtgtttttatttttactgagaatagaaaacagtgatgaaaatctgtttggttaaatttttgaaaatattttcataaaaatgaaaacaagaaataaccagaaaatgaaaacaataaatcattggttagaagctcatttcgggtaaaatgagattgtggtgactgtaattttaaacaaatctcaaaatacaaaaaaacaaaaagtcaatatattatacattttcagtatttttatttcataaaaacagaaaataagaaatcaaaccaaatatattttcaaaattctaatcttttaaaaataaaaacagttttcagaaaataaaaacagaaaataaaaaagcaaatcaaacacatccttttaatctggtagcttattattttttttcttttactttactttttctcttcatctttttacccgtttgtcct

SEQ ID NO: 2244 - DNA, 786 bp, Glycine max
aacacagcaacactatgataaagaccagcaggacaagcatgcaggggaacgaattgcagcaacgtctgtagcatgaggatgatatattgcaattccttcagagataaatttgatagatagcataaagctcagctgttgagttattggtaaaaccgcaactgccatagaaacctgatatccggtgtcccaagctatcccgaatcacaccccaaacctggaaggcccaagattaccaagaactgtcatttgtattaaccttgacgaattggggtagtggtggaatccatctaaccaggatagacgtcggcatgcgatgaggttccatttgagccttctgcgttgaaaccaacaatgtcaggatctgattgtgaatgttccacggtggccagctgttgtcgttgaaaacactttcattttgagcacaccatattgaccaacacttgatgccaaagatgagatgattacttccttggatgtgtttacgtaaccataaggcaacatccatggtgtagaaagttggttctgaatctaagggtaccatgtgccatgtactcttagcaaaaggacaatcacgtagagtatggattcacgtttttgtagctgctccacacctgaaacaagaagatcaatgaaatatgctgtgaaaagcggagaagttagtagaaggctcccttattgttggccaagaaagggttaatgttctcagaagctggttttccaagccaggaccagattttggggaggaaaaggacacgagcttcacggttacccccataacggcttggt

SEQ ID NO: 2245 - DNA, 734 bp, Glycine max
aagttactttttcacaaaaccatttttgtagtaggatcacatgaattggtctcggtcctatggcttccggaatattaataagatatttgtactaatatcatttgattaaattattaactaaacactataaagtattaatatatgttttgttaatttatatcatttgattcacctatgcatatcccgtatatatatgttaaagatcatgcatcttggacctcatctaacggggaaggtccacaaggaattaatcatcggcaaaacagtttgcgtagtttattttctgatcccccaaattgtgttagaaacacatgttccttttcataacgtatagttgtttcggaaaaagatggggtatgaaattatgtttacacaggaagctcgcgaacatgcaggtggaatttgggttctatctaatcgatggatatcaacttcactcttctccattcgatgaatcagtgtattactttctccttgaaaaaagcaaatgctatatgggctggttcaacaatatatgcctctcctataccaacagtaccagagctactttgggatcatttagttcatatcagtacccaggtaactagcccctgggtagttatgggtgaccttaatgagattactcatcctttaaaagttagagggaggggtttttccatcagaagggagaaaaaatcattttttatgggactttgacgcaatttggtctcattgattgagatgatagagccgtt

SEQ ID NO: 2246 - DNA, 629 bp, Glycine max
atgctgtaaggtgaggggttctgcatgaaaacctcacatgcatgcgcatagaagaagaagaagaaagccattggcacagggataaggttgcagttgcagtgcccattgtattttgattaaaggttattttttaaaaatattaacatttaatttaaaaattgaaatgaaaaagcaaattaatagagctaaggggttaaaaagatggtatataaataaatataaaattatgatagtttaaaatagctgagattttatataaaaaagacagaaaaagaaacatacaatcatagatacactcgtaatttttcacaatctattttttccacgatagtaaagctctgaaacacactgctgaaaccattaattaattaattaattaaacaaatagaaaaagagagagaaaaaataaacagataatagaatttccattgctcatttatcattattatttcattcatcttcgtgcagaaatttcccgaaggaggaagaggttctgatcttctttgttttgttttgtctggttccctttcttccttcaaccaattttgagatccgaaaccggcatcagatccgattcgaaatgtacggattcgaagctctcaccttcaacatccacgggggctttctcg

SEQ ID NO: 2247 - DNA, 656 bp, Glycine max
aagaaaacataaagtatatcggtttgagcatcacttttttgtagaatgcccacaataacagtaaattcagatcaaagtaaaaggctgcacaagactcatcagccagagcaaattctgatttgaattcaacttttacatgaggagtcagagccaatgcccgtttgtagactgagttgcatacagttacagcacctatgactactttattgtttaaaattttagtctcctctagctcaacctaaataatatcctcaatataaagatgacattgacagtaaatacaaaaagagaccaaacagaaaagtcaagattgcatacgtgatatactctaaaaaggttgacaacggttctgtggcttggcatagcatgttcttgtaatcatcaaccagcttaagagtacacttctcgacaatcgtggtggtatgcaacggagaaggctctgcaataggtaacttactcatcagccatcagcatagaccaataatcttaattagatcttgtcaacgagtaaacaccattgtactaattgtactaatacaaaagcaacagaaattcttgtaaaccttcaatcaaattcaattcaacagacagagttaaacaaaacccagactaacaaaacacagttcactttcaatattagttaacattcagacaga

SEQ ID NO: 2248 - DNA, 854 bp, Glycine max
taaggtcaagcccaatcacgtggcctgagatgatgtcgcacgtgaccccatcccactcacaacaatctgtgccgtttttccatgattctgtctttgaagaaaaagagcaataaacatgaagccaaggataatgatcaacaaaccaataataatgatgtgaagtgttgagagcaagtgagtttttgaaaagtagcaaggcagaactgtcatggtggttgcagaaagaggaagaagaagaaggaagagaaagaaggaagataaagtaggggagtagaagccagcaaagactgttattgatattcatcctttaaactgaataacaaaaatggaggattttggataaaagcaattcaattcacaaacttcaatttatagcctacgctccttcaaaagatttcattatttatttgttcctttatttatttttacctttatttttttctcttgttataaaattaattattatatctgttattttctttttattcaattaaaaaatatttttacttttttaatatttaatgaatgtttaattttattcaattgatattaatataataatatatttgtaaatcattatcaaaataattttctgttatttggataattttttatatagccaacaattaaaaattataaatatttataagttatggcgctagttttttttttaaaaaatcagttaaaaattattttttaaagaattcttcatcatcacctttgttctccaataatttatgactatattaatatttaaaaagtttaatctatcatccgtaaaagaaaaaaaagggtagtctagtatcaatcaagttaatcctcaatatttggtattatctaattcgatatttttt

SEQ ID NO: 2249 - DNA, 687 bp, Glycine max
tgaattacttcagtctgagcattctgtaagagtttctgcctttgtagacacacaaacactaatatatattttgtcttcacctctgttcgggtctcttaattccatcaaatcttgcacaccaattgtttgccctttgtgattattgatcaattttgtttcttgacagtcacttcgcttaatggagcatgaaaattctaagattttgaatgcaaaaggagagctcagtgatgaaaatattgcttcatatgaaaagcttcgtaaatcctatgaccatttgtaccgtaacatctcatcgtgagttgttttgtttacttttgactatttcattacctgtttactgaatctgttcttggtgtatattggcttaatatattcttgaaatactatgaaccccagtttaatgtttacatgtgtagctgcacatgcatatattgatccattactagcatgtatgtatatgctaaaaggtttgatctaacaagagacactcggtcaagcaaatttgaggcaaatatggatatgattttttgctggttaggatagttcgtgagatctctgttttttggaaacataaaatgctttcaggttcctctgttcctatatattaaaatcttgttgtgtctgagatgagctgcaccctccagctaacaaggatgtgtttctttgctgcttatctctctttacctg

SEQ ID NO: 2250 - DNA, 811 bp, Glycine max
agagcatccaaatttgtcccttcaacacttctgagtttgtctttttcattttctccctttttgtcattatctttttctttttccttctctctgtccaattctttagacttgtctttttcctccttatccttcactctttctgtgctttctgcctctggcaaagcattagactctgtagagacctctccactttcatgggtggtctgttgacctttgtctgattcaggtaatatttccttgataatcaaatcatatatcttgaagtcagtaaaatagttgcagaaggcttggtaaagagaaaaaaaaaaacaccaacaggatggttgtatgaataaaaatattctttcacataactatatggcgtagtgactaaagttgctgaaagtctcttaatagaaaaagtattttattacaagaatgaagacaataagatatgctccaatacaaggacaagaagatacaagaaatatgaaacaataagtaaattatatgcattttatgacatgtcaacaagagtatgtatcaactatcaatgctgctgctgcctacaaagtagttgaaagaatcgcccattccagactatatacagaatggatggtgttcttgtcaagggtcaacattcttaaatgcttaaactgctagttagaagctcaatggataatggataatagtatcatcaagtatttaaagaatgactaaacagctaaaatattgaaagtaaaccaagtcacactaccataagaaaacagaggatataccctgcagtatgtaaagaacctagatggtttcaaagcatcatgagtgatcccag

SEQ ID NO: 2251 - DNA, 790 bp, Glycine max
actcttgcagaggtctattattctacatcctcctttgtctttgtccttgttcatggactaattaaccagccccccctttttttttcctttttctcaacttgggattgggttttcactgcttaatcgccaaaagtctctaagggtccattaagcagtgatttaattaattattggcatatgattactagagaatgaagttgatattggaaacgttatagaaagatatgcactccctagctttagctagggaaaggaccctaagaaaagctttgtttgttgggaaatgaaaagggcctaaaagctgcattccttcctttctgtcggggctgctgttatgaaacttagctgggcttttggggcctgtgcttattcatgtcatttaggccagtagcttttggacactccatatggaattgagcacccatattcatgatggaaaagacaactctcaccctgctttaatttgacttctcatagaccatgcaactttatttgaaaatactaccaagtaggagtgcatgcccatttgaaatctgtgctgcctgtcccgaatactttttgacccttgctctttggttttttaccaccacatgttgaaggtttcatgacttgtgttgccctgctgcctaccttaaaactacagaatcgcttcatacaagggcacaaagcgcgatgccagggaaaccaaggtgctccatccttaagaaattcacctaaaaacctttggaggatgcccgggattgacaatttttgtccccccttcagttacccccaaaaaattttttctttt

SEQ ID NO: 2252 - DNA, 813 bp, Glycine max
tgaaattcagaagtgacacaatccaaagagtgaaacatctttacatataaacataatgaaggagctttcctcttcggggaagggtgtagtatgattggctacagaatgacgcgtttgattgactacaaactcttctactattcaaacgataagaaaggtcataggaaagttttctacgctttttttcccccacgaaaatggctcatggacagcgttcatgcccatgcatacacggaaagagaaaaatcataaaattcctgattccctctcattataattttttaagcttttaaatatatttttagtattttaaatttaaataattatttttttaatccttgaaaaaatatttttattagtctctcatgttttttaaaaaattacttttagtctctttttattataacaattttttaacaatcaatttttttaatttattttttgaaaagttatttctgctaattttaaaacataaaaaatatttgactatggtttggtgacttatttttacataccgagggttttaaagaaaaaataaaaatatgaatgcggaattataacgattttttacagatgattttaaagtgtcatgaattatttttaaataaattaaattaagaaaaacattttttatggtgaaaaatctctatgacaccattaaaagggactaatattaatttttcaaaaatttgaaggactaataaatatttattttcttaaagactaaaaaaattattaaaatttaaaagatttaaaatatatttaaaacccttttaaaaataaaaaattttctagttatttaaaaatatttct

SEQ ID NO: 2253 - DNA, 713 bp, Glycine max
caccccaacacaaggccttgcatttcagaaggtgctttaattattttcagaaacaaccatcctagtgctgccccaatgatatatgtgagaagaacattcaatggcatgaaccaccttcatagttcatgaaagtgtctcagctataccaattaatgaaagaaagagatggaaaataaagtaagagttaacattgaaaatgtaacagaatggcaagaagacaacatacaccagaagcaggctcccaaatgttatagttttagtcagggagctgcaaacaagagccggaagaaagacaaagtatactatctgtacataaacaagaaaaagtcattgagttatttgtgaatcaccaatcaagtaaaaagagccttgtaaggacggaggtactaataaattggaaagagagaacacaaatacccacaagcacaaaattgcatgcattaattacaaagattaaatattaaccttccgttttaattgccattctatactaatcactagtgaaacattaaatattttcttccaacttaattaactatttatcacggagtaagaaaataaaagaagtataaatgagaaagggtgttattaatattttattaggaaattgcataataaattttataaaattcaatattaaatatacctcttaatttctatgtccaaacccttaaacatcaaataaaatgatattgatggagtttgatttaaga

SEQ ID NO: 2254 - DNA, 729 bp, Glycine max
atttttgaactgcacaaaaaataattattatatgaaagtggggaactaatagctcagctagacttatatgtgattaaagacaataatcacgcatatgatgtttaactcactagctagatttcttgatagacgtacgtgtatgtgtatatatatatatatatatatatatatatatatatatatatatatattactgcatgaggtatatttctgaaataactcaaataagtgactcagtagcattgaaacggaccctctgcatttgcttttcaattaatgcattcactctcaagacattcacgcatttaataattggacggttcatatttcatttccctcaatcaacctaagaaatttcagccatccgatgatcttccgtctaacagatataaatgtgttgaatgcataaacgcataagtatgactgcactgaatactgtcccattgaaacttgaggtttattcattgtgtcgtttgaagagaaaagaaattgtgataaaatttgttcttgtgtgcatccaagcgcgtgatgagagagagagaaactagtgaagataaactcacaatatgatattattacacaggaaatcaaactttcactattcatacataactcacgtgaccataataatttaatactatctgctgcaaacagcatcggggaattaaaattcaacagtactattacaaccatagaatgcaaaatcttagacttactgctataataaac

SEQ ID NO: 2255 - DNA, 638 bp, Glycine max
aaggctgcaacttgctgttgttcattacctcttaccttttactgatctcaggtttctatctgttccttccattcctctctttcagtgccagctaagagtacacctatagcatttctaatatatcttcctaacacgtgcagggcttggtgtccattctttgtcttatgatcattctgctaccacaaaggcaataacactttccttaccaatagtttcctgtactataacctggaaaatccactagagtattctttctaagtttcataatgttttccatgttatttcttattttagactacatataattttaagtttctaagttataacttaaccaaactaaatatgggtatgtggtagtttctgtcagcagttaatacacaaacttatttgtgttgccattgctttgaaaacaagcagtgtttggcagaacctcggagagcacagtatggaggaggcattatagtaaatccaggatttgatcacaacatagagggttggacagcatttggaaatggagcaatcaaggaggtaatgtcgaatggaggcaatagattcattgttgctcacaacagaacacaaccattagatagtttctctcagaaggtccaacttaagaaaggaatgctgtacaccttttc

SEQ ID NO: 2256 - DNA, 640 bp, Glycine max
atcgccaacaggaagttcagttaaatttaatttcgtacgtatgtatatatagttaatttaactatgaatcacttaggaaataatttttgtatatatctttaatttatataattatgaattaactacgaaataatttatatatatatatatatatatatatatatatatatatatatatatatcttcaattttactatgaattagctaaaaattaactaggaaatactttttaaattactatagatatataataattttagttatagattaactataaaattactatgaaaataacctaataacatagttagaaacaaagaaaattcaacaatatattaccacaaattaactagaaaataactatatttttttttaaattagctacaaattaaaactaggattatttttcatagttaattagctacttgtttcatgctaccaacaatcttgtagaaatttttttagctaatttctaaaattcttgcagtgacccgagcatggagataaattgaagctaacgtaggtttttgcgtaaaatacatctcattcaagttgcttccaacgtggaaaacaaggaattgtctacttctgcaatctgcccgtgcatggtaggggaaaattggacttttgaatcaaacgc

SEQ ID NO: 2257 - DNA, 822 bp, Glycine max
gccatgactgacatgagaagtcggtcctactatggatttgtcatcctcctcaaaatactaaacagccagcccaactcactgcaaaacaatgatttaacattcctaatgccaaatgatgatgaactatctcaattctcaatagctctagaccagcttcatgatttcatactcagccattctattccaacaccattagtgctcagccatctattacattttccaaatggctctgtggtttccctctagcgttccaagcagagtgatcaacatcaccaacagtggaagaacaggtttgttcgtcaacaatgcaaggattgtcacactaaatttgtgccaaagctcttccataagatgccacggaatcaatgctgctttgacatttgacaacatggtgccttcccaccgagctccaaaacccaaggaagacccaaagaacagtaatgtgacaaacccatcctcaactgtcgaaaagatgaatatcccacctttgcagtaatgcgagaaaaatactttgcccttcagctgtaatgtcgtttcgttttatcaataacataacattacttttactttgtctccacaatgatctatttggcctgtagtcctgatccaactcactcaccacaatgttaaaacatattgactaactaattagattccacaaatcaagaaacaataaaaaatttgtcacaaatgcttattcatacatacaccccatagaacaaaccaaatttcaaactaagttaagcctttacttactagtacctcttcgatctacaaaaagcttacattgtcttgaaccctatggaataagactagctcttc

SEQ ID NO: 2258 - DNA, 653 bp, Glycine max
tagtttgttcccggtggggcaattcacacgctacccatgaatcccattttgatttgcttgttggaggcggagaattgagaagaaaatgagagcagtgtccctttggcttcggcgcaaacaccaattgccgttggcattggcatttcgcagattctcgacatctaattcgaaggtgaaaatctttgatcgcgagttgaagcgcacacaacgtgaccgagccgcatggttgactccctcacacgaccctcttcttcacaccgtcgctcaaaatctcttggaccgcttgcaggttcctttagttacttagcttcccttcccttctaaattccaacttcaattctctttgttgttgtttaggactgtaagaagacttttccaactgcgctatgcttaggaggctcattacaacctatcacgcgctctctttctgttcctcctggtatctatctcactctccacgtgctattagcattatattatgattaattgattgatcccagccccaggtggcgtggaaaagcttattgtcatggatgcctcctatgatatgcttcaagcctgtaaaaatgctcaccacaatgccaccgttgagacccactttcttgttgctgacgaagagtttcttcctatcaaagaaaggcaattataattgg

SEQ ID NO: 2259 - DNA, 869 bp, Glycine max
tgctgcctgcagggttagtggaactatcattattggctccctttctgtcacaacttggttctgtattaatggcttatgaaatcatgtcttattctttttccccaggcttttgtccattgcagaagagactttagaagaatttctttctaaggctactgggactgctgttgagtgggtccaaatgcctggaatgaaggtatccgtccaactcttctcattcgttgaccagttagttgttttttactcttcacttattccatagggatagaccaataagcataatggtaaaagaattataaaattgtcatcttggaataacttaccaccccatgttctgaaaatcttctttctcgatgatttccattcttttgaataaattagtggcatacatgtttctataatcatttataaaatcatgtttcttaactaattctcgttgaatgtgcacagcctggtccggattccattggaatcgttgctatttctcatggttgcaatggtgtggcagcaagagcttgtggtctagtgggactagaacccactagggtaagtgatcgaactattatttatatttactgatggtttggcttgagttcatcattcacatgatcaaacatactctttccaggttgcagaaatcctcaaagatcggcctttgtggtttcgcgattgccgagctgttgatgttctcaagtgctggccccacaaatgtgggaccattgagctgtttatttgaggtaagtaaaaaatttgtgcatggtgaaactttccctatgatagaacccaacctattggtgctactggggccttggacacttttcccacccttggtccctccaaattgtggtgcccctttttttaaaaaaaaa

SEQ ID NO: 2260 - DNA, 712 bp, Glycine max
tgaaacaacagcctcaactccttccaaattatagacattaaatgctccaacagcatatccacccttttctgcattctttgtgccaaaacaaaaaacagcattaaaatttaaaagagaatcagttgcacaaccgtgaaccaggtgatccttacgttgataatttcttttgttgatgtaagtctgattggactagtccaggactttacaacttctgcaaatgctgtgctgttaccaacattacctaccagaagcaaattatctttgataagatgaaatatattgaagaatacgggaagatatagattttacggcaccagatactcagatttggtaagaaactgtaattaagtaaaagtaaaaaaggaaaattacaaaaatttaccagggaagacaatgtaaggaactccaggatgtctactttcagggcctaattgccacaacggaataccagcaagtgcttgtccaactatcttcgcatatcttgcaccaagggcttttgtagcaaggtctgaagatgtaataccaccccagaaaatgtactatatttgtcggtgtatgattaaaaactcaggacacaatcaaagaggaagaatatgcggctcagttttctggctttgatttgcacgaaactattttatttcagttgtaaaatggagatggaaaaatacaatgaagttttataagatctctagtaacaaattaaacagcaaaa

SEQ ID NO: 2261 - DNA, 671 bp, Glycine max
aatggagatattcacaaattcatttaaagttaaaaaaataaaaaaattaaacaatataaaaaatttaatccccatcaagttaaactaaggtttaaatatcttttgttgtttgaaaaaatatcacattttttttagtcttcatcaaaattttattcttttttaatctctacatgacaaaatgatgttgttttcatcccttgtcatgtactaaaaacatatttagtaagagactcaactacattaacaaaatgtagagataaaaacatgagtagtaagagacatgttatttcttttgttaaatgtagagataaagaatattaaagtttttatagaagctaaaactaaaaaccgtgatgttttttttttcatggatcaaaagcacatatttcaacttaaaaaagaaaatatgtgggtcaatggactcaccaacaagtactactaatgataaagaaaaaacatagaattgaaaaggtaaccaaaacacctcaagatgagtaagggaagcaagaaggtggaaagggacaaaggaagctttcttcatgttgactgagaggaggcttgtgcagtggccgcatctcactgtcaccaccgttgacaaaatgctgcatggaacactcacctgcacgtacacctcacaacatttgaaaatggaagccaaaaaattgaagtgt

SEQ ID NO: 2262 - DNA, 748 bp, Glycine max
aactggaatctgattgtcgttaattttggcctcctctagcatggcacataacatggaactggaagcctagagcagaggagagagctagtgagcctttgtttatgcccacaagttagattatattcttctttattttgttttcttttctaaaaaaaagttcagatttagtcttcatctaatttaaaatgttgcaacatggtttaacgctagttgaccgacagtggaggatccactttaaatggtatgggtaaattatcccccacaaagtatttttttagttgaatatattcaatcatttttatttttgcctctaaaaaaagtagatactgttcccataagattttttataatgaaggtaaaaagttacgagataaaagagataatgaattagtattaattttatctacctttgtaatttttaataggattgacaatgaaaaaattatacaacgtttttaaaataaaatatgaaaatacatagagtaattataattgtaaaaatataagcttggcattattttaagaaaaataaatgttttatttgaagcgttatatatacatatttgaaattgtacctgatcatatgaactttaattcttgacattatcaatttaagcttcaccgatcagaaaacaagtttcaaacttaactaaaggatgcgaaacatgttctggttcccatgtctatgtctgtgtgtgagagatgtgtgagaaataatctgcatcatttatgtagaatcgataaatga

SEQ ID NO: 2263 - DNA, 828 bp, Glycine max
aggtatatcatgtcatgcatgcctttgatggctcagataagtttgaatgtttgattacttcttaaattttaataattggcctagatcccttcatgggccaaatataggtttgttaggtttcttatattttaataattggcttatgattttcaagaaattgtggaacagctactccaagttaaaatcattttacactttgttcaaaattgctctgagatctaagactttttggctatgcatgtttaagtttatatcaatatgttgcatggctaaaataagcctgttcttgagctatgacatatactcattcattcaacataattggagaaactagagagacgttaaaatgtcatatttcaagaaaattgcaaatgaaaccattctgttttctaatctagataaaaaaaatttcatttcctacgaatgctactattaataggtgggacaatgctactttggaattccttgaaatgttgattgaagaagtttggctagtatttcattgatgaaattatattttgcccagagcttttaatcacaaggagtgtaagggaaataaaataaaataaaaattcagaaaagtacaagtcaaacccctctaattcatcaggtgaacatgttgtcgttcccttccctcctttttgaattacaaaattggccgctttattttggtctttcaattttgctagttataaatatacagcgcaattgaatgatcaatttttgttcaattcagatcccaccaattcacctggcctcattgaatataaaccacatcctttctggcaacaaaaatattggccatcccatgaaggggatgggactcct

SEQ ID NO: 2264 - DNA, 639 bp, Glycine max
cactcactgtagttaatgcctcattgtgtttctcattattatttcctaactaacactcttgaccctgacttcttcacttgtgctttttagatcaacaaattaaagtattaaactttgagcttcagttttttgttcttgacttcttgtaatttattatggagttgatggggggtggaaaatttagtaggtgttttgttgttgttgttgttgttggtgtgttgttcttagtggggtcagtgagtgggattggtgttaattgggggacacagtcaacacaccctttgtcaccgtcgaaggtggtgaagatgctgaaagacaatggcattcagaaggtgaagctttttgatgctgatgctggtatcttggatgctctcaagaagtctgggatacaggtcatggtggggattccgaatgacatgctttatactctggctaacagtgtggaagcagctgaaaaatgggtttccaagaatatctccaaacatgtctcttctggaggagtggacatcaggtacacactacacacgcaccctttcctctgttttgggagattctgttaccaaccattggctttgagttgaagttatgctttttaattgtttgtcactgtatttgttgcttggcttgttggttattgat

SEQ ID NO: 2265 - DNA, 678 bp, Glycine max
agagatcacatgtaatcaaatgagtagttgaacatcaactctaattgcacaaccgtctattcacacaaaagcaaaaagttgtttggtaaattgtgaaggaacaagtgtaagctccatattttgcagagattagcaatagaatgtcattcagcaatggagagaacaaaacaaggatgataattataagtcaataaaaagcaatttttccttccatttaaagtgaatcaataacctctcttaagaaaaataatcacaaatgggctttggcatggagggaagaaaatacaaggaaaagcattcagcttagagctgtaaggacatggacctgttcccctgacaaccttgatagatgtacctaaacatgaccttccaaatctaatgatgtttgggaaacttcccattaattgcacacgagaacaatgattgcatatgatttgtgaataacaaaatataaatataattggcatttcaacttttggcaggaatgaagtctgaccaattggtcatctaagagtgcacattattttctgacataggaatctacaatcatttgcatatatagatgaatgtaaaattaaggagattgggctatttaaaacccacaaacaggggacataatttcattccaagaaggtacaatgagtggagccttcgcatatcagcatatatgagaattaa

SEQ ID NO: 2266 - DNA, 824 bp, Glycine max
caatgcatcacccagttctgattggtttgcttaaacaaggttagcccaaagaattaaaggcaatcgtccctccacagagcaatgtctcgagtagaaatattactgtaaaatgctcgattctccctggtatattcttgatttttcaccatccttagaactttaagaaactctgcccagctcatcccttgaaggtgaagccataaatacagctatgcctgcttttcctgtttaataacgtgttttactccatatttaacgaaaaaatctatctaatttcctcttgaaaaaaattatagaatccccaatggctttttgtatttgttatttagtttttatgaatttgatttatgttataaaatatggccgggaatacaggtgaaattatttttaaagggaactatattaactattgcaagagaaatttccaacgatgggcgaaaaaaaaattgctactgtactgtttggtggccagattaatctctacttttattatcttttgtgaaaccttccatgtacaaataacttcaactacagaaagggtgaggaatggatgaactatgaagtatcttccaagactaactgatttaccaaatgggttacttgcccagaatttcaagtatgcttgtcataaacagaatttgaacgtctagattagttgaaggaagctactagcatacaatagtttgccagtaattatatagtattgggtgttcacaactcatgcaagtttgactaagaaatgttattccaatttgttaataccacgaatgaatactttccacacaaaattcaactctccctgctgcaacactggcttcatccaa

SEQ ID NO: 2267 - DNA, 659 bp, Glycine max
tcaatacccatgcgggctggctatgcacaagccctttgactagtcctaggtgaacactgcaatgttggcaccaccacctgcattgtttgtttgcagctaagagaccaagtggaaggctttgctactaattgataataagaaccttgggagaaccacaccacaaaggctaactgttgtagttagagagtccatggtcttataaacccaccccacactagaatcccatatttccaatgtgggactcaagtccaatatgttgcaattggatcctaacaactttgtagtagaaatatgggatacatcataaaggatggtgttgctcttaccataccgtattgaaattattatagcaggcgagaataaaataaatattgacttttgaatgatgttctattgagtattatgatgctgtgtaatatgatgatattgttaattaaacctagagtgtcaatctttacttatactaatcataatccttactaaataagaaacaaatcatgagataaaaaaatatgataactaattcttggagataatgaagaaataaggaaactaatcctaaaggataatctaatatattatacggtcaaaatagtattggatgttttcatatattctatagctatataccagttatataccaaaataattttttaaaa

SEQ ID NO: 2268 - DNA, 816 bp, Glycine max
attttcacacctattccatcctatggaaccctcaacgtattgtgtaagtttctagttattatgcaatcctcaagaatattatcataaaatagaatcgatacgtgtttttttttttttttcctaacttgtgctggaagcaactgattaagtgtgtgtttgttaattttgtttcatttcagcttctcagtggatggaagtccaattagggagttcaagaacatggagtcaaagggtgttccattccccaagaaccaggcaatgaggatatactcaagcctgtggaatgcggatgattgggccacaaggggaggtcttgttaagacagattggacacaggctcctttcacagcttcttacagaaacttcaatgccaatgcctgcactatgtcctccggaacttcatcttgcggttcaaacaacccttcctcttctaacaataatgtttggctctcagaagagttggattcaactgatcaggagaggctcaagtgggtgcagaagaattacatgatctacaattactgctctgacactcaaagatttccacagggccttccttcagagtgcaacacagcctaaagatatttagtttccctgtggattgatccagactccaattttcggctctctttggagtttcctttttttcttttcttttgaaattttcataatgataaattctttgattggttgtaaaagtttttttatacagtgttcaattcaaatggttcatttctttctcagaattccttaatgactttagtttatatacttataaagagttgtgcctttgaaaatattttatcacattaaata

SEQ ID NO: 2269 - DNA, 921 bp, Glycine max
agacctgaatgtgagcattttacgtactcgaggagcacgtggcatatccatgaacaatgaattggtaaagaatgaaacccttctgcgtacttcactgtttgttggaacttcagcggcagtttccttgacagtcaagagtagataaagacgtctaatctgaaacaaccacaatgattcattggctatataggcatttggatctttgaataataatataaactataaaacataaagaattaaaattgaagttacatcactaagtacctgttcctcccattgtgctgtaaccacaggagggaatagtatagcaggctttgcctctgtaccagcaaaaacttgctgtccggtatccttactactttgatgaagttctgccaattcgctgatgaacatcaaaagtaaaaaatcaagcattattattttcaatgaaagatccatgagctatcataataatgtattccaaattcagtggcttaaagttaaaccgaccggatttcattcaccatcatatcggtgaccacttctaacatgtcttgcagcaagaccaccactgtaccccgcttgggatggatctccatttttcttgagacaaagaaatcaatgcacaagtttccaaatattatggttaaagaccagaacacaattcagaatatgaactacattatatagttagtttgtttgaatggctcacatgattccacaagctccacgacttcttcatgggagggagaaagccatacgaatttttaagggctctttggagtgctttaccttttgagaagggaaattaccgtcttccattgttcaagttgaaaaataatgataaatccagctcatgtggccctaaaaaacacactgtaaaaaaaaggcctccctcttccttaataatggccatatatttataattaagtgatttttttt

SEQ ID NO: 2270 - DNA, 681 bp, Glycine max
ttgtctctctccttttctcgcattactaccttctcctccttaccattttcacaaaccttcttattgctcccatttctctctctctacattctttcttgctgataaagcacttccttcttcagttccattccattcctcacaagagtctcttcattcttgatttcacaagagcataccctctctgcaagaacccgtttttcacttttccagcttccattccattccattttcactaacctttttattgctcccatttctctctctctctctacattctttcttgctgataaagcaactcttttttccaagctctttcttcttcagttccattccatccctcacaagagtctcttcattcttgatttcacaagaacataccctctctgcaagaacccgtttttcacttttccagcttcgtatattcggattctcgggagtgaaaatgttgcatgcgctattcaagcccaaattctattccaagtggtaataaaccttctctgtttccctcctttccttttttattttcttcttaaaataacaataatgatgatgaaattaaaatgtgaaacagcaaatctctgttgaagttaacaaacccaagaaaaggagcgcggtgcggagatttctcaagaaagacatggccgaccttctttggagttcccttgattacaatgcatatgg

SEQ ID NO: 2271 - DNA, 702 bp, Glycine max
agtttgcatgcctgcacatgagaacccatttggtgtggttcttggagggattctgtaagttttgacttttaattattctctttattctggactcagcctatttccgtagggcattgcctatttttcctttggttgcccgtgatggcatacggcatatgttatttcaataatttgttgctgtaattctgcatacatgtgttatatgtatatgccttacacatgcattgtgtttgtctggatgcataaatatgtatttaggatgtcacaatcctaaggtcctgcaattttgtaagagaggaatgtaattcttaattacttttcacaggggacaagcattgtgcactgctgctgctgttgttggaggaaagagtttagcttctcagatatctgaaaaaattgtaacaatttctactcctttttattatcactacctgttgtccatctccccaccccctcgtcttttttgttaacttatttaaaattttaaattcaatattctgtatcttaaaaagttctcatgcatcaagtttaaataattcaaaattagtttcagactaccaaaaaaaatatgggagtaatgaaatcagagtatataagaattaatggaaaaggtaatggaataatgaagaggatgctatatgtgaacaaaaatacaacattatagccatgagtccttagaacactttttgatgtagtgtgcaa

SEQ ID NO: 2272 - DNA, 822 bp, Glycine max
aataaagtagacgaatcaagatggttccatacgatagacttccaattgcttgttcctcgaaaggaatttctttaatcatttacattttttccagaactgaacgctgtagaattgctagtgggactctgaattaaccattacaaacagggatatacacgcaggcttagaagggacataggggcaggcaatttcaatccaataaattttaagaaaatattatttaggttaaaagttataaaataatataataattattaaatttatattagtataatttgatttttcctctatattattgaaaatgtttatatttttaataacactaataaaaaatttataaagatctcaaatatgatttaaagttatgtattttttaactagtaatgaatttaagtaattaaaagaatatagaatattttaatttgtaaatttttaaactttgacaaaatataaaatagcaatctttagttattattattattataaacacttaattttattttttttttcattaaattaatccttatgactaatttaatagcacttttatttattacctatttaattaataaaaattatttttttacatttccaaacccaccatttttgtttccgctatagtcaaacacaaacaagggaaacatcatttatatcaatactgacagaatatttttatttgataatgtccgggactttaatatattctctctaggataataaaagttattgtaatatgaatttggacttgccgaattttcttttggaattttttgggtagatttttttattaattcttgtaaatttttggcaaatttttctaaa

SEQ ID NO: 2273 - DNA, 815 bp, Glycine max
aaaggtttgagtttctcccaacgggcttcaagtgatgctgatcagattgaggttgacggggaggactaatggttagctcaaggttcaagtcagggcagcgttccaataccttgtcatcgttgagaggcctgtgagtggcagggtcaattcctctgctcagaagcttccttcttatgtgagtattccagtaattctttatctcattgtccgttctacccggcaatcttccagcaattagagaccacctatgattgaggaatgtgatgatgagaaagataggagtatgaagaatagtaatagttatagttatagatatgcttacttgttgccaaggaggctatggagtttgatgatgagttggtcttcttcgagggagaaattgccgcgcttgaggtcagggcggagatagttgatccagcggagacgacagctcttgccgcaacggagaaggccggcggctttggggagagagcgccagcagccttcaccgtgagctctaatgtaagaaatgaggcgatgatcttcttctttggtccatgcacctttgtttgtgtgtgctttctcacagcaaggggaccttcccatctctctctccaacaatgtggccggccctcgcacctcatttttataggcatggtagttgcgcttctttattatattggtgcatgagactgtgtgatagcgacacgtttctagaagacttggaaaagtgccttcaaagatattgagaaaaataaattatatatattatgtgaatgtgtggtagtccttgctttaccttccactttccgtttttctttgccccaacccaaccc

SEQ ID NO: 2274 - DNA, 675 bp, Glycine max
acaaagaagatgtctccacaacaggatctgggtgtggaggtccaatagatacttttggcggccgctgcacaaggagacatcttaataccgtcatgtgctttcataacttgaaataacaagtgaatgctgccaaaacaaagttctagcatacaatgttctcaaaaggaaaaaattagtaactcacataatctgtaaatgtttctccaaccatgccaccttcatcttcgtcccgctccacttcaacagcaacctgaattaatttaatgcacaataaaaaacaaaaaaagtaaataaaaacaataaaatatacaaataacattttttgaaacaatgggccttcacaaaaaaactgacagacaagaaataaattaataaaaggaaggaaatgtcactggactagtggagaaatgaataattatcaagaggaacgtagggagccatccaattttttttgcctgaagggaaattttatgttcacacatttattttccatttcaaaaacaaaatcacagtagaagatccaaaatatgaaataatacgcatatacatgcaaaacagtagaaacaggaaccctcttaagtcctgggtacactcagaaaacaagagtaagaaagaaaacagaaaaaacattgattgaaaagaacaatccagcccctaggcagacataatataaat

SEQ ID NO: 2275 - DNA, 708 bp, Glycine max
  misc_feature (671)..(671): n is a, c, g, or t
agttctacaccggcggccccttcgtcgtctcatcggactcctccttcatcgcctgcgcctgcggcgagtccatcaagatcgtcgattccgccaccgccgccatacgctccaccctcggcgccgactctgaatccttcaccgccttggctctcagccccgacgaccgcctcctcttctcctccggccactcccgccaaatcaaagtctgggacctgtccacgcttaagtgcgtccgctcctggaaggtaccgcaccgtattattcccctttcatttctttcaatgaataataatgtgttcgtgtctgctaatgtgcgcgtttggtgtagggtcacgagggtccggttatgtgcatgacgtgtcacccttctggagggttgcttgctactggtggagcagataggaaggttctagtgtgggatgtggatggtggttactgcactcactactttaaaggtcacggtggtgttgtttcttgtgttatgttccattccgatcctgagaaacagcttgtgagtactctgcttaatgcttttatttgattgtgttgtgccagcgagccattttactgtctgaaccgattgatatgtttgtgcaagagtgaagtattagtccctgtttgtataaacttcacaaacagtacttaataagataagaaaataagaagatcanatgaattaaacttctctcacaaagtaaaataactaag

SEQ ID NO: 2276 - DNA, 791 bp, Glycine max
agcaacaattagcaaaccaaaacaccaaataaccaaccattaacgaataaacatttcactgcttcaaatttctatctaacaaattcaaaagcccgagctgcaatttctatactctaaacaaaactgtaacctcaatttaaaatcaaatgcactctcaaccgtaaatgcaacaatcagcaaacctaaacgccaaatcaccaacgaacaaacatttcaccgtttcaaatttcaatctgcaacagcaaatagcaattgcagccacaacactacaatttcaaaagcctcactgtaattgctataacccaaacacaaccgtgacttcaatctaaaatctaaatcacatacaaatatcaacagtaaatgcaatttcgcgtaatttatgaaaccgtaaatgcggacctactcatagacgcgacagctctcaacgcaggaccgattcccaaaaacgcagtccacactctccgcaacacgctttgcaggtctttctgcgcctcttcttgcgcccgtttcgccatggctttggccttcgcagtggtcaagccttcgacggcttgatcgcactcctccggtgacgcttctttccgcttcttcgccaccgtctcatcgttcttatccggttgatgacgtttcgccgccgcggccgacgactgcgacaaccaccgcacacctatcgggcgcgttcagtctcgaaaaagcgtcccacgggaccgcgctcccgaatctcgaacacttgtcccatccgaaagattgaacagtcatcttgtacggcgtcgttccgtgcttacaagaac

SEQ ID NO: 2277 - DNA, 880 bp, Glycine max
ataacagaattttgatgtggcagtgagaggaagaggaaatgaaatgttccagggagtgtaaggggaagaagaagaagagagttaagcatgaattgagtatggttttggggcctttggttttagaggttttccataggattctataacttattatgttgaagtttttctatagagagaaagagggacttgtatacagaaccttcttctggaatcgataccatatttttatccatagagaaaatacccagagttatttaataaaattcagtctgcattttcaagtcctataataagcacaccaattttcacactggtatcagagtcaagtgtctccttgcataatggaaagaaactcaggacagtataaatagtgtaacacttttattaagtaaactgggtaggggtgtgaccgggtcagtttgagttgggttcgattaaacccatgatccaacccaaacaaatttgaatgggctggtttgggtcagttttctaagaaaaaaaatgaaacccaacccaaaccaacctgtttgtaaatgatttgggttgggttgggtcaaaacatttaatttgtctattctttttaaaaatgaaatattttttataagctaaaattttttattaatgaatcagacacaatttttttttgtagatttctataaaaaggaaatttgtgagctgtcactaccactggcttccatattccttttatttttttttgaaattggaatttactgccttttggaaaggatttcatacttggggaggttcaacctttttttaaacaaggaattaggcctttttaaagatgaaatttaaacctccaggttttaatacttggttttttggggggtctttttcatagggggttttatttttttat

SEQ ID NO: 2278 - DNA, 698 bp, Glycine max
cttcatctgtactgcaaactacagaggtcaaggttagctgtttctattaattaatgagattgaatgttcaaagtggaagcatttttcctgttcagttgttttatgattttgctcttttggtcaatgttattttagcagataaaactttatccagatgattggattcacccttatttagctattttctttacattgagctgcgtcacatgaatttaatcaattctttcatctgctcacacaggagaagcttttctcaagtaaaaacagaacagaggcttccatgggaaaaaagctgaagatagacatgcttcctgaaattgagaaagttcacaaggtactctagggttgagaaatttgagaagaactggtgtttgtaatactaaattcaaaatgataccaaattgatttgtttggcacagaaaaaggagaagttgctgaaaaagcaacacagacaagctcttctgcttgagaattacttggttgttgacgggcttggtcctgggcgttctcttcgtgacaggaaacctgttacctacacttttggtaagagcatgaaagtttataactggagccaattttttcatggtattggtagttaatgcgtacattataggctgattagtctgcactccttttgtataaatgttagaatatctgaaaaaacatctcataaatatctggattctatcctttgatgg

SEQ ID NO: 2279 - DNA, 869 bp, Glycine max
gacatccagcaagtaggagctaattggataatatcactatgcattttattaattaaatcacaaggctgcatgattagctctgatattttaccaaaactctgaagtatggaagaaagaccaaagtgaaaatgatagatgtcatgtgtgtatttgtgaataataataataataataataataataataataataataataataataataataataataatctcttcaaaataattataataattatatttgtggatatcatattgccatctacagagcagtagatcagttgtatgctcctacatggacacaaggcaaaggcaatgaatgtcactatatcatgtatatgaattacttgttttgatatgcctcctaataacgcagcatatatatcacttaattatttgtagttaagctagtggcttctgattcatctaatagtattattaaaactatttatgggtttctatgtaaagtcaacttcatcatgggcccaaaataagattatgatttttaaggtgcagaccctgtttttagagacagaaattactagaagttggaaaaaggtttgtacatgtggacttgaaaaggaagtggaagaaacttgattttgatacttcagaatatgggagataaaaaaaaggcaaaaaaaaatgcttgcaatatggagaaagacaaaaattttttccttcccgttaatgcgcttttatccttccaaagggtatattttatcttttttggtacaggataacaaataataggatttggaaaatcctacttaagaatgttaaaaagagatgagtcaatgtcgtgtgaaaaatacaaactttttaaaataaaagatatgggaccctttgaaaaaaaacaaacac

SEQ ID NO: 2280 - DNA, 817 bp, Glycine max
atacaaattataagtatagaaacacagtatcaagtgcatcaatatgctaaatgatttgaagtttcaaaccttgtaacacctctgtatatggaagctcccctggagaaaccactacttttcctgcaagaatgaaaatccaaattttcagtagctgcatatgtagaagtacaatgctaaaaatttaatggggcaagtcaagcaaaccttcgcaatgatgcgataaattcctgctttgttacatgtttcatctcctccacttcctttgaataattggaaacctgagaaatgaggatagaaataaggtcagtgacgtttgttccaaaatattgatccatgcaaaatctcagttcattatatatgtacaatgcacccaagaagttatttgacatatcaacgacttcagaagctatgtacacgttcactcaacacaaaaacagaagctagctacatatacataacttatattcacccaccacacaaccaccctcttttcattcatgccacgttggtctgaagatcctatatttcctttttgcggtaccttagcctccactttttgtgtaccaagtaaagcatatttctttcacaccaacactaaccattaaccacgttccattttagcaaaaattttgtatatactggttggatatttaaatatgaacactaacagttattccttccgtagaatctcttctttcgtcccaccctcatgttttcagtcctggatatgttttcatgccactaagatctatcaaaactgaatacagaaagaagtgactgccttacagggagttggtggtagcagtgggaccccata

SEQ ID NO: 2281 - DNA, 701 bp, Glycine max
ataaattgaaagcaaaaaagccattgcttcttatatattgttctcggaaaattttaaccaggtttctcaactaaaaaaagtcgtattgtttattggtaatctccttcgtatacaaaataaatatttaattctcttttatcagttggaacggaggaaagtatcaagaacctacaactgatgatgatggatcatattcaatcaattaaattaaattaaatagttatttttgtttctaaatgtataatttattgacaaaaatattctaatgaaaatacaaaatttactttctgaaagtgtaaaatgtatgataaatatattctattattaattttttattaataaaatagtttaagtgatataaagaaacgagataaatttgtcattaagataccatttttaaacgtaaatattaataactttttgttggatgaaaatgttaatattttttattggagaaaaatgtcactaatttatttttgacctaaatgtcattgcgtttcattagataaaaaatatcaataaattatgattattagacgaaaatataataattttttatttgctcaataaggcttacacatggtgaaggcgacatacttccataaaaaataataattaaattaccatgaataaaaaattacaaaataattgttaagaggatgacctgagagtgatgataagaatacttctttttttttttt

SEQ ID NO: 2282 - DNA, 671 bp, Glycine max
gcatactttggggaaccttttcactaatatgagtcttgggaaggtggccgtgtctttcactcacactatcaaagccatggagcctttcttttcagtcatcctttctgccatgttccttggagaggttagatatatcattcaaactgtgtttgcttaatgtggttaatcatcatgctggtacatttctcatatgctagcaacacactctttgacacactctttactattggttgaaatttattcacaaattttgctgggtctcacttctcatttaatgtatatctatcttgattttatagttttcaataaaatttaaccaacagaagaatgagtcttagaaagagtgtgttgctagtactcgtcttctcatatgctagcaacagactctctgacacactctttattattggttgaaatttatgaaaaataaaaaaatttggtgggtcccacttctcatttaataaatatctatcttgattttatagttttcaataaattttaaccagcagaagaatgagtcttagagaaagcttgtgttgctagcactcctcttctcatatagttgtctgtgaattgctatgtattctaagtgtttcctttgaaggaaaaatagaaatatttgacacattgagagaatttatttttatgttaattctttgcttcattctctt

SEQ ID NO: 2283 - DNA, 719 bp, Glycine max
gcatgcctgcagcgagagtgggagagccatcgtgtctcatcattcggtcttgattttcgaggcggttggcaccagcagcacaaacgggggaggagcttccccggcattgtcagcgcattacctggcggaggagctgtcggaggactacggatatctctcggagctggcttttagaggggaatatgaaacgtgtctggtgtacacggaggagatgaaagagcgatgcgtggagcagttcaagcaggggacggtgtgtatggaacagctggcagcggtggaagggttgtgcgagttggcgaggaaggcggttggggcgggggaatcggttcggagatatcacgtgaacctgtctgttttcacgtccgttccagacgcgtggggaattgaacaggtgtttcccattatccccattcaccgtttggaagaaaagccttcggtgaggggtattctctcggacttgacttgtgacagcgacgggaagattgacaagttcatcaacggagagtccagcctgccgcttcatgagatggaaggaggaagaacttactatctgggaatgtttttgggtggggcttacgaggaggcgctcggtggagtccacaacttgttcggcggccccagcgtggtcagggtgtcgcaaagcgatggccctcacagcttcgcggtcacgcgtgccgtgccggggccatcctgtggagatgttcttgagtgatgcagca

SEQ ID NO: 2284 - DNA, 705 bp, Glycine max
agtaaaagcattttctgaatcattaacattctcaattcttgcagatactcctttggtctcaataccactccattcttcacagaagcatttccaatcactctcagatatgatggttaagccacttacctagaattcacaaagtgaataattgtaaagcacacttaagtcacattgatgcataaaaatggaggaacaaagagagcaagttgacattgagaacatactatttaagaaaaaagatttgaagcatgctaaaattactgaatttagtttctgctaataaaacaatgacataaaaatgcaggggtgcatgtacatgtcacttgactgactacattgtagaaattccttcattattctaacttacagaagattcccttgggattatagcaccgcgtctgataaccagttcaggaagcctttcaatgagccctgagtgctgaatacacaaaaaaagtgggaacaaaattcatcatgaaatcgctatggattaaattcgacagactgaagacgtcatacacatgaagacccaatcagtgacaatttaagagtgttacaatgcacaactaaaatagtaaaatccctagaattacttttcaaagtagatattctcataataatcgcgtacctaaaaatccaactcaatttaacaaaatgctagttagtatactatgctgacacaaaagcaggatgcacataacatga

SEQ ID NO: 2285 - DNA, 649 bp, Glycine max
actattgttgttgaatataacttccaggccagtggaccatagaggttcagtatttttcctgtcacgtcagcctcgcacacctttcggctatctctagtctcttgtacccttttgttgacgtgagacctaatgtggccaaagaaattattttcgtagaatcagaatgagatctaaaatatttttgttaaataaaacaaatatgtgtatttgtttctttggcgtgggagtcttggaacttgaagtcgtatggaatcgaatcctaatcagaatggagttagaggaattttttttgtatggagaaatcaaacacaatataaaaacgtatctttatgatgctttcaaacaattgaactggattctgttagatgaattcaattaaaaaaacaagattctccagttttttttttcttacgagaacataaaccggtagtgaatggaaactaagctacgcacctcttaaatcaataggaagtttttctgagtaaaaccttctcatagtttttaagattggtagcgttaactttataaatttttctactttaattcttaacttttgtaaaaaataattcattttagttattctttacttaattttactgaggttttgcaccgaaaaagaataaagggatttacgaaataaaagttaacg

SEQ ID NO: 2286 - DNA, 666 bp, Glycine max
tctacaattttctctcttctttaaaattaattatttggatgctgaaaaattttaagaaaaaggtgaaatagaacaaagtagaaaaataataagtaaaaaatggataaattttaaagttgtttgaattgagagtaataggaaaattaaaaaaaaaaaattgagtggattttttttccctatgttctatcctaaaaaaaaggtgagttaatattaaacacgtttatgtttaataacatatatttatactatagaaaacaaaaattaaatatgttatttaagtaaacgtattttcatttaatttttaaatgaatttcattttttttactttttttatttataaattttcttctttttaagagagtttttttttttaaaaattaaaacgtggttccaccatatttttcaatcttatacgctcgctccccggctcccacgtgcaacacaattgtgagttgtgacctcctggttttgtttgttcacaaaatacaaaactgcggcgaacatgtcgaagaaaattttaaaaattaacctaacaccggcaaacacagttttgaagttatgtgtatatttattttaaacatttaatttaattgattaaaatattttaaatatgtaattaaatttttttctgaagaatatgccatttaattaaattcaaagaacttt

SEQ ID NO: 2287 - DNA, 669 bp, Glycine max
gtcccaaattgataagacaaagattggggatgcaaaacgtgatgtatatagtagtacttcttaaatccagatgtcctagtacgggaggaggaggagtaattcccaatgattaagggataaaaaataagaaaaatagaatagatatcacgcgcctcaagctgatgctgccgagttatttcagtgttttctcaggtttgagtcgataattatattaaatatttatatgaaaaactttttggattataataattttatttgatttgaataaaattattttttataatatatatatatatatctttataaaaaattaataaaagtatataaatgtttttttctttattactgtaataatgatttgtatttttgttttttagtcaattactttattcttaccacatttctagttactaatctaaaactttttctactgatattgtagagaacctaaacattaaaacatactagtattttttactgaaaaatgttattaatatatcttaacccaattttaatatatttcattttaatttttaattaaaaatattttaattaatatctttaaaataacaaaatgctatgtatatataacgaattatattttaaattaactgtatagcttatccattttggttttcttttttctatttgaagtaaagcattaaatat

SEQ ID NO: 2288 - DNA, 866 bp, Glycine max
tgttctggctttgtggaaagcaatagtactcttctgcctttggaactgaatagtaaagaccaattagccttgataaagcacgaatcccaaaaatcagtttgaaggggaaaagtacaatgaaattagaaagaccttacttgaatcagccttggagaaattttggtgaattgtggaaagctttctaattggaggagatggcttcacagctatagggattgacactggcctttcatttttttgatgaaattgtctgttggtagtcacaacctttttaggttccggttcattcacaatcttctgttttgctggtacattcacaacctccttcctttctggttcattcacaaccttggattctggcacactgatttccttaacatcaaagctccccttctccatctcaacatcaatctcctcatcttcttcttcatcatcaacaacaacatcatcaaagtctccatcaacatgcactggtgaacacttgatcatgccaacattatctgaattgctggaaattactttctctaggcacacaccaaaatccttgcaatttccatcactgtcattcttaccattgtcaataacatttttgccagacccaccagccatccataatccttggttttttcaaacaggatccactctggttggccttctaggctgtttgcattcccccatttcatcatagaattttaacaaaaatgattgtgtttttagcttccacatttttttaaaggtacctacttaaacttttttctgccggattggtttctttgtgaataaaaaagtgaaacttcatgtgcacacttatacaccttttggggtggtttcctggtgttaaaggtgtttcccccaaaaccgttttt

SEQ ID NO: 2289 - DNA, 4543 bp, Glycine max
gactggctgtgactgatctctctggtctaatctcttccagctgctggagaacttgatgaacttctggtcgtgctgatggagaaggatcaacacagtgcaaagcgagcttcaacgtgtttagcaactcgtcgccaactgtggatgcatctctcatcaagtctgcatcaaaaacctcatttgtccactcctctttgacaactgaggcaacccactgaggcaaatctagtccattcatagacaccccaggtgatttcctcgttaggagttctaacaagataacaccaagactgtagatatcagttttagtgtttgctttcttgagctttgagagctcaggtgcccggtatcccaatgctccagctgtagctatcacgttggaattagcagcagttgacatcaaccgagaaagaccaaaatctgcaattttagcatttgtattctcatcaagcaacacattgctggatgtgaggttcccatgtatgatgttctcctgggaatgaaggcagaacaagccacgggccaagtcttgtgctattttcattcttgttggccaatcaatgaatgtttcagttccaccacctgcatcaagatgaacaagaaaataattcacttattgatatggtatattaaagctaaggtgttgttccttaggtgctatagtgttccttaggtgtttttgtttgtactgttctccgattagaattatacagattactaaggtaaaactccaaattataattaaagaacagcacacacaacacttaatgaaagaacagcacacgaaacttaccatgtaggaaagaagcaagacttcctttagacatgtaatcaaaaaccagaagcttttcccctttgggtcccaagtaataggctctcagagccaaaacattggggtgtctaatttttcctagaacactgacttctgattcaaattctctatgacctttagtgatcttttccctcaatctctttactgcaacttgacttccatcctccaaaatagccttataaacagttccataggtgctctttcccatgatctcagctgttgcacacaagagatcatcagctgtaaaagccattggtccatcaaaatggactagtttccctccagcctccccacctgcttcaacatcaccaccagcaactggagggactcctttttctgtcctcatagtggccgctctaccctcggtggcttggccgttcccggccttagatgttgatctctttctgatcaggcagaaaagcaggacacaacaaagtataatcaggactacgaggagaactcctgctactatgagaattatgtctttggtgcttagcttcctatgatggtgatgttttgacacttcaggaggtggggcaatgactccttgtgatggagcttgggaaagacatggggttgaagggctgtatccacatagttgaatatttcccacaaatgagcttgagttaaatttcttggcaagcagaggggggacagaacctgagaggctattgtaggaaacattgaagagatttagactgcgctgactgtcaaaggagactggaatttctccactgaaattattcagtgacaaatcaagctgcctaagcgaggaaatgtttgcaatacttgaaggaatatgtccactaaattggtttctactcaaaatcagaacagaaagattacgcaatctacctaaactttgaggaatttgattgtcaaggaggttgttctctgcattcagcagtgtaagtgaggataaattagatagggtagcaggcaagttcccattcaaggcattattagaaatgtcaagtgtcttaagcctagaaagggttcctatttcatttggtatagctccactaaacttattatgactaagggaaatctcattgagctctcttaagctacccaaagaagcaggaacgtcaccagtgaaaaagttatgatctaggatcaaattttgaagcctaaagaagccattcttggaattcccaccccaagagttaggaagggagccagaaagattgttattttgaagagaaagaaaagtgagagaaaatgagtgagttaggctagctggtaaaggaccagagaaggagttgaaactcaagttaagccaataaagcttagtggaattagcaagactataagggattgctcctgtgagcaagttgttgctgaggtcaagagactgaagcaaagggcagaaacctaaagaaagaggtatggaacctgtaagcctattgttgaataactgaacccctctaaggttgggaagaagtcccaaagttgaagggattgaaccaccaatttggttatcatgaagactaagcttcctgaggccttgaagttgaccaattttgtcggtgattcgacccctcaaacccttccaaggaagctggatcacaataacctgtcccttagcacacttgattccaacccaacctccggaacaagctccatagccactgtcattccagctccgcaagaacccttctggatcaaccaactcttgcttgaaagcttcaagtgctaagaggtttgatgctgtcacaaccactccatcccaaccttcatcttcacacaaaactggcctcacgcatgaggggagcacaacaaggctccacacacataagagaaacaaaaaacaacatgggttaacgttgttcatgtgtgtcttgcatctttctttcttcttgtcagaaacacggttgaagcattgtgattgtgaagtgaggttggttttctccactgctactaccataacgaaaatcaaaagaatgaatgtaatgagagtaagagataagaggttttgatttagtggaacaaaaaaacagtgtgtgtgagtgtgtgtgtgtgcgtgtgttgcaagttgaagaatggtttttgtagtgagagagagggagagtgagaaggagcacgtgatgacataaaagaagtgtaggtgcgcgcgcgggttgcgagcgtgagagagagagaatgaacatgcagggttcagaatttgttacaaaaaaaaaaaaaaagaagaagaaaaagtgagtaacggctagttttccttgtaaatagtaactattcatgaagcatacttgtttttgttgacagggtttattataggatcatggcgcgctgttcttttattgcaaacccgcgcctctccaccaccaacggctatttcttcttcactactacacactttgtaggaccatacttcttctgctgcctttgttttctagcttccacttccacacacaacaatgtgccgtaggaaacacactgaaaagcaatactactagctttaatattctcacgggtaaattgtgttttacgtcattaagatcttatagtcttggattctaaaaatggtggttttggttcccgtgtttctgaaatatgttgaatttaattaagtcaaaattaaagaactgttcaagattaaaaatgaaattcaccatatttttaaaaatatgagaattaaaacacatttttaatagaggagactgaaactaattttgactaaagtcttgagaaatttaaaacacattttatcttattctttttaatacactatataacttaattttattattattattaaaatagttcaatatctcaaaaaagtcaattttaaaaagaatgccaactttttaaaaataagacaataataaaaaaaatattaaaagaaatgctaataacctatataggaaaatattctctgaaattcatgtatgtctcactaaataagtgagtcttatttatcatttgttaggtttcaatctcaaaaaatatgtatccacattatatattttagaagaaaaaatttatgatcaactaaaaaagaaagttccatcctcaattttttttttttttttggtgaaatgtttcagtctcaaattagtgagggatatttgaatttcaactaacagaaaacaatagaaagtgaattaaaaagtgtgatacatactatccctcctcctcgtgcactgatgaatatgtataaaaaaatgttattttttaaattaatgaattgccctgagagacaaagaccctggctgaaataaacctgctggcatctccaagtttcactgaagtgtcacgtggtgaggaaggagctaactgggttctgagacacttgcaagagaaatttatcagaaacattttaaaaaggaaatttaaacagggtctggttctctggatataagatttaggctacattaacgttcaaaagagtggtaaatggtaatggttttatgatgaccccggctcgtaagagttagtagtgtagtcgcaattcatatcatagcggtcccaaaatctgagaagaatcgtcgtgatcatcatgttcatggtacttcgcttttggtccacaacatgtttggaattggatgagctcataccacatgcatccatctcctttcctttgacacctttgttctcgtcgttttctgtaaaaagaacaacgctaattatattctgtgtcactaaattgtgtggggtttagttttgaatttttaccatccatacaacattttaattaattcacaatccaatgca

SEQ ID NO: 2290 - DNA, 3593 bp, Glycine max
acctcattttagggcgaattgaatttaacccccgcgaattcgcccttctaatgtctctccccaaaaccctactttctctcttccttctcctcacgatccccctagtaaccgccgatgacgccgcggtgatgtcgaattttctcaaatccctcactccaccgccctcgggctggtctgaaacaaccccattctgccaatggaagggtatccaatgcgattcatccagccacgtgaccagcataagcctcgcttcgcagtccctcaccggaacactcccctcggatctcaattccctctctcaactccgcactctctccctccaagacaattccctcaccggcaccctcccttctctctccaacctttctttcctccaaaccgtctacttaaaccgcaacaacttctcctccgtgtcccccaccgccttcgcctccctaacctccctccaaaccctcagcctcggctccaaccctgctctccaaccctggtccttccccaccgacctcacttcctcctctaacctaatcgacctcgacctcgccaccgtatccctcaccggtcccttgccggacattttcgacaaattcccttcccttcaacaccttcgcctctcttacaacaacctcaccggcaatttaccctcctctttctccgccgccaacaatctcgaaacgctctggctcaacaaccaggccgccggcttgtccggtaccctcctcgtcctctccaacatgtctgcattaaaccagtcctggctcaataagaaccagttcaccggttccattccggatttatcgcaatgcacggctttgtctgacttgcagctcagggataaccagttaactggtgtggttcccgcttcattgacaagtcttcctagtttgaagaaagtttctctggataataatgagcttcaggggcctgtgcccgtgtttgggaaaggtgtgaatgttactctcgatgggattaatagtttttgtcttgatactcctgggaattgtgatcccagggtgatggttttgctgcagattgccgaggcattcgggtatccaattcggttggcagagtcgtggaaggggaatgatccgtgtgatggttggaactatgttgtgtgtgctgccggaaagattattactgtcaatttcgagaaacagggtttgcagggtaccatctcccctgcatttgccaatttgactgacttgaggactttgtttctcaatggcaataatttgatcggttctatacctgatagtttgatcactttgcctcagcttcagactcttgatgtgtctgacaacaacctctctggattggttcctaagttcccaccaaaggtgaagttggtgactgcgggaaatgctttgcttgggaaaccccttagtcctggaggtggaccaagtggaactactccttctgggtcttcgaccggtggaagtggtggtgaatcctcaaagggtaattcttcggtgtcgccaggttggattgctggtatagttgttattgtgttgttttttattgcagtggtgttgtttgtgtcttggaagtgttttgtcaacaagctgcaggggaagttcagtagggttaaaggtcatgaaaatgggaaaggaggctttaaacttgatgctgtccatgtttctaatggatatggtggtgttccagttgagttgcaaagccagagcagtggtgatcgcagtgaccttcatgctttagatggtccaacattttctatccaagttcttcgacaagtgacgaataatttcagcgaggagaacattttaggcaggggagggtttggagtagtttataagggggtgttgcatgatggaacaaaaattgctgttaagaggatggaatctgttgcaatggggaacaaaggtcagaaagagttcgaagcagagattgcacttcttagtaaagttaggcatagacatttggttgctcttctagggtattgcatcaatggcaatgaaaggcttttggtgtatgagtatatgcctcaaggtacattaacacagcacctgtttgagtggcaggagcatgggtatgctcctttgacttggaagcaaagggtagtaatagctttggatgtagcgcggggggtggaatacttgcacagtttagctcagcaaagcttcattcctagagacttaaaaccctcaaacatactactaggcgatgacatgagagcaaaggttgctgattttgggttggttaaaaatgcaccagatgggaagtattctgttgagacacggttggctggaacatttggatatcttgcacctgagtatgcaggtacagaaagcctttgattttagttttgtacaattgtgccttaattttgaagttcatattttatatgctcgtatttggtggttatagctgttggttattacttcaatatcatgcttcggtgttcagcaaatttaagtagttcaccagagtaatcgctcacatacaaaaaaaaagtagaaagagttgaagggaaaataattgatactcaattcctagatacatggctacttcaaaattctttgtggctatttctttgcaatgttatattttgctcttttcacgtgttttgttgagttgggtgggggttttgctgcatagttcttggtggttgatgcctcaaaagatatgtcgagccatttttagacagtttaccagagtctgactctcaattatcctttacgatgtgatgaatactctggttgcattaaatctttgattgctgtatattgtcatgggcttaggtggtagttctctgtcgcaactaatcactgttgtggaatttatcattctatcccatttccttgttggatcggtgcattgaaacatcttttgttaaaactgttattttgatcggtgttgtttttatccatttagcatcaagacttttgcaagcataaaacttcctaaaatgttgcattgaatgtgattagatggcatttgattagtgctagtctatttgtttgattatatttaatgttactctgtttcttaccagctactggaagagtgacaaccaaagtggatgtttatgcatttggagtagttctgatggaacttatcaccggtagaaaggcattggatgatactgtgccagatgaaaggtctcacttggtgacatggttccgtagggtactaattaacaaggaaaacattccaaaggcaattgatcaaattctcaatccagatgaggaaaccatgggaagcatatatacagtggccgagctggcaggccattgcactgctcgcgaaccataccaaaggccggatatgggtcatgcagtgaacgtcttggttcctcttgtggagcaatggaaacctactagccatgatgaagaagaggaagacggctctggcggtgaccttcatatgagccttcctcaagctctacgaaggtggcaagccaacgaaggcacttcctcaatatttaatgacatttccatctcacaaacccaatcaagcatctcctctaaacctgcagggtttgcagactcctttgattcaatggattgccgttaaccaagggcgaattcgtttaaacctgcaggactagtccctttagtgagggttaattctgagcttgg

SEQ ID NO: 2291 - DNA, 887 bp, Glycine max
ggggcctctttggggttgccttaattgaaacttaaggatgatggtttagtcccacatcgaattaaagatgtggtttaaataaaacttggacgatcttcatttaacgtcgattttttggggttgatttagtccctaatactaagaaagtatcctaccatttttttagcctattgggccacccactattgaattgttattggaccaaccacatatttcctgttattcttgattatcagttgcctaaataggaagactcttgagtcatgattgtattgcaaagtaagcaatgatacatttttctacaattaattatcttcaataatatgatagtattgtttttatcatattatatatagtttgtatttgtaaacatattataatttatgactaaaacaggtcggtgataaggaacatttttatcagaaaataactactaattctaacattggagcctatactactatacctggtaggtgatatggatatccccccataaacgtgttaatacctacacacacgtgttatatgtggtgaaatagttaactgatgtaaaatcaataatccgaaatgatgaccatactttttgtcccaactgagatttaattctttaagtaatcaagatagaagtgcattttcttagctactaggtttactagatatttatacgtttgtcagattttaagggtgtgataagaattacaacttggttgtgacaggttatgctaatgacaaataaatgctaatgagatatcaaaattatgcttttatgtgcaaggttttaaatggtcattcggttttaaaatgctcattacataagtaaattggttggtattaatacatcacaaaactcccatgactgaaacaaactaacaaatgtccctaaattg

SEQ ID NO: 2292 - DNA, 793 bp, Glycine max
cgccagcttgcatgcctgcagtttatgggcagtggtggaccacatagattgttgccgatgaagctggaggcatcaaaggtttgcaattgagttcctgttggaatttttcccttcaaatgattgtatgacacgtctagcatgctcagaaagctcaaatttgcaatgcttggagggatttcaccaaaaagttgattcctcgaaaaatcaatggattgtaatgatctcatattaccaatgccttgtggaatatgaccaatcaattggttgtgggacaagttcaaaaagttcaatccatttagatctgtgatttctctaggaatttctcctaataatttgttacttgacagatcaatacttgttaccaaacccagaatgtttcgatactcatctcctcttcctttcagccatagtagcacactaactatactttccatcgaagagtaagagctaccaacatattgtgcttcagaatagatagaaggatctgtactttggttctttagtgtcatggcactcaagttacaaaaacagctcggtatattgccagacagattgttttctgcaaggtctaaaacctgaagatgactcatctgacatatttcatttggaatgtggccggaaaaactgtttgatcgaaggcggaggattttcatatttgagagcttttctccaacccatgttggaatacatcctgaaagattattttccccaaggtccaaggatatcaattggttattcttcttcaaactggtaggaaatattcccgaaagcaagttgttacgaatttgtaaag

SEQ ID NO: 2293 - DNA, 1004 bp, Glycine max
  misc_feature (811)..(811): n is a, c, g, or t
  misc_feature (932)..(932): n is a, c, g, or t
atctttccccggatcgccttgcttggaattgtgatcctgctgagcaattcttatcaataaaacggttattgtaatattcctaggattattccatattaggaattctataaaaaccatgtaataacaagcaaaggcaataagaatgattacagccttctcctccttctgtgtgctctgttccgtccttaatttctggaggtgctagacctcttcttctagcttgatactggttctctaacaatttcctaccagtttgaagaagactggccaattgatatccttggatcttggagaaaataatctttcaggatgtattccaacatgggttggagaaaagctcttcaaatatgaaaaatcctccgcctttcgatcaaacagtttttccggtcacattccaaatgaaatatgtcagatgagtcgtcttcaggttttagaccttgcaaaaaataatttgtctggcaatatacccagctgtttccgtaacttgagtgccatgacactagtgaaccggagtacatatccccgtatctattctcaagcaccaaataatacacgatactcttcggtatcaggtatagttagtgtgctactatggctaaaaggaagaggagatgagtatcgaaacattctgggtttggtaacaagtattgatctgtcaagtaacaaattattaggagatattcctagagaaatcacagatctaaatggattgaactttttgaacttgtcccacaaccaattgattggtcctattccagaaggtattggtatatgggaatcgttacaaaccatttgatctttcaaggatcanattttctggtgaaatccctccaaccatttctaatttgagctttttgagcatctagaacgtgtcttataatcatttgaggggaaaaattccacaggaactcaattgcaacctttgatgcctncagaatttattgggcacaattaatagttgttccaccactgcccataaaactgcagcatgcagctttggcgta

SEQ ID NO: 2294 - DNA, 812 bp, Glycine max
gacctccagatagaagacccatcaagatgatccaacaatcttttccctttcacaaacatcataaactaaaacgaccaggaagggtaattttttccggtaaagtgtacacagaagctttccgtagccagtgatactgaaactgagaaaaaaaagtgacccacgaaccagaaacaacaaccacgaaacccactagcacaaaccagaacaagagacccccaaacacaggaaccaaaagcaatgaaaagaccaagccaagagcgaccttggagggtgtcgctaaagaaatcataggtccgatcgacaacctgctcataccatgtcagaatttttgtcttgaatgctctctcttcattctgttgttcatccataaataatacaaattcgtttaccgtcattgaagacacatttacagccattaagacaataattctatttcctaatttataaaacctaaatcaggaaagctaataatatacaatgaataaacaaatttgctgattacaggaaacaacataataaccgaatcccttattgaaaatgtgtagttaaggaaatgctacatgaataccattttgttatcagaaatttttgcaggaggaagagttgtcattgttatttagttaaggatatacaagtgattcccattactttgaatcatccaacaactatatacccttaaaattttcacaaattttagcaaattaaagcgtatcaagtattttcatttttttcctggcagtgcatgagtagttaaaggtgcaaagcatgagttttaaagaagagttttctaacaacacgcggagtagtaacaa

SEQ ID NO: 2295 - DNA, 716 bp, Glycine max
attccccaagtcttcgatgtaccgcagtgagtgtgattactgcaattttgatttatttgtctgtgtgcaaatcatttaatctttcttcaacgtgccagtatatttgttctgaatgttatcagttagtgactgttatatatattaactagcatagcagtttgaggaggattttcttttgttatgcagctagaagcatgtgcacacccattctttgatgaactccgtgaacccaatgctcacttgccagatggtcgtccatttccccctctattcaactttaaacaagaggtgagtgtggctgcatcatcttcttagctatgaatgaaggttacaaaaatctaaatgccctacaatacgattttatgatcaagattcttgatacagcttcattatgaatatatccatgatctgatattcagtaagtaccttgtttagggtctattacatgtttatgttctatgtttacagttatctggagcatctccagagctcattgacaagttgatacctgaccatgtgaagcggcagatagggatacaacatgcccatttgactggatttctggaacatgatgttaagctcagcaaagtgtaatctaatggagatgagtaaaagagggttaccatcctattgtctaaattacaagtaattatacgttgcagtgtaattctgttgcttacactgtgcctgactaggaccaagactgggttcggatt

SEQ ID NO: 2296 - DNA, 850 bp, Glycine max
aaggcggggattgtagcccttgtgaagaataggaccgatgacatgacactagccattggagatggtatgaaatcttctatttacttgtttaatattgtcatcttccttcaaaagaatgaaaataaaataggataacaaagtgaacaaaagaaagaaaaagaaaaggcactggtagaaaatacagattaattttgcttggtgtgatttttgtgtttatataaaataatctttattatgctatattttaggtgctaatgacgtatcaatgatccaaatggctcatgttggagttggaatcagtggacaggagggtcggcaagctgtaatggcttcagattttgcaattgggcagtttaggcttttagttcctctcttattaatacatgggcattggaattaccaacgactgggttacatgataatatacaacttctacagaaatgctatctttgttcttgtcctattttggtaagttataattcagaaaatgtatatagttagatgctttcttcgtgtaattctgaatttgaatatgccacgaaaatagccttaaacaatttttttcttagtaaaacaaaatcttagatcttaatattgaacctggtgtacttctgagtatatacttcattgcactcactaggtgatttagataaaaaaaaaatgaaaaattcctttatgttctattctggtggcttttaaactattcaatagctccttgtggctgttaaggtttatgcctccacgttttgacatctttgtattttgttttccaggtatgtgctctttactgctttctctttgacaactgctataaatgaatggagcagcgtgttatattcaataatttact

SEQ ID NO: 2297 - DNA, 882 bp, Glycine max
aggaataaacatattaggtaattatactaattagtaacataaaccttcaagcacttatgtttgtcaacagcgtacttgttcacctccatagtaccattgcacccacacatactctcccaaacagttcaagttaaaagttagcatccaaagaataaagcatgtaagatcaattcaacaagaaaaaaaatagaaaatttaagataattaaaatcaaattgcacaaaccaatataaaaaatgtaccctgaatgcattgcccgactgaaaacaataacatcagcacccaatctcatggtactagttttgaaaccattgccatctagaataaaacatgatgttacttggaaagtgaagaatttcagagagaaagagaaattttattaatctgaaaatatgataaaagtcacttatgtactgttactgatatctaatatttatacaggcaactgaaacttctaggaagctaaagctctatgttatagctgtcataacagaatgtaatatactacatactggatcacaactaaaccatattcaccccaaaaaaaaaggcttaattatacttttggctactttaatttggaatatgtatgattttggtctcaacttttttaagtcaattaagtccctctagtcttgatacctaccatctctcccaacccatctcagtcacttcccaatgcctgcaccttcccctccccaaccagaaacttcctcacctaccactattgtacctcaatctaattctacttcacctcctccatccagacctaccaatattcacctcatggttaaaaggtccaaagctcgaattcaccctacacttctactcacacatgtggaacaccaaacatgccctgcaggcagcaagctggcgaatcat

SEQ ID NO: 2298 - DNA, 904 bp, Glycine max
agcttgcatgcctgcagctcgaagtgagcctagttgaactggggcttgagtctgcaccactttggaagacccatacacagatatatcaataccttgagccttctccttctcgatctgctccttaatccagaagtatgtgattctcaacccatcctacaacatcacaattgagatactgttaagtatttcatagaatcttgacgctgtttatcaagatcaaaaactgggaaagaacaaggtataaactacgaagattttcatctagaaaagctaaatattccattagagcctcttgaagaagttaaaagagctcaaattggatacaaaagtttttaaaacacaacacaagggggaattcatggaatagtttgacatagaagggagaattgatttatacaagtaccataaactgagcatggtgcaattgacctataagctatgactgttccacagaacttaatatgaacatggaataaattatatagagtggaaataagataattttcgcccaattcatgatagtaatattattaccttcaacctcatagttggagcccaaccaagtttttcttttatcagtgtattgtctgaattacgacctcgaacaccctcagggccaggaatgtggtgaataggaatattcttgttctcaaagccaagaataatctcagccatctcattcatgctaaccatctcatcgcttccaatatttactggctctcggaagtcagatttagtcaatctaaacaaaacaatagaccataatatcaaattttatcaaagattacaaactaactcaagaaaaggataaaacatctccattattgcttgataaacaccatatcgtgttcccctatccaaccaaataaagaaaatcctaaattatgtaaatgcagaaattcat

SEQ ID NO: 2299 - DNA, 994 bp, Glycine max
cgccagcttgcatgcctgcagattcttaccaattgaaccacatccaacctttggcttggatataggtacttctcaaggctaccatttggcatcaagggaaaaacaagggcattaaattctggcctacagcaaattgtgatgatccttattaaatttctgtgccttatctttttcagaatttgatattcccttctaaagctccttgaaatctcaccatgcgttgtatccaacaccttcacagctactcttgtattatcttgtagcattccttcgtagacttgtccaaaccggcctgaaccaattaagcttgaagcactgaagcctccagtggcctctctaagttgtttatatgaaattcttgggtacttgtggtcttctgttccctcttctacatcctccaaatcacctcttctaacgacagcaattcgatttctcacttttgacttgatcgttaccatggagtacctaaaaagcatgcataggagaggggtgccaaatagtaacacaggaatcaacaagaacaccaaatgataaccacgtttcttgtgacaatgttgcatgcctttaaaccggccacagagaccatcatttcctaggaaagagtcaatggtaagatttgaaaatgctcccttgtgtgagactctccctgagaatttgttgaaagagaagttaagttccttgagagaggaagacaactgcatggactctggtattttcccagtcaattgatttgaagacacgtcaagtgctcgaatatagagcaattttcctaatgaataagggagagggccttcaaaggaattaccagagaggttgagatactccagtgctgtgcaactttctagttgtggagggacgctgccagagaggttattcatggatacatcaatagctagcaccatgtccattttgctgagctccaatggtaaagacccatgtaagttattgtttgacaaatttaggtataatttcaagctatccaaggcagctactt

SEQ ID NO: 2300 - DNA, 849 bp, Glycine max
tgctcattcaaaattcactgttaaggttcaatttgttagattcaaaaaagtgctttttaggaattttagagattttaaaaaaagtataaattcattcttacatgtttttaattgtttacaacaacaaaaattactttttatataaaataggtaattggttttacaactaagaagtccacaattattttaagcttaaatacaattttaattttctattttgcagtttggtcatagttgattctttatattagaaatctgtaattataatccaatttgaaattgtgtctatatttttagtttgaatataaaattttgttttttattggttataggagtacccttcgtggacatactaaagaaaggaggagttctcccgggcatcaaggtggacaagggaaccgtggagctcgccggaacaaacggcgaaaccaccacgcagggcctggacgaccttgctcagcgctgcaagaagtactacgaagccggagcaaggttcgccaagtggcgcgcagtgttaaagataggtccaaacgagccctctccgctctgcatccatgaaaacgccaatggtcttgctcgctacgccgccatctgccaagaaaacggcctcgtccccatcgtggagcccgagatcctctccgatgggccccacgacatcgcgaaatgcgccgacgtaacggagcgcgtgctggccgcatgctataaagccctaaacgaccaccacgtgctcctggagggcacgctgttaaagcccaacatggtgactcctggatccgaaagcgcacgtgtgaaggctgaggtcatagcggagcatacggtgagggcgctgcaggcatgcaagctggcgaa

SEQ ID NO: 2301 - DNA, 929 bp, Glycine max
cttgtacagcagagaaagagtgcaaaataagaaagataataagacatacaaaaaacacatattaatcaacattttgaatgaacactgccaccaggaaaacatcagccttatatgttcttgaatcctgtttgagttgggctgctgttgtgcactaatgccatgacttctgctgcaattgtaactgtgatcctgaaactgcgatgtgagcctgcttctgtagcttcccagggctgcactgcaatgctccacttctatagcacacccaatgttgtgaaaattgagattttacacgggactgggagggggatgaaagattgtaaattgaaggatcatagcatggattgtaagatcctgatcctcccaatagatgcaaaattatatatagtaaatatacatttgataaaatgagataaggaaagtatcgtgtaaatgataacattgagctaaacctaaactgaaaatttagtatttatagatttataagtcataactaataggtctgaaaaaactcataatcagtcacataaatactaaacataagaaattcataatcagttagcctaaatcaaagtaaaaaattctgactcaaccgcaaaaattgtccaataaaaaaagaagaatttcttacatagaacaagaggcaccacattgcaccaacaaaacagagcaagaacaacagaacagaacctgagagacacatgttatgaacagtatgcaacaacccagtggatgcaaggcagagacagagcagaaatgtggttgcagtgaaattgagagtagagggaggagaagtgaggatcaaagtcatcgtttttcaaaatgggtgaaacctagaattttagggcactcgcaaacgattcagctgggatagcaaaggggttttgtatcaaaacttgacctgcaggtcgatcctagaggaaaaaacgggg

SEQ ID NO: 2302 - DNA, 882 bp, Glycine max
attatccacaaaaaaaaaaaaaaataaggcacgaatcacattcaaagacaaaaagtatatccaatataacacttcaaaccttttttcatcacagtgttgcttcatatcctgcttcaacgtgaagagaaaaaaaaatcagtataaaaaataataaggggctctatacaaaaaaggataaaacaagatatggtagattcgacaaacacactaccatagtgttaagagttaaaaatattagtaagcaaataaatagggcttgaacacgttagagattgttgttgtacttgtgcgtgtctccatatttgaatacagcagtaagaggttggattagatagaatagaacaaacctcaacaattcgaagttcattgagaagagagtctgaaggaatggtaattgtctgggtgatatgagagcgctgaaattgcaaaggtaaaaaaaatttagaaaatcatagagattgttgaagtttcagaggagtagcgagtactgacatagttatcaataagcttctggagttgaaactgcattttaccgagcattacgagaactttgcctgcgtgagtgcatccaatccaatccaataggatataggaaggaagagaaagttagttgatgcattgagtatttatgggtacgtgagggaagggtatagtaccgctttcttcgtcgtcatgcaaggcggttttctcaagaaggcaagagcccaattctcccaaggactctgagaattctgtaagataagaaagtttcgatgatgatgatgattattattcttaaaaagtggaaaataggagaggcagcagaccgaccataagcactgttggcggccactgctgccgcggaaagcaagctatcgtggcagtctctcatgtcttgcatct

SEQ ID NO: 2303 - DNA, 915 bp, Glycine max
acaacatgggatgggataacattagtattttctctttagtcattcttgttttcactagttctatacaaatatttgaaaataagatccaaagtgaaaaacaatggtgatattattgcaagagtttaatggctatgcactattagaataaatgtcaatcaatcaggatttgctgttacgacttttaaggtagttattgtaaaaatcagcaaacttattatacatgtagtttgtaaaagtcagtgcatagcctactatacaaatccttagttaacatcttataagacaggtctgatactaggttagaatttgagtttgattctaattcaatattaaaagtatctcatcaggtgaggatggtcttctatttatatagactattttgagtatatcactagtcaatgcgagatttctaaccgtgatgttctatttttagaacatatcaaacattgaatagaatttatatattatgttttgttccattttagcacatgtaccaccaaattctacaccttagtgttgtagtgcttggttcttaccaatggattggccagggaaggtgtcaacaagcttgacaatgtcctgttcaggaataccatcagtgcggaaaattccggtgcaaacaccaatgcggtcttcccttgttggtgcccagtagaacttctccatacgcccatcacggatgagaggtgcatagagtgttgagaaatcgttaccggtgacaatgatgggaacacgggggttctcttccttgttgtacatacctggaagctgcacattggtggggttatcagcaatgttcatgagagtggcattcaccatctggttgttcacagtgtattgtgtggttccaccaagacgaccagctcctgcatcaagatcgttgatgaagagagcgcacatctttcccttcttgat

SEQ ID NO: 2304 - DNA, 835 bp, Glycine max
tctctgtagagtcgacctgcagccttgactatatccaatgccatcactaatctatgtggtatgtacccatgaagcagtttcttgatgcaggtttcatttagtgaaaaattataattactgcaattcttgctcctaaatctgatgttctgattgttgtccaaacattttctgaatctgtagccaccctctttgggcaactttggagattggagccactggcaccagaaaagaaagcaatgtggcgacgagagatggagtgtcttcttagtgtcagtgattatattgttgaattgaagcctacatggcaaacatttcccgatggaagcaaacttgaggtacaagtacagcttcatgaacaatgtgaatgtgcatttacgtagctgtatgatgcatgctttgtttaattataaatatgtgctccttttggccttcaacccttttgagataacttctcatttggcatttgaagcacaagattttcagaagaaaataaaaatccctcttcagttttccctatggtttgtgaatagctgaattgtctggcattcgtttgattaatattgtaatgtcagttagatataatcatgaaattttaggattgcaaattaaagttgaaagctttttagtaatttttgctagatgatacgtctgttttgaaaacaaaagcataaaatttaaaatacaaattgatatcatctagctgagtaaggtactcgatcatgattttttttcaagtgtttgattagatttacatgtatgtgttaaaaatgtgctccaccctttaactgtaagatagtcatcatcatgaacatgcattgctagcacaatgcaatat

SEQ ID NO: 2305 - DNA, 766 bp, Glycine max
caaacttcgctgttctgcaggcaatatttagaggagcgatgaagggaaagcttattgtgaattgtcctctcccgccagaaagtataccaaaatttcagatactatacaaggatgtctgaaaattgaactcaaccctttactgctttttttttttctttttcatagggatagtttgtaaatacaccaatggtcactgttctgttttcttgtctttctcctttttgcttagcatgcactgacccgtaagcttgtgtctattgaattttttctcgctgttgattcatgaaataaaagtcggttggttctctacctgtaattgttcgattatagttccaggatctgtatgctgtgagtgtagtatatatttatccgatttggatcatcttatgttactgacatgaaattggtgaaaggttcaaccgtgtggaatcaacattttataaattaatgtctatgtatataaagaggttgttgaagttttatatatttttcttgaaggaaattttttattgaaacagaatttgtcgcacaagatgtgttccaaatcaccaacagaggttaagtatttatgagaataaagaaaacatccccccctgatacaatgcctcccaaaagagtaagtctgatcaaaacaccacataatacataccaaaacctatttatcagcttattcaccaagacaaaaactccaaagctttccataaaagcagtcaatttgtgctgtttctgtcactgcaacattatattatacttctgtcattcgact

SEQ ID NO: 2306 - DNA, 819 bp, Glycine max
agatggccagcagcagggaatcacaacttcaacagatatagaagaaactggtggccaagtacatcatatcaagctcaatagcaataaaaatgttaataaaaactcgcgttattctggtgttttttgacgatttatcctcttctcatccaacctatgatggaacagcttggctatgtgtctcctttcacagtcctggacataaaaagacaagaaaaaccattaaatgctactttcctcactaccactagagcatctactgttacaacgcaactcaaagaaattatctacatgtagctgtgtttaagattcctcaccttgaacatattcagatgaaaaggtttgtctggattcatccttctcagcttctgataagtatgtgcaaaactcagctgatcacgaggggtaaaccggtcaacctcattgaaccaaagacaggaaaacaaatttgacatcggagtgtgtgctctgataataaaagaaccttcgggtacatctgtcaaaagatattataagtcatttcagtacatttaatcaacaaatttcgagaattgacagaagaaaaacaaaaatcattaacagaacatactgcttggaagaagcttatttggatctgatgcatcaaatttttccagtccatcggcccggtaaaatgcaaattgttcatctatgactgtatgattatacttgttcaatttcttgttctgtgcaacttcttcccacacgcaatgccgatcgtagtgattggatattgcaaattcataaccctttcgccacaaaaagtactccaagataagtaaaggatcaagctgcaggcatgca

SEQ ID NO: 2307 - DNA, 1028 bp, Glycine max
aaggcaggcactaagagcaccaagatccattcctcggacacattggcaaacaaccttggcaaggttatttgtagtctctgaagctgccggatctgaggggagaccaccaaataagaatcttaaatgacgaaatacggtcatgcagactatcctcataagctcacttccaggaggaagcaactgaagatactttgcaaggagcttacgtcccttgggaagagataccaaccgaatgaaaacaagatcatccttagcagcaagcccaactttgtgtccattctttcccagtgggtcaacaagttgaagtgaagttgctagtccttccaacaggacttgccttcttcgtcttaaatgtgttccaccatcttgtggctgattaaactgtaggtaacgatcaatatcatccacatcaagaagaagacaaagaccatcctcaattgtgactctagcagcaaacctaggttcctgctcaagaggcttctctgaaatcttttgatcagagctagaagtgtttggagggtcaacctcaagaagagggcgaggacagcgaatagaagaaaatgaaaccctccctagggcatcaatctgaacaaatgaatgtggctcagtattagcacgggatcgtggaggatattcccttatttggcttgggcaaaatggatgttttaacttagccacattaggtttttttgccagacaagcttggtggtaatagtcatctacatatgggtcattactatgagtcacagcatgttgcattctaagaatgctctctatttcatcacttgtcatatacttggaccgaaactgaaatgaaccactgtcactcttttggctactggcatcagaaccatgtagggaaaaacgaagactgtgtttacctttatgagttgattttggtttatgatctctaccatcggtaattccatgcatatgttcatatttgctgattacagatgagccagaggaagggcggggattgaataaatgagactggaagcctgagtaagtagcctgcaggcatgcaa

SEQ ID NO: 2308 - DNA, 925 bp, Glycine max
gttccaattttcattagggttgttggtaatggttgaggggaacaagtgggcttaactgctttcttgagcagggatatatgaagcaccggatgtatcttgcttccctctggaagttccagtttataagtgacctccccaattctttgaatcaccttgtaggggtccataaaatcgtggactcagcttctcatttggttttcttgctagagacttcattctataaggttgtagtttcagaaagacccaagttcctgcctacaggattagctccgttctatgcttgtttgcagatcttctcatctgatcttgagccttgagcagattgttcctcagttcctgtaataattcatccatgtccttactcaactgatttacatctttcaatttggaaggaatgtcagctcctttaactaacagtggaggttcctgtccatacaaagctttaaaaggagacatcttggcagagatattgaaatttgtattgaaccagaattcagctcgggccaagtggttaggccactgttttggtttggttccagttaaacacctcaaatacgcttctaagcatcaattagctacttccatctgcccatttgtttgaggatgataggcaatactcatcttcaattgagtgcctgctttcttgaacaattgcttctaaaagaggctcataaaaagtctgtctctgtcagtactattgaggcagggaacacatgcagtctcactacttctttaatgaataactcagctacttccttagctgtataaggatgacttaatgcaaaaaaatgagcatacttattcagcctatccaccaccactaagatagtgtctttcccttgagcctttggtaaacctccaatgaaatccattgagatatcagtccataccttacttggaataggtaggggctgcaggcatgcaa

SEQ ID NO: 2309 - DNA, 797 bp, Glycine max
atgtgcaattatgaatcttaaccttaaaacttataaaactaaattttaacaggtaaatttattatttaataaattaaatcaaaggaccagattcgtgcagttttttaacaacggtagaggatcttaatccaagtaactttacattctgaattggtcatcccggaaggcaaataggaagtataggaagcaatagcctagagtatactggaggatgaaatttatgaaatccaatattcaatacagcccaaaatgaaaacattctgcaaacttaaccatatagcttcttgtttagtatcatatggagctttggatcaactacacttcattccttatcttttgcttcctactcctggtagtataaaacacattgttcaagcaattaaatgacgataatctcatcaaatatttgccctcagggccaagttacctcttacaaggaacttcatcagtttggtgacttctacctcatcactccttaagaaacacggcaaacaaagatggacccttaatacacctctagatgggagagttgacaaatgttgtaatgagtaataatacatgcacccacactttttaaacacctaaccaacacccataatttttctctctcttcatatcacatcataatatctatgtttctctctctcactaggtgtataatacatattggatgtctatgaatacttttccatatcctatatggcaacaaacatgcttattcaccatatggaagctattcgaggtaattaacaaaaatatatactcattgactcaacctatatcactaagaaacaaaa

SEQ ID NO: 2310 - DNA, 842 bp, Glycine max
attcagccctcttgttcagataatggcagcaatgattgatatccctgtcttgcatgagcagctccatctgggaaggtaaattcttctacctttatgcacagttgcaccctcacaatagtgcaccaatgccccacattaattatagtggctacttagtcctcaattcttctgtagtaactaaagttatatattactagctacttaaatataacaatcagccacctctctctaaagcctgattttcgatatattaagtttaattttaacaatattttttactttcaatcaattaaaaatgattttagatataattttttaaaataattattataaaagttatggatcagatcagatcatatatagtagtaattcatgattgaataaaagtataaaaaaatatttaattattttaattaaatttataactaaataattatgaagaaaaataggagttaagaaggaaaaaaaaaaactctttacctgatttattcttcgttgacttggttgtttagtgtgatgggttccatcttggtgattattggattgtacattcttctatggggtaagagcatggaaatgcagaatcgtgtggtcaagttagtccaagaagctgaagaaaccaaggaacaagagccgcaaccgcaaatacaacagttgacagtgtatgttcacgcagaaacgtgcgattcgcagtgccactgacacctagtcgcatttatatgtatgttcatgcgttaccaagcaattttctgcaaagttttaagtaggcatttacttagacaatacataagaaaatgtataggggttatggtttgatccgtctgggaataaggtccttccct

SEQ ID NO: 2311 - DNA, 905 bp, Glycine max
gatcgacctgcaggtatgagtggtgggattgcttatgttcttgatgtggatggaaaattccaatctcgatgcaacttggaacttgtagatctagataaggttgaagaggaagaggacattcttacacttagaatgttgattcagcagcatcaacgtcacacaaatagtctgctcgccaaagaagtgcttgatgattttgagaatcttcttcctaaatttatcaaggtgttccctagggagtataaacgtgttcttgcaagtatgaagtctgaggaaacctccaaagatgcagtggtgcatgctgctaaacatgagcaagatgatgaagcacaagcagtggagaaggatgcttttgaagagcttaagaaactggcgactgcatcattgaatgagaaaccgagtcaggttagttttttaaatttttattatattctttttatggtacttgtacctttgatgttcaaaaaaagcgatttttttaaaaacctgtagattgggcattcacacttccttaaagtagttattgagctattgctttttcaaatgaaattcaatgggcggtgttagattgaattgaggtgagtttgaaaatggagatcttggttaattacagggaagaatgcctagaaattctactttgagaccgtttctcctttatgtgaagatggaaagatctttttagtaaggaaagttttttacttcctctttgctgtaggtatcctataaatgttttaaattaacctagtagatactgtgctgcatttaatggatgtttaacgatatcttttggtggggtgcaagaatagtatagtttgtttattgcataaatgtgaataacatacaggggaaataagcacctagagaaattttttcacagtttatctttgttgatgtctttcgaatat

SEQ ID NO: 2312 - DNA, 893 bp, Glycine max
gctagcaccagctcctgtattcgcatattctgcgtagtagaggctgctcagaccaaagtttccactccacggagaccaacctgcaatacgagcattatatatattttcagtccttctacactacctaacaatttcatctatttacaagagaatcaccggtatactctctcaatagcaagcagaatatatatatatatacacacacacgaacttatttgtacttttcctttatttatgaaagaaaaaaataatataagataacttgtttataataagggcatgtttgtttgtttttttaagaaaacaaaatcaaattttctttacaagaatatattttgaaaattgtaactctgtttggattttcatagtattctacttttagttttttattatatgatatgtagaatttaataattatgcactagttagtataagtcatcttattagttagtatgactttttaaattattattataaaaattaacatcttattatacataaaacttatcctctctactatatatatatatatatatatatatatatatatatatatatatatatatatatatatattctttcttcttctattttatcttctttcctgaacactctggctccctaagaattaatttctgaaaattacttaataaaataatcttaaaaactagaaaacaaaaacacacctaattaatactgcaaccaataagactatgttctgtatctacactatctaacatacaaaaaagaaaagacatgggatgtgagctttatctaacaagtagaccccttctctcatgattctttttctttcttgttaaacagtgaagcttattaaaaaagaactggtggacctgcaggtcggactactagaggatacagccgggtaccga

SEQ ID NO: 2313 - DNA, 886 bp, Glycine max
attttgaaaataagggttcaggagttgtttacgtacggggaaggtattagcaacccatgcgcccgtcacaagggacggtagcctttaatcgagtgtgcataacgtgacttcaatattactttacttttgccctttttatgtttttttttttattttttggggtcgacaaggggactgcccttgctcctacgtatcctcaggtgcgatgaggaattcagacctacacacttctttaagtctaaatgtttgtgtgctaaattgattttatgtttttgaaagattcactttaattgcaaacaaaaggtcgtttaaggcgttggaccttgaaataatgttttaatttttgaaaagcggagagaatcgttaaggcgttggaccttgaaacgatcttaagaagttggttatgagttggttttatcttggttttgtttattaactttcaatctcttttaagacaactttacaacactagtgatcggttaagattgaactttacaaagaaaaacgagatcgtcgatgatagatagagaagatgaatgtgcacataatgacaagggggatccctaagggtacatagatcacattcaaatcttaaaaacaaaactaatcgacagtcgcatgaagaacaccgaacaagaaacgaagtaaggaatgatcacggtcgcgattcggtagcgccttggcctcgtttcctcttctttcttcttcttctttctttcttctcttaattcctcaccttctgaaccttggaacctctcctcagcctccctggcaggcctatttatagaaaaaaatggcatttaggaccatggcagctcgcccaggcgagccaagacttacacctgaagtaactggcacgcccaggtgagctgcagctcgcccaggt

SEQ ID NO: 2314 - DNA, 966 bp, Glycine max
gccagcttgcatgcctgcagacttttgtcactgctgatgaagcttatcattgattgttaaaaaaacaagaatggagtattatttgtcaacatttaatcaagcaggaaaaacatattaactagttaacttattttcatttgggatatgataatttacatagatataatacaaaaataatttcaccgggcacaagaggagagaaagttacaagttattataattataaatgaagggtgcatatgataaactacaattttttttaggtaatacattagctatatttttatgtaataacaaattcatcacacccacacccaaaaatctagtgaaaagccgaaacaagtggacaacatttgaagtacatatgctaaaaatgcgaaacagttgtgtctgcatacttcacttttgaacacacccccccccccccccaaaaaaaaaaaaaacacatacacacacacaaacaaccctcccttgtataagctgaaagttagaaatccaatatcattgtctttagtaattacaaccccgactcactacgcatcccaactcagacatgggcctgtccatatgggttatattttcagcccacatcccaactcagctacgcaattatcaaacaccggtttaccaattacaaccccgagtgctagcatcccaagttttagaatcaatcaaacaaacctcagtaccaagaaccctatgccttgacaaaccctaacgttgatttaaatcgtttgttcgcacttcaatctccaagtcataaatacactcttctctccccattcactcgcattggcttttggtagttgaagtctttcattgttgtcaaattcagatcaggttttcctttttccctctctttttatcttatcgattttggttcatgccatgcctctgtaactttgtttgtttgtttgtttgtttctttctttcttcgtgtaatccctgcaggcatgcaagctggcg

SEQ ID NO: 2315 - DNA, 837 bp, Glycine max
tacacgaagaaagcaagaaacaaacaaacaaagaaagaaacaaagaaagaaacaaagaaagaaagttacagaggcatggcatgaaccaaaatcgataagataaaaagagagggaaaaaggaaaacctgatctgaatttgacaacaatgaaagacttcaactaccaaaagccaatgcgagtgaatggggagagaagagtgtatttatgacttggagattgaagtgcgaacaaacgatttaaatcgacgttagggtttgtcaaggcatagggttcttggtactgaggtttgtttgattgattctaaaacttgggatgctagcactcggggttgtaattggtaaaccgggttaggttgtttgataattgcgtcagctgagttgggctgctgtgggatgtgggctgaaaatataacccatatggacaggcccatgtctaacatacattttcttcttcttctcaccctctacttcgttagctttttgtaaaattagtttccataaatttcgttgtttaattttatataataatgtccgttaaagacatttttatcaaaaaaataaaggtgagggtgccaagatcaaacaagtatcaatatcatgggccttatggacataagcataagctaagggaactgctctatcaaaaaacaatatatattaagtcttattcgttatcataatttcataaggaccacaattattaagactgtgatatatcataaaaaacatagaagcaagatttttttattttattaactagcatgggtagttaattgagcgcaatattggtgctattgtgcccgaacgtccacatgacaccctacttcttcttcaagca

SEQ ID NO: 2316 - DNA, 842 bp, Glycine max
aagtgataacagatctcaaattttattgaacttcataaccatctttagtataatagatattagaaaatggttacaaatgaatgaattttgcttcatactcactattagaagcagcctccggccacttttgtccaccaaccatgtggaaattccagttgctatgacctgaaaaagaaagctgattactagaactgaattcactatcattatattcacatgaaacatgatatgcagtctaggctttattatgcaacctgaacggctccaagtccaactgtagcagcttcgctagatgaaattcctgttacaataagtcaaacaccagatcaggtgcagttcaaatcctggatgtattacagctatcatctaaaatcacaaatcagttactgttactaagtgctgaaactaaaacccaaaaaaaaactgtatatcagaattaaccatctttacattcctttcaatcgaacacatcattaggaccaaaaatctgagactcattaaaatgaactaatgaagagtttaatgccattcagatttcagatacaattttcaacatatagtaacacctcaagccatgttatacttcatgcacaggaattttgagtgtttaaaattttcttcaccccacagattacttaacaccaatcaccctcgtcagtctcatcttcccacgtccccaccctccaaaccaaaaaaataaaaaataaaattatcaacccgataaaattcagtttaactgctgatagatagatctatacctgcatttgcaaagatggtagttgaatagaacaaaattccattgataccagataattgctgaagaacaagtaatccaataccaa

SEQ ID NO: 2317 - DNA, 834 bp, Glycine max
tgagtcgacctgcagttggtccaaaacatgctttattcatcatgatatatggatttagtcatgtaatgcaaattttaaacttggacttggaagtttgcttcaagcctctctttcataccaactagttgccagagtatctatgagtttgaattcaaagtttaattacagcacagcgataccaacgtagcaagatcgatccgattcattacaaattgttacacggagttatacaggtagctattgaaacaaatatatattttttttcaaggcaaaatcgattgtggaataatgacgtttccaatgttgttgtgccatgggtcagccaagtgagcagccaagttctccaaaggtccagtgccgggataagctgattgttgaacacagaatcccacaaaagccaacaaagcaagacgtcctaaacattgaacaaataacaaaatgttgtcaattttctatacaacaaacaaatgttagtagtacatccattttctagctcaattggttaaatagagtgtgcgaattattataaatctctcagtatctgagttcgattcttactgataaaaaaaatagatgttatggctgaggagttcttaccatttttaatttctttgactttgtattcgtggaatgttttagggtccttagagtatcccaaaggatcaaaagcaccaccagggtatttcttcttttcagggtccttctccatgctcctttggtgctccacgaaggaaatagcaaggaattcaatggccagaatggtgggtagggtgccccatggaactgggttgcctaggtaggttgcttggccaccaggaactgcaggcatgcaag

SEQ ID NO: 2318 - DNA, 820 bp, Glycine max
aaccttctcattaagttgcaagataggaacatgctttgcttggcggtggtgccaagctcactaagtggaatttccatctttggaaatgttgcacagtttgattttcaagtggtgtacgatctcgaagggaagaaagtttcttttgctcctacggattgcactaaagtttaattaattaattaattaaaatatataaaagaaattaaagaaaatgtttaacttgttgcttcttttcaataataaccgattcattgctaaattcgaaaggggatattttattttctatgatatataggtatgtttgtcctttgaaatgcttgaaacaatgtttgtagcaaataaactttgttagggctgggatttgctgtacgggtaccggttaaaatacttcttgaattcttatggtaaaaatgtcttgtatttattgtacatgattggtacctcaatctgagctatagatatacgatttttttattcggtcaaagaaagatatatttatgtagagtgatgatgatatatatatggacatcaatattttttatacacctaacaaatatcttacctttctttctatctctatatcttaaattatattacctataaaatctatactttttcacttttatctttctccgaaagtgtacatctatattttttcatttatgtaagtgtaagttcaagggtaaaatgagagcaagtaaaatacaaaatcccaagatcccaaaacttgtatacaagacccaagtagatacgttactcgagctatccaatcccacgaaaatagctgctattcagaaagtgatctgtcaccccaagacca

SEQ ID NO: 2319 - DNA, 825 bp, Glycine max
ttccgacttgcaagaaggttttgtcatgatgattgacgatggaagaggcatgttacgaaatttaaatttgaatcgcaattttgaaaggtaatgctgagcaaacaaaagaaatacctttatttctccatttttccaattttaattattttgcatattcaataccttatgttattttttctgagtttttctcacaaatattgactgcaagtgttttgtagtttggttgggaatatttttttttcattgacctagttttgtttggtgcagagagattggtctaatattgaattttttttattggtaattttgtattgttattaaactattcagagattttattgtgtaaaattgtatgttgttcttatcatttggttgaagtttacttattagtagtttcttatgttataaactacaggttctgtaaatggaggaaattacaaagaattggcagcatgaccagcaaatagatcatcattggtaattaatcatgttgatgggtactatatatgaacttttttgggactcaccaaatttttgtctacaggtaaattgatctatcataaaaaagatttgcaggtaagagtctacgcatcttccgtttggtccttgagagagacatggtttcatcctccttgaaatatatttagacccttaattttatgttaatttgcgtttttttgtatgctacctatttttactcatttgtctccattttactgattaactaataatttttttttcttattcaaggtacacttttattattttatgatagattagacaatttaaactagtctaatgcctaacattggctgcaggtcgact

SEQ ID NO: 2320 - DNA, 851 bp, Glycine max
atcgccagcttgcatgcctgcagttgtggttgaactcctatcttctcagtcaaacactcatctctccttagtttcttgcaggtttggtggttctcttaaactactttttgccaggtgtggcagccacaatcttgtaaaaacatgtttttcttcctttttcttactggtagtaaaccttgagttgtgaatttcatatgcattttttaattgaagattgactaaatgttagttgcatttttaaggttactttgcctatttatgttattttatgtatatataatttgttcgaatataattttgcatttcaagtaagatataatgatccatgttacgatcatgttttgtttttctccctcttccaatctatcttaggacctggattttgacaacattgctcacttcccaagtttcaaaaatattgcacacaataccctctcttatttggcagatgtactgtgtttcattaatatatgcattctgacatcattgtacacagtacacacttgttcaagcaggaggagtattgcatgttttaatgaaggtaagttactgaaatgactcaactacccttttgtaattaaaatagatctgtgtcctcatctcttattattctttcctttttttttcactttcctcctccttattgatcctataacctcctccattgctgtcctcaagttaaaccactgaatgattacaatttacaacagccaccaaactatgaagcttccatccatctaacctacaggcctacacacaacctaaacaccaagtcttcccaaaacagcatataaacctccatttaaccagcagagcatcatccctctctgcaggcatgcaagccttggcgt

SEQ ID NO: 2321 - DNA, 870 bp, Glycine max
ttattaataagaaccagtgacattacaaagacaaatattagatatttcattcccttaaatgcaagatgagaaaagttccatgctgttaggcatcaaatatagaaagggcatgcaagaaaacagtatacacacaccactaagagatgttggtttgagctttagaaaaaagtgattacaaggttgtgaaaaaagaaatgatttcttttcggagattccatacaagtagaagatattttgcatgaggtggttataattatatgaaagcccttttatttttggaaagtgattttgattttgggttttcaggtatatcagtgtaaaaatattttttctctcgaaaacctatataaacctatatgaacaagacttgtagtttttaaagttcaataaggaactaatatatttttttctaaaaaatcggtttcctatctatccatctactttctctcatcaatcacaactgattatatcttcacaagctattcctattagcttcccaaaaaaatctgaaatttgattattttcagactttttttgtcaaaagtttacccaaacaacttaaaatatttattcttttatatgaaaagtgatttcttcacaaaataatcttaaaaacaagcctctaaagccagactggtaacaactaacaaactactatccagtacttacaacaagagttgaatccgaaaaaactggtaaaaaaaatctgtcagaagaaactcaatcccacagctaatatcaaattctatgctgaaaaaattagaattgtcttggcctggaaaagaaaacccaaaaaaatcattaaatggatcataattacctgatggtctcgcatcggattccagtcatgctccacaaaaacaagggtat

SEQ ID NO: 2322 - DNA, 771 bp, Glycine max
ttattggcattacaaaaacaaatattagatattccattcccttaaatgcaagatgagaaaagcttcatgatgttaggcctcaaatatagaaagggcatgcaagaaaacagtatacgcacaacacaagatgttagcttgagctctagaaaaaagtgattacaaggttgtgaaaaaagaaacgatttcttttcggagattccatacgagtagaacatattttgcaagtggtggctataattatatgaaagcccttttattttgaaaagtgattttgggttttcaggtatatcaatgcaaaaatatttttttctctcaaaacctaaatgaacaagacttgtagtttttaaagttcagtaaggaatcaagtgattatatgtccacaagctatattcctattagcttcccgaaaagatctgaaatttgattattttcagacttttttggtcaaaagtttacccaaacaaattaaatatttattttttatataaaaaaagaagtgatttcttcacaaaataaccttcaaaacaagcctctaaagccagactggtaacaaactactatctagtacttaaaactagagtagaatccggaaaacctggttaaaaatctgtcagaagaaattcaatcccacaactaatatcaaattctatgctcaaaaaattagaattttcttggcctggaaaagaaaatccaaagaaatcactaaatggatcgtaattacctgaaggtctcgcatcggattccagtcatgctccacaaaaacaagggtat

SEQ ID NO: 2323 - DNA, 939 bp, Glycine max
ttcaaataatttgttttttcatgggtttgattttgctcccaatgtgttctgtttcccaaatactattttttaaatttattcaatccaagttgttaatagtaaagcttttcatttagacaagtttagagttaataaatttaatgttttcaaataaatatttgacgagcataacttattttcttattcaactcatagtaatattcttagttaatcaacatcaattattaaacttattattgacgatacaagatttaatttcttttattgaaaaagaaaaacaaaataatgtaaatattttctattcaacaatattttctattcttacatttttaaccaaaccttatttatttattaatgcatattgttaaactttacttaaattaagaagtatgtgcgtaatgttaaaaaaagactttttagttactattaattaatttccattaaagaacacatttaaaaattgaaagtgcacaaatggaaaaagaagagtgcgtgacaaagcagcactccattggttaatatgaaagcacacggatcgccatgtagcgaatcgggagccgtagataggatctaatccaaccgtccacgtatgtctcaaagccggatcgctgtaatgacaacagcagcgtggaaagctctatctataaaacggtgccaacgccaatttcttctctcatccatttctcgcaacaacgcttaatctctctcattccccatttcctcacctccttcaaccgctgctaaattctagggttccgaaatggacgctggcggaaagatcaagaagggcgccggaggtagaaagggcggcggcccaaagaagaagccggtttcaaggtccgtcaaagccggtctccaattccccgtcggaagaattggccgttatttgaagaaaggaaggtacgctcagcgtgtcggtaccggtgctcccgtatactt

SEQ ID NO: 2324 - DNA, 873 bp, Glycine max
gtaatggcctgcaaaacaaaacaactttatataaatcaagactttcccatccgaaaccctctcaagcagaaatcctggataagtatagcttgagtagaagaggtatataaaatcttaaaaatgcttttcttattattaagttcataaaaagtcaattgattattttaaacctgcataaaaaattatcatggagcaaaagtaaaggccaaaatctggtcacattaaataaactgtgcaaagatataaaaagataattaacaagaaggattgcacataggattgaaataaccaaccaattgaaagattaaggatacttcgttgtcgctgagttttcattagctcaaactcaaaaggaaaggacatgagagaattcagtgtaaactagtccaattgagattctcacaatcaagttgcagtgttgcacaagacaaataaataataataccccaactgtaaatctgtattcctggggttttctagaccatgatattatattagcaagaaataatcaaacagaatgtgcaatccttcttcattaaatatttaaatgtcaatcaacaagatctagtccagatttcacaaaggcaaatgtgaatgaccagaaaaagattatataccatgtttatatctgcttgttcttgacaaaataccatagaccttatttttaggatgaactccttcaaagaagttggccattgatcctgccacaaagtttttattatatacacagaaaataaattattttaacaaaggaaaaaataagcatagaaatgtggaaaataaggtatcccttcggaagtagggaaggagcaaacatgagacagaggaaaaacataaaatgagaaagatttgaatgcaaaaaatgcatccaat

SEQ ID NO: 2325 - DNA, 888 bp, Glycine max
aagatataatgggcctatgctctgtctgtgcttcaagctgaaaggcttgtgtgtataagggagcatgttagagatagaagccattctggggcttagatctagatgctttaagctctttggaagttagtccttaacatgtctcaacctctactagtaagtattaactacctgtgtttttgtctgataccaaccagttatgatatttattttctcggtgaattctctgctcctgtaatgtatttcttcagagcttttgggacctgttgagtgaagcatgatataataaattcataacactgaccacagcaatataatttttcaatctcatgcaaatgcattgaattagtgcaattcagcttttggcattataatgatctacagtggatgctatcctttcttggcagttggccctgcttattgtgtataatgtgcttaaaggatacttgcacactggaggagaagaagcttagagatccaaggcgtctgtatgcacctggccgactctatcacattgtggagcgaaagccatttaggtaaagtatgatactctcaataaaatttgtctgaacatttgttgatctcataggtcttagctatgacatcttattgaacttcctctaattaaaggaagacttttcactgtccttattgtactaactatgtaaagcaaaatcatgcattttaacaaaaatatatcacatattttgaaatggtccaacatagtagtgagttagctaattgtggaggacgataatgaatgtggtcaatgggagctgatttatcgttccattgagttagctaattgtggaggacgataatgaatgtggtcaagaggcattcagtagacattccacatgcatgtggttctccctggaagttttacacagc

SEQ ID NO: 2326 - DNA, 777 bp, Glycine max
gaattgtgccggaaaatcaaccaaaccaccccctccaaccccaactgctgccccaggtgtaggaatatatgctgctcctaccattggacaacctataggtggaccccttgtatctgctgttggcaccccagtgatgaaccttcctcccccggcacacatagcatatggtcttggagcaccagttcccagggcagttgttgctggagcaccaatgaacttaggtcctgtgccataccctatgtcacatacatctgctcatagatgaagttctgttcagagacctaatgtacaaagagaaaacagcggattagagaaggcttatgaatgtaatgtaattcttttcctattcctatagctgcttatgtgcaagagttttatgctacatcaattatttcaaataagggatactaagaagcattagaatgtatctgcatcggctgcgatggatggaaatatctgacagccttgacatacgacagcatgaaagtaaggttgttttatagacacttaaattgttgtagttagtcatataaagtgacacatgctgtagaggaaggttctgtggctttgataagttattgttgtattttgatcacttggtttctgattttctgtaggatcttctaaatttcccatctagcttcacttattttcaggtcagttgctatgattgacatgatatgttatagcaaatatttgtccattctggcaacattgccatcaaaatgtttcaactatgaaatataaaattcttccattggtaggagtttttaattg

SEQ ID NO: 2327 - DNA, 879 bp, Glycine max
gctcggtacccgacttactctctagagtcgacctgcagatgatgaacttggagcaatttgtgatgataaatttagaaagtggaaagatgaaaaaagagggcatgtattggcgttagaggaggaagaacaaataaaatggaaggaggaacattttaaacatctagaagatgtgcatgaaaaacttatagatcagtttaaggcaagtaagaaggagtgggagttggaaaaatctacattgcttgatgagatttcctcattgaagtctttgttagactatcatataataaaatgacatgatctgcaacaccagttacagatgtgcaaccaagcccttgctcatgaagaaagcctgagaaagcgtctggaagatgaagtctccaatttgaacaagaagtgttttcaattgatgaagcagttggagttgaaagatgctgttttgatcagttccaagaaatatatcaatgaagagcgagagaaagcagcatgtttgatgaggcaggttgagtcctatggatttgccaatgaactgctacatttgccacacaacgaacttgataggcacaaggatttgcatatggaagatggtttcaaagaacaacttaaggaagtttatgatgctttagacagggcaaacattgaattggatgagagaatatgtgaaaaaagtgaaatggagtttgaattgagaatatggaagtcatttgttgaacgtttgaggaacggtcttgaagaaaatcttgtcatgtgcaaagaactggaaaattcactccttgcacaagtagattttactgaaagcctcaagcaagagaaagatagcttggtttttaagttagaagagaaagagaataaaatagaatgccgacaggcatgcaagctggc

SEQ ID NO: 2328 - DNA, 885 bp, Glycine max
aagggacagtagctgaggcctcttttggtagtaagtttctgctctttcagcaaaagtgtctcccatttcttcttcttctgttgtgctcattgccaacactttcattctctcctccaagtctgccatcaaaacaccaattttcgcatttgcattagtactacactaacaaaaattaaaagcctttttctcactaagtgaggttggctacataaaccacacaaaggcactcatattggctataaagattaaatgcttttgttgtattagtaatgtaaaagaaaaaagaacacaaagaacaacgtttttttttcttccttaccaggtttacacaattccatagcttcaggaccataaagtttcaacttgtaccaagattgacattgggatgtaccccaaaggaggttaatatagaccagatctcaacttgattgacgagtaaatgagctataagaaagtgacatgttaccaaaccgtcgacaccataaaagggaacactgacaaaacccataaataactctggtaggcaagataaaatgatacaaggaaattaaatagtgcaaggactgaataatttgaagatagaatttgaatttgcaacatgagttaggcaccacaagggtatggcacattggcactctagtgtctagtctagagttacaacttacatctactacctctagttttgaatgcaaaggtcaaaatcatgtactatacctgagcatgtgcactgtggacagaaaagcaaatgttagccaactttcaattttttattttttaacaagggtaaatccaataaagttaagggggaatatgagcacaggctacgaggcctaaatggaaaggtcaccgttacaattttacaaatgacacaaaaatctaatgcac

SEQ ID NO: 2329 - DNA, 811 bp, Glycine max
agcaagatgaactggcagggtttggggaggagtgaagaaaggagcactattctcttctcgtgggggaaattcaactccagcagactgccaattattaaaattaatacattacagaaattgaatatcaatgtcttagctccaatccaaatagaagcaatttaataatataatttgtgcgaatgagcacatacatatcggcacatgtattgatttattaatgagaaaatcaataacatacaggagcagatttaaacatttttgtgaagctagtccaacaatacaacttactaaaaataatctgggaagggcaggggaaacactgatgatatgtgaaaataaattttgacacatcataataaagtgcatgctaatgtggttctggattaaggcagcaattaaaaaaatatgttccaacaggtataaaacaattgacattatcattcattacagtatgtatgtacatgaataaaaaatagaatgtcaatatatacatacatatatatatatatatatatatatatatatatatatatatatacacacacatacatacatacatttaaaatagaattaccactttaaaatttagaataacactaagaaagcaatatcaaaatttacaacggcaatcacctttaattcattatatgctgcaaggtactgtggatattttccacttggtcctccaaaagcttcttgccatgtatcaatcaaaatcaatatcttttccctcacacgtaagtctggctgtacaatataggattaaaaaaatgcaacacttgataagcaagtttttcatttgaaacataaa

SEQ ID NO: 2330 - DNA, 850 bp, Glycine max
aggaggcatctgaattacggaaactagccaatactcagaaaattgaaaatgtaaaaaatttcctattcaattcataatatagatttattatctgtttctttttcaattctttagcaccagtacatttaatttttctttctgttttgatttctagtttctgaggtgtttattgtagtccttatgatacatttgttgattgccatcaattaaatatcttctactgctttgcttcttgagtgtcaagcagttttaagaggattcaatagcttaaatcctagtgacttttttttcccatgaattgtttattaattctatttgaggttagacacacatgtacccaagaataaaagagtagttgcttattttgtaagttatgagtggacatgttctaaaatgaagcatttggttttagttattgatggagaaaaagagatgaaagataatcaaaagttgaattgttattgactgagatgcattataatttattgtttcatttgttatatgtatgcgtgtataacccattgtactaacccttctctatgctaataatctagctaactagtgaaacaaatcattataggagaaagaggaaatagcaaaatgaatcctaaaggataatttaagatatgataatatattttcttatattctaacactctccctcaagttaaagcttaatcagctttgagcttattgcacataatcttttttcttgtatggaaaacaaactagccctaaatctaaaggttagggctggagcaatctagaaattgagcacaaccaccaagcaactagagggacacaactaaccaacgtgggttgggtatagtggaaggggcgtgtccatcac

SEQ ID NO: 2331 - DNA, 813 bp, Glycine max
cgggtaacttggtacttacaaagaaacttgtgtttggttaaaattgggttattcaagaacatgtatataatagactaattgagctttgattttgttttaagggtgctacataagaataaagaaaacagagaaatcagatgttgggaaagcatcccacacctggagagaagtttcggaatcttatctgtgcttgggtaaccaatccgtgcgattgttactttctcacaacacatgttccaaagaagaatatttctaatcaaaggagcaagatagtggaatgaatcaactccttgtctaacaagttaagaatcactgttgtatacaatgctaagagtgcctctattccatagccatcaactcagcctataagaccaaagcagtaccaataagacccaagaaagcccttatattttgactcgtaaacctaaggttatgaaggaagttatacctgcgcgctttttagaggatgcatatatgtatcaagttaaagattctaacctcagtataactattctacacattaaaaaagaaaatattacacacctgctatgaccccaaaccatgatggtatcttcatcaatcatctccaccctcgtcaacaaaaatcggcaagcatttgatttgaggcgaattaattgtcaaaatgctaagagacatcaaagaaaaaatcctttaccctcaagtcagtgttctgtatatatctcagtgcaagttggcccatgtcaacccatttttttttaaaatcgacaaataaaaaaattatatatagaaatgaggtaccagaaataccactgcaggcatgcaagctcggcg

SEQ ID NO: 2332 - DNA, 807 bp, Glycine max
cagcttgcatgcctgcagatttgtcataatttagcattttttttcttttgaaacattccaatacctttctttcaaatcattacctaaagaggtaaaataatgattgaaacaactgtgaacaaattgttcctaatggctaaaagaggcaagacaaagtcatctaatacagttttgtggatgaataaaattgacaaggaacttgaccatggcagaagtatttgtaagcaaagtatttcatcttgaaattagcaaatgtaagttgtgtgaggatctttagagaccaaaatcgagttaaacttttggagccaatttcggttcttgaagatgcatagagattgagtagttgatgtgaaaagatgaagcggaatggaaaaaattttaaaaaatgagagaaaaattgaggggagaatgtgttcattgggcaaccgtggaagaaaaacttgatctacacgatattatttcagacactcaattgccataattaaatttaagggtttaaaatctcagtaatacctgaaagattaaaaatacaattaaacctgaaaaatatggctcacattttgagaatgggggagatatgtcaaatgaagtataaaccaagttatttattgacaggcttgtatacaaagtgatttagatcaccggactatcaacaaaataactcattctccaattacttttatatagatcttgtagtgctgtttcgctatagcaaagaagaaaaaaaaaggaaacaaggagagaaaatgaagaaatgaagcaaagattatagaaaaataaagaaatgggagagagatagagagacta

SEQ ID NO: 2333 - DNA, 736 bp, Glycine max
caaaacaatgctcacggtagttggtgtggtatcaatattaagtttgtctggttttgggcctaagttgggcgttcgtttcagtgtgcaaggctggcgtcacagagtagaaaatgaggagagatctacaactaaaaatgggggtgagagaccaaatattcagtgtccaccagggagaattctagtgtgggaaaatggggaagctcgatgcctagtgaaagagagagttgaaattccattttcagctgttgctgcaacacctgatataaactatggatgtggttgacaatagcattcgttctccgtattgtaaatcatttcactcctcccttttcctttattttttttactttgttctactttttgtcaatatgctatttaaaatattatattcagtggctgattgtcttgattttggtaggtgatgcagttgatcctttattttgaaaatgggagaaattttgatctgaggtcacttatactttgaaaaatatgctctatttttaaagtttatggtaaggcattaatgctgtgcctcatcgtttgatgactgatgagtacacggtaggttatcttgagttgggggtgttttacacccaatcaagagactaggtattcaaaacctttaactcgatctcctctttttccttgatgggtttgatgagtgtcatgctcgtgtcattcaatcaaatttttattaatagtatggtagtatatcttggttggtttctataaatga

SEQ ID NO: 2334 - DNA, 882 bp, Glycine max
tgctgcatctctatcttggtttgactcattttttgaactttcagcagcaatagcagctagagctgctgcaatccctgcaactgatattgctgcatgcacctctgctctttgcaacctctgatcttcttttctcttcatctttatttccttaaaccatttttttattgagacatttttcagtggtatgatctgcttccatggcatctacatgttgatcacaacaaacctacttattgccgactgaactaataacccagttcaaacaagagaagtatgtcatgctaatgaaattcagagatcataagattacatacccatttcttccggaaacagctgttgtaattcaattcagggtgcatcgcttgctgcatccatatccatgactgaaaaaacgcaagatgaaaaatatatgtatatgaaaactagtcatgaaagattgatttttaatatcacttgtttctgacttataatttcttacctttacattattagacttccatgctgggaatgagccgaaatctgcaccatccattctatcactcttttccatcttatgcaaggtttcataaatatttatcacttgtgagtatgttgaatagcattagaacacgtaatgttacatcctcttatcaatcttctaatactccacaggtattagatgaaattaagtgtaaaagcataaaaaaattcaatagatttttggtttagtttaaccaataagagaattaatataaggatatattgcaagaggatttagaactattctattgcaatatagttgaaccagtttgactcaccgaaggaagagcgttggggctactaggctctaattgcttcatagagttattatcaagtagaacaactgatccatgttgtggctca

SEQ ID NO: 2335 - DNA, 808 bp, Glycine max
gcttgcatgcctgcagaaagaaaataactgatttcaattaatataattattccatccacaatgaactaaaggagatatgtattttccatttaaatttaaagtatagtaaaagaaaaattatcgagattttagacttgaggttattttagcgatgtttaaatagatatattctcttaccaatttacacctatagtttgaggagtatgcccaaccaccattgccttagcaccaactgcttgcagtgtctcatcaagaatggaacatacctgggaatcaaatttagtttcaaaatgtcaatacatatcagcttgaaacagaaatccattaaactgctaaggatcttagcaaacaaatcaagaaacatttgatatagcggcacaaaagtccccatgctagtttaaatgggttatgacattctttaggaacactaatgagaaaatgttgcggaaagatggcaccaagaagtttgttttcaggaaagactaattgtattttttgagatgttagatgaccattgcgggcatgaaaaaaacttgcaatttcttggacgcacaatgtaacgattcatgtttctctaagaaataccagatataaagctcatcagttaattaatgttttctattaccaggtaacttctttgttgcattatctctgttttgtcacactaagtcattgtttccaagtttgtttgtttgtttgtttagttatagaggtgctttgttcttttttttttttttttttatgataggagttttgttcttttattttaactcaggggagtaccttttgtaggtttatccttatcctt

SEQ ID NO: 2336 - DNA, 822 bp, Glycine max
agagacatattggaatagttccccgattagcaacagccgcgaagaatgctaccaacaaaataaaaatcatacagggaaaagtggctcttaaagattacttcttctcctcctcgtttgatggcttgtcgtcattcttctgttgaggctggataaacaatacaatcagaaaactgatagcagcacaggaagttgagcaaaataccacttacccccacccagaaaagaaaatgttgaaatttaagatagagcacaaggcataaaacatcataaggttgatagcatattagtatttttataaaattatcgttatccattaaaataaaataatatatatatacacacacacacttcagggcaaacttacgcaagcacatctaataatatacttaaaggcacaatataaacctgaaaatacattttaaaaacaagcactaatgaagtaatgagtaacataatttctaaaattaggttattaagaacacatttattttcttactcaacctagtataatcaaggttgtgcggtctgattatgttttcatattaaaaaaacaaaactaactattgtccttaaggcattcaatgggcagacatcataaacacttcacaaaggatttctaataaaaaaaaaaaacaattaaaagaagggagaaaggggaaaggtgttcaaggttaacgtttactggcctgcactgaaattttctaaaagaaattcctttcaaatccaatatattctttttcatagaaagactaacctcagactgattttgcatggacgccagcaaatccttgacagaagggtcatttgggtcaaccccaggaa

SEQ ID NO: 2337 - DNA, 858 bp, Glycine max
ccagcttgcatgcctgcagtaggttcattaattatcctcataccattgaggccagcaatggcaccgtcatgcttggtggcttttggctgtgagtcattgaaataagcaggtacggttacaacaacattcttcacatgtgtttccaaataaacctctgcaatcttcagcatctttgtgaggaccatatatgatatttcctcagcacagagatgcttctcctgacccttgtacttaacaacaatcatgggtttgtcattgataccagcaacaaccttgaatggccacaatattttctctttttgaatagttggatcactgtatttcctaccaattaacctctttgcatctgcaaaagttaaaagaaatctgggcataaaagtctttagaaatatcataagaaggaaggcagtaataactaaattgaaaatataccaaagacagtgttttctgggttgatgacagcctgatccttagcagcatcaccgatcaatctctgattactgtctgtgaaagcaacaaaaggtgtggttttgtggccttgttggttgtggattatttctactctattgtgttgctccagccacaatccaacacatgaatacgttgtatcaaggtcgattcctatggaaaatttctgatcttctttggccattctcttttaagtgaatgtatagtgaaatacacaaagtggtaagtgtgaagctgcatactagtagctgaaatatatacatatatcaatatatgcatcttgatttcgtaaaatgaatgcacatatatctgccttgctatcggtaatcaggacttaagtattcccattaaaaactaaaaaaggtctcttcgtgcacagtgcatctgtat

SEQ ID NO: 2338 - DNA, 839 bp, Glycine max
aaatataaaattaaagtagatctgtaattaataaattatagcttacatcacgtgtatcacctttctagctaggttgttaatctaagttcggaactgctgtttcagcacatttttttgctgtttggccaggctagagaagttgtctagttaatcaccatgaaattaagcatttgaaaagttatttctagcacaaacagtttacaaggtatatatatatagcataaataaattgaagaaaaatgaagccgacgaatcactatagcaagaagaaaagagaattgaatttgtttgattgctttataagcaagccgtagtatatatataatgctgaaaacacggggaaagtttattaattgcagcaaaagcatctttgataattaaagaaagacatgaatcaaagcattcaaatacattaatctctctcatgaacctaaaaaatcacatctaatgaaaggtccttgattagagaaaaagaaggtttgacaaatgaaacattagtgaagagtctacatcgttaaaaaaggaaaaatccacccacatgtccacactagctagccacacactcattattccaccacacggaacaaaagcagacaaaaagaaatcaaattggaattagtaataggaaataaaaaggcatttggagacaattaaattaatacagagggagtcctaaaggcaaaaacatcattaattaagatgaattgcaagtatagtcaaaactgacacatttcttttcaaactttctttttttctttgcatcattcataaagtaataagccagcagataaagccattccacaaacgaactaaaacattctttcttgcactaaagagca

SEQ ID NO: 2339 - DNA, 930 bp, Glycine max
agaaaatacaaattcagttatagtgttagaatctttagcagacaaggttgttaatttgttgatgaattacatttgtaatgtctatcaatagcatcaagaatgaatgaaaatgcatcagaatttgctcaattgccttagtcttaatagatattagataaacttccctaacacacaacttgtgttttgtttgcatcttaataaatctttttttttggttagaaaaaaaaaatccaaaattgcagaaggaggcacaatgaattcctcaggtaaaaattgcatgtgagctcctaagccagagccagatatatttaattaaacgcatgatatatttaaacttgttaagataaagataaatacatagcagtaaatatacaatttcttagtcaagactaagaaaaattgctcctaaaatccaaataatgtaactatttagattcccaataattatatttatagataaatacttgacactaaagtatataattctcagttttcttttataaccttccttgccaaacagtggcacaatactatcatattcatgacatggacaatacttttgtgaccagaatgggtggcacctttattcgaccaaaacattttacgaatctgaaattaaaataaaaagctctttaatgttaatatagctcctaattaactgtgatagatcacccataatctttttacaagactaataatgcttaatatgatactctcttacttcttaattataagattcttttaaaaacttatttttcttttttatattttttttaatttctagatacatacattagtttttttttttttacatatttttacttaattaatctcttctcaaatattattgagaaataactaaatggatagaaaaataagaaaatagtaattttattaattatttttttaagggatgtgaatgaatgcatt

SEQ ID NO: 2340 - DNA, 938 bp, Glycine max
cctctatgatcgacctgcagcatgacattgttgatgtcgggtctgaaaccgccgtcggatggcttttcggatgagctttggtatacgtcggcatttaaggggacggtgactttgacacggttgctcaaaccagatcttgtgagagctgcctggatgttttggagagctggaagagttgtggcttcgaaggaaccgttgtatgttgacaagaatggttcattccccactgcaacgtaccttgcaaaaaacacaagatataatgtgtaagaaaaataatacatagatagtgattaattgcagcatatggtcgttgagtttacaatcagcgaaatgtaagaacacacagcattatacataatgcatgagttagatccactgacataaagttgcaacactgtttccttcaataaagcaaatttttcaatctatctccctgtgagttttaactacatactcaacaaattaggatgacatgcattttgagcttgaaactgatatgggttttaagccatgtgtacttttaagtcctcgtttcaagggatgttgggaacatctataatacagaggaacaagaattttgcatcatatttgaatcacaacctcgtgtggctataatcaattcagtgcaagtgattgaaatgaagtcttatgctactatgtggagctggatataaggatcaatcaccattgagctcaactaattactgaagagatcaaatgaactaataaacttaaattttagaagacagatttggatgctaacatatacattcttgaatcttgatcttctagaaaggaaaccactaattcttacaatgatagagttgttgatcttctataagggagaatctcttattttttccccaaatggcaaagagtcaggaatgaatagaaatagacatcatatgtggactcaacttataataaagagaaatctt

SEQ ID NO: 2341 - DNA, 813 bp, Glycine max
caggctcaagcccatggaggagttgtgataaacatggaatcactcaaggtcccagaaatgcaggtgcatgttgatgtgggaaactctcctccatacgtggatgtctcaggtggcgaattgtggataaacatattgcatgagactctaagatacgggttggcgccaagatcgtggacagactacctgcatctgacagttggaggcactctctccaacgctggtgtcagtggccaggcatttaggcatggtccccaaataagtaatgttcagcagctcgagattgttacaggtttgtcaaaactaacaattaatattcactgatataaaaaataaaaaaagtttgtaaaaaccatcttctaaaaaaagaaaatgaataattgtgtaatttactgtgttgtcttttctgaactactaattcatttgatcctggctgcaaataagttttcaaataaagaaaatgtcttttttttttccctactttgatgagtaaacatggtcaatgaatggatgcaggaacaggggaggtggtgaactgttccgcagagaataatggggatctctttcacagcgttcttggggggcttggccaatttggcattataacccgggcaagaattgtcctggagccagcacctgccatggtaatgaatcagtgactataccaaaacaaagtctttttggttttaggttgtgttatgagagcacacaagtagtcatagctgaaaattttctattttttggaacaggtaaaatggattagagtgctgtactcagatttcacagcattcacaagagaccaagaaaggttaatat

SEQ ID NO: 2342 - DNA, 841 bp, Glycine max
agctgtgttactgttacaggtttccatgaatcaactataaaatttcataattagttaggtcctaagtaaaaacttttagggtcctatttgaatgttttcgtaaaaaatttctgaactttagggaccttttaaaaaatttaatggaactactgtaccgggacctagagttgtgtaacctgaaatgatgattcgttggttatgtgataatactcaaacccactgatggaaattaaggccagagtatgtaatggctcctttatcccctattttttttgttttttttttcagaaaaaagaaagaagcgacttggacttaactttgtttcctacttgaatgtgaagataagttaattattaagggtgcatttgatacgctctagagtacagtacaagaagaacaacactagacaaacactgagttacaggacaattgtttcatctgtgaattgtttgatagccaatgaatagcacaaacaaaatcttaaaaattactgaaataacctttttaatattaattattttaatataattcatattactattgttattattgtcattattatatatttaaagataatatatattatgtgtttggattcaatgattcaagtcactcatcttatgcaattatgtgagctattaggaaggacttcaattcaattgaagattttttaaagcgtgaacagggctgagatttaagaaaattaattgtaagtagtagggcttcaattcaattgaggaaattggtacaacttttttgcaattgaaaaaactccattcaattgaatatttaatccttcaaatcacggattaaatttctgcaggcatgcaagctggcgtaa

SEQ ID NO: 2343 - DNA, 820 bp, Glycine max
  misc_feature (14)..(14): n is a, c, g, or t
atattacgccaagncttgcatgcctgcagcagcagcagctgcgtctaatgtacaagctggacggctacctggacggtatggatttattgatgatagaacaaggcaaaccatgcccgaagcagcttctgatggttcagtagttttgggaaatccagttgccccccctgtaaatggcgatatgtatactgatatcagcactgaaaatgccttgctcccgggaactaggtatggcggtttttatcatctgatcatctatttgggtgaagtattaaattgttacttgagaaatgctagcaacacacactattattgattgaaatttattgaaaattgcaaatttttgtgggtctcatctctcatttaatgactctcctaattgtggttttcaacaagtttcaaccaatgggagagggtgtgttaggggaagtttattagagagtgtgttgttaacacttctcttgttactttggctttgtcattcatttgaagaattttgaacaggcgaacgagcaaaggagttgagtatctagttgaagcatcagctgcggaagctgaagctatcagtgccacactggctgctgctaaggcacggcaagtgaacggtgaagtggaattgcctgaccgagaccgtggggctgaggcaacacctagtgggaaacagatatcttccttgattaagcctgattctgctgggtcaaatagcattcctcctggtggagtgaggctgcatcacagagctgtgagtaatacattttctatttccaaggaaaatttatgctgtcagtaatgttcaagccccatatcaattttctggaatttt

SEQ ID NO: 2344 - DNA, 925 bp, Glycine max
ttcaatgaagacgggaaaagcctacagacacaagcctaggttctagtttgaatctgaaagccatgtaacactaaataaaaagagccacatttaagacacatccatctaccccttctggatcccatcacctgttttgcactttccaaccaagctaacagattttttgtcataaatagaggagggaaaaaaagtagtagtagtaatgagaaaagggaaagttacacttacactaatgactaacctaagtgcctatgcaagtgaaggtataattgaatgccatccaacaattactgacctccaatttgtctctaatgatctataaataattattggtatgtttaattcatccaatccctccataattccaccaccattaattctcaattggggacccacaaattttcttatttatatcaaactggctaccatactattcttccatatgcaccttaccttgagcactttcccaagttttctctctcacacccttcatttacacacaacggaatcattctcctttctgctaacacttttgctttttcttcatggctctctttctctttgctattttaatcttgatggtcccttctagtaatgcctattggccaccttcacctggctactggccaagttccaaattcaggtccatgagtttttacaaagggtttagaaacctctggggccctcagcaccaaagcctagaccaaaatgcattaacaatctggcttgatagaacctcaggtctgaatcttatcactttcaatttcaattctctctctctctctctctctttcacttgcataatatcattgaaatttaatccacttccactttttgtttctcataaacaggaagtggattcaagtcagtaaggccatttcgatccgggtactttggtgcttccattaaggttcaacctggatac

SEQ ID NO: 2345 - DNA, 928 bp, Glycine max
aaagagcaaggaatggcatttgcacgtgctgttgctgcgggttttgacattgactacatgatgcctgctttgatgtcatttgctgaatgctttgaagcatcacgcttgatgtaaaaataattatctttctttaccaattttcaccttaaatataccgattagtgagatgttgggttcttggccaattggttgataacatatatgtgatttctggatgatattgctgattctaactttgtcatatttcagggatgcatgtagaaattttatttctctttggaaaagaaagcatgagagtggccaatggcttgaaattgaaactgctgaagtgacgcccaatcatgctgacttctctgcaataaatgcatcaggcatcatattttccaatatggttactacttcccatactaaattggacttagaaagtaatgggaaaactaattcaggtacctgaaaactccagcacatgtggacttgtatatttgcgcactgtttgtgacttagtagtgcatacctttatattaacctggggctcgaggtcattcaaaggattattattttcttgagtggattaaggggagaaaatagttggaggaagattcattggggatacatgaaagaacaagggtggtttggaatcaagccatacacaagtcttattatagtgggttttaggaggttttaggttctgtgaacaatgcctgcaaatttgggtttgagggtttgtcaatttcataggttctatgactaatggaagaaagaattaactggggttttgttgaatataatttttttattctggttaccaagaatactagatctgagcccggtgtctattttttctctcccttaaaaatgtactaacattgttgtttacacatttatagatgtgtttccaacggacagacaaccaactgcaggcatgcaa

SEQ ID NO: 2346 - DNA, 837 bp, Glycine max
tcggacgcttcgaagaagccgtccccgtcctcgaacgcgccatcctggtccccgacgtcgaccgcggccccgatcacgccctcgcctcgttctccggctacatgcagctcggcgacaccttctccatgctcggtcaggttgaccgatccatctcctgctacgaccaaggcctccagatccagatccaagccctcggtgacaccgatccccgcgtcggtgaaacttgccggtacttaatggatctatcttgttcattttgtccattcgtaattgttttgacaaagttagatgcagtcaaattagaattggatcagtaatctacataatattatatgttgactcggactacctaggtgaaacttcgattctgattggtgaacaacactagaagcacttatagcactgtatctaagtttggttcaaattataattggataattcaattgtgttgttgaattgataattggttggacaaaacctagatgtaggtcgaatagaattggagttttatcttggtaatctgcataataaaggatttcatttaatatcaatacgtttaacgtcaacacatattaccgattgaaattataattcttattggagagcaagaccaaaagtacctatggaattccatataaattttgtcctaattctgatatggggataattgcatttttgaattggtgttttgtgtggtagatacttggcggaggcaaatgtgcaagcaatgcagtttgataaagcagaggagctgtgtaagaagacactggagattcatcgggcacatagtgaaccggcttcgcttgaggaagctgcaggcatgcaagctggccgaaa

SEQ ID NO: 2347 - DNA, 872 bp, Glycine max
attgaaactgatagggaagcaggagggaacaaaggtgtctctgacaagcagattcgactcaagattttttcaccaaatgttcttgatatcacacttgttgatctcccaggcattacgaaggttcccgttggtgaccagccttctgatattgaagctcgaatcagaacaatgatcatgtcgtatatcaaaactcccacctgtctcattttagctgtcacaccggcaaattcagatttggctaattctgatgctcttcagatggcagggattgctgatcctgatggtggatttttgcttcatgtgtctcaaattttaatcttttcacatctctctagttggtttctaaaggttcttgtatctgttgcaggtaatagaacaatcggtgttatcacaaaggttcggtatattctactaacattttaactgacacgtatatttgtgaaattggttaagctgttgccatgttctgacaatgttaggcacttgtaatttggaatgtagttggatatcatggacagaggtactgatgctcggaatctgttactaggaaaagttattcccctccgacttggttatgtaggtgttgtaaatcgttgccaggaggtagtgattttatactacggtgataaaggcagtattaaactactttaacctttacacatgtcctattagatgttataccacaggtcattgtatacacacaccatgcatatttgtactatgcaaatgcaaataaatataaacttgttgattaacatggtggtcaagtcaatatttatgctgaaatataatttgtctattgtttcaccaaattaggatattcaaatgaaccggagtataaaggatgctcttgctgctgaagagaaattttt

SEQ ID NO: 2348 - DNA, 857 bp, Glycine max
aatctcttatcccacttttagaggaagctgaaagtgttgtccctgaggacctgtaccctactacacccgttaagcttggggttggtgtttcgggtctctatatttgtcactcactggtcacaattaatgggttacttttgaggatttgaacccaaggttttaatcatattactggtcacagttagaaattcttaaaagactttgaatccttatatttctttggtaacaaaacaactcttgtttttttttttttaaaaaaaaagaaagcaatcatcctattacataaaattgataattttttctataggcattatataaggagagaaaataagaatataaaatgaaataatttttttaataaattaaaattaatttatgtacaagttaatttatagatactttctcattcaacttctctaaaacacttatttaaatgtatgtaaaagttaattttagtttatgaaaaatatttaatttaattattttttctagcttaagtattcgattgataagtttatcgtaacatggcctaattaaataatctggtcgatgtagctgcaattactttcatgatatgatttaaaaaataggccacaaaatctttaatattgcagcagcaattgaagtttttaagtatattcatgacttgaccttgaagtttgggtagagactatatatatatatatatatatatatatatatataaagtcatgaatataattaaaaataatgtccaactagttgtcactttaactctttaatagttcattatgtaaagggcctgagtgtactgagtgtacatgtattttcaattttttatgctaatgcaggcgactgcaggcatgcaagctggcgat

SEQ ID NO: 2349 - DNA, 933 bp, Glycine max
atggaaacaaggaaaatcctactaatgaagctgaacaaaaagagcctgagaataaggtgattgttctttgtttatttctagtgttctgattttgtctggttctgaaaatgttaacattaccagtagtcaagcagaagattttttatttgtcacttataactagctcattatgaaattgtaattgtgcatatgatcacagatgtaaagtcacttacatttacaggaatattctggagtctgttgaatgaatgataatccggtaatgtttagcttgccctttctactatgagttgtcactcattgctttggatctttattttttattgtttttgtactacttttatgttgtgcacttttgaaatttaactgtgaatttgagaactcctgtgattattcaatcgttagtcacagaagaaattctcagttggcttaatttccatttccatcattaaaatttgacaattttccttctcaatattgggtgtatttatacttcttgcatttcttaacatgccttttatttctattgttgtatgtagaatttcttagttaatgcttttagtttgtttaaatttgatagcttaattaatagcatttctttcctggtagataggagatgactctcgaggaatatgaaaaagtactagaagagagaaggaaggctttccacgcacttaagactgaggagagaaaggtagatactaaagttttcgaatccttgcagcatctctcgaacaagaaagacaatgatgacatctttattaagctggttagccttacgactctatgttttcagtctagtttagttttacttattaaatttgttgtactaatacttaatgtgagcctcacttggattttttctttgtagggaggtgataaggacaagcgcagagagacacttgacaaggaggataaattaaaaaatctgtg

SEQ ID NO: 2350 - DNA, 874 bp, Glycine max
agcctcactcctggtgatggccctaaatccaatttgtctaccaaatatggactcattttggcacctaaaacaacactcaaccgacagatacaaacctgaagagccagtatcctatcttctactgtatcttttatagtgattcgtgtcacagtaacaggacgagtttgcccaattctgtgagctcgatcaatagcttgatcttcagttgtcggattccaccaaagatccaaaagaataacatgacatgcagcaaccatattcaaaccaaggtttcctgcttttagtgacatcagcataacagttatctgaaacaaatttcaattagtcagacaccaaagtctaccaaggttaagacactagaacacagtagaaaattcaagttcaaggagttggaaaacatactgattaaatatgcaacaagcattattgatataaccattaagaggattaaatttcatactacttcatctactaagcaataggttcacatattacttggtgtcattaatagatttgcataaaaaagttacagctttaacaatgttgggaaaggccaaacctcaggttcagtattgaaatccttaacagctttgtccctcgcacccagagtcattctaccatcaagtctccggtactgtataccaaattgtttcaacgatgtctcaactaagtccagcatgctagtccactgggaaaaaactatagcctttattggtccttcagttgtggactctgaataccttcttgtgtgttttgtaaccctaacatctgaatcgcagtcttcaacatgtaaattatccaaagaaggtgaatctctacaacctccagaggagttcggtaagtcagaactagaaatcttcaatttacaatttga

SEQ ID NO: 2351 - DNA, 906 bp, Glycine max
ttttgcatttgtgtttctgatttgtgtgtacctaatcccaatccgtttcttttcaatcttctcttcgaccccatttcctagatctgcttgtttcttccatcatcaactaatcatggttcttcacagagaactcgatcatctcttttcatcccctttcgttgaccctcccaaaggtaactcttttatgttttagaaaaaaaaatgcagctgttattttcaaaattgcgtgcttctggagttgttattaagttgatttaattttaataatttaattttgcgtgcccagatccctgttcctcgttttattacatttattatttgtaattttgttgaaaatgattagatgatgcgaaatccagtggcatgtcaattgaaaagaagattgagttcctcgagagtttgactggaaaggttggtaattgctatattccatttacaattgcacttatttgcagttgtgtcttagtttctaatgatgctgtctctgttaactgtgaatattagtgagtgttggggttgccattgctatttgatatgaaaatttgatgagtgcattggagaatctggttgatgtttttttggtctcgggctaaatacctgtctatgtttatggacttgcaaaattttattacttttggcaatcacacattatgtaaccagtgagttattgctggattcattagtggcatggtgttttatgcttgtgtgattcattttgcatgggtggtggtttaaattaaacaactctaattgcaaatgttgtctctttgaatattttgaattttaaatggtttaatgactttcctattcaattttttttttttttttaccaaatgaactcgcttgtattcttgtattttaaaatggaggataaggaagcattggctagcagctgcaggcatgcaa

SEQ ID NO: 2352 - DNA, 938 bp, Glycine max
aatcgattgttcattttttaaaagtccagatgaggtattatctttcacaactgagagtactagggaatccttcagctgtatagattgtggtgatccgggcaaatatggatgcaatttcatttatcttcaattactccccagaaaattgcataaactcttcgctgctgaagttttcaaatagtaggccacttaccaggttctttcctgagaaggtttatacatgttaaattctttcatttctaaccattctcttcaaagagtgcataagccattcttgaattgaaccatcccctaatgatggctgtggtaggtatatatacttatcagagtaatcccctatttggtatcctgtcttgtagtcaccttaaacactaatcctacgaatgagaattctaactgatagaacagtgaattatttagatggagcaggcaccatggatcaaaattttcaataaatggttgattcaggcaaattgggatttgagacctcttttactacttcattaacctagttataataaataaatttgcgtctggtgctagttgctcatcactcagttataaaatgtggttcagttgtgagcatttgtaacagtagtgcaactcaaggcacgttaatttgaagcagcgggactcaaattctcaatctattttacagtaatgcaagtttgctcctttattaatctaaagaaaccgtaatttgaaatttcgaataaactttatcatgaaaaagaaacccatataacgtgatagtctgctttttaactaaactaatcaatctatattgaagccaaggaaaggaaagaaatgttactaattcaaactaacaatgtgaacaaaacttggttttcgaatgctgatttgacgaaatcttgcaaacatattcggccttttgttgacattttttttatcaagtcttgttttctaattttcactat

SEQ ID NO: 2353 - DNA, 886 bp, Glycine max
ctgcgtgaaaatatgaaatatacatccaactacaccaaattcatttcgccaaggagggccaccatgtacaatgttcatccacacacatatatatatacacacacatagaaagcacacacagacacagtggtttatggtgcaatcaatataaatatctatcccatcacaattcataatcgatcaattcaaaaagataattaaataaaaatatcattaccgtagttattaactgggttttaattaacttgagttagctgtagagtgagaaatacttttactttatatatatatatatatatatatatatatatatatatatatatataattttagttgtcattagtctataggactaaagaaaaacatctgcgagcatgacaatgacttcaaaatgagtagcttgattgactaaacaatagactgtggtaagataaattttaatataccttattataattgagtttttaacctaatttaattttaaaaactatctaatgagataattattacttctcatttatgtcctattttagttaaatcactaattaacataagatcttcaacatttataaggaaattattatatgatttgagatcattaaaatataaacccatcttcatatgatataacatataattgaaatttattatttttattcataaataaaaaattcataatcataaggtatatgaaattggctagaatgatagacacaggatactatgagagtatgtaataatttctcaacggttatgtctacgtctccgcaatacaatggggtagttaacagaacagaggagttcctgcaatgacatatatgtttggctggcacgcatgcaatagtgcttgttcattaaattcgaacatgtgggtatttattcacat

SEQ ID NO: 2354 - DNA, 1185 bp, Glycine max
  misc_feature (1179)..(1179): n is a, c, g, or t
ttgcatgcctgcagtggcagtgatggtgggtttttggtgacaggaaagccttgcaagcttccacccccattggacccagtagcattattattaggcttttgttgttggttttgagcatgctgcttctgagaggtggatgatccactagacatacttgcattttgatggccctgttggctctgctgctgtgactgagcaggaagttgctgctgctgaatctgtgaaggatgcagcatttgagaagaatagaaagagccattgaagaacggaaaagcctgagcatggggggttccacggtacccaggtggaccaccaacatgtgctggtattggaaatgagtaagcattgttctgcaaaatggccaagtacggagcttcattgccaggcatatttggatagctgaagctcattgttggtgcagctgcccccgcagcagcacccgtgccacaagcattcggcggagctgaattggacacactggagggtgctccattactagaaactggcaaagacttcacagatccaggccgtacagatgccgcagcagctgcttgctgctgattcagcgggaatatgaatgcagggccatgctgaaatttgtgacatagcacaaattaattttagaaaaaagcaaaacagaaggagaagacaagagaatttatagttctagaagaagacaaacaaaagaaaaaagaacataccaagatattactaggtgctgctcctgggggtaaagcttgctgaagcaaaatttgttttcttgatgaattatccacaatggcaggctgagaggctttgtccttcccaatatgtcctggaaacatggcaataccatgccctttgtcctgagaagagtttgcagccctgccgggaacattcccatgcaactctgtggagggtacaacattaagattgctgggcttagccccgtatagtgatgcagaacctgctgctgctggccagaatgaattcatcctcgcaatttgctggtgacacaatatattgcgagcaatgtagcagtgggttgcacaccttttcggccgaggctggttaaaaagaagatggggaggctgtaatttaagggagaaagtgattaatcaggaattcaattccacattgtttcaaaatcataagtttaaaaagggggaaagtaccggtattgctgcagagcatgcaagnctggcg

SEQ ID NO: 2355 - DNA, 817 bp, Glycine max
agcttcctcttttgattaacacctcaggcttagaaacttaacgaatcttgctctaggtgttgatggaggcgacttcactttttcctccttggtgaatggagctacagagggtaattgttgatcaaatgctttacgatacaaggagagaagatattgttccaaatacataacttctaactctaacactgcaatttctttaattaatttggacgttggctggagtcaaaaaagaaaaaagagaagtcaagacatacagaaagctatacatgacaagaaaatcataccaggcctttaatcctaaacaatgtataatcatttatgggctgcaaaataatcttatgattgcagagacataaatggaaggattgaaccacaaatatattcaccatcagcctagcatgcataaagcaaaactgtatgaatgtttgcaacatcaatgttcttttaatagttaagaaagcacatataaatcggtccattaattcttgatgtgtcacacatgttgataaatgaaaattatgacatcaaaagaaaatgcacactcattggctcaaaatttgttgaaaatgttccaaaccttgggcagtatcgtttcatttgaattaacaagagatgtaggcctgtatccaagtgccttttctaacgtgcatctaacctcaaattggtcttgtagccttttctctaactgtagaatctgccacaagataatttaaacacaaaaataggcatagctatcaggtaaaagcttgttgagccactagaaaaatttgaagcaagattaaaagaaaatgactgattaaaccataatgcagaatac

SEQ ID NO: 2356 - DNA, 882 bp, Glycine max
tatttatatattcatgctagctcttgcgtacgtttgctgagatattacaccaccgctagattcttctccttagatttatttctataagtgagagggagaaaaaaaagggcgttccatatatgtgagggaaaaaatatccctttcatacttgcatagatgttatctcaaacttctttttggttggcgccacatactttaagtagtggtcgtaagacaagcacctttacacttgtgatggaagtgattttttgtgtttatatatatatcaacagttttaagggaattatatatatcctatattactcaaggaaaagtaataaaaatgattttacttttaaaccaaaaatggtattttgacttgatataatctcccacagatttttgctatcatttttaatttggtgataattttttataagtcttattccacccatttattaggttgaaccttatgtattataataaaccattacttcctttctaaaaaagaaacccattacttccctaattttcattattgatacatttctcccctctctttctctattggtattcactatctcttttctttcaccttttgctttatatatgcatcgacaaattttatgctatactattctgtcacttgcgtttattgttaaaagcgtgtgcttatttttaaaataaacgacatttttaaatttatcaagaatatacttaacagtttattgatggcgtatatatagatgcgtgtgggtgtgactttacatatacttttttatataataactaggtttacttatttatttagtttcttataattgcataaattttattcctacacttcattttttttttgttatttgctttagtctctatacatttttaaatttgttttgattt

SEQ ID NO: 2357 - DNA, 788 bp, Glycine max
aaaaacacaattacattaattaaccttgttgaccctcgatacatcctgccatcaatacatcctgccagtacattccacagaaccacaatagcaatacttcttttttatattgccatcagaatcacgaatttgatctatttcataattgtaatcataagtcagctcttgcaagggaggaatgttatcagcagcaaagaacattatgtgaggcatcctggtgtcatggttatcataaaggacattctgagcaataagattaggggagcagctatggttgatgaatctccccaaattaccaaactgagcagcgtcaatggtgaaaccaccatccttcacaacttcacaagaagctgtgtgtgcatcaggcatgagagtcgtgagagtcgaaagatcatcccaaagagtactgttgctatagttatttccaatatcaaaaagatactcatcattaccggttctttgttcagcttccttgtcttcaagaagctcccctatatattcacatataaaacttcctgatgggattgaattcagggatctcacaccccatccccttgtatcggttttaaatatttcaagttgaaactttatgccaagttggctgactctattatggcatgttgaaggacatttacaggtaggtccacactcatagaccagaggctttgcttgtacaatagccccattgtgattgaatggaatctctcccccatttttcactacacacgaacatttctccaaatcggagcatccattagtacaatcacatccttctgcaggccatgcaa

SEQ ID NO: 2358 - DNA, 767 bp, Glycine max
aatagagactctgaagcttattaaggaaccaggaacttatgagtacttagataaagtcactggagaacttgttcaagggattcttcaagttggaaagagtgcaggacattccatgtgtggtgggcatataaatgggatgtttggttttttctttacagaaggacctgtcttcaatttcgccgatgctaagaagagtgacttagccaagttcgctaggttctaccggggaatgttgaagcaaggtgtatattttgcacctttacaatttgaggttgggttcacaagcttggcacatactactgaagacatcaaaatgacaatagcagccagatatgatatgatatgattgatgatctatacttttgtttttcaaaatgtgattttcaactctcaacgaatatagtaactgggatgatttcctgacatcatgtcgttcttgggagactctaatttgggactttgctgctaagactagctggacttagctcagtgtcctaatgagtatttattgtttttgagacttttttcgttctttcttcttttcttaccataccttaaacaataaaaagaaaatgttctatatttatctctattttgttgtacttgtctctattgccgaatacatacataaactacttatcttgtattgaaagaaacattaaatgatcggttaattttaagaccatgtcatttcgcttttttttcctgcttgaatttttttttttactgctgcttgaataagttataaaccttgaatgcgatcagtg

SEQ ID NO: 2359 - DNA, 881 bp, Glycine max
gatcaaaaccagaatcagtgcctcaaatgcctaaacgaatcgagagtgtctctggcagataaatgtccaaaccagaaagaggcaattgattggagaggagagtgcatgctgcgctactctaaccgttccatatttgggctcatggaaaataatcctaaggtgctagtcgtgagacaagagaatgtaacaggttcattggatgaattcactgaggtgctggggaacttgatgaggaatctatcaagcacagctgcatcaggtgactctcgtcgtaagtatgctacaggaagcatgcctacttcaaattttcaaatcacatacggttttacagagtgcacacctgatttgtcattgcaagagtgcactcagtgcttgggtgaagctatcgcggatatcccagtttattttaatgggaaaactggaggtaatgttttaaaacccagttgtagaattagatttgatccctactccttctacggatctacgctgaaattagacccagatgcaccgccaccagcgaccccgctaccatcaccgcccaccaacaacaattcttcttcacaaggtatttgtcactttttgctcaactcagtgttcttttttacttattcatttgttgaaaggaaagtaagtgctagcttatgaacttagcttttatagaagctctttcattttaacttctacaaaagttgaaaattttaacttccagaataagtttaattcatttcacttttctttttttaactgcttgtatatagactagtttattaaagaaaacccaagtatttaagtagtatttaactgttggagttggacttttggatattatttaaggttaaggtattcacttgatctctatattattgtctctattttaagtt

SEQ ID NO: 2360 - DNA, 889 bp, Glycine max
tgttgtgatatatgtaacatattttggtggatgacaggtgtttccagagaggcagggaaagtggaaagcaacaacacaatcaagagaatttttaaaatccataaaacgatactatagcaatgcttacacagatggtgaaaaacaagatgcaataaacttgtattattccttccacctattttatctcaatagttttcttttcctttcctagatggaattcatagttcatctttagtaagattttatatatttaggtttctaatgttcaaatactcgtcccttaattaatcctgtcttgaataaataataaataattttaaacatttaagacattgttctattgccaggtttttaggttacttccaaccacaggaagggaaacctgcgctctgggagctggattcagattattatctccatgtatctgggattggggatgatctaattcctgagaagtggtgagtcctcgttaaaatggctggtattaaaatcagtggcgtgcttctatgatacgttacattcggcattggttttctcatttttgtattgcatatattttttattgtttattttccctatcaatcttcaatttcttcctgaattttgcagttctgaaccaaatctcagttcttctggaagaggtggaatgatattcacgcctataccagcttgcagagaagacttctctcgcataaagttgacatcatttgacaagttaattgaaaagacctgtagtacaattaaaaatgtaagactatgccgtgagccggatcagagaccaggtggggtttctggaaacagtggtgtagcacctgatgcagcgtaatttctcttttctgagttgctgtttaatgattttacttctgaattttattttggtttaattact

SEQ ID NO: 2361 - DNA, 1310 bp, Glycine max
tgaggtgagggtaggtttaccattggtgcaaaaggctctgaagtagccttaagggatcgctcaggagtagcagcagctacctgtctcacctgtgtctcctctgcctcttctcctatatcaaatggctctgggatggtggcctcagatgactcatcctccatatgctgaggtacctgggctgtgggaccttcgtcttccctgtgaagagaaggttgggttccgggccaggctaccatcttattaaactggtctactaaaggaatggagtttggaggtgccaccatttgtaaactttgcagtaaagtgatctatccctaatgaatgctctgaagcatagcttcaaaacgctgaaaatttttctggactgggatagaggggactgctgaagtggatgctggaataggagctacaaaagtagaaggaagctcaactggccttgcccttgcccttctagcccctcggatagaaactgttagatcatcgggattccaacaattcttcttgatgtaggccaggttaatgaccgggctcaggtgctcaaaagtgaggctatcagagacaacccctctggctctacataatgcggtgattatagcagggaacccaagtctagaagtgttagactgggctatagaggtcatctggccagagatcagtgctcctatgttcatatccaagtgagagactaggccaaagatcagcctagttgtatccactgtcaaatcagaagtgtgtgatatgggggccaagttggagtatgagaggacactccacacctaagctagtgtagtcagatccttcctaagaatcttcccaggatggccctttgagttcaagatgaacccttggctaggtatgcataaggcagcctctatctctttatagtctggaggcaacctacagtatctggtgtaagcgggtaaggtctccccctcagctaataccacaggtgtctccaagaatatgttgagactgtcagcatcaatcttcaccaaatgacctctgactctagactgctttggtggatgatcctcagaactgtataaatttgcatagaattctttcaccaaagctaggtctatgcccccatcgactaaattggtgaggtgtttatggaaattacgcctctctaattcagccttaaactcatctagctcagaatgatatatctctactttcttctctggtaaaatgtttctccccaaaacattatttgtgtatatggtccaagcatctaaggaagagaatctccttgtgtcatactacgctatgggtcttgaaccaatactctttctctttctggaagccat

SEQ ID NO: 2362 - DNA, 856 bp, Glycine max
agatttcatgccaaagagtttggtgtagtggttcattatgccttgtacaagtgtcccgagctgtatgtcaccgatatgagaacttaaagcagttctcagttccaaaatttgtctattttgttcctccacccagtttccatactccatcttgaaaagggttattcctgtaaattgggtattttcagagggttaaaatagttggaaaaaggagtttaatccaagaaaaacatacttaaggaaatccaagaaaaagatattatatcaaccaaaatgtagtatctgattctgatgtttactagacaaactaagagttgcagtttgttacagaaacttgtacatagaactgatataaaacactcattttcaagatgcgtaatggtgcttatatttatagtatcaacatattgacaatttaagagtatgggcctgtacaacatccgaacaatgtaaatagacaaaggtaaaacaaatacgacacaaattttcaggattttcatctgagactagataatctagtttggcagcaaatttcaactcaagtagttaaataaatataacggtgcctctaggcactaaagttttctaaccagtaagtcgtgagggcagtttgtaagggcagtgtgatttaggcataggtaaaaatactgtcttctcaaaaaaaaaagttaattttagaactgagagcaacaaatgaccgagatatgtaataaccagtaaccacatttaacagaaaaatcaggagtagtgacaacaaatcacaatatctagcactagcagcttaatgaccacaaacctgaatttacagagccagcaaaacccaaattattagaacccaatccgttgccaatatacaatc

SEQ ID NO: 2363 - DNA, 776 bp, Glycine max
ggtggcatcattggtaagatctgacttataatttagttgtgacagaacaaatattgttactcaacattctttggtgaaaaaggtaattttatgctattattttttctttttgacagtgatgggttcactggagcactcactgtcaagtttgactttgaatggctcacttagtgctgatggagaaagctttggggatgacccaagagggaaggatggtgggattacttcaagcattggtcctggtggcggttccggcggaactgttcttttgtttattcagactttggcacttggtgactcttctataatctcaactgctggaggacaaggtagtcctagcggtggtgggggtggaggtggcggaagggttcacttgcattggtctaatattccagttggagatgaatatgtccctttggcaagtgtaaagggaagcattatcactgggttggtatattacaaagtatacttataatctgcatttgttttaagcatctgtgactgaagagtcgtttgatttgcccagtttatggattgtctgattcttaagagttagaagcaagttcgtgactattgaatatgatttgctttggctcatggcttatggcttcttggataaagccaactggtccctcactggagaccagtactaatgttactctttctagataaattcatgtatgcttgaatatgttacactgtaggagaaaccaggatttttcttttggttgggggattggggttgtaaatttgtaatcatgtaattacatagttgt

SEQ ID NO: 2364 - DNA, 855 bp, Glycine max
atctgccatgagagatttacagttctccatgtttttacaaaaagtaccggcatatgaaatttgaaagaaaagagaggatatgacagagagagacttagtttctcatttatactaataaatagtaaatgttgttttcctaaaatacccaaaattaaaaaaaaaaatgcttgtgtgcttttcctaagagaaaagatatacactctcctcgcacaagcataccttctgtcatccaaataacacatctctctgattcttttcttcataaggactgttttggagctacttcagaaggcgatgtgcagttactataactatgaaagtccttaaaaacaattattgagtgtagtgtgcggtgtaccaacaagcagtacagatagaatggattcttttgggggttgggggataggagggtaaccacattactgcaaggtcagcagtagcactcaatctgagggttattacttcacaaagagatagataatatacaaaatagctaagcaaacaagagttgactcatgaaaaaaaaacatatgaaaagttagtgagaaattaccagtgcaaactcaacaaatgcaattcgagttgaatgatggtaatccccaagaagcctcaagcgatgaacctagatgaataaataaaaaataatgtaaaattttacaacataatcattaaaccaacaacaaacagtattgaacctagatgagtacaccaaaataatgaaaaatatttcatatgatgcttaaactcaaccagcaatcaacactataatcctagttccattaaaagcttcaaacctctccgcaaatagattcaaagaagtgtttgacatctgcttgagtaagctgcaggtcgact

SEQ ID NO: 2365 - DNA, 777 bp, Glycine max
tgaatggggagttgcccatatcttctcacagtgttggagaacctggtatgtgttggtcttctcttttatcagttgatgggatctgccacacttattttagtctttcttccttcacgtggaatatgcaatatgtactgtgcaatgaccttttgagcaaaagtttataaactaaaccatataaatggctgatacactgtatttcaaaatcctctttataagtttgtaatttgaaatctgtgaaccttttttaagattagtaaagagaaaggataaatagattgaagacaagacgcttattataactaacatattttcatgaagcaggtgcaaagttggatgacaaggagaaagtagatgagtggatgttgcaccaaggcaatctatggcctgaaactgatgcctcagttgatcccgaaaaggccatgtaagcaccacagtaccattttaataaccatataatctgaaagaaaaatcctaaattatttaatgatgtgatataacatgatgcaggaaagagccactgtcaaggaaagtaccagtaccatccggcagactcagtccttacagaatgatggttgtcgctaggctcctccttctattactgttctttcagtacagaatcttccacccagtacctgatgcaattggactatggttcatatctgtgacatgtgaaatctggctcgcattatcctggatgattgatcagcttcccaaatggttccccattgatcgtgagacatatcttgatcgtctttcaatcaggtcaagtgtcct

SEQ ID NO: 2366 - DNA, 919 bp, Glycine max
gccattgatacaaagtcggtgtacgagaaagatttcaatgctttgtcatataaatttattgctgttcttgttgccagttttgccctagcaaggaatatgcagcgatctgaggtttgcctgctaactttttctatggttttcagattatattgagataacatagtatgttaaattcttttttttttttccagattgacaggcatgctcgtgcaaatataatatgtcagcatcacatcagcactggaattcatgcatggcgcaaacttattcgccagttaatcgagatgagaagtctttttgggccttttgcggattatttgtaccgcccacttcgtgtatgtatgatatgactgtctacattgttgctaccaactggcgctctttgttgctactcatctatttcttgccttaaattctctaatttgttgagtatatgaaaaaactctaggaagatgcatatattgattgctgttctttggtgtatatatatgcctgggaaaaaaaatctaagaattcaaaaccaactagtgtagcctttttgtgcttgtgttcctagcattatgtaaggggcttttggctttgcaaaagagttagattgctcttttgaacttatgctcctgtttttctgtttatgttttcttttccttttggggatgttcttggaggattttttatctatccaactcatgctttctgatattaaaatcttgccaaaataattttttttaatgattcaatccaccaagctgattattttctaattttctctaggttttctggaagctagattttacggaaagttcttcccggatgagaagatgtatgagaaggaattatcaaggctctgatcatttaggtttcgctgcgaattatgaggattattcaggggagaacaatgatcacaccactccagttttat

SEQ ID NO: 2367 - DNA, 893 bp, Glycine max
agcagagattccatggcaagtggaccttagccttgcagggaaaatctctgctggcacaacaaatgtggtggaatttggaccaaaattggcaaagaaaaaggtgaaagagtacatcaccacaaacccaattctgttttctttctcagaccaatgatcatatggtatagccaaagcaaacatgaacacagtcatgaagaagaaccccaacaattggatggcaaaacggcccatgtaatcaattaatgccactgtgaaccagtaacctggcacagtactgcatagtgctatgagtgtttgtgctcttgcaatcttatacacctgcaataaaaataaaaaatcagtcatgaaatagtcttgcacactgatagtgtaacagttttacacttttaatcaatagaaatcagcattggtatataactttaaagataattatcgtaaaaattaataaatttatcatatataatgatttgggattggattatagtgtaaaactattttacattgatgtcaatcaatagtcttttttctctaatttgtatataatcgttttttaaatgcactaaaaaaattgtgacttcaaaggaagaaaacaattttcatcactaaatttggttactaattaattcattgatttttgttagtacctcgtggattgcattcatttcctttgctggagggatccacccaattgcactgaaaatgtccttctggaaaaggttttggctgtagaatgctatgtccaacaagaaccaagtggtggtggttcccaacaaatgcaggccatggcgtttcacaaattccttggtgaacaaaccatacttgttgctctcattctctgtcaatttcttcaccttctcctcttcagcttcaagttccacttgcaacaccttaga

SEQ ID NO: 2368 - DNA, 843 bp, Glycine max
tctaaggtgttgcaagtggaacttgaagctgaagaggaaaaggtgatgaaattgacagagaatgagagtaacaagtatggtttgttcaccaaggaatttgcgaaacgccatggcctgcatttgttgggaaccaccaccacttggttcttgttggacatagcattctacagccaaaatcttttccaaaaggacattttcagtgcaattgggtggatccctccagcaaaggaaatgaatgcaatccacgaggtactacaaaaactcaatgaattagtaatcaaatttagtgatgaaaattgttttcttcctttgaagtcacaaaaattttagtgacattttaaaaaaaaaaatacatacaaaacattatagaaaaaagactatgcacttggatctattcacaaaccaatgtgtatgataagtttgttaacttttatcataactattttaaaagtcataccaattatgatttttgattggttgacattgtaaaactattctatcactgatttttaatttttcttgcaggtgtataagattgcaagagcacaaacacttatagcactgtgcagtactgtgccaggttactggttcacagtggcattaattgattacatgggccgtttcgccatccaattgatggggttcttcttcatgactgtgttcatgtttgctttggctataccatatcatcactggagtgagaaagacaacagaattgggtttgtggtgatgtactctttcacctttttctttgccaattttggtccaaatgccaccacatttgttgtgccagcagaaattttccctgcaaggctaaggtccacttgccatggaatctctgct

SEQ ID NO: 2369 - DNA, 869 bp, Glycine max
ttttcctgttgtggttcctcctctgtttcctgtacttcttttgcctcaaggtactccttaggtggtttggttgatataataaccctccttttaagtgattcaggagaaggaaattccttcaagctttttgaggtaggagcaaataatatgtctccaaatgttcgagtaatcatctagaaatttgaacaggactgtcaagtttcaaccataagaaaataaacattttggtttttgaattcctagagaacttcaactaacaaacctcagccactttggcctgaaggtcgggagttagatggtcttctaaggttattacaactggatattctgaggcaacaaaggcatgctgcttaatagacctcaaacatttgatgagtgccacaggagatgtcaaagtcctacattacaaaaacagagatatgtaaagaactacatttaaaaatatttaggaaaaataaatgtaagttcaaattgccattacattagaatatcattttcctgctatgccagattgaatcatttttgtttgcaagtagtaaatggatgaattagtcttcatcacattgttggagatattatttaaattgcaaattttccttctttgggcagtgaatgtttataatcactagatcatatcagagtagaaacagataaatgaataataacttgcgaaacagatgaactggtttttatggggaaaaaatgagggggaaaagaaaagagggaaacaagggagatgactcaagttcgtgtttaaaagtcagcaacattgaaccagaaaactactaaaattaccttccatgaagaacatccacattatcctttgattcattaggccatatatctaactcaatcacccttacgccctt

SEQ ID NO: 2370 - DNA, 931 bp, Glycine max
cagcttgcatgcctgcagtttattggacaacaattactatcttaccaacttaactccagagctgtataagctcaagatgaattctgaatttcatgccaatgaagaacaactaactggtgccaccactagagaattatttgtttgcagatgtcatttacggtaagcatatgatgatggattgcacaaaacagatttctgagttcatcaatacaaaaattgggatttcatgaacggttccttagtaaatggttgaatgacataaattttttaccgtaacatagctctaacatgaaaataatcttcagtccaatattgcttaaaacgtgcttattcattgtaaagttcattttcagttcaagtttgaagttatttgcttgtaacaattttgtttcaggcacattggccaacatggggatagatcatacaggaggcaacttctcaaggtagcaaatgatgctaatacacctagaatccaagggaatgttaaccgagggacacttaaacaatcagcatcacatttcgctttttcattacccccagattttgagcccttctcatcatcaccatcggaaagtccttcatattcaccaggagcagttccattatcatattcgccttcgccattgccatctccctccagtatttttttcactccttcaccaccctctccttcacctgtagtgttaccaactccaggcatatcatccccagcaaacacactaccacccgagtttaattgggcgcctagcccttcaccattttctaaccaaggaaacacagacagttccaatcaaatacatcattcggtgataatctggtttgcagttgggggcttctccctattgattttggtgtcagccattatttttgcttgtttccaaagtaggaaggttgtggctgttaaaccatggtccacagggttgagtggcca

SEQ ID NO: 2371 - DNA, 944 bp, Glycine max
agaatgggcacaagcaatcactcatttcaacttgtcgtcttctcagatttgtctttgttggcaatctatctcaaattaatctccaagcaaaaactgaaattttctttgggacctttaatttccatagctccgcaaaaactccatcatcactggcctctatgatttccccttgcagcagattatacgcgctttgtgtcgaatagatgccgcttggctcagctttccaaacccactcatctcttctacatgggtgaactgtcttgccctcaatatcatttaaaaagctgtcagcattgataacctcactgtcaaataatgatctcctccacctaaagtcccattcccacccagaatccgtgtgcactcccacttgctgtataagatggttttgctgattggaaatggaatatagtcttggatactttgctactagagatatgtcatcattaatccaaatatcctcccaaaattttatcctatcaccgcagccaaccctccacgataatccattttagttttcaccattgcaaattagtaaaatgttaatatagtccttaagccctaagccctaatattgaatgctaccagacattcaacctttgctagtccttaagccctaaaattgaatgctaccagacacatccatctagattctagaactttgagaaggctacctcttgcagatgttcaaatggattaccatacactttcattttattctgattactataataaagatttgattttccaatttttcagcatcttattttctttcatcttacaaccaaaaaaacgaaataagaactttaatggggaaaattatcaccaagacactaacacatctgaagttatactttttgctgaaaatgaaatatgacttcagagatgaatcataagccttacatgtcctgcataataggcacgtatctgcaggcatgcaagac

SEQ ID NO: 2372 - DNA, 858 bp, Glycine max
agtcgacctgcagttttttccatctcaggatccaacgccctctcaatttagtcctgggagttcattgcagctacatgatgcttctattagtacagccatgtcaaatccgttacatggtatacaattcccttcaccagtccaaagctttgcaaataaccctttcattagatatactagtttaattagttctctaatgtctcaaggcgtgatctcattggctaaccagctgcctgcacaggtatctaatattaatatctatcataagttcatttcttttttatcctttgttgatttgattgttccatatcaagagttaattaagtatttgttttttaggattctattggaactgagtttaatccagatattctgaaggttcgtcacgagtctccagcaaacgccttgtatcgtgatctccctagacaatgcaaaacttgtgggctccgattcagatgccaagagaaacacagtagtcatatggattggcatgtgactaagaatcggatgtctaaaagctgtaagcagaagccctctcgcaagtggtttgcgagtcttaagctgtggcttagtggtgcagaggcattgggaacagaatcagttccacattttttggcaacagaaagcatagattatgaagaaaggaaagatcatgaagagtttgcagtgccaacagaagaggaccagagtacatgtgcgttatgtggagagtcttttgatgagttttacagtgatgaaatggaggaatggatgtatagaggagctgcatacctcaatgcacccgctagaaaaacatcagcaggcatggataggtcacagttaggccccataattcatgctaaatgcagatcagactctaat

SEQ ID NO: 2373 - DNA, 792 bp, Glycine max
aaccatatatatatatatatatatatatatatatatatatatatatatcagcgatttcaatttaatttaattttcaactattaaaaagtcgaaatttttttgttggcaagacgttgtcaacgctccccaccaaatccaaatgcatgtgattttcaacgcgtaatgaactatatttgaaaaaagaaaaagaaaaacaataacagaattgttaggttaacaatccacatatgaaaattgccaaaagcaaaaacagaaacgagaaagaaaaaaaaaatctcaaatgagacaaaaaagtgaccaaaccaatcacttttcacacataatgcctcggcaattcagaaccagtcccgaaacattcattgaaacaatagtaaccatttattctgatattaaaaaaataaacaaaacaaataacaactcatgtgatgtgagttctggacaggattctccagccagccggccatcctctatctctattctctaaaacattatattatatcaaaattctaccatatcataaaatttctctatattaattttcaattacacggaatattgatatattatccacccctcaatttttacacgcaggtcgatttttttttccagtttttttatttacaaattacaacgtgcgtgcatattccgtatcccgtattccgtccgtgtgtaagagtacaccgaaaacgaaaattaatcactgattatcacatgatggaacaagcattggggttctcatcgctgaacatctgtggcggaggtgcgtgcgggtgcatgtagtacggtagaggt

SEQ ID NO: 2374 - DNA, 819 bp, Glycine max
agtcgacctgcagatgcactggagttgcttctagttatatcaatgtaggtatatttttgggactctaatgacgtgtcttaatattatattatagtaacatttttaattgaaaatggaaatagattagttttgataacctgagtccaagatgccaataatgacgtctgacgagggagcagagttgtagaccgtgtttgggtggtggattttgacaggggtactttggtccttaaggaaatcccaagaacgggttgtgtggaggagcttcagaattgggtctgggaaaacagacacaaccctaggtttctgggcaattgagttcgcctcctgtcttgttaaacgagctgcaaacccggagaaaccatgcttgaagttgcgaactggggccttctcattccttccaattaatcaaattttctcatcataatatgtaatattcatttcaggttttggtagaaaaatacaacagttttggtataacatttgtcattaatttgatttaaaataaaaagaagtcatttgaaaataaaatattaaaaataaaattaaataatttttttttaaaaagaataaaattaattagatttatttatattcaaatctaacgtccaactgttttacttatatatataagagtattgagggaatagaattcttataatgtccatatcatatttatttcagaatataagcaatggtcatccggaagagaatctttttttttgaattggcggcccccatgtacacaatataaagttcacggttagtgtcatcatcacttccattccctgcttgaatgatgtctgcagagcatgcaag

SEQ ID NO: 2375 - DNA, 866 bp, Glycine max
tttacattcccaaccacaatcacaaaaggaaagggagcagataattttaatcagacagttaagcactctgatgccattgaaattcggtttcgttcttattcggggatcagttctttcttccttcacttaagataatatggtagccatgcctgcatcatcatcatccaaacaaacattagcaggtctgcctaaatgaagaagagaaggggcacaggtgctaatcaggaaaataaaagttaagagtacaagagaaatacgtcgatttgaaaggagcactagtagctccaacaggtgtgttgaaggcaacttcctgaaatggcccagccatctttcctcggggaaaccatccaaggtctccacccttctttcctgatggacattctgaatactcttgtgctacctgtgaagtcagtgaaatactattgataataaccaattggacaaaatattttgtctctaggttaatttcaagtgaacagattcttatttatccttttcaatgaattgccattcatgattcatcaaacttaactgacatctctaacaacaggtggtcagggacagaaaacaattctgatatttaactcaaaattagattctcagccctactcgcatagaaaccaaataaggattttaaaaaagaaacaagaataaaaatcattgtatgaccaccaaaagaaaagggtcttgctaaccagtgccctaaaaaagagaaagtttttagtataaatcataggggaaagcattgttacacatcccaataaaaaaactttctacctgtacttccttacccaggcatttgccaaagaaaaatacctttgcaaactcagctggtgggaccttgtctccattgccaagccaaccat

SEQ ID NO: 2376 - DNA, 874 bp, Glycine max
tcgacctgcagcaaattccagctacaagggtcctcggaatgttatatttacatttgtggttcttctctgatgccaaaatcttcaccaatgttctgttaaggttagtttttgcctagagttcaacaaccctgatgtcattatggaaaagatcatagaccttaccacagggttcagatgcaagtctaacttcaatttgcaagtctaacttcatataatgaatctgacaagcagcaaatcaacctatccaaaagatcaagagaagtgttctccatttcatgttcaggcaatgattctgaagtaggaagagaatgtcttgctggtaaatggattatctcttcctcatctatagatacttgaaaaaaaaatccaaaataggaaatggctgcttgctcacgaagttcagtgatggtcggttcatatcagagtttaaaaacagggaaaagaacaaaacagagaatagtaaactaatcttattgattcagaaaagttagtttttatgttacaaaagagatatttataaacctctagaccttgaagctaatcataaactaactaacaactaacagaattctgttagtgaaagaaaagtagttagcttatactaactgtcctacaataaccaataactgtttgtaacagttatttctatacattcattctaatagccctcccctctctcaaactaaaggggaaggtttttctaaagaaaaatgcttcacattgagtttgttccttagttcttcaaatcttgttgagaaaagtggcttggttaagacatctgccatatactgccaatgagaatccaatggattagccatatactgacaaactttattaacaacataactaatctcaggtctagtaagggtagcat

SEQ ID NO: 2377 - DNA, 940 bp, Glycine max
gccagcttgcatgcctgcagttgcgtcttctgggaacctggtgaaatagaacgaggtaatgtccctatggtctctccaattcgctcgcatgtagctatgatcttgtcctgttgttctcccttcaatggtcagaccggaaccctccgtcgttcgtgctctggcgctctctctcttctctcttctagacctaactctctcccacccgctgtttctctctctactctctctctccatttctagatacctggaataattgtaatgattttactcgtccatttgattttagatgcattggcatgattgtcatgctcaagccaaagtacagttaattcataatacaataaggcacaatctaaaaataataatatattggaaaaaaccaaaggcccacattggctagagatagtgtcaagatagagtatataagtggagggcaactctcaccctataagctagcttttggggttaaattaggcccaacccagatataagatggtattaaaacctatcagagctgatatttgaccacccctcaactaacaaaaaattaagttggcctcacagatttcccagggcaatcaacttggtctagctaggggtgtgcaaaaacttgttcgtaaaaaactgaaccaaaccagtacggaaccgttttaactggttcagttttaaatctaaataccgaactgttttagaaaactggtttggaaccgaactggtttcaaccagttttaagaaccaaactggttttcttcttaaaaaaaatgatttggctgaaaacttgtttggttaactgaaccgagattttagaagcaattcagttagccaaaccgcttttatacaacagtgcagttcatttttttcaaactaatttggcccaaactggtattttttttgcacacccctgcttggtcctgggctttcccagtgcaaatctaccttg

SEQ ID NO: 2378 - DNA, 797 bp, Glycine max
aagtgccgagagaggaagaatacgagacagagtgaaaagaagtccaaagagagaaaacgccaaagagggttcatatgtacacagcaggcaggtgtcggacccaatgtctctttcttattatttttttccccaacttggttattctgctctgcttctgccattcttttcttttccgaaaacttttttttaagataataaagatcatcagactttaattattttgcatccataatatgatagttttttatatagttaactaataaaaattataataattatcatttattgaccaaggcattctagctgaattaatgttgagtgggatctctgaattagtataaatttattgttttttatttctataaataaaaaaaatactattatttgttgaatgtataggatatttttaagtaaatatatgtattgggtcataaatggtatgtatagtaaaatggtatgcatttttaaaatattaaaagattttagttttttatgcaatgctttctttattagatcgtaggagaatttgtaatagaatataacattataaaaaatacactaaaaatatatagaaattacactcattaataattagactaaattaatttgattttcttttttttttactattttggtccctattttaaaaaattaataattttgattgatctttaattatgtatatgtttacttcttttattttttatattttaattaactaaattattttatgatatcttcatagataacattataatcttgtcgtaaatcttttccacatgtgaatagtgtttttt

SEQ ID NO: 2379 - DNA, 921 bp, Glycine max
gcagtatatatattctcctataggtcctatatctgcaaccctctactgaccacaaaaccttccattagattactcgaccattggttgaagtgtatttcaaaatcatcctccatatcaatgccttcctagtgtcttgagattcagataggttctgttgctttcctgtcctgtcaaaaaatagtacatgatgtgtggaattttcttttaaaaaatggtacataatttatagaatagctctgctctttgctgatgctttcaaggaagcaggtgaaacaaatgttattaagtgtttgcaggctggtgcctgtaacaaatctttagtataactataaatcaaagaaatatcttagactttggatattgcagcccttaagatttaatttcagaaaccaaaaatttcccctttctataaaagaaaaatatagctttagattgttttttgtcagtatttgaagatggtattgtcttctgtaacttgtatcgttcttgaaaagaaacttttgttttaaattctgaacagtgcattagaacatcatgaataaagtgacatttaaaaaatatatattttctaaatctcaaaccatattgttaatcacttaatctgcatgatcccttgattctttcttatataggctatttagatgatagagttttatctttaaaagtattgaatccaacaggttttactcactgtgtgtagcaactggcaagtagcagcacatgtctgctctcaccctaaattttacatctgaatgttttgattggcagcttctggaacttcgatgccttgttccagccccaacaacacccagctcgtgattcacatgatacattttttctggaaggttagtaaaaccttgattgttttcttgctaatcttatattctctgtttctattctgagaacatgtgacacatatat

SEQ ID NO: 2380 - DNA, 876 bp, Glycine max
ctgacgtccaaactcgcattcctgcagctcaattaggcaaaggcaatcacaacagttaggtaacaagcagcagctgaaagaaaagaaaggtaacacctgaaacaaaaaggttaaagcatcccttcctccctactcaacaagatgcacccacagcaactattagaagcatatatataatgtaacattgtaacattgaaactaataataatcaaagagagtgaggggaaaaagaaaagagcaaagatgcctcctgatgtaattcaatttcgtcctaccttagcacctcttcaattttcttcacaacttacattaaagcaacgttctagcccaagagatcatcgccaaggaatgaacctcaccaacaaaaagaaactcatgcctatccttcttttgatcctttcaatcatatcaatactcaggcttctgagcctcattctccgcacttcatcatctgctactatgtctccaccacccagttcttcacttttttccactcacaacaaagttgcaaaacatgcacccgattcctcaaagcaccccaattccaccctaactgaaaaagagttcaaagttctctcaaacctcgttgctcttaaatccccaagcaacctcctcatatttgggttccaaccgcagtaccttaccctctcttcaatgaatgcacctggaagcaccatctttctttatgatgacatgatagccaaggtagcaacaaactccaacaacactcaaacatacaaacttgggtataatgtgccatctaaaaaggcttataatttgctcaaacatgcaaggcagaaccaattagcttgtgcaccaagttacccaaaactactgcttcagaaatcgaaatgtaagcttgcattgatgaattta

SEQ ID NO: 2381 - DNA, 963 bp, Glycine max
ccagacttgcatgcctgcaggtttgatgctacttccatctcttgggttcttattgttgtcatgtatttttgtgtgtcggactctgtgctaattgtaattatttattcacagtgatagggatactcaggttatttaattataataaatcttggaatttaatccactaaatgtttagcttaaattgctctccttcccttcatattttttattttgattctcgtgtcaaatattaaaatggtggaattgtctatctacttgaacccctatctacttgaaccccacaagaaatgggaggcacttgcttggtctatgttttgtgctgttatcacttatcatgaagaagcaggggagagtgctgaggtgtagggagagtatttgtttgaataatattctcaactgtctaaaatatgtcatagaactgtgctgctcattcaagataatatacttgtttccttgtgttctatactcagtgacacctgtggttaattactatttgtaacagaaattctactctcttctctctaacttctcattataatgatcatctttatattaaagagggacgaaaaatgagactctgatttggttttgaatttgcagagtcaacatgatgaggtggaggctaaatttttagaggagcgatcaaagctggaggctaaataccagaagctctatgaaccgctttacacaaaagtgtgcatgttgttcattgataatgagcaatgaacctttttatttgtcagatatcttgtttgatttatgagatttctttcatgggatttgatcttatatagaactttagactgaattactttttgcctcacaatggtaacaaaatatcttttgtctttgaattgtttttggtggttatagaggtatgagattgttaatggtgtggtagaggttgaaggagttacaaatgttgcagtaccagaagaagccaacaaagctgcaggcatgcaa

SEQ ID NO: 2382 - DNA, 933 bp, Glycine max
tccatcctaagtgtatctaagctagagagaacagaatcagcaccaaaaatgataaaccatttgaactctaataaaagctaacagaatataggacattgaactggaccaaattaatacttatgaagttcatcatgcctgtaatatcaaattcaagaactaaaagggccagttaaagatattgcaatgggagtttttatgtattactaccaaacatggaaaataaattagagatgtaccttcagtacagaaagatatgcatctgagaggttagtatattttcccaccattgcaattctaacctgtgaaaaacaaaatagttgtaagctcagtactagccactatagagagttgaatattggaactcacagattcatgaaatatattagcttttttagatgatatattagaaaaattgaaacttaccatttcatgaaatttgtcatatacttttgttgttgtaatccactccttaaaattaggctctgtagcaacactgtaaatagaaccataataattagtggaatcacagaacatcactacatcagcacatcaggatgatcaagatgtacatcaaaacaagaatgagtttgtcaaacaaaccctcgcaggtttaatgttttcaggattgcatcatgcgccttttggtcctgttggtaaaaaagaatatcaaaaggaaaaaatctggttattatatgaagcacatcacttagtgtaaaaagaaaaataaagcaattcaactgtttaggcaaaaggatactaaaccacaagctaaacaatttaaaacttcgtaaacaaggttccggtaatgcaaaagacaaccacaaaaagcagtttcagaaagtaccacaaaattacttacacttaatagcaaaggaatgtgccaaatatttggaacatcatagagagttagtatgcttgatgactgcaggtcga

SEQ ID NO: 2383 - DNA, 942 bp, Glycine max
gccatcctaagtgtatctatgctagagaaaacagaatcggcaccagaaatgataaaccatttgaactctaataaaagcagcagaatatagggtattgaacatgaccaaatcaatactttaaaagtccaccatgcctgtattatcaaattctaagaactaaaagggctagttatagatattgcaatgggagttttaatgtattactaccaaacatggaaaataaattagagatgatgtaccttcagtacagaaagatatgcatctgagaggttagtatattttcccaccattgcaattctaacctgtgaaaaacaaaatagttgcactcagtactagccactatagagagttgaatattggaactcatagattcatgaaatattattttagatgatatattagaaaatgttgaaactcaccatttcatgaaatttgtcatatacttttgttgtcgcaatccactccttaaaattaggctctgtagcaacactgcaaacaagaccataataattagtggaatgacagaaccactttaagtaacagccataccataaataataatatactcccagaacaacactacatctgcacatcaggataatcaagaaaatgagtttgtcaaacaaaccctcgcaggtttaatgttttcaggattgcctcatgcgccttttggtcctattagtaaaagaatataaaaaggaaaaaatctggttattatatgaatcacatcacatagtgaaaactgaaaaataatgcaattcaactctctaggcaaaaggatactaaaccacaagctaagcaatttaaaacttggtaaacaaggttccagtaatacacaaaaagacaaccacaaaaagcagtttcaaaaaataccacagaattacttactcttaatagcaaaggaatgtgccaaatatttggaacatcatagagagttagtat

SEQ ID NO: 2384 - DNA, 868 bp, Glycine max
aaacgctagtgttcttgcattcttacactacgagaacaatcctcccatacttcaccataaccttaaatctgcctgcatcttcctagatgatgactattctgtcaagattgcaggatttggtctgatcaactccaatttttactatggttctcacttacacaagaactatgaagcatttgacatctgcaaaaatgatgtttacgatatgggtgtgttgcttcttgagattatctcaggctcaaatcagttggattcaccaactttggctttacagcatgtaagggctggaaaatttgaagaaattttggacccatttctttgctatgatgaacaaccacattaccgccaagagcaaatgcaaataattgcagatctagctacaaggtgcctgttatttggggtagatggaaggctaggaatgatagatgttgtgagggagttagtacacatgactaaagaaagtcttgatggaggaattatgaaaggacctgcactggaggagacattctcaaattcaagccttcttcagatgatatcaatgtctcctgattctatgagtgtcccttgaatctttatgtcccagtcagtttagtttgtcagtcccttcaaaagatgataaacaaccacaattgtatgtgtgcactataagtccccagccactgtacattggggaatgcatccaatattctggttctgacatacttcactaaggtacaaagcaagtgtatttggtagctacttcttaataaatttaatcaactgctattgttaatgtgtgggaatcattttcaatacagaggtttttttatgggtatatatatagttgatgaaaatcttcgcgaaaattgtaatgtttaatttattgcat

SEQ ID NO: 2385 - DNA, 931 bp, Glycine max
aaaatgtatccagagactctacatatgttgtgtaacaattcagagctattcttcttggcattaagcttgcttggtcgagagggtataggaggattagagtagattcggactctcctgtggctattaatctggtgacaaaaggttgttgcatgcttcacccttatttcaaccatgtaaaggagattcatgcagtccattcctatgagggtgatgttacttggagccatattcttcgagaagctaatcaagttgcgaagcaagttgttatagctttggttccgtttcaagtttttaatttccccctaggtgtactgtcaatgtgttgagagctcatattgctcacgttagtttccccagagggttctaggcttttagcctttgtaattcgccaaaaaaatgtattttaagaaccactagaagacacaatgaagtccacagcatcctgaattccccagggggaattaccttccttgtgtttgctagttttttttttttgcttaattaacctatgattgactgattgcagatttcatcatgtcaacttagaaagttacttgaactttaccatgcatcaaagaagtgaagtgccaatccaaaagtcaacacaggacaaacccagaaaaagaagatccaaggagaatgcggtggtcatagatccagatagttgcagttgttaaattgcggggaccttgaccagtgtgatccactgtccccgcaatttaacatgaagcaccttgatagatgcatagtggatcacatttttctgatgatgggggaaacaaaacaagagaaagcaaacagaaacaactctaggacctcaaggatgagaatcccattacatcggctgagaaaatattaaacaaagctgctggacaatgatgtaaaagctgcaaatcatgggttgaggccgagtcttgttttgcaagccaat

SEQ ID NO: 2386 - DNA, 867 bp, Glycine max
atgaactatcactaattcaagaatccatctcaaccctgtggcaagaaaggcagcagattaggagacagaaaacggaagccctacgttggcttgagcggtggaggagtcgtggacaagttggagcagctcattgcaatggggtcattgggtttgccgaagaattacctgagttagcagaattttcattatcagatcttcaaaatgccacatgtaatttttccaatagctttaaaattgagcaaggtggatatggttgcatatacaagggggaaatgttgggtaggactgttgctataaaaaagttccatcaacataacatgcaaggaccattggagtttcgtcaagaggtcagttcctcccataatggtctttctgccttttgaaattgttatcttaaaatatagggatggcttgagaggattggaggtggaagcatttatattttaatatattttttgttttcaccacattaaaaatggatatgtgttctatttttctcacttgtttttttcgtgtttgttagattctgctaatgttatccttttgtgatcaggttcaagttcttggtagtctccagcaccctcatttaatcactttgcttggtgtttgccctgaagcctggtcaattgtatatgagtacctccccaatggaactcttcaagactacctattccgaaaaagcaacaattcccctttgacatggaatacccgagcacgaatgattgctgaaatcgctagtgctctctgcttcctacattcttttaagcctgaaactattatccatggtgatctgaagccagaaactgtactacttgattcttcactgggttgcaagatgtgggatttgggctctgcaggtcgactcta

SEQ ID NO: 2387 - DNA, 934 bp, Glycine max
gcaatcaggtagcgatggtggtcaagatgaaattgactttgaatttttggatgggaataataaggatcgaccttatttactgcatacaaacattttcacaaaaggtcaaggtggcagggagcaacaaatctttctttggtttgatcccactacagattttcataattacacgcttctctggagccaaaatcaattagtgtgtgtaactatataatcactgttctttttttattttccttgcctaataacctttctttgatgaaatgtcacagtttttttttggatgacaccccaatcagggtgttcaagaacactacaacgaaaggagggagctaccccacaaaagcaatgaggattgtggcaacaagatggactagcccatgggcctcccatagagttcccgtgaattggaatgacgcaccatttgaggcccactaccaaggattaggcctcgatgcttgccaaaaccaaaacacaagcgaccagcaagaatatcgttcctctaagttgtgatggaattctaaggagtatcagagcctataccctcttcaaaaacaggccaacaacaatgtgcgaagcaagtttttgaattatgattattgtactaaaatgtttcagggtcccgagtgtcatgaatcatgaggaatatcgagagatgacttacccgatccataatgcaagtgtctacgttgaaattctctaaaactaccctagcacagctgcttctccctcttcatcacacgctctccctcacaaataacaaataaccctgaaacatcgcacgttctctctcttcatgacacaaataacaaataattctctgaaaagtcaggtcatattatttcatcatatataatcgctctatcactaacggatttcatacaacaaatgtcaggagagtggacagattcacattgtggcaagtaagaggtac

SEQ ID NO: 2388 - DNA, 734 bp, Glycine max
gtatggaacagaggaagccataggcctagccgtggccaatgccatagaaaaaggcctaataaagagtagagatgaagttttcatcacttcaaaaccttggaacacagatgcacgccgtgatcttattgtcccagctctcaagaccacattaaagtacatataatataatctccattctcacattgtttctaatgatcttaatattgtgtttgtgctcactttttaattttattttattttgtggacaaaacttagatgcggtttcatatgtgcttttagtactgttctttaattagaataggagtttcacctctgtaatacgcgttagcatttgatggaaacctctattacacggattacctgagtgaaactccaattttgattggagaacagcaccaaaagcactaatagaactacatctaagttttgtccttgctttttttatttttctataactactaatgttgtttgagtactttatgtgccacacaatgttgtttaggaagctggggacgcagtatgtggatctttatctgattcattggccagtgaggctgagacatgatctttaaaatccaactgtttttaccaaggaagattttctgccctttgatatagaagggacatggaaagctatggaagagtgttacaagttgggattagcaaagtccattggcatatgcaattatggtgtcaaaaaactcaccaaactcttggaaatagccacctttcct

SEQ ID NO: 2389 - DNA, 870 bp, Glycine max
aaaaaatggcatactttttcctcgtcaacaaaattctagaagaactcaattagcaaatttctgaatgaatccatattgcagcacacttcataaacaattatacccaatacatgaccactttcttcttttccaccaaaaggccctccccaccgtttcaacccacaccctttatttactcaggagaaaaataagcgcaaatcaattctacccttcttttttttttctttcccttttcagccttttttccccctctcttcctcacccacccacccaccaaataataatggcaagccccatccttccattcattacaaaagtagaaaaagcaaaagcatgatttttgaaaccatgttaaaaattcacttggagggaatcaatgaaaccaagcccacaaaaattaaaaaacagaagggggtgtgaccaagtgtattcggaactccaagaacagaaacctttgaatcatatggaccatttttccaccaacccagtttaagaaacaaaataaagatttaattttgatgaaaaaaacaacaactatgaggttgaatggaagaggagaggagaaaagagatggcagcagtgcggctaaatgccaaacctgaactttctctatcctctcgtactccattagatctctgactgtctaagttggaaggtagttcatgcagaagtggaaggggaaaaagttgaattttgcagcttggcttggaagaagtagttatgagtggtgagttgtgattgtgaatgagagataatgataacacatgagagagaaagggagagtgagattatgaatgaatgttgatgcagccagaacaagagcagaaacaggtgtttgcttgctcaagaaagtgttcaagttgggttcct

SEQ ID NO: 2390 - DNA, 868 bp, Glycine max
aaaaaatggcatacttaccctcaacaaaatcctagaagaactcaattagaaaatttctaacagaatccatctagcagcacactgcataaacaattatacccaatacatgaccactttcttcttttccaccaaaaggcccaccccaccgtttcaatccacaccctttattcactcagaagaaaaacaagggaaaatgaatcctaccctttttttttcgtttcccttttcagcctttttttccctctcttcctcacccacccacccaccaaataataatgacaaaccccatcatccattcattacaaaagtagaaaaagcaaaagcatgatttttgaaaccatgtcaaaattcactcggagggaatcaatgaaacaaagcccacaaagaaactgaagggatgatgactattctgaactccatgaacacaaaccttgaacaatatgaaccattttgccaccaacccagtttaagaaacaaaataaagatttaattttgatgaaaaaaaaaaacaatgaggttgaatggaagaggaaaggagaaaagcgatggcagcagtgaggctaaatgccaaacctgaactttctctatcctctcgtactccattagatctctgactgtctctttctttctctctaagttggaaggtagctcatgcagaagtggaagggagaaaagttgaattttacagcttggcttggaagtagttatgactggtgagttgtgactgagaatgagagataataacaataacacatgagagagaaagagagtgagattatgaatgaatgtgatgcagcaaggacaaggacaagagcaagaacaggaacaggtgtttgcttgctcaagaaagtgttcaagttgggttcct

SEQ ID NO: 2391 - DNA, 823 bp, Glycine max
aattacacacatcatgatcttgtaatcatcatctcccaaatcagggatagccttggccttcttaccccagggattccataccactgcactctcattatcaccaaaccaataagtgacatcaattgtagattaaattaacaaacttatgtaaatctgaatgctggatctggcccttataaagtgaaaaacacgttgtagagactaaagtaagtaatccccttgtttttgatgaggaaatgaacagttgatattatgtgcacttgtataacaaaacatggatattttaaaatatcagtcgttgattttctcatcaataaattaggattgttttactctctaaagtgacttgttcagattagaagagccaaatagatacaatgccatgcaaaatttttattctctgactaataactaataacaacctgcatctggcattcctttcttctggagtacaaaagttctttttttctcatggtctatgatggcaattttagttgggctgtgcaagtacactctgtccatctacaaggtaaccacaaatgtccttagagaacacttgaaaaaaaagttgatttggtatctattatatatattcatacactcgaaaatcaatcagaatatatataggttatgtgcacttatgtgcttatgatgtcaattttcttagcctgtgagacacctccaaccaattgaatgaaaggaccagaaaatcaaattatacctctccatcaaaagtgagtgcatctgcctgctctgtgaaccttgatctgttcaacagattgtcaaagtaatccagtgtctccaatccctcaatacgcacttc

SEQ ID NO: 2392 - DNA, 839 bp, Glycine max
agtcgacctgcagtgaaaagcagggtactccaggtctttcttgacacggtaaacacactgattcttcttgaattttcaagccatagaatgtagttccaaatttaggcatcaatttggttacttgggaaggttttattgaatgtgttaacctttcttcctctttatttattggctatttagttatgttaaatttattcttttaaattaggcttagttacaccttttgccttccaagttataaaattttgcaaattttgtccgctaattttattttatttttaaaattttatcctccaatttataagatgtcacaaattatatcatgatatcaagtatccataaagtcctaaaagatataattttttttcttctcataagtaaatgttaattattaatttattagttttttattagcgggaggattcgaattcggaacctaaccctcctaaaccatatgatgatatgaccattactctacaatagtttcgaaccaccacattttataaataaggagacaaattcgccaaaacaaattttgggagcaaaaatttgcacaagattgtataactttgagtgcaaaaatgcaactaagcctttaaactatcatgtcagtagtactattttctttttcctgaagcaagattacccgcaaagacagagcttcagaaacattgaactctttaacttgttagatgttactgccaaatgtttctaatgaagtccagtttgaactaacttttgaaggttatgtatggtcttctcacaactggagcctcagcagcaacagcaatagtctatgaagcacactatggcaactcaaataccaattggtttccatt

SEQ ID NO: 2393 - DNA, 907 bp, Glycine max
atatatcaatgactgtatagcttctttgcattcagcggggcaatccctattgaagaaaattaaaatattgtcaagttaaacttctgcttaaccagtgaacctcccaacaaaaggaacgcaagagtgattgaagacaaaaaagaaaaatactaattcttttactgcatacacagaaaatcatacctctgcttataaaggtctccaacgtgacccaatatgcaagtagtaaattttccaataatttcatagcaaaacgtcagattttgctcgaccagaactccttcagcctgcttcaagtgtaaagactaattaacaagcctaatgaatatacacatggtgtagataacatatcacaatatacaataaaaaatgggaaggaaaaaatacccttccatatgcattgtaatcaagggcactcctaagaaggtcggcaatgtctttcttcagaaatttctgcaccgcgctccttttcttgcatatcgtctctagcctcatctttattaacttcaaccgcgatttgctatttcacattttaatttcatcatcattattgttattttaagaagaaaataaaaaagggaaggagggaaacagagaagtaccacttggaatagaatttgggcttgaatagcgcattgaacattttcactcccgagaatccgaatatacgaagctggaaaagtgaaaaacgggttcttgcaggagggtatgttcttgtgaaatcaagaatgcagagactcttgtgaggaatggaatggaactgaagaaggaagagcttggaaaaaatagttgctttatctgcaagaaagaatgtagcaagagagagagagaaatgggagcaataaaaaggtttgtgaaaatggtaggaagagagagagaaagggtcactgcaggcatgcaagctggc

SEQ ID NO: 2394 - DNA, 922 bp, Glycine max
agtttgctaggaagtgggtgccattctgcaagaaattttctatagaacctagagcaccagagatgtacttcagtgagaaaattgattacctcaaggacaaggtgcagcccacctttgttaaggatcgtcgagctatgaaggtctgtatcatatctatcagactagtacttgaacacatgggagtttaaaagttagtttaaagcttattcagtgttaattgggtgtttgacagagagaatatgaagagtttaaggttaggatcaatgcacttgtggcaaaagctcagaaggttcctcaaggaggatggattatgcaggatgggacaccatggcctggaaataatactaaggatcatcctggtatgattcaagtctttcttggtcacagtggaggtcatgatactgaaggaaacgagcttcctcgtcttgtttatgtttcccgagagaaaaggcctggattccaacaccacaagaaagctggtgctatgaatgctttggtagatttttttgagcagtttttgttgttcctatgatgtccattcacctttatatgagacacaattccttgacacttccaattattgctgtgatttgcagattcgggtttccgctgtgctcacaaatgctcctttcatgctgaacttggattgtgatcattatgtcaataacagcaaggctgctcgagaggccatgtgctttttaatggacccccaaactgggaagaaggtctgctatgtccaatttcctcaaagatttgatggcattgataggcatgatcgttatgctaatagaaacacggttttctttgatgtaagtcactgcaagaaacacagcatcagcatagcatggccttttctttgaagcatttgactatttttttttggtagtgtaagctaatactaactatttcttcttctttgtct

SEQ ID NO: 2395 - DNA, 966 bp, Glycine max
tggcctttcctttgtagtatctttgtgcgttgccttcaatgccttgtctattaatccttgtaaattattgtgagtaccattggtactcttaatagatcctttttaattggcctataaattaattcataaaatttatgttaaacaaatggcaattggaagtgtgtgtaattaatattaattaagtttaactaaatttacattgaaacatgcacatagtgtggataattatggactttccccagctaaatatataatatatacttatatgtttaggacttgggagtgaatgatcatgactactgcaattcactacttgagagtttgaaaatggtacttgtgctatggtcaagagggactaagaacatggacttcctaaccctcttcactcttctactcttgttattcattcatacagcactctcttctacccaatatcatgatgggaacatcttactcactcatcgtaagatcttccccaaacaggaagctatcacctcgtacgctgtcatctttgatgctggtagcactggtagccgtgtgcatgtcttccatttcgaccagaacttggatctccttcgtattggcaacgaactcgagttttatgataaggtcaaaactactaattcataagctacagttatatttaacgaatacttacaacactctttctactaaaattcattagaagtcgcaaattttagtagttttcctttttatttaacgagtttcaacttctgaattaaaaatgaaacctatcaaaatttataatttccgaccaattttaaaccaacaatagaaagtagtgtatgaaaagtgtcactaacattcctagttatatttacacgttcatgtcaatctccattctcttcacttcttacagtcttcattaattattgtggtgtaggtaacacccggtttgagtgcatacgcagataatcctcaacaagctgcaagcatggcaagtgg

SEQ ID NO: 2396 - DNA, 975 bp, Glycine max
ctaaaggtgaaacgtatttggccgctgttcgtgagacgcttgagcagttataataaaccccgtaatcatcctcgaagaaggccaaactgaaccctaaccttctcatcttgtaaggtttcttttttcctctctttgatttttctatgtgtttcgttttctactttcttattagctttatcataagttagttttagcttttggacaagtgcatgtgtagaaccttatgttttagcttctgaatgagaagtgtgcaaaccataaaatgatagacattgagggttagataagctacagaaaaataaaggctaaaagaagatgtcattttctgtcactcaaggacggatactacctgttgctctatttgagcctttgtttggtgttttccctttgtgtaatcattcaaagccatgccattatgctccattatccatagctatttgggtttctcaagcctcaatgtcttcaatttcgtccctacctacctagggcttctatcacaatttctatcagaacatccaatcctctctatcttctgcctaaccatatctgcatattttacaatttgctattatatctgatttctggatccgggtatatttccacttccttaatttggttatgtaatgatgtgttctttttctcttcttagtaattccccctttcaatgagatttattcctttctgataaaaataaaaactaattaaagtatatatagaaattaaagcccaaaactggtttcatgttttgggaggtggacaccatttctgtgtactggtaaagaagataacattttcatcattcagaagtttctgaagttgcagatataggtatatagatttgggggttgttttcggtttgagattttcatattattttaatttgctgcataaaaaaatttggatctcagtacccaatcacgcaagaaagggtaaacggatctagcaagaaagttactaatgtactatatggtaaga

SEQ ID NO: 2397 - DNA, 876 bp, Glycine max
cgtgctccttataatatgtgggttgtttgaatcttaaccactttataataacgagttagaactaacatgcaagaaaccagagaaagaaagtgtagcgcacattagatacagctcttaaaacttgtgaattttttagatggagatggattaacatacttaaaagcaaacattctagcaatgcaacaatgtatttcttttaatccattagatacaattaatttcattgatgaaatagatgttgtagggaggctcagaggtacatgtataggttgaggaaatgatgaaagagagcaaacactgaatcagatgcgcactgaaatgaagaagcttgacaaggatgtctctcttagtgtcattgccatgaaaactccgggattcagtggtgcagacctagcaaacctcatgaatcaagcctcgattcttgccaattgaaaggggcaaagataaaatcgcaatggaagaagttgatgactccgtagatcgcattgtggcaggcatggaaaaaaccaagatgatgataaaaaccaattttttatctactgcaaattaacttaaaaagactactaaaagctataaaagacagaagagaataagatcaaacttgagatatttcattcatttcattgatggcaaaagaaaaattctggtggcttaacatggttcataccaggtgaagatccatctctcatctctaagaaccaactacttgctagaatagttggaggcttaggggaaagagcagaagaggaagtcatatttagtgaaactgagataaccactggagttgcaatggacttgcaacagattacacaaatagcaagacagatggtaacaaagtttggtatgtcaaagattggaccatgggcattgactgat

SEQ ID NO: 2398 - DNA, 861 bp, Glycine max
tcaaaacccgggtctttctctagagtcgacctgcaggttttcctgtcagcagttcaagcagaatgacaccaaagctgtacacattcccagccattgttactgtcattgtgtatgcatactctgccaaccaacaaacaaagtaggttaagagctatgaaatacaaagtctgtgtttggatgagcgattgcaaaattaattttgaaaaactggttttagagtgaagttatatgtttggatgttttgatcctgaaggcaagtttgatgtaaaactcaatgcagatttttcaacccaatacaaaagttactttttataacttctagtcaaactgaggtttggaggctaaattaattttacctaacaataacaaaacatctatatctttaataaaatcacattggacaggagataaaaatcaattctgatgcttttcaccatgaaaccatacacacactaaaatagcttggcagtctcatcgaattctgaatcactggtagtgtatgcatgagcaaaaatgttaaatgcaactttcaggttatattctcaagtgtttcatgaatttagtcaggtttatctttgttaattgtaactaaaacagaaacagtgattaaataattatatataactgatgtcaagtaaatgagatagagacaactatgcttaaaatgtatataaaacattgttcacttagtggaattcaaaacctatttgatccacattgcccctacaatatatatagtgtttagtggtagttacatgaagttaatctatgaactacgaaaaactaatagaaatataaaagttgaagagttttttacctggaggaatataaccaactgaaccagcaactgcaggcatgcaa

SEQ ID NO: 2399 - DNA, 852 bp, Glycine max
ttgcatgcctgcagtaaagttagtcctctatggtgggagtcacagtcttgggtaaatatgatgggtgttttcccttatcagccggatcaacattttagtcagcatatctttggagcttccgtagggttgcagggaaaaagatggcagtggtggtggttcgctctcacttactcgatttggaagcataggaacagcatcattttctccaatgctaattttgacgctcataaattaatggatgatgcagtgtttaatttatggacatggctcagatgttttgaaaaagatttctctctacatttcaatcaatggtcttcaaatctcaaagatgcttttcttaggacagcaacataggtttagagtatagctccaagtcttatttgagtagtttttgggatatttcagctactgtatcattgtctgtccaaaactacttgtaatatggctctaaatctgtatattttagtacctctggtactcatctataatattattatttttgctgagcaaaaaaaaaaaattgaaaaatttaatcgagtaaaaaggatcagaaaataggtgcaggtttgacctactgaaataaatagaaatgtattcctattagtgacaaatttcctttaaatttaaaatttatgttctaaatgtcttctggtatgtgtgtgcaggttgaaggtgattcaggttcttcgataccaggggtttcaggacttcagtatcatattaccaaagaagccattggaaaattcatctcattccagtgtactccagtacgtgatgacggtgttgtaggtgacctaagaatttgcatgggccaggagcgcgttcgccctggtaacagatttatgggactat

SEQ ID NO: 2400 - DNA, 800 bp, Glycine max
ctagagtcgacctccagaacagagcagcaagtggattaagctttattacaaataccataagttaactttgcaacaccagtaaactttaaatatcaaagtgtcgtggtctaacgattaaaaggatctatatacttctgtttcacattgtaatacagcatcgaaaatcataatttttttaaagtaaacattaattccattcacactgatatttcatattttcctttcaagagatttccgaattcagactcaaatgattgtggaaaatgtgttttagaggattcatttgcccaaacaggatgattttataatactgaaaactgaaagggactaaagacagacataatgaaatggaaagagtaatttattagccagaataaaaactacaccatgatctcattttagcattgtatcgtattattatcatggacaacttcaaccctgataagacaaaacaatggtcctaaatgagaaaaatctcctcagtccaaacaacttcatcaagaacccaggatattcgcaactaaacaatatcttcccccatgaagaaaaagaaatccattgattaagaaaaacaatttctacaatagatcacttagactatttcttggggctggagattaagtatcttcctaacaggtctattttgatgtctcaaagcaagtatgtcagagatctacttcataaaactcaaatggatgaggcacactctatctctactcctatggttacaaactgcaaactgtccaaacatggagctgatctatttcatgatccaactctctataggccagtagtgggtg

SEQ ID NO: 2401 - DNA, 904 bp, Glycine max
aaccaccacattttaagtaaggcaaccaactttccaaactactagtatgcaagaagtttggattgagatcaatgagatccaattcagacaaaacacaacctttacttacccatttaagtcataaatataagtgcccttaatttcacactctgatagagatggtaaatataacaacagtacataatattaaacggacttcaatataatttgatacttttacattaatttatacaattttagtcctcatttctttttttacagtgatcctcatatttctaggtagcaattttattcgctaaatttgatcatatgttaaaattggattaaaattagtgtagcttcgaaattgtaacaaaatttgatgaaaccaatcatcaagttaacacaggttaaaaaagacctctaagaaactatttcaaccattggaaattacgatgtgtgaaaggtagttaaaaaaacttacataaatctaatatgatttttttagtacgtactctaaagtgtactatacgtcaattaagtaccatatgtctaatatccacaaattctattttatgaaacttaaaaggattaatgtggtatatgatgttgaaggattaatgatttattaaaatgatttacactacgagtaagattaatatttgatccaccggaatgaaacacactcgtgatcttcgatttcaaacaaaaaatatctcttatgtgagactaaagtagggaaccaattaatttaacatatgataaaattaaaagattaaaatcactatattaaaagtatgaggatcaaaattgaataagtgtaaaagtaaaaggatgaaaattatatctaagccaattaatttcaatgtatttaagccggtaaataacttacaggacagattcacagaagaccacaaattgttat

SEQ ID NO: 2402 - DNA, 927 bp, Glycine max
tacacaaatctaagtccaccaaggtcaaatagctatctccaccacataaaaaaaatgaaaaaaccaccaaataaaaggcaaagacacacaaaagcaaagcatctaacttcatcagaagcaccaaagcaaaaaaacaaagaaagagagaggaaagggaactcactgtcattgggtccatgaaattgcacataaaattcttgcattccatcattaatcatctccaccttgtaatcactcatcatcctacggaaaacaaaagacaaagaggacccagaatcaggaacagaaagggaagagaccccattaacaaaaagattgaaactttgatgaattgagagagagagagagagagagaaaggattaacagtttcatcaagtccatctctcggcgcttgcttggggaagacatgtttctctgtgtgtgttttggttggtcccttgctttgccttttcttctctttagccttttcctttggcaagtggagagagagagagagagagagttgggattggagactcttgtgcagctgaaaggaagtagaatttggttcaggcagcaatcagcacaactaggagataacaacaataatagtaataataataataataattataaaagtgaactaatgaaccatgaaattgataaatatcttatattaataagatagataattaaaaaaacttaatttatataatataaaataattttatattattattttattttataataaatttatcctatatgataaattataattcaacttctctaaatcaagaaacatgcagtttaaatgagataaaattattctaactttataaatgattctgagttcgagttttacagcctgtttgaaaatggatctacaagactacaacgtatttttcacatttatccatcttcactagttactagctgcaggtcga

SEQ ID NO: 2403 - DNA, 973 bp, Glycine max
ccagacttgcatgctctgcagagtattttgtgttagtgctttctattttgaagtaaaaaaaatggacaagtaaccttctattaaaaaaaggttaaaaatattagacaaaatgtaattgaagggatccaaattggtcataaggcaatttgggaagggaaagagagctaagaagaaaaatccaagacagagagatataagaggacatgttttcggtctccaatacaagaactgaaacttcagcttatgtgctgttagttttttggggcaaaatgggactgatgatttctgttattctttactttgtgtctgaggacagattggaattacaattaatttattaggttctttatttgctttgctcttgctttctcacttcacaagatgttctattctgagtaagctagctactactacatttttattccatgtatgtgtaaactaaatataccatttcaaagctaatttcctatagttttgaaaaaaatatatcaatgtcatatcataactaaaaaatatatcaatgtcatatcataactaaattgttctattcttggcaaatggtttttaagagtggtagtaggcagatatgtaaagacactaaaatgctttatttgtttccttagatgttttttgcttttgttctccaattttgcaggcattctgtgacataaaagctatctacacatttgaatgcacgtatgacataaacaccttggttacaggcagggaaattatgggtattttttctttatattgttttcaagatgtccatgtgagaactagctcttaagatggtcttttttgctggaaattttcattttttgagttgtagagtatacagaacaacatgccatagttaagaaagattaattatgccaaagtccaagtttccaaaatgcaaagttgtattcttgaatgccctcctttttactatttgcccattgtttgactctgctatcatcattatatagat

SEQ ID NO: 2404 - DNA, 878 bp, Glycine max
aaaaccactcctacaaaatgaaattccgggggatgagtatatactaaaaaacatgacaacaatgaaataccactctttgaacacacatttttacaagcacgtacaagttaaacaatactgtttacacccacctgtttaagcttgggtacagctcgtgatgggtttccctccagtgtcaccaatgtagataagaaaactccgatgaatatgggtgaaaataagaactgtgaaaatatttcatagcattcaaaattaaattattatacaagcacgaaattaataattgatacaaagtggtaatagacagtggattggaggaccaatgggaacatcccacctgatcaagtacaagccgtaaaagtgcacctgatgctccaggaagtgtaaccaatttactcagatacaaatacctatagattcaaagcaaatgtcaggaaagacaagggaatgagacttaataattattgagccttcatccaaactcctatgaccatgatatgtggaaaatctcctaaacatagacatcacaaatatcaaaaatcaatcttcattggattcttctgataatattcattaggggaatgaataaatatttacaatattattaaaaaaaaaaactacacccaggacctaacaacatattacacttattattactgccattgggatttgcattatttaaagtattatcatttatcacattcataattaatagactataaacaaagagtctactttcaggcataccaaaatagattctagggcattaccagaaatgcagtgttggacccactaaagcaaaaccaagaaaagtaaagacaaatgtcctcttgaaatccagtgacggcacttggtctatcacaagctgcaggtcgact

SEQ ID NO: 2405 - DNA, 865 bp, Glycine max
acgcttaaactccaatcattttcgtaaaaagctgtaaaaaaaaaaaaaaaaaaaactccattcattttcgtgaaaagtaagaatctcatctaaagaggtttgaatgccttaaatcttaatggacaaatgcaagtactccaagttgatatgcaaataggataaattgggatgaaggaaacggatcacagctttataaattggttgtaaccgatattaaccggatcgtgacgtatttttaaattttaaggattatttcgttcaagttcattttgaaaaaatagatatttttttaactttttgaaagagtttctgaaaataaaaatatttttaaaaataaaaactgacattttttgggcttggggataaattaccttcggattaattttgttcggcgcaacttcacataataatgataatatttcaaatttataattctttaattaagttaggcataattttaatatttctttgttgccttaagataatattattttgatatggctcatttggaaagatagttatcagacatctttagtgttaatatttgcattttaaaaaaatttatgaagtcggtagagctgaatattgttgataagagtcttgaataattggtgtaagattgtgtatctctttttttctttttatttttttacggtaaatgtaacattgtgtatcaaaattttatatttacacatttttattttaaacatgagttgacttagtagcaatccaatggccaatcaaaattatctagtcaagattaacccaaaaaaaaaaagttaatttaaacacgaaattgctatagaggaaattgagattgattgcaggaaattgagattcctataacaagggatatagattattg

SEQ ID NO: 2406 - DNA, 807 bp, Glycine max
tccaccaataataaaatactttaatttcaccacaaagtatatgaatatgaatcaaccgtttggtttataagatgcaagtagttaacatatattataccatgtccttttcccattcttcttaactgggccacatattctgagatctttttaatgtcttccaccttaagcaacaaaaagaaattaatgagaacaatgtttctcccatgctactcaactactcttgacagcaatagaaagaatcacactactggacattgatttacctgaccaaccaaaaactcgctttcaagaaagtcaacaaattgcacatcattgttttcatttgctaactgcatatatagtgataaaaactagttattggcattcaacaacatagtaagattccattgggaggtagtggaattaaaaaggtttgagttgaattcacaaaagtactgagaaaatagaactatagaagtgacgtacgctgtgtaaatttagaagcttctcattattcagcctttccaaagataatgcaagttccattgctgcgaaatagggcgagacagaaatagtaagtataatcatagaaaccattcaaattcacgaataatagaacaaaacaacactcatgaaagatgagcaaaccaaggtaaaaataaaaataaaaataaaagttcaatatttattatatatatatatatatatatatatatatatatatatatatatatatatttataaaaaaaaacttaccatataatgcatcacccttttctgagtgatcaaattctgaaaatggcatcagcattgactgcaggcatgcaa

SEQ ID NO: 2407 - DNA, 933 bp, Glycine max
gcttcttgaagatctcgacagcaattaaggcacaaatcatatgagcaacttggacagcatcgatgataatcagtaataggtatcctacagaaattactgcaagaaacaaataaaaataaataatgaaccttatactatctacgaataaggaacaggtgcatgatacttcagcacccactaaaaccaaccattcaacaaaatttgttacaaatgtaccagcacacctactcatctgtgttcaattttatcctcggaagatctatttcagcacctgagagagaaaccatttttacaacatcaactacttattcaccacacaaaaagaaaaccaacatacacaaccacaaaactaccagcaaacccaaataaaccttatcacgcaacttcttttcaagttctacttgaaaacactgttcacggcggatctgctttatcaccggaagcaccgaggacagcagcacgtggagatactgtaacttatcaagaacaggtatctcgcgtatccgaatcttagtcccagaaaaagcaaaaaattgactaagaagaaaagaaattacacatgctaaacttgaaaggcatatcctaatctcagttatgaattttaaaagtatagggacctagttaaacaagaatcatgtgatgtaataactgcatccatagaattaaccaaacttacaacaaattaaaccctaccgtagaagattgggaatcaaataaaaggcatatttttattggatttcgagacatcctaataaaagcaataagctttcagaattagattaacttatgtcattctgtattcaatgttaagcttaagataaactcatgcaaatcctaaataaaataattatgtgcagaaattctgatcccaaattacatttcataatccataaagtccaaactccagaaggtagagagattaccttattgtgt

SEQ ID NO: 2408 - DNA, 786 bp, Glycine max
gccagacttgcatgccttgcgcagggggctcagcagaagatccaccaaatccacctcgattaccagcaccataagtgctgtcatatccagtaggaggcccggatctaccgccactccgtccatccccttgattatctcccccataaccacccacattacccccatatgatggaggataggaattgggtccaccagtataacttgcaggtggaggaactgcttctgttccataacttgcattcccaccaccataagaactgtaagtgggtgggtagtttccaccagcaccaccaccataagattgggcagtaggagcaggaacttgaccataaccaccatcttctctaccttgattacctctgtatgaaccacctctaccatcactactaccactccttccactgttatagtcattgcctctccctccatcataactcccagatctaccccctccactgttatagtcattacctcttcctcctcgattgttaccatagcccccacctcctcctcctcctctattataaccaccaccacggtcattagaactattgggattaggacttggagcaccgcatttgttgcattcaaccctttttgcaaagttcaaattcccacaactatacaaggcaatttcaaaatcaaatagagaaacacagaaatcaacagcagtaaaattctcacagcttcagctaatgaaaacaggaaatattctcaagagcagaatttttttttaaaaaaaagacctttggttaggacaacggcaggtctgcatctttaccgccg

SEQ ID NO: 2409 - DNA, 776 bp, Glycine max
gagttgacacggcgttgtaggcatgcggctgctgctattggtgacttaatttttatttatggtggtttacgtggtggtaagtcttaaaattgatgttccttgtattcatctaaatggagttttttttttcttctttttttgcttcacgatgcatgaatgtttgatcaatgtagttcactaggtcaggctgctttctgtagacaattttatttactttactgtatttgatttacatgtttcatttttgttgaatttgttacttttctttatttttgttcggactcaaagcagatggtatagagtgctaatgtcttctattagagtatgaattgttaaatggtgctaggataagagttgggagatagaaacttatgaattattgctcaaatcacatgatcaccttagcttcaattcttttgatcagatgcatgtttagctaggtgctctgagaaaaaaaacttgagttgagaagaagagcacatctagactgttttaagagaaacattggggtattagtgtattactattcaactaggtttactattggctcatgctatgagtgaacagttacaagagataattccaactaagacagttgctgaattctttttttctttaaatatatgtgtgtgtgtgtgtgaatggatggccagtcaattcctgttgatcttgcaagctgagatgcttgctcttatgctcgctttggtattttatattgtgacgagttctaatttttttcttgacatgtatgactgaccatggtgtattacgtgttt

SEQ ID NO: 2410 - DNA, 878 bp, Glycine max
aaaattatggtataatccgaaaaaataataatgactacaggaccaccctttttaatttgaaaatataaagataacccagaactatcagaccaggatctcctgtatttcatttttttaggtttcgaaatatttaatttgctctaatgattaagaaaaatgcattttagaacaggacataagcagctacttcttcaagggccaatggagtggtgaacggaaaaacaccaattccatatttgaaaactcaatactcataagaatgcttaagcataaaagatagtgcaaatcaatgccagagcaaaaataattcaagttaaagaagccgataatattcagatttcagagtgacggagaattccattatttccacaactacaccattcttattcccttaaattgctaaaaggcaaaccttccaaaaaaatgtcaaggaaaaccaaaaccaaaaccacaccaaaccttttgcctagctcttctaatactttgacgagcatcttcacatgatttagcaaccaacttagtcatagcctgaaataaatgtcaaacaaaaaggatatatcagcatgatatatgaaatgagatgtttaaagggtaaacaataattaactggagtgtaatgagtttacctgcatatgctctttggtcaatctggtcatttcaaggtgaagaagtaaattagttaattaatattgagcttgaaattcaagttctttaatagctattatatccaaccaaattcactcggacaggcatgagtaactgaatgtcaatagaatacgtgcttacggtggaataacagcaatcaatctttcaccatctgatttaggatttaaccccaatggagatgaaacaatagcattctctaattgtttaagtgt

SEQ ID NO: 2411 - DNA, 784 bp, Glycine max
cagttggattcactggtgcagctggtttcattcttgctgtcctgtggtttatctcatttggcttggcgcttatgattcatctgtgctgtggatggggaattaacatcaaggacaaaggatcaaatcattcacagaggatttgtcttatacttcttatatcattcacttttgctgccgcgtaagactctattttcatgttccccttgttaatttcttcatgggatgctgtatatcctcaaaattcccctcgtcctttccccctttgtcaatagatatggaaacattgttctttaatgagctttttcatgattgattacccagattttcttctgtatttataattcaaaatcatgtgccatggatgttttattatcatttttcagtgtaaaaaatccaacgatgatgatgtttttggtaattccattgctgtgaaattttaagaattagtttttgcacaatacatgtgaaatttctgtttactgccatagctctaagttttattcatcatgcactcgagtgtggttactaacatgccctagtctctttatcacacaggactggatgtatcctcctttctgttgcgcaggataaattccatggtcaagccttggataccctccattattttgtcaatcagtctgattatacagtgcagactctaagaaatgtcacagagtatctctcccttgcaaaaactatcaatgtcacccagattcttcttccatctgatgtcatggatggtattgacaagctaaatgtggatctaaattctgcaagcatgcaa

SEQ ID NO: 2412 - DNA, 818 bp, Glycine max
aatgggcatgacatgtcagcaacctgcacttgccttcgctgcaacttgtgtcttgtcggaagtctatccctaataagtctccaaacaaaaattgctattttgcttggaacctttatgcttcataatttgacaaaacagtcctcctgagttcctgctgctgctccttccatcagtaccttgtaagcactgtctgttgtgtaatgacctataggattagcagtccattcccacacatcaggtccatgatgtggaaaggtcatatcctaaatctcattgaggaagacacctactgaatcaatttcattatcaaaacatggccttctccaaataaaattccactcccacccgttgtctttgtagcttcccatctgttggatgaaactctgctgctgtaaggaaattgaacacagtctggggaatttttccgccagagacatctccccacatacccatttatcctcccaaaatttagtttgatccccacagcccaccttccaccgcataccactattaataatctaaccctgaggggaatgaatgagggccttcttcaagtctctccaccaaactgattctaaacctggtctatctgctgccaacataccctgccagccaccatacttagattgcactactctagcccaaagttctcctttgttttgcatcagaccccacctccatttaccaagcaatgctatgttgaaattggtgatatccttgatgtccagacctccattttccttggatgaagtcaccgtgtcccacctaatccatgcgatcttattttggtcaagccctcctccccaaagaaaccttcg

SEQ ID NO: 2413 - DNA, 928 bp, Glycine max
agtactactgtaccagttataaaaaaaagattttgaagtaaaatttctatttataggtgtataggaaaatgaggaacgttagcaacactctctctatgattgactaaaaattattagaaattaccaatctttgtgggtcccacattgaaatatacctattacagcctccaaggaccagagggttagcaagcacataccttcacctagttcaactaatgatgtggcccagattcataaacctaccaagactttatgccttgcactttttgccatgtcttgtttaaattcaaaagaagctgtatatttgtttctatattagcaaacaacaagccacacccagtaacatatacatacaattgtaaatacaaaatagagtccaaaagtaggcaagcttagtaacagtccagtttatgaaagcaacaggaaactactgtcatacagtcatatgctgggtagaatgcatactctaaatgattgttaaaccaaaactattgataaacaatcaaagagttacagcttcacagagtttgcaagcaatgcaacgttcctcccctgttggatattgtcggagtgcatgttcaccacggaaacgagggctcaaagggcctttctcaaaaggatagttaatctgcattataaagtcatgcatttaactagaagaagctgcaacaaacttgaccagcaacaagttttagaagatacttactgtaacttttgtttcaaagaagtatttcagtgtcagcattaaacctcgaaccatttcagtgagaaaaaatgtgttgatgctacgctcaaaaactgtcatccaaagcattagcaatgattagttacattataggaaaaaaaaaacaaaaatcaaactgaaaatgaaaactaaataccggaactccaatcctttaaatttcctttgcaagttgctccctttctt

SEQ ID NO: 2414 - DNA, 825 bp, Glycine max
cagcttgcatgggcctgcaggccgaaagaagaacatttggtatatgagcaaatacaatagatagaggaccaactattattggctttcttgagtttacatatagaggctctaaaggaggaatttcaccagctgagtttacacttaacatttttccatttagcaacatagtttggctatgtaaattcctgtctggtgcagttaaatggtactctcttctggctggttcacccactctacggtatggtaacttgttaaattttaaggccacattgacttgaacagtggtgctgttgtccaagttgagcactagtattgtgatccctttctgtaagagagtatcaaatcagatttcacatataatacatataccatatacagatacagaattttacttacggattcctttgcacaatgtgcataagttcttatcttctttgtcccatagaaggtagttaagaggacacggcctcccatgagtcggtgccatagaagtgcactgtaaggaagaaagtacataaccacacaaaggtgttataaaacagcattatgattgtagttcaaatgggaccccacttaataaaactccttgttctattagaaaataggttccttaacaactggcaagcaattaatgaagcaaacatcacacacatgggaacacaaactttgatatagcagtccatatttaattatttattatgtttcattgttcaactatgaaattcaaattttagtacctataatagtctggatttggcacgaaagtactagtattcagcaaaccatagtttcctcctatcaaactttgtctgcaggtcgactcta

SEQ ID NO: 2415 - DNA, 821 bp, Glycine max
cttgcatgcctgcagtttaggtttacacaatatttttctaatgccattgcaaagggtgtccccatattgcagtgcccccagcccattgtcaaatcacaacttctgcacaattagtaagccaaaaaaaccaacaaaaaaaaaattaaagagcatatataatttagttagatatacatgtaatataataatgctaattgctaaactgccaatgtcatgtaaaattaaatccaaacgaaaagaagataacatgacacatgcaagttagttatgagacttgctatagcaacaagagaaaatcaagagtttggtacagttataaattttttaatcaatagttgaaccagtttaaacatatcattaaaaaaagagaagagtgtttttttaataaaacataccattaaagagaccttaaatttataattgattgagagtgcaaatttattttatattattattattattattaaaaactgttttacattatatatcaatgtatgagcatatattaaagtgtatatgatgaaaacccttaaattagtgagtgtagaagaggatttatgaggttatttatgtggccttactaacttgcattatttgagggaggcaaaggaggttgttggggacgcttgcgcttcttcttctcgtagctaattcccctagccttggcttgcgaatcacgcacttcgcgaaggtagagtctgacagcgcgagcaccgaaagggttagcctcaggcttccctccattctcttcaaaggcagctctgaggcgccctatgagtgcatccaggctcccccacgcttgccgtagagggcaagggcac

SEQ ID NO: 2416 - DNA, 980 bp, Glycine max
ttacttcctgtgcaagggaacaccagcaacacaatagccactgtatgcaatctgtgactgctggcttcccacaacaaagtttatttggtggcaaattaaattttcccctcatttgaatcctccaatagccaccatagagtaaaccaaacacacaaagcaacatacccaatagccccagaactactctcacaggctcattatcaatattgatggtaaccgtattcaagatccaaaagggagccacacagaagaggaggaaagttgcaatgtggacatacttgttaccaaaatgaagtttctccaaattccttccaacgacacaaaaactacaaaagagagtgagacatgccacagaaagattgtccctaagatcaaatagtccccctctccattgaggtgtgtactcaacaagactgatcatttcttgatgcaaaagcagtatgattctgtacttcttcatcagtttcatactcttttcctatagggcttgcaatgcagttaactcctgcaagtgctggagcagcaattgcaatggagatgcatataccaaccccaacaacaggtctttcagatctattgaaaccccatttaaggccacaaagtgcatactgagaaaagcaattaacatggagtaacacaactactaccatcatatgtaccctttcatgaggcttgcaagtgccattcttgcagtatatttttcttaggaatatgatgcccttaggcttccacctacaaagaagtacaagatggtggaaccgctttggatgttggtatagacacatgagagtaaatagagcattgagaaattgattgttgacctcaaaccattagtccctttgtgactgcttattaagtattttgcttaagattcctgtcatgacaagaaaaagaattgctcctgaaacagcaacacaaattatcctttgaagaatggccatgttcaaaggattcttaatccattatctgcagagcatgca

SEQ ID NO: 2417 - DNA, 966 bp, Glycine max
aaggataggaagtagaaaatctaccagaaccttcccaaatggcaaggcagccacatgcaggaaaattgtaattgagttctagaaatcattgaaatactgcatctccttatgaatgtgaaattgtgaggtatctctcctttattggaaataattctgctacaattaattagtaacaacaaaaaaaatgtgggttaagcagtagctgtacaatcccttctagaagacaagctgatggacttgggtacatcacttcctctgaccacacggttatatataaaaccttaaatgactgtgagctattgggtctagttagcaaacttattggcattcttagcgtctgcttccgatttcttcttcccctaatcaaaatgctgaaggttttctcaccatcaatgttcttttcatttctgctaatgttattcaagccaatgttacgatttggtttgttcgcagcattttcaaacccatgaaaattaggatttccattttcctttacactttctgcattaactctacccacttcatcatcactagtctctgattctaaagcttgcacatctttcttgttttcactgacattattaatgtcctctggcagaacaaaagctgaacttgaattttttcaaacatgacactgtttttgtggctccaaaatgggatcagggattggtttgatgctaggtgctggaagaggaaattcccctggatgacaaccaggccagacagcattgggaccaaaactagatacagctgggttcatattacattgccatgagaactgattgatatgaaatccactgctagtaactggaaaattgttggttggtattgattgaggctgagtgtaaggaggatacatatatggcaacggttgtatcatcatgtttggtgttggtggaggtgatgggtatgtatggtgaggagaggaacacatggggtaactgcaggcagcaagctggcgtagtt

SEQ ID NO: 2418 - DNA, 870 bp, Glycine max
ttcgaactaaaacagcaaaaacaaaaaaaaaaggttaaaacagaaaacatgtgctgttgagttgagagagagagagagagagagagagagagagagagagagagagagagaaagagatagtaccaatggcaagacatcggcggggttagagcggagtttatcgggaaggtcggagtcgaaggtgtcgagatctcccatatcgacgagaaggaacttagggttatggaggagactctccctgtaaggcaagacattgttggtggtctcgaagtttcggatgaattccttgaatttctggatgagagagtggttcgaatcggtgccggcttcaccgcgggcaccggaaccgtcgtcgccggcgagcgcttggtcgctgtagtagacggctccttcgtcccagcctgacatcttctctcaatctcgttagggtttcagtttttttcgattgaagaaaggaaagaaagaaagagacaaagaagaacgactctccgaagaacgttaggatatgaatttgttcgagtgaaagaaaggggctaagaagaagggtgattttggcgggaaagctatggcgggaaagtattggcggggtgtgagtgtgacactgatgttggcacggatgtatctatactttataaacttttttattctcaattttttaattttagcaaattttactctcaaattaatctgacccattttatgttttactttttaaagaaatttgaaaatttttatttttattatttgtttgttaattagtataaaagtgagagataaaatttataagaaaaattgagcaacttcgtcaaaaataaataaaaaaaatagatgtaagattttttaaaataagctgcaggcatgcaagctggc

SEQ ID NO: 2419 - DNA, 799 bp, Glycine max
ggaacaatcttagatgaaaaatggagatcaaaaacgaaacttgaatggaagtaaagatagatcaagtgacatttataaaccaaaaacaggaacaaatcaatatagggatcattactatatctctttaatagaaacaacaaaatgaaaataccggattgtagaaccgctgtttagagaatccactgtcaacaacatagacaattccctgcatgattagaaaaataagaatggataaggaggatcttgtctctaaccataggcatagtcaaacttatggtaaaagagatgttacttccaacgtcagtgatgtttctgctatattagtagaaatgatcacttttctctttcctcgaggggcttgagagaacactaactcctgagagaatgtaaaacaagtatcactccattcagaaattacaattataataagtatagaaacaaatttttgacaagtaaacccacagatgtatttctaacctgttcagcgcatgaaagtcctgaatacaggggcaaaacaatcaatcctggaacaaagaaaattccatgcattagttgtatctcattgaagacttaaagatatgaaatcattttcttgttatgttcggaaaacacaaaaatttatacatattttactcatttttgttgtcagtaattaaagacatcaaaagctaacagtccaaataataattattcagagtgtgtacctgaagagtgctttccagtagtttgaacctcatcattaagtaactgaacagaagcatcaatatcatcttgtccagtaaggaacactagaacgtct

SEQ ID NO: 2420 - DNA, 856 bp, Glycine max
tagccactatgggacatttcatcacttttttatgcatgaagggatgtggaaatgtcaccatttcacatggacttccaagaaatttgacagtccttggaatgtgccgcgtgggaccatgtttctacactaaaacccaggattaccagaatagtagacaaccacaaaacaattaaaaagaccaaaatgtacttaataaaaattgctcttgcaggcaaagttacaaacctgattaacaacatatgatcttttaggagcattgtcagtatgctccaagccaacatactgctcccaagcaccataaacatctctcctctatcacaaaagaatatcaaagaaccttttctacatgtaaaaaatgagcacaaggcatatttcaaaaattaaggtgaaaaatcatatactgaggaaaagacaaggtgaaaaagcatatttcaaatatatgtatttctaaaatatgtttcttatcttgcaattaaaaaaattctctaattatttcattatacttttccttatgtgatttataagaaagagaagagaaagagagacttcacataaaaatttataaaagtaagagattgagaaagtaattgggtaagagagcatgaaataattaacttgctattttaaaatatgaattataaataaaaacctaagatgctcagcaaggaggcatgtatttgtgttcgagtcatctccaccaataacaacaaggtcatccaagtctagcttcttcactgtttcttcaatttttttaaactgtacatgtaaaataaattactccccatacttgaagaagatgtgtaacactacaagagttcatatgatcaatctttatagcaaatctgcaggtcgactt

SEQ ID NO: 2421 - DNA, 889 bp, Glycine max
atacaaatatggtggaaagccaataatctgctatatcatataacggatagcatcatggataactagaggaagtcgcatagcagctgaaatatatgatatatatcgtgtatgcatacaaaaaaaatttatgcaaataaaaataaaatgcataaaatttggcatcatattaacccaaattcaattaacatagtctctaatggaggatattactaattataccattggttaattgtaagtaatttgtgttgcatcaaaattaattcctagtctctaatgcataatttccacctacaaaagttgttcaagcaaggcataatgtatgaaaaacacaacacctgatactaaagatacttgatttgaccatgaacctataaaaacatgagactctcaaaagtacaagaaaatatttgcattggattggtcaaggctccaatcaccaggattagatattagcaagctggagagttcagattattgtcagctctatgtcataacataaatcagtcataatctttgtttcacttcctttcaatatggcatgagcaaaatacttttaaaaagaagtataaaatgtgtagtagtcactagtcagtcagtaaagcctcttgtttgggatataagaaaaactgctcaggatttaaaactaaaacatataaaatatataagaaactaagaaagataaaaacaaaaaacaaggaaatataaactcagctcactttttcacttgaaggaacagattgtacgaaagctgaaggattcaatcttacttctgacgctgatagaggttcagatattccagtgcttttaacctatgaagaaagaacctatcagtaaatctttacatcatgcaaaagagtatgaataagacttgtgaattgtacaacaaaat

SEQ ID NO: 2422 - DNA, 854 bp, Glycine max
taaagtcgacctgcagaactgattcagtgacacaaacatgactgatccacaaatagatcataaagttatacatatcatgtataaacacaagaaagataaggtatgtttccttttagttatttccatgattccatctagaaaacatatttccttttctttatccctataaggatatacaatggaataaacaacaaaagattgctcgaaaagtcattattgctagagttgtaaatagatgaccagttgtcatcaatggtggtgtaaatgagttgtgttgtttgtgatttattcaagtctttctcattaaaagctccatgaggctcataaacaaacaaactcaaacttgaagttaggcttggttatttcatgagtcaagcccaagttgaattaatactttgcaaatagccaaatagttcatatatgtatatattacctaaatagttgtaattttatttattatatttacttgaaaagttatatttttgtatattattatcttacatatattattaacctgatttcaattatgaaaaatcatattttaaatgggtaacaatgaacttaaaaaaaagtaaccattttcatcatcaaagatcccatttccaaattccaagtcattattaggaatataaaattatattttaatattattttacttcactttctatcatgaaagtacccatctattgaataccaaattaataaacaaaagagcaaattacagcaacacccctaaggtttcatgtaattacacataaccccaccctttttttattttcctacactaaccccctttaagtttgaaaacattacactaacatccccttatatgtttgaaaaccttacactgacac

SEQ ID NO: 2423 - DNA, 806 bp, Glycine max
gtaaatttcataagcgaatgcatgtgcaaatttttcttctacacgggatataaattccttcagccatgggaaaaacggctctaagtagttaaatatacatggccctgccaattgcatatttgtattctttttttcctgctcttgcacttttagtaatacggagttggggacatatctaacgactaaggagcagagaccctagcggcctgcgccactttattcattaatcttaacacagttgcattttaattgatataggatttatttatattttaaatttcatactatatgttaaagtaaaaaagtgctatgaagcattagttaatttttaaataccttcgtgtgtttggatggggtgatttgatagggtaatttaattttttaaagattgattctttgtaaaatatggggtttggataaagaatttaagaagaatttgagattttagtattttaataaactaaaatcttaggatttcaaattccttaaaaaattaaagaaattgaaattctttatgcagttctcggtatgctttgcttctctcacgttgcacgcatgctctcatcgtaaggcacacttacgctctttatgttgtatagtaggatctaatgactcaggttacgcccttttttgatatcaatacctattggtttaatgtttatggactatacgatgtttcttggtgattttgaattaaatagatgagatttctttgtttggatggattcgtctatgttttttctgaatgcaagtggtgttgtgtgtaagaatggttcttagttggtggccctgcaggtcgactctac

SEQ ID NO: 2424 - DNA, 843 bp, Glycine max
agtcgaatccagtgctttgtattttcagcaataatgctatatcctcctacaatatcttcatattaatattgattctcccaatttttaatcagccatgttaaatataaaaagcaaatgcatttaatatctttgaaaatataaaaacattcaattcaatattttcttcatttagtaagcaggaagatgttgtattgttgtattaagagttggaaatattctacttttaagtacactttggcttggtagatcttataatcaaatttacatagagtaatcactgtttgaatttgtatgatgcagtccctgacaaaagatcttcacattatgtgaagtgggtgctagttggtgcaataacactaatgggccttgcacttgttataacactttcattactatggatttgtttgctatcaaagaaggaaagagctgccaggagatacatagaagtgaaggatcaagtcaatccagaatcaagtaggaaggatgatggtatttcaaatttaacactcctattcagcacagaaaagaacataacaaatttttgtccttttcttctttgtaaatactaaaatggtcttgtaacaggtacaaaactcatcaccttccatggtgatatgccatacacatcgttggagatcatagaaaagttggagtctgttgatgaagatgatgtggtagggtctggaggatttggtaccgtttaccgaatggtgatgaatgattgtggtacatttgctgtaaagaggattgatagaagccgtgaaggttctgatcaggggtttgaaagggaactagaaatattgggtagcatcaagcacattaatctagttaacctgcgtggtt

SEQ ID NO: 2425 - DNA, 837 bp, Glycine max
attaaaatcagtttggcatcaattttatgaatgaatcaatgaattgaagtttgagagaaaattatcttcctccctctctagctagtaccgtgcattgagtttgtagtgtgtaacaaaaatattattcttctctctatctcattttccgctacgtgtttgttgtggtttttcttttttattgagtgtcccactgataccacacacgaaagcacaaacagccaaacctcggcggttaaatttatcttttggccgaatgaagataatacctaaacaagcgaatctttcactatttacccctctgaatctccacacttttcttgtcaaaaagccttgaaccttcgctaactctttgctttatccttgtcttcattttctttctctctttcctttgttgttgtcaccaaaatggctactagtacactcagccatgcagaagaagtacttcccaatccagcaaaaaatactgatcagaagcaaatccaagttactgaagatcataccaacaacattgactatgtacaaagggcacagtggcttcgtgcagcggttttaggagccaatgatgggttggtttcggtttcttcattgatgatgggtgtaggagctgttaagaaagatgaaagggctatgctacttgctggttttgcaggattagttgcagggacttgtggcatggcgataggagagtttgtagctgtgtgcactcagtatgaagttgaggtaggtcaaatgaagagagagatgaataatgaggagaaagacttggagatggggatggagaaaagaggattgcctaatccattgcaagctactttggcatctgcaggcatgcaagct

SEQ ID NO: 2426 - DNA, 741 bp, Glycine max
acaaagttggagataactatagcatgtattttcaatcattcaatttacattttacatctaattgatttaaacctaaattgttttctgatgcttgtatgattaataaaatcatattcagacgaagtaagaatctaaaatgttatgttttgtgtactatttacatcattaatttggaccccctacaacttccctatggtatttattttatgcaattagttaatcttttgtatgggtttttgtttttcctttttgactcttcaaatactgagatgtagaccatcttatgcagaggaagtttgtatagattacttcacagaccaaacagtcaattagatgagcgaaggcgtttgaagatggccctcgatactgtaagattctattgtcttttaatgcaacactgacgtattgtattcataaagtgattgctataactaaccagggaagcccatttgatataacttgtttctttgaatcttcaggctcgaggaatgaactatttgcacaactgcactcctgtggtagtgcatcgtgatttgaagtccccaaatcttctggttgacaaaaattgggttgtgaaggtgcaatctgatctcatgattaaaatttattgatagcatgggggatgctatgcgttcacatgatgatgttttttctgtctgttgaataggtatgtgattttggcttatcacgtatgaagcatagcacattcctttcttccagatccactgaaagcatgcaagc

SEQ ID NO: 2427 - DNA, 961 bp, Glycine max
cgccagcttgctgcctgcaggggggattttgatttcccaaagctgtctaaagccactgtttggctgatggagaggctgctcagatctgagacagttgtaagtagaatttgtagagaagattcccgttggttgagctccccacacccaagcatccttcaagtctgcaataggacttagagctgaggtctggtctataaaagctgttgcttcccccaattcactatcaaagaggtgccttctccaagaaaatttccactcccagccattttctccaaaaatccccatgcttgccactgtctgaaatttttgagaagatacttgatataaatctgggtatttttctctaagaacagagccatcacccactcaagagtcttcccaaaataagatttgatctccactgcccaatttccaaagaaagtgcttattgacagcagtcatactgctgtgctgaacaattgatcttaaatcagaccaccaagaggagaaattatgtttatgaggaccctcttccaagcctctccaacccctgtatttagaggagagaattctgctccatagatgatctgattgctggaacatcaaccatttccacttgataagaagagctctattaaaagccttgatatctttgattctcaaccctcccttttctctaggagcacacacttgattccatgcaacccaagctatcttttttccttctacatttccaccccaaagaaattgtctttgaatggcagtgagcctcttaatgactgctgaaggggccctgaaaaaagacatataaaacaagggcaaagctgtcaagacagcattgattaaagtaattctgccagccatagaaatacttctctggttccatttgttcaatttggcctcaaattttctgaataaaggctcccacaccaccttcctcctagggttaatacctataggcatccctaggtacaagaaagga

SEQ ID NO: 2428 - DNA, 944 bp, Glycine max
agttacagagtactagttctgcaatgatttattgtagtgatgcagagaatggattgttgttaactattacctaacttgttgtctccatgaatgaataaatccccgcaaagtgtttctaagcagtagcatagaaacaaaagcaccaaactgttggaaactaaaatgatcattaatcactaccaacaagtgatgcaacagagagaagtagaagaagagaaaaataaagagatttttgcatacaaaaggaaagtgtatgactttgctttctctaattggcaactgaagctttgtagagttgcaagcttgaacactcacaaaccttaaaccaaacccattacatttgcactcagcacacacttaaaggtcagaacatgtcttctataaaaggagaaaaaaaaaaaagcttaaaatccaaatttagttggagagccaccccagctaaatttagtgaatggcaaaccctacaaattgttaaaattagtagaaattaaagagtaactattttcctaagatgaacacaccaaaatctaaagttctgaaagcatacctctttcatttgctagaggtacataataagatacttaaaagccacttcaaaagtccatcttctaaagtgttatgatcttattgctataacacatgtatctttcttaatcttctattaacacacacaaaatcaaaccgagacatctctaagtgccacaaagaagaagtgctccaagtcagggggtgcaaagaatgagagtggagacctacgcaaagagcaattggagagaaccctaggcttcttaggtgctggagggcatgttgaaatctcaggaatcctgaattttttaccctttggtgtggaacatggactgttgcaaacatcaatcacctcagcagaaccatgcatgttgtccacttcctttgaattagaagagtcttgtagcttaggaggagga

SEQ ID NO: 2429 - DNA, 890 bp, Glycine max
agacgacctgcagtatcacattcacataagtggtcaaattttgatttttttggtattgatatagcgagcaaaacaagttttgtacctgatgagagaaggcatacgccatggctcgctctcgcttaattgctgcttcctctcgctgatgtaacctcgaaattatttcttccatggtttcagaaccattgcaccactccacctgacatataccaaaaggcatgttatgttcatattgaaaggatactcaaaattgcctcaaattgcgaaaaataacagaaattgaccggtataatgataataacacttccaaaacggttgaaatcaagcactctcggggagattatagcgacactacctcgagctcatgaatcttggcctcaatttttaactgggtttccaatttcttttgcttaatcctggcttctgttatcatacagattcttcgaactctaatttgttcttgtattctgctccatgaatgtatatagcttagtgcagttgctgtttgctccctggccaggtggtcttgaatcaaagcttcgaatttctctgcaccccttagatggtgtaatgttcttcttgcctgcgtgggtacagagggtagggaggaagttcactcttgtctttatgtccataataaattgtgcataagatttgaagaaaaagtctcaaatcaatatctaaatagatttatagcataaagtttgctacgattttggggtatctataactaagctcacagtcaatgaaaaaataaatccttaatacaggatttgttgataagtagctaggtataaataacagatgagagaaaataaaaaggcctcatgacaccaatcgttgactcaaagaagtaaatggctttccaagtacggttgaaaaaggggtaa

SEQ ID NO: 2430 - DNA, 919 bp, Glycine max
tcatgtcatgagtgatggagcagctactttcactctgacgtcgatcaaaaactagtttaaggaatattatcaccatattcctagccaatatgaaatactatattagaatgtgagactacatataatttaagcccaaaaaacaagtttagggaaagagaactcttcaaatataatcatcatattcctagccagtgaatttcaacggctaccagcaccaattagatatttaacaaactaattaaagccagtaaaaaaatcgttaaagcaagagatttacaacattttttatagccaaacattacaagttaatggcattcgagttcaacacgacacgacaacgatcgaccactatgtttctgtttcatgattcatcagttgcggaatactggcatagtaaattaagtgagatttttttatgtaattccacattaattgagaatcggtttcattaattatctttcacttctattgtatctgaaaaatactctccaaatttaagagttgtgcaaaaaaacatttttgttagagaacttccgagggagaaaaacataacaactggccgcaacccggagcttgatagttagtactacaaaccttctacgtgcaggaataatccgcgactcagatagagctctcaaaacaaaaacattcaagtcatttttttgctaccgacgacgcactacattaaaaatcaaagacgaaatagtgttacaaagtgaatttatactaaaagtaaaaaccttccctacactacacatgttttttttcttgatgacgctgctatatagtttattctacatggtaccgacattctaaaccaaccccactcctcttactagttactattcttcattttccccatctctctgtacagccgcacctgcaagcatccatgcggagacatttactgctgcctttt

SEQ ID NO: 2431 - DNA, 720 bp, Glycine max
tgcagcctactatttgtcccaacatcaaggtttttgggatttatgcactgccaaggttttaaattgcacttgtagttgcagtcacagtttcatcgtgattctcgatgttgcatgaaatttcggacaaatgtgtgttggattttatctggggcaaaagttagttgcagttttttatgtagttttgatgaagttttagaaaactgtttgtaactgatttcggttgcgacatcaaggcttttgggggtttctgcactgtaattgacagcttgctgctgcggttttggctgcaacttttttggcaattgtgtgctgcaattaactgtccattgcagctacaatgtcaaggcttttgggatctccacgaccacaattgttgacacatttgagttcagatgcaacttcagggtatttgggattagtgtgccacagttgacagtctgtctcctattttggtaaacaatatcaaggttttggggatctctgcaaccacatttgtatgcaatatcgaggattacgacagaatcacaatcacaattatggttacatttgcctgcaatatgattacgagggaatctcgtctgtaatttaaaactttttttcttcaatcaaaactagtatttcactttggtaattcacataataaatatttgcattgaaggtcaataatattactaaggtgaaacttcaattctgattggacaacaagagtgaaaacacgag

SEQ ID NO: 2432 - DNA, 748 bp, Glycine max
attctgttgttttgcagaatctgcattgtcatttacagttatcttcagcatttaatagagagctacctcagctcataaggaacatgatctccctttttctcattctaattttgcagaatttaagatagaagaaagatatctttccaattaccaaagaagaaaagtatggtctgccttatcaaagaagaagaaaaatattttaccaataaaaattaggaggaaatgaactcaaattagaggtggtgtatctaatattggtcataggtttcatctcagaaatggtagccgtaatattattttacactttcattgttaaatttcaatttatggaagttagtctaatcatttcaagcctaaattggatattattttctctttttacctaagaaaaatatatcaaggaatatagatttcaaatatcataccatcatccggttgtcaatatccatttcctgaatgcagcgaaaaaccatgtcagccattccatcaccttctacatctataagttcctgtgagaagaggaaaaagccatgcaatcataaggcagcaaattacactcatagagtttctactgagagaaagagaaagagaaagagagagagagagagagagagagagaaatgaagaagtaaaatatcatttactaacccaagtaacttcagatttacaaagactaaatatagacaattctgttagagagtctaacagaattgactaactaactaacttctactagaagctagatgag

SEQ ID NO: 2433 - DNA, 904 bp, Glycine max
tgctgatgcactgagaattgttgaacatccttgtggtaatagggcttaggaataagtcacaaggaggctgtgtgaaagttttagtgaaccaacagcccaggtttgtggctttgaagatgtaaaattttgtattatattgttttgtattgtatgcacctaaaacttctatttgtgacccttttacattgtgtacgtaatcatagactttggggtactgtttccttaaaagttactctactttgtacaagtagttacttaatctggtttaaaaaaatgtcatcccttaatctgctacatggcgtaatagcatctgatgctatattttttttctttttgggcaaaaatgaatttaaaaatcataatgatttcattgtttaaatttaagcaaccttcaccggtctttaatcttctacttcatcaggctcatgactttttcactttttttcttcacattctcaactgcattaatagaatttgtggccccaatagaccctacggaaagattaatgttcattcagttatattttcacattttcaaccatcaaacacgagtttatatcaatcctagtcacacttagcaaacaataattgaaggattgtgtaaatcccgtgactgagactttatgtgttcagaaatgacgaccagaagagatattccacctattcttaacacttcaacaattacttatatcttgtcctttatatgttccttatattgaatgatttttactattttaatggatgtcattagtaaagggttgatcgtagtatgtatgcaaacaaaaactacaagataatgctgaaaacttacctatggatatggatgagaatggatgccttgcctaataattaaatccacttataatgtctttgtccaataatttcgagaattaacgaaagactt

SEQ ID NO: 2434 - DNA, 882 bp, Glycine max
acaaccctttttgttcaaagttactaatgagttgttgtgtgttgaatgttggacgaggcagttgtgacgcttcgtctctgatagagacacgaccatctctgcgtccagctggtactacatagtttatgcctccgactctgttggtgctgtctctagcagcaaaagcaagaatgtcagaacaggacacagtgtgaggacactctgcctctatttgggccttggcctcatcgatcacttcgaagccacgcaagcttgggttgttggcagggtgctctctctctgatgggttacccgctgtggattctaatagtacagaaccatcacaaccctgcatatatatagcaatataattaattaagcatcaacttcagaaatggatttgcactatacatgactatattaagatgaagtagttaattaccctgacaaaacaatcatgaaagtgcattctgatcaaaccagcagcgatgcccgggttgagagaaacagctttgtttacagctcttctcactattgcctccgcagatggacacgtagttttgtagaaatccaccttcaaagatgcggaggcagatgagacaattagaacaaagcaacagagcattacatgcatgtgtagaaccattatattgttgtgtgtatgtaatttatgattgcagtgcacagtagtactagatgtgttgtgtgtttcagccttcaatgacaacaagtagtgggagaagagagaagggagtgatatatgtgcaagtatgtttgaagtggaggtggaggttgagagaatttgagcttggtgaattatatatatatataggttgagaattgtgaattcaggaggtgagagtaggccttacttttgaaaccaaaacgtgtgtgtggctgtat

SEQ ID NO: 2435 - DNA, 864 bp, Glycine max
atgctaacatcctcaccaaggctttctcctaccaattttagagtaccttactcctacacaggagttcttctcttttgtattggccttgtacaactgtcactactgctgtttagttagttaacagttagccatgatttgttaactactgtggttagctttctgttatctattggtctctctacatatagagagatccaaacagttgtaactaacttttctcatttagaatcaataacagaaactcaatatggtatcagagcaatacaaacagttaactgttaactaactaaacagtagtagtaacaactatacaagtcacaatacaaagagaagaactcctgtgtaggagtaagatactcaaatatcacataagatacaagctaattgattgaaatggagaaagacgacatgggttatttgtgactttaaagtacctaccaaactcagggaagatttttcgtactattatatgaccaaatatgctcaatggtagaaagtgttaaactaaggtggatgtgtggtcacacaaaaaggaacaagatacaaaaaatattatatacaaagatattttgtttaaaaactcattgagaaaaagatattagaaaatcgactaaggtggttttgacatttgcaaagaaatctactataggcctcagaaagaacagtagattacacaattttaagcatgtgaaaaaagataaaagacgaccaataaggacactagaggaaatcattaaataggatctctcatgttgaataacatccctaagaattttgtttttaaccaaacccaatgacagtgtgatccaaacaatcaacctcacctacaaaaacaaatttacaaatttctacttacattccata

SEQ ID NO: 2436 - DNA, 876 bp, Glycine max
cattcagatgttgaatgcttggaaaaaccatactaccaaaatgccttgtattcttggtattgacttgttttatgcaagaaaatggaaatgtgtgtatcttcagactacaataaaataaagcatggtagagggttttccagtaattttgtgcatctttggaatctacggtctcattggatgtgtttagtaaggtgaaaaatagagtgaatagaaaatcgaaagaaagataaaatgaataaataggaaaaaataaataaaaagaagaataaaaagatacattgtcaatcaatttttgcagtgaacaaatagtaatcgattgaaatgtgtgaaaatcaattggtgtttatgatgaacaatcattcatatatatatatatatatatatatatatatatatatatatatatatatatttgtggcggttgccagtaaataccaaaaaaccactgctacatatgcacaatttctagtgatttctgaccgccaaaaaaacgaaccaccgtgaaaattctgctcatgttagcaaggaaataataaggtgtggtccccacctatttccacacaaccaaaccaccaccccactttctcatttctcacctatttattctctcccttccctgtttccccaccatttctaccctaaaattgcataactcagatatgggcttctgattatatgcatatatcctgttcaccaaaagctattacttatgtcaattatttgaaggatctacctctctgttatagattagggattagggactagtgctgaaacacatttattggtacaaaagacaaagataaacagctgtaaactcaataatcaagtttctgtaagatttcacccttgctaagaggaaagtcactcaaaccaaac

SEQ ID NO: 2437 - DNA, 942 bp, Glycine max
aataaatattaagataacatttcacattggattcaacttctgctatatttttaattccattacattagttttgcaaacataagggaacaaattaaagcaacaggtagagtcaataaatcaagattcaagaaccacaatatttaattctattttctaatttccctttagtgtaagaaaccaagcaaaagaaaaggcagcctcttgtcactaattctattcttatgaagaagaagacaataactccatgcctcagctttgaccttttgtaagttctcccatgcattaatcttggatatataaaaatgctggaatttcaaaaactatgtaaagttcacgcaaagatttatttggaatgagcatgagacaataatcatgcagtatacctctgccagaaaagaaacattcagtcaaaagaggagaaagagctatatatgtaagacatggatgtaaaaattgaaactactttgccaaaagcgtgaccatgcttagagaaaactgttttgaaaaaattaaaatacaaaaggatggcaaaatctcatcattacaaatttatcatcataaaagtgcagtacatcagggtatatctaaagcaaagtttacttgaaagcttgctcataactgaagaactggacaacagaatttgggacaattattagtaccatttcctttgaacagcccatgaaaaccttaagttctccatatatattttagaccttgaattgttccattgtatttaattcaatgtagattctgaacctgtaaatggcaaaggcacatcacttgtatgatattgatacatccaagcacaaaagaagcaacaaaaaaggtagcttgtcagataaatgatcagtataatatgtgacttgtaaaaagatagacatctatacaaaaagttgtcctaaatatttctggactgtttctagatcgacaggcatgcaagct

SEQ ID NO: 2438 - DNA, 776 bp, Glycine max
gggagaaaagactagagactattgttgacttcaaccttaatgaatgatacaacatagaagattgtacaaagtgcattactctgcacacaagcatcacccgaggatcatccattaatgtcagaggttgtaagaatgttagagggagaacggctagctgaaagatgggaggaatggcagtatgtggaggtcaatacaaggcaacattatgcgagactgcaaagaagaatgaaatgggaagggaagggagggaaacaactcataagtgatgaaagcaaagctatatggatgaatttggggtaccctactcaactgtcttcctgctacctttggttaactctgtttgagtttgttcaactactaaatttatatgctaccaccaagcaatggatcatatatgctgaggatgttccaccttaattaacatgtttttgagtcttacatatgcactttagttaaatacttacagcaatcttatactatttgattatttttggtgaaagagaattacgatttaggaaaaaaatgctaaacatgaacatgctaatgattcctaaaatgctaaacatgaacatgctaatgatgctccgcagcccaaaagcattgtagatttttcaatcccccagacaacatcgtatgtaaaccaagcttggtataacaacgacacaaaaacaaaaaaagaaaaaatcaaagacagcctgaagtattctaaaagggctaatttagtatgaaatatactctttatgctaaccttgtctaatgcaagactgaggcagttc

SEQ ID NO: 2439 - DNA, 904 bp, Glycine max
atacatttctgtaaaccataaaaaagttgtgtgggatgttagtattgttgatgtttctgttaattttccttggagaagtacagcatcagagtatagcaacttggtaactcctctatatttcaaagctaaatattttatgtgtcctgtttgatgacctcaatggaaaaattaatttaactgtgaaataaaaagttgtgccatcttttcttgcactgttaataggagtggcaattgcatccatttatttactaaccttccagctaacataaatccaatcaatctgcccaatcataaaaataaaactcaatggattggatcaacaattattactagatgatttataaaccatctatcatattctttaaatcaactggtcaagatattggataaaaggtggtcataggagtaaggggcctgttgcaggttcttcagaaaacagttctcatgagacaaatcttagagaggtaatttttgttgacaagaaaggaacagtatgtggtgctagtatttgcttatttattcaccatactctccttgaaagttgtcattagcattttttatattacacttcggttcctaataattttttcctttttatgcttcttattgatgatatttttgcacaggtattgaagtcaagatctttatgctgtaaatccacaaatagtcttgagtctttttcttcaaaagttgaggagcaaccgtactctctgaagaactttttaaattcaatatccacatctgggatttgtttaggcatccaacttcaagatctatatgattattttgatgttacactaaatgattttaaggtaaggcttagtccatatgtagttcttgtgcttgttttttacatttgttattcatcctttttatcgtgctaactattggattgcttcttgtt

SEQ ID NO: 2440 - DNA, 952 bp, Glycine max
cccggaccttctctagagtcgacctgcagatctttcttattgtttccctttatgagtctacatttcttagaattgctctattcagtgactttcatctattgattgcctttattcttgtggttgaacctcaggtccaagtggaatgaggaatttgggattggtgcccagctctttttctatttggctgatgaagctggtaatgccctagatgtaagtagagaaaacttgaacattcatgaggattctttgcttgcatctggctctggagcagatattggagattggcaactacatttgaaatcaaaggtaatgattgaacattcaagattctgttacttgtactaccattggacatttttttgtatagattttatggtttactgcttgtgattgacttacacttccttaaagaagcacccacaattcctgtttcagtctttgaaatagtttaagaatatgataaaccaatgagtgtccccattttgtagcaaacatgtattgccattatttaatattttaactacctagataaaattcccagtcctcctttttcctttgatcgataaataacccatttaaatcattcctctcttgccctaatgtagaaattgttatctcttgattatctgttatattatgcctggtagtaacctgctattcattttcttatgcttaatatttttcaggatgatttgcagctgcattatgctggatttcgcacacctcactttcacaatttgtctgatctcgtagaggaaaatcttgcatcacaagtaggttagggtatttcagttcaattcaatttatctgatgatatataattttcatgtaaatgcaagaatatgtggttatggatttttgttttttttgggttttcccttgatatatttgctttatgtacatgttttagtagatacaaaagcatgctcgactgcaggcatgcaagtcttgg

SEQ ID NO: 2441 - DNA, 924 bp, Glycine max
caattataaattactcttatttcagtttccttttaccaaaattgaagttcaattaataaaccaaagagactggtatatgttcaatcacatgcgataaaaatgttccacgttcttgttccgagcagattctttgtaatttcataaagttagagaaaagaaaaaaaaaacagacatttagtcgccaatgcctaaaaccatataataactccacagtttggttctctgaatgaattcccttcattttaatccaaatctcaactacctcttcaattctaaacaaataaattagaacactaccaagtgatcctctggggtcttgacatgagccttctagttctagcttttcaatcaatgtatctacagagcatgtattccattttggattatagagaaataatgtaaaacttttaaccaaatgttactgcaaatctaaagaaagttcattgctccatgataaattgataatactacataagatgtacaactgctgattttatatatcattttaacaagacttgccaagagatatatcccttaaagccaagagcacttatgtttcgatttgagacacctctatttattccacttacatttgaaaaataaaaatattacattcaccaaactgggaaatgggaaatatcaaaacgtatagaagtgagccgtggaaggaattgtaaacaagttatgacaaaaaccagaacctattcctttgtgcctattttaccagcttttcaagaatagtacaaaattaccaagaaaaaaaaaatgatgcaacgtattttcaccacatttatttttctctctcatcaatgctggcttcttctgtttcgttgcataaaattgcagaaggattcggaggatctgatgctgatggctctgtctttctaacttgtaggccagtaaagcgcgctaggtcaatccatt

SEQ ID NO: 2442 - DNA, 752 bp, Glycine max
tatatttgttgctgctgcaaagtattgtgttgacattgcaactcaccaacacggatgctgtgttctgcaaagatgcattggccattcaagcggggagtatcgagaaaaactgattgcagaaatatgtgctaatgcacttctgctagctcaagatcaattcgggtaacttttggaaacataattgtttataaagcacaaaattcctttcaccggttcttctttttctgttttgtatatctacttttccacccacaaaaatgttttctcttttctgttgcagaagcaataatcttagctgttgtcaaatgtctttggcaattgtataaatgattttaacccgttttaccagaggccaagtctagtggggactggaaaatgtggtggtcacacagtatgaaaagtgaatagtacactaggaaacaaaattgttaataactaccggatctaaattacagtgttttcttttttataaaaattcaaattgaaattcatatgttgttataccagctttaacttgctgataaaaaaaaaaaaaataccggctttaacttctctattgattgaacagatttctttctatacacctttttgcttttgtctttgcatgggactcacatctaacaaatcaagcctgttgatcgtttttaataaaacaccaattctgtgttgacctactttggaactatgagataaatgctgcttccactactctttgatttttctaccctttcatctctctgttctttttgcct

SEQ ID NO: 2443 - DNA, 882 bp, Glycine max
cgtaacatagaattttaacccttcattgatgttgtcctttatttctctaaattttgctatggcagcttcaatctgtttgtaggctttttcacgtgaagctgaaataaatataagaaaccatcagaaggtcaactatggtacaggaaaggtacactcaaattggagcattcagcacgaaatgcaattgagaaaattttcttttactggttactgtggttagtcataaaattgtgtgcagtattaaacataatctgaaaacagacttaaccttgtcaacatgaaggtaagttatatgcactaaaatatcaaataaataatataaataagaaatattggattggatattctatattttctatgtttgtattaatttgaattatgttataaataactaacaatttataactcagatcctatttattaaattcctatgcatacacatattttggttgttagcctgcttaaaaccatattcaatctagaaaacaaccaaatgtgacttacctttgtaatcttcgagattaaagataacagaaaactcatcattttgagcctgtgaacaatggcaaacaattatcagaatcacatcattaaaatttatcacttcctccaccatctatcagaagcaaatacaaacaccaacaaaggaagtattcaaccataatggcagataacctgaattttttggtttcacaggcaaggtccaccctctcaagaagcatgaaatattaaaaaggtagcttgtatttgctagttacttgggaattagttagcagtggtaatcaagaatctagaagatagaggggaatatttcttttcttatatgcattagcattagtttgctttagatgggttacgggtatacaaagataaacactggat

SEQ ID NO: 2444 - DNA, 883 bp, Glycine max
aaccttgagaggcgtgaaaagtagagatcctgcttttacaacttttatttaattaaaacaatattatgtgatgtggcaaattgtagacatgtgattggttgtctttgtaaaacatttttacaataaccatacagattgaatttttatttaattaaaacaatattatgtgatagttgccactattacatcacactttctgtgctttgcatcctctctgcttaatgccgctgcccctctgctattttgattcacgaagcttcctttgccttcattatataccttccaaaacaacacagattgaattttatatatatatatatatatatatatatatatatatatatatataacttgcattaatctctctctctctctctctctctttatacatatatttatgtatattatggatgaatagtgacctttagcatattctgtaataatgataaatgaacttaaaggatgatatgtactgatgacttaatgtttgcaacttaaccattgcaatgtggttcatattcccatttgttttacttagactgtatcactaatgtaaattgtgaatagctttctattggtttttggattatggcttttcaatgagtttatattgctgacattcaaagaggttggacagctttgctacgctacattgtcttcacaaatatttttgttgtatcttttttttttctgttttggagaatatctttcctcactagttgtatttttcctttattctctcataaaatctcttttttaattttttctataaaaatgtaagttatcaacgattgccttcatcagtcatattgcaactatttcaattaaacagctttgaaggatttaatagaacttagatttgaaatttactcttcttaattgg

SEQ ID NO: 2445 - DNA, 810 bp, Glycine max
acgtgttttttctaaaagggtggacgaacacgaggaacacgtgggggtatttgcggaggaagggccccacggggacgtggagtccgaggatgtttcgccagcgggagaggagggtgagggagacgaagggaccgcgcttgcgcgcggacatgaggtggtggattctgagaacaaggtcgagtcttttgaggtgggacatgagtttgtccaagtgggggtctcggactctgtcctctaagcgggtttgggcggagacggtgggtttcttccatcgccgttggatgaagagggtgaagggggaagggggtggagggaagatcctgtgtttgaggatgcacgagaggctcatgggattgtaattgtgcagtggtgaaacgtggattcatggttgttgatgcattgcgctgatgctgtgtcgcacaaggttttgctttgggagttgcagaagatgcttgtattagggaagcacgaagggtttatgcagcaagaaaaaaaagagaaaaacggacattaggaggttcacacctgaagaaggcaacccattttttgggtccgtttgcaaagtgaaagaaaattgagaaaaaaaaataggtataacatgtttttttttattagagagaaaatgaaaaaaaaaatatgaagaaaagttaacttaaaaaataattatttttctttcactattcgtcagatttaaatttcaaaattttctttttctttctcattttcattcctctctacaaacaaagggtttatgtcttttttataaatttacaatttaaacaaacattttatattctatgcataccaatt

SEQ ID NO: 2446 - DNA, 838 bp, Glycine max
aagatgcacttacgcgtgtattttgcacagaagctggaacatcattatcaagtgtcagcataaaagaatcaaatttacacatttaaaattaataaaatcacaatttagagagccaatcaaactaggaacgtggaaacataagcaagatatggggaaattcaaacagtgtaactgacaatttgagtgttgcccagcatatttatagaaatttaatgtctggttgaggcataattcaaaaggcaatgatcagcatgctagtaggaatttattatctgattatcatgatcacttttaatgggtcgtatccaaatcaatggaatttttttaccaataattattataatcaatggtcaatctgatccaattttaaataggttggtgccaaaatagagaaacagcatatgttcaaagatattagcacatacactagtaaatccaactttgaaaagcatataaggttgttaatatttaagaaggcaggtgaagttcaatccaactgcaaaactcaaccgcctaatttgagaaagggatcagccacgtgcatcacagattgaaatagttaaagatgttcacagacatgggcacatacactagtaaacctaaatctgaaaagcatataaggttgtaaaaggtttcagaattgaaaaagagagaaaagcttaaacttcagaaatggagtttttgatattaactaacccaactgaaaagtagttacacctctagtatgtatattagagcagggacagctgtttacaactttgttctaaattgcattctcctcttcacatctaataacatttttgtttctattaaaaaagaatgcaaacctgcaggtcga

SEQ ID NO: 2447 - DNA, 887 bp, Glycine max
aagaagaagataacgtacaagcatcaatcaagctctcactgctattccccggaatatttcaaaaaacaaaacaagaagaagaaaaagaaactgcaatgtatggaaaagtggttctctcgttcattttcgtgctcttgctcgtcttctcttactcaattttcataggcaccctcgacattcgatcttatttcttccctcgcctaaagttaccctctggtgcacctgctccctgtgcacccgagcctcctcttcgggttttcatgtacgatctccctcgccgattcaacgtcggcatgattgaccgccggagcgcgtcggagatgcccgtcaccgttgaggactggccggcgtggccggtgaactgggggctgaagaagcagcacagcgtggagtactggatgatggggtcgctcctcaacgccggcgagggcagagaagcggtcagggtttcggatccggaactcgcccaagcgttcttcgtgccgttcttctcgtcgctcagcttcaacacgcacggccacaccatgaaggatcccgccacgcagattgatcgccaattgcaggtgcgtcgctacgtttctcaattgttccgaattgatttgtgaatcattcaaatgctatgctgtgagagttatttttcacagctaggctttgcatgtttagccttagaacgcgattagtatgatcacttgaagatttatgatacaggatgcttgttaaacgacattagatgctgaaaaatcataagaaatttaatgaatgagttcacttcacaccagtctagaaggtaggaatatcataatgaagtcttctcaggatcgcacgagttgaactctgctcatgtacctgcatggattccatcgctaagtcagtgcttgagaattgta

SEQ ID NO: 2448 - DNA, 897 bp, Glycine max
gccaagcttgcatgcctgcagtaagcacaatctcattttctctaattcctctgttgcatcctttcatacacatgtagtccgtcattcttatccaacccatgtttctttttatagcataaacatgtgatatgggtgcatcaaatatcttttagaactcagcaaggaaaaggatgaatataaaatggtatgatacaaaagataggaaggaagtcaaatttcaacaggactcatattatagaaatttgggttcttgtaatctgtgctttaaaaggagtgaaagtttttaaaatataattctttgtatctaaaatgtccaagagaaaagtgtgataagaaactaaacaagcaagacactaatttttttaaaaataaaataaaatccaggagaacctttaagttggcaagttccctcaaacccatctcaactgagagcatactctcaatatttccttccccagcaagatcattcaaatcacgaacaagtttgcttctatctggaccatcagcacctggtccatgctctttaattagacatcattgtaaacaatttcagagatatataattcacatgaattttctgagtaccaactcatactcacttttgttccaagattcctccttagccttctgtccagcagagatgacaagttcaaaaggaagaggagctagagaagaccaatgttcatgcttggattgtgctatatctgcacatatgcctaaaaagcatagaagaaacatgtcacgagaattataaggactttgttattgttaacggatgaactgacttttgcataatatacttctcaaagtttggtaagtcatgatttttcagatcaaaggaaaaaaaagtagttaagattggaaagtgtcttcttttcacagaaagtagagagcagt

SEQ ID NO: 2449 - DNA, 885 bp, Glycine max
aacatggccgaatattttgtcttcgatattgctgaatcactgttaaggaagcttgcttcttctgtttatgaagaagcttctcgagcttatgatctgtatgaggatgtgaaaggcatcaaagacactttgtcaattgtgaaaggtgtgctgttggatgctgaggagaagaaggagcacaagcatgggttgcgcgaatggctcgggcagattcaaaatgtatgcttagatgctgaagatatcttgggtggatttgagtgccaaaaccttagaaagcaagttgtcaaagcattaggcagcacaaggatgaaggtaggccacttcttttcttcgttcaattctcttgttttccgtcttaggattgctcatcaaataaaaaatgttagacgtagattgtataagatagcagctgatgggaacaagtttggtcttgagaggattgatgttgatcacagacttgtgcaaaggacagaaatgacttattcccatgttgatgcttcaggggtgattggaagggataatgataaggatgaaattatcaagcttttgatgcaacctcaccccaattgtgatggcgatggagataaaagtttgtgttattcccatagtgggtattggaggcttagggaagaccacacttgcaaagttggtgttcaatgataataggatggatgaacttttcccattgaagatgtgggtgtgtatctccgacgaatttgacattaggcagattataattaaaattatcaactccgcttctgcttcagctccaattattgctctttctcaccaagaaaacattaatagcttcaatattgagcagttacaaagtcgtcttagacacaacctttctggaaagaagtatttactagtcaatggattcaagga

SEQ ID NO: 2450 - DNA, 840 bp, Glycine max
ttccaagaattccagttgatgggtagcataaacaaccgttttatcatataaaagtttcatgagacatttctgcacagaatttccaatttttggtaaagttcattgaaagaaataaacattacatcagaaagtgcatcagtaaaaaaaaaaaaaaaaaacacatgcaccaatcattagcactactaaccttaaacaaatgagttccggtatgagcatcaacagcactaaaaggatcatcaaggaaataaatatcagaatcattgtaaacagcccttgccaattgaatccgctgtttctgcccaccactcaagtttatgcccctctcctccaccgggttcaaatctccatcaccccacatgttgatgtcttggtgcaaagcacagccatccaaaacatcttcataaaagtccttcttcatttgcttgccaaacaatatattctctcttacagttccagactgaatccatggactttggggcacataacttctagtcccatagactttggttactgccccagaaactaatggaatctccccaagcaaacagcatatcaaacttgatttaccagaccccactgacccacaaattgctaccttctgacctttctttatcactaactttcctgtaatttgaattgttggattcttgtgggtttgatcatttgtttcccatacatattcgcccggcttaatttcaatagcaactgctgaaatctttgaactatgcctgtttatgaattggttttgatcgtcttccttaatgaactcctggattcgatcaacggagacttttgtttgaatgatcatggagataagctccggtaagttgtagattggtt

SEQ ID NO: 2451 - DNA, 922 bp, Glycine max
acaatatccacgataaaaagaatagaatggcctagaatagtctcatacatttatcaagctacagcatccagactaacggttgcaatttgcccttctttatacaagttattattacccaaggacaatctaaaacctcatacctcatcccacacatagcagtcgtatagtttgagccaaataggaatttttagacgagacatggaaagggaatatacaagttcaccaagcataaggatagtggtagagctgggataaaatttctgctgttatttattaacaatccctacaaaggggtgatacttataaacaaagaaagttccacgatgagtagttaactagaacttgaacaatagattcaaaaacaaggaaagaattcaccaggagagactcccgtgcatgtcagacttgcctcgagcacatgccaaaaaggatgatagatccaggatacccttttgccttccttccaccttcctttatattgctgttgatcacaacaaaaccacttctactaacgtggcttcttctcatgattcttcccaacagattcctcataattcccaactcccccaatggtttctccttgtctctgcctaattaaccctttcctttccttatagtatttagtatttaccggacagtatggagtgctaccctactttgggcctaacgttgaacctctatcagatggatcaaaacccacaattagggtgaatacagtctcccatgaatatagactgttagatttgctaacatgcagagtgatctaacgacagacggtttcttttatttctttcatttttgttgcttcgaaaaaagggtaagcatttagcattactctctctaggcaggggagggaatttagtattgacaaagtacggaggagtttcaaacttccatgttccaggaaaaaaaaaatgcttaa

SEQ ID NO: 2452 - DNA, 857 bp, Glycine max
cagcttgcatgcctgcaggaagagcagggatgttgatagctgcaattccaacaatgaagaattatcaaaagtttacaaaagaattatagcatttcacataaaaatgaattaaaatgaaaattgtgaagctaaaaataatccaaaataaaaggattttcttctttcgatgaatgaaaataaataaataaataaagaacagttctcctcttataattatataaattttcaacagggtatacgtacatttattgcatgatgaagaagtcagttgagatgtagaaggccaaggagctggaatattatcatttagatcacagaggaagctgatcccagaaacactgtcaaatgtagcatctgaaggcaaactaggtaatagacaaccagcctctgtttggggtagacaatgcagcaagtcatctctcaatagaacattaatgcaagagggaatataattataatgccgcagatcatgtctcagcagaacaataatagaagagcatattaaagtagacttcaatgatggataaacaatgcatttcaaaagtacataatttttcttaattgaacccccttcaccttccttccctccccttccatcccccaaaaatggcacttgcatataatttatattgacataatgtacattgcggaattaccttgatttccaactgaagcatccacattgacgattttcacaccaagttgaataagagagagagaaaagaagaattattaacatcaggtataaaatattatgggtattgagtgtgagcttagcatactaataagaaaagagaaaagaaattaaccttggagggaaaagtctttaaggcttatgtgacagagaccataaacat

SEQ ID NO: 2453 - DNA, 840 bp, Glycine max
cagcttgcatgcctgtagattggtcatcaaatgcactgtagaaaacctcgtagaatctattcctatagttacagagatggtcaagaaaactggttgttatcttctagacaagcaattacatgaaatacttgtgaagatattgcacaagagtaagtaccgatcttcctcaagagtttgttgatccatttcatcgaatttccgagtgaggacttcggcccccactggtgaaagcacatgcagtacaagagcctctaaagttcttgggaagttatgctgaaaatagtaaacaatctaacatgcttcaaaacatacatatatacgcgcacacacacagcctaaatgatcaaatcaaacaagtagctaacactatggataaaaacaagattagtatataattcaagttgcagaagtaacaacagctccaatatgattgataattagaaaaactatggaaagcacaatatataaaactgaaagtgtccataatgcccctatactattatgataaacaaaatctcaatccaaacatgtttgtcaactagaaaggaaggaatccattgatatgaccaaataataataacaccttatgcccaccataactttgtctaaccataatgaagcaacagttcaaagtaccaagtgcataaagaatatcaaactctgatgaatccgctactgatagtggtaaatatcattaagttaaggtggatacacatcttgacatatgatcaaatgggtttcgcgaaaaatcattattcagacaacatgatgtgcgaactcgatatttacacgactctcttttacaattctgccccgaagtacacttaaaacgactcacag

SEQ ID NO: 2454 - DNA, 882 bp, Glycine max
aatcgacctgcagcattaacagaagcacattagctccatccaaaagcacacaacaacgatattatcctctcctaaacactttcattaacttcatcatggctatcaatccactctcgttaccaaaactccaaattaactcgcaacaaaatttcatctcagtgaaaaaaaaagcatgtgaattccatagtacattaggaataatgtaaaatggtgattatttgattgagtgtaattggattggatcgagggtgaaaaaaaataacttggaaaaacgcaaattttggatggggttctagctctaaaacaaaaaggagtttttcaacctagtcagtgcctaaatgcccgcgaagtcaatacttaagcgcttaccacatccatcaatctaccctcatgcattaacaatatcgtaacattaccaaaactactaaactaacttgcaaccaaacttcagctcaagaaagcaaaactataggaattatgtaacaaaatattttgagaagaaaaaaaattaaagacaataactagctaatgtgctaaaataaaccgttaaaaataacaagccctcctattctagaataataattgtttgaagccaaaaaaattaattaaaaagagagaaaatagaaagggacgatgcatataaagaattaaatactttgtagacgaaattgacgagattgagatagaagatgaaattgaaattgaaaaaggaaattagggatgatgatgatgatgatgttgttgttgttgttgcttacagggaagggattccatgaggggagcggcgacctcacggaggatccaggcgacgacgagagagaaggcgaagaggccgcagtaggcgatcctggcggaacggcggctgattcccgatacgacggt

SEQ ID NO: 2455 - DNA, 920 bp, Glycine max
aacagcaccagcagcacaaaccctacgtataacaaaggaaattaatttaaagcctcgtccgataaaattcagccattgaaaaatttccacgtcggtcttatattgtgtgccacaataataataataagacgaaaatcatgttaatctcaaagatatcaaaatccctgttgaaaaaaaaaccaagaatggtggttagtgatgtgcatatcgattgacagacaaagtgcattatcactgttgataaatttgacgtcgtttaaaggggagcagcaagaagctaatataattcccttttcaatattttttatttgataattttgttattatacagcaaaacgctctccaactccaacccagttatccaacacacaccaccaagctgtcttacactctaatccttcacacaccgtagttcagcaacaactggtttgcacttctttctcagaactccttctccagccatcgcaattcttaccctaataaatggctcccttcaacttccaacagccatcaccgaagttactcaccttcaccttcaccttcaactgccaactgcaaacatctaactactttcaggttcacttagccgagaatcagagactaatcactagagataccgagacctacttttcctcacatcaccaccaacatgcgttccagcaacggtacatcaagcagcagggcctccaacggtaacacagggcgccaccctgtttaccgtggagtgaggcgtaggagtagtggtaaatgggtttctgaaatccgtgagcccaaaaaacctaacaggatttggttagggacatttgccacccctgaaatggctgctattgcctatgacgtggcagcgcttgctcttaagggtaaggatgctgagctcaacttccctaactcggcttcctccctccctatccctgcatcat

SEQ ID NO: 2456 - DNA, 854 bp, Glycine max
ttgggatagatcctagtccccttgctttatgacttggttggttggaattttattgtctaacctgatctgtgacttgcaaatgtaaagcatgcagttgagttgatcatgtcaatactttgtaagaattacacatactcaactaaactttgtcgttgttcttatccaagattattcatagaacctcttgtgacttctggatgaaactgtttcattttccttttgaatttgtcgatttccaggtttaagcatcaaagtttagcaagttgtcggattacattagtgtgatcccaatataagtttgaaaggatgttttatttccgttgtcctaatttcttcatttcttgtattaggtcatcagggtggtggcctcagaaatgttgccaatggacccataattgggggtccatttacactaattaatacagagaaacaagcaattacagaacgtaattttcttgggaattgggtcctcctctactttggttatacctcatcccccgatcttgggccagagcaagtccaaattatggccaacgcaattgatatattaggtttggcacttcaatctcagcttactgtgttataagtttctttctctgggttaaccttaactttatgtattttatttggatcaagaatcaaaacagaatctcaagattctaccagtatttgtttccattgatcctcaacgtgatactccctcacaacttcgtgcttaccttaaaggttagattgcctcattggcaaaacttcattttttatttacttaaacttttagctttggtcaattatgcttttctaccctttttggctttgccctattaacttttgtcgtctatctttccctctgtcgt

SEQ ID NO: 2457 - DNA, 872 bp, Glycine max
aatttaaaaatggaaaagtgctcctaagattggctcacctttatgaggttgtaattttcttaccgatgtattgatcataatctctggttctctcttaaagatttaaactgccctttcaaaatgatcttctaaggattgcttgcctgcaattttacattcttaaccatgattggaaagattttttctgtgacctgttttacttgcatttaacctatgctataaaaatgtaaacatgcatgcatttctatcaaagtaatggaaataatatttatatatgtaacctatgcttgccttgtgtggggagaaaatttacttggtacaagctaaatgggacaacaaaggccagattggatagatttcttgtctctgctgaatggtttcagaaatggcaaggcacgacacagtttattttggaaagaaacttctcggaccattgccagtcatgctgaaatctgaaatggttgattggggacccgacctttctggattctaaattgttggtttcatgacaaatcatttcgaagggtggttcaagaatcttggtcgaataatcaggtgaggggattggggggatttttgctcaaagaaaagataaaaggaatcaaggctacgctgaaagtatggaataaggatcactttggagattcccagcagaagctagcaaccattgagaaggagttaaacaaactagaagctaaaggtgatgtaagacagctatctgcccaagagttgctatgtaggaaaaagcatcaggaggagctttggtcagctgcccaatctcacaagtccttattgaggcaaaaggcaaggtcaagatggatcaaagagggggatagtaattccaagtttttccatagagttgtaaactcaga

SEQ ID NO: 2458 - DNA, 738 bp, Glycine max
tcagtttgtcaggaatagcttaaattctaggaaattattgctttttcaaaaaaaatctcagaaaactggcaaaaacagccggttatttcttcaaaagaactaagcacacacttaaatgagaagggaaatatggaggaatacactttacagacacaagttttgcttcattgtctggctgctagccttcactgcaaaatttgcacagtagctacttggttctgaaatatctgcaatatagggagttagaagcttgaaaacgtacaccctaaaattatacactcgcagaggcagagctttgttttctgaacattgccaattgctcaactccactccaccaacaaaaaattcctcctttaggtaattatatattataacatccctaagttatagtagcttttgctctcagcctttatcattaaaatattttcctcaatggcaaccttttatctgttttttgttgtttttatttatcttgcatctggatagcatgagtattgtttttctcatatgatgtatgtatgattattctgatatcaagataacgagtattgtaattgctgatatatgtttagttcctactactgcacatggtttgtctgtatataatttaaaacttggtatttgtttcattattttatcttcttcagcttctttgctatggaagactcggattcagttgctacactgatagattctactacttctaagatacaacagctcagagcatcgaagtcttgc

SEQ ID NO: 2459 - DNA, 867 bp, Glycine max
ctgcgccaacttgcatgcctgcagctcaactccgcttcgaatcacactggatgcccttcttctaaaattgtctctgacaaccagccaccactacccatcatcttcctccgtgcagtcaccaccgtcgcctccaccttctaggctggctgcgcttccatgccccataccgatgcaacacaaacaatcacccttgccgactccgttgcccacactaactccgtcacccatgccacctccgccgtccatgccaactctacctccactccccgcactcatacagtcgcatcacacacccttgccagctccgtttctcattgcaatcgttcctctccttgctaatagcaacccccacgtgtccttcgaccgctactggatcaccatttcccaagtccgcaaggagtatcccagctactacaaggagctcgaccactccttcctcttttacgctactattgatgccacaaaatggctcgacttccacaacactaatctttatcactcattccttcacccattttaatttgggatcccggtttgaatttgaagccatagtttaaagcccaacactttgagaacatattcacaaagccaaaggcagcagagaatgttaggaagtgatatggaaccaaaggcaacagagaacatattcacgaagccaaaagcaagggtgcaagcagaggtgcagaaagtaactaatagtggacctagaaacaagggggtgcaactagaaggaagaatctgcaaaattattgttgtcgagaaccaggggacaacaataacaaaatttgttttgcttgtaatcttttcctagcatagaatcacaattttgttagggaatccatactataaatatggataatgtaataa

SEQ ID NO: 2460 - DNA, 819 bp, Glycine max
aaattcaggaaaagaattgacaagtaatcatttctcttttagattcgctctctttctctttccctttgtagcataaaagaatagactaacattctgtaaatattcgatgctcaagagtggtatagttaggtaatttaatgaggagacataaggttggtcaaaaggaaggagaggtaacttggtttagatcttttcttatatttctcatgtggaatcctttgggcctaaatacatgaattagattcatgtaatgctcatttactcgtttctgttcagaaaaccaaataaactaaaaaataagccgaagcaatcctctatggtcattccctgaatccataatgaaaattatctcacagaccataatttaaactgaaatatagggtgtgccaggcccatgctatagtgcaacacttgggcgacacatgaaaatcccagtagcaagctactgtgttggattctcccctttaaaaaagtaatttaataccgtgtggaccgatgatccacatatcagatattaaactgataagaacagatactacacttgatcttagccaaaaggccgagaaaggtatgagtacaacggtgttataatgtctgttttataataagctctggagtgattgtcctctcttctaatcgatatgggacttagtcatggtgacaatttgacttagccatggagtcttcgacaatgggcaccaatgtttcaagcttgtttctgagtgtagagtgtagagtgtagacacactgataattctgaaaatgagtgaattaagaaagaaacaacaactgagtggtggttgagagatgacattcttt

SEQ ID NO: 2461 - DNA, 815 bp, Glycine max
agactccttcacaatttccttgttttgttcaatttctccaagtattcctctctcctgcaaaagaagaacaagaaaaaggcatatatcagcagcacttcagtggtgttaagtcattataggaagagtgcaaacacttttcattcccttgtaacattcaaaagtaactttttaacaaagtttttgccttagcacagtagggactgaaagaaatttgttaaatgcacaagtttgcaaaaaaacaggtaatgatgtgtagggaagtaaataggtcatcatttgccagttaacatcaaaacaaatatttaatgatgcttactaaccaagatcagcatgtaatatctcccaaatgcagaataaaacactgtgcatgaattggtacattttcatgatcctttaaagtatcattaaatgatacaggctatattatgctctcttgatatgggagcaatgtgacctacccttaaaagataattatcaaaaagaactacataaccctttcatcctaatccattcaaaatttgttattaacgtatagcttgattttgtctaatcaaatgctaaagcattgtcttgtcatgtcagtcttctatcaatctggaaaagttcaaccgtataaatgcagctacaaacataccattagccgggatttggaagcctttgaagggataggtttgtttaatccacgtgccgcagagaagcactgaggagagggaggattcgttctaatttgttgtaaggtcccctccctcttgtgctttagattctccaggtcaagagttattgacatgttgttgttctctgcctcatcaggtctt

SEQ ID NO: 2462 - DNA, 782 bp, Glycine max
aggcaaaaaatagagaggccaggagagagaatagcaaagtgtggtcttgaagtttagaaagagaggaaggaggagaaagatagagaggatggagcaagctggatagttatctggaagcctgggaatggcttataccactaaggtgcccctgcacacaaaagaactttggccttgaaggtaggacagacctaatctttaattagaagaatggagatgggtaggatcaaactccttcctaacagaggagcagcctatcagctgaaaaactaggtagaacaaagagctgaaaactatctttcaggaattggcaaaaacaatgcatgaatattacattcacccatatcagagtttaagtgaagaatgatagcagggggaaagatagcaagaagtgtagtagtcagataaagcaaggacagaagtagtaaatttcatactgaagtactagtgtaaaagccacgatccccacagaattgagtatagagatactttggattttgaaaaccttagcacacatgcatatatgccaagtctgagtaaaaatagaagtggtatttccttcaagacacaggctcgtaaaaaaatgtaagaataatcattgtaagcataaaaacatatactcgcacagcacttaacattggcataactgaatgccttttattgtcaaaatgtagaaattcaaacttttttaaaaaataatacctttaattcatcacgtttccgagacttcaattgagaaagttgtgtctctgcatcatgtaaacggtcatgaagagctttcttct

SEQ ID NO: 2463 - DNA, 891 bp, Glycine max
aatagaactcactagacatattaatcacatattatattcaatgtattaaaataccggtgtaatttaggacaaactagatgtaacaagccaaaaagtttaatatcccacctatcaatatttcatcaaatatttgtaataaaacttgatcagcaacataataaattttttgaacaaacatggtaataatttagataagttattttataaatggggaaaaaattattgttacatgtatgtttagggattctcaagtacataaaggtgcatggataagaaaaaagggcagataagactatcagcttttagcttacctgattcccataaactcttgatatctgctccaagctggtcttcccagtctttacctaaacataacagccatagaaacatcagaagtgacacatatattagttcatgtaactagaaacaagctatgggttgagttcaatactccggtttttaaatattcttcggcagcataaactgcatcacttccaatggaaatcttatcagccccagacctaaagtattcagaagcaacttccaaacttgaatagtaccagagaatataattgatcggatcaaaaagatttgaaaattctgagggaacacaattgatagaactataagactgaataatttcaatagagggaaaacaatgcaagaaagtcaatagcataatctccataatgatcagtaataatacctcccagttgaatctgtgaaatctctaattcctcccccaactgttaagggtacaaaaacattttctgatgtgtatcgcaatacctatgaagcatagggagcatgaaacgttgaaaccacagcagataacggacaaatacaatctagcaccaactcaaaaactcccactttagcacatttcacaaa

SEQ ID NO: 2464 - DNA, 863 bp, Glycine max
tagcaaagaggaagccttttttgattccaggcctggttagactcagattgtgaagatgatttctatagtgtcaatggtggtaagcatttccttcaactctctctccttttgtactttttttcttcttctggtagagcatttaaatttgtttacttgaccattttgttataatatagttatgacatggatgatattggttagaggtgaggctttgtggctgataatatgtgatggtaaacattgtcttaccattattgacattatttataatatgacaatttagtttgtcatggacaaatggatattgtatcataatcagactttatgtaatgcaagttgatgaagaaggaataactcattttagaaattttggatatattgttttacctttcttatgtagtttctctttcaactattttcattactctccccaaccaccttcagctgtattgtctacttcattttatgcagactttacaccatctagagggaccacaccagttcaccacacttttgggaccccttctaggaatagaattcatggctctatggctgaaacatccccagaaaagaaaaagaaattgttagagctttttcgcgaaagtgtcaaagatgaccaaggtgatgttcatggacacaaagaagtcaagccaactatacaagatgttattatgcctaaatctgcacattgcactccttatctctcagaggctaactctgcctgtagtagtgaaaggaccatgagcatgagcgaggatcgttcatccattagagagaaatcagtcaagtctttgcagtggtgcattccaagcttgtcttcatgccgaagctttcgcgagaggaggccaaagacgagtcctgca

SEQ ID NO: 2465 - DNA, 818 bp, Glycine max
ttgtttcataatacgttccttgcccttagaagaccaatcagagaaaacaataaccgggttggtgagtattgtggcctttttgttttgttttattttgctaaacgtgtccttactaaataggcaatagcaagtattgaatgaacaatatgtttatgtttctaataaactaaatattttactcttaattagtacttctcatttcaaatagaaagggagttaatttaacttagttgagtgtaaattattgtagattttttaatatctgtttttattcctacaaataaaaataaatatttttcatttcaaattgttaattaatattaattttacaaaactagttgacagtttttctttataggtatgggtactttcacttgcaagtctcatgatagaaaagaaataaaaaaattggagaagtattagaactagacaaacaattactcactttatttcaaaataattgtcacctttatgcttttagtttgtcttaaatcattattttaaaaaccgaagaaacattaattacattctgtaacttcatcattacttttttttaatatacccactgagtgaaacaacatttttagaattgaaaggtagtattgtcaagataaagctatattttcctaattgagtatttgattcttaaaacttgtgtattctataaaaaagttaaaattgtttctaaacataagtatatagcagattaaaggcttataaggatcacagtaaatggaattcttgctgtgtcatacgcatgtgtacgagttcaaagatcccatttacatgaaaatggattacctgcaggcatgcaagct

SEQ ID NO: 2466 - DNA, 977 bp, Glycine max
ggacagttcacaaaggtcaaattggtcacatctatactaacaaagataacaaggtacactaatttatataaaaaaaaaaaaatcattaaaattccttatcagttcattattcccgttacacatcctcttatcttactctattattacttctattatttacaaatttattacttctgagcactgattaaactctggttaagcactgattaaactatggttattaaagacgcgcaataggtcaccatagcaatggccctacatttaactcggtatattaattatgccatacttgcatgtgctctgtccatactaaatatcaaagaattagaggaagacaccgcagaatgatattgcaaatttcatcaaagcttgacatgaaatgactataattctagtgttttgtttatacatatatttgcactaaaaagccacattattcttggtcccatatactagaaacttcactatagtcccaaacaaacaaaagtttaaggggatctgctatgttggttgaaagttgtaaagatggagcaaagataaaactcaaaaaaaccattcaatttaaagccatttgcacaagatattgtgctttaagagccacaaaacaggattaaaacaatcatagatgtcagaactttaaaaataaaacaccaaccttcatacgctgctgatcttgtgcagcttgttttgctcgtgctctaatttcttctggatcaattttagactggggacggaccacaaaatccaaaggtgttgcttccggccttgatgcatgctgcctagaagaggactgtccagacctaggcctgcaccagtgaaaaaaatttgacatacaaaatattttagtgattactcgacccacagtgctccacaacaagttcataaattccattcaggccttactgtgaaagttccaaatcaagatcactgtccctagattccattcctgcaggcatgcaagtctggccgaagatagt

SEQ ID NO: 2467 - DNA, 849 bp, Glycine max
aggtcataaatgaaatgcttatcaaaatgtgaaaattgcagtcaagtgtttaaaccttttaatttactaggacgaccccacctacgatatcctatatcgacagcagttagcataaatgactcgagggatgtctggtttttcaattccgccagtcggtactggtaacaccaacaagcaatttcgaatataaaatccttccttcagtcaaatatctcctggctttcgattatactgtgctgactgaaaatgtgagacggagaagttaagtaaacagaatttcttttcttatgcgatattgacatgaaaacaaaatgaaactgtaattatcgtcgttcttactggtcatctttggcgacacgataatatctctctgcatgctggcgctgccctatcagttgagcaaaacgctcatcatgagtgattacaattagctgaaaattttcctgccctttcctgtcctccatgatcctgcattataaagaagataacagcacattaatacaaaattaattcactcatccgtccttaattataacatcattttcagaaatttgtttgtcattttttataagacttctttctaatttttagacacattaaattttttttcctatatatctttactaaattattctatctccaaatattaatgagaagtaattaagtggatagagagataaaaaaatttttttagaacgattgtataaataattgacaaatttaatgtaattaaataaattaactaattttcttaagaggtgtgaattagttgaaaggatcttataattaggaatggaggcatgaaaatttaatcagaactaggcgacaatctattcacaccttacgaga

SEQ ID NO: 2468 - DNA, 859 bp, Glycine max
ttcttcgtcagtagaatcaactgttgcaattgcttctctaacatctccattaattacattccacatcttctctgtctcagcattaagaagcttctccctgagtttcatttcaagttcttctaatgcactttgattctcagccagaaaattctttagggcatccttaccacggaaactctgttcattatagtaaaacattgcaccagcctttgagatgagtttgttttttacgctcaaatctataatctctgtttctttgcatatacccttgccaaattgaagctcaaactcggcaattttaaatggagggacaagcttgttcttcacaaccttgacaagaacctgacttcctaaaatctgtaccaataaaaatctataaagaataaatattcataccagaaattagacctaatgaattcaatgcaatcttaagatccccaaaatattgcacaaacaataacttataaaagattatgtgcaagaagaaaaaaagtcgtatccacgacagagtgaaaagctctagcttgaagcttctatacaggacatcgttatatcaataatccaaagaacaaacaagaaaaatggtttgcttaactaataatagatatccacaatccaaagctagggactgcatggatggttaaagtactaaaagataatcattgcatttagtattttacattggacaatttcttgaacaatcaaactagtatgtgtgaagcaatcagtttttccaaaaacactgaattgatgacaaaggccttcccccaaaatttactagattggtctcaaatgactaatgctaatatattttctcttttacaatgtatactccatactaagcaccaacaactacttt

SEQ ID NO: 2469 - DNA, 894 bp, Glycine max
aaagtagctgttggtgcttagtatggagtataaattgtaaaagagaaaatatattagcattagtcatttgagaccaatcttgtaaatttttttgggggaaggcctttgtcatcaattcagttcttttggaaaaactggttgcttgacacgtggtttgattgtgaaagaaattgtccattgtaaaatactaaatgcgttgagtatctttactttttagttctttaaccatccatgcagtccctacctttggattgtggatatctattagtagttaagcaaaccattttgtttgttcattggattattgatctaatgatgtcctgtatagaagctagagcttttcactctctatcttggatacaacttttttcttcttgcacgtaatgttttatacattatcattgcttgtgcaataatttgggtattttaagattgcattgaattcattaagtctaatttctggtacgaatatcctttttggatttttagattttaggaagtcaggttcttgtcaaggttgtgaagaacaagcttgcccctccatttaaaactgccgagtttgagcttcaatttggcaaaggtatatgtaaagaaacagagattatagacttgagcgtaaatcacaaactcatctcaaaggctggtgccatgttttactataacgaacatagtttccgtggtaaggatgccctaaagaattttctggccgagaatcgaagtgcattagaagaacttgaaatgaagctcagggagaagcttcttaatgctgagacagaaaagatgcaagagtcggatgtaattaatggatatgttaccgaagaaattgcaacagttgattctactaatgacaatgttacagaaaaaattgcaacagttgattctactgatgaagaa

SEQ ID NO: 2470 - DNA, 803 bp, Glycine max
tcacccgcgagaacagcccgctcccagtagtgcactcacacattttatcacccaatcccagaacaaaacccaacaagttttccctttctgatgacaatcttgtagcactttcaagcaaacttctattctctatcttgagtttttgaagaaaaacatctgagcctctaagcttgttctccatttgatcaattaactcttttatttgtaattgttttgcatccatttcctcttcaatatccaatgcaagctgttctgattgcctccaattttcatctttcagtttcagtttctgctccatatcatggatatcatactcaagttccactaacatcaacttcttctcttcaacttcaagtgcagctagaacttcagctgctgtgatcttatcacaagcttctttgacatgaataatttaatttctgcctgtttgtcagcaagctgtgaggaaatggaggttaaggagttagtgaacttctgttccagtgaagtcacctgttgcatgagttcatctgttctcacattccttccctttataatctgaataggattctctttctcaaactcattggttctttccatgttgctttttgcaatcatagcactttcaagttctcttcttaatgactcttgttcaaggctaagaacctctttttggaactcctctaaaatcttgtccttctcttcaattatctggagatatctcacttcaacattttcagaggactcagctatttccccgcttgctggaacagaagcttctgtttcctttacttttggttcttgttcaaataggagaacatgtt

SEQ ID NO: 2471 - DNA, 833 bp, Glycine max
accacacctccccatcatgcaagcatcctcttctactacccttcaaacagcccttaacaaccttaactgccgccgccgccatcgccactattttaacctccgctccaacaccctccttagcacaagagtccctctcatataaagtctactatggcaccgccgccagcgccgcgaactacggcgggtatggtggcaactccagcaagaaggactctgctgagtatgtctacgacgtgcctgctggctggaaggaacggttggtgtctaaagtcgagaagggtaccaatcactgatgcttcaatttgcttcacgtatctcatactgatactcatacgtatttttgaagtatccaagcttatgaaaaaaaaaaaatgaaaatttcaatataagaacatgatatatgtctctgtataatatataagcatggaagcattgtccattgaagaactaaaatttcaaaattattctttttatggatgatttcaagaaaggaatgaaattgatagtactattcttatttgaaaataataggaaaataatttatgattaggtttataatttttttttagtgatgtctatgtttttaatttagatttgtagaattgcaagtatatattcattacgttttatgaatttttatacatgtctcgatatgaatgtatcttaatacacgtattgtatatgtgcatcatcataggtaccaatggaacggacagtgagttttataacccaagaaagaaggcagagaaagagtacctcacttttctcgccgggtttcgccaacttgcgccaaaggatgtattttgaacaacttggcacgtctatgtggacct

SEQ ID NO: 2472 - DNA, 866 bp, Glycine max
cagccgaatgcaatccaacagcggtgaaacttcacctccatttatgaaatcttccagaaactgtacagaatagaagcatctaatttagtaaatacatagggaggaatttatcttgggaacagatccaggacaaaatattagatacatctatacaaaagacaacttaaaattaaggaattggtttcttatcaacactgaaatatcaaaggaaaaaaatggtatcaagcattacggaccatcatacatcagcagaaataaccataacaattaaattaatgcaatgcattttcaggtctatgtttttacaaagtcggctgaacaagcaaaagaaagatgctccatagtaatttcacccaaaagatagcataaataatcagggtaaatatgcaatgtaccagctaaagtcaaaggagaacaataccttggcaggatcatgtgtattatttctcatgaaaaggggggaagtccaaaaacattacaatggaggaaataacgaacatgatgaaccaagaaaacagatcaaagccaacaatcatgactggataatatggcatgcatatattgttttagtttccaataattatcaaaattttgaagcacaacagaaaaatatgcatctatcactgatgccaaaacgaacacaatggaaaaagaaaagcaaataaaaatcagttgaagaggggaattaacaaccttggtatgaggccaaagttgatcaggagatacatgcatagtgcaaccctctttaccagactcccattcaacaacaaaacgagcaaggacacctgaaccaaagctaaaccacaagctcatcagtccaactgcctcaattctaaacgcccttctcatctgttcagttagtttgt

SEQ ID NO: 2473 - DNA, 817 bp, Glycine max
tgctgcccttcttccggtatcgttcaacaatgggagcagcagagttattatcttctcttaagcgcaggtcatgctcaaaaatttcactacccacattactaatactattactatcaggagatgccctgctgctttttcttagctctcttcctctcataagtcgttcatgacgatccggaaccggaaaactattagaattaccattgcacttgttcccaggcatatggtcactctggaatccaaccattggtattgagaatcaatatcgtagtaagtagccaaacttcctcccctgcaaatatcaaaatcacaaatcatccccaattcaacctctaataaaagtataacatcagtgaaagacagcaaaacaagtgtgtcattgccagaaagaaagttttctaattactgaaaattaaaatgaaatatagacaacaaaggagaaaacagaatccacgaaattacagaaggcaacaagaaggggtcaacagggtgggcagttgagttggaaaccattttcacattcattagtttatatatgcaaatgggaattaccagcgtgtctgagattgttacattaatggaaattgaatacaaacaaagcagagcaaaggtagtatatagaaaaactcgagaagtaagggctgttcatctgatgcgaagacttaatagaatagtgaaaattacaggagcaagttcaaaagggccagctaaggacgcttctgacttagtttgtcaatttccagctgggttaggggcaaagggcttataagtcagacaatgtgggcacgcagtaagtgggcaatctgcaggcatgcaa

SEQ ID NO: 2474 - DNA, 802 bp, Glycine max
tgcaagaatacttggggtagttacgattgtaaatgcaaggggaacctcctatatataaaggaacaagatgcttgtatcggtaagatattaaagtctatgttttgctactattagtactattgtcaattcatgatcccaccatcataacaagtttcttacatcctagattgataataagagattttaaactagtcttcttgtgtcactgcattttttctagacaatttagcttgttcatgattaaaattttgcttttttatcttgcagaaagaagtgaatcaaaatttggacggttccttgcctttgtggtcatagcagttgttgttggtgctggtctagctggttacatgttctacaaatataggctccgggtaagcctaattcattctcagctacagataatgttatacatcgttcatattaaattggagattaccatattaaattacctttgtctgtgtttttgtagtcatacatggactctgagatcatggctatcatgtcacaatacatgccattggaccagcaaaataatgtagttcatgctgaaactcaacctttacgacaacaaggcaccgtgtaaggtattcaactattcatatctcttcaccttttaaataaagacaaaacataaaatttattctttcaagtgtttttggtattggtttttcaatcagaattggagtttcactttggtgattagcgtaataaaaaaggtttgcattaaagattagaataagttgttaaggtgaagctccagttctgattacagaatagtaccaaaaacgtcttaggaactaca

SEQ ID NO: 2475 - DNA, 862 bp, Glycine max
ctagagacaacatccagctacacctttgatgatattgaatctctgatcccaatccaaagcaatgttatcgttgaataggagagagtcaagactaccatttggaatgtagtcataaattaggattagatcattcttgtgcttgcaccacccttgaaggttgaccaaattcttgtgcctcaatcttcctaagctttcaatctcagctgcaaattccctcatcccttgcattggacttctcatgattcttttgacagcaacttcagttcctgtgctaggtaacacacctttgtacacagcaccaaagcctccaactccaattagctggctctctatgaaaccctttgttgctatgtgaagatctctatatctgaacctatgaggacaatcaagctcccagtcctcaagggtttcaaacatcatgtatctcttgtagcgtgtcacaataaacaacaggcacaacaaggtaaatgtcaaagcagacaacatggcaactgcaaccttgacccaaggaaaagatgatgcatctttctcctttggtggtggctttggaaggagtgaaaaatttagtggaggggcaattcccccattcactgaaacactccacccaagaatataatgagagcttgctttcctcttacctgttgatgcagagaaaccaaaaaacatggtttccttcataacaaacttgatgtcatgaatggcctgggatataagtggcttgcttggttttgatacctttaaaggggctattgtgacattcaagatttctgtttcaccatcatattcaatccaagcacaaacagcatcttccttctccatgctgaactcttccttttttgcatccatgccttcttcaaagtat

SEQ ID NO: 2476 - DNA, 886 bp, Glycine max
tccaactgaaatccaaacatgctaaagatggttgtacttgctttagaacttaatattagtactgacaatgtgacttgcttgatagtcttctttagtttattgcacttataacctacttaacatctatatgtaacattggagttaaatcatgcttggtatatgatttatttgaaaaaaaaaatggacaggatggggtgcaggtttactttccccaagcaattagcaaaacatgtagggagaggggccaggttgcccctatgttgttggagttgggtgtctatttctataacctacgtgctaatataatgcaaacaatgagtagtgaaagactacgaaccattttctagtttcattgaacttatcatatggacaatgtaatccatattaaactcatgctgttactgttattattctactcaattgataattcttgtatatattttctgtatctgttcagttcttgatattatgattttgtgatagcctgatgtgtaatattttacatttatcatctttcctagggaggcgttctttctggtgtgagtgtgacattactagtttcctgatagaagaaagtctaatggcacattcaacaagcttgatctttatgggccgcagttttagtccacttcctaaaaccaaagtcagtgtatctggaaggcttgtctccagatcttcagcaggacttcgcattcaagctgtgcaagagaacggtggaccacgaagactagtggacattattagacttgtgcctgagctctcaaggaattaattactttagaagccattctcacagggctctgtttggtggaatctcattgttgggtggattttatgtggcacaaacaatctctcttttggagctctaggagtcaatgatgttatt

SEQ ID NO: 2477 - DNA, 949 bp, Glycine max
tgcataactttaacaggcgggtattctcttgtctctatatctatgttccttgttgtgctaattctttctgtgcctggtgccactccaacaagataattttgccttttaataagatcagaatcccaaattctatcatacgggtcatccgggtacctaagaaacatattggcttaaaaatgttaaaccaaactcatgtcatcactcatcacattagttagttgttcttcccaatcaagctaaccatgctgcaatttttccttgaaaaggcaataaggttttatacttctactgatgcttattctctgaaggaaaattttggaaagtcttctcttcattcatttatgtgccaaaagcaacatcaaatttaaaaataaaaaaaagggagctttcacacctgacagcatcctcagttggagcaccaaagtttattcttgcagcaacttccaagaagaaattgtcctcaaaatccgtggcatacatggaaagattcaagggccgcaactcaagggtagatataaaaggagaaccagttgtagcacagcacatgcaaacatcaatagaatttgagggtgctctgatgatcatttccttaacatatatccttgaggcatcatatattgacactgtggcccattttgttgcatccaagtagagctgaaactgagggtaagtgtctccactgtccaagcttccatactgaaacgttgctctcaccaaatatcttcttctctcttctgtgcttagtgtgtaacagtacttcttgctctctatgggaaagtctcttcgcttttgatactgcaccatgcttctatttggactttctacttccactgaaatgccatgttgcatgatcctagaatctgagatccatgccaaccccgtgctggtatcagtgtaattacttgtccctccacaatcaatgctaacaaattctgcaggcatgcaagct

SEQ ID NO: 2478 - DNA, 873 bp, Glycine max
atgaatttattgtctcggcaaatcatcaaacataggtggcttgttgcataacatgaggagcattattgttcaagtgtttgtatggcactaaatggtttcctttcttttacttgcagtgtatgggttggaataaatgaagccgcagctcaaaattgctcttgctttagttgttagcttgctttggattcagcaatcattttgtggttagtatagcaatttggaacacactaagtaattggctctccaattgtttttagtagcatagcttatgcacttaaattttggtgcttgattgcttaaataaaaattgaataatacagcagcttttgataggcatcccatggacacttcaaggagtatttaatttcagtttcgctttgcatttagcacttaagtcattttgtagttagtatcacaaattaacattttttttttaattcaactctctaattcttgtcattagtagcatccttgaatactgatatttaggtgcttcctgcttaaattgtaaaaaggaaggaaattgctgaatttgatacattgggcattgcatgggcactttattcctgcaatatgagataattcatatttaatttcagttttatgttctaatattgagttttcctgttccatgttttacatatttcatctcagtgataaataaaatccaaataagccaaaaatccctgtctgtttttatgcttgccattattctttgcagatgaaacttctgatacatctagcttaaacaagtggaggtgtagatgttctttccaagggaaccaaagctattctcttgctaattgttcaaaatcatgtgattgcttctcaggtatactattaattttctattggaatgaagacaagcagcct

SEQ ID NO: 2479 - DNA, 848 bp, Glycine max
tcggtagcccggttgtatcctcttagagtcgacccctgcaggtctgcaaaatagacaggttaaagaaattgagggtagttttgtaataacaatttaaaaataagagaggtggtgcaaaagtaaaagtttggggtgtatttggaaatttccatgacttatgagggagtgccccaatagggaagagaagaaggaattttggagtgcttgttaccaggatggacacaagtccaaatttattaaatcagcaatcaaaatggctcaacatagtaggaggttgctcaaacatcataaagtctatgttcatctaatgtgcatggttggctagagcatcaacacatctataccttcccgataaatatctgtgatttaaacgtgtcctgtattattgatcaaacaagaatagctcagacacattatataatacacaagcgcacacacacatttcaacttttttttgttttattgaaaataaaatccattaataatggtaagaacaaataataacaataatggttatcagagaaattaaactacaaataataaaatccattaataacggtgaacatttgagtaacaaaagaggcccgaacaaaacggtctaaaacaaaacaaaacaaaggcagggctacaaactcagccgagaactacaattaaactagtaaatttctttacattcagttatgggtttgcgcatgcatttccaaaattcttgggccatataaatcttctttaaaggtctcttgtgaagtgatcagacaaaacttacaaatttctagaatgatgatgcagtttcttggtaaaaaggctattcaagaatcatgcccaatggccataaacatttttacaaa

SEQ ID NO: 2480 - DNA, 853 bp, Glycine max
tacaaatgctcccttcattctcaatcttgattgtgatcattatgttaacaacagcaaggccgttcgggaagcaatgtgttttctcatggatcctgaagttggtagagatgtgtgttatgtgcagttcccccagagatttgacggtattgatcgcagtgatcgatatgccaatcgcaacacagttttctttgatgtaagttaacatcgattcaatgattttatctagagtcaacagaaaaatggcgtatccttatgtgcaatgatttcaccaaatacacactgcatttgcatgcatgtaatgcagtaactgttaacaaccctgaagtagaaattgtggacacaactctgtaatttccaaccctcatccctgtttgatggactgtaatttgatggacttcaattgttcatttcaggttaacatgaaaggacttgatggcattcaaggaccagtatatgtggggactggatgtgttttcaatagacaagcactttatggctatagccctccttctatgcccagcttaccaagatcttcatgctgttgcttcccctcaaagaagtccaccaatgatgtctcagactttcaaaggaatgcaaagagggaagaacttgaggccgccatttttaatctcaaggaacttgacagtaagctcagttacttttttcaatcagttctagagaagcatatagcagaatcttctatgcaatattcttctggtttcttttcttcttgcagattacgatgagcatgagaggtcaatgcttatttcacaaatgagctttgaaaaaacttttggcttgtctactgttttcattgaatcaacactaatggagaatggaggagtgcctgaat

SEQ ID NO: 2481 - DNA, 864 bp, Glycine max
aagaatgaaaaaattgttagcataagatggtgggaataagatgtgctaagagtcaagatgtaggacaatcaaatataaactgacatgctgcaattcaaaatcaccaagtgctggatgatgaaaaatcgcagcatttctagatggggtatccctcaagctcctttccagctctactgcctcaagcagttcttgactgtgatgaaatggatacaacttaaagaacataatcatgaaatgaattataaagtaggtcactcgtgccagaagaaaaatactgaactaaccttgtagtatccctcaagctgataggttgccaacacataggacattgggagcttctctgacacctacaaacaatagccagtaactattactaaagtataatgttgcataatcaaccatataaaacaactcaaatgttctcacccattagcagccaaagccatgttttgtgatcagaaacttacaatatatacatatatatgtatatatatatatggaaataacaagaacattttcaacagtgaacatggcccctagccatatacaaatatccagacaacgcacacacacagacggatagagacagaaacatatccatcaaactatttcaaaagttcttatttctattttgtaggtggttagtatagcaccttgtccacaattatatcaatgcatttattagacttcaagttcaaacttttcatgagaatgctgaaagctagaagccattttaatatataggaaccaattgaaccaaagatatactaccctatgagaaaatagaggtaaaaataacactaaaaatctttgttttgtgaaagacacgtgaaaaatgtattaaaatgtaccattcaagaatgc

SEQ ID NO: 2482 - DNA, 818 bp, Glycine max
aaggttcccaattaactgaagaaggatggtattttgcttgagttcaaatttctgcatattttagaacagaacaggcaatttcagttagtgatttgatttaatttaatgggtcagaacttcgagagtaatagaattgtacttagcaaaattgtctaatagtagacaacaaaaatcaactcaatttccaatggtatgtttttatggccagaataagaactctaataagtaatgcttgcatattatttacaaatatgtagattgtatcaattcaaggcagctcgaactagaatttaaccctcatgattgatgtctcttcaaagaaaaatgagtatttgctatcttcaaaaaggttaatagccccctaccaatgatatgcacaagacaacctggaggttttagttctctagaaagtgacaaatcaactaccaatgatatgcatatgaaatctaacaaccccagtcccccagtaccaagaatatggaacagtaagagattaaatctttatgatgcacatatgtgccaaaattggggatgtcttcatattgcataacggtaaagtttcccttagtaaccagtcggccacaagtttgaatccagaaatagcctctttgcatacacaagggaaatgctagatacaatgaccctctctcatacctttgtgcaacaaggagcctccatggcaccggggaccttagttttatttgtacccacatccaagcaacatagcaggaaatgcttttcttagaaacattgataaggcatcagactacccacagattggaggtctattctagaaaatctaggatttagttttaatt

SEQ ID NO: 2483 - DNA, 717 bp, Glycine max
  misc_feature (705)..(705): n is a, c, g, or t
atcagagagtccggcaggaatgtccgaatcagctgctctattggtgaccccactcggccattcattagtaataatgaatcaaggaagtgaacaaacagatacagattacatcaagcctatctacatagctcatatacaatgcaagaagtaactaactaactaactgtttctctaatctctacgtgagtaatgcacatgaattgaaggatatgtcaagaacaaatcaacaattccaggttcctcggcaattgctcgcaatgcatcaacatcgtcttcagtgtaagttccaaactgttgagcactggaagacttcctaccagataaataggccacggataaccctacatataactgcaacatataagacacggaattcgcgaaaccgactaaggtccaaataaaattgccaaggaaaaagagaaaaggttggtaccgaagagggagaatttgccactgcctttcagccagtacaagttgtggcaaaccttgaagccatccatcttgaagccttggttggcggagtccttggaagcttgcaggagaagtttgggggcggcgacgccgtagtcgccgacgaagtacgtcgggagaggaaagtgggacccaccttcgatgtatttcgtgaagtcctcgagctgctccggtgagtccgggaagaactgacccacgcacaagagggcgtcgaatggacctgcaggtcgatcntagagaagaccc

SEQ ID NO: 2484 - DNA, 783 bp, Glycine max
aaggaggaaatatattatctaaaaaaatagccaataacattaaacaggatttcaatcgtactgaataaagtcaacaatacctaattaaattgcttctcaattctttgtagatggctttagctttctcctgatatggcccattctctacaagatttaaaccaaaaatttagtttcaggagggtataaatatagtgggaatatttgcagatatttttagccttggccagtccatattacctttggagtaatggtggagtgctgaaagaattctgtaattcatgtttatccaaacaggacctctccagtatggagggtcatgctctgtgttgtgcttcatgtacaaggaactgtgtaataagaaatattatttttggttcactataatccacaggctgaataatgtcactcaaattaaatccattaaaaaatgcatgcattagagcataggctgtaaaccttgttttgccaagtgaacgtaatccatagttggtccataagaggctgcgatttgaaatgagttcaagctgcttttccagaatccatgatccctgaatgaaacagtaatattaaaatatacatctgtgaaatcattcaagcaactaatgaattcttagttcattgcataaaaaggcatgtaaatgagaattgatgcacatccttacagatggaatgatcctccccatgaatgggaataaactaacgtaaccaatgtgaggaaccaatctcaatacaggcatatccataacatcccggagaagttggtgagtagcataattttgtcca

SEQ ID NO: 2485 - DNA, 794 bp, Glycine max
gtgtgtctgtcgcttttataaataacattggttctgaacttctgatgaaagatttttgtgcagttatctaacgggtgtttccctccattttcgccaaaagacagtaatgaaaagaaggtacgttactgctacgtgttaacttataatagtgataaatatgatcataatgcgcaagaaacaatttggcccatttttcagtttcaattaagaatttgaagcctatcatttggccttagcttgctttcatgacaaacttctttttgttgtgggctaaatgaaatttacttttcacaaaaaaatcatctactaatccttgggaaattcaggcaagtcaatcatcaagtgcagtagatttattttcctcttgctaatagctgtgaaccatgaattacaaacattcacaggccacaactaccaaaccttgttttacacagtgagtgaatctttagtgtgtataaattaataacacagtaatctgtcatgtacaggatttacttttactccatcaagcactcaatccagaattcctttccagtcaaaatttgctcagaaatggggtatcttgcaatcaacctcatgattatcttcatcattatactcaaataccaactcaatctgttactacttatttgtttcatttattttgttattggtgcaaattattgctccccagctttacaggagcttgctaagagggaggacaatgggtaggtggttgaaagatcaaaaggagaggaaaaagcaggaaattaggacccataatgctcatttacacgctacaggcatgcaagctg

SEQ ID NO: 2486 - DNA, 984 bp, Glycine max
tctttcctggtgcttggacaaccattttggtatctcttgacaatgccggtatttggaaccttcgtccagagaacctcaactcgtggtatatgggccaagaagtttatgtgcatgttgtaaacccagagaaagacaacaatgtggttgtgtaaattgctgacaaatttcaggtgatgccactctgaatttctcataagcacactcttaaatcttgcaccacattttgcagcaggtttaatattaattgggtgcagtccaggaggtatgaaatttaattttgtggttcttagttttcttataattctatccatcatattcaaaatggtcgatctttgtttggttgcaggcacaactagtaacattataacatatctttcacggtatattctcagttatatataattccaattaattaatgctttactttgtttgatcatattgatgaccaggtgatctaatgacccttttgttttgctagtggagatgtggcgctatctgtaataatgacaactgcaagtaccctaactgccatggttggtatagctataatttgagtcttaatctttggtttccatttttgacgagcaattaattaattcatgacaagatgtgggtaggcattagtacaatgatacaatcaattagtaatggtttcagttccatgcatctgcccacgtttgtacttaggcagacaaattaattttctccttcgcagcccttttggccctccctccctggttttgaagactagcataagacatgtcttgtttgagttattacaaatagtgcagagtgtattaatgattcttactttaattatatacttttgtctctaaaagtaaaaatatgaaaatcttttagtattggttcttaattataaaaactttattcgtttttaatttttgaaaactacaaaagtgctgtacatattctttcataatgacttcacaagcattctctaaactttgactgcagagcatgcaa

SEQ ID NO: 2487 - DNA, 755 bp, Glycine max
ttgcatgctttcaggaatggctgaggcagctcaaaagtgtcttctattatgcagaagatgtgatcgatgaatttgaatgccaaacactgcgaaagcaagtgctcaaagctcatggtaccatcaaagacgaggtaagccacttcttctcaagttctaatccacttgtttttcgttccaagatggctcaacaaatcaaagatgtcagcaagaggctagacaaggttgcagctgataggcataagtttggtctccgaataattgatgttgacacacgagttgttcataggagagacacgagtcgcatgacacactcccgtgtgagtgactcagatgtgatcggaagggaaaatgataaagaaaatatcatagagcttttgatgcagcagaatcccaatgatgatgacaaaagtctctctgttatccccattgtgggaattggaggcttgggaaaaactacgcttgcaaagtttgtgtttaatgataagaggatagataagtgtttcacattaaagatgtgggtgtgtgtttctgatgactttgacatcaaccaactcattatcaaaatcatcaattctgcgaatgttgctgatgctcctcttccccaacaaaatttaaacatggtcgatctggagcaattacaaaatcgactgagaaacatacttgccggtcaaaaattcttacttgtcttggatgacgtatggagtgatgaccgtgttaaatgggttgagttgaggaatttaatacaagaaggggtt

SEQ ID NO: 2488 - DNA, 785 bp, Glycine max
ttggcagtttatgtgtcagatcatgttccagaactactaataggtgatcctggaagatttcgacaaataattaccaatctcatgggtaactcaattaaggtaagtttatggtagagagaagaacattgtgtataattcaagttatttagtctgatatccttcatataagttacttggagatgttcccttgtcctacatccttgccttataggcatgctacggtcatcatagtctcatgaaaaaaaaattctatttactgttctagccaagcatatgactactagtagagcaaaattgatgtgtatttcttgaaaatattattaaaactgattttgtaattgtttggcagttcacggacaaaggacatatttttgtcacaatccatcttgttgaggaggttgtccgttcaatagaggttgacaaagaatccaactcagaaaataccttgagtggttcccctgttgctgatagtcgccggagctgggaaggattcaaggctttcagtcaagagggacctcttggttccttctcatccccctccagtgatcttgtcaatttgattgtatctgttgaggatacaggtgaaggtattcctcttgaatctcagccactcatctacaccccattcatgcaggtaggtccatccatctcccgaaagcatggaggaacaggaattggcctaagcattagtaagtgtttggttggcctcatgaatggggaaattggatttgtgagtatacccaagactggatccacattcacttttacagctgtattcaccaatg

SEQ ID NO: 2489 - DNA, 829 bp, Glycine max
  misc_feature (813)..(813): n is a, c, g, or t
aagttaagttattatattctattgggcatcctgagtacttaaaaattaggcttaaatatctttttagtccttgcaatttagcgtttttttgcttttcatcttttcaattttttttttttggtttagtcctttattatgtttgttttgtttttcatatttaaagcggtttagataacacattttcactgttcaaagtgccatataaaccactttaaggacgaaaaacaaaacaaacataatttgcaacgacaaaaagcaaaaaagtggtaagttgcgaggactaaaaaggtatttaaacctaaaaataaatagaaatgtctaatctttttccttttttgtatttatgtagggttcgtttccattatggtcatcctgatgtctttgataggctttttcacctgacaagagggggtgtgagtaaagcctccaaagttatcaatctaagtgaagatatttttgctggtactgtgtcttccaattcctcattattttctcgtatttgattgcatcctcattggagttttctgttatttctaggcttcaattctacactccgtgaaggaaatgttactcaccatgagtacatacaagtagggaagggaagagatgtgggtctcaatcagatttctatgtttgaagcaaaaatagctaatgggaatggagagcaaacactaagtcgagatgtataccgacttgggcaccgttttgacttcttcagaatgttgtcctgttatttcaccacagttggattttatttcagcactcttgtatgttatcttcagagttaacttttacttgcatattatgtagttntttttttaaattaatt

SEQ ID NO: 2490 - DNA, 825 bp, Glycine max
cttgcatgcctgcagtataatttcccgcggtgttgctttttaaaatctatctaaagattcaggagcaaaaggtaggtgcaaatgaataaagattgatagagtatccttaaggtataaatgaaaaaaaaataaaatatcaatcgtattaaaaaaattgacatttttttcttaacacttcttaactattgtccttaaaatggctattgaaagaaatccaataaaagctgaaatatatcattaattggcttgaagttagactcatataacccatacctaactctaggccgaacaatggtatttcaattttccaagaactaaacaaaaaaaataaaaagacattttcaattttatagtaacaaaaaacatatcttggcgacgtgttattctttttctaccttacatatgttcatccgttttactaatcaaaggagagattcaattgttaagtgtttttttactgtatcattgatcttaaacggatacaagttattttcattgtgtcattggtcgtaagactaacctttctttgcttatttttttttaataaaatcatttgatctatcaaattgctttttataaagattacaaaacataactcttcctcctgtttttttatttgtcttttacaatcatcttaccgttaattgggattctcacccttcacaattgaatgataacagcactatttcgtacccctccctcttgaacaacatgggggcaaaatgttcaacccgtgtaggaaatataattaactttacgtgcaacaggaacaagagacatcagagccagcaccagtggctagcatataactctgttcccacacat

SEQ ID NO: 2491 - DNA, 819 bp, Glycine max
ggccaaacttgcatgcttgcagaaacaaaaaacaaaaaagtaaccaatgaacaaacataaacctagaattggagaagataaaggacaattcctagtatgtaatcgtatttttctaaagtgtgcagagtgtatgggcataggttttggctagcatatatagtgtacactcccattaactacagaaagcaccctcctccccaaaagagccttatgcaaaataaattggtataattgaatttagcaaaatattgcaatgaatttgaagagcttacggacctaacttttaaaagctatagccagcaccgatgtgattaaacaccaattaagtctcaaaaataaaataatccatgcattataaagcttttatccactctcatcctaacacaaactatcatatattgtaagtttattggctttgatgataatttccttagaagtcaaatcaacagtgatttctaattcaactaaaaaaaaatagtgacactgaataagaaaatagaatacctgtcttggaagaaccagaggcaaaagtcttcaacttgtgtaaaactgtaaattgtatagctgtatatggcataaccatgagcaatgccggcacatttccccgccaaaacccctgcaaaaaagtgatagaaaaaaaaaaggactattagctttaaaaacacacacacaatcacaaactgaaaagggtggaaaatctggttggttccagtacctgtacgccttcttctctaagaatatccttggttgcctgaagcataccagtgtattttgatgctgcaggtcgactctacagaaaaccccggggtttcgagcccc

SEQ ID NO: 2492 - DNA, 822 bp, Glycine max
ttgcatggcctgcagttactagtaatagatttgcagtttacatccccacctatacctgtcgatattcctgagagaaatagaagtcaaaataaggaagaactggttttattagcttcaaatctggagtcacatgtttcccaagaaggacatgttgggagtattactgatcatagcttgttggtaagtactaaggctgaggttggtactgtcatggtaaataaaacatggttgaagaatagcatggggaaagcaacacgagtgcatctcaatactaaacctgctgttggagtgcctctcaatagcatggggaaagcagcaggagtgcatcttaatactaaacttgctgtagagaaaaaagggttgaataatagcatggagaagccagcagaaaagcctctcaatactaaacttgctatagggaaaacagggctgaagaatagcatagagaaggcagcagaaaagcctctcaatactaaagttgctgtagagatacctgatttgaacggtactggtgctgaatgcaattcaatcagcacagaatttgatactgtacatttcgtttcacctgaatttaaattggagcagtcaagaagcgtatctgtatgttcaagatctaccaaaactacttcttgcaatagaccggatagcaatggagaatcacttggaacctgtcttctcctaaaattttcccctgtagcttacatcccatcaaaagaagatttaatgacaacgttttgccggtttggtcccttgaaggcgtctgaaactcagttgttaagagacaatggtagtgctcaagttgtttttgtaagaagtgcagat

SEQ ID NO: 2493 - DNA, 978 bp, Glycine max
ttatttgtgtcaggtcatgtgtcaggaagacaaaattataataccatctactttctaaactatattaatgacaaatacgaccagaaaaatgaacaaatctttgaagaaatagttggcttgacaatgcctcattgaaatcaattgattcactatctactttatgtgttctttgcatgagcttgttctattattcttctttggggttttaatgtgtgccttactatgaagcacaaacacctctcttgttcgaagtgttggacatgtttccgatacgacactccccgacacttgtttgacacttcttattaagtgtttaatttaaaaatcattttttattggcttgaacacttaagttaacacctttacacaactcatacacttgaaaaaatacagaaggttggtttaaaaaggtgaatataccatcattttagatattttgttatatgttactcatatttcatttcattagagtctatgtttgtgtgtgtatgcggtgtccccgtgtcctagattttagacattggctgcgtcaaagtgtctgtgttgtgtctggtgtccgtacttcatagaggtgcctaaggaaaatacagatttgaagctttaaccattgactgtagcttatgtcctagattttagacattggctgcgtcaaagtgtctgtgttgtgtctggtgtccgtgcttcatagaggtgcctaaggaaaatacagatttgaagctttaaccattgactgtagcttatgtccaagaacaagaacatgcacactggttttgcattaatactgatatatcagggtggaagtgcattattatttacaattttcttcctcttgctgtagtgatggcactttgatttctgtggaacgccttgaatatcatgttagggaagaattgaacaaaacagcacctcgtgcaatggttgtcctacatccactcaaggtatatttgtttgtgttcttttctgcaggcatgccaagct

SEQ ID NO: 2494 - DNA, 847 bp, Glycine max
aacccgcagttatgttgttagcgtgtcaaggtttctccataatattcaattactcaaacgtactctctaaaataaacaagttaaatctcttcttggactgattccaaatacttgttaactgcaacatataacctatactaacttcccaatttaagagtaatctaacaaacagtattaagaattttataatgcaaatagacagaaagaatcttagtcccacatggttaattattttagcttaggtggtgcattgtaattttctatgtaatatagtaattctgtaataattacagtacatagaaaaaggccaagagtaagttaattagattttagaataggtgctgacactatagatccacacctaggtaggtctccaggttgtgctgatgaggtcctacacttacacatatgccatgcatgtctgactgaatgacacttcaccaccatgaaaaatctaccagtcggcgaatgacacttcaccaccatgcatgtctgacagaatgacacttcaccagcatgaaaaatcttatttattaaagattagattaaacaatgtgtcatttttaccaaataacttgcataattattcatccctcaactactaaaaaagggaacttgcatgatagaataatcaagaccaagagtttaaaggaactgatcccatgaacaagcaaaggagaacctactagctaccctccaccttacaccaacctcccaacatcacaatgcttgctccaacgagaaaaggcaagaaaaatattgttccattcaccaaccttcatcacccctccattctcctacagtgacaaactctacaaccccaccataatagccgaaaaagcactct

SEQ ID NO: 2495 - DNA, 940 bp, Glycine max
ttgagtcaactttccttttattagtattagtctttgcatgcaacccatcttgacatctgtgacatgaataagagcttccagtagttcttttgccacctgatttccttgcatgtctcttgtggaaatatcctataaattataaaatgataatgaggtagttgatgaaaaataaccaacattaaaagatgaaaaaacactagatggcagcataaaacaaatagtaatcaaaacttagtgaacatgcacagcctattgctcacatgaaagaggttacagaaaaaacttatagcttccatcacaaatttatccaaatattcttcaaatctagatacatcctcttgtctttagcatgtcaaaaagcaagtctcttttttcttataaagaaaagaagcttatacacattttggcacctcataatccagccatgtttttttatagagaataatggtgttcttaattgattcatgtagccaaccccatctattgagatactccgatcaactttaaactgtcatttagttaaatgcatgcatggaatcttttacgacaatgtcaattaatgacgagtttttggtacaagctattgaaactagatacatcctcttgtctttagcatgtcaaaaagcaagtctcttttttcttataaagaaaagaagcttatacacattttggcacctcataatccagccatgtttttttatagagaataatggtgttcttaattgattcatgtagccaaccccatctattgagatactccgatcaactttaaactgtcatttagttaaatgcatgcatggaatcttttacgacaatgtcaattaatgacgagtttttggtacaagctattgaaactcaataacaaaagtgttaactctgtcaagaatatgttgagatgtcaataaaaaagtgactaaaccctgcaggcatgcaagctggc

SEQ ID NO: 2496 - DNA, 910 bp, Glycine max
  misc_feature (747)..(747): n is a, c, g, or t
  misc_feature (758)..(758): n is a, c, g, or t
attgaaaaggcatagaaaacctaaccgacctcaacaggaaaaagactccattacaaaccttgatcgaaaaaaaatcctatgcgacatcgggcaagacaagttaccggtcaaggcatcctaaaaagcatcaccggatgaaccaaccaaacagttcctaatcgacatcatctgaaaattattcagggattgaacagaaaaacaatagccggcatcggtcgtaaacttgactggactgatttttgtggacaaaccttacctgaaatcttcgcacatgaatggtttttttttttttccgacattgtgcaatttttttatttttcaccaaccccggccaataatattttttgtaccatcgaggatgttttcttattcattgttgttgctcaaaatgttttctgtcaaggttgcctatggtatttcatgcaaactcaaccgacgttgcgttacgggtgacattggactgcggtaattgaataggcaaagaaaaatataaccgacctccacaccaaaaagactcaattacaaacattgatcgaaaaaaaatcctatgccacatcggccaagaaaaattaccggtcgaggcatgccaaagagcatcaccggatgaaccaaccgaacatttcctaatcgacatcatccaaaaattattcaaggattgaacagaaaacagtagcccgcatcagtcgtaaacttgaccggactgatttttgtggacaaaccttaccggaaatcttggcacatgaatgnttttttttttntttgccgacattgtgcaattttttttatttttcaccaacgccagtcaataattgttttagaacgatacagaaaattatcgtcaaaatgtttaccgtcaaggttgcctatggtatttcatgcaaactcaaccgacgttgcgtttcgggttaca

SEQ ID NO: 2497 - DNA, 763 bp, Glycine max
  misc_feature (685)..(686): n is a, c, g, or t
attgaataggcatagaaaacctaaccgacctccacaccaaaaagactccattacaaactttgatcgaaaaaaaatcctatgcgacatcggccaagaaaaattaccagtcgaggcatcccaaaaagcatcaccggatgaaccaaccaaacagttcctaatcgacatcatccaaaaattattcaaggattgaacagaaaacaatagcccgcatcggtcgtaaacttgactggactgatttttgtggacaaaccttacctgaaatcttcgcacatgaatggttttttttttgccgacattgtgcaatttttttatttttcagcaacgccggccaataatattttttgtaccatcgaggatgttttcttattcattgttgttgctcaaaatgttttctgtcaaggttgcctatggtatttcgtgcaaactcaaccgacgttgcgttacgggtgacattggactgcggtaattgaataggcaaagaaaaatataaccgacctccacaccaaaaagactcttttacaaacattgatcgaaaaaaaatcctatgccacatcggccaagaaaaattaccggtcgaggcatgccatagagcatcaccgggtgaaccaacccgacatttcctattcgacatctttccagaatttttcaggggttggatcggaaccactcgccacttgggttgggnncttgtcccgcctgatttttgttgcccacccttatgggaagtcttggccctgaaggggttttgttgctctgctgcgct

SEQ ID NO: 2498 - DNA, 839 bp, Glycine max
caaacttgcatgcctgcagactatatggcaccgcccctatagtgccccttccaacgattacctagaatttaatttgatcttctgaaggtagatgaataaataaataaacgtgtgaaaataaaacagtaagtacatgccagtacgtaataatgtgaactagtttgtatacatgaatttaggtccaatgctgcaaaagacctagttagacttggaacataaaaggatatatttaaatgactctcaagattaactaaataatacacagacaaatcagataattaaactgcacggccactaagggatcagcatatgtgaaagtctcagagagcagacatgtcgctagttatatataaatcaagctgattttattatctatatgggaatcaaatacaagcttaattctcttttgctagcttcaatttggatacacataattccaacctccaccaattgataacaaatactagtaatgtacacatgctattgtgcccccgggtagcttaactcttgaaaaacacattctcgtggcatctcttgacgcacaccctcgtaattcgaagcaacaagaggaggataaatcagagaactggtttcaccccaatcagtactttgtccacaacttgaagaagcacaagcaccacccattatcttatcggtaatcatttcctccccatagaagaactccaacgacccacctaataacctttgagaataatcattagcagaaaccatttccccaactgtagtggtagtgaaactgctttgtccttgcaccaactcagcacggtactcattgctctgaccaaactgtacttggttgttgccaatagagttcatgc

SEQ ID NO: 2499 - DNA, 819 bp, Glycine max
tttcgccagcttgcatgcctgcagttgtctctactgcattttggcttcaaagccagcaaatgcaacccttctctcgttgtttacaagactcatttccaaactgtttaactagtgtacatagatgacatcatagtcactagaagttcctctcagttagttcagcagcttattactcaactcaagtttcgaccattgttgatcttactgagctctagataccatcttagaaattcagagaagctagaaatgaaagaggaaaaagtaattgattctcattaaccaaccataacagctgtctctatgacagctgtcaccactaatctaacagattactaactacctgagagtgcagttgaataactatgttggagatcccacatcgactagtgatatgaccaaaatatagtatataaatcccttcatcctgaagaaagggtcaaaacactcacagtcgcacattagggacagcttggtttgttgcaactgtcattgatggagtcgtgattttggtggtgtgatgctggtgggtttagtgggtggaagccagggcacaaacaggagaaaagattcttatgctctcttctctatcttacattatgtcactttgtctctcagttcttgaatgctcaaaatagtttgcaatgtacatcttggctttcccattcatcctggttttgcaagtcctttgatctaaaggtacaatcttactacgccaaggaacaattgatctaaaggtccaatcttactactccaaggaacaattcccatccttacagctccaatattcccacatcttaataagtgttggtaagcctcctt

SEQ ID NO: 2500 - DNA, 804 bp, Glycine max
atgggttcaaggttaaaaatggccattttggtgatgaacattaaccaagaaaacagcataaatacaaaagttgaaactcctacaaagtaggcattctgtgttccttgttcatgactgttttggtcggttatgctaattctgcggccttggacatatacacgttcatcagcttccggagctaaactgtttccaattggataattgtgctgagaaatttccctcaacaaccttgaaagcagcaaattcacataaaaaacattgaatgttttttatttagcaagcaagaaaattaatagtaaaaaattcagtacttttttgttgagtaaaaaagtcacaaaatttgagtcacaaatcaatctttatcaattgcgattcattactcttaaatgattaccatatttattcatttattttgttattatcctttattgctgttcctcttacctttatccgtgactgcccccattgacagaagggacaacaccaatggagagaaaaaccaaaaaggtcttatattataaaaccaaaacattcaaagaaacaccttaggaatcatcaaaaaccataagtgggaaaagggaaatggaggaaaaaaataatgctaagctttttggaaatactttattttaaagagggtgagatagccacaagagattcaatcaaccaaaagcaagatatgtagtggatccaacccatacccaacaaaccccacattatatatatctttagatcaaattagattattgtgtgcagtaccaaccagaaccaaactttgtgcctttttcccgcaaggcatgcaagctg

SEQ ID NO: 2501 - DNA, 570 bp, Glycine max
acttttaacatctgaggtcactggtttcttaatgacagaaatcctcactaaagaattaagctttccaccactgcgtgaattttctgcaaataaccaacatatggcataatgagccacattcccaagttgatagtatcattaaacatcttttccaagaaaaataacaaatacataaataaatcaaactatagccaacaactacacatgaatcaaaatgaaacaatgcacatgtgaatggtatacaccccctttctgcaaatcatactagtgttaagaaaaaggctacacaatgattatgcaaacaaagaccagatttgtgcagagctcaaatcaatatattattacaaagcaatcaaatctgattttctttttaataggcaggagggttgcctgtataacatcaatgtcaagtcaaaccggtaatgggggttgggttccttgactaatagtacccattgagagtgagataacaaatgtaaggtaaaagcagatcaatttatataatacacaattgaagatggtccatcaaattgatctgctctcatgttaatcctctttcaatagaaatga

SEQ ID NO: 2502 - DNA, 803 bp, Glycine max
cgccaagcttggcatgcctgcagtaaacaactgctctacaccggccccagcaaatagactgttctccatacacttctttctcacacattgcacactgtctcaagccagtacttgagtatgcttttgtgtcattgaatgtgtcctccctaggtggttctacatacttggtgggggtcgagccagcacttgcactattagatttttcatcgtatgcctgacccggcgggtgggaaacggtaacagcaacaaggtcataacctcccttggctacttctggaggccactgaacatcaacagtctctataaaaggttcaaaacacaccacagttgaatactttggaccactttccctgtcaacctgaagtaaggagtgcaccagggaaatggccttcatgaatgcatagacaaacctaagctcttcaatgcttggatttctaaatcgaagatcgccagaaggtgtgcatcgagcaacatcaataacaggaaaacgatctgagcctgatgcttccaatgacaaagacttgatcatcttgcggttagaagggaacatcaaagagtccacttcatatgtgaccctcagaagctcaacattgggagagtgaattgtctccctagaccctgtcattttcttagcatcattctctgttctaaacatgtaaaatccaacatctccaccatcccctccaataaactgaacacatggaaaaggctgtttcttgccaggccaatccgaatctttcccaacccggacgccaaacaagtgccccggacgcagcctcttccacggctcagttctatacaaa

SEQ ID NO: 2503 - DNA, 866 bp, Glycine max
ctatgaaccctggctttaatatggtctctagcaatgctacggtgcctgctttcggatcctctacagtgcctcatttgcagttaggacattcctatgaacccagtggttggtcttattgtttgccctgctttccacagggatttgctcctgctctgaacttcaatgctgagggaaaccctcctgctgaccatgtaaaaacttttggggacaaaattggtccctatggtgaatccagttcccttcagaaacaaattcttgttattgatcagacgggtggtcaaacaactattgtttatagctccaggtttggcagtcctggtgagtgccttgcttcttggcattcaaaactgcatggtgctaactatttgagggggaacgaaccttctttcagaagaggtttgaatttgaatttgaacttgaatatgactgagccaactttggctgataaagtagatgggaatccgggaactagcattgaaagtgagatgcatgaagacaccgaagaaattaatgcattgctttactcggacagctatggctattctacccaggatgatgatgatgaagttactagcacagggcactctccgagtacaatgaccactcatgataactgtgaaacctttaggagggataccgcagaagaagttgcaagctctgccaggaaaaccaagaagaggaagctattggatggctattatgatgacatacaactcattgatactgccagttctcagaatctgaacaagtcttctgcaacgggagatgatgacgcagaatcaagatgttctagtaacaacaatgaaggatccttgtctggcaataagaagattaaaaaggagaagatacgcgatgttctgagcatt

SEQ ID NO: 2504 - DNA, 129 bp, Glycine max
tgaagttctacaaaatgtcaatataatatatttaccaggtgtgatcacttctgttacaaaaggcttgtcaaacttgcaagtcaagtctttgaaattgatagaggcgatttgccagaaccttccaatact

SEQ ID NO: 2505 - DNA, 939 bp, Glycine max
ttcgccagcttgcatgcctgcagtggaaaagagggtgagatccgttgtgtcaagatataggggccaacttatttcttgggatgtggtgaatgaaaatttgcacttttcattctttgaaggtaaacttggacaagccttttcaggtaggatcttccatgaggctcataatattgatggacaaacaactttgttcctgaatgaatataacaccattgaggatagtagagatggtgtgtcaatccctgcaaggtatatccagaagcttaaaaaaattcaaagttatcctgggaatgcaggattgccaattggaattgggcttgaggctcatttctctggtccgggtattaactttccttatttgagagcttccatcgattatcttgctgctactcgtttgccaatttggattacagaactagatgttgcaagccagcctaggcaggtaaagttcaattatttttcatgcaacaatttgatgatgttgttggcagaatagcttattcaccgcaagtagttattagatgatcaccacatgttcatagtcccgcctgattaatctctaagtgacaagtagtcgagtttttcaatgtgcatgaaagaattaatataaatcatatcatgtggagattaattgagattgataataatagttccaaactatctaataatttcgcatgccgggcatacatggttagagaaagtgtttatgttgtgttgtgctgttctttgtatgaaatgtggtttttagtattttacccatttatttatgcattaaaaattgattatagtttttcacttatgatttgtgcagtcacagtactttgagcttgctcttagagagttacatggccaccctatggtcaggggtattgtgatgtggacagcatggtcaccacaaggttgctataggatttgcttagtagataacaatttcaggaa

SEQ ID NO: 2506 - DNA, 931 bp, Glycine max
ggaaaagagggtgagatctgttgtgtcaagatataggggccaacttattgcttgggatgttgtgaatgaaaatctgcacttctcattctttgaagataaacttggacaagccttttcaggtaggatcttcaatgaggctcataatattgatggacaaacaactttgttcctgaatgaatataacaccattgaggatagtagagatggtgtttcaagccccgcaaaatatattcagaagcttaagcaaattcaaagttatcctgggaatgcaggattgccaattggaattgggcttgaggctcatttccccgctcagggtattaactttccttatttgagagcttccattgataatcttgctgctactcgtttgccaatttggattacagaactagatgttgcaagccagcctaagcaggtaaagttcaacaacaccaaattcatgttattttgttctccagtttcttatttctcgataaactattagatagtcttgaattagaattaccagcatctatagtctcaactaatctttagatgataagtaattgaatttttacatgtatggaaaaagtaataaaactcaactaggtgtcatgcagagattaattagctaggaccagggtactgatggtaatctcgaaatatctaaatatttttcctgtgcgacaagcatagttagagaaattgcttgtgtagcgttgttctctacaaatgtgattttagcattcgtatctaataatttttacccattatttatgcattaaaaaatgattatagtttttcacttatgatttgtgcagtcacagtacttcgagcttgctcttagagagttacatggccacccaatggttaggggtcttgtgatgtggacaggcccgtcgccagaaggttgctataggatttgcttggtagataacaatttcaggaa

SEQ ID NO: 2507 - DNA, 897 bp, Glycine max
acaagaatttgctgttcaacggaatgggggtggacctccggctagcaaggataagaaggatggtcagtcttcatttccaactggtaaacagaatgactagattagtagctaagttaagcagattagaagttgatatttcagtacataccttcgatagaagctaaaaaaaataatccagctgtcttttttataagttggaattatgcattgtattctccttaatttgcccatgtatgtacataattatcaattcatggttcacataactttcagaatctctaaatagtcctgatatatggtttgttccccacacccgggtaaatgcatacatttaaataattttctccaatctattactttttaggcgattagaaatcattatactcttttaataagtgttttttgtaatatatatatatatatatatatatatatattatagatatcattaatacatttttgtatataatcatttcatattatgttttttcttgtagaatcacacatcttattacttatttctactattttcattttctccgtgagaaatgctaacatacttctttctaactctcttgatatgacaggcctaacaaacacaacagacttaacaaaatactttttttaacatgatcagaagtacattgaaattggacacaattaatcgaattcactatttcattatatttgatacccacctactcaatcaaatcatcaaaactctataatttcattttcaaaataacaaatgcataccaaaatgtgtatacaccagccaaaataaaaaaatttaacccatcaaatccatttttttcatgatattttatactactcaaacattttaagctcacttccctatctatgatcgtagtagtagcactcttggaattattacca

SEQ ID NO: 2508 - DNA, 877 bp, Glycine max
agatcctagctgatccatcattttcacggcaagaaacttctctttctatcttatgttctataagggagaatgagaagctaataacatcttattatttgggttctgaatacaactaagctgctttacttctattctttacaagactggcttatttgaaggcagaaacaatataagtagcatcattttgtaactttaaaattgtcgatcagattatggattaagtttttaatttgaattttgttatggttttatcagcttactctcaatacgagggaaatttcaaatgcttctgttggattttgtccacccgaaattgattctccaggtaatgaataagagtccataaataatttattcaactaaccaaaatactagtgcatattatacattctgttcaaacaagcagaaactcgtggaacatctcctaaaaagaattgaggccagcttaagaagggagctttactactggcatgcttattatgtgagtttctccctccataatctagataaccccttcaccccaattttatgtttatttcttttggtaaattagtaaccaaagtctataatgaacaggacagaagactcccaccaggaataacagctttactaaagttagaaggtaagcatagtgacccttctaatcacatttaagctagccatatagatttgcctagcagaaataaaataatattatagactaatatgcacaattcggaaggggtctaactcaattggttgaacagtgtctaaaccctttagtactatcttcgattctaaggataaaagaaaagactaatatgcagcatgatttccctcaataacctgctgagacttgctgttttgggtgtagtattattgactaatatgctcttct

SEQ ID NO: 2509 - DNA, 826 bp, Glycine max
acagtactatcaatttgttgatggaaatcccatgtcaaaggagttcttttgttttatatttattgtccttataatgtttaacaaggcttgtgtaaaaataggtggggagggatcaattgtgattgtagaacgttttgtttctacaagacaatggtaggcaagctgttagcgtggggcagcacaagtggctgtagtgaatgagcttttgtcgttcacattagcacaacttgtgctagacatgttctgcattaacagaagttattggcttataaaaaagaaagggagttccgtgatcaaattactctcttttgagagaaatcaaactctctcaagaacaatagaaatggtcaaaaactaactttcctaagtcttgtaatcaaattaagctagttccattttaataggtttcgttggtgaaaaatgattcatgcttgcctactattttttacttaagcacggaccaccaggaaaaataagaatccttccatcatgtcatagtatatacagatacatagatatggataaccgattaataataaaatatggaatatggggagaagttttgcaaatagctccaccaactaaaggctgatatttaaagagccaaattccagaagaaaataatgctattgtctacaatttgttacatgaatttgaattaattctacaaaacttggcagccaatagtttggacataatatatatatatatatatatatatatatatatatatatgacacaacaatctctgccaaactggaaggattaaagattgcctaactttatggtgtgtgtgtattgcatcattgatgcaacatttgttgta

SEQ ID NO: 2510 - DNA, 833 bp, Glycine max
  misc_feature (807)..(809): n is a, c, g, or t
ttccctgaacaaatgagaataatagagtccatttttgtgcctttcgatattataggggtcctaggcggcatggttctcgttgaggcattgaaaataaaatactttctaatctgttttttttttttaaaacaatttgtacacaaaaaaatagacagagagagagaatgttttcactacttcctctctgtataaatccttaaaattaaaaaagaaattaaaaacaaagtaacagttttataaatttaaaataaagatagtcaaagatcattttaaaaagtgagaccttaaacatttgacatgcggtggtatataagttgaccacatctaatgttacattgatgcccactatttattcctctaaatttccatcattattataaaaagtcaatattaaaataaaatatatcacattaataaaagtaaggataaatttgtcctcaaaattgtgttacaatgataaattaattactaaaatataaaaaatttaaatttaatcagtaaatgcgggtaaatgtgaacaaagtatacagttaaatgtgttaaattattttctcattaaattataatatttaaaaatcaatttaacaataaattatatttttcaacaaaaatttagaaaccaattaatcatcaaattatctatagattaatttgtcactttcaagatatgtagagactaaatttaaattttcagctttcacaaatcaatttttcaactcctcacgccttaaatggacaaatttcacgatttatcctaaatttaatttaaaacatatgtacagaactgcaggggtcgactctagaggnnnatagcccggggtaccgagctcaaa

SEQ ID NO: 2511 - DNA, 969 bp, Glycine max
cagcttgctgcctgcgaaccagatgagaatatgcaggaaaacaaggaaaatattcggaaaggataagatgaagaagagtagaagaaggaaagaggaaacagttacaataggattgagctataaacctgctttaaccatggaaaacaccagaatttcctatctagcttgctactttaactgaaggcagtgagaaaaaaaataataataataaaggaaaaggtggctagcagctgcttcaaacacacatatagtacctttaagtttttgctaatttaagaagtgcatgtatgtaggcggtttatgagagatagagaggaaaaaagagaagcaaagaaacaggatagaaagaaagaaaacccggtttttttttttttctgactaaagctcaaattccagcctctctctcttctcatctatcctactagtattacacctttctttcaaccttgactacaaaagcaaaaggcaaaaaacggccacatagctgttactaatcaaggatcttgtaccaacccaacaatttgtgtcttattttatattatatatataatatgacttggaaaaaaatatatatctcccaaagaaacacgaaaccatacagttatggaaatagaattagctaggagaaaacttaatagttaattaggtgttactgtttcttgtattgttccccattcaaaattagtttttttaataatctacaaaatcttttattacatgaattatttagatggaattccaattttgataaaaaaataataataattataatacaaacaacacttatagtaagttttgtcctgaattaagcattcatatataatacatttattggtttctatcaccagttaactacagtttatcttccatcaaaagtgagcaggaaaaacaaatagaatattaaatgtaaatacttacttcttaatacgtgtcacgaagtttggactttgagtaataacgacgacatga

SEQ ID NO: 2512 - DNA, 882 bp, Glycine max
aaataaggccaaatttgacaatgtagctatcagtttagactaggccaaaaacaattttgaatctggtggtgaacctccgttctagctcaatgcaatcatccatttaagattacaaattttaaaagcattcaacttggacattcattcaggaaagactccttctataattcaagtagattggcttcctcctcaacataactagattaagtgcaacacggattggcttcttgtgagtattttttgagacaaaagtgttgtgttccttggctgcttctgtacttatctagggatttctcctgtcttcaatgctgaactcactggtgctatgcttgctactgaattagccatcgaaaaaggatggactaatctggtttcgtagtgatttagaaatagatggttaaactatatagaattaaattagaaagattaattttagatactcacatttttagagaagaaaattaaattggcctattttgacattcatgtacagaaatttacttggtggaaaaccctccctagctttatatgggaggactttcttcgcaataggtatgtattgcatttctttaggttcaagtaacttgtcctgggtgaggtttatgccaccaatttttttatttttattttcttgcctttataataaatttggttgtgctgcatcttagcactcctttttgctaaataaaaaaacaggagacatgaactacaaacaagagagagagactcagttgctagcagagacaacctagaccttttaaagtaacttttaagccaacataaagttagaacaaacatagtctacaagggaaaaaaaatgaaaagtaaaacttcacaatttcaagcccaagtaatctagcaattaattccatttactttgca

SEQ ID NO: 2513 - DNA, 799 bp, Glycine max
tagacttctagtagtcacataaaacacccaaaggaaattcaatgtcatgggaaagaaaagactatgtcaaaagggtaatcctgtaatgacagaagctggtgtgttacaaaagatggggcatcgataggagctgaactggaagcaccttctggccatggccataccaacacctgagcagggattggtcacgcaccttcaggagtgaaataccttgtggccttaccccaaaatatgttgcagagatggcttcctcaatcacagactaagattgtatgttttatacattttattttggatataatacgcatttgggtaagcaacttaattaaaagctaattccataagctcttaccaaatgagctattttaaagttactaaaaggaacttatttgataagcttctccatgaagctttaaaaaacatgtaaggtcataaactagatccatgagctcaaataaactcctccaaaagtccttaattggtcatgaaactccctcaataactggacattaccaattatcttataagttgaagctattaaagctagtttgtcatgaataatgtgatataatatatcagcagtacagccaatactttctctagagtatattagaaatatagacattactagtttataagtgacaatactcccataggaagggtatttattttgcattggcattgttttgataaagtgaaagggtatgaatctgaaggtatatataattacaaaggacacaactagacctcaatcatatctgatagatggtttttgattgttatctgcttcacatcacca

SEQ ID NO: 2514 - DNA, 946 bp, Glycine max
cgccagcttgcatgcctgcagcagattttgagacttccaagttccaattgaaaacgaaaaacaacctaagaaaagataagctttaaattaaagaatattaaactcacctattccccttaatcttgaaccaggcctcagcacaattcttgtgagcagcacccaaatcatccttacaagaacaccccaattcaatgggaactccggactcttcttgactatcatcactctccaaaccaagatgacaaatcctgcaatccctctccactttggctaaatgcaccttaatttcaggagcaccactttcaatttccacctccacagaatcagtgacagaagaagccctccttgaatcaacatcaccaccatcctcagcatcagaaacacaaccaaatgtgtaatcatcataagggtcaccatttgttgaatagaaatgggaatagcatgaaccattctcagcatcagaaaagcacatgctcatgtcactgccactcactgaacggtggtggtgactgagactcccttgctccaaatctaccacatgacacatctgtagacttgacatttcaataaaaacacaaacaaaattttcaaacctcaaagtttaagcacctcttctactaagaatatatatatatatatatatatatatatatatatatatatatatatatatatatatatataacaaaaacaaaagaaagaaaaaaaaaagagagaagttggagggtatataaaaaaattgagaaatggattaggtgccgtttgcttgcaacccctttaattaatgcatcattctagaagtttcaagttatggaacaggttaaggaaagttccatgctttcaaggctccaatgctggttagaaagagagagagaaaaagggtctcaaacaaagattggtgtgcaagagagggactcttggtgtggctgaagaagacagggacagt

SEQ ID NO: 2515 - DNA, 882 bp, Glycine max
agtactggagattctggagctaatgtcaagcggcttgagcaagagactgatgaaaaaatccagcacctgaaaacggaggctgcaagaatatcggatgatgttgttgccatgcttctcaagcatgtaacaagtgtgaaaaattaggaccctttgatatatattggtgctgaggacttctaaattatgatgattattattccgagtttattttttactctagatattctggtgcgggtgagatccttgttttggttacaatgcttaataccttgctgcactgtactcagtcagaaatgacttcaaatttgttaaaataaacatttcggaattaaaagacaagtgtattttgtgttgctattttaacaagtgtttgaggactagttccgcccctgcatatgaatgtaaagtcgaaatgcatggcatataatactacggctgttgatcccgttggacgctccattgaccttcgttttgatccaatccatttgtgaaatagagcatgtttggatacaaggctagaaatgctcttgagagtttctccaaggagaaaagttttatatttccaattgagaagctctgaaaagtacttggcttgtatctaaacagacccatagccataacccagttcacaagctactcctattgaggtctgctagaattctatgaagcataataccagttctgtttaaatctcctattatctctattatcctcttctgttttctctgaccagcaatctcccaattttccattcacttttttctcaagatctcacaaaaaatttgaatctgtatattgatcctaaacaaggttctgatcccttattagtcgtgaatcttttttttttaattgcaatccctttacaagttgcctgcaggtcga

SEQ ID NO: 2516 - DNA, 852 bp, Glycine max
atagagtttttgaagcagctgaagctgctgaaaaacaaaccttttcagccacctcccaagctgcaaccagaatggtttctaacaggtaaacaatattattattatactgctttgaacaataataaaccagaattcaaaaaaaaaaaaaatagtaaaccagaaatttatagtggtcattgacaatttatgacttaaactgaactctacttagcctggacaagagtttttacgtttatgattagctcaactacacttttagtttcttaattttaattgtagcatcattatcaggtagtttaagttctcttgtaaaattaacttagccatgccattttttggttgatgcaacatattaacactccgccacatcaatttaaggttttaaattgtagtcatagttaaagttttgtcatgatagttggtattgcaaaaaaatacaaataaatctggttgcaattgcagtcacagaaatcttgaaagccataacattataatcataattgcaattatggaccgtttttaaaaccttgcatcaatctatatcagcgaagtcaataagaatgactacaaaaatcataaaattttgtactacatgaacaagatatatcaataaaaaagtgctagcaagacactttttaacactttttttcacatactctctctgattatgtgaaatttatgtaaacgagtcattctcaaattatgagacatgaatttctaccaatagaaaagtgtgggttagaagttatgttgttagtagtcctcttgtcaatatataaatgtaatattacatggatcctttggcaacaggtttggggaagaagcaggggaggctactgagcatgtgtttgc

SEQ ID NO: 2517 - DNA, 956 bp, Glycine max
actaagagcaatcacagttgtgatgcagccccaaatccatctctgcctcctgctgctcctttgcctctcacaccgtgccatctctagacaagacagcaaaaagcataaatgagtaacaaatttatcaagctaagtagaatgggacattagttggtcatggattcgaatatagaaacagccttttttgcatatgcaaggataaggttgcataaaatgaccctccaaggtacccatgccaactaacaagcaggcatttccctgatgtatatattaatagaatattagggcataatcatctagtcagtagaggtcaatggcaatggttcacaatatagacataaaaaaaattctcctatcttggacaatggactcactagaagtaaaagtagtttaaaaaatgcaggttttgctcacaatgacagctgaggtttattctcttactgcaacgctgataacaaatacctcccaaaagatcacatcaagacaacataaaatttgtgccaaactagcaagtgaacaactgtcacccctacaagtgtattattccatgtgaccaatatttttttataaaacattccatgcacctaatgttcagaagtcattcaagcaaaccaaatacaaagttaaagctttaaagaaacatcagaaccatatagaatttatataaaaggacctaaatagtcaaacaccatcacacgttccaaacacactttgcaatagtaatatgtttcaataaggtttaatggctgcaaaatgtgttagggattttttctattataggaataataatccatacaagccttaagccataagctcatactatctctccaaattataatgattcacattattattatttttttgtgaaggtgggatgagggaatgccataaataattttcaaccaccaatcaccattcattatttacaaaatcataaccatctgcagggcatgcaa

SEQ ID NO: 2518 - DNA, 850 bp, Glycine max
ttacgccaagcttgcatgcctgcagttccctctcgatgtgtgatgcagcagccaatgctattgcttcatcaggaagacgactcattgcagatgaaatattagtcgggtgtgtttcagtaattcctaaatgttttagacggtagaggctagcttgcatgctttcgtaagcacaaacctaaaaaaatttataacaaaaacaagacaaagaagaaaccatattaaatgaagcaatataacagatagatcttataacaaataaacaacaaagcaattaattcactttcaacacacaaatgcatcccaagctaagcagcatgtagattacaaaccatcaaacttacaaaatcataaaaaataatagaaggcgagcatacaaagcacactgagcatccaataaaatgcattattgtttggctaaattactccattggtccctctctttatttaattttaagggaccaaattgaacaaattaaataaaaagaggaaccaagagagtaatttagccgtattgttttttgaagcctcattttttcaacaacccaaaagcatcagatatgaaccaaaaagaactctacaaatcatgctgttgagggattaagttttacaatgcaagttccaaatctccattgcatgttttaaagatgatttattttgctattaatagtgcatttcaacagaatgacatgttttaatttataaatgaaaaaacagaatgtcatatgatataacttacaagctctggtgtaaccatttttctcaattcatcctctgaccaaatgcgaaaatttcgctttttaaccaaaattgactgtccatttgttcccctctgcaggcatgcaagctggcg

SEQ ID NO: 2519 - DNA, 903 bp, Glycine max
tgacaaaccaaggttattgaacaaccaacaaataaactgtctttttggtactaataaatcgttttctgcttcaatataagcagacaagcaggatgacatgtatgtatagtttataacaaagcaacatctagaaaagcaaagacaaatccaaactatatcttcaaaaattcttaaggaagagatacaaatctgatttagatacaagaaaatcaagaaataacaatgctttacattattaaacataaaagaatatcttgaactaccttcttttgcaagagcttcttccaattgaagtcaactttctcactcaactcccacccataattcctggcatcctgtcacaatcatgcttttaatggatgatgatctcagaaacacttaaagaatattacaataattacgaaccagcatgaataaaaaatacaaagaaaaaaccgatacattttctgatggaatataaaattaaatcacatttgcataacatattttatgagaatgtgaaccaatcctactgtaactacatcacatcagatctgataacatatacctttaataagtcctagtagcttaagatgagacacatgtcctgaatttaatgtagtacaggagcactgagataagataagctttaaaaacaaaaacacttctacgattagatttcttttttaaactactatttctagctttctgagaaacactaaaactgattttttttttaaatttcttattttccaaaatttatccaatcatcataaaaaatttcaaagttattatttaaagatttaattattctgtgggtccccacacttctaccaaatttcaattaggtccctgaacattttttcccttcaattgggtcgtcatgtctaattgtcattatgaaaaattaactgcaggcatgca

SEQ ID NO: 2520 - DNA, 773 bp, Glycine max
agccacctgacacaagtaatttgaaaccttgatatatatataactagagcagtttactgatattccaattgaaaactgaactgttatgactttgagtacctgataaccattgtgcttgattagctcctttattcgttcgactatataaacaaatccattctcatcaatgtaaccaagatcaccagtcctcaaccaaccttctgaatcaattgttgcacttgttgcctccaaatttcctagatatcctttcataatggtaggacttttgaaccataattctccctctttgtgaggaggcaaaggcttccccttttcaatatctacaacttttgcacaaaaagttggaatcaacttcccacatgaatctggatgagctttagcatctttatctgaggcaaaaaatgttgctccaccactactttctgttaggccataaccttgcctcagttcaatccatggaaacatccttctaaactctagtgccacttccttgctcaaaggtgcagcacctgaccccacccttcttaggctggataagtcacacctagctttccttgcatgttttactagtgcaaggatcactggtggcactgctggtaagttattcaccttgtgcttctggatggcatcaagcatagcttggaagtcatatttctgcatcaaaattgttgtaacaccaacacacaacaatcctaatccaaagaacacaagtccatagatgtgaaacattggaatgaaggccaagaaaacatcatcttgggatccacttacat

SEQ ID NO: 2521 - DNA, 848 bp, Glycine max
atatgattcttctcctcccccactctcaacaccaacactaacctgttcattgcagttggttgtcactctgaactcttgttttggctcttggaggtattccaaggacaccgagacacctttccccttctgttgggcctccatcatatgtgcaatccaggatgatgatgatgatgactccatttctttgccaacgggcggcaacgcgattaattcctcctcctcctcctcctcctcctcctcctttcccatgacaacatgcaaactcctgcaagcttgttgtactagcatagacaaggagttgagcatctgcttctgctcttgggtgtcatggcaatcctttggcaggaaaaactctaacacaaaatcagcggagtcactcaggagtggaatggccaccgcagcatgcaagccaaacatgttagcatggtgcgccagaggatattccgccttgctgaaggcagttatgtcatttgcaaaacaaggtttggtggttgtgaaagctgtcccaactactccttgcccccccaaaaggtgacactcagagcacgcttccaggaaacccagtacctctacatccgccacaaaactagcaggatccaccatcgacacataattctcatcgtttgaatgcccacatccactctttccttgttggatgcagggagcccatgtgagagctaaaggcaagttatgcgccttgcatacacacgtcaaaacttctactatctcatttaatgcactttggtacaactcgtcaaaaccctgttcagatgtatgatccattacaatttaattcaattattcatgcagcctacttatatacgtacggtacgtaccttcgcggtcac

SEQ ID NO: 2522 - DNA, 874 bp, Glycine max
actaatatacacattatacgaataagctacagtttcaaaaaattgtgaagattcaaggtattcagaatgcgacaggaattctcatttgtgcaatgaagattacctgattaacaaatgttctctgaaaggggcttttatcagcatttaactgcaaacaagaaaacagtgcccataagaactgcaatcatgacagaccatagaaaacatttacacccgcaacatccaatcaataaaatttagaaggccaaaaagtatttctactatacaaggagggaaaaaatttagtttgaactttgaatatttcttaaatggccatcaaaattgcacccaaaatatctttataaataggaacacagaattgtatatgatatatgatattacaaagatgcagcattgaaaagtcaaaaaatatccccaagcgtttgagagaatagaaaagaattggaaaactaacataattccttttttaaatccagcatatccaataatgcacagcctagatcttgaactcaaaagtgctacaactctcaagacatataccaattctcacatgttgcgtggacagatctctaccagttttaaaccaactactgaacgagagtcctcttataacattctaaaacagatgctaatgacatatactaataacaacaacaacaattctaaacaaaaatagtccctgacacaataagacgtgagtaatgaacatagtcaaccataagtgaaaccattatgttctgaattaaattactacaggaattcagagttaactacagcatttgaatacgcattgacatgatctaacttaacagggaagccaattaagaaggtttcaaaagagagtagtgatctactaggtggatgcaagttggaa

SEQ ID NO: 2523 - DNA, 933 bp, Glycine max
aacaaccaaatcaattacagaacctctcagtgttctaggattgggccaagaatcacagaggacatgtcagatcagtggttttcaccaaaaccaagacaaaagttctgtcctaactcagaatcaaagatgggtcattaatactagaaaaagcaagctagttcttctggagttgtgcagcaagcattgcaattcagaaacagaggtatatgacttcctgacaacgaatatatataaagaaagcaggaaattcttgttttaggtgtgtccaacccatcaatgaactgagaggaaattgaatgtgatttcattgggagaagatgatgaacgagttgaagatgcagaatgtgagataattgaattgatggaaccaaattcaaatacggttctgaaaaggacactttccttcttttagctttgaggacaaggctgcatctatactggaaggcattgataagccaagttgtatgttaggcagttacaattctgtattaggcagttgtgttaattctggattaggcagatatgttttaggatgtgacagttatatatatggtttgatagacttgtagggggaattaaggtgtcaatttgttgttaatgtttttgaaatttcttgcatggggaaacccttgtgtgctgagtgcttgtaccgcaaatctggtcagtaaaccagattgtttctgtaatataatcaaccactgttttgtgtttctaattctagagtcatacatcagtgatattaactgttaacttggtagccatgctttttttcttatgaaaactaaattgtcataaataaatagttagaaaaccaacttacctccatcatcccagtgtgaataactgaaaccatcattggattaactggaagacatattgcagatgctgccatcagtaactttggattctcatttcggagggccattgacaaac

SEQ ID NO: 2524 - DNA, 953 bp, Glycine max
aaagtcaaagatcagttagcaacaagcatatcattacataaaaataagatccgcaaagaacaaaaggactaaagaacagataacaatagtcgtatcccactagatgaggtcacccacatgaaacacacaatgtcattagactccattaaaaatcatattcttgggaatattattcaccatgagatccctttttaataatttcctctgttattctcattctccctttaccctttatcacaaggttaaaaaccatgcaatcaactcttctcaccagtgcctcaagtggccttctttacatgtgaccaaaccaccttaaccaattttctaacaagtgtcacataaatatctcctcatatacaatcatcttgccatttagtactacatggagtttagatgcttgtaatttggttttcagttttaacaacttttttttttttattagccaaaataatctatttgaattaattgagtaccagaggtattaaaggtacaaattacagattacaactctgctgtagttcaaatcaagcaattggttgatcatatccagaaagtaaaccacataatgagactaatacaagtatgtggcctagattcctatcctcaactacaccgaaatccttctctaagatttgaagaccactgattatagtgagatgcaaaacccttctctaaatgtttcagccaagtccatagtaaaaacactgcctcatccatcattttatttgcattgagagtgttgttggagaaaactatgctatttctgtgcttccaaatagaccatgtcaatgctaaccaccaccatttccatctagtcgccatcaatccttcatgtgtttgatgcatgtgctggataaaatgttgtcttgggtggtgtgggaagacacccaccagattcacccaagacagcgattcccaccaaagcggaagtattttgctgcaggcatgcaagc

SEQ ID NO: 2525 - DNA, 859 bp, Glycine max
gaaggattaaaaggaaaaagaaactgtcttccccattgttctttctcaatagttaaattcgcttatttgttagtcttcatttaatgtactgatgcagtgctggacaacagagacattttataggaaaatcttcaaaatattgtgccatgaaagaacaagtagaagtattgttctccctctagggatgattgggttggtcaagttcaatggccttcacttcacctaagtgagctctaagaaaaagacccccaatttagacctacctatattgctgtcagttaatataatgtgtgaataactgcccaatgtgctagatgatgaagaatgaacagaacagtatgagagacagagagagaaggaagagaaaggaagggggaggagggcagtgtacagagaacagagataatgactcaattataatataccaagtatctcactcaaaaataacaaatgtaaaatagtcaaatagaaataacatatttggagactacaaataggaaccatcagaaccaatagtgtcatatcatgaatacctgtccttggatgcccatttgcattgcaactattgggtctaaaatcaccccccgaattgggcaacccataaggtaagctgaaatgtcataaggatggaccttgtaagatgtaatatatatggcagcacaaagagatcggcaatcaattaatcaaacatgatccaaaatgtatatcccccatacgtgaccatcaaaatccattaaaataaacaacagtatttaacctgttagtagatgtccagcttcatgaacaagaatccgacgcctatatggtggccagtaacttgagatttgagctaagcaggtaccacccagaagtatagcat

SEQ ID NO: 2526 - DNA, 935 bp, Glycine max
aagcattttattttagttagggaaggttcaaaagaggatgatattgaaagtttatgaagtagtttgtttaaacttatttgtagaaataagcgtttattttaataaaatgttttagtgtatttgtctaaattgtttctgcttaaaacaaaagtacttattttgaaaagaaaatcttatctgtttcttaaaaaaaatacttattttaaagttgctttttttaagtttaaacaaactcatcctataactagacaaggcatatacagtaccaggcagagcctttccagaaatgatgaaaccttagcatacctgaatcggaacttgaacggattcttgaatatggtcccaaagtgttattttcagagcctgaacattgacttgtttgaatgttttgtcatactggacttcaactttattgatctgtgttatttggaaataatcatacttatgctctaactgcaataacttttggcaaaattgtgtatggaaagtaaaattaatgaagaggaatagaagaactcgtgaaagatattatccttgaatctgcatgtatgaattatgaatttatgatacaatcatacaataaataatcatatatcaagagcaacagtgttaaattattctataaaaaaacagtaaacccacctgacgtggctgagaaataagtgaggtagagtcatccatttcactatgtacatcagtaacatcatcatcacaaacacttccattgtcccaggaagggaatgattcatagttattgcattgttctcctgatacatctgcaaattcacctgagttttaaacgcaatcagtaataaatgaaaacactctaaaatgtcctgtgtattgacagacaatgaatcagcggatataaagaaaattattgagatcacaatagtacattttacctgagagctttcttgccttcctcccaatgc

SEQ ID NO: 2527 - DNA, 897 bp, Glycine max
tcttgggccagacttgcatgcctgcagctggagttaatcgaacacagagttggggatgcaacttggttgcattgagtggcgtgggtggccatggcatattgaagagttcaaatatggatggataacgatgaatcatggaaagtatggaacgaggcttagaaagacaaagataagagcggcattttgacaaaatgtgaagtggaatatagtgtttaggtttagagagaagtagagtttttaacttttgaacaaacctagttttgttcttcatgacaacatgcctgtcgagtgaacggtcacgcacaagtttgatagatgaacaagaaattgaaactgagacattattgagataattacggggttttagttttttattcatagaaagggaaaaaagtgttgttccgccaagaacaaaggtggaacttagggaagaacctggtttgggattgttgaatgagagaggaacacaaaatgccatttttaacgcttcaacgaatcaattaccaaacctgaaaactaacaaagaaaaaaataataattagacgactcaaatcgtaatgagatagaacaccaaagtctgactgaattaatttgcatggcaggtttaattagaatgaactttgtttcaattgcacatcgcagtggccgcgattccaaggaagcgtcgaacttatctttttttttaaaattttccggcgaggcagagacgttttgcaacttccggcgactggcgaggcagaaagagttaaaagaggaaaggagagtcaatggcttcttccggtgaggcagaaagaaaaagaggaagagattgggctcaaagaagtggtggctgataataggacaaatagaaagaaactagagtttcttactttcttttgcttttggggtcagtgggta

SEQ ID NO: 2528 - DNA, 873 bp, Glycine max
ccacattcatccaaccatcagctgaaaagttattcaaaactgaatcaagtgaatgcaaatctagctgaacagtgcaaacctgcaaagttgcacactggaatttcctacccaatgcatcagatacactgatgtctatctttggtccatagaatgcaccatccccttcattcaactgcaaggttttacacagaatataattgaattgaaatgagataggcaaactacactttttgatatctaacatgaatttgttctaatcagaattacagccatatgttccagacaatattctaaactatatatcgctggcaagaaacattctagaagacatatagaagaggaaataattacctgccaaggcttgccaaaatcatctaaagcttctttaagagcactttcagctttgtcccaagttgcaatatctcctaggtatttttctggcctctactcaaatattcaacacatgcaaaaaacaaataacaaaacaatattaaagagatgttatctttaattgagagaaaaaaaaaagtattggtttgcacaaactgggaaccaggatacaaagacaacagaaatttgctaaaggagtttatatgagtatcagtgattcagagttacatggaagtgatggaactataataaaagtccccacataaagttaccataccaaaaactaataatacatataataatgaatgcattgattatgcaaaatttgatccagtgtacttaaaaagtgattcactggctagttattatcataaatacatgaggacccacaatcaaaattctatacatctttagaaatttaaataagctaccagtgaactgagtgaagtcataattataatttaatctactgcaggcatgcaa

SEQ ID NO: 2529 - DNA, 934 bp, Glycine max
ttccgatgcattttccatgctttcattgctttgatggttgtcattctgcttcaatacatgagaatcatcttcacacttggcatgtgaacccatctcttgatctacagttctgattccacggccacgacccctaccccttcctctgccactgctatgtccaggctctggctgtgcaaatcatgaaaaaaaaagaaggttccataattcagataatatttaatattaaacagctgccaggttctttagtgccaattctatagttttcagcaaaagctttcagaaaaccagacagttttggtcctttgagtggtaagctttaagttgaagtggggcctagcctcacagactattagacatttagatgtacttgcattcacaagccactagtgagtttccctattgactgaagtaaatttttttgtatccagcaaaaggttcacagtgtgcatggacaagagataattacccagcaaaaggtttaatcacacaagaaaaagttaagctaaccactgatgaagtaattgaataaagttgataaattaccttcttatttctcttgagttcctcgtcgctgtcattatcatcatctccggcaactttcctaatataaagtaaacaaagttcagcataaagaaaacttgttccaagtaacaagagtattattaaccagagcacaaacctcctcttagtgacagcatggtcatcaccggttgcaacagaagagcctaaatcaggaaccttgctgacaatatctttcagaaaatcaaagacattaaaagtctgcacacactgttttctgcaaaggcaaggatgctagtaactcagacattttagaaactggaaagtgaaggtaaacactagaacaaacagcacatgttccaaaagcaagaccatcccaacattttctactgcaggcatgcaagcttggccgaaa

SEQ ID NO: 2530 - DNA, 810 bp, Glycine max
cttgtataaatgatagaggatatcttttacctgaaaataaatgtttcattttacaagctaaatataagacaataggaaaaagtaagtatattatacacagtgaaagaaaaattacgatatagttttctaggtattaggataccaatctgaaatgagtagatttgatatattcacaaaactaaattggagctgtgattatgttcaatcaacaagatactcatatattgtaataatatcacacaagtcaaattattttaaagcatcataaaagtagtttgtcaacagcagattcgtaccattccccccctccaaaaaaaaatggcataaatatgtaagcatgactcattagcttcttatatcaccaaaaatatgccatctctccaatctctctttgcaaaaaataaaaacggaaaggaatttaattatgttgcattctgtcgtaatcacatgctagtaaaatgagatgggtacactgttaccaacatcttgttatctttttattagaaaataaaataaaaacaacaaacaaccaaacttatccacttggttttcttcccaactgtgcatgtgctgatgtgcattgcagcctaaagaagctattctgaagttgcaataatcattcaaaatttcttaccctccatgttcatgaaattaaaaaagaaatggcatacataaaggatactgatgaggtcaccatcaatttacctcatctttcatcatgttcgactccttggaagctgaccaagctttggtgatcatcaataccaacgttgaatcaagttcttttttttcagccaaattgtctatctt

SEQ ID NO: 2531 - DNA, 907 bp, Glycine max
  misc_feature (898)..(898): n is a, c, g, or t
tacgccagcttgcatgcctgcagaacctgtaggttgtagctacttcatgaaggaattcagctgctagaactcaatgctcacttccatgcacggtaaataaccaaagggaacgatgaaattaatacataaacctaaagataatagtttacagcatgacagtcaagatgagtgaccgcctataaagcctcatttttagatggataccatttttttttttatctagtttatataaataaaaatttatataattttaaaattatataactattttattataaaaaattaaatatttttttagtaaatttcttatagggagacaattactagtaattagtcaactaacaatgacgtttccacttaacaaaaatctatccacaattttgggaagaaaaagaatcgataatttaagtatagcgttagaatgtgaaagataaagtatgatatattatcttgtttcatttatattagtgttaacataactatgtaaacaaacatgtcgataaaaaaattataatatttatgattcaaactttaacaattgaactgaaatcaagctctaagatattaaattatttcaaaatacttaattgttttattgttgcatatgtaacttataaaataatattaattattgtttctacttttgcatacactaaaagaaacttatcaaatttaaaattgttaaaatcctatttgaaatttattgtcacaaagtaggttccataattttgctttgatttctattgaatttatttttttaaatcttacctatgaataaattattaatgatttaaaaaaaaacaaatataaggataaaattcaaatgattacaaaggtacaatttttttcaattttctcataacataaaaaatctcatcagccctgcaggcatgcaagnctggccgaa

SEQ ID NO: 2532 - DNA, 890 bp, Glycine max
attttaccctgaggttttgccatatggtgaaactttcttccatgagccagttggtagagcttctgatggtcgccttatcatagatttcattggtatataccttttcaataattctcatcatttttttgctttatttcttattcatttatttgtgaaacacgatcaaatgacatgtttgctttttctatctactttgttttctttttctttaatcatcatgtggtgtctcacaacacaagctaaatcttcttttctttgagttttgttccacaaagattggattccagtttgtgttgttattggagttataagatacatgtggttgaagggagaagagggaagggtgatggaggtcatgagttagaatcttttttattaacaaaaattaacaaattaacaactaatatatattgactgataaaaagaattgtgttgtcattgactaagtgaccaacacaaacatctctacccaaatgaataaagttgggattcaataagaatgagttgtgaaatttttttacacaatatctctgtctaccattatctatttagcagccatagaatcctatgatggtcatacttacaaagtggtacataaaaaatataaagttttcacgaagtgaaaatttaatatgagaagatcataatatatatattaagggatctagttcaattagttgaagtgtatataagtattgtaaatttcctcttatcgtgttcaatttctgcatatcaaaaaatatatcataatatatatagttctattgccaagaaactatcatactagtgatttggtgccatttgtgtttgcagcccagcatctaggtttcccattcttgagtgcatacataaattcaattgggacaagttataggcacggtgcaaacttt

SEQ ID NO: 2533 - DNA, 882 bp, Glycine max
aatgaacactaactggtgtggtttccacatcaggaactgtgaacatatcttcatcactgtcttctggataagtaaaacagttcaccaattagatcaccatgcttaatgtgcatatataaaacattctctttactgccaaaaactcttacaattagaggaataaatgagacaaaaaaaaaaattctctttactttcttgtaacattcaaatgatccagacattctttctttatttccattttgtagaaaaaaattaaccctcttaaagaaaatgaaaaaagaggcaaataactagcatatatatatatatatatatatatatatgatgcatttgaagaaggataaaattaagataccattctttagtgacatgtgatttctcatccaaaatctagtaggttttaaaacttgtttacagaacaagtgtttaaaaaaaaaactgatttatattttcttatcctcttttgttttcttcaagtgctcaaaagacaaactttacgaaatcagaatgtttcagagacaaatactttcaaatgtaggtacaaacaaattttagaaaacagaaaactacttttgaaaatagtaaacaaatcaggcccaagtattttttttatgctactctttaatcaaaattagagtttgatcttaatgttgacctcaattatgcgggttatggagatgagactcaagttttaattggagaatcccaccaaattacctaataaaattgcccttaaatttagtcctttgaataactgattagtgttatgttctgttccataacacaagaaagaatgtgtcacctaccaattttgctactcttgttgtgtagagacaaaggagggaaagtgtgtagcctattattccatgaagaagaggatga

SEQ ID NO: 2534 - DNA, 797 bp, Glycine max
cacgccaaccgaagtgaaggaaaggattttgaagggaaggatggattaacttgtaagccacctgggttttctgtttagtttggagttgaatggcatgacatttacaatcctttgttaaagggtacctttgttattgtggctctttagataaatgtaccctgaaaattatttatagacggttcacttgttctatattttagattatcagtgaaaggaggagattcttgagttgggcatgttgtgagtgatctattggaatgtttttcagtgcagactggcatgcaaagcacgataatgatactagaattgcctcaaatctatttctcctgtttttccccccttcctttcatgtgtccttgaatagattagtttcgagaaataaatgtttttttttctctctcaaaaatcaactcaaggctaattaaaaaataaattatattttttaacaaactattttaaaaaatagtctaaaaaagttagtaaaaaattatttttgtataataaatcaatgggttcaaatgataatacatattgattatgtgaaaaataatctgactttgattttctagaatacaatcttggggaggaatggaaagttttataactaaattctgaattgagaattattcttatagttggtttaaaggaccgaaacttttggaattaaaggactgaaacttttgaaaatattttagagttttaccagaaagtcaaaatattcttattaaggtgattaaaaaataatttaagcaaaacatctagtctaactctaaagggcaaaaattaacacgtattat

SEQ ID NO: 2535 - DNA, 822 bp, Glycine max
agtaactctttacaaccaacttcaggagaacaagaagcaaggcaatgatcttagagaactaaaggggttgttctgctcaaaaagagaagaatgtagaatttctgcttctatagaggaatgcttctaattatagattggattcaaattctttgtctgtaatatggccttcatattcacttggtggtgtaaatatgtttccttttgtagcatatgcgggccaaggttttggtggaatttcttgcataccgatttgaagttcttttgtctatggtatcgcttactcaagcaagcacactgctcttgttaatgcttaacagattaaacaaatggttgattacatattttttttcttgtacaattattttcagtagcaaattttttctatataatgcttattgttcttatcataggttattaggatggatctagaaaatttggatagtgggaaagaaataaaatcattaaaatcataatttttttttcgtatcagtatgaaacataaacagaatattatgatgttgtattgatacacaatagattattatgatgatgatgtattgatacttactaagaaaagacttggtatgttactatttactacaataattgtgatttacttgcattacatgagtttttattttttcagaactagaaatgtgtctaataactgattaagcaatcagatctcccatttataacaaatccatttttttataatattcatggcagaaagttctttcatttgcaattggttataccaaatatatcttcaaaactgctggaggtccccctgcaggtcgatcctagaaggttacgacgggt

SEQ ID NO: 2536 - DNA, 916 bp, Glycine max
ccttcgccagcttgcatgcctgcagttaaagcagaaggcaagctgtgtttttgtctgtatttaactttacatggagttttgtattacatgttctttataagattgctacatttcttcaattcttctgcaagttgttattactttttgaccttgttaaacttttatttgaagacctgctaaaggttatatactctggatgcttatagcatggatatcagtccctttaaattgatttctttactttccatctgttatattttttacattctgtaatgctcctatcttgtgaagctgccatagtgataaatttgtacaaaacaattagaattgaccggtgaagcaattctggaattacaaaaattgcagtttcatgaaatgcacttgtctgtttctacatcaattctagaatgaatcatttacttttgaatttcagtttctaatttgtgcattctgtttcagtttgatgccttaaaaggtagtgtaagacacttcagcttcttcccaccaggagggggaggtatgttggcacattctttggcacatctagcatcctggttgaaggtattcaattaactgaccagcatgccatttccatttaaggctgtgctttatgtgaaaacaaaatttatgggagaagtaataattggtggccatttagacataatacatgctttgatacattaactctgtttatttcttcccccttgccctaactcgttccattttcatttctattgagctcatcctaagtccaaggaaagatgtatgtttgactttggcatgcactcaggttagggaagacgatcaatcaggtgatgggatcgaatctgtgatcaataaagttgaagtttatttggcagaaggaaaacttgctgaagcagcagattgtctagaagaaagtgtgagaggcacacaa

SEQ ID NO: 2537 - DNA, 928 bp, Glycine max
acacacacacttatggtatgtttgtatttatgttacatttatgttgaacgtaaaagtttgagtttgctttggtcacacatgtttatagctttggaatgtgagaaattgtttgccaaagtgtaaaatgggaaacgtaaggtgttcacacacttagcattcacccaaaaccatggtagcaagacactcttgtgttggcaatgttacatgaattttatttagagataaaataatgacaggcaataattgcatcataagtctcaacaaataacctcaatcaaggacagattgaggaggagacaaacaattttttcatgaattcactactaagaatacaaagttcaatgaaaacatatctgtaacgtgccaaattttcatgaactcgctatttggaggagtaataagttcaagaaattttacatgatgtgtgtgctaaaagatttgtctgaataaaaactcaaggtcttttatcatcctttgtcctaacaactattaatttgctacgcctaactctattattacataggtgcaagctacggtggtcaaatataataatttgtgtatggtatacaaatttttttagccattgaattcatcaaagtgcataatattatcatgaaccttcccacatcataacatttattccagagtgccttgtcttctgcatctttcatgatgtcttcagcaatagtgtctctgacgaatgacatagctttgaatgctgtagcagattcatctctgtcactgtcacatatttgtcttcatcgtggctttgccgttgtcgcaactttgcctcagcttatcaattttatgaaaaatcaattgttatccactgacatagcttggggaacatgcaaacttcataacaaattattcctagaaagttgaatctgtgagcatttgcaacaaacttattccccaaattaatcaa

SEQ ID NO: 2538 - DNA, 938 bp, Glycine max
  misc_feature (931)..(931): n is a, c, g, or t
caagaattatttcaaaccgctgcttccatttaagaatccttgttatgtccttttctgcaaagtagattagtatgtcacaatttgcatgttggctggttgattttatgaaattaggaagggttaaatatatttttagtccttgcaaataggacaatgctctcttttggtccttcaattatgaaaatgtgtcatatatggtcttatttccataaatgagggaccaaaagcagatgatttttatatgaaggacaaggattacatccgacacatttttataaacgagtgactaaaaagaagcaatttacttgaggaactaaaaacatattcaacccaattaagaaattaatttgaaacatagtagtacaatattttcattaatagttattatgagagaaagggaacttaccaaaaatgaattgatctaagctcttgttaggtaggtactcatacacaatgaggctctcagggccttcaatgctacagcccaatagtttgacaaggttcttgtgttgcattccactaatcaaattcacttcattgaagaaatcatccacccattgcctattattgaagaccaatctcttaacagcaacatcattcccatttggcaaagtccctttgtatacagaaccagctcctccttggcctatttttcttgaagagctgaaataatctgtggccttctcaagagtttcatatttgtaattcaagctagaattctttaaggaaggaggaacctcgataaaattgttttctgagtgattcaggagaaaatggaatacagcatcagaaaaattgccaaacaatcattccaaatatatcttattggtataccaatagtattctacagaacattactttttctctttttggtgaaggccacagaagaggccgcgagcgtgagcactacaacagctgcaggcatgcaagnctgcgaa

SEQ ID NO: 2539 - DNA, 811 bp, Glycine max
ctaagacgaccttgcgcgctaagcccaaaagcttctctggaattttaacattttgaattgggcttagcgagcagatgcactaagcacagggcttttaaaactcaaacgtcatatggatacactaagtgcaactgtgagctaagtgcaccatacgaaactgcaaaaaattataaggtactgccttaggcagttaccatttcactcttgtgcattaaggcctcactacatctgtcctcaccttgcttcatctccctgcattcctgcactattgttttttttttttttttttgcattcatctgcacaatccaagtaagtttcttcactttacttcattttcattctaagttttcaaccttaggatagataacttagtgattgttaggtagaatttctggttatgcttagtgttaggttagttgttagttagcatagctttagggttgtactgtagtcaaaatgtgcttattttgagtagggtttgatggcctaataggggcctaagtgagttgctgagaaagcccttgtttttctggaaatcgcgatgagtgcgctaagcgagttcattgcttctgttgaagattctggatttccagatgaacacactaagcccagctgtcgaactaagcgcattcatcttctctgttgagttatctgttgaactcgctaagcacggatgtgcgctaagtgagtactgtgtatcaaacacttaggattttgtgtttttgttgggcgctaagcgtgcatgtcacgctaagcgctataatgtctctgttttaaaaatttgtggaattgctgctcgctaagcccatt

SEQ ID NO: 2540 - DNA, 897 bp, Glycine max
gccttaaccttctccgccacgtgtggcgcatcaagaaccacctttgaagccagatctgctgccggagtggaaaaagacaatgactgagaaatcactgccgaaggcggtagcggaacgagaaactgattcaaaaccatcttcgcgttggaagattgctgctccttgagctggaaattgcagtagcactttgagcacatattctgcgtggtagggctgccaaagaaactgcaattgttggcatagaagcacggtgcttgacatctgtgttcttctgccattttttttctcgatacctgaaaaacgagatccgaaccgatccaccgatgagatcacaaatttcaattttcgaaaccctaaaataaacgcagagaaaaaagaaagaaagattattattattaccgttagggagaaggatgaaagatgattattagggttatggaaatggaaaatcaagggagaaatgaaataaagggggaaagggagaggtcagtggttataagggaaagaaaagaaagggaaggaatctagaatttgaaggaaagtcccaaagaaaagaacctgcacacgcacaaaatacaccaatgaaacaaaaattccagatatgctttcttcttctctctatctaacttttttcttcatgggtttctattcgtttgtgttttgtaaccaaacagagcacaacgcaatagtttctttatggcttgcggcggtaggaggacatggtttttgttgtggtggctgtggtagtcgacggcgtggttggcagtggtggtgcaatggtggtggttccattggagaaggggaagaaggagatgacatgacaataatgtgttagagagtaggcttgatgacgtaacactccatctgtcacgccatcatttaacagaatgagactaa

SEQ ID NO: 2541 - DNA, 834 bp, Glycine max
aagttcttgcaagcttttctcctggagacataatttccaagtaacttctctcaaaatatatcaagaaaattgagatacaggaagcaacaaaaagaataaccataaattgttactaaatgccaaaatttgaacaaatttatgccaaaaaatatacagtgacaaggaataataagaaaagaagaaacaaaaattaaaaggctagaccatcctctttactctattgtcacaactatgaaatagcaaaatacgtacataaggcatgacttctttcatcctttgaagaagtttttaaaaaataaatttaaggaaacaataaaactacaaagaaaaaaattctaatgtatgactcctgaatagaagaaaacttcatcaaacatcatattatagaccaaaaagcatgcacacattgagaaaatacctctgtcatctctcttctatgcatgatttccctacaaaaatattattatattcaacgtccagaaaatcacgctagagtgatttatggccttcacttagaaagtaaaccataaatccatatcacaatttacaggtgcaattagggtcaacacgggagcagaagatttggctgattgcagagtgagagagagagagatttaatcagaacatacccagtgacagatttttctatccagcaggtcatccacaaatggaaaaagatatccttcatactgagcaatggaaacagcaacatgaagataagagtttactcgcgaagaaagtgaaaaataatccgcagtattcactatgtcaattccatgtggataattcccttgtcttccaacattctcttgaaaagcagctgctgctgctctt

SEQ ID NO: 2542 - DNA, 855 bp, Glycine max
ccatcaagcagccaatcttcagttgcaagtttagtaaggacaggtgatatgaaattcatgatctattttactttcaattgtgttgactcttctaagaaatctttagaagtcattatttagttgttctcaaataacttgcatttgagttttaaaattgaaatcaatatcatgttttacaaggtttttcttctgtcaacataattaagtatggatctggctcctctaaagtgaactcactttagagagtgaagtaacaaatttttcaatcatcaatgagaaaatcaatgattaatattatgtgcacgtgcattataaatcatgcacgtgttagaatatcaaccattgatttcttcgtcaacaacttagatttgttactttactgaccaaagtgaataactcgctttggaggagccaaatccattacgtataattttctttgcatcctgaagcatggacaaaacacttataccagaatgtctgtgtggactgatgtagttaaccagtctcctccaatggaagcttaaattatatttcataaaaacatgacgcctgattttgggaccaaggaattaaatcattctctcaaatcaatatttcaagtaggaaattggtagtgtgttttcttcgttgtttctttgccagttggttggacctaatatctgtaagacctgcaacacttgtctaaacatttgttgtcaataaaactttcgatagctatggaatgacagggtttcccagattgacccgttgagcgcatactggtcaggttctaatgacatttctgacttagagacagagaggagagaaagaaaggggtggaaggtgacaatacatgacctctctggctcggctgta

SEQ ID NO: 2543 - DNA, 878 bp, Glycine max
tggaaggactaagcatgaaggagccatgcttttgtgacagaccgacaagttcaagcatcttctcttcttctgctcctccaccagaggctcccccaagtccaagtaccccacttcagcatccacatgaaaagaagaaacagctatgtgttgaggaattagaagaggaattagaaaataaggagccaaaaaagcagcatgttagtgttacccttttggatctgaatattatctcaggtggtgaagatgaatcatgcactctagaagaaggaccagaactcaaccttatcacttgtttggatgcggggtcatcatccgataatgcaaattcttcatcagaaacaacaacaacaacaacaacaaaccctcttggtaattctgatgctactgagcctagagtgttctcttgcaactactgccacagaaagttctacagttcacaagcactaggtggccaccaaaatgcacacaagagagagaggtcaattgcaaagagaggacacaggtttggatctcagattatggcctttggccttccccttttgcatcataacaacaacaacaacaacaacaacaatcgttttgcaagcatggcttctctacctctttatcatagcaatagaggaactcttggaattcaggcacactccttgatccagaagccttcttcttcttctcatcatcatcatcatgtgaatggttttggaggctcttatgcacaccatcatggttggtcaaggccaatcattgatcaacaacccggaatagcaaagcttgctgtgccagattttcatcacagaacaaaatcagcattatcagcatcacaaagcagtgttggtaggtttgaaataatagttaatagtagtaataccatgttaatt

SEQ ID NO: 2544 - DNA, 949 bp, Glycine max
agtttaatgagttaagataaagcaggaatacaatgaagaaagacagtagtaaatttgttcaagactccaatgacctcgacactggattttcaggacaataaaccttaattaaataattttctatagatcataatgatgacttgaatcccaagcagggacattcaataatgaaagaaagaactcttgtttacggatctcttccctttttactttttagtgttttctttgtccttctttactcattccataatctacttgaagctcagatacagctgaccagcactccagcagttctttttcttattttagttgataaccatgtaagtagttgctatgtatataaacctaggatgatcacaaaggagactggggacaaagctagaataaataagatgggggacctaatatgaaaattactttattgaagggggcaaattaattttgttttagaaaaaaagctacatgggaagaagaaaaaaaattaaaggggaaaaaaaggatgggaacaatcccctcctccaagcaacatttcacatcccctaaatgagaggtaaattattaccagtcattattattttatctttcttctgtattaactgttgtcatacgataagcctatgtcaaatgtttagctatccaacacagtatggattgattctagaatgaaagtcttatttttcaagatagggtactgcccatcaatgactacagttggtcgtaaacctatcaatcttcttctcaaaaagattggatataaaaaggcaaaaaatctaatactataaaatagggaaccaagtaactggcactctgacagtctacaaaccttttttccattggtagcatcaatttcagcatcctttccatttatttttaatacctgtccatcaatccaagatacctctgggtcttcaatccagacatgagaacccacaacaatattcactggagt

SEQ ID NO: 2545 - DNA, 945 bp, Glycine max
actttcgccagcttgatgcctgagccctgtcttacaaatttcaccaagtccttcctcccatcaaaatcatactgccaaatttcttttcatgagtcttttcattcaaaatcacacacacacaaatcaaataaagaaaactgctcaacatttcatgcgttcaacaaatgcaatgctgaaactaaaagccataggaatgtacaaaaaaaaaaaatgggaagagaagaaaaagaacctggcctcgaactggttcgtttaaattccagaaaacataagtctcaatcacatccaatcctccatctttggatttctgaataaggtctggccacatctgcaacattaccctctttaagttcaaagaaaagacacatacaaacacaaagaaagagagagagagagagtgaaacctctggagtactacgagggtaatggatggaaccagagatcaagaccctgcgcttgccgtcgatgactaatgctcgatgatcatactccacattggcgcagaacaacgtgggactgtgaatgcagagcaaccaaaacagaaccaacacaatctgtgtcgctctcatatttttttgtttttctgttttccagaacagagagaacggagcaaacccacaactaaagtaagaaactttttcagaaccaaagtggcaacaaataatgaggttgccttgtttgttaacacaatgcaaagcaaccttactttgctttgtgtgttatttgggtcgtgtctcacatgcgtgtgaaatgcaagtggaaatgatgttgctttgtgagtagatataaatggaaaataaaagtagttgaggaaatgacagagatcataaaacttggtgagagggaagggaatcaaatgggagaggaaggagagtgaagaatatagagccaggctaagcaactactatatatgtacatttattagttaattaatatttatttaat

SEQ ID NO: 2546 - DNA, 925 bp, Glycine max
acccgggtccttctctagagtcgacctgcagtagttcacgtatataacgatgttgtgtcatgaatataccagattgtgacggtaatagctcaacaccaaggaagtgacttggggtccccaggtatttgagggagaattgcttagccagggcacttttaaaggtgataagaaaatgggaattattaccagaagatcatccacgtacaccaaaaaatatgcagtaacaaaaccttgcttgtagatgaaaagaaacggctcaaacctggagttgaagaatccataggctaccaaaaatgatttaagctcattgtaccatgcgcgcggagcctgtttgagaccgtacagggctttatgcattttacaaacatgtggaaagttaggatgaacaaagccggtaggttgagatatgtagacctcctcagtcagtgttccatgtaataaggcattgttaacatccatttggctaagagtccagtgatttgagatagcaatgcagagcacaagtttaatggtctgaggcttaatgacaggactaaaggtttccttaaaatcaatgccccgacattgatgaaaacctttagcaactagccttgctttgtaacgagcaatggaaccatccggatttcgtttcaatcagaacacccacttgtgaccaatgatgttgaaataaggttgaggagggacaagagaccacgtaccattttcaattaaagttgtaaactcatcagacatggcttgtttccattcaacatgttggagagccttagacacacacgttggttccacggagtgtggaatgagatatttagttactcagaacagctacttgggtttggagatacccgcttttgctcgagtgatcattgggtgagttggtttgatggtagttggagatgccggaggagtagccactgcaggcatgcaa

SEQ ID NO: 2547 - DNA, 829 bp, Glycine max
agatctactggaaataacaggcctcaccagaaattgtagctctgccaccagaaaacttgcaggaaatagcgggcctcaccagaaattgaaaattaggggaaagattggctgacaagaggaacagacacaaggattcaggaagagaggtttagggctcaaatggagaaagggcgggagtgattcatgaagagggagaaactaaaaatcatgggtttgagaggtcaaattaaagacctgtgcaatttaaattttaccctttaaaaaaaccctaaaactccccaccggaaattatagctctactaccagaaaattcaccacaagtagcaagcctcaccagaaattgaaaaataggggcaaggttggctaacaagaggcacaaacacaaggatccatcatgagaaatttagggcccaaagggagaaaggacgggagtgattcacaaagagggataaagtgaaaatcatgggtttgagaggtcaaattaaggacctgcacaattttaaatttttaccctttaaaaaatcccttaaactccctaccagaaattgtaggtttgctatcagaaaacttaccggaagtagcaagcctcacctgtaattgaaaaataggcgcaaggttggctaaaaagaggcaaagacacaaggattcacgaagagaggtttagggctcgaagggagaaacggtgggagtgattcacagagagaaaaagtgaaaatcatcggtttgagaggtcaaactaaatataaagacccatgcgacttaacatttttaccctttaaaacgacatcgtttcacatgtatttttgtccttcaagtaaaaaccaaggga

SEQ ID NO: 2548 - DNA, 991 bp, Glycine max
ggtacccggggtatcctctaagatcgacctgcagccagcaaggtacagtcattttgtaccggaaagtctctagctgtcaatgatttgaaatatgacctaaaattgcctcaaactcaacatacactaacactactgttaacaaatgtcaacttttaaagaccccaataggattttatgtaagtcaggtacttaattatgaagcaaccagaaacttagttttgattaaacactatatatacacgtgtatttgctattagatcttattgaatggcttttttttttttttaagtaaatgttaatttgttagaatattagttttatacttttgttagataaagaagattgaatatgtgattttttattttatttttttaattatttaatcaatcttatatttttattttaataaatgactttatcataaaatataatttttcgatacaaatatttattaattttattgatgattaatatttgttaaaaaaatttaattaatttcttttagtgaggttacctcacttaattaatcatattttttatctgcaaaactttgaatcttaaattttattaaataagtttagtttaatttcactctaatcaatgataatctggatatcatagtaataatgcggttgcactgcacatgaatgaataaaaacaaagtgaaaaaaagtggccagaaaagaatgcaactttagattgcagtagcttttgacttgccacacagaacacaacacaaatccatgtgcgtgcctaaggaagaagctacgtgagggtcgttgttgtccagaaccagaaccccatgtttttattatgggtcatgttcaattatgatggtgcactgtcgttgtcttaaaataataacgggttcttaaatgcggagagggactaatccaaagggctaaactctctcgtggtaacacactaacaccatgtccacaacaaaccaaagcccgtggtttctgcaggtcgatcctagaggataccccgg

SEQ ID NO: 2549 - DNA, 856 bp, Glycine max
atattaaaggatttggcacctttaaaatgagaaactgcactttagaaaataaaaagttcactaaaaaaattcttggtggatattatgataaaattaaatacatatataataaaatataaagtttttttttttatgtgacagcaataaaatataaagttaattacaatcttattagttgactttctaactaatggttatcatatattttattctataaaatgcacttttctcatttaaagaagtcaaataatatttttttaacccttgcttattgtgttctcaatcccatttatggacatcataccagagtcaccttaagaaagatttcctgttcccatacgatactatgatgtattcctgatgactctggtaaacacgcagacacatataatgacactatattttcacatttttgctaatccttccttgagataaagggccagtttgtttaagcttgggtcatttagtttaaatttattttttaaaataaatgtttttttaaataaataagcagatttttgtctttcttatgtgtttgtttaaactgtttatatttaaaacttttttaagaaataaatcttatctcacaaacacccagaaaaaattcatgttaataagaaaaattttgataaatatattacaagaacaagagatccaaaaataacagaaaaaaaaagaaaaagataattatgattaaaaaacatttatttattttaaagttgtttttttttaagtatattaacacttcagaaattcaatgtttcaggcacccaattgctacccttctcaggtccacacgtatatgcttccactgccatggttagcccagattggagtggtgcacttgtgacttcct

SEQ ID NO: 2550 - DNA, 925 bp, Glycine max
ttgcatgctctgtcgaggtcggaaccaagtgcaatatcaccccaaccttccattgctacgatggtgggcttggatgagtctacaatcgagtcttatcagaaacttgtactaggggaaagccgacgagtgccaggacccaatgacggatgttgcaccatatgtttgtcagagtataaaaccaaagacacaatcagatgcattcctgaatgtgcgcattgcttccatgccgaatgcatagatgaatggcttagcatgaacagcacatgccccctttgccgcaactccccctcccatccttccactgttcaagttatggccagtgacccttgattgcttgtgggtttatccattaagcactcaaccacaaatctgggacacaaatccagctgctgtcattgtccgtttgtcacacttcaaggcttagctagtactatttggatggcttgaatgttaaacggtttttcaacttattacattgcatggattgtaataataataataattggataaattaggaacaacaatatccagccattgatgatactcgtcatctcataatataataccaaaaagaaaatttggaattgttcataatgcacaattcttgggttatacagtgttcagcttcctttggctggctggtaacggtatttattacatcaaaatacagcccaatatgaacactaaaacgaacagaaaaggcatgcatcagtcagttcccaaagtcatcagaggatagaactgacacccatgtaaaaggtgcaaacagttatgaaatactgtacagagaaagaactgccatttcaaaattctccttacttcttcgcaagcagcttctttggaagttcatccaggggagttgattttaaaagaaaaagcctggcagcacgctccttcaaagtacctccacattttaacccacgtg

SEQ ID NO: 2551 - DNA, 886 bp, Glycine max
ataattgatgagaagtcacttatcaagaaataccagcaagagattcaatgcttaaaggaagaattggaacaattaaagaggggcattgtcacagttcaaccaaaagatactggggatgctgacattgagctcctaaaacagaaggtaggtatataaatcatggccttttattttatttgattgttaggactctcaagtgagaattctttttactgtgagaaatgaaaactaaaaatttggatcaaacaattatacatggatggtcaagattaaaagttaattaatagtcgcatgtccacttaaagtcatgtacatttttcttttaatcttgaccattcatgattttaatgacttatatttgtagttcttatttcttataataagaagagttatcgtttgatatgttctttgtatatatagggaagaggtcgacttagtccaagagtaactcttgtttaacttacttcattggataactttttataaacattgaatttcattaatccaactgttggttagatacattaagtagatcaagtatataaaattccatacaattttaaaattattttatatttcaccaatcaactttattttaacgtataatatactttttggaatataagtaaatgttggatgtaaaatcatatatctatgaatgttcaattatctaaaatttgacatgcatgacatcaagatgatatcacaagattaattggttgaatttgcgattttatattctatataaaattattaagtgtcaaagacttaactcctaaagtaagttgatcctttcccccatatgtgtgtgtgtgtattgaatttcaaaaggtgaatatttctatgctttcctagaagttgagcataaactaggttcactacagta

SEQ ID NO: 2552 - DNA, 865 bp, Glycine max
cgcttgctgcctgcgaagctactggggttttctcatagttgaatttctgctttactttgagatcatgtatgctttcgctccttaatttttttttaaaatagcatttctagaatcccatgcggttttgatttagtttgtgaagaattgttttaagttccttaagtttaccattttatcatcagaatagcaagattatgctctcagtttcagtttgaaattgtgatcgaaaattagtgcatggtatttatcatgttaattcatcatggtagtttgattgtttgagaaatgatactaaatatatcctgctatacaacaagctattattgcaaaaatgggtgaatacaatcaattatcactaagaatctcatccttagaccaaaaacaggcaaaaggtggaataccgcaaaaagaaagcatatccactaaaaaagaagtttttgtaatgggtacatgttttgttaaactgcccataagaatcatattttgacttttagctggagaatatctgacaaaaacttccattgaatgaataatggatccggatcctaaaaacaacaatgcttttgaataagcatgagtaatcaaatgaaataaaacaactcgataagatcccatactgagcgctaacatcatataacccaattgagactttgtgaaataagccaaatttttcttaatatcttgttgagcaatagctaaggtagctcctaatactattcttattatacctataaaagctacttcgttcattattgcaattagaactatgaaaagaggaagaagtcgagctacaagaaaaattcccacggctaccataatagcagcatgtataagggcggaaattggagatagtggtttatcagct

SEQ ID NO: 2553 - DNA, 961 bp, Glycine max
ttgcatgcctgcaggaaacaatgcaatgacctcgtgtataagttaaatatgtttgtgtgtcagtacaacggggaactttccatagcattgatgaacttacaattatttatgctacagttgaggataggctgatgatataaaaatgttcttaaattgccatatcctcctctaaaacaatggtggccttggcatcatatcatcaactagtgtctaaattgtaagaattaacctctagttttccattttacccagagaataatcattgagcaaatacgacatgctgcttaaattggaattatatcaaaccactataaaaccttgacaagcacaattaacttattgcactgatagtggttcagcaaccaaacaccacaattaaccttttgtaagccagtaaaatcagaattatacaaggcagcgttaagcacatgatctctaaatgaatatttgcattttttgtttaaagatgttgaaataacaattttgaacttgtatccacatttttgcaccaatcaagtaaaatgcatcaatatatcaaatatcaattattttagatgtatctgagataccagttagataatgcactttaatctgttattaacatattaatagggattagggaaaagtgtaaaaggctcacaagtgggtgctaggatatcggtggagatgccaaaagtttataagagaagatttataactaatgacaaccataatgagtatccagaattccagataagttttagaacattcagggggaaaaaaataaagctaaaaataatatggttacttgttgataccataagagcagccgttccaacatcaagaaatgtgagccaaaagatcttatggttgggttcaaaaaaatcatgaatacggttaatggtgccaaaagtccatgatcctatcagaattagtggatagtatccccagcgattcaaagcctgcaggcatgcaagctggc

SEQ ID NO: 2554 - DNA, 907 bp, Glycine max
gagaatcaatttgacagaatgaacttgatgagctttccatttgaatgaaatgcaggaaagaacattgctctgtgattaatctgtttaattttgtttttggtagttcatatgctgaggctcaggttactgagatgcaaagggagattttgttggtgttgatgctgatttgaatacagtgatttattcttcaagaagaaatcaaattcccatttgtgttctttattctacagcatctcctaaaggaggcgcaaggtgagattcatcatgaactttgaaagtaatgccaagtgaagtggcatcaaagatacacacccatagtgtttctctcctatttttcccttcattgtcatttgtactgtattattactataggcaaaattgtatttttggtctccctagttgtctccaatttcgattttaatccccctttaaatttacttacgaatttagtctcccaattacatccaatcctgtagatgtggttcccaagtccagatttggacgttgactgttacaaagaaacattaactgtcacatgtcacgttctaattgaatgatgaaaaggtgtgtcattttaatcgagtgtggttaatttttttttaccctaaccctaaatttagggtaaccaacgcaccacaactctttctctctctatctatcaccattttctccctcctcatgaagaaactctaccataaagggacagttcacccatcaccaccactcatctccgaccaattctccttcctctcggcagccatcctcacccttgtggaggcactctcaccggaggacagagaagtcctctcctacctcatctcccactcctcctccaccttctctggcaaggaaaaccgctgccgaaatcgaccattccccttcgttcagctgcaggcatgcaagctgg

SEQ ID NO: 2555 - DNA, 953 bp, Glycine max
ataatgaaaagaaagaacccggctggtggttagttgcatgcacactcttcagtttaatcattttcagtttcattgtctttgtcaaaaaataagttttagcttcttgagtgttggtttgattaaatttcgagcatccttaatccttatgattctattttttactttggcaggttcagtggggatttaggacaactgagatgtactaaaatggataaacaattatttggacactaatgaaatcagtatttcaacacgtgtcttaggagatggtggactagttcatacgaagaaactcttatcatacaatatggtttgaaaattttcttttagaaaaaaaattgcagggactgtctgtactgctaaatacatattcttatatgggaacaaattctaagaactgagtatcttttcctagacttgtttctttgtttgttatgaaattaatactttcctggagctctacaacattaggaagttgatcctcgttaatgtataataatatgattgatgaaatattttgaatgttgaagttcaggaatagaaaaacaaaatcaggaaaatatatttaaattttcaatggatttaatattcaagacaactagatattttaaatttaaaattaattaaaatatagatgtaactttgttttcggcctaactcaaccgtaataaggcaaaaaaaattggtcgtattttggcaccaaaaccacttggacccgcctgattcaacccataatctgcaacaaccgacccgctgaaattgacggtcaattctgtcataaatgggcctaaaaataaaaaggatgtggattggtatatcaagagcttgggctcggagatggaaaatattggttacaacatgagagcctatgctatttgtagcttccaataacccctggggaactgcttgggcacccagcagttttccaaaataacatattagcttttttcttt

SEQ ID NO: 2556 - DNA, 874 bp, Glycine max
gggaaaaagaaaaaagaaaaaaaaaacgatattcacacgtaaggcctgttgctgagaagatacagccacaggaatagatgcaaaatagaaaaatatggagattgttttcctattcttatattagttatttacagcctcaagagcaaagaacacaagtatataaagataactgcaagaatttgattctaattatataatatgtggaaggttctgctaaactgtgacatgtgaagattaatttagacttaagacatctttatcttggctaattacagcctcaaaagggggataaaataaggcatttgataccatcaaaatgaagtgccaagccaggttatggtgattggtgaacagtaaatggaaagaaaaagggctgtaacagagagcacatatatgttccataaacaacttaaactgtatagactaactgattatataacaaaataaggcaaaacaaagaaataattcccgaaactctaagctaaaagaaatgaaaaataaataaaaaaaatcaacttcagtatgactacatggaatcctacgtgaaatactccaaagtgcaaatactataagcctaccgttacataacaaaagaaactaatcatgcagttatacagaaggcctaacttctagaccagcctccattgctgattctcttgtagcagcagtagtctcttcttcagcttcaccagacatctcctccagggattttcctttagattcaggaaccaagaatgtaaacagcatccccaagaagttaatcacacccaaaactataagtgtatttctcagcccaatggcattctgagcatacaggtagccaaaagcccctaccattgcccctgctttccctgctgcagggtcgactctagag

SEQ ID NO: 2557 - DNA, 836 bp, Glycine max
ttagagtcgacctgcagccacgtattacaccattcgttccaagccacttttatgtcgaattaccttaggtcaaaggaatatcctaacttcacatccaaaaaacttatctctactcttcgcagatctcctcttacgatgaaacatttcataaatgcagctgacatggtagttccatcatccgggagtttgtgaattgtataccatagaaatatgttttttcatgtggattatgtaaggattaattatgtatgtacctgtctcatctacatctctccgtcccttttcctttgcatttatggagcttagaacgtaaatgagcatgaggctagctacactggaacgttaatgtgcattcaatgggatttggttcctcaacctaagagtgcatctacccttgatttgaaattaaagaagcttgactcgatcactttacattatagatagatatagatgcatctttatttactttatacaccttctcacctttacacaaagcaaatcccatgcaaagtggacaaaatgcactatggacatatatattctatttaatgtattaagccattcgactttggatactggttaattaaggattcgggtagtttgaaaagaacaaagccacactactatagataattaatttgactaaattaacgattgaatttgttaaaactgaagtgtgaatgttagataagttatagctccggggactacttatatatgtagaagttaataatgatgccaccaacttctggctgtatgttatatttctttttcaaacctactattagccatcaatattgtagaattgacggatcttcatctgctttctttgtagt

SEQ ID NO: 2558 - DNA, 789 bp, Glycine max
agggtttttctttcctttggaaaaattaatctttctttccatgccactgttgccagcattaatgaataaatgattctagtggttacacggttacacctctggtgtgagtgagaagacacagcagagcgcacgcggggcacaccgagaaaacgatgagttactactagtagcgatgaagagaagggggcgaggtttcactgctacaaacaaaagcttttaccttcccaatgaaaactctccctctcttttcctgcactgccactgatacgctgccattcctggcataaaacaaaacacaatagagagagagaaggaacgatcaaatcgaggaagaaaaacaagttacccactactggccatcaatggagaaagatgagatggtttatgtttatgtttatgtttatggggcacggaatcaaaatcaacccttccttctctctctctctacactttgatggcaatccctccactcatttaatattctcaccctatttgtcctcgatcttctcaccacagtgattaaaaaattctctagtcccacaaacaagtaccaacatttaacagaacattagggatttaatttatcaaacctaatttgttcttcttgttagctccaaaatagatgtatttagtgttttaacattagcgttagttactattaatactaaagtctaaacatgaatatttactatatgatgatgcttacttctctctcttcctatggtagtatatagtatactagtatgatctaatttaatacgatacagtataattaaccatggaaaaagc

SEQ ID NO: 2559 - DNA, 934 bp, Glycine max
tttaatctgatgaccaatgctgtgacccacttcagagcaaaaccaatctgattttgatatatgtagtgtacaacccaaacagagttttaacatttcagagcaacattataaacacaaaaataatgcagagacaggtttgatctataagagttctataaccaccatggctccatccagctacctagaattaaaatgacgaaaatctctatcccgaaaactataaagtgcgaaactgagacgtcaaaaacgacgtacaatttttattcatatgagaatcatggccgcaaaaaaatgccatcatgtgttccattggtgcactcgacataaatacagtaatcacagtaagaaaattataaaaaaaaaaaaaaaacgaaaaagtgtacctggaaacgtccaggaaataaaacttgttagaatcctgtattttgttaaaagtgtgacctttatattaatgtcaaattattgtatagaataagcacgtatcacctccaccacaggagcttgacacattgggcacttccttctgctttgaagcaactcattcgcacattttgaacatgtacacaaatgaccacatctgcaacagaagcacaaggatactcttagtgattacaatcaggttgagatgcaaactggctacaaatctgtcctactggttatgaatattacctgtacaacaaagaatcgatattgctttcacagcatatgcagcaaagtccctttcttacacattcccatttagatttatcttctggtgactcgcaatcatgtattcctgaaataaatttaacttagtcttcccagaaagctatatgacaagagttatttttctttaaaaatcacggctcagttgaatgggaaaaagagccctgaaaatggaatgtgatgtggtaagagaaatagcaaacctgatgaaccagcagagcgatttaga

SEQ ID NO: 2560 - DNA, 951 bp, Glycine max
tggtttgcgattcaaatagcgcacaatagcatcctcaaccctgttcaagttgttaaacaaggatatgagtataacatttaacagtcagggtaactaactggctatgctcatataaaagagagagaacatgagcctttttcatgtccaatttcaccaggcacatgagcataatgaaacagtatatcacgctcttttcagtcatttgaattgaaataagatcatatgcaagatgaagggtaagcgcatgcatcaaactcaaacgcaattccagttatattatacatcaccctcacttaaggcaatctatggatgggaactatcaatcaagaaattttagacctgaattttaaatcatgttggctaagctcatgatcatccataacaaactgatggcatgttttcaactaataaaagcagtgtgtggatgagagacaacctataaatagaacaacagaggacaatggtatgagactatccaagagaatagcccttcagcttaccagggttgcttaaagaaatctgacttgcggtccttttcagcattgtgacgagattctccaagtaaaactttcagatccttgttttgagattcaaccaaggccttaataaattccagaggagactgactaaaaccaacaaagaatgctcgcctccttcggtgctcgtgtatttttctaatgattccacatatggactcatcacatgcatcgatctctttggtcctctccacattggccaccagagcattcaattccctctgaatgggaaaaggaacatcaaccatcacatcataacaagcagacccaaccggactattcccggagagcttgatcatatgctccaaaagtataacctgtggaggaaacaaatgctgcgaaatcttctgtgaaaccatcgtgaacttcaccttatcctccccaaacaccctctgcaggcatgcaagctggcgat

SEQ ID NO: 2561 - DNA, 971 bp, Glycine max
aatttcaacacagagttggctattgattcactgaaaagaagaattcaacttttgacagaattaaaaaatagaacatacccttccagccccccccccccccaacacacacacacaaagaaaaaagatgcaaatccaagttatccattccaagctcacacgtaccctaatttttaatcagaatgcaccgtattggtgatccctcagcaccagccaacctaagaggtaagcaatggactgaatataatcctgctggaacatcatcaagcttcaagccttccacgagaatgatctcctaaatcatttgcagtagttagttcaggtcacattgattttatctcttatccaagcaacaaatgaagcatattcaatttggtttatacaaggaaatctgaagacaagactaccattctcatttcaaaatacatctcatacctacactaattggcaactatcttccaaactaaaaagttaaatattttatcagaagaacagatgccaaatgaattggaattgatgtggagacaataagtaagttaacactttgaagggaactttttcttaccctgtcttttagaaaaacaaggtgagatggaatcaagtaatcataagaagcaacagataggtaatcaattcctgcattgcaccacagaatataaatgtcaggtaatcaatgtcacacatccagatcattagttttcccacacaggagctcaaaattatcctgtgctatcttcatcaagaatggaaatagttatagctattcaactcactaacaagcaaacaaaaatgcctaaacattcatcttcatctatttattttgcattacatgtatgaaaaaactatgaagtcagtcaaacaaaataatttaaggggaagcaggctacaagtgcaaaactagatccagccattggagttggaacacctgacaggaaaaatgcacatgggaaactgcaggcatgcaagtcggcgaa

SEQ ID NO: 2562 - DNA, 839 bp, Glycine max
atctgtattccaagcctgtttaatcatagagtgataccctttatgagtaagccaccagtccacaacccgaaaaggtttagggccccagtccaccagccttgtcttcaaaatgatagggcaatgatcagaataatctctttgaaggacatgttgggaagtatcaggccacaaggataaccactggtcagacaccaagaatctgtccagcctactcttggcactgccattgggcctaaaccaagtaaaattgctgccaaggcatctaatatcatggagttccatctcagatatccagtcattgaaatctgcggtatatgaggtgacaacactcctctgagataagctaattctctcctcctggctcctggtagtattgaaatccccaagaaagcaccataaaccagtagggttagaagccttgagttgcctcaaatcatcccacaagatccttttcccagctaagtcacaaggtgcataaacattaacaattcgaatccactgattctcttttacccacttcccttcctgcattataaaacttctacctttataccctcctctccacctgaaaatgtgagttattccacatgcacaacaacccaccagatgcttgaattgaaggaacaaaatcccaagacacataagaatctccccacatagattggcagatgagcttatcaaaagactccttttttgtttcttgaatacacacaaggtccaccttatgcttcatattaagcctcctgatggcagcccactaaatccccctacccaaacctctagaattataggagagaataatcatgatgaattcaatttaattcccatctcagcgcaaa

SEQ ID NO: 2563 - DNA, 846 bp, Glycine max
ctgataagatactattctatgattatggggcatccttctgtaaatgtggatttttattatctttgataaatctaagtttaaattgtttttagcattagagatgagaatgattatttccctgtacgtttagctgtggccttgtggacggttctacattacaataatacaatgcctatttaatatgataagttgataatacattgcattgcctaggagacattaattggcttattggtgactaatgatgatgaaagaaactaaagacactgaaaactagtgaataaatatagtgggaagaagcagccttcaagtttcaaaactggcaacaaacagtatggccagaatatcaagaaatatccgtcaaatccagtatgtacaatgtgctgacttttgactagcctccaggcaggaagcaactgcaacatgtgattgatggtgtggcaaattgagttaaatttttataatgaaattgagttaaaattttacaaaggctgaggtgtggcaaaacgagcatcaggtgttcgagtcttcaattctgtgcgatgattgagactgagcacaatatgcgtaccccctgccccttagaaaaaaaacacttgttcggttgttccacacttgccacgtactcagctacatccgaaatctcaattagtgccctatatgatatctcttgtatctatgcatacacatatatttttgtttaatctttaaaatagtattctgccacaaatttggaacgacagaaagcctcaaacgaagaaaagacatcacaaatataaaaatcaagcatatcgtacgatgcaaatgtcaatccaaacaccacttctgcaggcatgcaagctggcg

SEQ ID NO: 2564 - DNA, 823 bp, Glycine max
aaaagaacaatggtagcgtggtcacagaaagtatgaaccacaggagtgatgccacaaagaataatgcaacgaacgaaaacctcaaacggtatttaacaattcactctgtacataaccacacataccataatacatactgaacatgtgatgtgatggagtatactctacagatcatgaattaatgttaaggataatagtgttatccatgaatttttcatctccataattttaagaggatatatacaactataaactgattgagattatttttcatgtttgaaatctagagtgagaaagctgacaaatatgacagaaaagttaaccaaatctttgcttgatggtgttggaataatgagtggatcaatgatgactcctgtgctgaaatcccaaccaggacaggcattcctaaagatgctccctggagaggtgctgttggcttcccttgatgcagtcagtaagtaacaacccaagtctaaaatactacttataaggctagcatggtcttcattatgaaattatcatacattaaaaaacacaagtttaatttgtaactgttagttttaaaaaaattatattattaattaatcagaaatcatggtaagtatgactcataagataattattcaacataccatatatatatatatatattaatttatgattggatgacaatataaaataaaactaaaactgtgaatgcatatattatttaatcttaaagaaccaatataccaatcttattcttatactggttacttgcataagcactgccacctaatctctttcttttaaacaagcagcatcaacttgatctctatttaat

SEQ ID NO: 2565 - DNA, 914 bp, Glycine max
tatccagtaagtatactcatgtttatgtgcaaggaaatatacccatgtatatctggaatagtcattaactatgacaaagtcatattttttccctcgagactcaacattttagttgatccaaacaaattataatagtctagaagttctttaaaagcaccactctcaatcatcagatctggcttcagccagcaggcaataaaccaaagcccaaagctgtggtcaaaatccatcccatacacgttcttgattggcctggtttcatatataggaacaaactgttttaccatgtttcgatctgcctttaccaaggataagattataagtcatatcctatgaacaatcacattgtcagaagaatattaaacagactcgaattaacctatcaaagtagactccaataaacctatcaaaatccaaagcaaccttttggattcagaatcctgatcaaccacctactcattgaaagagaattccgatcaaccaaatacagcaaatgtggtaagccactaactaagccttttgcatctatgtattcaaattgtaaacagccttcttcttggtgcgtctatgcgtgagtctgaagggggaaggatgcaaactgattcttatccaacagtatcccatatcatcatgagaaataaaaaagaatattgatgccatcatgacagaattatgcaaaagaaggaagaatataaaacatggccaacttaattcaatatcataaaaagaagaaaaaaaatgcatgtaaaagacatcaaacacatcagcaatcacttcttaaattttctccactcaattatttttgcattaagatggcaacttcctaacaaaatggtatgctaatcagaaaagagctacaactacaaggcctctcacatcacacataacctcaaagagcaaacaatgtttacacc

SEQ ID NO: 2566 - DNA, 865 bp, Glycine max
  misc_feature (856)..(856): n is a, c, g, or t
attctggttggaccctgcataccccgtttggggccatgatttctccagaatcaacttcttcgatgcaacccaaaccgataacatgcctttcgaaccctacgcttcttatttcaatgaaacaggaaccctcccatatgttaacaacacccaaaccaacatgggtctggacccttacgctttttgtttcaacgaaacaggaaccttcccatcccttccctatcatcagcatgtcaacaatgtgcctttattcgataaaggttacactcttggcaccccagatgatcacgacaacctcgtgtatcatcacctcgtcgatcagaggaggaggcagctagagggtacatctgataataactatcagattctccgtgatcgttacatggcggcttcacagtctctccacgatggaggaggagtcaaaagtcccattaggttttctcagataacgcctcaacatcaatatcctcccaatgccaatattaccccatcacattattacgttgctgcaaaacaaaaagctgaactttccccttttctatctccgaggagaatcgggggagaccctgctacagcgtttaggtatgacaacaatgacgtttttctacaagggagagatgcaaaacactactttgagaatgggtacggttcttacagaaggagtcctcgcgatgatgatgctgctgcaattcatgacgtgggtgggagtgttgttcctaagaacttttattctgctgctgctccttctggtcaaagaagtggtggtggtgatttctcatcactgcccatgctgctggatttttattctgtgcctgatgcgcagtgctacatttacaacctggcaaaggatcagaatggntgtcgtttt

SEQ ID NO: 2567 - DNA, 896 bp, Glycine max
atgtcaacatttaaactaatgatacaaagtaattaccatcattatcattttcctcactggggaagacattcgtaaatcatacagaattatgctccggtcactaaaataagaagaaaacaagttaaaaacaggtaatttgcgaatgagagataagtacattaagccaaccaatatttttcctgatttatatagtagattaaagtaaacaactaaacattattcaaaatctatataagtaaaacttcaacaaaaaaatgcataccaaaagaaacataaactagtcctcttataatatatttccttcctttcaatgaatgagatgaatagcatttttctccagatttatgacaactattggaatatatagcatatatctcaatatcatgaaaatatcagagaatagtttagagtatcacaaatgatcccttatggtgatactaataggaacatcccttaagaccaatgtctaccatccaacaacaaaaatataaaatggtattttctcatacttaggaacctatttatattacagattcaatcatattgacagtactagggctttaatcttggaaatggaacattgaaatgcgatactagtctaaaacaagcatgagtatcaactttttaaaacagtagaaataacaaataatcaataattgagaaaataatacaaaattcagtgagattagcaaaacactaaacaagcaacaatacaaaaaagatcaggatatctatggggggaaaactgaattgtatcataatcaatattgtagtgcttgacctacaggcaatctcacatacctagctgaggtggccaacagatttggttctccaggattaaaccgaacagaaattacagtatctgacccccattcaaaactgtttattggttgaga

SEQ ID NO: 2568 - DNA, 906 bp, Glycine max
agtattccttcaactccctggccttttgcaaacagatttcagcatccttccaatgagaaagactagcatataaatttgccagaccatgccaaatatcaaattcatttactttatcatactcaacctggaaagagttgagaaaatggaggtaagattgattttgcaatcagcaatttataattgaagtcccatgcatcaaccaaaaaaaaagaggaagcactaaaattcagtgtacaaaatgacaatgaaaaggaaatatcagaacatcataaaagaaatatataaaaaacaactttctttcttatacatttcttgactaatctttgaagtactcatttttaaagaatttaagataaagcttcccagacaacagctatctccataaaaacaacttacaggttgtctcacagttcttattaattggtattagatcttttcaccatgttccttagctgcaaacaagcaacatgggtggtgagatgtgatgtgccgatgttgttatgttcactcaacactatttaaaggactaatgcacagctagcctgcatgggtgccaaagctgttgtgcgtagtgagatgtaggatccaattacaaggtacaagactcgaggcccacattggaagtatgagattatgttgtgggggttcataaggccttggaatttctattcagaacagtagcttttgtagcattgttctctcaagattcttgttgagatcctacatcaactgtaaatatggtcaaagtaggcaatccttacctcatgagctaatttttaggattgagttatgctcaggccaaattcaagatagtatcagcgcttatcatagatacaatattttggccaccctcaactggctaaaaatctacctggccccacaattttcccagtgcaacatacttgg

SEQ ID NO: 2569 - DNA, 885 bp, Glycine max
agaatgttgcattgcaggaactgatatagttatgtaaacaacaaccagaatcacagagacattacacaatcaagggtaatttgttgtattggaagaatcgggtagtaattcctgaggaaaaagaattgattcaaaagctgctgaaagaatttcataactctcccatagggggcatgctgggataaaaagaactacagctagaattgcaagccaattctactggacatcattgaagaaggatgtaaacagctttgtgcagagttgtgacatctgtcagagagctaaaacaacaacttctctacctgcaggattattgcaaccactacccattccatcacaagtgtgggaagatattgctatgggtggtcaatccgaagtattaaacaaatgtttagagatgtttttgaggttcttcacatttgagaatctaaaggggtggtacaaggcgctagcatgggcagaatattggtacaatactgcttatcacacgagtattcaaatgacaccattcaaagctttgtatggtagagatccacctactttggtgagatatcaaccagaaatcactgatgttccaactgtgcaagagcaattgactgttagagatgaacttttgagacaattgaaggataatttgatgaaggctcagacatatacgaagaatcaggctgataagaaaagacaagatgtcaatctataggtgggagacttggttctagttaaactacaaccatgcaaacaacattcagctgctcttagaaagaatcataagctgggaatgcgcttctttggcccctttaaaattctggccaaagtaggagcagtggcctacaagttagagttacctgcagaagctagaatacacaatgtcttccatgtctctca

SEQ ID NO: 2570 - DNA, 902 bp, Glycine max
tacagttcagagcttgttctgaacggaattgtaatccaaaaattggaacttgagaggtatatttttccttcatatttctgttcttttttgtccgcaactctgcatgcacaaggaatttttttcctactttattcttttaaccttgtttgatatattagcctagctacataaatgccatctttgatctcaaccatgcacagttttttcccactacaatgatttgttgccttgaagtaaaaacacctaagaatattgggttcaaattgtgcaaaaagcacattgggttgaaattactgtatgaacccgtagttttgcattacagtccctcttttgacattatgtctaaactaagttaagcacaggaaaaagatcttataaagtgagattttctttagaggtgaacaagaacagatgcatatactatattggcttttagtgggttcagatcacagttaatgattacacccttgagtgtcaactgcggaggataagttcacaagcacaacttacgctatgccatgtagatgagtaagtttcagacaacttaggagtcaaagtaggaatcttttcgcatatttgcatgtagcgagcctattgttcatccctgaggacaaagtaaaactactgtcttaccaataaagtgattagtaacgcatcatctcaacaattttatcaaaatttaacattattatgatgaactttggcagacaccaactcttcatgaatcaagttacaaggaataacccaagtgcgtcgaatcggtttgggaagatttacagaaggcgtagaggccttttttctggaccgtagcagattttttgaaagtgtcattcaggtctacggtggaactcgtaaaattaatgggcactctcgtctcagatgctgacttatgagcgcttctt

SEQ ID NO: 2571 - DNA, 942 bp, Glycine max
ctctcgccagcttgcatgcctgcagtatgggagcttttctgctgagcgcagggacaaaaggtattcttttaacatgcaatcgctgtatctatccccccctctttctttgttgatgaatgccatttccacttcttgaaaattagaataatgcttctttctaactttatatcccttcctccttcacttctgaaggaaagagatacagcttgccaaattcaaggataatgattcatcaaccgcttggtggtgctcaaggagggcaaactgacatagatattcaggtatgggcctcagtttcctccttttattttttattggataaacctcatgtttccttctcaatttataaatttatatatttctaccatagaaaattaaagcctgtcttagggtagcacttaaaatataatgagttaatttaaaccaaatgaatgccctaatcatgtagtgaatttcctaataacctaaatttattccatactcctaatattcctatgatttatttcctatattatcctgctatttattttccattccctactgttatacatttggatttagccagcatttggttagattggatcgaggcagacagtccataagttttgattatgaacagcagtgcaataagtgaccctaccaagggagactgaaggatttacttgttatatcactgttttgtacaagtatcattaattcataattctgttataatagttcttcttcgagaaaactgattatgattcacaattctcaggctaatgaaatgctgcatcataaggcaaatctgaatggatatctcgcctatcacactggccaaagtttagacaagatcaaccaggatacagaccgtgactttttcatgagtgcaaaagaagccaaggaatatggactcatagatggtgtcattatgaatcctctcaaagctctccagccattaga

SEQ ID NO: 2572 - DNA, 873 bp, Glycine max
agaggataaaaatgtacaaggcaaaagttgcctaacccatctgaaagttacataatcacattagctgaaaccaaaaaggaaccaaccccctaagacaactcctccctcaaactagtagaccattgattgaaatgaatatggaagtctttgtccatacattttaaccatgaccacgtgtggaataaagcttcatccatgactttttcggggttgaaaatatggttattaaaaaccactgaatttctatgcttccaaatagtcatggataaagctatccaaagcactgcccatctcttgtctatatatcttttgctattccaatgcgagaattgtatgaaatggtttttaggatcaatggggaaagggcccactctatataagttaaaagagtgttgaatctgccaagttcatattctgcaaccattatatgtaccattactagagatgagcccaactaaatgcagcaatagatacttgaagccaccagcataatgctctgtagcttcttttgctctctaaacagttttcaattattttagttcaacaaaaatgcatttattcgatagacaccaaatcccatttaaacacagaaaagaaccttatacacagagaattacgtatcaacaacacagaaggagtaaatgagccaatttctattaggaagtgtttaggctccctctttggaggatttgggccctatgattatgaatcaaaccaatgtgctggcccataaagcccaggcatcgagaacctcatgatgacatgccaaactcaatacagtcgtaaagcaatgagaaaacctcgggaaccaaatttcacgggatcagccctgaaggcatttcccatgcctcatcatgtcataaacactatcat

SEQ ID NO: 2573 - DNA, 943 bp, Glycine max
ttcgcatgctctgcaggtcaagggctctttctcgatcacattcttattgcccacgctctatcagaatgcaagcatccgttcaccacaatacaaacagtgaattttctcttcgcaactcccaacaagctttcactctctcaatgctatcttcatttcttattcacctcataacttaaccctattgggattctattgtcttcacttcaccctactttacaacgtgtttttccacttcaacttattatgatgtaattcatcatgtgttcatttcataaagtttgcctataagttacaatatctctgtgatccatgttgttgcttcattcccttgatatcacaatggtttcaaaggcgtcattagttctcattgtaattagacttcaataatcagtttatatgataaaattgtggttttagccaggatctgatgatccctagggtactgtgggctagagaaggtcaacgattaatctgcgggtactaaaatcatcacttttgttgaacatgaagtcacttttaccattaggaatttgacattaatatttcttagaaccaacttataatcgtcaaataaaaatttgattcaataaactaactctaaatcattctttaaatctgtatagatattattctcatattcaggatattgttgtaggaaactcaggtttcattgttcctaaatttgagtttcttgatgccatacgcaaaatcgccaaggagaataatgcacttatcatctttgatgaagctatgaccggattccgttcggcgtatggaggagctccagagtattttggcattgttcctgatttgacaactctaggaaaaataattggtgggggtctgccagtaggtgcatatgggggaagaagggatattatggaaatggtggcaccagcaggacatatgtaccaggctggtactttgagtggaaacccctggc

SEQ ID NO: 2574 - DNA, 833 bp, Glycine max
gagaatgcaaagatgtaaatgaaaaagaggtaataattttttggcaatttacaacgacgtgatctgaagactaatattctaagataaagatcatgtttatgagggggaagggcatggaatttagctttccatgcctgggtaaataattctataaattcctgtaaattgtagacattctttttctctctctttcctaatttttttcacattcatattctatcctgtaaattggagagtctcctctatggaagggatccgcaatcagtcatggaaaagaacagtagcaactagagagattatagcagttgatggcatttatgccaaaatccaatccaaataacactcacaccatcctccctctattcttaaacaagatagtactcatcacccgcagaccaagtcacgaagatataaatgaacttattgatgagcttcagaacatccaaaaaaaggaggttagcaacataccattcaggcattcacattgctgaacatgcagcattatccaactcaaaaattataaagataaaaaaaaaagcacactccctagagacatgaatttttccacagacacacgcattcaagtccaaccagaaaattttcaaaccatccaaaactagcattctctaaaacatacactaaaaaaccaaacaaatcaagggtaaaaaagaagaacacaaactaaccaatcccgggattctctttgagcccgcacttcaatcccaacggtccctgccaccctccatcagcaacatcctccccttcatgaagcacactgaccttaacatccccatttccctcctccccctccttttcctcattcacaggagcca

SEQ ID NO: 2575 - DNA, 923 bp, Glycine max
aatgaattaatatcgttcaattctcaaaggcaaacaaatatccatcaataagctgcacaacatttgacaaaacatttatagtgttaagtcaagataagaaaatccagttggagagttacaaaaaaggtaacgtcataaacccttttcctcctaaaaaaacatgttattttaacggtctcttgaagtgaagcagtacgcgatggaagatggtaaacgagagaacaatggaattaatgccactacttcacatccaaacaaaatttatatacaaataaataaacaaggcatcttctctgtgttcatagtgatgtaatatgtgaaatcaaataaataacagcgtaacgattgacgtcaaaatagcaagtagcaacccgtctcaattctgattcattttattgaaagaaaaacagtgcctaatctcaggaattctatcaaagagagagagagagagagagagagagagagaggaaaagaaaaggaaagaaccccattaataaaattaaataaatgaatcaaagaaggttgtttaaaaagtcaatgctaagaagataccttgtggccattgaggaaggggtgaaggcagagaaaagggaagtggatcagggtcagtgaattcagggacagaatcccagcataaactcttgcacccaaacatgtctcttcagagtccctcttactcccccacaacgagagagtggttttcttgttcttcaaagaattactccaagaagagagagaaggagattgttgtaacaatagtaaaggagaaaagtcttcaactttctcctctcctctcttcttgttcttgcagagacgatgctatgctttaactttagtttcgagatttttaatttgaagctcagagttcggttatcatttgttaattcataataataataataaaatatactataagatgataa

SEQ ID NO: 2576 - DNA, 843 bp, Glycine max
ttgcatgcctgcagtaatttatctttttaatcaaaagaagtttttatacttatcaatcaagaaaatgcattgataacacttcctgcaagtatatttcctgttcaaatgcttaaaacatgagatgtagaattattttcttttactagtaagaccagtgtaaaatcaacagaaaaggtgaggtggaacacgagtaaacatatacatcctaactcaaattgctaacaaatttccaacagaaatctatatgatcaaagagaatctaatattatctaagaacagatatagccattgcttggtttttcgattgattaacaaaagaaatgcagagtgattaatatgcaattaaaatctaatttgggaacaggagaacaacttgaacatcttataaaaagacaactaaaagaaaacatgagagagaagaaaaaacgattgatgtgtatgtctacaaactctacacacacagacgagcaaatccagtacgaacgattgatgcatatgtgaatgagtacaaaacaagatttaaaaaatttggagcaataaggacatcacaaagtactgaatatacattccttttcaaattgccatcacaactacaatgaaatctgaagataaaaaaattccttttcaaattgccatcacaactacaatgaagtccgaagataaaaaaggactagataaattcatgcaagaaacacttaataagctgtcagccaggttagatgaatctctcaccatcaaatcataccaaaatctaaagtttcaatcattgactgcataagtttaagcacataattgatagctagaatggacaaaaagaaacttacaaagctgcaggcatgcaag

SEQ ID NO: 2577 - DNA, 904 bp, Glycine max
tcggattgaggaagtagagtgcaccacatgaggtaagaattaatacttaatcacatgtacaaaatttagaggcagtttctttaaatattattttgtaatatttttaattcgaattagagtttatcttaatgatttgcataataagcattcatattaaaaatcaataaaattattgagataaaactctatatattattctatcaaatatcaaatttttataagaaaaatgattgattgatattttaaatttgaaattttatttcaaaaattatatttaaattaatcgaactaattaattagaaaacaataaaataaagtacctaaggaaaagtatgagaacacatttctagcatagcaagatatgcatgagaaaacatgagagctacaacttgcgtatcattatttggtgagtcctgtgtggtgcaatttcaaacctttactattcattaaacttttaccatatagaaagtggaaagagagaaaaaaaaaattgattaaacttttaccattaagaaagtggaaagagaaaaaggagagaatgtaggttctttttctatttagtattgtagatttatcttttctaaatttaaaatatttgttggtcgctatcattgaactcagtgatgttggatttaaatttcttaaataaaattttgaatttaaattttatagatagaaaaatataaagaaaaaatcttattatatgataaatttgaattaaatttgttgatagaggttagtcatctacaaaatcattaaatattttgtgtgatttccattatcatgatatatataaaaataaaatatttgttccttgttaggagtggttgtttgtttgtccccactctcaaagaaaaataaaattgaaaggcccactttgtttgttgtttgtaagattcagatt

SEQ ID NO: 2578 - DNA, 847 bp, Glycine max
tacccggggctttctgtagagtcgacctgcaggaaagatcacgaatactaacgcgcattgctgatatgattgagaaacactgatgagcatgcaacactggaagcatggaatgatggcaagctttttgaacaggcagacaaagttgaattaccattggtcatgcgtctgcttcattactatgctggtgagagagaccagtgagacccatataatatgtttatttatgtacttatttatgagtaaatgttgtatgcattgacagtgtaaagactttttacactataattcaatcgtaaatcaccatgaatgataagtttgttgatttttataataactacttaaaaaaagtcatatcaacaaggattttagatatgtatagaaattaaactttgttcattcagatatactcaattatgtgatttttatgatgatttccgtccttcattaattcaggttgggcagataaaattcatggtctaatggttccagctgatgggaattatcatgcacaaacattgcataaaccaattggggttgcagggcaaatcatacctttgaactctcctctatttatgttgctttcaaagttggtcctgcactagcatgtggtaatactctggtagtaaagattgcggagaacgcacctttgactggtttatttgcagcacagctatttcatgaggtaccattaatgttgcattggattttaagaaacattgataatcaatgttgcattggattttattctatctcaaatgcatattttgtcactggctggtcttccaccaggggttccaaatgttgtgtctggtttggtccaactacaggcatgcaagctggcgtcaga

SEQ ID NO: 2579 - DNA, 867 bp, Glycine max
aacaataggagcacagagttcagcttggtcacaaccacaatcgtcacatcctagctttgaagtcccaagtaagtcttattttattttatctggtgaattcactagaattatgccaatgttgagggattaagaagggatttgcttgcatgagattagaaattcatgatgacattagagtttgtatccggtattggataatatggacaatttagtcatttcttggaacataataataataataatgataagactcttttttttctgatcattatcaattatgtagaactgttatatcgtttcagtccacaataacaattagcagtcttcagtacttgtcaaatatccatttttacatgttgccaaagccagattctctttttatgcaaattattagaatcatttgaactttctattatcagcactaaggttaaagggacatgagaaacctcgggattaaagtttctatgtatcaaaaaaatgccaagttcgaaacagatctcttaacaccattaacagatattttcttgtaaattatattaaagagctatctagctatcagttgtctctaccattttgcaaaagtttccataacttgcttttgttatgagtggtataatattatctcaagcatctgaatctgagtactttattgaacttagcatgttagaccaaatttcaagtacctctaaatcaaactcttgggaaatcacaccaaaacaaaaacatctctgacacaatcacacctcccatttaaaatattaacttcccttcttttttctattttttttcttattgggtaagaaaatttgaagtgctatggaattttaattttatatgtagaaacatgttcaaattctagttaaaaat

SEQ ID NO: 2580 - DNA, 883 bp, Glycine max
tttgtaaccaaaaaccagccagccttagactcatgaaatggagcattgagttccttcaaatgtgattcaaatacactagccaagcctttgtctgaatacttgtgttttccttgcccagtattaattccaagtagtggaggaaggtcctcccctgattccaatgccttagacaagtcattaatccaaacatgtaatgcagtcatggcagctccaactgagagttctttcagatgcaaagaccactgagtttgggatttgaactggatatttgtatatatctcaagcatgagtcctaaatccagaaggtcacgtgctctttcaggcacattcagcttgacacaaagatcaattagacaattgcataaaggcttctttacttcagcatcaattgaatttaaaagttctaatgcttcctttctaaaggcttcatcaccctccagctcttccatcaaatatcttaccacagtcccaagctttgtattagccttctcaatgcaatttgttagcttaccaagctcttcttttggtgtttgagtcagaacatttagaagagaacagcagaagtgatcatttggaacaatgcccaaatccaggagctgtttaaatatcttcacaacatcatcagttcgctttgcttttccatagcagcagatgagtgatgtcataacaaaaatagtaggttgaaatccagattggatcatttcattcaacatcccttctgcctctgaaactttaccactgcgggaatacatggtaatcatggatgaaaatgtccaactgtcaggctggcaagtcccagaacttttcatttcataaaaaatttcagctgctctatctgtgtagccaacatcagcacacatagctaaaagcttgttataaagat

SEQ ID NO: 2581 - DNA, 861 bp, Glycine max
gatcggaacatctcttcaatttttggcttcgagatgagagggtaatgcagtaagtggacatagtcctcttttttgcagctttcctttctttctgaactatattcgttattaaaactacccttattccaggtagatgccaagaaacagagatctgcatttcctccaaacttcgtacattcactggatggttcacacatgatgatgactgctcttgcctgtagggatgctggcttatgttttgcaggttttaagacctccctttactatcaaaatcctatagcatattcaaaatttccatctaaagtcataaaagtatacaatgttagtttaattgtttttttctggttccaagggaggctgtgtagacctaggaattcaggcaagggaaagggtcaagagtttgtaacaggaatcaaaatgaagtctgatgctgttgccacttgagctctttgctcattgggcactttaagacttctaaaagcatagaggatttgtctatttttgaaagccagcaattttcttcttggcatcttttcttaattgtttctggaactggaagatgtagggattcaattagaatcactttaaaattgttaaagcttatcacaagtttaagggaaagtgcagttcattttgaggcatgccttctttcagatgtgttatttagtttcattgaattcgtatgttgaatattgcaatttgcaccctaaaaattttaggacctattttgcacagttcagaaggcaaactaaacacatccttaaactattgctttggatcaatttacatttgaatgttttacaatatcatgttggaggctttgatagtaatgctcaaggcacatctatgatagcaatcact

SEQ ID NO: 2582 - DNA, 903 bp, Glycine max
acaaataatctttgaaaccgtagacaagcttaccatagataaactaaactcactgggtgagaatcagaaaaggcctcagatttgttttaaaaaaaacctttacgtttattctcttcctattttaaattaaagaaacctacaaattataacactcaaggaagtgcaatccatattaagttcagaacaagttaggtgtttggatagaaaactaccatacaaaactatacctatccgactttttataatccattcacattcaataaaattgaaattcaaaatatatcgtgcaactccaaaactaaattaattaagtaattaacaaaactttgagttaacatagttccagaacagatgggtattaagtgttcatcagtaccagagaccccaaaaaatcaagataatattgactatgtcagaacattatagcaaaggaaagaagcaacaaaggccaatttcctgacaatttcattcattcatgcaaatattgattttgtaacaaccccttcttaccacttgcatgaaaagacatttcaaataagctttttcagtgtgacgcaagcgttcaaccgtaattctgagatacggctcaagccagtgatccacttgtcctctgcaattctggaagacaacttcaataagctttggagccggcacaatatcattgtcctccatatttttatccgacataatctgcaatgtgatatacaaatcacagacatcagtaataacggaaaaaatgataataatatcaggccaaccaaacaggtggtgactcaagtaatgatgtaaaagtaactcacggatgaaatcatgttccataaactctgttgatagtcaggctctttgcaagtaaggaaatgagcagttccccttaaatatagttgtccaaaggaaccaaaatat

SEQ ID NO: 2583 - DNA, 830 bp, Glycine max
ttcttcaggtcacagccatcttcattccctacattgccggcattgttgcggccagcacggtggccagcgctgctcacacccaccacctaggcctcatgatccgctgcttcacaggaccaaccctaaaaagaagcgaattctccatcaggcaagcagtctccagcaggctctccctccatgccacggcggctggatgcctcggagcagccttaatttcatcattcacataccatatgctccgggaactcaactacaacgaccgcgacgtgatgagtctctgggttgtttcaatctttagtggcctaatttggcttgttggggttttgcacattgtcacagccataggaagaaccactgattccatctcattctcctcaaggctccaccctttctccatcttcaagtaccctcatgcaattggaggccttgcaggggttttcctctcctcattcaccaccatgtcaattttcactggaggagttattttcatagtgggacaactctgcattaagccactgcacttgctctatctctggctaacctacttcctttttcctcttgtttctttgtcactgctacaacccttgttgcacgtgatcaagatgaattctgtgaagatgcaaattgtggggtttcttttgtcactcttgtcatcagggtttggattctactacggccacagtcactggaaatggggccacttggtgctatttggtgcagttcaaagcacagccacagggattttatacgcttttggaaggctcttggtgttggactgtgctccctctggcaaagaaggtgcgttctccatttggtatgcttggatgaga

SEQ ID NO: 2584 - DNA, 868 bp, Glycine max
gatttgtcagcgagatacatagttgataggtatctacctgataaagctattgacctcatagatgaagcaggaagtagagcttgtattgaagcctttaagaagaaaaaggagcacgaaactggaatcctttctaagtgcccagctgattactggcaagaaattaaagatgttaagtccatgcatgaaatggtaatggcattggttacagtattttcctgttgcctgtatcaattgcttacagtattagtttaagatgacatttctttcccactggttcaggagaacaagcttaaatactatggcgcttctagcattgacgataccaatgaactcatactggactcatatttatcttctacaaccaccgataatgagtatgttatttgaccccataatcagagggcattcatttgtatgtatctggatttgatttctgagcggctaacacattatattttctctttagacctatagaagttgggccagaagatatagcagcagttgcttccctctggtcaggaattcctgtacagaagctcacagctgatcaaagaattcttctgttagatcttgagaatcaacttcggaagcgtgtgattggacaagaggaggctgttgctgccatttctagagctgtgaagagatcccgggttggcctaaaggatcctgatagacccatagctgctatgttattctgtggcccaaccggtgttgggaaaacagaactcgcaaaatctttggcggcgtgttactttggatcggtaaggcttgacacactatatgttttagcaatcatagttagagatgattttgttgttgtttttcttctttttaatgatctgcaggccatgcaagatggcgtaataaa

SEQ ID NO: 2585 - DNA, 880 bp, Glycine max
tgtagtgcagtattgtaacttttggttcgtgtatgtcataacagttacttaaagtcttaaactaactgatgcatattcaagacttgtatttcatttactttaactgtataaacttggatcagaattatagtttcactgttattccattttatcaagcatactgttcaataaacttggatctgttttcagtgaattgcttgttaaagtgtgaatgttttaaattgggctagttatatgagggtaaggctaattatgtggacagttgttttgtttggggaaattacacttgcctcttactttatttactttcttttattctgattccattatctatctgagaaattacacctaactcccctacttttatgtgaacttctgcctataaataacaaagcaagcttggtaggtgtaatatatcaaaagagaaaggcgttggggtaataactgataaacactaacctcagtaaaggttggggttattagagtaatgtacagagagttgcagtattcaactgcactctcagttaaagtgagttagttaggccctagggtttagtttaacttacagttagtttgagggttagttattgaaagctgttgacagctgtcataactaactatcctagcctatatatacctaattgtaacacaaagttcagtggccaaatacaatttcttttcttgattctcaagtttttctttctctcagattctctctcttatcttcttttatggcactgttagaattctactaggggtgattaaccctttaaaattgaagtcacaaggaaagctacattactgttatattttttgcatttgattttctaaaatgcattgcatcagatagtattggcttcattggacttttctaatttat

SEQ ID NO: 2586 - DNA, 895 bp, Glycine max
aactaacttttcccaattggagtaatttgtcaaaccgcacaactaaagataattagatacagagagagctgttttttatttttggtttttctgtttgtggagtctggtatgctaggttgcagaaaagaacttaaaaaaactgacattgagctctagattgtagaagctgtttttgcatgtcaaaaagacatttaactgacatttgagtttgacactacagaatatccaaaacaactcaaatagtgacaacagtggaaaggaagtagcaagggaattcagcaagtgtttctgtcatttgtttgcagtcatcaggtaatccagctagagattttgaatcatatagtggagagtggaaacagtttacgcaacccatatcaaaattctaaagcaagtgagaaaatcaattgattcttaacacaaattcaatgtttcttggcacatttaaggttgtcaaaacttgaggatattctttatatgaggataccaaatttctgataattcagaacagaagttgatcaaaagactggtgatagttacaagattataaatatgcattggataacaataagatctttacattcttagttgagccaagtcaaaccaaatttgctcaaatgccttaacaatgagatcatggtattcacttgaattgagggaaaggtagcaagcaagtaagtcctccaaatccttcgatgcgcggatattgttctccacaatcatctccaccattgactccctgaagtcactttgtggatcaaatgaggacttaacaacagcaaatccatctggaaagcctgtactccttgaacctttgcttgcagtggatgacacactccttcttgcacatgcttgaacttttctgcttgcaagttttggagaattgactctaagcctt

SEQ ID NO: 2587 - DNA, 900 bp, Glycine max
catagaatgctaaggaagctaacggaagttggttgcagacctgaatgaaccatctgttcaaatgatctaagagcatggccaccgtctccgttttgtgcataagctgaaatcagtgcattccaggagactgagttcttcacaggcatctcttgaaacatttgaagtgcatcttttatggatccacattttgcatacatgtcaaccagtgcactcccagaaaatacatttgaaatgcatcctgatctgattatatgtgagtgtaactgttttcctagtgtcagtgaagctagatttgcacaggctcttaaaatgctggcataagtggccgagtcagcacctattttggctctttgcatctcaacgaatagctttaggccatcttcatggagtcccttctgaacataacccgagatcaaggctgtccatggaactgaactttgatgtgccagatctgcaaaaatcctatttgcttccccaaatttgtcacatttagcgtacatgtcaactaacgaattcctaaccagaatttctgaaatggcttctgttacaatagcctgggaatggatttgcctacccatttccagattcaaagcatttgcagcaatgctcaacaaggtagcaaaagggaactgcctccggtcaaatctagtaaactgtaactccctgaaaagttcaagagattcttcaactctgccattccatgcacaacacatgatgagcacattgtaagagataccatccacctctggcatctcatcaaaaagcttccttgcctcaacaatccgatcatgcttcgagtagaaatcaagcaaagaattagccacaaacacattccacacaaaattacacttcaccacaaaactgtgaacttgttgcccaaactctatatcatccaactgt

SEQ ID NO: 2588 - DNA, 782 bp, Glycine max
tacttacatgcatagaaatagagaacaaacaaaaacaaaaggtaggattttaggaaccaagcatacactgaccttgaagctcagcagaatcaggtgctacagatattccatcaccacctttcttttttacttttaattttttagaagacaacgaagagatatcctgccaaatccattttcaaaattaacaaatgaaaagaatcaaaaaccaactgtaaatattatatatattatataatatttgtatatttatacatttgtggaaaaattatcaagctggcgactatgtattgcattatagtctttttgagtctgactttggataggaaaacttgattctgattgccttttttcaggtactgcggcactaccagagatctgctccttgacatgacctgagaaacttgaccaatacaataaacaataagcagatcaccattaaattatttaatggaaagccataagaccaaagtaaaacataaacttcaggagcaaaatgtgaacatagctataagtttgacatcacaaaaccaagttctagttttatcaaacaagcaaatcacagtaagcatcttgaaagttataattataattgacagtaatttgtcagcataaaatcaaacttcattacattatagcagtttctcttcataaaaagatctcattcagactaaactttcccaagtgcaaaggtatcacaccctcaatctctgtcagatcattatatatagaacaaattccacaatggtgatattcagggcagaaaccaagtactctgttta

SEQ ID NO: 2589 - DNA, 910 bp, Glycine max
aactgctccagcgacgttgcagtgttgctgtgttttggcaacaaattcacgggggaattcgctgtcatgttgagcagcaccgacgccgacatgttgtggtacctgaaccgagagaatgccttcgattctattactttctcgatggtcctgatgccctgcacgcatctctttaagtctcgagggtctttgaagtagttgaagctcaccgatgggttgtcgtttggatcacttgtttctagctgcaactcacccgttgaaattggacccattatcttctcaagaatgaatccgcccctgaacgctgccggctccagcatccccatcttctctattgcttttgccaccgcctctgggctcctctgctttggaggcaacttggaaaattgaccaatctgcatttctggtattcattaattgtcacaaaattttaaatttggaagaacgagaacgagaacagtatagtctatgtttaagcttaaaaaatgggtgttgaggatattagagtagatggggatattgtaccttgggagaaaacatgccgtaatctctaggagaacgagaggtgaacatttgaccactggcggcttcaatgtagctgccaacgttggtgatgccgaccacctctatgagggatacctcaacggggacaggggacgggacaaagatagcgttcatcgggttatccgacattccctgtccaaccaagggctgattcaacaccacatcaatgttgtgtttcctaagctcacgttctgctcctattccactcaacattagaagctgtgggcttcccagtgcaccagctgagacaattatctcgctcttgggaccctgcttcaggtataccctgtgttctctccccaatgcatccatgaatatcactccactcgccactggccttgatctacta

SEQ ID NO: 2590 - DNA, 880 bp, Glycine max
tttatccacttaataaatagtcaaaaactgacacagccacatcgcagaaggtcatatgagcaataatttcctgatactagttattgttgttacctcacatggttgagataacatgccttccatgctatctgtttagaagttaatcaataaccaataatgaccaggtaccataaggcagagagagatttatcagaccagttccaaaaactgatattgtgcaacaacatttattcccaataatttatacaaatctatattcagccacaccatgaatatattcgaagtacataatgattaataaactcatcccattaggaacaaagacagaagaaatcagtaatagaatctgattgattaaacataaattttggggtttaggctttttatgccttgtattcataactgtattttcagtacacctagtactgaatttcatatataatatattgatttttgctgtgcaaaaaaaaaacataaattttggtctaagaagcaagtaatgcatgtctgtgcatgcatcaaaactgggctttcagcatcattgcatcaaaccaagatttatcaaaagaagtgaaacacatgtaagtggaaactaattgaaataaactttcatttaaggcacagagaaacaataagccaaaaatagaagctaaccagcaaagactcctctggaaagatcaatcaagtctctaagagcaaaaaagtcattgctttcaagaagatatctcctgcttccaagtcctctgttgatagacctccgaaatgggcagcgaacatacggaagcattgtacctatcttttttctgacactcataatatgaagcaaggctgggacctttgacaaaaggaagggattaacagcagtgacacaaagcatggg

SEQ ID NO: 2591 - DNA, 954 bp, Glycine max
cgccagcttgcatgcctgcagaaagctgttcaatatcattaaaagtggttgctactacctttgatctgatgaacataatcttcggcattaacaaagtatttcatgccataaagtcaaatggcttctcacataattcattatagctttatgcaaattattttgaataagacagggtgcaaaaactaggactgggcagagatatgaaatattctcatgcactaaaccaaattgtaacaataatcaaaagtttgaaaggggcaatggtaaagattacctgcaatagcaaatcaacaacgggaacctgcctatgaattacagcagcaacaagtgcagtacaatccacatttatgtggagagaaggcttaagtgactgtaaaagcacccggtctgttgcacttgaatccacaccacactgccattggataaaataaaccccaagtttagcatattcaatcaagtattaaccataactaaaaagtacagtaaaaaattgagtacaagcataggttttagagactggcagttaaatactaagtttgcactccacttagaaattaggtatgaatctgtcagttgaactcagggaataggtaattttatcgtagaagtttactcttgcaaaaggacagacaggtgaaatctttgaggaagtttcatgaaaaactaacaagcatggaaaatacatgaaagttttctgaatgtagagagagcaggagggagaacattatcagattgtggaagatagaatccaaactaggtatcagcgcagcaatcatgcataacaaaagatgttcatgataaagtcaaggacctttgggtttaaaagaacctcattgtaggggctagagatgtcctatcttcttaatgcttagtatagtactgatcaaacaattgcaaatgctactatagtactaatctatgttctggggtcaaattaggaatctctagaactat

SEQ ID NO: 2592 - DNA, 898 bp, Glycine max
aaggtctgcaaatggctgactcagttgttgatagctgtggactacttgcattccaatcgtgtgatccacagagatcttaaggtattgcatattcgcttttattgtttaagaaatcctttgtgatgtttacattaatgcaacttcatgtatttcagtgttccaacatattcctcaccaaagacaacaacattcggcttggtatgtagtatttattccttgaaagctcaaacttaggctttcataaactatgttatctgaagaaatatatttattgcatgaaccttacaggtgactttggtcttgcaaagcgacttaatgcagaagaccttgcttcctcggtatggatacatgcgtgctatgttagcttttatctaatgcctccttctagtaagttacctgtatttttgtcccatggtaatggactgtcatgcccagtaattgacgcttctcagcttaaataattaaatggatctcattatcttaaggaattaatctttaactcttggctgagacataccctggttcagcccaaaaaaataaatttctgcatatatatttatattttttgctttgaacttcttattgctaaagttaatgatacttaaataaattcacacagtgatatgttgttttttatttgcatacttcttatatcttgtctaggttgttggaactccaaattacatgtgtcctgagctcctcgctgatataccttatgggtataaatctgatatgtggtctcttggtaaggttcatggataccttattctaattgacaaagctatatggtatcaaaccttgtttaagaatgaaatctctttgtatgtaaaggttgctgcatgtttgagattgctgcacatcaaccagcatttcgtgctccagtaagaactttaaccat

SEQ ID NO: 2593 - DNA, 891 bp, Glycine max
ttgcatgccttgcagttgtaaatcaaagccacatcagttttcacttcagtaactagttaaatgatcatagaaacttcaaatgtgtatatattagtattacaatactaaagaaaaacaagtattatggatcaataccttcaattttccatcaagaaggccatcaagggccatgaactgagcaacatgagacccaaatcctcctattgatccttcttccacggtgatcaaaacctcgtgcgattttgcaaggcttcgaattagggaatgatccaatggcttgcagaaacgtgcattcaccactgttgcatgcaagccaagatctcccaagagggtagcagcagccacacagctctgaacagttgatccatagcccaacaaagccactctttccccttcaattagtatcctacctttcccaatctgtcgaaatatcacaacacaaatgtgtgtgtttggatgaatatatataaaattaattttggttagaattttgattttggagaaatgtgatttatgtttgaatgtttttattatgaaagcaagttagaagtaaaatttagtataattgtttttatcaattcctaaaactgcttcaacttaaaatcaattttggacccagaatcaatccataaaagtggaatcaaacatgtaaaaattgatctaaaattacattactcatattttaatgtgattctagaaaattcaacgtcaaaccaaacatgttataagttgatttgcataattattcctaatcaagtaatcatcttcataaaggtaccaatataattctaacttacctcaagaggaatgcctttattccctggtggtagttcaacaccaacaccattccctctcgggtatcggaaacaactgggtcgatcatcaatggca

SEQ ID NO: 2594 - DNA, 914 bp, Glycine max
acctaattgagccggtgggcttgtgctggttctcctcattgagtacctttggtggtccaatttcggttcggatttggaggcttaccatgaagtttccagcatctatcttgggtgtgtcttcacttcttacaaaaggtacatcatagagaatccttgttctcccctttgtcgatctccatcttgggggctacacctctaggttgactggtctgccattgatcaatcttctttcccttttgtgcaattaagacagaactttcagtggattgaggctccatcatcacccccctacatgcttcttctgctcggaaggcagccatggtttcattaagtgaggataactccttgcctagcacctgaattcttataggatcaaactcactatttagtcctgtcaagaacttatagattctgtcattctccttgtaacgtttgagtaaattagcatcttttgtgcattttgcttcaaattgttcataatggtctaactccagccaaagattttgctgattttaggcatactcactaatggatcggtctccttgtttggtagttgcgatcttcatctttatttcataaatttgagtagcatcaccaaccttggatagttttgtttacagctatcccatacatccttggtggtcttcatgaacatgcaagcatcgctcacctctggtaccatggaattccacaaccacgacatcactactgcatctgcttcatcccatgcaccaatgtctgtggattttggggcatctgtcccagtaagatgattcaatttgcccttgccttttagaaaggtttggacaaagtgagatcatttgaggtagtttttgccattgagacaaaggctgggttgaatattttgtagctcaacagtgccagtattttcggcttgagcggggttattggct

SEQ ID NO: 2595 - DNA, 753 bp, Glycine max
atatatacaattaaattgttgagaaggataagcattaattcatagtgtaataactgaacaatagttgtacattgtaacagaccatagacattctaggacctccaactaatatctcaggctttgtggttgagttggttcttaacaagacatttttagcatagggaattggagcctctttggttgttaacaaggctcatcaagctctgatatcttgtttcataacaagatatcacacttggagcctatttggcaaagtgatctggagttgactcttgccttttccacttagaatattaaatataatttatagcttaggaaatggtgtgccagttctttgtccttttttcactctcagagggtcttgatgtgagaagttgtgttaattaaaactatttttggacccaattcttatgttattccttggttagggctgagcttgcattgaaaatatgtagttagcttacctgtcctaaatccacagcagggtttagactctgtccacaatcgtaaataatatctgtttgcaaaaatctggtttctccattcagaagatctatttccacctgagaaatcatttccactatttagcatggcagtataagataagttggtttagttacttcagtaacatggcttgtctgaaaatatgacataagcacttaacattcaagagaagtaactaccaattaacttgagaaaatacaactttgatttgagatatgcatagaaaaaaaaaatcatcttacctcactt

SEQ ID NO: 2596 - DNA, 953 bp, Glycine max
tgcatgcctgcagtaaaagattgagctacattacatgaaacttgagaagtcaaatacccaatttactcaaacctatctaaaatgttgcatgagtaaagccatgttccatatttatccacatattcatattttgataaaccacacaattaaatcatcttactttgtccgaaccaactcaagcagtaatgtttccattgccagctgaaagttcacataaagaaaactgctagtcagaaacacgtctttgccagcttaaaacaaaacgatacttcaaagtgaagattaataaatgatcacaaatctaacaatggacctgaacctacccatagtctcggagttttggcgtcagattttttgtgcagtttacttagctctgactgaaagcttataacgatggcaactttgaactcaactgagaagggactgcatgaaaaaaatagcattaacatcaaacttagtcgattcagtatgcaataagttttacatgcacaaagtaattcatgaaaagatattgatgaaattataagtgctaaactcaaaaaagttttagtggtgtggttctcccaaggttctttaatatagaatcaacatgtacaataagtctgtgtgtgtgtatgttcagttttggatgtaccacaactcttaggaaaattgaaatacattggaggagaattcatcgtggaaaggacatacccagctaaggttgttggacaggtcaaaaggcgtggtagtattacataaataggcagcgtcaaattatggcacacatctccatctgctatctgctaaataaaaagagaattaacagcttattttgaattgacatgtatgatttaatacaaatacaccatcacttgcctgtgttgtttggaccagagaggtttcggtcacaattttctccccaagaagaacggactcaactcgaaacaactgaatgtcaatagaatgaattg

SEQ ID NO: 2597 - DNA, 821 bp, Glycine max
aaaaattggttagaacacaatatcaatgtttaaagattactgttaaagactttgcattttataattctatctaatttttgtttctaaactatggaagacttttatttcagaaacacgatgacaattcaacaaaactcacaatctaaacaaaaaaaaaaatcagagtcataaaatatattaatatttaaaagaaagaaaaaaaggatgcgcaattaaagttgaaaagtcaaattgtaattaaaaaaggttaataaaaacgtgggtccacgcgttttcgcgttctttccctgtattggcgtccacttgatatctttcgttctctagtctgtatactatctgtccacaaactctcgagagtttccacccaagatttcctgtattcgaagaaatggttgatagtgttgttacttttctgctacataacttgtctcggctccttgaagatgagcacaagttgctttctggcgtggaggacaaaatcaattctctgcgcaatgagctcgagtttatgcacgccttcctcatggattccgagggcaagcgcagtaatgagatagtgaaaaaagtggtgagccaaatcagagatgtcgcccacaaagctgaagatgttgttgacacctacgttgccaacatcgcccaacaaaaacagagaagaaaactgagggagtttttccacctcaaagaacatgtcttggtgcttcaccaagtcaactctgagatagagaagatcaggagtcggatcgatgagatctttgagaacagggacagatatggcattggagaaggtgatttccgaagcgaagaagctgctgcaggtcgac

SEQ ID NO: 2598 - DNA, 837 bp, Glycine max
ttctggcaaatgtttctttggcggggaaacagcatcaatgtgctgtttgggaagagctctgtctggatgggtttgtatcacttgctagacttggcaccaaggagacttgtgacccgttgtgtatggtgatttatacatgttgtgatggaaaccctgaatggtttaaacggttgtccagtgaggatggaaggctcgtaatggcagaaattgtgagaaccgcctcttctggtgagttagtagtagctttatgtattttgcttttttctctatgctgtcctgtcatttgggactatgggggtttttaagttatagcacttattttattttcatttgtttattcttttttgcttgtaattccttgatttaaatggtgatcggaatgggggtgtgagcttagaaataacagagagacccaagatatggagggtgtatactagaagaaacaaaggtgagaaagggaaagatgaggtggcaaggggagtaacagaattgccaaaagtgtgagagagaatctgagggtatatagggaaggtgtgtgtgagagagagagggtatgggggaattttggaattctgttatggagagagaattgtgacctctctagaggagcttggctctgtggcagttggattactcccaactatattttcgatttggctatcaataacactcaccttctctcatttactgtgttattttccattactgtgtgtttggtccctaacaaatggcctttttgaagttttggttctgttttttttttttttttacaatgcacaatgactttgtgtgcaccatatagctgacttcatctagtggggcagtgcttatgttgtt

SEQ ID NO: 2599 - DNA, 995 bp, Glycine max
aaaaaagaaaaattagtattgcaatagatttattgtaaatacttgtggtgaaccttcaacgaatcatgatcatgatttgacaggctaagcccatgatgaaccatacgtggtccactcctctcttgaaaaggtagtctccaacagatattttcagtgataccagtgagaatatgtacttagtactaatgataccatttattgcagacagacttcttataaaactagaagtttgatagtttacaacatttagaaaagtgtatcaatttaaatggcagaatacaaataaaaaaatgaaaattgcaaaagaaatggcaaaactgcatgaaatgaagttgtgttttagactgcctatgatcctttcccttttcttacgaaacttattcctaaaataaggactagatgatgggatctaattggcactctcatattggtgcaacggaagagagagaatttcaaattagcattcattgtgtgaatttcatttacagatatactcttttctattttcgtgataactgtgagataaatagataaaatttgataagtccagcaacctaacactagcttgatgcaatttttaatgctctacttgctacttttggcaaagcaaaagtgcatgtacagaaggggtctaacacaaggatgcaaatacactggtagtaactaggaacaaatagggtatcttgcattcttcttctcatgcacaaatttgattcacagttaagtatagctgcactaggagaatatagtagaaagcattgttgaagatgaatatgaagtggtgaaattttagatatcacagatctaagcacaataatgaaaaacaaacagcattacaaatatattatacaataaatacaacaatagcatactaactttctggaaacaagattttgcagttcattacttaaatacaaaacattgtaaactcctatattaaagaaattatctcgcatttgtagctgccaacaatggtttcttctctgatcagaagt

SEQ ID NO: 2600 - DNA, 839 bp, Glycine max
cttgcatgcctgcagctatcatctctgtttctcaacatttgcagtatccaatcaatgatcttttaggacctgatctctctctagaaatctcccagtcatgcattgtccacactctccagctggtttttatgtcagcgtgtcatggctcatcttcagccaccttagctggcaaccatatagataatctcacctccccattatctgcatgtccgtcaacctttcacttggttatttcagccactcttccaccttggtttgccctgtttggcagtgtgtttgtcttctcatgtccccttatttggtttctttcagtgtggttaaacggaggagctatggccaccatgtcggttttttttttgccaaccgccataggcaatttttgaagggagacttgctatggcggcaccgtagaccacaatggcgtgttatatgacagaattttggccttccactgtgttctgccatctgccatcgataacacttcctttctcgtctgtatggccctgttccattgcttctgttttgcttcatcttatttattttgccacgaattagcttattcctgagtgggttgctacttgcaacacttcttccacttttttgaatttccttttcctctgccttgtactgtttgtattacagttgtctatttggctatgggttgctgtagtcttggctacatttgtctgtttagctcagttatgatgcttgttgtgttgttctcttccagctgctagcttttgactgaggcaattcaagctgtttttgaactaattcttgagagattaatttttgcattttaccaactttttttttaaaggaaatttatctttctcact

SEQ ID NO: 2601 - DNA, 844 bp, Glycine max
  misc_feature (835)..(835): n is a, c, g, or t
ttgtaattgcccagcctttacgctaatgtcgttgtgttgtggttttgctacgactgttcatggtttagattggttgtgcggtttactcaagtatatcagttgtgcaaccagcctaggtcctggaaaatgggttgccgagtggaaccagatagcagctctgtactcgtgagacgtgacttaccccgacgtaaatttcatcaaagtcaaagtcattattcgtctaagcaaatttcatcttcatgagctttcaatattcaatcagcttatggacttctttaaaactgctacatcaaacatctaaagcatcttgtacacttaacaaagtatcagatctgctcacacaacattgtttctgtaagattttatcttaaataaaaacaatagtgctcagtgaagttgcctaaaaagaattatcaggataggcgacatatggagatgagctataggttttgatattaagttagatttcatgttgacattgtctttaagttactcatcaactgaagcaatgcctactagaatttgtctccaagttacccgagagaaacaatgcctactagaatatgtggtacaccaatatggttcctctatatatgaatttgcaaatgattagagactgtttttaggttttgttttttttgtaaactataaatgccaagcttgcaaatagcatgagtgagtacgaaacaactacacattttcgagtttcctcgtgctcatgtagtcatgttctgtacctgtgttacacattttaaggcaaatagtggatgacaagcgatccttacacatttatctaaattaaataaatgcaggattggctgcaggcatgcagagnctggcgtaa

SEQ ID NO: 2602 - DNA, 825 bp, Glycine max
tatggggttttctagtggtatcttcaatgtatacaattggatttctatcccctctagaaccagcagtaaagccctccttccagctcattattgcattcctttttctcctaaaatgtgtaaatccattcactttcatgacaacagatttcaatcccaagcccctagcctttcggccaacaacttccgcggttgcctcggcagcatacctagaaagcttttgccctgatttcaggtctttcaatggaccggcagagccactgagttttatatttcctttagaatctgttacagtaacaaaggtattattacgcaacatctttatatgaacaaaatcagcatcctgctcatattgatactgatgatatggagaacccctcccaaaattatcttcatctataattcctcttacaaagtccataggcctagagttccagccagtctcagcatcattcttgtttccgatgtttatgttctctttatcttgcataaaatctggaagagcatctgcatttgcatccacattctggtccatattattctggcttctggagtttatgttgtctctattccccataaaatttggaggagcatttacattctgtcgcatattattccagcttctggagtttatgttccctctattctgcacaaaatttggaggagcatttgcatctgcattcatattctgtctcatattattccactttttggagtttcttttctctatatcctgcatagaatctggatgagcatttgcatctgcattcacattctggttcacaataagcctcctccaatctaaattcgagctagaaaatcctctaa

SEQ ID NO: 2603 - DNA, 830 bp, Glycine max
cgccagcttgcatgcctgcagctcttcccatttcttttcaatcctgttaatggacaacaacaatgatacataattaatcactttgatacataatcactttactataaaactaatcacaataatacatataatcacttaatattaagaaaaaaatatgattaatataggaagaaaaaagccataaaggaaagagtgaaagaccctccaggccatgagaaatttttatatggtctgagattataatggttctaattaatctccaagtaatacctaattgagttttattatctctttcttgtgaattgaaaaattcaattacgtatcacgaaaagattgactgagaccatacacacatatcagatcatagtataatttttcaaataaaaaacttaagctacacatgaattaatgtggccaccatgaagagttgaagttgaaaacaatttcacttgttttttcttcttttatagttagatagtaacttatttatgtgaaatccaatcatatatatatatatattaagaaagaaaacaatgaaaaaatttggtgattgttacctgcaagcctagcaacagagttccatctgccttcacaatgcaacctaacatactcaacaagcaacctgtcctcttcagcagtccaaggtcccttcctccatacctcctcctctaagacacctctaccaacatggccagccataacttccccccaatacatggaataaggcttcaagttttgtgcttgaataagatattttcttccaatttctgtgacactgcttttagtctagtgtttgttgcatattttgggtctagtgttgcatatttata

SEQ ID NO: 2604 - DNA, 886 bp, Glycine max
attagattaataagaaacatcaaaattaggaacagaaaacattgaatattatcattatcatacaacaaaaatgcagctagcttgcaatcgaatgagtcaaaggaatattctcctacaagaacatcacaatcattagccttcatataatatatgtgactaacttcaacatttatttcaagagcattgacaaaaaatagcaagatagcctaatttacccttacaaatcaccaaaataatatcctatagcagataaatcatcatattcggatgtgcctaggtaaataacaaatgtataatgattacacctcacagaacaacacgcataaatatactagatccaaacattatgcaagttattctgacctaggtttttgtcaagagttttggtgaactggttcaaagctggaggaaccttcaacctctgcttcagaatcctcttcttcctctgaatttgaacattctttggccacttcacgaaccgagtcaagtctctcttcggaggcaacgcccctccgattccgaactgctttggacgcttctcgaacaacggattcgaaaccttctcctgagatttcaaaacagaaaaaatcactttcaaaataaaaattaaaaaacagatagcaaacaaccgaatcatgaatcgaaatgaactccaagtagttacgtacaggcttcttcttagcggcaagagccggagcctttccacctcgtttgggagcctaggaaatcaaacacagtaacaattgcacattacgcaaacgaaaaaaatgtttcacatcaaaatcgacgcaagagctaaaacctatctaagatataagagaagcgaagaaaatgtaggcaagcatgtgcagagatgatctgaagtcgtgaatagaactcaccattc

SEQ ID NO: 2605 - DNA, 857 bp, Glycine max
aaacagccctaacactgatggcattcatgtgcaactctcatcaactgtcaccattctcaactctaacatagcaaccggtgatgattgcatctcaattggtcctggaactactaatttgtggatagaaaacatagcttgtggaccaggtcatggtatcaggtaaggatctatatatttttcataatcttcatgcaaaactaataaaatatatttttttatttaaatatatagaaattaaagtataaaaattgttgtaatcaaatcatacattatcgtataattataaattaatttttataataattatatggtatcactgatagattatgggtcagtcttgtacgaaaaggaccaaaaaatttcgcagataataagacaagacccaaaaggtcgaaactgggaacaagacttatgaggtcggatctaagacagaaggaaactataaaagggcctttgtctccctaaataagccaacttttactcattcacatataatagaataacctacatcattcaaagacgcccaaatctcacatcactccaccgttgagaacttttcaccatcgtgttaaaacttgaactctgattactcgagcttgcatcatatcaactttcagcacaattttttaattaattagttaatggtataaaaatatttattgactacatatatcaaaactaaactcaaattcatacacattattaagtgaaatttatgtgagacataccaatgagattctcattttttctgtagtgactccgacatttatttaagtcaataaatatcaatctgttataaatgtgttagagagtatattattattattatttgttgaacattggtttaacatgcatgt

SEQ ID NO: 2606 - DNA, 864 bp, Glycine max
ttgttttcttctctgtatttacaataggggaaagatgcatgaagcaatacgtcttgtgttgtcttagtgagatgctttgtctcatggacaaaggagttataaagctttataatctgacagttttttcttttttcttaccgaactgtctgtctgctcaagatggtgcatgcttagttttggtttatggaattcaggaagataaggaagtatcttgaatttgagcttttaatcaatttctatatgcatattgtgatggtagttttcatttaaaacaaaaattgtgtttgtcagttggggttacaatcactggatcgcatcatttttatgttggatggcattcgtgtcaatatattttatctggttctgtgctaagctaccatggaggagtttatgtcttgttttggtgaaatttcttctctttgattaaaagtgaagttaaactggaaaaaaatgagatttaattaatgaacgagtgacaaatggtatgggtttggtttttggtttgtttatattggtttaacatgggatgttgcgatgatatagaggggtccatgctatgttctgtatgataccaataagcttgtggtagagtaaactccaaaaggatgaagaaaaaagttagcataaggcatagagtgcattattatgttaaagaatgagaaattgcaatggcttagagtgcattattattaactatatgctggaatatatatgataaggctccattggtttatgagaaactacgggtggagattttcccccctattaaatagtaacaaatttggaagattaaatacacaaatgttcacttctcttgtgtatgttggtctctcagtgcttgcatatggtagtaatctgcattat

SEQ ID NO: 2607 - DNA, 903 bp, Glycine max
ataatgactccgtcacctattgaaacaaaagcaatttcgacacgacaatcatttgaaatggctttgttgaaacaagtgataatcgtctccattctcgtttcgattccgaaaatgccttttcaggcaaggaaacagttcctccccacattgcgttaatttaatgtgtagacaggtattttacttacaaacctacctatttctattgctaattaagatgcacactcacgcatctgatatgaaacgtgatagggacaatagtgctgtagagatgcatgcttacatcttctaggagtttatcaaggactggtaaagcttgagactctatgaagtcaatcttgtgttctagaccaggctttttaatgaatggtagtcctatctcataagcttttctgtctagatccatagcaataatctacattagggagataaatggagttaataacataaaataaaaaatacaaatcggagataagcagggagcatatagtattactaacctttccatcattaggaatggtgagtgcagtgaggagaagagagtatccagtaaaaactctcacttcaattgtctttttagcatttaaaagcttcaagagaaacgccattagctgccccgaatcaggtgcagcacccatgaagccccttaagaatgaaaataacattacagagaaaaaaaaatgaaataatagtgaaagtcaaatcaataaaaagaatgaagtaatgatgccttcctattgtttttgtttgagaacttcctgtatacacatgtacatgtactactgtatcacacgaatattttgaagtgatcatgcatgtgaacatatcaaaatttattttgttcatgtcatgcttattaggtttagaagtagaatcatggtacaaagaataattacagaggatgct

SEQ ID NO: 2608 - DNA, 943 bp, Glycine max
cgccagcttgcatgcctgcaggaatttgataaacattctagctgaagtttctcagacaggaaagctgcgacatataccatatagagactccaggttgacatttttattgcaggagtctcttggcggaaatgcaaaattagcattggtttgtgctatttccccagcactaaggtagatatcaaccattagtgagtttgacttcttctggctcttaatgtatgctggattatttctcatgacttaacattgcagttgtaagagtgaaactcttagtacattgagatttgcacaacgtgtaaaggctatcaagaataaagcagttgtcaatgaagtaatgcacgatgatgtgaatcaattacgagacgtgatatgccaactcagggtaatttctcttctaccatgatcaatcatttctttatacctggccagtacatatttttttttcaaataacttataactaagaaatcaaacaggatgaactgcatcgaattaaagaaaatggttacagtccaagtgatggaagtcggggtcattcagcagctttgatcagaagaagtttgattttattgaagcctaccctcaatcacccattatcactacctcatgttgatgaagatggtgatgaggagatggagattgatgaggaaggtgttgaggatcatgctgtagttctccacaactcaaatggaggttttgctggtttttcagcccctaatggatctattggttctcctagtgctgcaatgaatggtgacagccctgctggcggcatggttaaatgcaaaacatcccccatcctcaaattccgtccttccagcctttcaccaacaatcagaagcagcaggaaaagtttgaggacctcattaaagcagtctccttctgagaataatattcatggtgaaagtgatttaggtacaaacaccgttaaccagaaatgtttgt

SEQ ID NO: 2609 - DNA, 856 bp, Glycine max
cagcatttcaagcttcaactttttaacatatgatggctcattatactggcaatagaagtgtttgtagtctgaggaaaatatataaggtgctcgcatgaccaaaatatgcaggtgacttaaaactgcataagattgttctggacttcctgagctcacttgagttaagagaggggctttgatgcgctcatatacctaacaagaagaatgtgcaacataaatcacagagaagcaaccaaagctgacaagtatcaaggcaaaataattcaagatcaagaaaaaaggtttaaataataacaatgatagtttcaataagtacgtaaccaaagggaattgtcatgagttatgactgaaggtgatgtaacatgttgacatatgggtaagggcaaagagggattgtgtaggctataacaaacttgcatatgtggcaacgagtgtgggaagcattgtcaggcttcgtgggatataagggaaaagaggggtgggctataatcattgggatagttttgggtggctgtgccacagggcagagaagaataccttctctgctatttttctttcttatatgagtccatatatgaatatcataagcctaatctttcagctgaaaaacctaaatgccaaatatatgtcctctgtgaatgattgagcaagataatagttaaaagtaaaatcattatgagatacaaagcaagcacgattcagaccaaagaactttatgttaagggaaaaataacatgtataaaaaaatgttgcaatgaaaaacaagattaaatgagatgtttacacacaaatcaaagcatacctgctgatgcacatcagccatagacaaagtcaactgcaggcatgcaagctggcg

SEQ ID NO: 2610 - DNA, 908 bp, Glycine max
tcctggcccatcatgctttggagatcctgaaagatttgttgcagaattctcgagcctacagaacacaaggacatcattcaggttcatggcctttaaacacaaagtttgttaaataataagaaacaatcgcatcttttatgatactagtgaagcattctaaaattaaaccttgcacagtgacttggatggaatactaaaggcagcacaaggcttccattgaatatcaacgaataccaagaacaaaatgcaggaaattatagaaaggtcatggttttaattaaaaaatgaaacatttttctcagtcaacagtagtcagatctataaattaaaaacaagacagcaagaaaagaaaaaagaaaatatagcatatttgaagcaaacaaagagagaggagtagtttaatgcaactataatacagatatatctataccagaaatttgaggaacgctgaatgacctaaaaaaagtattggcagaacaccagaaaataagcgaatattattaatgaaagtagaaaggagctcttacaaggaaccaccagagcctatgctcctcagagaaaactatttctctgccaacaataaccaaaataacttgtagcattttcctattactatatttgaagtatttttaaaattaattcaacatatatcttaacatgtatcctagatttccatgctgttgtacatgcataatattaggtacaacagatgcaccattctaaattctcctttgagtatgtccctattgctttacatatgcagtacagccaatacttaaccagtgaacagactgcctacagaagccattcctttctaattgtgtattgtatattaagtacaaagaacaagcacataaggacagagaagggacagggttaatgtccagagtacaactgcaggcatgcaa

SEQ ID NO: 2611 - DNA, 853 bp, Glycine max
gacctcgctaaaaaaagcgcatgagagtgaaagagaacagttgtactgttgggggtgaagtagtttcttttcttccccccacacccccattcatgcatctttatggtagatcgtaagtagaagtgatgagtgtaaatgtacatttttcttttgtttggtggtattggacatttggacttgttggtttctcttttaggctgtcttgaacacctgttaatatgtatgatccagcagtgaaggaagcacagattctttaaatggttgctatgttggtattggatacttctagcctgcctggttgcatcctgtatttattattgaacatttgtgccaatgtaggtgagatatcataagaattgtacgaattatgtctctacagtgacaaatgtgaggctgatgacattcaatttgacgctcttattgttaattcacatgtatattttttaaacttcttgctgaaagagatttttttttctctctactttttccctaatcattgattggacccaactattatttttaatttatggtagctatagagtatattaggtgggaaatgaggactaatcttgaccatacaactatacatgaatggaggcttgtgattgtatctgtgtgtatgtatgctttatgagatgatatagttgtatttttgtgttgtatgtgataccacacctatacttgtgtgacactggtggagccttgtctctattttattggttgtttaggaagacatcctattaaataaatattaaatacttgtgtttgtttatgtaagtaagtgcacgagttctttcatatatttaggaaactatatgttgtgggcttacattgtatgttctcccaaatgcgg

SEQ ID NO: 2612 - DNA, 867 bp, Glycine max
agtcgacctgcagcaactgaaattgagttagctaaaagggtgaaagacttctccttcaaggagacagggtactttttatttccgttttccctgtaaaagacagtggcttgcattcttggggatacattgatgtgttgttttcacacacatgcctcttccattcattgaattttttttaactacatgaggaattttgtttgtatgattttgccttatggttatttggggtataaggctatcaatatccagttatgattttataaacattttatttcatttgctgaagtccatgtaacttgtaaggcactttttagcaagtgcaatattggagagatgcacttgtgggtaaaaaggacttgtaccattattctaattttgatcttaaacaaaaaagaagtttaatatgtttatttgcaagtatgtgcaactgattataaacttgtggggacttctgtaacaatttttgtttaccaagttgtgtacgtttgatactgacatgcattaacatgccttcattattatgtatttgcatctcattggcttttagcccttaggaatcattcaccactaacgtagaaatgctgctctttttttatcacctgtcttgtgcagtttattgggatatgtcaatatctttttgttatcgagaattattaaagtcggtataacataaatgtgttctaaaatctaacttgatcttggatgtttttaacccagcaccatatattactgtgtattatttggaaatagttactgtctctattcactggacttaatttattttgttcaatgcttatttggtatttgacacgggaatggaatggactaaacatttgcaatggccctgcaaggcatgcaagcttggcg

SEQ ID NO: 2613 - DNA, 957 bp, Glycine max
ttgcactgcctgcagcctgtatgagaaaatttataatttggacattttttgtaaaatgaatatttgggaagtattaggaaggggagaatagggaagaaatcattcttcaataagacagaaaagagataaaaaaaaaaagacttgcaactggcagacttaaaaatcgatataaagttctcggccaaaagtcaaggttttaatcaaagggacattttatattataaacttccaaaaatcttaagtatgtaattgtagagttcacgaacaatcgttgttatacaatagaacagagtattaattagtagttagtaccttcataggagtgacattatacgtagaaacacctgttattggagtagaacttttgttttcggcagtataaaatgcgagggcactttcaccgggcttgaccctaacctggtagaataaatgaataattccacattacagttttaactttttcattctccttaatatccaaccattttaatggcacgtgaaacatttgcaagtcagcaagagctcaaacacaatcaaatgtgaaagtgtaaggtaagcatacaactagatttagatttaaaaataccatttgtaccccaaatatttaaactatgatatgactttttaaacaaaagctcggtctttaacttgacttgactattactagttctttgagtttccattcttaaattatcatggactagtacaaataaaattaacagctccaagaaataaaattaaatgttatcttaaataatactttctcatgtaagttaatatatcctctttgtgatggaaatgcagaatgttttctgtaaggtgcaaaatgttaagtaaagaaaaacctctctctgtgtgggaacaaacttccatggcatcccatcagcaatatcagcattgaactggaccacaatttccctgtaaaagaaaaaaactcatcaacccaataatagttac

SEQ ID NO: 2614 - DNA, 980 bp, Glycine max
ttgcatgcctgcagtcagtgtcatcccattaaaaaatgtcaggtttcaagtgatctggatctgcacaataatgtttgccattaagtaccttaaatttcaaaagtaatgcaattttcccaattaattgcacttaatggcaccatttagagatgcttgactgttactaataatgacaacacaggttgtatgaaatgtaaaaagcaaaatattatataaaaaaaatgtttgtagtataacaatactatcatgagggtcatatcactaaattcacccaatgctaataacatcagtaataataaagtttccgcagatgcataagtcatgaatagccatcagtgatgaatgagggaaggtgctacagattttacatcactactgtcatttgcttccttcttggttagaatatattagagtagatgagtagaattacactctattctgttgtaactacagttagctatgttagttgacttcaactaaccttaggatagttgacagttactattgttaactgtaataattgtttggtcctagtataaatactagagatgtaactgttttcagttttttttttttggaaggcaaagataatttataatatagaataaaagtaccagaggtactacataatacaaatgggagtcctgagagatcaggagatacagcgccctacacaattgaataccctactaacaaaaactttagctaaaagctatagacatatttgaagaccaacagtaataaggaatctggaaattcctttcccaacccctcaaccaagtccataataggaacagagtgctatctgtcagcctagtgatatcaacggtttgattctggaaaataatatcattcctgagcctccaaattgaatttgtaactgctatccaccacattgtccttcttgtgttagaaacctttgaagctgctgaggaataatgctgagaaaattatccatggcctgcaggcagcaagctggc

SEQ ID NO: 2615 - DNA, 825 bp, Glycine max
tgaaattacaatagataattcagaattcaaaaaaaaaaaaaaataccaactccatcatttgaaacagggatggaagcaaatataaagtaaagtaaactaaatttatggaacgggaatgatgccccagcccaaggcatctaggttccaaaaaaaacttaatagatgaacttacatttacctcactccaaaaagacaagtagaggcttgaatttgcaactttttagatttctgtttgttttggaacactaaaacccaaggcaagctcaaatagagttctttgttttgataaaacaatataaggaactcttaaattaggatatctttcatagtcaacttaagttctcgttaataaaagcaaaaacaacaaagttttatcccactaaatattaaagggtggaattactgaagttcacagagtgaaaagaaaaatcagagaattccaagaaaaaaaaagggtcttgaagctgaattttgcagcccattgaatagtaaatgagtatgttatgattgttatccattcttcgcaccgtgttgcatgtgcacattgtttccatgcgtccatgtcgtaaacaatgttgaataaaaacgaacggaagagctatctaccttagggttcacgcgagaaagctatacaaaaaggaaaaactcagtgactacgagttgaatataattaattaattggtttgaattcgagtaaccctagggtggtatttattgaaattgcacataaccgattaaggggggaaaaaaagaattgaccttgggtgtcaggttgagtagggttggggcgcttgagggcacttttgaggattggctttggagccg

SEQ ID NO: 2616 - DNA, 813 bp, Glycine max
ttaatatttatttatatatatttttttgctcaacaatgtttacttgtatgtcagtgtattacactggtatcccaattatactagacacaatgcattatttacacacacaacataatcatggtaatttttttattttggatagcacagtgcacaaccacgaaaagtttaataatggtgcccaataattccaataaacccccacacacatggcatatagcatgaatagtaaagaatcattctcattataggagtatgacacaaagaaaggaatattagaattatggtccagaaaacagaaatttttaggtaaaaaactactgctgataaactaagtaattttctaatcctctaagcagatatcaaatcactgataaaaaaaatatatacaattcaagcttggtcaattagtcttaagacttataagatttcaacgaacatcctaaccaaataatcccataacagcttataaaaaataaataacaataaaaatgtcagaacgaagctgaattctaaaaaaacaataaatatttaccgtaacagtttcaacagaataatagccacgatcaacataatctcccataaacaagtaatttgtatctggacactaccaacaaaaatggtaacaagaatcagtatttaacaaagaggttccatatttcaactaaaagcaaaaaaaaatatatttaaatatgcaagggtgagatgctaaaaagtaatggttcaaccgagaataaaataagcacatagcacatttgttctcaaatttgaaataagacaatgagagactgagtatgtaactgaatggcaataaac

SEQ ID NO: 2617 - DNA, 950 bp, Glycine max
ttaatgaatatgtagagtgatggaggttcactagattgccaacgacctgcatttttaagaaaggaaatggccaaaacattattattttatcatgaccataatttacaaagcaatattgcatcaccaatatatgtctcaagtataatttgataaattgttatccataagtttctcatatggtaactagaaaaacattgttacgtagaaagttatggtaacactatttttcctctgagaactaactaaccttcattgtcatcttcgaaatcaaaatcaagggtgttcctgacagatctgaaaaatgaagtcataggtccagtagggacatcatctaaggaacctatggtaatgccatcaatctggcagcaaaatataatatcttcattcagaatcaatgccaatcaaatgagagttaatggcgtaaatacagaattttccaatggtgtgatcttttgctggaacaattttagaaaaatgttacaagttaaatgtgaattggttaattagacagatgggaaataaattcataattttattactgaatctagagctgctttgaacaattgacaggcccggcgcttttctggtttatcagggaatacctacaaagacacacaaatgtagtaacattttgaaaagagaaaaaaatatatacgtgaaaattttgaagggaagtaacaggatgtgtcttcttactatgcaagctctggtttccttcttttccttgagctttcgtacaacagccaaggcaagttgaatgttggcatcaatgaactcatctgaagatcccttgaaatatttaggaatttgagaaaattatgtgcaatgtattcagataagcatgtcacacaaaggtcaagtgactatgaattagaacagtttcttaaagcatgaaatcagtgttagcctggcatatagtacagggagctggattccctgcaggcatgcaa

SEQ ID NO: 2618 - DNA, 883 bp, Glycine max
atggacaagtttaatctcaccttttaccaatggtttgtgatgacattaggaaagacctacagtaacatgtcctgtatttactgtgtattattttaaattcttgatatccggccctcatattagaagggatccttacggaaggaaagttttatgtggtcttgctcgtaggccaagtaaacgcaaaaacgtatgaaagatcaagaaaggaaatccagaaaacatgtcatttgataaacctaattgaacccattttctatattttcctttcctgcccaaatatttatgtataagcttccttcaacttgtctacatctctgtcactttatgactgccctttatagcatctccaataatgaacatcatttagtttttttaactcttttaatggctcttaccatcccacatcggttttaagaactttagcaacttttcactccaatgatgcatctctgtaagaacttaaacaggtctcaagttttttacatcttaatttttctttaatgggtctcagacgttacctttcaattgttttttaatggttaagagtcagttcttttataagaacagttcttactcgtaatgtccatatcatcttcctccagtggtgaacctagttaaaaatggttcttaactttaagaacctacacaagaactatcttagagatgctcttgtagtgaaggtataggttgttctaagatggtcacatcaatcacagatcaccttatgtgttctatatttagaatttaccttgtctgttacatcttaaagacgatactgaattactgatgcttatgcagtttgaggatgatgtgtacttgccaacggatgagccacatgggtcaattcaagctagtttgagccgcctttggtcaaagctgtaga

SEQ ID NO: 2619 - DNA, 811 bp, Glycine max
aagaatccctttctcgtgtaaattcttcttaagttctccgcttttttgcatctccaacacaatatctgatccaccaataagctcacccttgatatacagttgaggataactggaccagtttgaataaaccttaagcccttgacgaacttcttcatcagtaagaatgtcaaaactctcaaagggaacattttcttgctggagaatttcaactaccttcctactgaaaccacacttaggttcatctggctttcctttcataaacagcataactgcacttgaatttaccaggctttccagacgagaggataaggttgtactcaaatcagtagattttgagatgccacctttgccgtttcctgattctttctcttttgcttcattagtagtatcaattccatgatctttaaaaacttccttcagttccccactctcatgcatagcaattgctatgtcacacccaccaagaagttctcctttacagtaaagctgaggaaatgtgggccaattggaaaacttcttcaagccttcacgaacctctgagtctgataggacatcaaaacttccaaacttgactctctcttcgttcaacacaacaacaactttcctgctaaatccacattttggctcttcaggagttcctttcatgaaaagcatgacaggattagagtcaacaagctgctgaattctctttttcagaggaccactaagccctggttgaacttgatttttctcctttgaagaatcattgtcttttgctaattctttcaccgtttcaagaacagaagcccctgcaggcatgcaagctggcgaa

SEQ ID NO: 2620 - DNA, 902 bp, Glycine max
aaattctatgggtgcagtctctccttcaagaacttaaatgcagacttctcactcccacaattctgtgacaacctcagtaccgttacccttgctcataaccctgtgttgcacaataggaccaagcacatggaattggatatattctttgtgagggaaaaagtgctctccaagaatctcattgtgaagcatgttccagcccaagatcaatgggcagacttactaactaagcctctctcagcagtgaaatttctccctctgcgtgacaaactgcgtgtgatcaacaaactcagtctgcttgatgcaccctcagtttctaagggggaataatagagtgaatagggtaaatagttagtaagagagttatgccagctggattctattatttgttatgctgttatgcaatagtttgttatgctgttatgccctgttgctgctctatataagagcattgtattcattatttcagataagatcaatatatgagaaatagactttactctctctctttctcttttatgatattctatcacttccaacatcagagcagggtttctcaatagagtaggatagaatactagagcaaacttttgtaagaatctaaattaaaattcagattggttcaatgaataccatatgtcatgggaccaaatctggactgtaatatatattccaagtacccctggtacttcaattaatacatattatttttgctgaaaaaaaaaatataggctacgctagactaggatcgcgacccaatctgataccatatcaaactaagaaaagtgtagggtaaaattgtgtgtcctttcctctgtgtattcccctataaatattctttattacaaataaatacaagcagattttcagccctgtaaattagcaaaactaccataaatccctat

SEQ ID NO: 2621 - DNA, 880 bp, Glycine max
aaattgcaggtaactcagacaatgaaccctcaaccattgttgtaaatgagaatgatctttcactaaaaagactcgaggaatatcagaatgagttgcatagactttacaatgagaaggtacctagaagccatttatgttttttaccccatcatttaggggatagtattcttcaaacttgcaacattttcatattatttcttgtgatttcatctgtagaatgaaagacttcagcaagtagagaaatacatcgacataatacacagcttgtccacaatattgggaaaggattcttcagcaatcatcatggaagttcatccaagcttaaatgatttgtgtggaataacaaaaaatataagtgacaccatcttagataaactcaatatcacagtggagtctctttttgaagaaaaacaaactcggctagacaaggtaaaataatactattgtttttttggtctatataaaaattgttaaatttgaaaagccagtcagaacacacttcctctactttctaaggaattatcccagttattaaaggaacttaaacatgtcatttagctataataattataacaggcataaaaaaaagacacctgggctacaaaattttaaaacttttcattataaaacttctgatatattaaaggagtactaacctgttgggaggctagtgtaaaataaatacttcaggaagcttcaagtaatgagtatttttcccttcacttttttgctttccattttataaatttgtcatattcttgataaattttgcagcttcatcatttaggcaaagcactgtcaaatctatggaatcttatggacacatcatacagtgagcgacaatctttttcccatgtaatcaatttgttgtcactctcat

SEQ ID NO: 2622 - DNA, 782 bp, Glycine max
aaggtaatcaatattcagttcagaaacaccgaaagcaaacacttaaggtatgcttggaggaaaactgagagcagaatgaaaatggaatggaatggaaagatttcaattttcactcattgtagcttggcagaaagtggaaactcactttcaaggtacacaaattgcaacctctgcttttggtctttcctctagaaacatttcaaacttattatttttttttcttcatttcacacttttctaattgctgattatttaacactataaaacctaacatattattcattttagatacacaattaagacagcaccaatggggtatactaccatggtatattagatgtctacatatacaccctcaacttaataaaaaattgggtcttatcaaggagtgctctaaggacacttaacatttaatacacactattaaatgcttttaatcacttaaaaagaaacaaatgttgcattttaaaaagaatttaattttctctaaaagatttttacactgtcatctatacacacaaaatagtcatgtatagtagtaaacttgtcgagttttatagtcattattttaaaagtcacatctaacatgatttatgctcgaaatatttacactcggtacatgaaaattaaactctattaaaaattaaaacagtgcggtgtgtttggtaaggcattcgggaagcttataagctcctttaactagcttctagcttataactttccagcttttcagatagcttataagctaattttaccaaacacaacaaaaatatcagtgagta

SEQ ID NO: 2623 - DNA, 798 bp, Glycine max
ccagacttgcctgcctgcgaacttgatgccatctcacactcagcgataagctcaaggttttcaaaagctccacctttgatcccaataactatgttgcctccaaatcccgcagcatgaacgagaaggtcactctctctttaccttaacattaatttcatgtttttaatgagttccattgcaatattggataaatgggtctatttgttgatgactgatcatgtgttgaatgaaagaaaaattctatggaatccttagaaaatttaagggttttggtttatggagaaaatctctcctcttctttctcgtgtggcatgtctaaactcattcaactatttgctcgctgtatcaaaacccttagatttttggaaaataatccatggacacttaacactagatgtcacccagagagagaaagagagagaagtataggtatgatagcctatataatatgataacaagagtgatagagaaataataattattgatggagtatatgatatatataagtgtctatatatatcatcactgttgggtaccattgcaactctcaaaatgatatcttggtgagtgtaggacagacatgatacccacgagtccctgatgtgaatgtgagaagtgtgactatgtatattatacgccaatatgaaaaattaaaaagctgagtttttagttgtttgaaaagtgttgtgcttaaaaatactgttagatgttagaaacaatccgagaggcaatctatttttttttctttaatcgagaaaaccatttgttgcaacttgcaagatctagctagtttagact

SEQ ID NO: 2624 - DNA, 853 bp, Glycine max
tttgagaggtttcctagttgatgagggattaatcccatgaacccacttaagctaaggtccaagtatctcagactctccattgagcctaggaagcttggtattggagtaagaacaaaataatttgaactcaagttcaaccgattcaaatattttagttcaagcaaagaaggactaatctctccactcaactccctatagggagagcccacaggtgtgtcaagattgatttccatgacttgaccagtgttgttgcagtgaatccctggccatgtgcagcaatcagatttgtcagaccacgatgaaagcctgtttgaagggtctgctagtccatgcttgaagctgaggagtgcatttctttccttctcactgcaagtcatattgagccttgctgccttgcttgcactgaagtggagagttgttgcagtggacaatatcaagagaagaacatgagttgcaaatagcactgccatgaagaagaaggaagacgaaaaaggttgaatccacaattttctggttcacggttggtatttactactaacaatgcctatataggatatataccatagaagggtttgcatttaaaattttattccactaatggtggtggttgcaaaatgcacacatatgtagaggtatatatgtctacaacgagacatttaggattaaaagtgtctaaccacaccaccattattttgcactagtttattttattttgatttaactactctttttagtccttatagttgtgataatttttttttagtccctatagtttaagacattcattttggttcctatatttataatttttttaccttttggaccttgcgggaaagattgctgcaggtcgact

SEQ ID NO: 2625 - DNA, 942 bp, Glycine max
agtcaagcatgctttcctaaagctaggatcaaaattgccaatgatcccaatggcaaaatgtaacagattcacagacacaagatgaagtttttgagacaaaatatttgagccatcataacacagtcttttctggttttcactccagcagtgaagtgcaaaatgagctactcctccccacctgtgtttaatgacaaacacacataatgagcgaaactcagatacttagaccatcagagataacaagcttttcattaaggctaaaatattttgaactcgtaagtaaaaagtacaatcttgcatttatagtaatgcagttgcaccattattggagtgtatggtgccatggacgaagaacttcagcatttctaaaataactgcatagtgctggttcaattctcattcaatgcttcctatttatcaaactgagtttcttattactttttttaatcatataattgaatgttatgataagggtttagatcactttgcagttctgaaagaactgcaaaggattggcatccacagcgctatagtgcttgtaatctcttcaatcacctcactcatttggaagtaagaatatcaatacggggcccaaatataacttacaatctatcaatcacaaacaatcaaaggaaaaggaatttttaaataaaaaaaaatcatgaattaatcggagggcctaatgaataagcaatcttccaaaagaaaagaaatcccattataacatatctctatagtaaatcccagcttcaatctccatgtgggattgaggaaagaccaacaagaagatgaaaggttgataattttatactcatccttatcaatagggtaataattgacataggcatcattattatttaaaatactagaaaaaatggtccatgaaccagctttccaaagacatgtgtataaaagcctgctcctatgtcctgcaggcatgca

SEQ ID NO: 2626 - DNA, 808 bp, Glycine max
ttgcatgtcctgcagattccaaagctttgggaaatagagaatccatttttgcacccaaacaactcccaactcggtgattcccaccacccaaaacaccatcacctgtgccttccccccaaatgaaaacatcccctagagcatcaccatcatcacgaccagaaccttggctagatgtgctaacagcacttgatagactaactctaaaagcatccatacccattgtcttcatgtgaccatgcatactgtctgatcctccagatgacacagaatgtactgaagcactggcagaatctggagggaagaaacccttctgagggacagcatacaaaaccacatctaatgctttatccaaaccattcttaggggggctctcgtatggactatgaaggcgaaggtgatccccacagtcctgaataggaaaaataaatattatcttaacaaacaaattcaactgcaatggagagaaaaagggagaaaatagaaggacataaagaataagtttataccttttgcaggctttcattactgccaaagggagaattcaagggagaacttcttcttgtgtatgtccgaggactattagcctcagatggaataccatcacttcttgactctgttctccacttccggtgatggcttcgagaaattaatgctttcaaaccactgaaccaaacttcagcttcatctttatccttgcatatctagtagaaaaagaatcagaccaccagattgtgttaaacttctgcatacaaatacattgatactgttcacaatatcaataacatctgtacaagcaaagcaatgggcc

SEQ ID NO: 2627 - DNA, 857 bp, Glycine max
acctgttattacaatggcacttgtataattgtgtgcacaccttaaaggaaaatttgtaataacattgcaaataagaggaacagtagtaaacagcaagcacaattatagtttcctaatcagcatatgtagtacttcttatacactttgatgtaaaaaaaacaaaaaaaaaagtaagcaattataattgccttttgattgggttaaatgtgtttagtctctctagatttgatcataattggctttagtgccgacattttaaaaatagtggcttcagtcctcatgtttctaaaatatatatgatggatttcgtccctaatcctatgtttcattttttacctaagaagagaccaaattcaccacatttaagaaaatacaaggaccaaaatcaccattataaaaatgtaggaactaaccaattttgaccaaaatttaaggaacctaaaacacattttaccatattttgctctttctaatgatttcatattcatacacctctcctagaagttgtaatttctatatcctttctagtaaatttctttttcatataaaagaaacatgaaaaagtaagcctcacaacatttaacaagggaagaataacttaccatatgcatttccaatctgactttgatttttaaacccagcagtaacagcaatgcatagaatcataaggatccaattgatatctggaatatatatctggccaaggaacttctttgatgtatgtacaacttttattctcgggaaacagccatgagcattggcttgcttaataattgaaaaggttgcggatattgtggcctggcttgcaactatagctgctaatgttgcaacaacaaatactggccagtatattttgt

SEQ ID NO: 2628 - DNA, 795 bp, Glycine max
tatgatttgatgaacagaatcccatcattctaatataactatgtaacactagaggtgatgagttcaatccctctcctccatatttaaactgggaaaaaaagatgtaggtaaattaaagaaaataaattctgtaaagaaaaattaatttatatttttttagaacaaaaccaaacacattcatatcatatataattggatatctaaattaaaaagatttcaaaatctaaaatgtaaaaccaattacttttttaaaactaatccttttagaatctaatccaatgcaaccatattacatttaattggatttctaaacataaagggtaaaagctaatgagattttaaatatcaagtctttttaattttttagtatttttcttgatgcttcgtgccatttatatgaagttcatcctttgctgcaaatattaaattgagcagtatgattccaagaaattaaacaacaatttttctttacatagagtttcaaattccaaccacctcttaacaaatatattggattttagatctcatcctcatgtcttgatattgcaagcctagggagtatgcttcatttaaattagcatttttgttggtcatttctttccttagtagctcgtcatgttgtttttaattagttatcttttttaactgatcttttatgttacatgtgatattttagtcatatatatttcttatattaatatcacacacttaattttttagtctttcatcctcaacgatgcaaagaattcatcattgttcttattgtataaatctattagaacctgattctttatt

SEQ ID NO: 2629 - DNA, 898 bp, Glycine max
tgagtccttacagatgccttgaagcagttatttctgattgatgctattgatgaaaatggtgcaattacaagtattggacagaaaatggctggtacttgatttctttctttacatcttagtgttgaattttaaacatctgtatgtagaactaacacattatgtaatattgttatctttatcaagattttgatgatggctttcactagtttaccatttttctgtctattattttcatagaagtttctttctgccagacttgacaatgaaatttgtgcttggtgttgaccataaaatttattcttttcttacacattcattttcctaatcatgtgtacttctcttggttccctgagttgtttcttgattctatgcagagcttcccttagaaccatcattggcaaaaactttaatggaggcaaacaattatggttgcttatatgaggctttgactgttgctgccatgttatcagctgaaactacattgctaccagggcagaggtggactagtctgaactctgaagtttatatagatagatagagatagcgagggagagaaagagaaagagtaggaggatcgtatcatcccccgcattttcaattatactgaaaaggctactgtctttcaaataactccattcttataaaatgtttaacaatttacctacttgtgaataattctactatcagtgaacaaaacaaatgaaaaaaaaaactggaacataggatgatgtgtatcttgtgttttaccgtgccgaggcttatatgtttatacatcgacaaggactgagtaactgagcagtaacaaaactcctttaatgtgcaggaagactgagaagaagaggaaacatactatatctaaccttcctgatggttctggattgggtgatcacattcaatt

SEQ ID NO: 2630 - DNA, 853 bp, Glycine max
acaagtacaccttcctttgtgagctgaagctatttaatgccctggctaggtcatcataatggtcactcccaccagattcaatgtcaaagtcaatgccatccaatataacattacctaatggccctgatcctgaattaccagatggaaaaagattagtagacactaatatatatatgttattcaacactcagagaggaaaagaaaggaaagaaaaatatgcatacgatagatatagtataatttggtatgaaaaaaataataaagaaaaataacatatattaatatttgatagtgtttaacacacaagatattattagcagcaccctatttaatatactctttctaaaacactttattattgttgaaatttatgaaaaattacaaaatcttgttaacccctctttccaatatttaatacaagattcagtcatttttaataaatttcatttaataataaaaagtatatttgaggaagaatctatagatatttgtgtattattactcttaccggtttgacctccaaggaaattctgccagaggtagtttgcaagttgagtggcatcatcagctgagctgagggagtagcttccagcaccaccaccaagggagagcaacactttgatgccaaggtcttggcaagttttgatgtcactgctcaacccagtgcagccattgttgttggggtcacaatgacctgcaaggttgagttgtggagtttggccgttgccaaaagtggacaagaaggctatgttcacatattggtagtttctagtgttgcaagcttctgctaaggtgccttctccaccgttttggccccagtagatagcgattcctgcaggcatgcaagctggcg

SEQ ID NO: 2631 - DNA, 825 bp, Glycine max
atgatgtcatgtgacctttttaacacaatggaaaagcatctggcaattcactaaacattgccctcaaagcaactgagccaattggaagagacttaaagaacagttaagtaacactctgaaaactggaacatagggtggtaaaaactcaatagcattgcacaatgtgtgagtggggggcaaaacaaggtttccaaactacatctatcaagcagattatgtagacaaaaaaataagcctcctacagcattctctgaataaaatcctaattgaggaagaaatagaaatgatgaattacctcatttgcaacaccttcatcatctttgtagcctacgttttccaaaatttcatgtattgcagtcagatctcttcttgaacaagcatcaccaaaaggcgtcaatgaaactgtttcctttgatgatagactcctatctggtatgcccattaaaacatttgatggtacctgataaataccacaaactttaaaccctatacatttctaagcttccgactggcttcactaacatatacatgtcaaccaagtaaagttcgatccttgattgactagtaatagaagaacttgagacaaaaagcaaggaggcaaaaagaagggcataccgaagtttctttctgaaggggggttagagcagtcacaagtgacttaacatttggtctctcacgaggttcatattgtaaacaacgtgatgctaatctcactaactcagtcccatcatcatttgaaaaatgaccttccaaacatgagtccatcagcaacagaaaatttttgccttgtataaggtcaagtgcctgcaggcatgcaagcttggc

SEQ ID NO: 2632 - DNA, 842 bp, Glycine max
gttggagccttaatgccaccatagttgctggtcttgatattgtaaacttacctctgcataattaaaccatcacaaaatgtcaaaacgagtagaggggtaatttaatagtacgttggttttcatttatatagatcaactaacacatttatagccattatttgaaatagtagtccctccgtcccaaaatatcaatgtttaagattttttttacacaaactaaaaaataaatattttaagaaaattaatatttattaagaaacaattttattaaagtattctttttttgttgttattttcaataaatatattattaaatctttaaagacaacattatttattacaaaacaaaattaaaatagatagtttgaatatctcattaaaaaataaaaacatcaatcaatttttttttccaaaaacctaaagttgcgtcattttatgacagatgaagtatatgataaagggaatgcattagggtaatggttggtgttagacaggaatagatagaaggttgaaaaaaagtgtcctttaccggtagaagtagtcccctatagatggcatgagacggccaaagaacccaaaagaagaggacaaagacaccaatgatgaagttccagagtaacctcgtgattcagctatttgtcccaagttgttcagaaatactaaaccaagtgttgcaccgaataaatagacaaagaaatataaccagaaatctattcttctcagcatcaatttcactcctacttcttctcttataccaataccaacttcttgattaacttctctactatcttcaccctctttaacctcattctctatcctctcttctatatcatgactctcct

SEQ ID NO: 2633 - DNA, 923 bp, Glycine max
gccagcttgccatgcctgcagaaggatggacacacggacgccaaattactgatactttgcgggtattgaaatctattcctttgtggttatagtttccctcatcgtatttagttagaatgagtgctttaaagcaccgtatttctcaaatgaaatgctcactgaaaaattggaaacttgtaacacttgatatattactttattattaataaaacagcatatcaagtatattacattaggagatataaggttggttggttgggtggttaagaaggagggaaaggttgcgggtttgaacccctcctgctaacaaaaactaacaaactaacaattaacatttgccaataaaaaaaaaaaaaagtatattacattgtgctaatgaatacacgatgcatcatgtcacggtaaagtcgaagtccagagcttgaattgcctagtagatggttattagggagatggatctacgttagtaaaaaaggaagtgaatagtttctaggtaattgtaatagatcatgtttttcttaatgcataatttcttgttgcattacataggagaagtacaagaacaagccttggctcttggaggatgaaacaggtcagtcccagttccagggtcatctagaaggttcacaatcggctacatattacctgctaatgaaggaaaggaaggagtttgttgccattcctgctggttcttggtatgcttgttgtgttaaggattgtgtttgactgtgagaagagtgctcctatgaaatttgcttgtttttcttttatcatgtaatgtcctatttttattaccggtcgaaagacagtaggcagatgtgttgtatggcatgtttgttttttaggtacaactttaacaaggttgctcaatataagcaattgacattggaggaagcagaagagaagatgaagaatagaaagaa

SEQ ID NO: 2634 - DNA, 913 bp, Glycine max
actttttttaaaacctgggtgtgtctgttagcatattaatgaggttgtggttcagttttactctctccgactaattgcattatttaatgtcatttcagtggccccctttagttgaggtggtgaatacctgggagttgcctcccgtgctcattgaaagatacaatgcagctggtggggaaggaactgctttttgtggaatatttcctgaaatacgaagggcatgggcatctgtggacaattcattgtttctttggcgttttgataagtggtaagttctatgatgacgagtaagtttagatacaggattaggcatttcccttactcatttttgaatgagagatgtctttccggcttttcttttgtatggagtttccttctgcattttttacttggcagacattcaagcaatgaaaggacttcatatttatcagtgatctactctctctctgcgaccatattaaatttttaaaaaaatatattatttcccccttttttttctttcacattttcattgctttacatttgtggcatgagccctcacagactattgcatgaattcttattacgtgttattcgctggttctttgcaatagtctctgcttctagtttcagcagtagcctgataggtgtatgaatgttactgggacaatgtttttgactaagctgttagaaaaggtttaagggtgctagatgtttgaagataagatttctatggatttaatttctttaagtttttgtttgaactctcttttttgtactacaatttctgttttataattattttgtctgtttaattgtcaatctacaataaattggtaaggaataatctaacggggctaaattttgttttaattgttgctgtgttctcatttaaaacctttagagctatttaacggaactcatatttacatgt

SEQ ID NO: 2635 - DNA, 826 bp, Glycine max
gccagcttgcatgcctgcagtggaagtgaatttgaagagatgtatgttggtgttggtgcacgaagggtgagggatcttttttctgctgcaaggaagcgagcacctgctataatattcattgatgagatagatgctattggaggaaaacgaaatgcaaaggaccaaatgtacatgaagatgacattaaatcagttactggttgagctagatggattcaagcaaaatgagggcataattgtgattggcgctactaattttccacaatcattggataaggcattggtgagacctgggcggtttgatcgccatgttattgttcccaatccggatgtaaaaggaagacagcagattttggaatcacacatgtcaaaggtatggttttatcccgtgcaaagaatgttatagaacactgatttgaaaaggataaaaataggattaaatcacaccaaattacagaagtttcagcaatttcctttctatctcagtgttaagaaactcttactgagggtatctctgtccagaaaactacctaacacataattgtcccataacatccctgtcttccctacctaactttaaaggggaagtagtatatacttcaggaaaaatttccattgttcatatgcaaaatgtaaagttatttactgttgtgtgttgttcaaaccacacgaaatactcttatttataatgaatgaggtttacaaaataaggaaacaaaataatggataataatggaaataatagcatactaaactgctgtaattaaaacatatcaattcatatatttcacacacaacatagattaacttccatgctgcaggtcgac

SEQ ID NO: 2636 - DNA, 886 bp, Glycine max
aaggtgttgttcttttaacattttgaattacattcttttgaagcgttgagtgcactagaacttgtataaactgctattgcacatttcaggcacttccatccattgctaaggaagttatagaagttttggacattcttctgaggtggtttgtgttacagttctgcaaatcaaacacaacatgtctattgaaggttcaatttatttttgtttttgttgtgatttcatttcagttttcttcttttcctttccttccttgttatggagatgtatgctgttagtcttaactttattcaatttaattgcttaggtgctggaatttcttcctgaacttcttgacactttgaaggatgaggggtactctttgacagaatctgaagtggcagtgtttcttccatgcttagtagagaaggtttgtattagcaactataatatttgtggcacctgaggatgttatttttccggtgaatctttctgatttttagttgatttcagcaaatttttggtttgactagtgtgtacttccttgggtgttacagatgaggaagtcacatttaatttcttattttaatgttgcagttagggcataacattgagaaagtacgagagaaaatgcgggagctcaccaaacaatttgttgccatatattctgcgtctaaatgtttcccttatatattagagggtttgcgctcaaagaataaccgaactcgaattgaatgtgctgatcttgttggatttattattgatcatcatggtgcagaggtattgttactaatgctttataatgaattttttttttctattcagtagtttccttgcataattactcctggcattatgtggacagattagtgggcagctaaaatcattgcaaattgttgcaagtttg

SEQ ID NO: 2637 - DNA, 970 bp, Glycine max
tgattcgccagcttgcatgcctgcagttgaatgacaaattgcattgtattgaatcaattacaagaaggtaataaaacatgtaaacaaaaaaaaaaaatatatgacaaggaaaaaaggttataaactttcctcccaatcaactcatcttgaaagaattataaaatgtagcacagcagaatacataaatttaatggttgtgaacctatccagatacttggaagtatatttgggatcatgctgccgaccccaaggagtctccatgtatttaaaataaaaaaatcactcttattcacgtaaagatgcttgttattgtgagaaatggataataaatattgactctatcttactatttgaatagtgaaaattataagataagtgcacatgatttttttaaataatcatgtgattactaacttttgatcttaatcacccatatatgttataatcaagatttattattctcacattcttaaaatgacaagcgtcccccccaccatctctctctctctctctctctctctctctctctctctctctctctctatatatatatatatatatatatattacaatatataaatgtattttttgcaattttgaatttgttaaaggagacctgaatacctttattataattattactatttacaatttcaaggtcccacaaggaccttcaaggaatcagggatgggaaaaaaattaaccctaagtgggaatcaggatggggacagaagaacaatgaggggataggaataggaatagggaaataatagagacggggatagggaggtacttcccaccctagctccgaacgtgtgtcatccctacggggtacaagacaggtaattgacaaactaactgtagcatggtctcatttatgatgtagtactatttaataaagttataaacaggaatattgaacgaaatagagacataatctcaaggtttcatatcactagaacatgcttta

SEQ ID NO: 2638 - DNA, 941 bp, Glycine max
accattcacgaatcacaagataataataatctcttgttacatagtttaactcttttttttctaattaaaaataaataaattactcaccatgaaatcatgtctaggaataaaatatatttgtttagtctattttatgtatatttatttttaatataatttattgttttattttataaagaaatttgagaaaaaaataaataaattaagctcttttgatgaaaaatcagtaaaaatttaaattattaacatttcatcacaattaattttaacatactaattttcaacatatttacattatgaatttatcttttatttttcttcttttcttttcttttcttttctcttctcttctcttctacccctcaattgcttaaaaattaattatatgcgaatctaaacacaaataaatctttataaactttgacacttcaactttcactttattacacttaaaaatgataaaaatgtttacttcttttctcctcgactaaaaatctcgagatttaaatttatttttatcaaaattatccaccatgacaatttttttccttgccgaaattaagtaaacataaagtgctttagcaatatagagcaaactaggcctttagaattagggaacctgaataagggctctttttatacatctgtcttggtaccatataaattaccaaatgatccgtatagcatgtttggttgacatgcttcacattctcacaaacaaagtaagggctagtccatataacttcatattttgttgcaggttttgagttatgatccagaagcaaacacggtaagctttaaagatctcaccaatcacatttgaaatgcttccaacattctggctccagaatatctttcaccgccacatgaatgacccacaaaagatttaaaataagaataattataacaacacaatatagacttgaaattcaaaagccaaa

SEQ ID NO: 2639 - DNA, 896 bp, Glycine max
ctttgcttcatctaatacgcccttaagataggcaggtcggcttaaggataaagactctcaagttttatatccatcaacaaacaaattatttatttgttattaacttttataaagtaaaaaatcatatatgttgataaaaatattcaatatataactctcatttaaaataaaaaaaaagtgtctatcaaaatttattttagatcttactattttttttcctgatcagaaaaatttaataactatatatttaataaactacctcgatataaattatatatctatgatatattttatttttaattacaacttcactacaatagttagccattcatatacctatgaatccattcgcagatttaccaaaattttgttgccaatatctaaatgaacgagaagcaattatgctcctaattagggagaagcaatttagtcccttagatttacatttgaatactattacaaagtgtttaaaaatcatcataaaatatcaatatatcaaaaggattaaaaaataattttcaaaattcaaaaattaaaaaaatattttaaattttagagactaaaaaaaatacacttctaaatatagagattaagacgataattaaattattaattaattcagaaattttcaaattgaacctaatttcacgagactcttgaaaacaacaatgttcacaatccaaatttattaagataagataaaattaaccatctagccggattcgtctatcatcacaagtctcaatcataggttacaaaaatctgagttttgagaaacttgactcaagactaattctaaatcatattcacctattcaaacctcattatttgagccaaagttgcaccatgctttgaatgactaatgaaaactaacctgttcttattatataaactaa

SEQ ID NO: 2640 - DNA, 881 bp, Glycine max
ctgtgagaatggaggcccctgccacatacttcccacgaggaacatgtttcgcacgctgacccgcagtgtaacccgctattgatacctgcaaggacaattatatgcattttttatcgatagaaatttaacaagatactcacttatcttattcaatgtctttatagacaaatatatacgttgcttaggaaaaggcttctaaaattaattcatcttttattaactctatatatgttacggatgccatccagatatatgtacatgtacatatcacagaaagacaaaacattaatcgatcaaatcaggataataattaattgttgggaaaaatcctttttacacaacaacgaggatcaaaggatagattacacacaaaataacaccatgaatgaaacaatctaagaacacaaatttaaatgtaattcgatatcttttgcttaacaggaagatctctagaaatatattctgatagaaactacttaattcataccaatatcatgggtaagcaaaacaaaaaaaatatatcataaaatatttagtatctcaaataagattaaccgttagaggtaagacaacataaattcaaaaattgaactttgtcatatgaaattaatctctggacatgtacatccaaaacgaagaaaatggatatataagacgttattatggaacataaataggttaagaaattaagaatgaagagtggagtacagaccatgaaaaggtatgctaggaggatccatccagcgttgtcctggcggaaaatgaactccaacacaaagccaatgatagaaagttgaataaatgccctcacaatggcaacaaccatctctagctccagccccagcttctggtagaaggacaaggccacagccaaacacacc

SEQ ID NO: 2641 - DNA, 928 bp, Glycine max
agaaaccactgtcatcttgatagtcaacatcaaatgctcccgattcaatgacaattttcaatgcctcagtatctccagcttgagctacaaatatgaaaggcgaaaaagtagtagcattgctggatttgggtatcttgcctcttctgattgtatccaacactgcttgttggaaacccagtgaccaattgtccgacttagcgattgaacttgcagattgaccagcagtattcaccaagccaaaatcagcaccagcccttgttagtactttgagacactcctcttgcttatattttgcacagatcatcaaagctgagtcaccagagtctgttgtggagttcaaatcacaaccaaaatcaataaggcattgaataattgttggtaagcctatccgagatgccatgtgtataggaaggaaatgagtcttgctggtagttttaactggggattccacatccgcaccacattctaagagcaccttgacagcctcaacattgccacagagtatagcatgatgtagaagggtccttccacggtgaggtttggaggagacatgttgcaggagcaagcgtagtatagcaccacttttttcaaaatactcgactgcacaccaggttatgccataaggttctcccagcccagcaccaacacgaagctcttcaccagtagaagtgtcccatgaccatgctccaagcctcacctcaaagtctaacctaacaccattctgtagttcatttgtaagaaaagtcttagtgaggctcatttcacattgacaataaaatcttgaaagtcaaaaggtaaagccaataatgcaatatgtcactatcagcagaataaacccatcaaacactaaacactaatataaccatgaaaatcttattttgctttattttatttgcaaatagttgtgcaactgacaggcatgcaagct

SEQ ID NO: 2642 - DNA, 980 bp, Glycine max
aaaaaaaagttacacaaaccctactgcatcatttctaacactacattgttgcttgaaaaccagtggttctcaggcattaatccaaagccaaaaactatgattttgcttcttgagtaacgctccctaaatttcaaggctaaataacaagccaacttggcttgtgacttcggattagaccacacacactgctacaaaatatcactccatcctttcaacaaatatacataggggaaaacaataaaatcccactaatgagttataatttgtttagtttactccatgattaattgcctgtggcgattgaggtccttcaagtaacttgagcaagtataatcttctaggtcacatgcctctaacatgagagatttctgtgcaactaaatttttctttggttctataattgtctcttcaccctttagtagaagcacaacctgtagtgtttaacaagaatacaagttagcttcctagcaaggaaaatggtacaacaatgctgcgaatcaaactaagctgaaaaagaacatatgctcattttctaacctgattcatgtatggccgcttggaggatgcatggtggacacacatggaagccgtcaacatggtgcgcttcatttcagtaagatcatattcctctcctaatctggggtctgctaaatcctttacattgtttgtgtccagcagtggctttgcctgacaacataagaagaattttgcaaggcattatataaaaatcttgaattcttaattgccaaatcctcaagtgaaagactcactgatatgtgttctcagtgaaacctattagtctaatacactccatgacatttagggggttatgaagacttacccagatgacaagactttgtctactattcgaatcaacagcacggtgacctgttatgagctccaacagcaaaactccaaaagcaaatacatcagttttctcatccacaactccatgcataaagtactctggggccaaatat

SEQ ID NO: 2643 - DNA, 969 bp, Glycine max
tgtttcgccagcttgcatgcctgcagggcttccgttggtgaaactgataataatcccccacacgcaaaaccaaatgaaggtaattagcaattgcagacagaaagtaaaagattgagaagtaaacactaaaacataaacataaaaataacaatgaaactttgttttagataacactcaagagtgacactgacatatgcatgcatgcatgcaattagtagttgtaccaagacttaattataaagtaacacatacaatattttaaacatctcactcgcatttctcatttttttggatctctttctttttactacatcatatgtcctatcatattcataatttttttctctttttcaactctctctctctctctctctctctctccagatataggatagaatcatgggtgttgatcaaatatttttcttaattgaaatatatactggttagaacttactcaatcatttgataattgtcacatgatctaccacccggtgtaatactctgattctgaattattatgtggctgatcaatccgatccttccatgtatttctagtctctcaaaatcagtacctgcgatatatatattttaaatttaaagaaaataaaaaccgaaattatcaatatgtgacgacatgattcaaattaaaacataattacgtaccattggtgtgaattgtctgtcttagaacttggcagcaagtgcaaaagaatggccttggcataggaggccaattacgaggacccatattcccacttgctggctgattcagattggatggacccgcttcaaagtcatgcatgaaggattgatcttcaatatccgtatccgtgaagggatatttacgcttgttcttggaagacccctctacgaattcatagttaggaaatactcctcctccgatggtaaaattgtcattgcaataatggtgggattgatcatggatcgttgaatccgtggaggaaacat

SEQ ID NO: 2644 - DNA, 969 bp, Glycine max
atctgctgcttatactatggatgagcatcggagaattgcttgtgcagaaattgagcgtttgaataaagattctgagaagcagcaagagctgtttacacagaaggtatgccattgttctggttcatttgtaaatattttttggctgatggaaattcatgtgattgtcattaaacttctttcgacaattgacccttagccattactatgtattggtgttacttgcaatgaaattatcttgaatgttcatattgtcttaaattgttttttttgtagctgaaggagtctgaagaaaagattgggggcttaagcaaagaaagagagcaattaatcaggcagagagatgctgctattcaggaagcaaatatgtggcgttctgaactggcaaaagctagagagcatgatgtgatcttagaagcagctgtagtaagagcagaagaaaaggttagggttgcagaagcaaatgctgaaactaggataagggaggctgttcagagagaatccgcagcattaaaagagaaggaagagcttcttgcatatgtgaatgtactaaaagcccaacttcaaaggtctagcgtcttattttctttttcccttgctttttattttgttaaattagatttgttggctacttctgttttcccacctaaacataaagatggaaaaaatatatatcaatacctagtgaaacagggaaatggaaggagacttttgatggtttatttgtctttttaccagtttattgagtttgaatatgtatatcagctacgaaatgtggagcttcataaaaccaaagttgacatagcagatatttttcttttcaacaggcaacacattgatacaactcaagtttttgagaagacagagtcatgctcagatacaaagcatgttgaccccactgaagaaaatgttataaagcatgcttgagtgtttctagagccatccccgtccctgcaggcatgcaagctggcg

SEQ ID NO: 2645 - DNA, 864 bp, Glycine max
atgcctgtttatcttatttttatacatcaaaaaagcacaaaactaaatggttgcaaaagcaattcaatattgtactacgttgaaggcttgaatggcagggaaataacaacgacatatggatcgagtctgagtcatcagacagctcccacatgccgtttatgaatggatcaggtcaaattctttagttacgggcgtagctggtaaaccatacacaaataatcaaaagctgaatattcatatcattcttcttaactctatcaattcgttcaaattaagcttttccattatctaaaattttaccaattgccactaaaactatatttaacgttcaaacatgtatgggatagacaaatttcttgtccagattttactctgttaaaagtatcgatgaatataaaagaactatgtattaagttatttaatatttcatcattcatgtcacaccatcataacatgtttgatagctcaaaggggaaaaaaaagaaaagaaaaaaggaaaaatcatcaccgactaaccctcatctttctctccctgtctagcaagaacaacagagagaaaaatcctgtgccggtattcttacaaaatctcaccggattcaattccgggaaaaactctttctcaaaataaagcgttataaaaaaaaggcaaaaagacgcgtcagcgagaaccctcaaacacgaatctcggagagcgaaagagaactctcaaatgaaaaggttcagcactttccggtctccgtcgtgagcgtagtgatctccgatcccgctctccaagcacgccgtcgtcgtcccggactcctcggaattcattgacggcgaccctggccagcgaatttcctgccggcagccgtagctagccgcgtt

SEQ ID NO: 2646 - DNA, 886 bp, Glycine max
aactttacaaaaacaaaaacaaaggttgatcacaagattcctatcccgtcttccattatatatacaccagatcagatctatcatacgattttgagacaacttacaaattcccaataagacttctttcacaatatatttagttgcaattcttttttaaggtttccgggtcggatatacctttctaacaaaaattgaaaactcaaattgattctgctcagttcactttacttgtctaaatactacttttttttgggagaaaatagaatcatatctgatctttgaaaactcaaattgtttatcaagagaaaaacaagctggcaactaaacataaaaaattagtcctacatactaagaaaatttaatgtcgacatatctaatatattacccttttctcacatttttgttttgagtctgtcttgacttaaaagcctacttgaaggtctatttatgcaggcatgcttttaagtgagcaggttagcttgtgggctaacaggcaaagcctttttctaaataggttaaaagaacaattcctaaattaattgcacacgggagaaatatagaccatgacgagttcatatttcataaaggatgataatcaatattggatgtttggaagatgatctgtacaaaagtaacgagaagtttcttatcaacgctcaataacagcacctaaaatctcaatagttgggtgttttcatgcaatcccatgttccagctatctactacataaaaaagaaaggacctctgatcgaacaaagttccttgtcacgggaaataacatctcttacattcctcacaaggactattgtaaacatggcaatgctagcaatctattcacggaaactctgagctgcacaagatagtttccagttttacaacaacaaaa

SEQ ID NO: 2647 - DNA, 928 bp, Glycine max
tgtcaaagttttaacagtattagatttagtccctatacttgacacccttttttgttttgcattttggttcctacaggaaaaaaattctaataccattataactttaataaatgatagggactaatttgtaaacaatgtaaagaacaaaatgtagagttttttcatgttgggactagacagggaaacagtgtttgatacagggactgaatttaccatttcaccatttaaatattaaatcgaaattgaattttccaagacatacctgctttaaaagtgttacttgcgtgggttgcaaaccaaaataagaatttgattctaataactctaaagtacgtccatgggtgtcatcagatgtcataataacaagaggaatctgtgtctgggattcacctaaaagttgaaaaacacaaccattacttcaagggactttcaaatatgatagttaacattaataactacaatagagtgggctattgtttgaaagagtggcagaagaaaaagaaagtctgggagtaatttaccacaaaatgcttacagcagaaaaaaaaatttaagaaaaatttaccacaaaatgttttctaggaagctattttctactgggaacattttccaaaaaaaacaagtcatttttaaaaaaaaaattcaagcacaaaaaaagttactttcatcaaaacaaatgaactcagcatcttaaacattgggtataatttaaacatactatctatttcctgtataaaagatttacatgcacaagtttatcaatgttttgttttgttttaccacataagcaaccaaatcaggaggatgaacatgactcttatttttatatagcaaaagcacaactggtactaaccttgtgagctggcttcttgaagagccaatatagattcaatgtattgttgtacaaaacatgttccagtagtgcttt

SEQ ID NO: 2648 - DNA, 954 bp, Glycine max
gccagcttgcatgcctgcagatgatgttgtcttcttcttagtaaatccaccatgtttgatattaggtctcaagtaatttaaccacctaagtctgcaactctttccacacctcttgagccctgcgaattatttgtatccatcaataaggttttgaattaatcgatgattaattattatactaaccaaagttcacctttccaaagccaaactaaatagtatttgctcttggactcaataaatatatacgcttaagaggaatattaaaagaaaattataagagagaggagtgtaccaattttctgaggaagagcaatccaattgccaccagttccattcttttcaatataggttttgagtgtagcatcctcttcaggagaccatggtcctttcttcacgttgttcttgtcacagcatggagctctacccatctttttgtgttgttgtctctctctctctctatctctctctctgtttaggtttctctttctgttttttgttgaagcaaatatcaactttgctagctaggattgttgggaaactacgacgaaggaagggtatgatttataggtagggaagtatggctgatgtgattcttaaaaggacaaaaagtcttacacacctcaccccctccattccctcaccagctatttttttcaactcggtttttttcttctagggtttattcatctttctctgtcttcctttttggattagttcggtcaccgcgtttaattatgcatgcaactggacaaacgtaacataaaatttctcttcttttacataaaaagttgcactgctttttcataggtctattagtttaatgcttgaacccgatgctacaagtatttgatcaatagaaggctccatcctcttagtttgtccgcattatccttgaaaatgttccattgtcaagtcatcccaacatatcttattatattgacgggaatgtactgc

SEQ ID NO: 2649 - DNA, 913 bp, Glycine max
tgaagaagaggaggacctttgtaaagagttattactgaggcaccccccacactggcaatggttcctagaacttttgccaatccatgtctccttctgatgttgacttcctcaagcctggtacaaatcaaatgaacttatcaagtcttaacaagattaaatcataaaataataaagaatgttacaaggagatgcaacgtgatttaccttaaagctaaggccaagacaaaagtgatcgcaggaaccgagttttgcaaggcagaagcaaaagttggagaagcatagtataatcccaacaagtaaaacccttggtttgcagtgatcctacattgccaatgaaaattttggaaagaagaaaatattagaactcataggaaggaaatgttagtatggaaatcagcaacttctatacattcttaccccagcaatgcaagtaggaagaactgagccagtaaagataaagtgaggggtggtctttgattcctgattataaagatattgacattgctccatgttaaaattatgagtaaataatatatgcattgacactattaagggttttcatactatcaactaattagaaatcactatgtaaggtaagttcattaacttttacaataactacctcaaaagtcatgcctagcatgatttctaattgatcgagaccatgcatagaaattaaactaaaaatatgtatagctttaaggaaaacaaattcaaaggaaataacagaaagattttgttaggaaaagtgaaaagtgaaaacaagcttcatctggaaactcacttctctaacacataagcaaatgggctcaacaaaagcacggcaatcaaatttcggtaaactgggtaaacgacttggctgacaccaatatttagtgcaagtctagacacgatgtgatatcctgcaaagcac

SEQ ID NO: 2650 - DNA, 878 bp, Glycine max
agcagcaggatggtgcggtgggagagagaaaaatgcatgaactttagcaagtgaaatgcacaaaacacgtgcctttctctcccatactactacaacacctaggttcttcagaaaataattcattcaaatcattccaaattaaattagacacatgaatttaaaacatgccgatccaccgataaattagaaactttggtaatgtgcacttgcactgcaaaaactagctaatcaaatatgctggtgccacgagccagtcccaaagtaaccacaccaattgcaaattcatgcaataacatcaacatacagctcattccaataatgaacaaccacctcaatcaccagttgcatttctgaatgtcagtgttcctacattcacatttattttgcaacctatgtggactttggtgatatgaagatgatgctaacctggagcgaacaacattctattaactaactagtgagggtaagtggacttgataccataatattttatttagagagggacctcactttgtattatttttttattgataagaataaaaaatagatacaagagaatttacaagttagaacaactcacacagtatataatgagagcagatgctttaattgacagcacaccccttttagcaatctatcttgagtatcctctatatttttcttgagttaattactagtggttacagaaaggaacatgatcacaacgttaaaaacaataaacctatatatcaacattaattgaaaaataatttacagcaacataggaaagtatcatgcccaaattgcaagtgaagacatcaatccagccccaaggaaaagcagacagtaacatattatctgaaacctaaagttacaacgcattttcttgctaagaaaat

SEQ ID NO: 2651 - DNA, 836 bp, Glycine max
gcataggcattttgccaaaagtgatccttcggagattgtcggagaacagagctaaggccaaaaagattgaaccatctcttccaaataaggtgcgatgctttacatgagaaaaacaaatgtgatgtatttcttctgacccttggcagaaagggcatgataagttatttcctgcacttgaatatttcttctattgaggtttaccttagttggtagtctgttatgaaataacctccatagaaaacatgtctccttgggcgggattttgatattccacaaacttttgaaaatgtccagctcctcgcttccactatgcaatctatgtaatgccgaatatgtagatttaactgtgaatttcagtgaagaatcctccaaccaaatccaacaatcaactccttgaatgtagttcaaggttgttgtaagaatcagttagtttgaacttccaatatgccctatggttttaataattaacaagcaatacaatttgatgaatagatacatttaaaatactgatatttttatcttgaatgtgcaggatacatatttacactattatttgacgaaatgctcatatcatcctacaagtttttcatcttaagaccatacactaacattctcttataagagtatcatcctaagaccatcttgaagaattgaagtattgagagtgtcatttgtcataccaaatagagacaaattggcatataaaacaagacttaaaagagagaaattgtctagggctcgacacctaacactaaaagaaaagatgagacaagttggacttttggaaatgtcaatcataggaatggaaagttgtgctataaagcatctttttcagt

SEQ ID NO: 2652 - DNA, 886 bp, Glycine max
aaggggggtggacagttgttgtacaccataagggtagaaagaaaactactgactctgagagtggaattgctgtgggctctgttgctcaagctgctgtagagaataaaatgaccaaaaagaaacataaagaagttggtctagatttctaccgctttcaaagaaaagaagcacagagaaatggtataatttcttttttgtgtcaaaacaaatgtcaataattaaatatggatccacaatgttagtatatattgcaagaaaagcatatgctattttacagagctttctatcaaagtttggattttttttatgagctaatgccatttgcttttcttttgtttctaatgaattccttaatccataaaaaaggaaaatcatgatgttttttcatttctattttacagtgcttaagattcacaactcattttgtcagaactaaaattttatacctgaaaacactagcaattcctgtttctggatgttcatgaaatgaatgtcacgttgctgtgggtggaacaccacttaatgaattatgattttttgtagaagtctcatgctttacaccctatatttgtttcttaattgctgttgtgtataagattataaacgcatgttgttgccaagttaagattttatatacaaatgaatgtcatgaaagaatgtttctggatgttcatgaaagggatgccgtgtttttgtttgttggaattgcataaggaattgtatgattttatgtaaaagtatcatgctttatgcctcattttgtttcttaactccagtttatgtgaattaaaacttagtaactttctaaattgattttgattagattttgtttttgttagcggtcaaactgagataaaccattttggtttttgttgcagagattcat

SEQ ID NO: 2653 - DNA, 915 bp, Glycine max
atgataaaacaaaaatattcaatcattattatgtggaaccaacaagataaaaagaaaaagtacaaaagcaatacaaagacctttgaactaccacaagcaagaagatttagggtcaaccttaaccctctaagttggcggacactgtgttgagttggctttgttttttgtatattaaaatattcagtaaataaatgataatgttaaattggttttaccattgcaataacaacccaatccatttattaatggcgaggcatatatctaatatcattttatgttcacaaataatactaaatacttttttatagtttatttgtaataaaagcatgaatataaaatgatatctatggtgagtaataatataccaatattgggggaaagacccatctgagtaggccttatgctttggtaaaatccacaccacgattccaaaccctctccaagccattgtggtcttctaatttcaggtgaaaagaaggacctcccaattgggaaaaacctttagaaaatgaagctgtgggaagaaaaaaaacttcaagtttcacattttctttcaattattttgcaaaactacctcttagatgatagctctctaaatacaatgtcaacaatttggagtgtttctcaattattatgccaatttgacctgccaacaaacttgatctccactctatattctctttcccttctaaaaatggtgcaagtgtcagttggaaattgaacttaattcaaatgcttacacacgcacacacatacacccacacacacacacatacagtccatcatgtttatgttttgaagccaaatagaagtatggaattactatccaatactaaatcttacttggatccattaactccgtcttcatcatcaacaacctttatcttaaactctctccataaaaaggaagtggct

SEQ ID NO: 2654 - DNA, 866 bp, Glycine max
tcctgtaggaacaagaacaaccccctttttgtgagttgttgattggatttattaggagggaactgagaaagattgatttttttcattgagttgcatagtcaaacctatttgattgaaattgatttctttgggtaaggtatggaagggttactgaattctttgcttaaccaaagttgcttaaaaccctttggtttcactcccagacttggttatactttcccggtgatcacaagaactgggcatttaaatcgaaaacccgaatcctgcaccctgagaagttactgcacacaattaggtagagacagtactggcactagctccagaggggctagtgttgctgcattggatagtgatgataaaggagaggaatctagtacggactgggaattggagttcctcggggaacttgatccgtttggttaccgagctcccaagaaaagggaaaaagaacagaggtcaaagttgcttgaagccactgacggaatggactggtgcgtgagggcgagaaaggaagcactgaaatcaattgaagcaaggggcatggctcatttggtggaaaatatggttactgttaagaagaaaaagaagaaggataagaaaaagttggaaagcaagaagaaagtagttaagaaaattgagaaaatagaagatcttgactttgttttggaggaagacttgctacagcctatgaaacctgagattgatgttggtgatttgaaaaggagagtgagtatatttaatgatggaatgtttatagaaaagaaggagaaaacaaaggaagcatttgtcaataggctttctcagttctctgggccatccgatcatagaaaagaaatcaacttgaacaaagcaattacagaagcaca

SEQ ID NO: 2655 - DNA, 947 bp, Glycine max
taatagtgtaataagaattgcacaaacgattttctttaggtttgtataactgtttttgaatatttaaggaacttcctagttaccaacatcttgattgatatctttgaagcaaattttcttcatccaacataatgtgttttggagttatttctcaatattcaggaaagataaaagaaggcgaggatgggtgtgatgcaaaggatttgaaggagaatcgtgaaaaacaagcttggaattttttttgacatattcatatttgtatatatctgacatcaataacatcatttgatttcataaaagaatattattttaaaataacatttatctattgaatttgattttgaaattttaggtagatgatgctcacctagatcatcacctttgattttatccataaccattttgtatttttcagtttagaaaaaaaaaaaatactatatgatcaagtataaactagaaaacttgaaaggaagattaaataaaacaagatgtcaattttatttcaataatagagtgccactagctttttaggctctggtataataaaagcaacctttataaatagcataattaagtatccaagccagtatgctatttttctcctttgtttatactttgtggaatttcctattaactttggagttggaatttccctatgcaaacagccttattggccacctaagaaattaaaccaccaaattctcatacaccaaaaggcagaacccagctagtcttgtataattcgagacacttatagaattgacgtataaatcaacttgcataaaatctaaatataattttaacattaacaaaaaattctcttttttttaattaataacttaaaattttaccaacgtttaatttaatatttaatgaaccaaaatttgaaacaataaaattatttttaacataatggatctgtcacaactacaaatctgcatcacaaa

SEQ ID NO: 2656 - DNA, 888 bp, Glycine max
aagatgattttaaagacttctagtcgtgacaatttttaaagaattaacttcacaatcatacctttgaaaatactatcatcgaagacaataaaataaaataactatttagctaccgaaaaaaaaaacagcatataaaactcacggtagttgttttcttataggattcgcatatgcacacgatctcttctgtcttgaaactaagttcgaattgctttgcaagaaaatcgtgtcccaatatttactttagaggaattcaaacaaccaaataatggacagacacaaaatgagttctttgaaactaccttcagcgagtagtgaatgcttctttgaggctctcaaggaacggaataaactataataatgtcagtctaaaattgacagctgtttctctctagccccctatttttacctcccacgttaagtaccatgtcattgaaaagcatttcaaatctcaaacctcaaaatgcatcattcataccccattaatgtgatcaaaggtcttttacctatccagagaccaagaccttcccaggaactatagcacctgcaccatcaactcactacaaaaccatacataattccccgaaggtagtaataactcagagtcttcaactaccttcagtcatcctcttgcatattatctggtcgcttcctggattgcaaagccagtcgtgcatctctctctcgctcaaactcacggtaatctgctcgctgtaagaaagaaaccttgtccagatactggttagagctcttcttataagcatcaagctcttcttccagcctcttttcttccttaaattcaccccagtcctttttggtcttatccagtacactgagcttctgtttcttcttgatttgttcaaggacagcatccactgcaggtcgact

SEQ ID NO: 2657 - DNA, 838 bp, Glycine max
agaaatcaccttgcttagataatatgattgggctatgtctataagcattcaaccaacagatgatgatagaatggtataacttacaggaattattccaagacaaggccctcccatgacaccccaaaatccagcccgaaaatcatacctgtatggggggaaatctgttagttcactatagaagcaatcagcagaaaattaataatttgtttgaaattgcaatataacctttaattctgtaaagggaatctaagcatgaaactcatctttattctgtcagtgaacacatactatatacaattgcaatttaactgaatccactaactacaacagcaatttataggagctctttgatatctcaatctaacatagcatccagtataaatggtacagaagataacagctgcccaagtgatcataaagcatactaaccaataatttccaggctgaattgttccggctagcttttcagccttcttgacaacacgatctgataagggctgcccatttacagtaacactgattttgctacgctcatctgtatgattagaccgggagaaatctcggaagcttttcttgataatgtttgcaaaaaatgattcaccacctctgttggatctaggatgatcatgttctcggctagcatctccagaatcctgggaaaccccagtgttagaataatcatggacatccatctctgttgcaagtgctgtctctttcaaagaattttgacgtgctgacatcttgtccacttttgtcttctcctgctctgagcgactactttggtttccctttccaaaccgatttactgcatggttattactagagtaatcaaaatact

SEQ ID NO: 2658 - DNA, 858 bp, Glycine max
aaaattaacttagtccgtgtttgaatgaagctaatttagaaagaaagaaaattaatttcggtcaaaaattgattttaaaatgaagtgatttatgcttgattgtttttatattaaaacaaaattagtagaaaaatccattataaaatcgcttcactcaaaattgactttggagccagaatcaatcaattcttcaacacgcaaccaaaaacatgaacagtttaccttaaaaaatcaagttagctggtacagtggtacctcaacatgattttatctaacataacgagaatccaaacatgattttaatcaacatgataatgactcctgaatgattaatagtgtgtttggattagcttcatggcgaaaaataattaattattattttttccatggtgaaggtaaagcaacaaatagttccttccattattgatggtatcaccatgattttgtgagttagaattgatttttgacacactgaagagtttggaaaagcaaacctgttgaaaacaagtgacaaggtatcaaaattgagaggatcctccaagaaaaacttcaactgtgcagctctcttggcagtggagaatctaacaacaggtgccctagacatgcaatccctcaaaaccacactgctggccccaccagaagcatagatggccttgcaccctctgttggtactcgccacaaggcacccttccgtggtggccatcggcacagtgtattcgaatccatccaacaacaacggccccgccacccctaccggaatctgcacataccctaccggcatttcgcagcactgccctaaaatggagtcgtagtcgaacccctccagcggcaggccctcaagcgactgccccgtcaggc

SEQ ID NO: 2659 - DNA, 887 bp, Glycine max
tgtagttttcaggatagttggttctggatagagctgatagttaattctgatttaattccccttatatgttgcctggttcaaaataatatatgctgaggtgtgattagttaataaagttgacctttttttataattaatgtcatctatccatttatttttctattgacctgtaagatttaagcatacaccaaaactgtcaaggaagggggtattctatatcacatgattttatttcctaaagaaaaagaccataaatataggcatgggaaagattggagattagtttgttcatgattctggttgaatttccttttaaatttggcattatctgtttcatgattgtgttcatatgtgggcagacaaatcgaacttgcaattaatgatcaattttttctcttttatttgcagcgctatgttgaagctcaatgttgcatggcttcaaatgattataaaggttagatattgtattttacctggagtcattttgattattgatttcattcttgtgtgtttgacgcttggagctgaagaagtcaaatatgtgtgttgtggcccttgggccactttctgacattacaaaatgataattctactgtaaattattgtagtgcttatgtggctcatttttctgcattagcttcttgtcttcttgtcttcttgttttgatcaaacttggacaatattttaatgagaaaaaagtttttttttttttggattttcctatacttggtagtttctactatcttcagtgatgtgtgtttgacactggcacatccagttttactttgtttcaaatgttggcaggtggattggaactctttgcagatcttttacagcgcttccctaataatatacacataatacttgagatggcaaaggttaggctt

SEQ ID NO: 2660 - DNA, 930 bp, Glycine max
acgccagcttgcatgcctgcagcctctttaggggctgccttaattgaagcctcatggccacgtcaactagagatatggcttaagtagagcttataaagcttgggcaatccccaccttatcagccagttttgcagggttgagttaagtcctaagcctaaattctaagaataatcttcactcttccatttcattttctctctctctctctctctcaggagaagtttctttcttagaaatagagcctaattctgtctctattccctaatggatttttactctaaatatcatgttgaatctcttttaaagaatactattccttagcgtagacatggatttaccttcacatgtcacaaattttaagtgctagcacattgatactattaacattaggagtattcatgacaatttcttctcacaacttaagtaaaagaaaaattacattgtaagtcaaatactgtgctgttcaaaatatgaattaatcatattcattataatgtcaataatttcgacatattgcttggacataggtacatttaccctattctcatatgcttaatttaaattaataattagtaacataacaaagttggaaaacatccaaaatcctaaatgaaaaatatcaaagaactaatatttgaatacatcacaacaaactgcacgccaaatggcccataccttggtgctcgtaggagcatggatgtgaaacactgtatggtggaaatcagtataagcatttgaacgggctcctgttcccaaaagcttctcacgttttttacttcctaggaaagcaacatgttcaatcatatgtgcaattccttgctcgtcctcctcctcatctattgatcctgcatgaacttccaaatgtgcttcgaacctaaaattaaatcagttgatattaagtaattagcaacaacaagcacattctagaga

SEQ ID NO: 2661 - DNA, 867 bp, Glycine max
tcttggctgaacccggtcttccttaatcgacctcgcagttatggaacatttcccactgctcgataaaatagataaatacataatttgatttttttgttgtgggaatgatgtatagaatgttgtcagtcctgcattcagtttgtgggtacaatccattgttgatattttagcttgctttgcaattctatttcttttttctgttgcagttttagctctatgcaagaaattagttaccgagaaatcatctactgtgaaattttatgcttttcaggctaaatattaacttgatggagagaaaagtgacaatttacgcaagattagtctattatgtggagaatgagtagagggtagagattcctgactcctgagttcagcatacaaatctgtacctatacaaaatttgagattcacgaccatttctcgcttcctacgatcgcttaataatacaacaaactcttcttacacagattataacaaggaaaagaactgctccatcgtaaaccaactacactttaaatggtctcccataggcttcatgatggagagaaaagaactgcatgacatctgcaaaattacaaatttttataattattttactaaaattaagtactggtttacttctgtttcttaattgtaaattgatgttaaaaacatacatcttttagcatctagtaagcatggcaagcacagaaaatatatattaactgacctcataacctcagcatgcttcaagaggcattccattgtctaaacctgcatattccacgacgattttcagcaaatgagttgcgaatagactgcaacatagcacgcacagcaggaacatgaaccaattcctcatgctgctcctgcaggtcgactctacag

SEQ ID NO: 2662 - DNA, 864 bp, Glycine max
cctgcagctccaaatattacaagcaggagatcgtaattgcaaaatcagaaggaaatttcatttgcaaatattaatttaggccgaaatgttaaggcagtcccaaattggtgctgttttaactcaaaattctaagaacacaccaaacatgatgcataaaagagcaacgcttgacctctcaatgaaggttaggcacggaaacaatttacaaattcactgctcagtttcccaatgcaagtgtagtacccagctctacaaagcactgcataacactaactagcataacaactgatgcagtaaaccaattaaaaactgcatatattcacctgatagctccagcagctgctttatgaaagtatgcatgtgaatgcaattggtcttgaaatttaagcatttcaacatatgtacgcaacgtcattttccttaagcagtatgaatgaaaatcaaattgatcttctgtaatgtctgcataatgcttctcaacagccagaaatttcttcagagccattccaagattaccttggcgaaaatagctttcagcagaggcaagctcataccttcaaaatacaaatgttacaatgtgttaccaaatgaaaccataatattgctagcaagtacagaatattacacatcattagatacagaccacatgcactgcatatcatgtaggttgttgtgctgatcaccatcttttgtgaacaacacagcagttttttctgccaaagcgacctggatatcaagagaatggaccaaaagaaagtcagaacacgcaaaagagaaaactacacatattacaacacacgagtgcgaatgaaattcaaattatatagatagccaaaacctgatcagcctgcaggcatgcaagct

SEQ ID NO: 2663 - DNA, 872 bp, Glycine max
gatcgacctgcagtttctgtctcactattgacatcaagaacattatgtgaggtccaatcaggaggaaaggtcttctgtagggcttctgttagttcccctccagtcctctcaatcttgcgtaaacatcttgaccagtgaaccgcagttcccatgtcgacaatcatctcagactctatcatctctctacatacagacaagaggccactgtaaacgtaagattgagcaaaggtggctcttgatagcaaagatgtcatgagacaatggtacactgctttgtctggtttaaatccagctagcttcatctcttcaaagcaactcaaagccttctctggcatagaagcacgtgcccaaccatttattagagttgtgtaggttttgaggtttggttttataccagatgcttccatttcttggataatctcagttgccttctgccaggaagaagaaaaactgattaacaagatgtaaataaattaccatgatttgataaaaaattctgaaaatctaccattcaaaaaccatgctttgaggcggtttaacatgcagcacggggagtattatgaaaaatgtataacataaaccaacaagatctgtttgtgagagcaaacagaaagaattgaaatgagacttcataacatgcaaggattttgcactcaattcattgctatactaaatgacgatgaagatgacccaaatgagacatttatacccttatttttagtccactgtaagtaaccaccaacttaataaaattatatttctcaacagccatcatacctgcatatccccagctttacagcaagcatttataaaagatgtgtaggtatggatgtctggtagaagtccttcttttctcatttgttgcatcaagt

SEQ ID NO: 2664 - DNA, 865 bp, Glycine max
attgcattcacaattttagttgccagccatgactataataaacacaaaacatgcaaatataacatggaaaaacaacatccattcgtataggatgtatataactacaatcaaataccagagactcaattcaattcatcccaatttagaatttatagccacacaaaaatattggcacttcactgaataattaagattgtttcaaagcaatattgacattccgctacggtgccgtttctcttaggtggtgcaattggaatttcctttgtgaattttttttcctttctggattaacagtaattgctatttggtttcccatgcacggtctttcactaaattcattaaaattctgtctttaccagccaaaaacattgtcacatgaaaattttaattaagtatcaaatttccatacacaaaattgacgacacaaccctgcaaaaaccctcactaaaaccgaaaaatgtgagatcaaaggcagaacaatcctacccttcgattgttcgggaaattctcatcagcagagggcttagtgctgaccagaaagtgggttggtgagagctgattaaagccctgaaagcgattatcatgattgggagaatatgatgaagggaaaaactccttcgccaaaggattcaactttgtgaacatgtcaaccagcttctgcacactgaattcagattcagccttaggttttgagtccattttgttggcatcagcgggaatctcagcaaccgcagccatggaaaatcaaacaaaagccaccaccccacaaaaaccctcaacaatttgcaacactaaaaatccaaaagctgatattttgagaccggaaaccaaagagaaacacaaggaatctgtgagattccctgtt

SEQ ID NO: 2665 - DNA, 860 bp, Glycine max
acttgcaaaggacaaattcagtcacggttactgtgaataatctcctccaaatgtgatgaatcaaggtattattttactcctcaaggaatatgaagaaggacatagagttactactacaattgtccttggaaaggcataggctttcattttatgtatatagagtcagcacattcaatctgttgtactcaagaaagatagcagaaaatataggcattttctttctttctttgtcttctccttgaatctgtagtaaaataaatgtggggtgtgttcccaagttgggtaagttcctatctgtcatggttccatttcaattgtaattttgaatttgctgctacctccaaaatatgatgtaattttctttccactccccactccattttgtggggttggcagagagagtgaggggaatatcaattatcttcaagtgactcaatctgagtcatgcaacatctaattcaaatgtgatctaaaactataaaatagattctctattatcacggtgtgattggtagatggtagtagaaaataattggctaaactgcacatttgatctccctattttagtaaaactgtgattttggttttctggtttctaattctgacatttggtgtctcttgtttgaaaaattcagaattttggtgatgccgttaaatcctaacgatgatagttaggagtaatgtgttgactcactaattgttgatgtggcatgtactaggtagccaataatcttgattagttgctcttttatattaattaaaaaataataaaattaaatttgcctaaagcattcttctcctaaatgtgtcaagcccaacctgttttccctttttggctttctcttaatctgttgtctctg

SEQ ID NO: 2666 - DNA, 1247 bp, Glycine max
tacaggtcatgacgaaagatacaattggtacctcaaagccttacactggggcaatgaggggcatcgtgcatgagcctcaagtgaacataggggcagatcaaaagttctcacccgtcgatgtttttaaacaagaaaaaaaaagggggagacaagccctggaatttcaatagattgattaaacatcaaacggctccattcccgtcactccaaaacggtcaagtgactaaatcaaacagaacatgcactttgagggagttcccggagagatttgcaaaagataggataaggtcgcatgaattatcacctctttcaaaaggacagtcaatctatgttttccaaaaaaaatcaaatcaaaatcaaaatcacaaaatagggaaagaatgtcatgaatgttgtacaactttccattacattgcattgtttcatatgaagtctgcatttaccgcatttcaagacaaaggttgcatgcatctgcatccctaaaaatcatgttaactgcatagatttcctacatctaatatccagtcgtgtggatttgggatgaccgaccctctcgatgagtcaatctcttgctttctcataagggtgaacccttgggtactagttacccatcaccatcagagggctgcacgtcctcaccttcagagggttgcacgccctcaccatcagaggactgcatgtcctcaccttcgtagggctacacgccctcacctttagaggaccacacgtcctcgccttcagagggctagttaccctcgccatcagaggactacacgtcctcgccttggtagtactacacgccctcatcttcagaggaccacacgtcctcaccttcagagggctacacgctctcgccatcagagaactgcatgtcctcaccttcgtagggctacacgccctcaccttcagagggctacacgccctcgccatcagaggactgcatgtcctcaccttcgtagggctacacgccctcacctttagaggaccacacgtcctcaccttcagagggctacacgccctcgccatcagaggactgcatgtcctcaccttcagagggctacacgccctcgccattagaggactgcatgtcctcaccttcgtagggctacacgccctcacctttagaggactacacgtcctcgccaatagagggctgcacgccctcaccttgagaggactacatatcttcgccaacagagggctgcacgccctcaccttgagaggactacctgtcctcaccaacagag

SEQ ID NO: 2667 - DNA, 839 bp, Glycine max
agcttgcatgcctgcagttgcgacttatggacacgtagaagtgtttcaatctcttcaatatggagaggttctaacttactctgtatcaccaaaattacagagctatactcatccgctaaaccttctaggataacaccaatgtgtcgatgaagtgcgattggctctccaacagaggcgagagcatcactgagtgctttgacatgaagaagaaattcatgcatcgattttagatcgagagaagtagctggcaactccgttcacaattttccagctttggggtgtgtttgtttgtgaaattattcatgtattttctcccccacttggtaagaatgcacacgcttcccagaactctagagagaatcaatgaggttaacgtcgattggagccaagtcaagaggacttgatcttgttgctcccaaatggaatacgtaggaatggtaggatttttatgaccgcggcatgattttcctccgtcagaaaccttgctggaattgaaggattcatcacaaaccaatgaagtcaacaaggcttaatcattggctcaacttgttgaccatgacaagaagttagcatcatctaacttttcatagatcggatgaaaagattggggagcggaagaggagggaacataattgattgttgcctccattgatgaccgaactaggctctagatgccttcttaatgtttctaaacatggtaatgagagaaaaaaagatagtgaagattaaaggggaaatggtgaaattaactcaagtgaattgtagaagatagtatttatagacaaatctgttagagaataacagttgtcacataactgtctagcttagctaatcagagt

SEQ ID NO: 2668 - DNA, 1035 bp, Glycine max
aaattgagcttctagcacctgacaacactgaatcaccaccatcctcagatccaaatagccctccacccctgaagctgcatagtgaccttgacctagacacccccccttgatgatccaccacccacatctcactattcctctcgtcaaacccaacaacacttctgcgacaacccttctgatcctttttcttccgaaaaagcttcccaattctccaaaacccatcaccaccatgatgatgcctcttgatctcaacacagctgctgctgctcctcctcagcaccacaacctcatcctcgtcattattattatcctccttggccttgttattgtgattcaaacgctgaagaaccactggggtactctcattgttattctcattctcaatgaggaatgagaccctcccaacactccccacctcaacagtgcatgagttgcggtgcgaagaggccatctcatcagagcaaggacatgaagaaagcctttgctccccacaatcagaacacacaagcttgaccaaacggtccttgagacaataagcacatataccaacagaagaagaagaagaagaagggtgtttcttacatggtgtgaattcagaggtggagtagtagtagcaatccatgtcattggtgtaagactgatcttccacacctttgttcctctccctcatggctttcttcagatggaggagcttcaaaagtaaagtgaaaaaatatgggaaggggtttttggtttggtttagtttagtttagctctgagagaaagagaaagaaaaaaagggacaccaaataatacttggcttgtagaagcagcttcctctatgaagctatgagtaaaaagtagagaattttgaatgtgaatgaatgaatgaataaagagagagaggaagcgcaaaggcgtttcctttacgttttctttgcaggaaaaaacagtgataggaaggaatagaaagagagaaaaaaaaaaaaaaggagtgatgcaagaaaagaaaagaaataataaagcactagctccgcaggcagcaagctggcgaaa

SEQ ID NO: 2669 - DNA, 740 bp, Glycine max
aaatctgaatattgatcatgatcaacatgaagaccatgctctttctcaagctagcaaagtttgtattctggaaaatagaagctgatagccaccactagttttgacttgggataagataaacccttcatcttttcatagaaatttcaaggaaagggaatgggaatggagagcttcacttctattaaaatttgtgtgggtccggatggtgttagaatagaaatttcaaggaaagggaatggaaactgaaagctactacatttctattaaaatagtgaattataattttcaaaaatttataattgatgcacacgtaaaagaaaagtgatctgactaataaaagtatagtgacggttgacttctttcagtgctttgcatgatgaggacgaattgaatatgggtaaagatgaaccggtcgtcaggtctacctccataatttgaccagttcaatcctaagttgctgatgtcattaggtgctagctacgttgctgatatcatgaggtttaaatacatttgcaattggctaaattttactctatttttttcagtttaattccttatgttttgaaaggttgaattgtgtttcttaaagtcttttcacaaatattttataaaaacataatgaaggaagacagacaaagcaactcacaaatttgaacactttcagcaactcacaaaccaaaggtatcgtcctatggatgaaatatagttttgtaaatcttgttttaaaaatttgtaacact

SEQ ID NO: 2670 - DNA, 798 bp, Glycine max
taccctgcactaacaaccacatcaatcaacaaacatattccctactctcaacccaaaatgtagtatatctcataatactatatccaaacaaccctcaaacactcatatttgcagaagaatcaggtcaaatattgaatgagttggcgaacattcattgggaaaatgtcgttattttctccatccaagaggcgcttagctatgataacatttgcagcatcagtaggatgccaagggtcccaaaacacatacttggatctgtcccagcaaatgatcgaagtaggaccacagggaatcaaacctccaaatcgcccagccatggaacaacaagaggaatatgggttctcaaaacctgccacattaaaaaaaggtctaattagttcaaaactcaatggaaaaatgtaatcaattatttttttcttaattattatttactctttcttgtaaattaaaaaattcaactatatatagagattgattagaataaaacttgtaatgataggagactatctaaaattttctccttagaattaaacatgtaatgatactgagactatctaaatttttctccatccaaagttaaggaactattagattagttgtcacgtcagacacacaccatatgcttcgtaattgttgagtatgtctcctaaaatgttgtagacatctgcataaacaaacattgcaccctttcagatttgaattgagctctgcaatgaggcccttcactggatattaaatgactgtgctagctgattggggaaagtgacacagccatcacccgcagttgggttcatatcc

SEQ ID NO: 2671 - DNA, 836 bp, Glycine max
agatttacacttctaggatcctgcacccatactccgtttacgaaaagcccttgaatagcattttgactccttctgtagttgattaatctgtggaaataattggagttgttgtccccttcttttaaccacttcactctagctttttgtcttagcatagattcaactgcaaaggctgcattccagagttgttcctggagagatttcctaagattgacttcatcttgggataagattctgttgttgaagccatcctccaaagcattgagctccttcttcaaatcaaggattttcctagaattgatatgaccctgagaaatactccactgcctgattttctgcttaatgaatttgattttctgtttcaaaactaaacccccccatcccggggggtgataattaccccattcaagtttcaccaaatcctgaaaccctctatcctttaaccactagtcgataattctgaaaggtttaggcccccaatcaatggttctagccttcagaaggataggacaatggtcagagaaatccctttccaacacgaattgagtagaatccggccattgggacagccactcatcaaagagtaagaatctgtccaatttgctcataacactgccattaggtctacaccatgtgaatctcctcccaacagacctaacctcctcaagctccatatctgagatccaggaattaaaatcagacatgccaagagtagcatcccttgtctgagatgagctgagcctctcctctcgataccttatggagttaaaatctcccaagacacaccaaaggcctgcttgatgggatgatctcagctgcaggcatgcaagctggcg

SEQ ID NO: 2672 - DNA, 931 bp, Glycine max
ttgcatgcctgcagctgctccaacaagtggtttttgtctctctttaactgctctttttccctattcatctccctcacatggtcctttgcaacccctagctcgtgtgagatgttagagatactgtcctcgaaatttttacagtcatcagaaactttccagcttatagtttctatgccagtcgtgacattgttcacacgctctttaagattagaaacaatttcatcaaaagcttcactgttggcagttattgttgctgacaaagtagcaatcctgtcctcgagggctctctgatcttgctgaaacttttcctctgccttcctaaagctttcttccttctcactcaacaattgttctgtgacccggagcttctggtttgacagacgaagcttaacctcaagcatccgaacattctcaaccgaagtactgatttcatctcctttctcttctaggtctcttttaagctcttccactgtatgttccaaatcagctaccttcttatctttcgactcaatgccttcatgaaactctcctgccatttcttcaatcttcttctctgcaacttcaagtttgaccatgcattccttaaacaaactatcaatttgtttatattcttcattcaacttctgatatgaatcttctcgctcttccagtgatctcttaagatccatagttctgcttgatatgtcattcttttcattctctaccattacaaggctttgtgcatgttcttcgctaattttttcacagtggagctccagttcttcttttgttttctgaaaggaaagcaggtctttttgcagattatcaatttgagacgtgaaggcaattatttgccctgaagcctcactctctttttcgtgaagcttttcctgtaaagtggataactctgattctttctcagctaatgttttctccagtgcagcaatcgctt

SEQ ID NO: 2673 - DNA, 779 bp, Glycine max
aggtttgaagtatttgtcaaaatgggaggaaacattgtgtggcaatgttcagttcctgtagtcctttggttgcagctgaaaagctgtctttgaagcttaactatttgctcctaaaagtactttggtataaggttgcacacctctttgtgtggtgtttcatgaattggctgtttcagggttgccatgtatagattgggttgctttattgtgtattttgttttgtctccagatattttgttttggttcactctgttttgaaagatttcttatcctccatttagttgaactttctcttaaatctattttcttacaagacaaataaatgtgaaaggtgtagaagattatgtagcttggttgtgaaattattcacacttagtgcaagcatagttatcaatcccaaataattgtgtggactggccaaccaaagtgtgaagaaagaagccaataacaaatagaaatttgtatgaaatatgaataaactgagcagagatcaaagaggttgaaatcaagctagctgtgcaatgcatggacatagttatcaatattgtgctttagaagcataatagtggcatatataggttactgaaattcagttatacgttgttttgcaacttagttgttttaagagtgatgtaataagatttttttccttttagtgattgcaggcacatttagtgcgggctgctgaagtgaaaaaggccatcgaatggatcttaagcaaccgtgatggtcattatgctgctgattcagttgtggcggcaattgctcatggtgctgca

SEQ ID NO: 2674 - DNA, 924 bp, Glycine max
atatgtatttgctctttttgagatgaacaagtctcctataaagaaaccccacattacataaatcggtggatttatgtaagaaaagaacaaaattataaaaggtagaaacagaacaaaacaaaacaacaaacctcaagagcatttgttttaatcatcaacgtatccaattgtgtacatgttttccctgtatattctttgtactttgctatttctccagttaaagcatgtacttgacccaattggcaatcacgatcatctctaatttgttttaactcttcacgaaggcatttgagctcatttgctaaaatttctttctgctttatagcctcgtcttgtgaaacctgaaaacagaaaataaaagagtaaaaaacagaggcaacaaacacacaaaagagagactatcaagatactcacaataacaacagggaattaatgctaataataatagtaatagtaatatacaacagtctcttcacaacaaggttagttatgacattttaagaattataaacaacctaaaattaaagtgcttgcttgaagaagaatgccagcacattggcatcaataaactgcttggtaagctaccaatatccagttattcacttccattccacacccactgtagcaaaataattttcaaaatgatcacatattccacttgattttaaatattttttaaaattaacaggaaaaattcacgaaacaacattctccattgacaaaacatcattaaacacttcatagcatgagaaaaaatatatatattgatacaacttactttaagagacaccaattgatcctgcaatgccttattgtggcctcttacattgctaaggctctcaacaattgttgctttctctgtttcaagtcgtttatgggcttcattaacagtttcaagatctgactgaagacgactattgtact

SEQ ID NO: 2675 - DNA, 829 bp, Glycine max
tacaatttcatccatggatccatgaattgtcaacacactgtatcaacgttgatgaagtgactagcagtggtaagtggtaacagttaaacatgaggcaactgattttgctaaattttcaatgatgcctgttattaaatacaataacaaactgtacctgcaaccttggggaatcaataagcaggcaagatgggttatagtagataggcggtccatcaaactttcttcagtaacacggtacataatcttccctatcataagaaaaagaacatgtgaattagactgttttaagtaaagtgacaacaattaaaatacaagtgctggccaacgacactttttagtagctttttggtagccactatgatgcaatgtcaagtggaaaccagagaggcagataagtgataaccatggaacataatgcaacacattaatgaagagatgcaattcaatgcaaaaacgagatttttagaatcacaattcataagagcagtcacacatctaatagctctcaccttcatttttaacgtaaactaaaaagtgtttgtggcaacaaaaggacaaagaagcatgaaaaaaattagccaagcccatgttgattaaaaaccacaaatgatagacaaatcagaaaggttattcacattttgttgctcacctcttttatttttaacatctatatatccatcttgtttgatcctttgtataaaatttttgtccaaacgaccttccatgcctctcgcaagattgaaccggccagatatattgacaacaatatgaatatccttatattttgaggcatataagagcaccacattaccccctgcaggcaatgcaa

SEQ ID NO: 2676 - DNA, 857 bp, Glycine max
agaataatctgcaagagatgttcagcttcttgctcagcatctgtcactttgaggtcgtcaagattcgctccaaggctgatatgaacgcctttcatgttgctgccaagcgtggcaatctaggttctttttttttatttttttttttatttttcatggaataagttcttcttacggatgttgctattaattcagttaaatcatttacatatgatagaatcggaaagtcctaatgtttcaaccagaattgcatagccatactagctcatgtgcctctaccccagtatttaacatcataccctagatggagaaatatttgtgtagcaccaattcagaaaaaagataataaaaaagcagttgaggtagttcggacacgtacaaaggaggtcaccaaaactgccaattagaaggggaattgcatgtttggtttgcagtggaaatgttggggcacacgttccaatgtaaatccaacgggtaaaaacaaaataaacgcaaagagaagagtcatcatgaccctttgacaaaattacttttgcctcaaacgtaattttgctacgaattttgaaacatgctctaagttgcacaaaagaacttaaaaggatatgggagagggatcacataggaaataatatatgtgaaaaattggttacttttgttgtttctttctttggataaggaccaactatcaaataccaacgcaccaaaatcaagaaccactatggatgtgtcttcagtgttgattttttctctttctggcttgctttctgaatactcgagtctgttttgattgccatgtacctgatgatgacacatgtgtaagcttttaggatagtagatacctgcaggccatgcaagcttgg

SEQ ID NO: 2677 - DNA, 882 bp, Glycine max
ctcaattttctccttttcatctgactccaacttgtccgcgagcttgtccttgtcactgacctgattcttcatgttgtatacgtaggtttcaagactgttgcgagcatcgatcctctccttcaccttcttgtcttcctcggcaaactcttctgcttcacgaaccattctatctatttcttcctggctaagacgtcccttttcgtttgtaatggtgatcttttctgatttaccagttcccttgtcttctgccttcacatttagaatgccgttggcatcaacttcgaaggtcacttcaatttgaggggtgcccctgttcaattacccaaatataataccaccaatgaatttactaacattaatatatggagcaataatgagagaggacactgcatcatcaacgcaggtaacaaaccttggagctggtggaattccagacagatcaaatttcccaagaaggcgacaatcctttgtgagactcctctcaccttcgaaaacctgtattaagaaaaaagcagtgaatcgtctcaagtcaatcccatcatagttcaccagatagtggtgcattttggatttagaagaaaaacacgcatcatgccctttaatggcaccgtacctgaatggagacggtagtctgctggtcctggtaggtggtgaacacttgagatttcttggtcgggataacagtgtttctgggaatcaactttgtcatgactccaccaacagtttcaattccgagagtgaggggagccacatccaggagaaggatatctggatagagattgccacacaacaattagaaagtgtaatgcttagcaatctacttccataaataatatttacagactatggtacctttggtttcttcaccaccctctccactca

SEQ ID NO: 2678 - DNA, 841 bp, Glycine max
tacaataactagcaaaatggcatcattatgctctgcatattcgctaacctatgcaatgaccacattaaataacatcagaatcccaaaactgttcagtaataacaaaaaccaagaagtttgggaattaatttgggaaggttaccagtgattcatccatgatgcgctgatccaacccaggtaaatcaaccaatttaagaggcggtgctgggaagagataagatgatagaaagaatgttaggatttaggaaacttagtttacaaaaaataaaaacggtacggcacgtataactggagcctgtcaataaacaaactcattcactcttttagggttcaaatgcaaggcagcttccagtaattatctgacaacataacatattaattgcacgaagcaacaagaaactcaaaagtattgtaaaggaccaaaggctactgtaatttcaagaacttattttgacaagcaaacttctttgtgtggttatgcatggatagtccaaaaagacataacaacatgttacgatatcagccaattcaccttttcaaagatgtataattactctatcaaattgcataacctgaagatagtaaggtaagtaaaacaaatcatcagacatcaacaaacctgtgctcgtgcgtagcttcaaataaatttgatcccgacccttgccggtggaactcttactcagtctatcctgcaacgaacgtctcaaagcacctgcggcaacaacaacgaaacaaagcacgtgaacatgtccatcagtaaagaaaataagcgaattgcacagatcagccacttaagtgtgtactgtgtgcagtttgaagaaaaaataagaactgacttgcg

SEQ ID NO: 2679 - DNA, 918 bp, Glycine max
agaacaaactctcaagttctgacatgtcaaactctggagccctaacaccaaaaaggttttaaaataagaataaacagtaaacacaattcatataagttcagatttttataactacaaagttagaaagacttaattcatacctacaaaattcatctagtttctgtgtctcagcccataagcttccttgcattgccctcgttaattttaaccaatggtaaggtttcagattgctccttttagtctgagactgaccttttggattagcacgcaacaggctgccacgtccctttgcaccgaatggagcagaaggtggtccgggaacagcaggttttgacaacccattggcagcaagaggaggtgggggaggtggaacatttgcggagttcttagacaaagaattctgggatgcagaagctggaggagggggtggtggtggcgctaatggtgatggagtagaactagaatggctaggaggtggaggtgggggaggagggccaggcgtaccaacagacttgctcatactcgatgaagaagaaagagggtgggaggctgaagaaggaaacccagagagtggaggaggaggaggtatcgaggatgacgaagcctgattagttgaagatggaggtgtaggtggaggcggtggtggaggaggacctttaaatgaatctttggcagtggaaagtgatgttccaggaagggaaggggctggaggatgggataaagacttggttggaggagctggcattgaaaggggcggaggaggaggaggactaaccaatgatttcttaccttcatcatgcgttgcattttcagggtactgtgtagcattagattgcatcaattttgaagtatgctcgctctgaggaggaggtggtggtggtggtggtggtggtggtggtggtggaggaggaagtgaca

SEQ ID NO: 2680 - DNA, 906 bp, Glycine max
actgaatagcattgtgtcctgtttctttagtggctcctgctgttttattaagcacacagcaatgacctacaaaatgtgtatcaatcggcacaaaataagagatatattttattttcgaaagcagataagaatttctgaaaacatacatggaaatgctttaaagtttgattctgtcaagtttgatgctaataaaacttactatttgtgtatcttttttactacatcattttggtcaacattatagcatctttaaccataaaatggttcatcctattgcttcttagtttgacacctacttttctaaacaggatgatagctcagcagatcaaagattatcccaggaaaatgggactttgagtaaagtagattctcaacctccctttgcagatctctttggtgatatcttgggtccattggctattgaaggccctccctgtagcagtgtccaccctcagccaagctcaaattcaggattggaaggaactgtaattgaagccacagccatagtacctgctggagaactggccaattctgtgcaggtactacacattggtttaatttaagtacccaaataagtaatgaagtctttttcttaacctgatgtgctaagtgctaattgaatgccactgcaaaattccgtttgaatattgttttttcttatatttcatacatcttatattttgtttacacacgattattattgatgatgaaccacattaggagtttatgtggctgctctatttgttgaaattcctacctttgtgttccatggtaaaagctgaagaaaattcaaactatttttctgaaaaatgtggatatggtttttaaaaaaatccaaacggtttttctaaaaaatatggatatggatgttatcacaaaccgaatatattacaaaacaatgacatt

SEQ ID NO: 2681 - DNA, 841 bp, Glycine max
aagacgacctccaacacacctccattgacgagaatatgggcactactatgcaatgaaactccgacattaaaataaatgggacaagagcaccattttttttttttgaatttccgttccttttaactcaactagattaccgaaaatcacacatttaatttcttttttctccatttctcttcctttctcatctctttcatatcaaccaaagtgtaatgtatgattttcgatagtttagtttcaataacaaaaataaaatactataccagtcagtttagtttgagataattataattcaattcaattctttcatatctaatgagttaacgactcaaatattttgtttggataaagaataaaattggggaaagaactaagaaaaaaaattcaaaaagaatattaaattaaatccgaaccacctaataaaatgagagatactatggagaccgttcaatgttgcccagatcctgtgctatcaggatggcggctgtattctattcctttgtatttttcgaaatgaagaaaaagaggccagcaaggtgtcaaactgtctataggcaatctcatggactctatcttaaagcaaaggctaggctaccattcggcagcggcaattgaaatttcatgtaatcgactttatctaccaaaattcttaatacattcattattattaactaatgactcaccaaattataagattcattaaacagtgacatacgtgatttttaagccagaataagttttagtgtcaaaaacaatgtattaaagaatgcgttcataacattcctcaattacattaactatgatatacttgccgccagtgacaggaactgcaggcatgcaa

SEQ ID NO: 2682 - DNA, 822 bp, Glycine max
aactgtcaaatgctcttaacgttgtctcttgggtggtaaaagtggagcaggtctattttcccctagagtgaagattatgcttactaccatatgctttccttccatgttcttgcctctttttaatatagctgttgagctcttatttttttccctcaggtgctagaattggcctctcctcgcttattgtcgttgaaggaaaaatttgttgggatctttacattgatgggcttcttgttaattcagatggaaatttgttggatgctctaatagaataatatactataaaaagctagaaaagatgataatgatggattcctggctaaaataattagcgtttcagagatcatgcttttttgttgatgtcaattttcaatgttgtttacttttcaagttttctttttcatttaacctgagtttagctattgatgttacatacatgccatttggactctttgaaatatgtaatctatgacttcaaggaaatggttagaagttattcatactttcattaagctaaaattaaaaatatccttttactagctgttttctttaatctttataataagattatcctcccaaacgaatctgcaatcagtttcgtggaggttttccacatggatttccttaataccatgatgttgagaaaccgagaaacctatttccagaattaactggaaaaccccaatgcagctaataactgttgttcttttaggctgctttgagcaatacgggtattccaagagtccaagttgctgctggaacatcaaatgatgagcaaccagaagttgacgtaagcaacgaggagtttctgcaggcatgcaa

SEQ ID NO: 2683 - DNA, 898 bp, Glycine max
cactgtctttcttctcccatctcattgggatatcaacagactgagttttctctagtgtttactgtttatcctaggaaaaaaatatttaaataaaacaaacgtctcttctcttttttgtctttgttccaacgcataggacaaaacaaagttccctataggaattataaaaaataaaaaaaaataaaaaaatatatatatatatatatatatatatatatatatatatacacacacacgacaaaccactacatagttaaaatttatttaatacagtagctttttccaataacaaacagtatgcatgtcagtgaaccaaacaacaataacaacaaaaacgaaaatacactagacatgcataaaaggacaaagtcacattgtgaagtgaaaaatagataacccacatgatgtttgcaaaaaccattttggatttttaatttgtgcgtgtttgaatttccgattcaaacctacgtctgggtccacctctattttcgagaaacatggaaacctttccttttataaaacagaatttatagactaataaatttactttaaaattcttacaccccaatttgaatccacatccaaacatacctttagttggatgttttgagccagaattgtaagtgggctgggaaagaaataaacaaaaacaaccctaaaatgttggcttttgcacatgggttcattgactcctttcactgaacttgtcaaggtcatgacaaccacacaagcatgttcattcataacctaagagcccaggaatgagggcctttgctgctgctagctagctgtccatgtcactcagatattttatctgaaatatcaatagtcagcatgatgatggatgagggcatgccaccccataattcttttgcagattgatgcagatacatagcta

SEQ ID NO: 2684 - DNA, 903 bp, Glycine max
gcttgcatgcctgcagctgatcccaacaatcagctctctcatcctgaatctctttctcagaatcaccaatttactaatttacacatgattcctgaagatcagctgcctcaacctgaatcgctgcccaactctgatccactgccgagttctgaaccaatgcaagacattcatctcacagacattaaaccgttacctcataatcatctggcccagtatgatacacttcccagcaatcatcatatggaccattctgaggcagtttccaaccatcaactaactcactctgagacactgtcccatgaacagctagccaattctcatttgttgcctcactatgggctgcaaactagtgaaacactacacgatcatccgatagttaattctcgaccacactatgagatagtcaacgctagcaacatacccagctatgagataataaatgctgaaactccattgaacagtgaggaacctactccagaaactcagccaagcaagaggaggaaaaagaagtctatagtctgggaacacttcaccatagaaacagtcagtcctggatgtagaagagcatgctgcatgcaatgcaagcaaagttttgcctacagcactggttcaaaagtcgctggtactagccaccttaaacgccacattgctaaggggacatgcccagctcttctacgcggccaagatcagaatcagttcagctcatatactccacgttcaaggggaagtgatgctgctggcaatgctagcagtgcacctaagcgacgttatagatcccctaatactccttacataatttttgatcaagatcgttgccgccatgagattgctagaatgatcattatgcatgattacccccttcacatggttgagcatccaggatttgttgcatttgtccaaaat

SEQ ID NO: 2685 - DNA, 856 bp, Glycine max
agcaattggtatacaagtaatatattttagttgtaatctaggctgggccgttagtgtgcctcaattctgaatgatacatcttatactacaagttagttttcaactttctctcaagaatacgaggagggagcttctccaacaacatcaaccatcaggaaagcagccaaggaaagtggatgagaagatcatttccggaaaataaagtctggaaatgagttactgtttcaggtcagttaattaacacttgccacatgctcaagtcaaacaccatggaccttaaagtcaaacacataaagaaataatataaggcctcaacctaaaaattgcccccaccttacagcataaggaaatattatcaggcccacaaaaccttaactacaaccataataatgaattttataattattaacagcagaatttaaatattatagttttgacaaggcatgaaattattaaatatatcaatacttgtcaatagagggtaagtgtccaagcaatggtaaggttactaccttgtgacctacaagtcatgggttcaaatcctagaaatagcccctaggtttacatctacgcttctcggaccctacatggtgggagactcatgcacatgctggatgcatacaagtggcaaaataatccatatatctataacccaacctatcaatcgaaaattaaatctgatgcaatcaatacatttcagtaaacaaaagtaaatggattgtatggactgtgttattgtgattaatggatggataatgatccatccatttgtttctcaattcattgaattaaatcactgaaaatggatcaagtggtttttcttcctattgctactgaaagcccatttttccttttt

SEQ ID NO: 2686 - DNA, 908 bp, Glycine max
aaaagtctccaacttgtactcagtgttgtttcgctcctttgggtccaagtaaacctgcccaattcagtaggcataaattaaaaattaatacaaagttaaatgacaacaaattccatagacaaatgctcaaccatatagcaagactaacaagagttaagtggcgataatagctctaccttcataatcttggatccatcaattcggaacctcacacgcttcccaacaatctcagcaggcaatacaacatcctccagcattgcttcatgaacagcagtaagagtgcgactacgaggacgctgagcagcagaacccttctttggtggcctcaaaatccttcgggtggcaaccaagattacatcctacatgtttaattagattaaaattgctcaataaaagattaaataaacgaatagaaaattcaaaaagaaattagtaagttcaagcagtctaaatgagaagaaaatacttaataggagcaaaaggaatactttcagactattatatactaaacacgtagtaaataaattgcacataactctctcgggattattacagaggtaaattaatctcgtattgtgtgcctgcaacttattcattattttattagcaagaggttatgccaaagtacttgctaatgataagtgttgagacagatattataatgaaagatatctcaagttgcagttggtgttctctggtaaacatccacaatatcaaatgtattcaaactaccaaaatatacaagacatataaattatagatgccaaaaatatgataaactttacctaccttgccactaaactttttctcaagctccctgacaagcctgacatgaatcttacggaaacctttccttaatctgtaagggacatgaataacaacagccttgcggttcccagaaacatcaa

SEQ ID NO: 2687 - DNA, 717 bp, Glycine max
ttgcatggccctgcagcacgagcctgcacattaaattttcagtaatcaatatatctataaaagattccactgacatgggtagtgtgctttaatatggaagataaagcagtatgatcatacctgtccaatcatctgccccccaaacacctttccaaatcttggagcatctggaagggtaattccttggaagatatctaccttccaaagagaataagaaaatgctttaatttaaggcagaattccagggtattactacataccatcaaagatacaccatatgtttcaacagaaataccaaaattttactatcaaagagaaccaggacaaccacatcagtctagttctacttacccttttctaatagcagtcatacatctatgatctatcttaaaaaatatttaaattgctgtatcatctttcctttttccaattttcttttaatttcttatcttcaccataggcatgttagcatgtcttttccgagagtgatgcacagacaagttgtgaaaagatttatgaaggacagaattagtatagtgatgtacacaggcagtaaaacatacaattatttttctctcccagttaatcactccataaatgccttaaatcaataatcaaattaatgatatatattgagagaacctcgagcggctccaaatgcaatatattctccacaggtgagcatgtctcgagagaattttctgctctccagataga

SEQ ID NO: 2688 - DNA, 905 bp, Glycine max
ttgcatgcctgcagtgaagaagttatgctttattagaagaaataaaggctattataccaaggtgatatgttgcaatatatctcacatgcttcttaagaagattccagaagcaaaaatatcgcaaaataaaaaatacttaagatcttgtgtgtcatctgaaaacaatttcaagcagaagaaaataggtagctaacttgtaactttatgcattaatcaaattactattgatcgtttcacaaattataagcagattatactgtatcattaaatataatgttttctttatcgtaatccaatgatgtcataatccagtaaatattttggacatcttttgcaaacacatggcctggagaaaaatgccaaaaaacacaagtataagttattttctctctgatgttattacatttctttgctgtcaatcaagttaatagcatgtcttgagggaacataatatttaagttgtatttattgatctgttccttcttctttcatatttttcatgctatagtggacattttggttatcacaaaatatggagcaagtggagactatcatgcttgtactgaccttgcatataagaaagctaaatcagatggggcagatgtacttgactgtctggttcaaatgtcgaaggatggaatacccttttgcttaagctcgatatatctttcagagagcacaacagttgctgatacaaaattcaaaaatcgtgcaacaactatccgggagataaaaaatcgcagtggcatatacacattcagcttgacatgggatgagataaaatccaaatttgaaagggtttacaaggttgataagaatattagtgatgctgctgattcagcaattaaggacatcaaaacatttgctgattctgtggtaataggaaaggcatctgtttttcctga

SEQ ID NO: 2689 - DNA, 908 bp, Glycine max
cagacttgcatgcctgcagcagtgttgagtgcacatggggaagcactaagcatgtgagctgccacatcaaacaataaatgtcactacaagagtgaataattcatttcatttaagtgcatctcaggtgattgcttgtacactcaacctgaggttttgacatttgaaagcagtgggacaagaaactaaaagggcaccttagacaaagcaacaacatctgcctggtgaactgtgtttgacaaacctgcaatttgcaagttcacaccattctcatgtctccgataacagaaaataactcatgatgacataaactaccagacaagtatgtagcctatggcatgaaaggaaaacacttaaaacaaaagcgcaatttgagaaataagaatgaagtttactaccataaccaaagtagtcatattgtttcaattggaactctggtcgattttcatcattggccctagcagatccaagaacctcagcctacaagcaatgaaactagattttcagcgtaaatttgtcaaatgaaatgctacaggtaaatacaaaaccattcatgcggtttcacccataagtttaagctattgggatagttagtttgtgacatggtatctaagcctctatgacccaagtgatcaagagtttgatctttgtttcctattttaataaaaagttaagggcattttttacatgacaaaactgtttaagtttactgttttcactagtaattacaaaattgccaccttgttttcattttgtcatctgtttttgaagatttgcataggaaatattgaaaattgaaaacaacatatttaagagtgcaacggacaaaagaaggggggggggggggggggtaacaaatttaactcaaatctttgattacaagcagggctgcaggcatgcaagctggcgaa

SEQ ID NO: 2690 - DNA, 887 bp, Glycine max
aaaaagggtggtaggtaagacatgtgttttttatttgattaaagaaattttaaaaattcaattttaattataatttttctttgtttaacaaggagaaagttagtacttgtgtgcaaggcgtctcttgtttggaacgtatcaattttacgtcctagatcggaaatttccattacatatagattttgtatgtcatgagcatgaatggataattgtcgctgttaacattatacgtgtcaatgaacaatgatgggttcattagtttgttttacgtgatctagttatttattcaacatttggtgattatcataattaatttattctttctagaaggtttgtatcttaattttatattttgcttcattgctccagtgctccttttacattctttattaaaagttattctctaggctctgcaaacgaggagaataaaaaaggagatatgcaaaattttgcttgatctatatgatgattttgcctcgtcaaagtatttggattggattgtctttgtgccaggctaaatgtatattatgtatatatgcttttttttttcttttttcttttttaccgagtatatgtatgtatgctaacattccagtaacaccctgtttgccgatgatgtgccgctttgatttgatgaagaatcctatgtatggaaaagtcaatcacgatccatgaaatgatattatcatttgtcctaatccttaattagcatgaacaggataaaaaagcatattacacttaatacaatttatggatgtgctgtttaaaataggttggttggtatcttaaaaaataaaataaataatacttctaatttatattatttaacttttttagtaaataaatctttaatctactaaaataagttctcataacattacatataa

SEQ ID NO: 2691 - DNA, 894 bp, Glycine max
tagctcgtacgcagtttttgttgaatagtttccactcggatctgccttccaagtccatgagtctgcttcatgctgttgtattgttgacaatccgatttcctctagaaattctgcagccgttgtagcttcactatcaaataaatttctccttcaattgaagctccattcccaaccttcatctttgtgactcccatgaggctgatagtttgctgttgttgattggaaatttggtacagagtaggaaattttttcattagtggtctgtccccaacagtccatttgtcctcccaaaatctgattttgtctccacatcccaccctccattctatttgctttttaagtactgttaactcctcctattggttgaggtgccttaggtccttccaccaatgagagtgaaatctgttttttctttcatcatctagatttctccactcgccatactttgaattcagtattctggtccacatctgtccattttgttgaaacaaatcccatctccactttccaagcaatgctgtgttgaacttcctcaagtcttttatacctaatcctcctttctccttagggagacatacagtttcccacttgacccatgcgatcctcctttgctccgagcctccaccccataggaatttgcgctgaatattgactagcttctgtactactttgctaggtgccctgaaaaatgaaaagaagtaaattggaagtgctgttaagattgcattaatcagagtgactctccctcccaaggaaatgtgtctttgtttccatctagctagttttgtctcacacttcctaatgataggatcctagatctccctacatcttggatttgcctcaatcgggataccaagataggaaaaaggcatagacagcatgctgcaggtcgac

SEQ ID NO: 2692 - DNA, 858 bp, Glycine max
gccagacttgcatgtcttgcagtactgttatccgaggcagaaaagacaattttctggggagaattttcaagattagtagagaaagttgaactgtctgaggtatgaacaccaactccatcatgttcccttgaatccatgttattatcttttaccaacctagaggcacccctttttgtctccaaaaattgcttcacggaaaagtcaaccttactgcccttggccgaatctgctatgaaatttttggaaacgacactctccaactccaacctgtcaccttttccaacatctttcttctcagacaaactacgaacatcatttctatctgccccatgttcaaaaacattatcatcagagccgtttctttcagagaccaaaccaccctttacattattgtgcatcccctttttcttaccgtgcccaacttcatcaacaacaataggaatatgcactttttgcaccgtagcaatgaaagcagaggagttagaaaaccctgaaacagtacctgttggtggattccaaacagtgaagtactttggtgttgaatgtaatgaaagtctaacattatcatacttttggggcactgaagaccatggggcatttccatttccatatggaaccaatattgactgaaacagtaaaaagttaacagcaagtacccccaacagaaaaagcaatctccggttccccatatgacagatctgagacgacaccaaatcacttcattcttcgaaaattagcttcaatctccccaacacttagctgcatacataagttcccaaatcaatgaagaagcttgaaaacaaataaaacacaaaggatcccatcctattaagaaaaatggaaaatttgatagttaga

SEQ ID NO: 2693 - DNA, 827 bp, Glycine max
agtcttatagtttttgaataataattttagtctaaaatatcaaattattttataactaactgctgctttccagtaggtggtccttgacaaagagaaacaggttgccacagttgacagagaggttgacgatggtattgaaaccgtgtgtctaaacttaccagcagtaataacgtaagtttgattcttttaagtctgctgcatcaaccctatctatattcttaagaagctttgcccttttgcactttctctctttggtatatatgtatcacaccacatggtggtggcctaagatggatttaatttccttttctctgtttttattttccactttcttttcatttcattcataacttaagttcaaattaactcattggatcgtgaagcaacctataatactgtctaaaccactcagtcagaaaagctttctctttgaatgatattgccagtttgttttgcttggtgtgattataaaaacaaaggaaaacatcatgttaaatgtataatgaagtactggattgtagttttcattttatttttacatcgttttgtatgaggacatttaaaatcaaaagtgtggtagaatctgttttttaatgctatgtttttggtttaatagttacttgagattgaaggaaataatattttcatgactgctagtgagtgtaagcttgagtgaaaatgcattcagccataagagattttatatgcatgatggttacaaacctattaaatacaaaacaaaacttacaacagaaaaatgattaattctaactctacttcctaagttactatgtatctagattctaggctactgcaggcatgccagc

SEQ ID NO: 2694 - DNA, 159 bp, Glycine max
gaaggctggtgatggtggaactgcggcagatgaaatggaggatatgtttgctgaaatatcggtggctgtggctgtggcggcagttgttgtggtgctaggtgttgctgtggtggctgctgtggtggtggtgggaactgttgctgcggtggctgctgctgc

SEQ ID NO: 2695 - DNA, 863 bp, Glycine max
aagtcgacctgcagtcctcccatccttgaatttaaatcataccaaagataatataatcagaattcacataacaagtaatagcatcctaacatagcaagtttatactattagagtcacttgaagtgaaagccatgcaaaattttaaagcattttgctttacagctgaatagtatatactgatatttgtcacaaaccaactatttcaaaaacttagagcatgtttagattctcgtttggggtgctacaaactaagtctggggagtaaacttatttttgtgacatgttttgttatcctcagaactcaaaagtacgttctcacacttataacaccaacatgtacctaatctattaggcgaagaacacacatgaatggttttatctctaacatgttctctcgagcaagagccctttgggcttgaaactgacatgaacatgtaaggccaactttatcttgtgtaaatttcaacttttattataagaataaaggcagtaagaatcaaactctagagtatttagtcatagaatctctgataccatgtcaagaactaaaacttaacatatcatgtaaagacacataaatgattttatctctatcaattccaagctatctctgatctgcaactgttaactagaaatgtaaatacacacacaaaaatatatcaataagtaaccaaactgggatgattgagttggctcaatcgcccaaagcaagaatcaaatcagattatgcaactatcaaaagcacaattaatttggatgattatgtaacacgtgataatggtactctaataaaaaattctgtagaccaaggaagatataattcaatatgattttgagaaaattctatagaaggtaccgccggg

SEQ ID NO: 2696 - DNA, 888 bp, Glycine max
cagacttgcatgcctgcagttacttctctgccccttctcaatgtttccaagagaactaaatcacaagtatttacctccttaaagtggccaaatactcctctttagtcatagtctgcattatttctatctctttctcataatctgatatctgttgaaagtataaggagcattagataaatcatctgtgtctaaacaaaaatatagtctgtcatttcatattaatcataggtaattactatcatcttactggaaaattggtgaaagttgaatttccccaatacttaagtgcagctaaatcatatgctctggcagcagattcttcttcatcataagcccctgcaatatttaaaaaataacatcttatcatcatgttatacatgattgacagaatgattaaccaaaatcttggctctcataatcaagctactcaccaaggtaaactgttaatcaatgccaattccagttcaagttccaaaaggaaaggatgaacatgaaaacatgttagcatgtgagcaaggagaagcaagtgaacgagaaaagctaggcaatatattgagaagttgatgctaaagccaaagaggaggaactctataccttgcttccctttcttcttctgtgttatgttccaagagagtttgtcccacaagtgagcttcataccgacccgtccatctatgtctgtttacagtctaatttggattagcaaattcagcaaaagacaaaagtagttagcggtctttgaaactatagaacaattggaaattccttcttatatgacctgctaacaccgcgaaatcttgagcttctctttgttgtgctgattgaagaattttcaccaacttcttgctgtggtaactgctggtggtggttatcatcaccgctgcttgct

SEQ ID NO: 2697 - DNA, 883 bp, Glycine max
  misc_feature (8)..(8): n is a, c, g, or t
atcttgtntaaaacaatatgagaatgagacaagctcaagacatgccatatttgaaaccacggataaagaacatatggtgcaatcaacatgccatatttgaaactcgatcagaaattaatagcatacaaacaagccatgtccttgttataatgtatcgtacatcacccctattatctctagaattgttcataaaggctacaagaaaggcaaaagaaaggtgcatatatatatgctatacaccttatcttaatgatgcaaaaaaagcagcatacccctgtttctcaatgagatgtaggaattatgcacttgttttcttggacatggggtatgcaagtgctgatcgtttcttggttaccccttcaatcataaaagaaaaagccccataggtgaggcagttcagtataagagcttggggtgtacctggagaatcctaaaggatgagtcataataacaataaaaacatacaaaaaaaaaggaaattacatagatatatagagagagtacttttacaaaaaaaaagaaaaaaagtgattgaaatgcattgtcaattgtgggtcaatgttttgatttgctggacaatggagtctagtaataagcctcaaaagtggagataaaattgtctcagctcttggcaagaatggttatgtttatacggtgatatcaacaatgaaagacaaattaaaattcgtatgtttgagaaaagggttagtcaaaataggcagattagaatgacttctatccttaattaatttcagttggtgcagtgaccaagttaataaaattttcaagtaaagggtgacaattcatcaattatatattaaaagaaaggatacctggaaaacttgtagcaagaccagcgcaacatccagctagcccagcgtta

SEQ ID NO: 2698 - DNA, 809 bp, Glycine max
acgacaacttcatctcctccagtttcttcctgatttctttcctggctttctcaatcaataattttcttgcgtcaaatgctggtgccatggaacactgtttggtttgaacttcgactgtgcaggaaggcttttggccatgtcccatgctatcatttccgttagccactatcaactctgaagcacattttgaacccttttcttcatagccatttctgaaactggctcccacaacaactttctgtttcttgtcaggtctacttagtttatcttcctgtggttcactacaggagaatggtacatctgaatttgtattgaccatagtctctatcacatgatgcctcttatcagctcccaacttgacttttggccttcccctcttcacatttccattggcccgatgaacagaatcagcaggtaaggtagttgatccattttggttgacaactccagcagagccccactgaaatgaaacatttggaacgtactcataaccatgtccagaatggtaccctgtgaccccattcccattgaaatagggggcactagttggaacatatgtaactccatcaaatgaatgacttccatacccatttcctgccacatatgaccaaggacaatatggaaacgaaccatttgctggggccgccccagtttcaacagcaacaaaagtgccacgacagttcttacaagagagtcttttattcacatacttgcgcagatactcatactgaaccttacaagaggtgcagattgtccaaaaggtgtcaagcctaccacaaggggttggcaaattggaacatttggtataa

SEQ ID NO: 2699 - DNA, 876 bp, Glycine max
attaaaaaaagaaaaaaaaatacattaggtataataaaatttataacatgttaggaagagataaatgaaattaatttgtttgtacatggaatatttagaataaagagtaatttgtatatcattattgataaaaaaaagtataaaagttccagaataaaaaaattgtaagaaaaatatcaataataaaaatattaattaattaggttataaacgagctaattaaataagctacactactgttttttttctaagtgctatttagttcgaaccaattgtcatgaactgtgagaatgaataaccatataagctgggtccttgtaaaaagatatttttacgttgctgcacatccttcttttacatgcattctcagccaatcatattcttcataatgttttaacgaaaaaatttcctactaaaaagcatttaatttctttttccttaacaaatagcaagccaagttaaaactttgcattagactgatttaaataaacaagagacaaggcaggtctaaacttcaaataatccgcttaactctactcgtttaatttacacccttacacagtactattaagaacctaccctttttttcttcttttctttttttaaggataaatggatagttaagaacttacccttaaagaggtgcgagattatggatgattcccttcctcctttaattttgttgggttggggaaattctgcttttccttttgctcccactcaatgggagtgggagatagtttctgtctcctatcaacctgatcatgtacgcatatatatgaatcatttttaattcttaatttgtgcttgctgagagcacctgcgcgaatatgcatgtgataattgctaattaaaaccgacgtagtgtaaaatcta

SEQ ID NO: 2700 - DNA, 899 bp, Glycine max
gccagacttgcatggcctgcagcacggttgctttattgttccaaattctctcatcgtatctctcagattagctgcttcttcccactggcctgctgctgcacagatatttgataaaagcacataaactgatgggttgttatggtctctttccaggataagtctagcaactgttcttccaagtcctaaatttccatgagctgcacaagcactgaacaatgaccagcatatattggaatgtgctccaaagtatccacttttaatcactctctctgcctcatcaaggtatccactgcgacccaacagatcaactatgcaagaaaaatgatccacacttggcacaaatccataaactttcaccattgtatcaaaaatacggataccatcatcgaccaaacctgcatggctgcaagcagaaagaactgaagtaaaggtagcttggtctggtttgattccaggtgaggtttgcattgcctcaaaacagcacacggcttcttcgcctcgtccatgttgtgcataagcagatattatagcattccaagtgattgtatctctttccaccattgcatcaaatactctcaaagccttgtctaaagatccacatttggcatacattgtgaccagggcattacccaaagaaacttctgaagaaaagccatgtcttagaatgtaaccatgaacctgtttcccatgactcatggctgacatgctagaacaaatactcaaaacaagactgagggaataggcatttggcttgacttgtgtactaagtaatgcagagaactgctctaacccttgcaacgggtgtccattcataagaaacccagatatgatactgttccaagatatcaaacttttataggggacaccagagaagatttgaaatgcacgctttatcttcc

SEQ ID NO: 2701 - DNA, 874 bp, Glycine max
agagtcgacctgcaggtgggatgtagatatcaatactgtttgttgttctgagacagttaagataatattttccgcaattcacagcacagtttgtgagattggagagaaatcagtcaagcagcaaggacgcaatgtgaaaaacaatgttatcaaaattgtgagacatttctgtctttctgcctgtgcattttttgactaacgttattttgatttttcagtagttgattgtcaatggtttcatttttggggaatatgaaaagtgaaatcctgaaacctttctgcacccctccctcaaataaaagaaaatttctaatgctaaatattgtgctccccaagaccttaacaattgcctgttcttcatattaatgaatattagttcgacactttatttttatatttacttcaatgacatgaaattttacattggagttctcccagttatgataattttcctaaccaatggattgaatttgtttactttttacagtggttgaatttggtccagtcaatgtttagagaagctgagtggttgagaaccaagactgtgccaacaattggtgactatatggaaaatgcatacatatcatttgccttaggaccaattgtccttccggccctctatctggttggacctaagctttcagatgaagtcacagaaaatcatgagttgaactatctctataagctcatgagcacatgtggccgtcttcttaatgacattcacagttttaaggtatatataatacatccctgctccttgattcccttcctggttttatggtgactaatgtttttgtctcttctgtagagagaatccgaggaagggaaattgaatgtgctggctttgcgtattgctcatggcaatggagttatt

SEQ ID NO: 2702 - DNA, 858 bp, Glycine max
tattagcttatgaaactgttaacaagaacctctcaccaaagccaggggagcattccaaactccctattccagcatcattgatagcaggtgcttgtgctggagtttgttcaactatatgcacatatcctctagagttgctaaagactcgactaactatccaggtgtgtacatataaaaccaaacaggctcatgtttcccacatgagtttaatttctattattgtcagtataaaagtttttacattattaatcaagaaaaaatcatgttagctatgacttttaaagagttattttaaaagtcaacgaacatactatgcatgatgatttctgattagttgacaatctaaaaactctttatagtgtcggtgcgtagactctgttactcttcccctatgtatcttgtatcatcataccaaaaataaaagcaaaatttaagttgaattagtaattttgcagaggggtgtttatgatggtctactagatgcattcctgaaaatagttagagaagagggtgcaggagaactttacagaggtcttactccgagtctgattggagtaattccatattctgccaccaattactttgcctatgacaccttgaggaaagcatacagaaaaattttcaaaaaagagaagattggcaacattgaaacccttttgataggatcagcagctggtgcattttcaagtagtgctacctttccactcgaagtggctcgcaaacacatgcaagtgggagccctcagtggaaggcaagtttacaaaaatgtgattcatgcccttgcaagcattcttgagcaagaagggatccaaggattatataaagggttgggacctagctgcatgaagttggtgccag

SEQ ID NO: 2703 - DNA, 952 bp, Glycine max
aaaatgattctcatgttttattcaaatactaaacaatagagagcagggatattggatgaaaaaaaaaatgaagttcataatatacgtatcccctaaaattcatttctcgcacttttaatgaaacacgtatcataagtttacaacatattaatttggatacacattttaatttcatgtaacagtttaaaattaattttatccaagtttaaaataaataggcccttagcttcttgtttatcttggatctgtatgtaaccaaaaaaaaaatcttcgatctgtatgtaatttgctttgaaacccgctaacgacctcacctcaagggagattaatgtaattcgctctaaaagtaatgacaatgacattgatatatagtctgagggctacatacttttcagggggtggaaattaacattaaaatttagtaatggacactattaaatatatagcaagttataaattggaactttacagctattacagattaagtttttataatatttttcccggttcaaatgttgcgtttacaatttctctgaaaatcacgggtattttgtttgagttattgtttggcttatacccgtgcaaaaacaaggatatattcctaggttcagttttccctaaaatggttcatgtggtcgtgcaatgtgaatttcacttaaaagaaagaaatgttattaacaaactctctaatatacttttttaaacatatctctacacttaaatttattgaaaattatatatttttattatttaataagtctcttcatattttatagttttcaataaattttaattaataataaaatatatttagaaagaatgttctagcactactctttcacttaatatatgtatttattagattttgatgataaaatataacaatttgagaattttcccttgctaacaagattaatcactaacttaaggttaatctcattgatatactatt

SEQ ID NO: 2704 - DNA, 792 bp, Glycine max
ggttaaaaccccggttttgcgctagagtcgacctgcagaagcatctaaaagctgcttggattgtggccttaacccgtcaatgaaaatattgagctggattggttctaaaaatccatgagtaggcatctttcttagtaacccacgaaatctttccaaagcctcactcaaggactcgtctggaaattgatgaaaggatgagatgacagcttttccttcagtagtcttggactctgggaagtatttttttagaaacttctcaacaacctcatcccaggtcttaagactgttacctttaaatgaatgcaaccatctcttggcctccccagataaagaaaatgaaaacaagctcaatctaatagcatcttcaggtacaccagcaagcttgacagtattacaaatctcaatatatgttgccaagtgtgagtatggatcttcatttggtaaaccatgaaacaaattgctttgtattagttgtatcaatgaaggtgggtaagttaagttttgtgcctgaacctccgatcgtgcaatgctagtaaaaaaactgcggcaccgaagtacttgagtaatcttccaaggtcactcatcgaggttgctcttcagccatgacttcggcttcaaattctgctgtttgagattccctggatgtaggtgaattagaagatgatgactcaaaaaagtgagcctcttcaaggattaatgctactgttctgtcgtgcaaaagctttctttttctctctgtgttgtttcttctaaaggttgcttcaatttctaaatccaatggaaccaattcat

SEQ ID NO: 2705 - DNA, 498 bp, Glycine max
gacaagccggtgatgatgctgaatacttttgtccttggcaaacgtcacaactcttcacaaagtcctgaatggtagttttcatgcctacccaatataaatttcctgcaacaatataggaatacaagaagatttggaggacagcaccaacctattctagtagaataacactccttgttgcaagctaaacatcggctgtgaagctggattctcatgcaagtcagctatcacctgttttaagaaagggtctcgaagaacttcatgctgtacttgctgctcttgcatccaaattggaaatgaagtgatgcttttcaaatcaccttcttcatatatgcgagataatgaatcagctgctttattgtccggcccaggtttgtaaatgacctcaaattggtaacccaagagtttagctatccaattttgttggtcagctgtagtaatcctttgttgcaacaagtgtcgaaggctttttttgatctgaatacaccacaaattttctac

SEQ ID NO: 2706 - DNA, 574 bp, Glycine max
tttcgaaccttgagaagtggagaatggagatcaagcgcgagtaggttcactgtcttggaacaattatattctcacaacaggagggatggatggtagaattgttaacaatgatgctagagtgagacatcatattggtgaatcttataggggacatcggcaggagatttgtgggttcaggtggtctcccttgggacaacaattggcaagtagtggcaacaataatgttattcacatacgggacagggctatgggttcctcaaattcactgacccgttggcttcacaggtttgaggagcatagagctgctgtgaaggcactagcttggtgtccattccaggcaaatctgctagcttctagtggaggtggggttgatcactgcatcaagttctggaacactcatacaggggcgtgcttgaactctgttgcataggctgacaagtgtgcactcttctgtggaacaagaatgagcgggagttacttagctcgcatggtttcacccaaaaccaactcactctttggaaatacctccctgtgatgtaaatggcgcaaagtccaattgggtgtgctgtggcct

SEQ ID NO: 2707 - DNA, 598 bp, Glycine max
tgaaacaatgtacctttaagatatcttagaatccctttcaccactgtccagtgagaatccaaaggagcaaccataaattggcaaaccttattgacagcaaaactgatttcaagtttagtgagagtaacatattgtaatgcaccaactacaaacctatagagagaaggatcatgaaaaacatcagcaccatgtttagacaacttgcagttagaaaccatgggagaagagattgaatgagcttcagtcacgtgagttttgtgaagtaaatcacaaatgtatttactctgggtcaccaaaacagcactgttggacaaatatttgatttccagacccaagaaataatccagatgaccaagctgtttgagagaaaaagcagtattcagtctgtttgtgagctgctgaatcagagtggctgagctacctgtgagaattatatcatccacatatatcagcagataaacaacatccacttgatgcagatagataaataaggaagaatcacttttgttgccaacaaacccaaactgtaacagagtggacttgagtctgtcaaaccattgccttagagcctgatttaacccatagatagcgttattta

SEQ ID NO: 2708 - DNA, 662 bp, Glycine max
agtttgcatcaacttgacaaattaaatacctcacaacactttgggtcccctcacacagatttttaaatagacagctacatctcatgttccaattgagactatctcacaatcaccttttcaacagattcttgtcctattacaaaatatatgaccctacccaccatggtttttaatgaaacttaacaaagtggaaaaaaacaaacaatttagtgaatttagtgctggaaaaatatgttgttcttacctcttattgacctacgaaaatctgaatcttacccagaaaagaattaggtaagtggcattatactccagggtcatgtttggataaatttctcaataaatacttttagaaaaaaaaataagaaggtaaaataaattaatcttttttcggaagttaaaattaactcagggataaataagttgaatgagagagtttcaattgaagttcataagttgttttttaactcagcttaattcattttatctccttatttcttcttcagtaagtctttgtatccaaataggacctaaatcttactggaaatggaaatgtcaagtattgtcatgattacttatttactgctcagaaaaaattgattggactcaccaagaatctgaagactgaaagaggatctcccctgaccatatgtgtttgtgcctga

SEQ ID NO: 2709 - DNA, 579 bp, Glycine max
gggtgggccagtggcatgtttagttacatggttttgtggctgggggatatgtcatgtttcttgttttactctgtaattgcaggacagaatgctgcatatctcttttattctgtttattctcattatcagcttgggcatgtatgtctcatactcatgttgattttcaataatattattttccctaataaaaaaacaaaaaacaaaacatattcttattgcttcagttcatagaccctatatccattgatgatttgcttaagaaaatgggaatggtaaaaacaaatggattcatatggacaataaatttagacatgaatcacacaataatatacctcattgattttatataatacatatcgtcaaaatatgctttacctcctttaattatttgtgcaatttatcctgtaaaatttatcgatgaaccttaaagagttaaatccctttccagttaaatgcttttaaaatactatatggtggtattttgcatgcaaagttataaatttctcatatgttcaatctcaatcgttcatcgaattgaaggacatattcagccctcagacactcactcaatttcaatta

SEQ ID NO: 2710 - DNA, 244 bp, Glycine max
acctgacttctcttagacttgataacaacatgttaagcggtcatatcccacaagaacttgggcagcttcctaggcttagaaaaatctcttttgccaacaataatttatcagggccggttcctctgttccaacctgggttaacttgtgttgattgttatgccaataacagagaactttgtggagggcctttgccaccatgtgggtcaagcgatgatttcactgaaacattcaagaagggccttgc

SEQ ID NO: 2711 - DNA, 647 bp, Glycine max
taagattgtcggcagagcaaactgttccggacacagaaaccgctgcaacattgattagaaatgccacaaacagtgcgaatccactttccatgagaaagtatctacatgcatcctgcgtaatcaagcaaataaatcatcatattaagtttattttatactttgtcagttattaatgctttgtttatcttctgagtggcttactttgtcacttataatttagtctaaaaattaatgatgtatcgattctttaaataaagacagaaaagtaattaagttaaggaagaagcatccagccattacaaaaactagctcgtttccccaaagaagcatccagccattacaaaaactaggattgatatcagcagttctaacttccttacctgtgcaaacagtaacacccaaaaaattataaattactaaggctaagagaaacatatttgaggataagacaaaatttaaattctcctttgctagtccttgactgtttaaaactgacaaacatatcttaccataaaaagaaaaattgaaaggaaataaatgattcaaagaaaacttaaacattatcatgagattataatatcttaaatgagatatattatatattcataattcttaatcattacaaaaagcaaaagtaccccaaatct

SEQ ID NO: 2712 - DNA, 478 bp, Glycine max
aattttttgggacaattgaaagcataatggccaaattctttgcagcagaaacattgaatagcactcatgtcccatccttttggcttggcttgtattgcatacaccactggaacagatgtggatttgtgttgatccatagtgtcttgagtgagaaggcattgttcctcacggaacaaatcattgagacattcatccaaagagggtacagggtttgattccttccaattcaaattgtagtttcatatgaaactaatcacgtttagaagtttcatgaatagattgtaccgaacaaaggccttcggaaggtaaattttcatagactatgtttgtgtattcagcccacaaattcatgaaatgagagtaaaaatcagagatagagagactatcctgttgaaagttggcaatttcatgcttaagctggaatcttctagctgtgttattctgattgtagattttcttcagttaagcccacatcttg

SEQ ID NO: 2713 - DNA, 1142 bp, Glycine max
  misc_feature (1116)..(1117): n is a, c, g, or t
tttaattataatttctaatttgatgaacacacatcatttagtttactggatctatttacttacttaggggcagagttatttaaaattacgtttttatatttaggttgaattgttctaaaattttatacttttatatcttaatttaattttaacatatgttgttatttgactaatgttgttgtgcagggtaataaattctatgattaagagggtctagagtgacaacaactttttaccagcatatgttcagtgcaaattctcataaccagaaagtcataaccaggcaatactcacatgaattggattgaatcatatgattcacatcaaacaccaatgaaatccagaaaacatagaatgcttataatgtcttatgaaacaaaataaagcataaagcacattcttatatgaatgcagagactggattttgttagaacgcaacatacatggcttggaggaatatgcttgccacttagaagatccagaagaacagttccataactgtagatcacactctctgggattatcctgcctgcagataaattctttgaaagaaaagcagcctgccccatgtattgaagaactagacatgggtaaatgatacaaaaaaatgcaacctgcatggtaacaaggatacaatagcggttacaacaatcactttcaaaaacaaaatctatctaaaagttgtggcattctgtttaaaatgaggaatcactattaaggactcaatttattatgtcaagggccacaggtgaaggtaaattatgtgaaattgaaatacattaccacaggaaaatcaactcaaagtttgatttcacatattccattttagctagagttcttgataacaaatcaagaataactttctaaatgtcattgacctacagtgtaacaaatcctaaactccttcagttgttatgcatgtgcatcattaattcattataaacaaaggtttgacttttatgatacaatgtgtgtaataatacaaattagtgtgtatcattccttctttgtggtaactttccatccgaagttcagttctttcatagcataaaatcatcaacaatcttatataataggcaatctaacatgtcaaaatctgaaaaaattatattacanngctaggtacccacatattactgact

SEQ ID NO: 2714 - DNA, 652 bp, Glycine max
gtctagagtcgacctgcaggtttctgtaagggtgatgataatttccttcagtcagtaatatgtgtacctagctgtaatataattttctcagattttgacatgttagattgcctattatataagattgttgatgattttatgctatgaaagaactgaacttcggatggaaagttaccacaaagaaggaatgatacacactaatttgtattattacacacattgtatcataaaagtcaaacctttgtttataatgaattaatgatgcacatgcataacaactgaaggagtttaggatttgttacactgtaggtcaatgacatttagaaagttattcttgatttgttatcaagaactctagctaaaatggaatatgtgaaatcaaactttgagttgattttcctgtggtaatgtatttcaatttcacataatttaccttcacctgtggcccttgacataataaattgagtccttaatagtgattcctcattttaaacagaatgccacaacttttagatagattttgtttttgaaagtgattgttgtaaccgctattgtatccttgttaccatgcaggttgcatttttttgtatcatttacccatgtctagttcttcaatacatggggcaggctgcttttctttcaaagaatttat

SEQ ID NO: 2715 - DNA, 1146 bp, Glycine max
acttattatgattaaggttgcctttgcgatttaaatcaagcaaattgagatgaaggcatgaagctaatcaaataaagttctttgatcttaacaaagtccttgttttaatcttcgttacacctaatcaaagctaaaatttcccctttcagccaaagatttttatccatatccattctgcaatatatgtatttgacagagttgcagtctaaagataacgaaataggaattgacttatttaattagaacacaagactttctgggatttcagtcagaagtttagaactaatccaaacacttatacgataactaaatggcaaaattttgatagttgtaacaagaccatccattgaccagtatagccagtcaatttgaatgtaattctagtcgtttattatatccaagcatcatgggaccaaggtttacaaagtccatgttaggcggagctaaacttttgtcgtcattgtgtatgacaatcttctatattaataatcagctcatttttgtttcgtggaagaaaagaggtaaaaactgcagataaattctttgaaagaaaagcagcctgccccatgtattgaagaactaggcatgggtaaatgacacaacaaaatgcagcctgcatggtaacaaggatacaacaacagtaacaaaggtcactttaaaaaacaaaatatatctgaaagttgtatcattctgtttaaaatgaagaatcactatttaggtctcaacttattatgtcaaggaccactggtgaaggtaaattatgtgaaatacattatcaaacaggtaaatcaactcaaagttcgatttcacatattccattttggctagagttcttgataacaaatcaggaataaatttctaaatgtcattgacctacagtctaacaaatcctatactctttcacttgttatgcatgtgcgtcattaattcactataaacaaaggtttgacttttaggatactaatatatatgcatgcaatacaaattagtatgtaccattccttctgtgtggtaactttccatctgaagttcagttctttcatatcatataataggcaatctagcatgtcaaagtctgaaaagaatattacaactaggtacacattctattactgattaaaagaaattattatcacccttacagaa

SEQ ID NO: 2716 - DNA, 481 bp, Glycine max
  misc_feature (446)..(446): n is a, c, g, or t
ggaggccgacaatgtgacctcgtatattgtgtggttcacgacagagcgtatcatttgtgggagggtttttgaggtgagatctgggaatgaggcaagggttgagacacagaggtcggagtagagtgttccctcgcatgtggagtttgctacttggaaatggaggctgttttcttggggtgttcttgttgcatttgcggtgatgctgaaatgggttaacgaagaaaggagtagaacaaaaattgcagagagaatggtggctacgtgagacaccattggtggtttttttctgctaatggggctatacatggtatatatatatatatatatagaagaagaagaagaagaagaagaagaagaagaagaagaagaagaagaagaagaagaagacggtaagtgatactgtgatttggttgagtgtgaagtctgaagtggataaatagggtggnttggttgctggcataaatgagtagtgtgggctttt

SEQ ID NO: 2717 - DNA, 578 bp, Glycine max
aaacgtgttgaaatgaatatttgggatcttaacaacttcactaagatctggaattccaaacctgtgagtctttacttcaacccttacttttcatctctgctattaattgttaacttatcttcctccagtttaccttttgttggtgcacattttttagtgcttgattttacaaatccttttaacctatgcagccaactaaggataacctcggtatatttacacctacttgtttcacatctgctacatttcttatgaaagatgaccatcgaaaatttgttgctggcaccaacagccatcaggtaaatttaattggtagattcttctcattctaaaataagtgaagaaatataatttttatatctaataatgcatggaatattcctctttgatatccttgaaaaaacatgtgctggagactattgagaaggattaataagtttctcttaacctagaattacagagaaatggaaatgatatttttgagaatttttttttgcaaaagaacactcaagtacatgtccttcaagtcacatgagatctttcccattttattaacaaatataaaatgagtaatatga

SEQ ID NO: 2718 - DNA, 565 bp, Glycine max
aggattgaaatgattaaatataattttcattgtcaaccagtatatataatatctatttccagccaagcatcccctattccaggaatgctacataaaatgccaattttaatgaaactggattgagaaatgaatacttatacaagcaccaactaaattacaagacaaactaactacatcttccaaatatgacactcaaccacccaagtttacttcatgaaggcattaatttcaaccccctcatccatacttttacaacgcatacatcatatacatggacttaaaagtgaggcaccttcttgttcctgagtcttcagtttcaaacatcattcggaaacgcatgccaagtgatggctggtggctgtacactgacttgtagtacttggctaaaggaataacaaattctgagggactagccctgcgaacaaaagaaaggcatagattgagaacatgaaagacacatttgacaaaacagctgatctatgcgtttgcaatcttattggaagcaatagtgaacctaggattgtaaaagacggtgaaggggctattatttgcagctgcatgagcc

SEQ ID NO: 2719 - DNA, 639 bp, Glycine max
taaagggattatcttacctatttgattatggatttatatatttatatgatgatatggtcattttaagccaaaccatcaaacgatgcttttgcaaatctagtaaaattcaactgtaaagtgccaacattgtacaggtcagattcactgaacacaatgtcaccttaaattaaaatgaaagacaataaatgggaaggagggagtgtacatgactgggtgggatatgctttccactcaacagatcaagcaatagggtgccaaaactgtatactacactttcagcagtgatccttcctgccaattttcaaaaacattagggaatttgataaaccagaaaggggtgaaattaacaaaaaaagtcctttagcctcaagtaaacaataataacaaaaaggctatattacctgtcctcaagtactctggaggagtgaaggctaaatttgtactatagcttctgccatccctactatttttcatgagtccaaaacaagagagtctagggttggcttcctgtccaccattggtaccaacataagttgacaaaacatattgaaagaggcacaaaacacgataaaagctgaaatacctgatcaaacaaaattctataagcattaagatcatggtacaatgcccttcctttac

SEQ ID NO: 2720 - DNA, 1277 bp, Glycine max
tatagtagtagtaagttgttgcagcccctttttccaacaccatcaactatctctgctaaattaacaaattccagtctgagttctcatgaatcccataaattctcagaaaatgcatctacttctcatcaatatggtggaaaaaatcaaaatcaggagaaaattatcactccagtcattggtcagtctggacaagttgatccaaaattaccaaacagtcaacttggatattttcctgctacaggggttacttctgatcacaagtctacaggaaatggaaatgtcttcccttctatgctttatgcagaatcaggtgtccatcccatatggactccaaaatcagtgtgccagaaagaaagttctccatttcccacaatcacttcatcccagtccaatcctcaaagtcacaactcagaatgtcatctctggtcggaagattcaacccatgcttctgataaaaatttaaatgatcaaattaatttggattgtgagacacatgactctcctgatgctagtcagagtgctggtactagttttttccacgacacagcaaatcataatagtagcggtgtatacagaagcatgggctgcagctcctttttgtagctcctttttgtattgaatatatatccacattgtaggtgcacaaatatgagattatgaatacaatctacgttgtacaaatttttttaccattcacttggaagggcaaatccttgtattcatgctctcttcacagtattaggttttggtaaatccttgtaaatctcagtactaagggcactaattattttaaaaaatttagagttttattattaaacttgtaagtttttattattattaaatttatccactgcctatgcctagtcataaatatggttctggtggtatttgtaagcatactgataatatatatatatatatatatatatatatatatatatatatatatatatatatatatatatatatatgctttccagactattcttgctgagatataccgcattatcagtaagaaatcactcttccaatgaccctgcttccaatattattaaagaaggcaagactactatcacagctggggggcacccgaacccaacacaaacaagccttcttgttgtacatcatcttgaaaccattcctacttgctcagtatcattgttttgcttgttttcttttctttaccattcttttttattaacttatctggatttcttatgcttgtgcgtgctgattaatgagtattatcccagtttttaattgattttttggctcct

SEQ ID NO: 2721 - DNA, 650 bp, Glycine max
agttgatgacatgaccaagctagcataccttcatgagccaggagtcctgcataacctcgcaactcgtttttctctcaatgagatatatgtgagtcacaatcagttaatcaactagccattcttaatatatttgatagaaaaattatataaataagagagcaaagtctgacaaaaataaatgaaataaacagacatatacagggaatatcttaattgcagtgaatccttttcgaagactgccacacctgtatgacatccatatgatggagcagtacaaaggtgcagcatttggagagcttagtcctcacctttttgctgtagctgacacatgttacaggtatattacatcaacgtagaaatatatttggcacatgtaaactcggaaaacaattgattatagagttgattcagttcaatgtgtcagggcaatgataaatgaaaatggaagtcaatccattttggtaagtggagagagtggagctggtaaaaccgagacaacaaaaatgctcatgagatatctagcattcatggggggtagatctgctacagaaggaagaactgtagaacaacaggttttggaggtgagtttgaacgactcattaattgtttcttgatactcatataaggtatatgcagtgatattttcactt

SEQ ID NO: 2722 - DNA, 627 bp, Glycine max
tcgacctgcagccctgcaacatcatttaaaatatatttagaaggtgattcgtgaattatgaaatacttagtgtcaccaaattttcttttgggagctaggggtgatgggagtatgttaaattaggaattgcaactataacatccctgagcactgaccacccaggatctagaacaaaatacagattgtctacattgctacacgacatcaaacctaactaaattctagttctgcaaatcaactctatattttaaactcagaattggcatagagttgctgacaatatgcatagcacatagaaatagcatgaaggttgaccatgattcattgtctgtatctcttaacataatgaaatttcagaattcaaagttgtcatctccaacacccctcccttgctcaacccctcacttaaatacgctgttttggccatatcactggataacataggatcttgaacaaatctcggtaaataaatcatccaaaatgaaaagcaaaacaaagaaatatatgtacaatatacttaaaatctttataatggaatacaacgattagaaaatgaattgtacagtgcatttagggtgtgtgtgcgtgtgtaacactaacctggacattgaggctgaagagaaggga

SEQ ID NO: 2723 - DNA, 548 bp, Glycine max
aacatctcctgataactaatttcaacaagaatgttgatcaaaattcagatttcaggagtaaatataaagcagtaacaaaaaaatatgatggcaagaatggcagagcaaaacattgttatcatttcaggaaaactataaaagattaataacattgtcattatgttggtccatctgtacatttaaccatttaagttgtcaacacacatagtacgtgaaatttcaaagaacaaactaaagttcctcatcatcttggttaaaataataaagttaaaatatctatggtgaaggcaaggttacattgagtgtttcagaaaaaaccaaaatccctcatgctaaaaattgatgagtatcattttcgacatctcacctgcacaactctgtcagattcatgagcagaagcacataaaggcaactgatttggtgcaagaacagtaatagaggcaccagaagagtccctcaacttctcaatgttttgaccagacgtcccaattaatccacctgcctgggaccctgcaatcaaaagtcttatcgtattggcagccacatgt

SEQ ID NO: 2724 - DNA, 597 bp, Glycine max
cgccatttgaggcagaagcaagaaagatgatgcttcttccaaaatgaggttgaacacaatcggaaggtgcaccgggaattcaaacacgcgtattattatttataaaaaataaaaagcattttttttttcaaatcaaacatgccttagacgcacctcccatctccatgggttgaaggcaagaggatcctgatatttgtctgggttcaagtgcacagccgggggacacaccataactgcccaacctgctggtatggtatatcctgcatgtatgtattcgttgtttgaccaaatgaagtaatgttgtcagaattgtgagcttttcccttaattaaaatgcaagctatgcatgtgtgcacttatggacttatacgttacattctattatttaaatttaataaaattgaattttctaactagtccaataattggttgtgtatcaaagccatatatcaaaaactgtacttttcgtaatatgaatgatttattctgcaaataagcaacaatcacatatgacatacccttaaaattaatttccctcagtgcctttcggaagattcctggaacaatattggcgagtctcacggtttcatttatgaa

SEQ ID NO: 2725 - DNA, 499 bp, Glycine max
ggataagactggaattgcttctaatgcagatcagtctggtggctggggaagtggtggagggagctggggtcaggcagagcataaaactggaagtgtgggtgatggcaatcagaatagcaattggaatacaaccaaggcttctgaaggggagtcttctggttggaacagtatccaaaagtcaaatgaaacttcatcagctgggtggggtggtggcaatgggtttaaaagtggatcagatgaaggaaacttgaattctacttggagtggctggaagtctggatcaagtggagtcaaacaagctgggaaccctgctggtacttcagatattgatgctaatcaggatgctgggtggaaaaacaaaccaaataaggatgggagtgagtcatctggttgggaaacaaaaaacaattggaatgctccagtctcttcatcaaatgataaagtggaaaaaggtaatgatcaaggtaggtggaatgcaggaaaagcttcaggtggtttg

SEQ ID NO: 2726 - DNA, 590 bp, Glycine max
aggtcgcaatgtatgtggggtggactcgatggtctcaactgtagctgctatacatgtttctaaccattaaatataaggatggatgcctaaacatggtaggggcaccagtatagtgtgtatgtaaataatttacatgatgtataatgttatggaggaggaaactgctaagcccatgtttatgcttttatgctgtaattctctgtgctagctagtctagctacaaatattacccacggttatcgatagttattgcaagtaacctgaataaaattaatttgtgttcccacaattaattgccaatgccttctactatacggccattgtaagaaaaatctgccagagaagagaacaggtgagaataactgacttgttgacaagagtaatttgacatgataatgtggtctggaaaagaattaacgagtcaaaacaatttaaaataatttattttcaaaatctctttacagtttacactgtacagtatgcacttgattgtgcagggcatgcacacgccatgccttccgcactagggaaacacctcaaatggttgccgacttgatcaggcaatggaatgaatgtctttcattcctctc

SEQ ID NO: 2727 - DNA, 679 bp, Glycine max
ttagatcttcgaatggcctcttctttctcctttcgcgttaatctcggttcagtcaccaacttccgtgtcactgcttcgtctctttctctcatatgccgctctaattccttcttctctctttgatcttccaatatttcttcttcttcttctgaatctgaatgattatctttatgaggggaaattcttctcttaacttgtctctccctctcctttctcgcaattccctcatcatcgtgaacttctgatttcttcctgaaacgtttgctacgattatcaggctttctagatttatatgcatatgcatggtcactattgtcatcagcctttaaaattgtgtaagtcttctgcttccttgccagtattgcagcctccctctcttgtttctgatactgattcaaactcgatggtacacgaggaaccctagaaaaaatttcctccgcgaatgcgcgagtgtcgcttgatgatgggatccgaaactccactagtttgtcaaccaaatgagccggtgaagaagcttggtgggatagtccgatcatgtaccgaacaagggtgggctgagaatatcctaatagagacatcaatttgtcggatacccaattctttagactgtcatcattatccatcgtcacacggcggcggcggcggcggcggcaacaaccctctgcaggccatgcaagct

SEQ ID NO: 2728 - DNA, 641 bp, Glycine max
aaaaaatagcaagttaagcttagttttagcaagaattttacagggaagtgtgaagtgaggggcttaggatcttgactttgaaaagaaaaaataatacctttaccccatataggcaagtcaccacctagggttgaggggtggaatttaaaatgataagcaaggtttttaagaaaataatgcaaagcaagaagagataaagatggaggtaatatctactaatctactaagaaaaaagggaggcaataattaccaaatgaaaaagatggaaacatgaatggtacgtggcgtgagttttagattagatctattggtcctattagtttaaactattagaggtaaaggtggccagaaatgataggttgatggggaagcaatgaacagaaacacaataagtgactgactttgaaaactgttttcatatgattaaagaaatatatgtgtatatatatatatatatatatatatatatatatatatatatatatatatatatatatatattataaaacataaatgatagttgtctcaagtataaaataaaaaccacactatataaactaggcagaagaagaaatcagtacctaaaaaaatattgagtggctggttagaacttgagactaataatggatggtatagttcaa

SEQ ID NO: 2729 - DNA, 1260 bp, Glycine max
gggaggtactttttctctgaaggggtattgatatttttcaactcactcaccagttccatctttgagcacctatacggctataccatgtgacaatttttgctaaaatatcacttctaatgtggatattaggtgggagggtcaatggaaagtaaacatttggattttatattcaggatggaatttacaatagtatctctttttctatatatacattaaaaaaactaggaattaattggagtaatgtacattgatgcacagctgctataggttgtccaagccaatttactcgagcaagttgggatctagaatccattggaagagctaaactaggaaatgaccaatcacatagggaagctttcgagctaaagttgaaaatagttcagtcaatattaatttcagtactcatatcaggattcaactttacataattaacttaccttggcaaagaaagctgtcatagcaaagggacatgctagaatgggagctatgttcatgcaaaaaatggcataaccgtggcttcaacgtgaatttggcgccaaatatttgctggaaatgatggggagaggaaaacataacaaattcaagtattaagtggctctaaataatctgcaggaaaacaaaaccccaataaaacataagactccttccaagaaaatatccatgtagaaagaaaaaccatgaacaagaaatggagtggtacctgaagggttcctctccagtttgcttaagagcaccagctgcgtcacggtagagaacatgactcaacatctcagacctttctattccaaacatgttagccagtctcatgtacaactcttcatatgaaccaagacaggacaagtcaagggtccgtcccacatcctctgactctatgaaaaccttgcaatgactggtatccgaaccaacttgccaagagaactcggtggtagaagatgactttccgggtgaaactgaagactgggagtcactaagaaatcccttctccttcttctccttattctcatcatccgtcacagtaaaattttgagacaacacatcactagaagatctagagatttgttgctcggtgagtatcggttgaccgaaaagcaaaaattggtgtctcttcacatgatcagatttctccaaactcttgttagaatttcccatggtcagcaagcatgatagactttctttactcttaccatggttggtgatgttgccattacaaatcccagtgtgcaaattaagctggtggacgttagtcggaagcaaccccaa

SEQ ID NO: 2730 - DNA, 569 bp, Glycine max
tagtacctaaacgagctttcaaatagaatctagacaacatctgtctaagtcatctatccctcagtgcccacaaacccataaaaaagttttttctccagtattactcataaataaaagaatcagcattgcttgattgagtgtttagcaacaagatccgaatcatcttagccacctaatttactggcattccttgagaatattgaaaaccttgacaacaagctcgatccaaattttctaacttagaattggcagcttctatcttggcttggctcttcataaaaaatctaccgcgaaaaaatgaaatagaaccatatcaaatttgagtaaaagtacagtcaaatgtcaaataagcagtgcagtaatgacgcccaagccctaaggcaaacaataaacaaaacatttaattacaaaatttgtcggagttatccaaaatttctcaacacgttacacgtgaaaaaagtactctgatcctctccgtttacaatttcacgctaatgttaaacaataacagtccagtggttggtcggggataaacactaaacctaattaagtaacacaaaatatctaac

SEQ ID NO: 2731 - DNA, 1850 bp, Glycine max
acattgatgagaaaggtattaggagagaaaagccagaagatttggtaatggcattagctgaggcaaaggtatggatttctcggtttcctattattatttattttaattatgtggatacaaatcttacaatcacttcctcttgggatgctgtgggataactggttaagaaattaagaattacaccccaagaatagttatgatttgtgttggttgttcttgacatgattgactccatcaatcttctcagagttcttatttgactttgtgaaatccttggggtactgttgtgttgtcccttttccttttaaaaacaattaaactggtttcttttattgataaattagtcttcattggagtctttatctctatagtaaatgttttgcatttgacagttataggtatcctatgcacggtaattcattgtgcattatctccatgatactaaaagatttaagaatgctggtattttgtgtaaacactcagggtttgcttatttgagatgaaaaaaatgagaagttgaaaagtagggtgaggagtggagatggggtgggatgaaatgattttgattttctctaatagtctcttcttagtgggtggaaaatctattttagctcatttcatgttacactgcagtcccaactggaaaatctaaaccaagtagatcatcaattgccaagctagaagcaggagcttgaccggatatgccagtacttggaaatgccaaatctgcaagtggttgtgaagttgtagaaggggcagaagaaccattataggaaggagcattatagacagaaccattgctaccaggatctcttccttcatctttttctgaagtacttagaagcagatccttgtcctttgcttccactctctcagctggaacaacagaatctgaagattctgcactaatagatagatttccaagttcatctgcaaactcaaatgtccctcggtgttccttatcagtgaacatataagaaggctgcatgaatttgctattgttagtttgacagattttaatatacacaagcatcacagtaatataaacatgtttcaactttcaagtagcgttactgtaagacaaggtgtttaatttaatctatcacaccacaaggtgttgaggcagaaagtttagctgtacaatgttttatatttttaaaatgctaaaattgaattctaatgtaaataacaaattgcagcatattattcagaatatctcaggtgattcaacagttgaggcaagactaaacatgaaacactaagaagtcaaacatgttttataaagggaagaaacagaaaaaacacactttaaatggtaaggtgaattatttattattttctccccattttatctttaaatttgttaaaaatagtaaaatatttcattaaatttagaaatggtgcgaaacacttcaaattagtccaaactcaatgaataatttgtttcattaaagccactgggaaggaagcgggtagattagttaccttttggtatacaacagacaaactgttaaattcatcaaatatgcgatctttgatttcactgctctgagtatcagcaaatactgaaactgcttgctttggagggttaaccacactctctgccactgatacattgtattgcagaagcctgtaataaaataaggccctatcatgaacatcctgcaatcaacaaaaagctcatttaacataccacaaagcaaatattcaaacaattcactgttttgacaatacaaagtagtaactagtaacaacaattcaaacctgatgaaaatcagcaagcccagcagccaatgcagctcctaatgctttttgagtttcaggtggtcgcttaaagaaacacttcataa

SEQ ID NO: 2732 - DNA, 649 bp, Glycine max
acattgatgagaaatgtattaggagggaaaagccagaagatttggtaatggcattagctgaggcaaaggtatcaatttcttcattggtttcctattatttattatttattttttaattttgtggatacaaatcttacaatcacttcctcttaggacgctgtggaataataactatttaagaaattaagaaatacacaccgagaatatttgtgatttgtgatggttgttcttgacatgattgactccgtcaatcttctcagagttcttatatgactttgtgaaatccttggggtactgttgtgttgccccttttcctttataaaacaattagactggtttcgattattgataaattcgtcttcattggattctttatctctatagtaatgttgtgcattcgacagttatataggtatccaatggatggtaaatcattgtgcattatcttcatgatactaaaagactgaaagaatgcttgtattttgtgtaaacactcagggtttgcttatttgagatgaaaaaatgaggtgaaagataggttgaggaatggagatggggtgggatgaaatgaatttgattttctctaatagtctcttcttagtggctggaaaatctatttgtttcatgctacatgggagactgagttaca

SEQ ID NO: 2733 - DNA, 1428 bp, Glycine max
ttttttttttgtttcccagcacaccggggaaaacgcggcccaggaaatcgagctcgggccccggggtccctaaaagcgaccccccagaaggtaaagaacctttggttgatgccagaaggtcaagatagggccctattttatacaggctttccaaataaaaggatcagtggcaaaaagtgtggtcacccttcaaagcaagcagtttcagtatttgctgatactcaaagcagttgaatcaaaagatcgcatatttgatgaatttaacagtttgtctgttgtatacaaaaaggtaactaatctactgtcttccctcccagtggctttaatgaaacaaatttattcattgagtttggactaattttaagtacttcgcaccatttctaaatttaataaaatattgtactatttttaacaaatttaaagataaaatggggagaaaataataattcaccttaccatttaaagtgttttttctgtttcttccctttataaaacatgtttgacttcttagtgtttcatgtttagtcttgcctcaactgttgaatcacctgagatattctgaataatatgctgcaatttgttatttacattagaattcaattttagcattttaaaaatataaaatcattgtactgctaaactttcttcctcaacaccttgtggtgtgatagattaaattaaacaccttgtcttacagtaacgctacttgaaagttgaaacatgtttatattactgtgatgcttgtgtatattaaaatctgtcaaactaacaatagaaaattcatgcagccttcttatatgttcactgataaggaacaccgagggacatttgagtttgcagatgaacttggaaatctatctattagtgcagaatcttcagattctgttgttccagctgagagagtggaagcaaaggacaaggatctgcttctaagtacttcagaaaaagatgaaggaagagatcctgctagcaatggttctgtctataatgctccttcctataatggctcttctgccccttctacaacttcacaaccacttgcagatttggcatttgcaagtactggcatatgcggacaagctactgcttctagcttggacattgatgatctacttggattagattttaccagttggaactgaaagcatgcaaactttggaaagtagtgaactaagttagaactttgggagagttgattgcagttcggttgggcgcaagtgcagatcgtgggcctgtgcggagagggtgtccgcgtttttttgtggccaagattctagggacggggccccgcgcggtgggcttcgggcggtcccattggcctcactcatgccgccgtgcattgggattatttcccgccctgtcttcccagcacggcaatgcttcgatgacatctggttgacgaataagaggccccccctgaacgcgaaa

SEQ ID NO: 2734 - DNA, 151 bp, Glycine max
atttcagatccgaagtcattggatgtaggatatctccatttcagaagcttgagtaaaacatctgtcttgaatacataaacccccatagatgcaatatatggtgacctttttgcttcatggggtggcaacccaagcacagaggtatctactt

SEQ ID NO: 2735 - DNA, 664 bp, Glycine max
accactgatacaaggcgtatcattaaactgtgggacggactaccattgattggcaaaggaaaaccattagtctcgatgatcacgaccaaacagccttgttgcagggataccatctacacgagcgcccttgaacccctgcactccaaggaatgctccagaggttggctttggaggactctatccctacacgtccccctgacattgaactgcctccagaattgcaaagtgtgttgtcttctcatgtgccagtcttccttcgtcgacagggccttcctccctggatttcattactttgcttcccggtaccaacccagtcagcatgtgaccttataggtatgcataccaccacaaaacagcttctcacactcatcatggtcattacgagtacctcgcgatggcctttggtctcattaacaccccagccaccttccaatcaaccatgaatgctgttttccgacctctcctttgccggtttctgctcatcttcttcgacgatattctggtatatagtccagatattggtctacacacttatcacacctgaatgaagttctttcaatattggcccttcactcctttgtggtgaatcgaaagaagtgctcatttggccttacttccatcaattacctgggccatgtcatctctgcaggcatgcaagctggcg

SEQ ID NO: 2736 - DNA, 1399 bp, Glycine max
aaatagctttgggatagtggcctcagaggactcatcctccatatgatgtggtacctgagctatgggacattcatcttccctgtgaagagaacattgagtcccaagccaggctaccaactctctaaactgctcgaatgagggaatagatcctggaagcgccgccacctgtaaactctgtaaaagaataatatgtccctgatggataacctaaagcatggcttcaaagcactgggaatctgtcttggctggaacagagggagctgctgacgtggatgctggagcaggagctactaaagtggaaggaagctcagttggcctagccctcaccctcctagccccacggatagaaactattagatcctcagggttccaatagttcttcctaatatagaccaagttaatgaccgggctcaggcgctcaaaagtgaggctatcagagacaacccctctggctctacataatgcggtgatcagagcagggaacccaagtctagaagtgtaagactgggctatagaggtcatctggccagagatcagcgctcctatgttcatatccatgcgagagactaggccaaagatcagcctagctctatccactgtcaagtcaaaagtgtgtgatgttgaggccaagttggagtatgagaggacactccacacctgagctagtgtagtcagatccttcctgagaatcttcccaggatggccctcagagttcaagatgaaccctcggccaggtatgcataaggcagcctctatctctctgtagtttgtaggcaaccaacagtatctggagtaagcgggtaaggtctccccctctgttaataccacaggtgtcttcaggaatgtcttaagactgttagcatcaatcttcaccaaatgacctctgactctggactactttggtggacggtcctcagaactgtataaatttgcatagaagtctttcaccaaagccaggtctatgctcccatcgactaaattggtgaggcatttatggaaattacacctctccaattcagccttaaagtcatctagctcagtgtgatagagctctaccttcctctcaggtaaaatgtttctccccagaacattatctgtgtatctggtccaagcatctaatgaagagaatctccttgtgtcatactgagatgtgggccttgtaccattgctctttctctttctggaagccatttgcagacaaaggaaccaaacaattaatcaggacataagttattcaaattttaaaaactgaaaaataaaactgaaaaagacactggccgcttaacgagacatggtccgcttagcgagacatggtccgcttagttggcctttgtaaaaaaaaacactactgcttagcgacatgtggagccgcttagcggaagttgtagaattttagctt

SEQ ID NO: 2737 - DNA, 571 bp, Glycine max
atctggagtatgcatgtaaggtttccccctctgctaataccacaggtgtctccaggaatgtgttgagactgtcagcatcaatcttcactaaatggcctctgactctggattgctttggtgaagggccctcagagctgtataagtttgcatagaactctttcaccaaagccaagtctatgctcccatcaacaaaattggtgaggcatttatggaaattacgcctctccaattcagttttaaaatcatctagctcagtgtgatagcgctctaccttcctctcaggtaagatgtttctccccaaatcattatctgtgtcccggttccaagcatctaaggaggaaaacctccttgtgtcatactacactgtgggtcttgaaccaatacttttatgtttcctagaagccatctgcatataaaggaaccaaacagttaaacaagaaacaagttgatcaaattcaaaaactgagaaagatactggcagcttagcgagacatggtccgcttatctacccttcacaaaaaaaatacttcagcttagcgccaggtgaagtcccttagcggaagttgcagaa

SEQ ID NO: 2738 - DNA, 542 bp, Glycine max
aaaagggtcagtttaaccatcattatttgggaattaaatgaaccattctccttatgtttgtttctttcctgttccttgaattaaataacacatttgtggggtgggggtggggttgggagactaaaagatttctactatttaaaggggagattttttgttagtaaggttttttttttcaattaaattttaaaatgacaaaaaaatgagataagtgatttaaatcaagtaattgattatacatttttcggggagggggagagggatttatcaaacctcagtgcaacttgtaataactttgtgctatttaaggttggacttttaccatcatgtgtcatgtctaaaaattgagtcgtcttgaattggttcagtggccttgtcttttcacataattttctttaccatttatttctttttaaatttacctttttattacaaccaatgctgccccataggatattgtggagcaacaagcagcaggcttgatgaaagaagcagagcggttcctaatcttaagcaatatcgatcgcctgtggaaagaacat

SEQ ID NO: 2739 - DNA, 492 bp, Glycine max
gaagttcctcctgttgttgtagctaatgctaaacttataatgagatcctcaaagaagaacataaaatatgaaggatttcaggttacacattaactatctaggatgaaaaaatgagaaaggtgagttaataaaaagcttattttttatataaaatttattattgttatgatataacattttttgtgtgtataaaatcagggaaaaattgtcaatgctgctaatgcggtggaataaaggaatcaataaagcattgaatcatttttttctgtttgaggtcttgtacaattcagtgattgagtcccttttacttcacttttgggtgtttgagactcatgagagcaatattttcttgtccaagtttctactatctatgtgattggagaagttataggggttttagagcaagtcgggagcttcagaattgtgtatggagactcatctgatggagcagtttatgtttacaagaatgatggtgatgatccaggctgtctt

SEQ ID NO: 2740 - DNA, 821 bp, Glycine max
aaaattgcagttcataaatatactcactatgtttttatctctttctgttccatgtataaaaataagaagacagttgcaaagaagaaatttaactaaatattttaagaacatgcaacccttaaggaaactaagacaaataagaagcatgtgcaaaatacagaaattagtatgtgacatcagcacagatttattcaaagaaaattaggcatgcaactgaatttgtaatgtttgaggagagacattttaagtgaagtgtacttagggaagatataggcacttaatagaatatataaaacaatacttaacaaaccatttctattgatctattcattaatgtaaattgttaacatgagttttcaattgaaagtcaatatcggtaaggccaattgaatgcctcacttctaaatcattttctaagctaaaaattttcattgtcaacacagatttataatatttcaaacagataactacagaaaagtaaaacaatataattgaaaataatacctgagtattaggtctgcgtcctgtagcaaacataatatgagagaaaccatccactgtacctttgttggtctttaaagagaatgagccatcagctgactttgtgatagcttggggagactcctcggtatggaattcaatacctcttacagacatttgttctgaaacaaaatctctaatctgcagctatgtcatctaacagaagtatatctctggcaattcttgagaaaactgactctaagactgtacacatgcttcttctgtaagttgaaagcagcaaaagcggcttccatatgatatgtactttttccagaatgaaa

SEQ ID NO: 2741 - DNA, 714 bp, Glycine max
gaaattgcagttcataaatatattcactatgtttttatctctttctgttctatgtataaaaataagaagacggttgcaaaggagaaatttaactaaatattttatgaatacgcaaccctttaggaaactgcaccaaataagaagcatgtgcaaaattcaccagagttcaaaagtttccaacctttaataaatacagaaattagcatgtggaatcaacacagaattattcaaagaaaattaagcatgcaactgatttataatgtttgaggagagacattttaagtgaaagtgagcttacggaagatattggcacttattagaataaatacgacaataaataaaaaactattcctattaacctatttaataatgtaaaatgttaacatgatttttcaattgaaagtcaatatttgtaagggcaattgaatgcctcgcctctaaatcattttctaagctaaaaaatttcattatcaacacagatttagatttcaaacaggtaactacagaaaagttgaacaatataattgaaaataatacctgagtattaggtctgcgtcctgtagcaaacataatatgtgagaaaccgtccactgtacctttgttggtctttaaagagaatgagccatccgctgacttcgtgatagcttgaggagactcctcggtatggaattcaatacctcttacagacatttgttcttcaacaaaatctctaat

SEQ ID NO: 2742 - DNA, 1330 bp, Glycine max
agatataagtacaacacacatcttattttttcactgattataaaacatccaaaaaaaagaaaaacatacgtaacatatataatcttacctatcctagagagatttcacagtaattagtatctcgtttgagatctttgatacattctttgtcatcatcgtaataaggacaatctttcatctgattatcctaaacccaaagacactctcttgatgaggccaatcccttcgggaagaactttacatttgacttcatgaggccaatcccttcgggaaatcactctcttgattcctttctctttaagtgcaggtatgatcttcccataactattggagccatcattgcagaatatcgagcagaatttatcttgttcttctcattctgactaagtgtgacattttctgcgattcttgcagcctattgaagttctatggaaccaacaaaacgaaagcagaagctacacaccaaacaatcaatctgcgaaacaaggtagaatataagagaaaggagcagaaagcttttaatatggctacacaagaacaaaaactgtgaaaataaaaacaaaccttgttgaggggatgttgagctcctacaagcatggggtccttcagaaccagttccccctctttgaagtccatgtctgcatataaacctgcagtctcatgtctttaattcagttattggtcaaacttcattttgaattgtcaagtcttgggaaggtccaataccctaggcggtatgtagtatattgccacccgtgcatccccccaacaatcatagtgctacaatgcacactggaatttttccatcctatggtgttcgtatagatgtaattgaagacttgaattatgagtaacttgtaatatctgttatcttgatggctgacaacaatcacagtgctacaatgtacactggaatttttccatgtatccccccaacaatcataatgctacaatttgtcaacttgacttcttgtttactttatttagcccctattttcttgaggtgtttattgtaaactgagaagtagacaatcttaaaattgatccttattgtgatagattagagtctaccaaaggatcctacgcaaaagaatggataaaatgggaaaaacagttacgggatattctttgtggaaatgctgagtattttaattctattcaggttagtacatctagcatttttcccccagttgttttgtccactgttaggaactctgttcatttaacattataataacattggtattttactaggcattagggaatgtcagtgattgtttttaaaatctacaattatgctctaaagtgcttttgttttccctcaaaacat

SEQ ID NO: 2743 - DNA, 575 bp, Glycine max
accttcttccttcaaatcaaaacaatttaaaaaaacccttctttttttcgaattaaaataaaatgttacgatcctcgtaagctttcagcatgacacgtaattgggtttgtttgtttgattgttttgtgaaacataaggaagccgaaggcgtcagtgaatcgaccccccacaccagatgtggccgaaaatgcccctgaaagggaacccacgcttcaagagctcatcaacatcaaggtttcatcttttcttctttttcttcttttttttcagttttgagttacttctttgttggagtggttatgggtcttgaaaggtaaagttttttacgttccttttttgttttaatcggcaaatgttaattgttagtttatttagtttttttcttagcagaaacgatcgatcgaacccgtgacctttttcttcttccattttttattaaccatgcaaccaaccttatatctctgtgttgttgatgttgttgttcagttgatcgagaccggagagaaggagcgtctcatggagctgttgagggaaaggcttgttgattgcggttggaaggatgaaatgaaaactct

SEQ ID NO: 2744 - DNA, 502 bp, Glycine max
ctaaaagccaagctctttcaatctttccatcaaactaatgaataatggtaacaaaactgaagcaattgcattataacactaacacataccattactgtgaactcatatcccatctccgaaagaatctctctgcgggcctttgaagaagagcccagaattatctattgaaagataacaaactcagagattgcattaattgctttatctttttcaattacttaaaaaaaaaaaagaggcaaaacaaaagagggtagttatcaattacatgaaaggacattgcaacgtgaaattattataagaatgtaataaagcatccattaaggagttgcaagatatgaaaaatagagttcatttcacacagttattcggttatttatttatcaataaacgttgcaccgtttatgggtaggtaggtacatgatttgaaatgtatgaagaggaaaatgccacaaaccttgaagggtggatttttggtagccatgtccacgaagctcttaactgc

SEQ ID NO: 2745 - DNA, 1068 bp, Glycine max
cccaggcattaaccagggagatggcacaaagttgaacaatcacattaaaattattattttaaccagctccaccaatgaaccatactatcaaggctctatcagtttgcttccaaagtcgggcttccttacacaaacagacaagacaatgcttacataagacagacaaaactgctcatttacactgtttggaagggatgaatatgggagggaagaaacacagataacaatgtcatttcctttgtttggttggagaggaagtggaaagaaaatgagaagaaaagttgacttctagagataaaaattcaaacttttttgtactttctctccaatttcaatttcaaacttttctctcctccctcactttctttcctctcgaccaaacatagggctaaagttgcacaattcaaaaaattacactctcccaaagcaactttgacaaactcaaccaatagctttgacctaactaagagacacaagcttgttcacacatctctcccccactagaaaagacaaaactctacagaaaaagccaaaaaccagctgcagcttaatttcatttagcattgtgcttttggatccactataggctactcggatccaatggttgtttcaatggaattgtgacttccctctcttctttgtaataaataaatctttttttgtcatcaaatatatgtaaaacttatccttgttaaatataaccacaacttcctaataatatactaccaattttttttaatcaataacaagaaaaaaatgtctaaccattagtcatttgctatgcaagtgaaaacatcctttggaacccatgttatccgaagtgacacgatgatttgagtctcatatgtgagaatcaatatttaacatttaattttagtagataaataaaccccaaaagataggaggtagaaaccatgctcagatgtgtataaagaaggttgtaccttttgggactttttctttttcccttcatcagcttcttcactctcttcactttcaacatatgataccttcctgactgtcctactagaagtgcgaatctcactgttgcgcgaagaaaaacctgtg

SEQ ID NO: 2746 - DNA, 565 bp, Glycine max
gtgttaggtatattttagcaaatagtttcttaacgtgcttgtcaataaattcattctgccatttcaattttgagccttctcttcttgctgttagttggatacagccttatggtgagatctgttctattgtatgcctgcaattcagctttcaaaagctaatcctatttatctttctttttataatttttgccaataaattgttcattatacatgatttttctggttttcctgtatcttgcttatgaagaaaatgcttcttctatttgacttagttttatgtgggattgctaatccgaaaatagagagattgactagttgagagctgccttatcagttttagctcaatttctgttagaggagtgatatgaacacactccttcaaacacattctatcagtaaatccaattgtttgtgagtgcaaagaaggaaaaaaagatgcaatcacttggtcaaaatgaggcacctctagcatgccctcaagggtgttgccctacttctttattgttcaaccctccaccaccaccaccacaatctcagaacacaacagccaaacctagaaacagtt

SEQ ID NO: 2747 - DNA, 1329 bp, Glycine max
aaaatgcagtggctgaaaggaaattagctcatctaacttcagtgagcttgtcatggatacatgacaaaaatctgcctcgtgagttataggcagaagcaattcaatgtgcttgtcatgtaatcaacaagttgcctccatggacaggcaaagagaaatctccatttgaactactctatggggataaaccaatagtggattattttcgagtctttggagccatctgctatgtacatattcaaaagacaataagaagcaaattagatccaaaagccaagaaatgcatctttgttggctatgcccttatagaaaagggtggaaatgcatggatccaatcactaagaaatttgttacatctcgaaatgtagtatttgatgagatttcttcttagaaagctgaagaagaggttgtctcaactgatgagttcagaggagaagtgcaagcaattgcagatgtagatgagcaatgagttactaacgtagagcaacaaggagaggaaagcattgagtcagctgaaatagatgcagaagaagtaagaaggtctgatagaagaaaaaaacctccaacatatttaaaaaaaattaattatattttccccttgtaatttattaatcagaatcctcaagccacaacattcatctttactttagtaacaggaccctaaattattgaactttgactgcagtatagtcatgataacccgaatcgaaccgtcgtgaacccttatgtgcattttgggcagcgttcggtttggcccagagggttgcccttggagaaggtgggggagattgggcatgaggagttttacactcaggtttttggagggatgcagttcattcagcaggggatttccaatggcctgccggatgttgattcggtattttattttactaggaagtcggtgttggagacgtttgatatccggtttgatgagcatgcaccgaaggtggcgctgccgcagggcatgatggtgccggttaattcgtttaacacgatgtaccattcgtctgcgttttgggccttgatgctcccggtgtcggtcagcacgatggcgtccgatgtgttgagaggttactgggggcagaggctgctttgggaggttggtgggtatgttgtggtttaccctccaactgtgcataggtatgataggattgaggcgtatccgttttcggaggagaaggatcttcatgtgaatgttggaaggttgattaattatttgatttcatggcgatcggataagcataggttgtttgagaagatattggatttgagctttgcaatggcggaggaggggttttggactgagaaggatgtgaagcttactgctgcttg

SEQ ID NO: 2748 - DNA, 629 bp, Glycine max
tgggagcaaagttgagaatgcatcattctttggctacgccgatggaacagcgaaaggagtagcttcaatggcgagaatagccgtgtacaaggccgtgtggcaaggtcaacttttctcatctgatctaatagccgcaattgatagtgcaatatctgatggggttgatgtcctttccttatctattggctttggtgatgtactcttgtacaatgatcctgttgctatagcaacatttgcagccatggagagaggcatttttgtgtccacgtcggcaggaaatgctggtcctgaacgtggaacccttcataatggaataccatgggtcataaatgtggctgctggcactttggatcgtgaatttcaagggactcttgctcttggcaatggagtcaacatatcgggcttgtcactctacctaggaaacttctccacacaccaagttcctattgtttttctcgatttgtgtgacaatttgaaaaatcttgccggttcgtgtggcaagattgtggtgtgtgaagataagaaaggaacccttttagatctagtgcatgctgttggattgtcaaatgttgccggagcagcgttcatatcaagtagcactgatacgtcgtttttccgagagaatggtt

SEQ ID NO: 2749 - DNA, 502 bp, Glycine max
gtttggctaaattttttctttgcctattctattagcgcagtccaatgttggctgaaacgcaacgtcggttgagttcacacgaaataccattggggacctcaatggtaaatctattgagcgaaatcaacaaggataatttgctttatcgttctaaaacaattattgaccgacgttggtgaaaaataaaaaaaattgcacaatgtcggcaaagaaaaaaaaaaccattcatgtgccaagatttcacgtaaggtttgtccacaaaaatcagtccggtcaagtttacaatcaatgtgggctattcttttctgttcaatccctgaataatttttggatgatgtcgattaggaactgtttggttggttcatccggtgatgctttttaggatgcctcgactggtaatttttcttggccgatgtcgcataggattttttttcgatcaaaatttgtaatagagtctttttgctgttgaggtcggttatatttttctttgcctattcaatta

SEQ ID NO: 2750 - DNA, 609 bp, Glycine max
tgagtacacaatggactgaaaattaggcactcacaaaacaaactactgttaggattaccgagcaagtcgatataaatggcatcaatatacccctcatgaattgtgacatctcaaagttatagagacaaggcagacatacagacctgcaacttgttccttgtaggcaactagaagatcaagattggcccggaacacccgacctaaagcctccgctggcaattgatcagctgggagtgccagtaatgatgttaaaccaaggcagcatactttcttttcatgttccctgcatactgattgttaatttaccatcatatgagaccttcaaattgtcacacaatatttcaactgttgtatggaagtgcacagaaaggacatacaaatgcgggaccaagggatggtcaaagggtagaaaataacaaaccttttaaaatcagcacgcattccactcttcttaacttgttgcagcaaatggaaccaaagatggaatatttctgatgcaacacctagcttttgcaatatactgagagtcagagctgcattgtagtaaagagcatctgcaatctgcaaaaataagcttctcttagaaggaagtaacttatgatgccattt

SEQ ID NO: 2751 - DNA, 577 bp, Glycine max
aactgcccaatttttatttttatttgttaatatttcgtaaggtaatatttttccattcttcccctttctgtttgaaaacggatgtcacgcatggcaaagaaatgtaaggacatcacgaactcaattgtaatttgcaacatgtctattgtgggcatctacccgtccatgtcaatagttagtgtgtacaattgttagggataccgcatgcgcatatccctgtagggagagcgccatgcaaccctattttgtaaaatcttgttacattcctcgactatgcaatccgtattgtgtttgattttcacgtttaattccaaatacaaagataatttatcttgcttggtataggagacgagaaaaatgcatatgaaacatatattgacgtattttatttgaagccttaagctcctgtcttgggagttatactgaatatgattaatggttgtgagaagtaataccccacgcacaggataatcctttacacttcttgtgcaatgttaatagaaaacatattttacgttatgctcattggtaaatattttgaaatttacatacacaatatgacagctaatactagcaa

SEQ ID NO: 2752 - DNA, 933 bp, Glycine max
agtcgacctgcagcaatctgcttaacttccccttttatatttttccttctcagcacttcagtatttaactctttcaaagcattttccttttggctggaaaccattgatagcttctctgatgattcagagaacttctgcaggtattgaaatgaatgacgaggagcttgctcactttgtggagcatgttgataaggataataatggaattatcacttttgaagaatggagagattttcttctactttatcctcatgaagcaactattgaaaatatatatcatcattgggagagggtgtgccttgttgacattggagagcaagctgtcattcccgaaggcatcagcaagcatgcaaaccggagcaaatattttcttgctggtggaatagcaggaggtatttctcgtacagcaactgctcctcttgatcgtctgaaggtggtcttacaagttcaaagcgaacgtgcttctatcatgccagcagtaacaaggatatggaagcaagatggtctgttaggattttttcgaggtaatggattgaatgttgtgaaggtagcaccagaaagtgccatcaaattttatgcttttgaaatgctgaaaaaagtaattggagaggcccaaggcaacaagtcagatattggtactgctgggaggcttgttgcaggtggtacggctggtgcaattgcacaggctgctatctatccaatggatctcattaaaactaggttacagacttgtccctctgaaggtggaaaggttcctaagctgggaacacttacaatgaatatatgggttcaagagggacctcgagctttctacagagggcttgttccatctctgcttggcatgattccttatgcagccattgatctcactgcttatgataccatgaaagatatatccaagagatatattcttcaggatagtggtatgttatt

SEQ ID NO: 2753 - DNA, 454 bp, Glycine max
acttctttcaaaggaaagctccatgtccaacccttctttcagaatagcccttgctgtgccatttgtgtgggaatctgagcctggcaccccaaaacacaggttctctgaggacacactccctcctttaactcctccaccttcttaccattttagcaatatcaatagctacaagaagaaagagaagaagcactcatcaaagtccagtctcttgctcacaatgctaccaaagatgaacctcatcaagaaaatgattctctcatccccatcatcatacccttcttcgtggccctcatcttcttcaagctcctccaaagttgtccctatggccaagtttggcaagaagaagctcttaagctatggatcatcatgtaatgatttcaagggagattgtgaaggatgtggtggtggtgctaattcaccctcttccaaattgtgctttagcgttccccgtgcc

SEQ ID NO: 2754 - DNA, 648 bp, Glycine max
tgaataaacactttggcaaaatgactttaaacaaggtatagggaacaaacatatccactaatgatcacatcacaggtattaacaaattaaaattagatttaacatatataacacacctgatctttaattcatgaagaaagcttaaaaggaaaaagaaacttgtttaaatttatacccagaaggcactatggtagtatggtaccttacctcacatccagttttggcaaagatattgaactctttaaaatacaattaattctttcctttaaatacacaaattcaaaactattttcatacatacaactataccaataggatacaatcaactacttgtggatttccatctgagattacaacctccgatgcctccgtagcagctgcaatagcaaatccagccaagccgtagccagaaccaagctcaataacttttttagacctaaaagaatttgaatgcataccaatgataaaaaaataaaaataaaaattataccagcaaaaggtaacagaaaaataacagtgaaaagatgctggctattctcagaataaaatcttcaagaaaaaacaaaatacagttttcaaacggtcaaacctgaatatatctgcatgtgacaagcaatagtgagcaagaacatcttctgatggccaatt

SEQ ID NO: 2755 - DNA, 1306 bp, Glycine max
tttgcatctgcttcttataatgattttctatatactgctttgcagcttcaaccctctgtttggttacatttgaaggtgcttcttcatttgttgggggtcttgacccttcttttgtcacgcctgtagtttctttgttcttttcagacttcattttatcatttgacttgaacttactaaaccaccgtcttgtagtttccattttatttcttcacctctcaagctgccgtttttatatttctacttcaccaaacactaaagatcaaaagttttgccaaacaaggatctcgttttaccagtcatgaaaatcaaggtactactgtttaccagaagaaccaaaggcacagtaactgctacttctgttcaaacaggaaaataaacaacaaaaaatcagctaactttagcatcctccatacagttaatagttgatcagaattaaaaatacacacattcaagtatagatgaagcattctacaatcattaaataggaaccactactaaaagaaaacaaaacaaaaataattcaagggctcatttgttatgtgaatcaagaacaaaacaaaaaaaaaaaggttgatcataactaatccaacttcaagtagaggaactgtcagagcaactgcaggagtctgatatgaagaaatttttgggaaggtaaaacgtgttattgtgtttgaaaatgaggtaaagaagaggggctatagtggagaaggaagcaaaagcgatggaggaaagtgggtctgcacgtgaggaggaggcataaatgtggcagatgtaactagaattttgagccagtgtcatctatcattaggagaggaggaccaacattgtcaaggggcaccaaacccgaggtatgcaaggaggacgtagaagagacatatcgtgaaaagcatgaagtggaaaaggatgaagaaggtcatagcgaagtgagaagcagaggacatgccacaactgctgttatctgcaccaccacaaaaaaaaaaaaaaaaaacaaagtggaaaaggatggctcgtgaaggggagactgttgttacctctggattgcatccaacagagaagagacacattgatgataggttgatgaagagggggacaaggagggaccaagggtctattacaaacaatcaaaaaaggaaatggtgggcactgctgaccagccccgccaagaatcttgaggaccttaagctggaactgccattggcttgggaacccatgggcagtgagagctcttcgtaagctcttatccattgaagttcccaccatagctttcttgatggaaacaaggaaaaaaactgcaggcatgcaagct

SEQ ID NO: 2756 - DNA, 135 bp, Glycine max
acgtgcaattcctctatggcataaacgagcaggatatatagttggtggtgtgggtagctgtaatctgaaacatttggtcattattgagaaatgaatgcacgcatttttagaaatggatcttttgaagctcaactc

SEQ ID NO: 2757 - DNA, 461 bp, Glycine max
aagacaactgtactagatagaggaacttccttgatagttgataatatgttggttaaaaaattatcgtgtgctaaaggtgctttgtggataagttactctagataagttcgaagttataatgagaccactcgaaaggttaacgaaatagccaaaattgaacagaaaaatgaatgagaccacatttatactacatgttagtgatgaacaatttcgtgaggtaaacaaggtcagagataactaccatttgtgatcttaccaccgccccaaatcaatcaatagcaatctcacgatcaagtgatgcacctccaagtggtacacgatatttcagacttcagttagcgtacattagtaataaagattatgaagtctgataaaacctacttgataatgaaaaccaaattagaaaatgcaaaacccaaactttccaataacgtttcatattgaagacaggatagaagagt

SEQ ID NO: 2758 - DNA, 1172 bp, Glycine max
tctcatcaagaaagcgtaatgccacccacccaatctcattgaaattagtggaattcaaccaaccacccagtgagacacctacaagctccgatagtctatcacagtgacttcgtcttctggggcatccagatcttgataactgcaccaccatttacaagacgagtaaatgtttcattctttcaaatgctaatagttattttgttgcatggaaatccttcagaatgttattgctattctaaagaacttcaatcaaatttccagggaataaaagctaagggaaaaataaaaggaacttatttgtaaatgaactttcacttcaaaataaataaataactatataagggaagaataacttgagtactgaagtcaagggggtccaactcagttagttgaacaaggtgtgtgagttattataaatccatgacattgtctttgatacccacagatcaaaaaataaaacttgagtactgaagatagtgaagcagtgtaggaccaagtacaaagggcatagaaagttgaaagttaggatgcagattgacgtctaaagaacacacataagagcatagaaaagatagtatgatttgagaccctgcaagggaaaatctgaacaaaggtcctgcagaagtaccactttgcttcctggcgccaaagggtgcagcagcatcgaaggagctcaaattaggagattgccaatcaaaatgcagctccggaatccaggttccgcaatcttctcccattcaaccacaacaatcacctaaagattttcaaagcacgctgtgaatcaacaaataaccacaaatgaaagaaatgaatgaatggaaaaataaacaatgcaatatgtacctgaagaaaaacgaatcaaacacaagtgctatcttttactattggtaactctttcgccaacaaggaaaacaactaaaccaccagcttaacccaaaacgaacaaagcaaaaaactattacgtgacaggcttgagcaaatgacggaagtattcagcctgaaaacacccaaaacaaaaatcatcatcagttcatgctttccttaaaagaacaaaaattaaaaaataaatagaagaaagaataaccacagtttcttcagttctaggataatatacctgacaatctgtgagaggttggaagcatgctataaccctaactattatggtggagctc

SEQ ID NO: 2759 - DNA, 692 bp, Glycine max
aacaagtatcaaaatctaaccaaagaaaacaacaaccataactaaaaccaattacaaaaaactataactataaatttatagaagcatacaagataatttataattactattgactacaacttgacaacttgtacatcatcatcatcaagacagcttagaagatggaagataacttcagcctctgccccaggatgctcgacataaagatgaacaatttcctatccagctgcaatgccaaccatctctaaagcacctttgtcatccttaaactctttcaaaccaacactcaagacctccccaccacatcgataccataatacaactctttttggacaattcagttcccttaacattcacaaaatctaaaaaatacgaccacatatcctcaatgcaaattccaaagagattcaaaatccataaattccaaattattatcgcctctacataatttaccaccatggtacaccattcaattgaaacaatgattcattatgaagaccacaatatctaaggagcaaagtacaataacctacagaaaacacatagaacatagcacaactcatattaaatgataatgaatatttaacttcatttggtgcacacatacaaacatggcactctaaaatttataacaccaaaagaacaacaacacgaatgacatagctctgatgacaacaacaacgtcgggaata

SEQ ID NO: 2760 - DNA, 643 bp, Glycine max
tctacatttttagaaataggaaaaagggaaaataccagcagtaagtggcaaaaaggcaaaagtttgacatattttgcaaaccacacgtcatatccaaatcaaatatgcacacaaaaacatgaaggggatcaaaataaggatagtcaaatcagtagacaattcaaagttagggtttttattctaaaattttgcacacatgcgcacgtaggaaacaagttttatgactttttgcatgacaaaaacataaaattataatatacacaaaactcaaaaattacaaaataccagtcagctgaaacatctaagaggaaccacttaccacaaatcagtaaaggatttcacagataaataattcaagtttgataacaccacaccacagaaacacctgctactgacaatcaacaagacttacttggcaatttttcttcttgctttccagaaatgtttttgacctaatatccctacaacatcatcaggagaaacaatcagacttgataaatttgttacagtggagatcttggaaatgttgtccctttcatcaaaatttcccttctgtatcgggcctccagtcccagtatcgtgatattcagcatcattggtagcctcaagtgggtgagtttggttcgctgcaggcatgcaagct

SEQ ID NO: 2761 - DNA, 671 bp, Glycine max
aaccgtgatagtattacttgctttctttcttatgatacaatccatataaaattgtggattgacttgccttagaagggtatcactctcaccagcaatttttaaagcttccaatgctttaacaaaaacagggtagcgaagaactagacggttttctttcatgtactgaaggatatgggtcatgaactcagtcccaccaactttagaacacctctcaatcaaaatattgcatgcagctttatcaggttgcgccccagcctcttgcatcttttcaaaaatctccagggcctctttgtattgtcctaatatacacaaaaacaaaaataaccattgccgccttcaacttcataataaacaaaagacagtacaagtcaggaaaagttcctaaatgaaattgtgctaaaagtgcactgcatagaagctatcattctgatatgcagaatttcgtaaagtcaagtaacatgtcttttactatataaatgatgcaaccaaagtaaacacataattcaaatcttttcattaagactgagaatctgagattatacagttcaaaataagtcctgatggggaattgataaatgaaggcgaatgttaataggccacttaagcttgagctctctgccagtaaactaatccttctatcaaactctaaagcaaacagtcatgacaagttc

SEQ ID NO: 2762 - DNA, 428 bp, Glycine max
aagttaatggtgaaaaagagcttgcatcccctcttaccgcattttgactgtccccactaaatgatgcaccgtcgcaataacggatttttattctattccaattgaaaaaatctgaaaatataatcatccaaaagaaagatgaagttaattttcatttaaatgaagagtaataagcataaacaggtggacacgcatgtcttatgtgtatgtgtttaattgaaaagagaaatagcaatgctgttgatttgagagttataacctggattttcctcagctttgttgctcaatatcccaataaatggtatttgtttttccataaaaaatgatgaaccatgacgtgttttcttactataaagacaattttttacagttccacaccagcctcctccctgtaaccaaaaggtttagtgaaattattatggctaaac

SEQ ID NO: 2763 - DNA, 1236 bp, Glycine max
accgtgactggtattggagagcttttctccctgaagggaccgatcgagaccatccggcttgtaacccatttggccccaagggtaaaaatcttgaagggctcaagtttcccaaaagtcttgtttgtgtggctggtttggatcttctccaagattggcaagtggaatatgtggaaggtctcaagaattgtggccaagatgtcaaccttctatacctaaaggaggcaactattggtttctacttcttgcctaataatgatcatttctataccctcatggaggagataaagaacttcgtcaaccctaactgttaatatactacttaaccttacttaaaggatcccatacataactaaaagcctgacatttcacctgggtaatctttttcttctatttttgtatcttttttttttctttcccaactttatagtggtggtgtgtagttatataaattgcgtagtgctacttactgtcataacatctatggtggtgaatctgagctttctgtaatcggtggctactgcttcctgtgctgtgctcaaatttttgaagggtagcaccagtttcagcagtttgaagtgccagagttcagttcattagtggggtttggctgaagcaccgtaaatgaagcttactctatttaactttttcaacctcagtagctgcagattcccaactcactattagtagagctagcagaaaaaaacagaatgttgctttcattttttcttctctttcaaaacctcaaatgatgaatatgtgatgatgatgatgatgatgtgaatcttcacaacaagaggcaattaggcatgatgattgattgctgaatagtggaaaatatatataagaagggagagaaaggctagctactaagttaaacctgcttagcttgcaattcccaaaaacaaggctcagagcctccaaacttgcaagagattttgtgagcttcttcacaagcaagtgattttgcttcttcacttgagcaagtttcaccttcattcgatacctcactcctaagactagtctgtttttccactctctttcagcctctaaccttggattgcttacctttcaatacaagccaaacaagtctctctctcaaatcaatctaaaagtaagacactatatacggtgatcacaagtgcagaataacagcacccattttgggcctgaaacacctgcaagaccctcataatttttctgatatttcagattaaaataatgatattgatatctaga

SEQ ID NO: 2764 - DNA, 603 bp, Glycine max
atatgaagatcattattttaatctgaaatatcacaataattaggagagtcttgcaggtgtttcaggcccaaaatgggtggtgttattctgcacttctggatcaccatatatagtgtcttacttttagattaatttgagagacagagagacagagatgtttggcttgtattgaaagctatgcaatccaagtatagaggctcaaagacagtggaaaaacaaactagtcttacgagtgaggtatgaaatgaaggtcaagaagcaaaatcacttgcttgtgaagaacctcacaaaatgtctattgtttgcggcctctcatccttgtttttaggaaatgcaagctgaaggtttaacttagtacctaggctttgtctcccttcttatacatatatatatatatatatatattccactattcagcaatcaatcatcatgcctaattgcctcttgttgtgaacattcacatcaacatcatcatcatcatcacatattcatcatttgaggttttgaaacacaggaaaaaatcaaaccaagaatctatttttttctgctagctctactaatactgtttttttctgctagctctactaatagtcagttgggaat

SEQ ID NO: 2765 - DNA, 512 bp, Glycine max
atgataattccaacttccattgtaactgtgatgatccaggatctcacccacggatctttcattcacgttgttcagtaatttttttaaatgtttccttgcaagacatcattgaaataccatcgtcttgccatcagtagtgcgcatagaaattattgtgcgtcaaataacatcaaaagtcttgatttccgaagatggaatgtgtaatgttttattgtccagtgaactaattggattgttgtgagccgaacgagtagggcgttcctttccattcattccgttatggatcagtcgtggtttcacaagttctaccaatggtatagacgaacccattgcttcatagaaatgcgtaatgttagtaacattgatttacttaaaacttcctaggatgtttccggaggatttgttgttttattattttattatctttatttttccactatattaggtctgaaaaactttggctttattcaaaaaattgctaatcatcttttaatgaatatttttaagtcata

SEQ ID NO: 2766 - DNA, 607 bp, Glycine max
tggttttattttatcttttggggtcacaatggctgctttgtccaataacctattcatgtaatattcatttcagttagatacaggacttgtttgatataaaaaaatgagtactatgtgtgaacattttattaggcttaattatacaacttgaggacatgattaaactttttaataattgagaagtctaattaaaatgttgttaaataattagaggatttgattgaattttttaataatttttttaataattaaaggatccaattgaacttttaattataattaagagatcaattatataaataaacacatattatcgcttcaaacttcaaacaccttgttaacatttattattctatctctctcttccaattatattatacttgcacttctctctctttaaatgtcaactagagtggagatgttcatcaatctttattctaaaaatatgtattttattttcatttcttaatttcataaatagttacagaaccgctgcaaagtaaaaagttaaaagcttgatgtagttacctgaactgaaacgtgtaaggaagcttggagttaacactcatgggcggcacatagttgaagagggaaagcattggatgct

SEQ ID NO: 2767 - DNA, 536 bp, Glycine max
agaatgccaaaggctattataaaattacaaagttttgtttaatttgttttgtaattcaaaggattgcgataaatatttatcccatatcaaaacctatagacaggagcatagtctactgatacaaatatggcatatcaaataaaccaacaaaagtagtgacagctggaacggatatagaaggggggctctcatttaaaaaaaaataataataattatatatgtagactctaaactttttcatatcaaatatctctaggcttgtaatttactaatataaccacatatgtcagagtttgttcacttttggtccttctcttgcgtgtgcttttttaaatccatttttgagtgacagaaagttaaaccaaagaagtgaagtttgtacgaacaattttttactaataaaaataagaacaatcagttttctattatttcggaattatgaagcaatttcctttcaaattttaagaaattattgctttctatagagatctaagaacagtcacctttttaggcgtacatttgaaaaaagcttcctg

SEQ ID NO: 2768 - DNA, 582 bp, Glycine max
ttgtataatttaataaggacaacaattcaattcaattcaattcaagcaggtttttagggaaaggaaacttgttcttcatgatgacaaagctctttccttagtttatgcgagaagagctggcatgcatccatgctaagatcaacggcagcagaaagtgcaatgaacaaagcagcatcagccatgcatgtcacatgctgtgccccaacttgcacaacaggtttgctaactttgccttcaccttccacagtggaacccatcacaaaccctttcccttgcaacctcgaacccaataatccagaatccctcatcactttgtagtcaatgcagaattggccaccctttttcacattcattgtggcctcagcaattggtattccattggtaggtccattctcaatgacgagctcaaatttgtagcccaagccatcgacggggcctctctctcgccacgcttctagacgaccccatggcttccagctactcacacaggcaccattggggcgaagaatgagccatgcacctgggtttgatcttgatactctgtctgaaccaggggaagggacaaatggggttatcatggag

SEQ ID NO: 2769 - DNA, 523 bp, Glycine max
acccgtctccccaacccagaacccagtcaccggatttggactgcgagagctgccagaaaatggcgtagttccaactgaaattggacacgtggggacgctccaccagatccgacagcttcttctgaagtccctcgtcgctcccaaccgccattaaaacactctcattcggcacggagttcgtcattaggaactccaaagctcgaccacccagaacagccccaagcatggccttgtcctcatcgtcccacaccacgcgccctaaccccgcgtcaaccttcatctcctcaacagaaataaaatacatctattttttcaagcccaaatgcaactttctcagatcttcaagagagagagagagagagagagagagagattgaatatgacgaggctaattaaggtgggaagggggaacaagaaaggaaaactgcaaatgagaatgaaaacaagggtgaattctagcgtgcctaagtaaccttcctgcaccggatgatactttatctgaatcccctgactcctgagaatt

SEQ ID NO: 2770 - DNA, 589 bp, Glycine max
catacaatgctgaatggcctaaacaaaaatatggaaaaacagaacagaaaaaaataggaattatgaacaaagtcatgaaagtaaaaatgcttggggtttacctctagttgtggaagaaatacaagcaaccgacttgtcatgtcttgcaacaactgtaaacaatgaaacaccagaaaggatagaataataatagaataaataaactgcataattagcatgttgatggcacaaaattatgtaattcacctggagatgaatatcatgaggatcctgtttgtgagataaaatactaggcagtaagtaatttacaaccggttgaaattcaggttcaagaccagccacaggaactcctattagctgcaagtgacaggtggcaaaaacatggtcagtaaaagaatactaaagagagacatttgagagaagtgaaaaactgataaagggaataatgatttccattagccaagtgattctgagattacagatccgtatttaaagacagatttacagataacagaaccctaactaactttgtaacagtcaactgactttgtaactgacatctaaccactatggttaaatctaactagac

SEQ ID NO: 2771 - DNA, 548 bp, Glycine max
taggaaggatacaactttttcacaagaattctccaatgcttctgcaacagctactatgtgatgaagaatcacccgaaagcagaaattaccaacaaaatatcaaagcttataatatgtttgttttcattgagttggcatatagttaaatgatgaacacaattatttagtttatattattcatgacatttttgtatttgtgaaaggaaaaatatactttattcacagctgttttcgaagataaaagaaatgcttgatgaatacagtatgtttgctaattcttttaggctgaccgaagatagatatgataactatcagataaagaatcttaatctacagttgattgcagacaggaaaaagaatggaaggatttataatttgcccacagtttcaaaggtggttgcaattattgttgatgatgtaagtcaacctatcagtcgagacataatacttgaaaaacaaagtgggcgattacaaagaatcaacgagcttcatccaagttatcttggattgaaatatcctttaatgtttccttgtggtgaagatgggta

SEQ ID NO: 2772 - DNA, 674 bp, Glycine max
gtctccattgtggatgcattgcttctatgtctcagcttgaattattagatactggtggtgtaagctgtataagctgtgcaaggaattcaggactgcaacctgtaaatttactttaccattttatttaaataatcatttatgttcactgctatgcaaacacatgaaaatattgtttcctttattgattatcacaattccctcaaatagatcaatatttatgatgttagatagcaggtcttaattttcaggttaaactgaatcttgtatcttcataaggttgataagttaattgttaattagcatgtagaggtaaattgagtgttctaggatctaggtaacaataaaaaactttcttatgcaagctctgcaattcaaatctgtgttcccataaataggttgtttgcttcttacatatttgattatttgcgttgataattgaattttcaagtctagctgtatgttcccataattgacaatgataatttgacagattgcaaacaatgaaaagcctaatggatccgggacatcaaaagtacaaaatgtcagtacacagcagcagtacacatctctggctaaccaattaactgtgaggggtatgcaagtagggcattatgcagagaatgatgggcttcggtgctggttcaaacctcataatgttgaaacagatgggcctt

SEQ ID NO: 2773 - DNA, 558 bp, Glycine max
cttactaatcttactaaaaaaaaaagttagtatttatttattactgatcaatgtgggatctccaatacttacagattgctgagagtgcttgaactagtggaatgcgtggtggaggttggcgacgaggaattggattggatatcgtgttttccggagattgacgctcagacatatttggagtctcttgtttttgactgcgtggagtgtccaattaacttggaggctttggagaggctcgtggcccggtccccctctttgaggaagctcaggctgaatcgttatgtttccatgtctcagctgcatcgcttgatgcatcgtgcgccgcagttgacgcatctgggaactggttcgttcagtgcttcggagctggatcaggaactggatttcgcgtctgcgttcgcggcttgtaaatcgttggtttgtttgtctgggttcagagagatttggccggattatctccctgctatttatccagcttgtgccaatctcatatccttgaatttcagctatgctgatatcagtgcggatcagctcatatcggtcatacgtcactgtcat

SEQ ID NO: 2774 - DNA, 1100 bp, Glycine max
aaacttagaaaaataacaggaatagtaaagaacaaaagggaaatagtaagaagcttttctgatatccctcattcctattgctttacattatttataatggagtctaagcacctagtgctgctaaacgataacgaaacagaataacaaaattagtgggacagaattctgttataacagattatgttatgggtagtgatagtggattaggcaatagggatatgctgctgctagttttacccacgtgactgaatgaggtgggctggtctcttgaagcacctcttgggtctgctattgctatcaaagtttgttatctatgatggtggtttgtacatatcagaaaatattcacatttgacatttatggttgcagatggtggacaatgtcttgatacatgaggtagctgaaacagatgagcacacctttaaaagtgcaagtcagtatcctgtggagaggcttccggatgtggagagaggtgaaggggaagaagaaagtctgaatcctgttcctatccccatgtcagatattcaaatggcaacaacaaaccctgcaggtgaagctctaataccatgttgagaagaggaaaaagcaagacatgactgaatccatgtgtcaatgtacacagcagagtgtattattacatagtggataataattagagagaaaatattttcctaataaccataattacataaattctagaattgtctaattaccataaagatatctaacaaggaccttttaagaacaatgatatagtttagacctcatcaataaatagttaaatactacaaccaactgaaccaagcattttcccgatgaatggggttcaaaaaccttgatcaaacaatataatattctgtcacaaataatggtgttagattctgtcggagttacttataataaaagggtttgagtatgtatatgggcttggcccaagtgcttgtatacacttaaaacccagtaatataaatatgaggtgagctacacattgtagagcacccaattacagtttactcatgtgtcattctctctttatcattctttatctctttacatgacatcagagccaggtagggtttagtgccaccgtcaacagtctt

SEQ ID NO: 2775 - DNA, 505 bp, Glycine max
atattgaggcgcatgccatatgctttccttcgatcaaaagtcaagtagggatttacttcaataaaatgatagtggctaccaacctgaatttttcataactattaggcaatgtttgcttcaattcacttggaaaacctaacaagaaatcaatttgtttggatatttgaactcctaaaatttattattctgacaagtgtcaaaattgtaacaatatttggtctgacaagaaagaaactcaagcttctgatttgtgaaacagtagtacacaagagagatgaaaaaaattgtctacatttgcaacacttagaacttaaaaaggccaacagcatgcacatactcagattttagtctccagaggacccttaaaacaattgaaatcctcaaataatcaaccagtaaaaaccgtaacgaaaccagcacaaaccgaatagcagtcgttaacatcacttcattatttcatacgttacaataagttaagaaaaacagcttatcacactgcattcag

SEQ ID NO: 2776 - DNA, 496 bp, Glycine max
agtaatatatgttgttattttcttttgtccttcaagaaaaaagaagaagcttgattatctgtcctaaaaagttgccatgagtctatgagttgacaaggtttgaaattatattagattttatcagttaaactcatagatagatgtctccttccacaataactgtcatggtagctggtttctttttcttacaaattgaatgcttttaactgttgcaaaattaatattttttcttcaagttgttatacacatcatttattttgattttgctttcagaagtggttctttattaattttcttccgttgctttcagtatctatcaaacgctgcccttgcacgaacaagtgttgcaagtacaacagtgttatcatcaacttcaggacttttcactcttttcattggtgcatttatgggtcaagactctttaaatgtagcaaaagtagttgctgtcttagtcagcatggcaggggttgtcatgacaacgctggggaaaacttgg

SEQ ID NO: 2777 - DNA, 1172 bp, Glycine max
aaaaaaatggatataagcccacatgacagaaaaacacaataatattaatcacagaaagttcaggtacctgttgataataaaatgcaaagaacagagtatcagtgccaaatggttcaagaccgactctctcccaaaaagcaggattattaacaataggtgcctgtacttgaggataactaggaggtgtaattgtcggatgcttctgcataaccaaagaaaagaggagaaaaaatccatcaaagcatgtaatagatttttcaatgagcatgagggtgattataactagcaatgcatacaggagtataagtcctgggtcgttctgagtctttgggtagtggaattttgaagtgggctgcctcaagcatttgcaaattatataattgatcacgcactccaccagaactaacacttgatccactaaaattatcaccaatggctccatgttcagcaccatttcttcttccaatgacaccaaggttgccagtaggttgattaggttgtaatggttggccaggagacaaatcgatatccctggaagtttgagcagattctggaagagaggcagacactcctgcctgcagagcctaatttgaaggagtggactgcaagaacaaaagtttatgacagatgtcatgaaattgtgagtctcaaacatctcaaataatttcatccaaagaaaaaaaaattacatatgaatagatattaatttcctgagtaggtaagtgttgagcttacaaccattatgtgcttcacaggttagaattgcaatggtgggaaaatacactggcctttcagatgcatatctttctgttctgaaggtaatttaatcagtaatacatagtaatttccatttactttttgcattctctgctactttcacttttactacacaggtttaagaggcatattgaacattctggactaaaatattactattaacctgaaacctagtataccataagctaatgtaatacttggttttttgtaaaggcacttttacatgcttctgttgctcgaaaccgtaaacttattgtggactgggttccagctggggatcttgaagaagctacttataatgaggtgattactgatccttctgctctactgcacatgttggtcgattttttttggttttgctttatgcaaccctctgatgattgattaatgtacta

SEQ ID NO: 2778 - DNA, 492 bp, Glycine max
tttacttctacctttttttcttttttcttaaaaacaaaaacaaaaaacagtaatatatacatattgttttccttactttttcttttcttttcaatcacctaaacctaattaattggaagtgatataaaaaaatcaacatacccgacaagtgccagaagaaagaactgtaagaggaagtttaaagtaatggcaggtctctccttcctggacaagagaaaaaaatgttgagcaatgcaaaacaaacagctgcttgtaactggaaagttttaagttttaagagaattttatatatatcctcttataaaatgggattaattaattgattagttatatatgttaggggaggtagcatggcactaattacttttccaagaagtaggcaaaaggaaggaggaggagaaaagcaataatgttgcggtagactgggaaaacaagtttgctaatgcccatgttaagggcagctcttgagaccacataaagccagcatagcca

SEQ ID NO: 2779 - DNA, 311 bp, Glycine max
ctgcatcatcctgtccccctcctgatactccaactgaatctatggagttccttgctagatcatggagtctttcagccatggaactctccaaagcactgcatagcaccaacaattcgatctccactggtatagagatgccactttcatgcccttcaggccaccaatttgataccaagtgttccaccgcttcaaaagatgtaagaacattggttgtgtttaatttaagagttatttatattaggccattagcacttcttttagctacttttttcttacttggcaatgcaacatgtaaaccgacaatcatgcaa

SEQ ID NO: 2780 - DNA, 370 bp, Glycine max
aaacattatcttaatgttttgtgaacattttttactatagctattggctgttggtactgttttatcacaattaatgctttccgtgcaaaagctaattgaatgcatttgcttgacaattcaggaattaccacggttcttgaaaggggttactaagattcaaaataaaaaaatttggggaggtcagtgctaggtcatttaaaaaagtgtgcatgaattggtataaaaataataaaaaaacatcatcggagtctgtcaaactgtgcgcaaagtggcaaaaagaaattctggattcaacatggcacccttttaagattgttgaagtcgaagggaaggaaatacaggtatatgatacatcttggttccttctatg

SEQ ID NO: 2781 - DNA, 591 bp, Glycine max
tcacatatcactttatcatagcattgtaatccatatgatcatgtgattagcttgataggaaaattttatttttccatgaaattacttgattttcagtatagaagcatgcatggataggccaaaaaatatggttgtttgtaactgaatgaatgagatatttactgtaatctgagattatcatgattgtttgcttctgtgcatgcaccatgggaaaaaattgatgtgaccaattctgctttttttttttcctgttcttatttctttgtgatggttggaattttcatttgtttctttttctccctataggtggagttttcctgaattttacctgacttctatattgttttggaaatgaacaggccagatccttgtctgcaagatttgagggataaaattttcccattagaagaacaaaatgcttcagtcaagttgaacatcaacagaaagaagaattctccatctttgttaaaaaacaatacaaaaatagacaaagctgcttcaaaacctgataaagcagaagatgaaaagcgtggtgaagtagaagctctggaagaagtttctagttatacaataggatccgcaagaagagcc

SEQ ID NO: 2782 - DNA, 1303 bp, Glycine max
agaatggatgaagcccaaggggactgtttcaaaccatggagagaacatgaatgtcacaattgacaaatgaggcgagagccagtggtagtgaattcagggggttgctccatgtaaacttttcccagcaaattatgtaagaaggcatttttaatgtccacttgatagagagacccatgataaatggaaattatggcatgaaaaaggcaaacccaagtgattttagccacaagggaaaaggtatccacatagtcaaggccaaagatctatgtatatcctttaactacctcgtggtttttaaaatgaccagcattgtcaacttaaaagacaagccgatgccaaggatttaaaacttatagtttgatacagttacacttaatagaatggatgccatccatccatctgcattatttttaaattttcaaatgaaaggaatggtaaagagaagtttatttcatgggaaataaatttttggtgtgatttattcaacttattttgaagaaacaaatgcttatttctctagctttttgagaaagcttgaggggaaaaaatattattattcatttccaaacatgcattaagagcaatattgtcatcaacaatcaaggggcacaacaaataaaatcaaaaagttctacctgcgtccaagagcctgcagtaaatcttgaaaagttttactacactttaaacgcaattacaccctctttcttttttcatattttttaaccaaacaaaagagaatgtatcattatcggtgttttctttcctcatccaaacacataattagtatctgcttatgaatggactgcttatgtgaggggtatttatatttataatgctaatacgttcttgtgtaattcgattgcaaataatgtggttagcaatgactttaaattaatttctggtgaactgctgctgaagcacacaattcaagagttaataggttatagtgtgttcaagctatgattgtgataagagcatttgccttgataatagggtagaatgttactacttttacgagtttgtaattatttataattttatcacttttctttatgtgtttataactttctacatagaccttgtaatgtttttggtaaatctgttgtgaattaatttgtaatagatgagagaagaggtaaaaggtttcaatagttagacacttgtagagaaaaattactagattgtattaaaatttacaaacagttgagcagtactatactatcgaatgacaccccttctgataaatttcctgactcgttttagaaaggtcatgtaaacttggatcttaataatttgttgtgtt

SEQ ID NO: 2783 - DNA, 630 bp, Glycine max
aaaagaagattccaagtcttccaaacatcatgcattaggaaacactgaaaattgtttctccttcaatcacgctctccatcaacaactctacaatcacatcaagcaactatccatcattgtggagccaatttcaccaatcagacaagggtccttctatgttgacataccatagccagaccctgacgatgccaaaataggcaagaccatagaaacagagttccccaaattggagaatcagaagaatggctttaccaactcactaaatggtcttacagttaatggccattgaaagctatgctactaaagctactagtaactgtgttttttggcctctcctgagccacttttatttgttgattacttcatgatcccttttggataaggagggttatgcttgtgaggtcaaacttatacccggttattagatgtaatattgtaatgtttacatcaagtccatgcaaaattcttcccactcttacacctttatggcatgcacatgaagcattatgcaaactctccccactcttatacctttatggcatgcacatgaagcattatgcaaactcttcccacccaagcaaatattaattaaaatataataaaatacttttatgaagaataaattctaaa

SEQ ID NO: 2784 - DNA, 493 bp, Glycine max
gaaataaatattgaaagctagtcaagtataaaatatttgttcatttataattaacatgttgtcggtcatgaatagaaacagatttaaatatcttaagcaaatacttaagacatgattgagaaaagatctcaatataggtgatcgtttaatttttttaacaaagattaattattaataaatccgtagacacatgttataataatccaattttttttttatctataacagttactcaaattaattacttaaggttaaggagattcctggatgtttcaattttagacataattaataatgtatatcatatattcacagttcactcgatcacaattaacgttataatggaactattatttatttatgtataaacaattcatagacgtttcgtgaagttaaccccacctatccctcgtacttcgttggtttgactttgtaatattacggtgcaaaagcatatgatattgaaaaagtaaaagataaaaaataaacataa

SEQ ID NO: 2785 - DNA, 589 bp, Glycine max
ttggttttcagttctcttgacaaaattgtcagtgttcttatccatctattacctggtaaattataatttcatcttatagtttctcttatttttttcagcaagaaaaagaaattctgggaaattgtaggcttctgctacaataattactgacttctaccttcaatagtcaaatattgggtgtaaggttctgctttttatctagacaacaatgttcagtgtatgtgctattaagaatattgtgagaatatatgaaaaatatgacatcatatcacataacatcattcacaccaaattttatatccaactttttactgctatgaagcttccaaaatccaaatgctgtttttgacgaatttggggaagttttagttcttgatgtttataactgttagctaagaaatttctgttaatgacccttccaatgaagcctatttttccttggtcatgcaacagtccaacctactctttgggctgatgattattccagctgtcttgctgagttatatatatatatatatatatatatatatatatttctttttttattactgctgagttatatttctaacagtgcttatctatctgattt

SEQ ID NO: 2786 - DNA, 986 bp, Glycine max
aatgcatactttgtttaaaatataagaaacagacaagatatattccacatatagagaagctgtttcagatatgtcaaagcaagggaattttagccaagagtttccagcaaaatatcaagagaaaatctactattatattgagcagtgtttcaacatgaaatcaattgcttcatgaaatagaatgtcaagactcgggcagtatctcatatttgacataaaaaattccaacctcttatgataatcagatcttagaaataaatagcatatttgcaccttgcactctgagctacccatccaacaagtaaagcaggtgatgccaagcctcgaatctaaaaaaaaaaaagaatgagtgtaactgaaaattcactgcagcagaactgagtgtcttattcactgaatctctcttaataaagactagagcaactggtgtatcctcaaaattctgaattagtacatgttatttagacaccatatgattctatgaacacaggtcttatttcttgagagcattattttatatatgcaaggttatgacacaatagtaggggagagagggattcaactattgggagggcagaagcagcgggtggcaattgcacgagctatagtgaagaatccaaaaatattactactagatgaggccacaagtgcacttgatgctgagtttgaaaaggtggtacaggattcactagactgtgttatggtggaccgaaccacaatagtagtggctcataggttatcaactataaagggtgcagatctaattgcggtagttaaaaatggggtcatagcagagaagggaatgcatgaagcattactcaacaaaggaggtgactatgcttccttagtagcgttgcacacaactgcttctacatcttagtcctcttacagcttattgttgattttatcggagtaaaatttgatgctggggatttttatccctctgaatgattacgcaagtttaaatgccactctctatctgcact

SEQ ID NO: 2787 - DNA, 458 bp, Glycine max
tgaagattgcacatttgattggctttactggccacaagtacgtcagccttactctcctgagactgtgaattatataaattctctggatgctgaaaaagacttggaacttttgaaatgttatggatgggatattccacttgagtgtgcaagaacacttcgcatttccacaatgttgctgaagaaaggggttgaaagaggccttacaccctatgcaattggaagcattatgtgtcgggaaaatttgaacaaggaatctgtcattgaagaaattattggggaagcccaagattccttgcttcctggcatggaggaatcagcatttcttgaagccatctcccaaatcatggattaccaccttgataagcttgcaaactagacactatttttttttttttttgagtcatagatgtatttgtatgtatgtattcagtgagtgaactagtccattttgggatgga

SEQ ID NO: 2788 - DNA, 654 bp, Glycine max
gccagcttgcatgcctgcagcagctagtgcgcttgccggtgaaggtacggcacacatgccaaggctattcagttttttatctgctgataaccagggtatagaggcttattttcatgctcaatttttggttgttgaaattggttgtggaaagggaaagaaatccgctttacattttacttatggttttagaccgcaatgctggtacttcattggtcttgaacatacaagcaagaatgcagaaagtgaaattagattatacgtagacgggtctttatatgaaattcgtcctttcgagtttcctaggatttccaaaccccttgcattttgctgcataggaactaaccctcctcctacaatggctggcttgcaacgccatcgccgtcaatgccctttgtttgctgagatggggcctgtttacatcttcaaagaatcaattggaccagaaaggatggcacgcttgttttctagaggaggggatgtagtaccttcttttggtaatgcagctgggctaccatggctcgcaactaatgcatatgtgcagagcaaggcagaggaaagtgttcttttggatgcagaaattggagatttcattcacctactctatcatcctagtttgcttagtgggcgtttctgcccagatgcttcaccttctgg

SEQ ID NO: 2789 - DNA, 507 bp, Glycine max
ataggcccgatcatgaggtagatgatcccctatatctgatgacattaaccatcccacaactttttctgaagccattgcaggttatgtgggatgctatcgtgtttggggtgtttaatgaacacttccccttgtacataaagaatgaagatctgtctgaaatagcacacgatggtcaatgtctcagcatatctattatacagttgtagattctgtaagtcaatttagattattgttaattacctaaattattgttttaaattcatacataatttactttgcgttaacaacaataggcatatgactgagacaagtatgcgagcaggaaatgccgatgtgtatggattccttgagcgacagtccattcagagatctaggcaatcgtaatttgaatcaaaaagttacatgaagaactggatgtctacctaagagcctacctgaatgggtaagttaaactgaacaaacgaatttaaataatgtataatactataatagcctatattgatatcc

SEQ ID NO: 2790 - DNA, 537 bp, Glycine max
gggagaccaatataggttattatactattatacattatttaaattcatttgttcagtttaacttaccctttcaagtaggctcctaggtacacatcccttttttatttttgcatccagttcttaatgtaactttttgattcaaattgtgattgtccagatctctgtatggactgtggctcgaggaatccatacacatcggcattccccgctcgcatacttgtcttagtcatatgcctgttgttgttaacacaaagtaaattatgtatgaatttaaaacaatatgtttggtaaataacaataatgtaaattgacttacaaaatccacaactgtataatagagttgttgagacattgaccaccatgtgctatttcagacaaatcttcatgctttatgtacacggggaagttgtcattaatcaccccaaacacggtagcatcccacaacatcgcacataacttgcaacgacttaagaaaaagttgtgagatggtcaatgtcatcagatataggggatcatcgacatcatgatttggcctat

SEQ ID NO: 2791 - DNA, 951 bp, Glycine max
ggagtgtcacactgttggtgttggtggtcatttcggtggaggagggtatggtaacatgatgagaaaatatgggttatccattgatcacatccttgatgcaaaaattgttgatgtcaaaagtaggattctgaacaaggagtcaatgggggaagaccttttttgggctattagaggaggtggaggagcaagtttgtagtcatattatcatacacaattaagttggttcctatgcctgaagttgttcctgtttttcagggtttttattttttcacagttagttattagttattagtttgttaatttttgtaagagaaattcaaatccacaatctttttctctcatttttttctcccttcaaccaccaagtaatcttataattcctaactcttttcagcttgaaaagactttggagcaaaatgccactgattttgttgtgcagtggcaataagttgcaccgcgcacggatgaaaggcttttcatgaggatagttacacctcgtgatttccaacgttggcgagaggaacaaaactgttagagcggctgttatgactaagtttctgggaggagcagaagagcttgtgtcacttttggacaaaaagtttccaactttgggtctaaagaaggagaattgcattgaaatgagttggattgagtctgtggtttggtgggatagttttccaaatggtgcccacccagaagctctacttggcagaaatctcaactcagcaaagttcctcaaaaggaaatctgattatgtgaaggatccaatttccaaagacgggttagaatggatatggaaaaggatgattgagttgggacaaacaggtatggctttcaatccatatggcggaagaatgaatgagatttcagcaaatgctacagcatttcctcaccgagcaggaaatctgttcaaaattgagtattctgccaattgggaggaacctggaggtt

SEQ ID NO: 2792 - DNA, 448 bp, Glycine max
gttattcaaagaacctatttagtagttgtagttgtagtagaattttcattttttagtagaaacttgcttatgaatgtgatgttgcatttttctaggggaatgtcccacctgtgctacggactatactggaaatcttaccactgttacgtccaacagagcacatatcttctacgtggcctgttcttcttcgagagtttctgaagtatcttcctagacaggattctcatttacagaatgaggatggtaaaatcgatcaagcaagaggttatgatcttattttagttatggaagtgtctggttgtatctaatctagttttcagttttcctttaagtaaaagtgtaaaacctatgcttgtgtttgcagattctcaggtgaactatgatgcacctaatggtgctactccaatatcacccaacaaaatagcagtatccccgggttctggatcaa

SEQ ID NO: 2793 - DNA, 601 bp, Glycine max
ttggtgtaagtctgggaattgagagagtatttgccataatggagcaacaacagaagaatctgaaccaggtgaccaaaatgcttgtgataagtaactttattagttgcttgtgttaaaaaataaattttgattattattctggggatcaactataaaatcacatttgaacaccaattttcttgtaatatcgtggaacatatacatgccttcatgcatacacagataaccaacattttctattatggtttaattacggtgacttgttctgcatgataatactaaccgaaaggcttttatgtataactaatattttgcttttttagtgtggaaacatgttcttttgcatcactttgctgcatataatgatgataaataaaactgatctcccagttgcctcctttggttactaattttgacgacaagtttataatttatatgctcttatcacgtggtgaacgtgtttgggttatttcatggccaagaaagtttgaacggtggcattgtctttgtagtatgtcttaatttttttattttttgtgttagatggctcgtccgaccaagacagaagtcttagtgagcatagtggggaatgactttacac

SEQ ID NO: 2794 - DNA, 1376 bp, Glycine max
agaaatttccagcatgctccattgcggcaaagagacagatttcttcaacaacaacaatattggatgtacagggcttggtatgttgcattacacaaaattatttgtgtaccttactaataatataaggtgtatttctgttgctgtttctctttgtatgcgtgatagtttgtgctgcttttttatagtagattattaatgtagttatcctttaagcatttttatcaaatatgatatctgcctatagtattttacaatccaatctatttactaagggggttgttcctgattgggtgtttctctattttgggatcttccttgttttaagttgttgaaaagtttttctactaaaattttagctgacacttgatatgtgtgatgcagggaatgaaaaatttctcacgtactgctgcaaatctcttgtctgctgtgacaaaaatagatagcagttactatcctgaggtttttgtcccatcctttcccaaattaacgtcttttcatccctcttccattctatataaaacttgatagtgtatatttgcagacattacatcaaatgtatattgtcaatgctggttctggctttaagaagatgctttggcctgccacacagaagtttcttgattccaaaaccattgcgaagatacaggtgaagaatataatcttcaggcttcagctaatatttcatatgatctatttctgcagcagaagatccagcacgcacagcagaataaacgacagatagaacagttgtagctaaacccaaagtaagggtgccagtggaaacagcttttgagtgtttgtgaagaccattgcactcataatctcttggttcactagccagtgcactatagcagagataagtgcagtataatgatattactgaagcaggcaaaacacttccatttacctgtatatgaaaataattcaaaaacctcaaattcaactaaagtaatgaatgatctacagtacacaaaggataaaacctgttcccaactaaacaaaataaaatttcagcaatttatccttcagaacaaacttagaaaatgtcagtcacatcccaggctgacaggaataaatataccttttaatgccagctctactaacttacattccatcagaaaaattgaaccatgataacggagatagaagaaaagaaattagatttaataaataacagattatatatgaactcctacatagtaacattttaacaaagtatttaagtaaaaacaaatgaaaaatgcatcaacagcaattttcaagcattgtacaatatcatagaagagacaaatttggaaaatttacattttgcaaattaaaaaccaggaaaacaaattaatagtggttagctacaatgaaaatcaaataacaaactt

SEQ ID NO: 2795 - DNA, 1273 bp, Glycine max
aaggaagttggagcggcataataccagaaggagaagaaagcctccggcggattctggaggtgctgctcatagtgaactacttcaacctgttgctcaaaatgaggaacacaattatcatgtggaagctggaaaaggtttattttcagtatttgatattactatgccatgctgatagtctcattttttctcccttttccattattttcttcatatggatgtggtagtttagataaagttggttttttgtgttgcaagaatgctcactggctgtgtacgaatcgtgcagattgttcaaatttgagtaccgatgtcaatgacgtaggagtgtctccagatcatgaagatgaaccggtctccattcccagcttggctccagatcatgaagatgaaccggtctccattcccagcttggctcccgaagcacagaatattaatagtgacagtgttgtgtctttggctgtttctggtgaaatgcgggtgaatagtgggaacacttctaattcaccttcgtattgcaacaataagaatgcctattcgtctgtggtgggttgccctttttgtttgttattaaatgtattaggaaatcgtggttagtgtttgctgattgaaagttcatttgtagtgccaaacaggtcggatttcttttaagctttatgattggaatcctgcaggaaacagtgctgtttcaaagtagtttttgcatttgcagagcaagagggatgcatcaatctttgcaatacttgaatttggttctcttttgtctgctaggctggaactgataaattggcatagtggtgtggtgtccttatggagcaagatagtttcaatgttgtgcatcaacttttgtggcttacgtttacacttgttaaaaacatgcataagcacttcaagaaatcattttgaaatggaaaataatgtatatatagataatttgcacgtagcattagcacttcgagaaagatgcaatggaataagttggcacaatggtgtgtctttgtggagcaagattagtaatgtttgttaactttagtggctcatgtgtacacttattcttgtttcctagtacagaattgcaactttcgttttgggcttgtttcaatagttagtccatcatagagcaccatgtacttgaaagttgatggattgaagatcaaggtgggattgctattactcgcagctatgaccatgtgataactggatactctctatctgttttgaattctatcagaagagtttaatttttctattcagtagatcaatagccgacacagta

SEQ ID NO: 2796 - DNA, 634 bp, Glycine max
ttggttggagtatataatatatttgtgaatgtgttttgcgttgctttgtttaatcttgaatttgttagacattgtcattggtttaggtcatgcacctttcttactctgcggtctcccctgcaccaaggagaattgtgttgctgtgtgtgtataaaataatgtgggggtcagcactcaccccctctttcaattacatgttagaatctcttattcaaggcttacatttcttaggttatgctgccttggagtgatagaatagtaagaggagtggattgaaatcaaatgatactaggatagtaacttttattactatttgaattgttaaaacaggatggaatgaaaatggaatatgatggaatgcattcattccattccattctatccaatacccctctttttcttcccctttaatttgagagatggaatcattctttttccccaatctgtcacaaatataatggtcattttgttttattccagttgactccattctatcctcttccactctatatatccaaactatcttgatttgttgttatcttcatggctgctaattccttggattatgaattatcaaattgttctctcactcatatttatacatttatattgtaggtatgggctgctggttttt

SEQ ID NO: 2797 - DNA, 873 bp, Glycine max
ccccggtctttcctctagagtcgacctccagcaaactcagacgtcctcaggttctgaagatcatgggatcgacaaaaggagcctgaagagcactgccttgaatttgatttcccatcctaccaagattatgcacatcagatggagcagcagttccagaagccaaaccacatccaagaattctcgagtccattccaggggcagccattgctgatgccgcagcaacattttgaaacaagggtggcagattaccagtgcctagttggttagtcatcaaggatgccaatgctggatttccagcatagccactcataccatagttagtaaatgatgaatttgtaccatctaaaggctggtactgaggtggcatacttcctcctccactaaaatgggaggtaggcgatcctttgaagtatgagttattggaaggaacagtagacttttgtagctcaacctgcctatccaaggatggattgttgagacctgatccactcctgctgctcttacttgaattttgcaagtgtgctgattcagatttctttaaataagcctgttgcttcccatgatcctgaccaccttgcctaccaaaaagatatctctgatgactatctacatctgattcaacttgtgatgggaaatggttttcaccatctaacacatcatctgctgacaagttcatcactgataatgcagccacaagatctgctgactcattgatgccagatgaaacaccattaaatgcatctggattggcaatagctctcttgtcagaagcaatggctctgccgccaccaatgggagtgatgcagggactgggagccctagcaataagttgtggatcaggagtagtgcttcttgacaaggaagatcctactg

SEQ ID NO: 2798 - DNA, 1153 bp, Glycine max
aagatttcctttctaatttttgtttggacatgaagaaactaaaccaaagcatttttcatttggaaagttaaaactgcatacttatttacatgcctgaagtcttaagacttgtattatttgattcaaatatgcttttgttattgtgcatgtcataatttcttgttcattttgaagtcattggatgctgtggtgagggcgacagggggaagaggcccgtgatgaccaagatagcaacagataaaagtgaagtgaccatgctgacatctgacaatcccaagagtgaagatccatgtatgtattttgaacatagaatataggcaatatatgaatgtacatactttagctagcagctgcacagcttcacaatctaattttgacatgcttctttactttttgcccagtggacatattggatgatatgttagctggggtaggatggacgatgcaggactacctgaaatatggagagaatgactattatccacctcttccaaatggtcatagactttttctccatgacattaggagggtagctgtgcgagctgcagtgttgtggactgggagttagtaaaagaaatcaaattacattaaaattaatacattgataatactcgtgtgggctcaataacttgttttcgataataagtaatcatcacaatgcaagatgcgctttgtcccaagattaaaactaagttgggataaaaatttagagagtacaattttttgtgaattttaatacacaaaataaagaaagattttttatccaaaaaatgtaaaaatattttttttattactttagaaataaaagtattaaattttctcaatatatatataatccaaacatgcactgatttatttccctatcaagggatacttgatgctgtaattttttttttctattgaatatatgcatgcaaaaacaaaatattaaagcgaaacggtatttcagagttagaagaaaaaaaaaaactttcttgatatacttgatgcgtcatcatggactgtgttaatgaagaaacaagaaatattgaaatgattgaaattgataaacttctgtcgatggttttccatggcacacttagcaatctttgaatgcctttaaaactgccccgcatgacaatagtttttgtgaaggatatttaatttctcgcta

SEQ ID NO: 2799 - DNA, 624 bp, Glycine max
tgtagctctgactaagatcatgcccattatttgaaggtaaacgtgaagactaaataaaagtctttgtccaactctcaagatttgttggaaggtaaaagagaagaagactgcatcggtgatcagtcaactcaattgccaaatcatgagtctccttaactattgtaatgattaatcataagttatggggaagataaaatcaagtgatatcaaaacttgaaaacaaaaaattcttaaaccaggaaaaaaaatccaagacgagaactaaccagtgatgaagcagttccaactgcaaaaagcttagccccattacgctgcggaaggtaaccacattatatacaacaattagtcacaggaaactacagccacaaaattggattcaaattgcaagataaataagacgcaagttaccaaattgtagtacataccacaattgcaccaaccctctgtatcaaggaatatgatgctccggagagagcaacctgtcgaaggaaattaagaatgcaataactaaataccaacatttagttacaacaaatatgaaagtaataaaaatctatgggatgaataatatataaaaacctgaaaagcattatcggggcagccatggaaaaacttagcaacagg

SEQ ID NO: 2800 - DNA, 1385 bp, Glycine max
ggcaacgaaagcaagggagagaatagttgagaagtcaattaaagttcataatgattcagtgatatgatccaaggatccaatcactataataacttgggaagcctaaaacatgggatgtttagaaggaagtctagcctataaacaataggaactttgtagctttgaggcatattggagtctgaatgaaagtttgagttttctaccttttgtgagagcttcccttggttctaggcaaagaactaaatttgaccttatcaaggtaacttgtggcgatcaaatctatgacttatcacccatcttctcccctatttcttgagtgcggcgtcaatatccttttctaaaagaaaactaaatcaatttcttagtatgaaaacttcaacccgatccgtctcgtttccgtgttcatatcattcagtgagaaattttttaaatatagtagaagaatgaaagagtggaaaaaaaaggaagtactgactaattttctgttagattctggttttgctattgtttctattttttggtgaagtaaacagataaaagttattatgtctgtatatatgtgatttaagaaccggaattgtgcctatgaagtgtaagggtagcacataagtcagaacttagaaaattattcatgacatgctgcagctgggagagcagtacaagcaaaggtgggcagcgaggtacatcgacaccactggacaaaccccacaagacctacacaataaggttctgaaggatattggaaaccttaacaacttgtttgacgatgaccttttaacagcctctgcccaagagtaagtgagattatatggtttttttttttttcattatcatattattggtataaaatatttcatcatctttaattaagtctttctttaaattttacttaacggaactcaatctaatatcacttggacgaaagacttcttaatatattttgatatatatgactttttatttataaaaataaaaaataaatgtttttttatgagtaggtctaattttgtttttgggtgaacttggatatcttttggccaggagtgcagactaattaatgtttttagatacttaaaattcatttaagaggttaacttctaaaaaattttaacatatattttctcatacatggggaagattcaatctttaatcacatgtttagacgacaagattatatactaatcatgccatggaaggtaagttgaaaatttgaactttgattgtcttacccttggggcggtggtgtcttttcaggtaccagaagcaaggcgttgcaaccatagaagaaaagatttgctggatgatgggagacgtgctcttgttgaagaaccagcttccgttcccgttgctgcaggtcgactctacagaagatcccgggtatccga

SEQ ID NO: 2801 - DNA, 594 bp, Glycine max
  misc_feature (413)..(413): n is a, c, g, or t
agagttcagatcatcgacggttaccaataataaaacagagcaccccatcttcgccatgggacgcgtcctccggaggagcctcgactctcccaggcctctccgatcgaactccagtggggctctcccgtccgtggacggggttcgagccccacacttgcttcgatcggagagttgcttctcttctatctcgggttaataaggtctatttagtttgctttattagactcttgcagttgcagcaggtaggtaaagcatggagcatagagactctgtgtgtgtttttctgtgactgacaggttttataaatccaccacgaagcctctctaacattggccctttctgtttagactttagattgattgagtggtttgtttcatgactttactactagctcctttttctatgatcatcantgtatatatagattgattagcaaattctaaaatttaattcttttaatctgggccttgcctttttaggattattttttttttgggaggcatgcgaagcttggcggtaataatgggcaaaaattggtttccctgggggaaaaatggtttccccgttctaaatttcaccaaataaaagtgggag

SEQ ID NO: 2802 - DNA, 655 bp, Glycine max
cagacttgcatgcctgcagttagccaacaggtttttggtcagcaaaaggatggtacatagagtatgatgcatggacaccaaaaacgaaatcagaattatgaaaaaagaagatatgtttccatcggttccctcaattgcatgtttcttttgtttggtgaagtggtactttatcttacaaatttcttcatatagatatattataaaaaaacaggaaatggaactaaaaaaagtaaaaagtgcctttttctgatgggggagggacacgtcaagaaccatctaatttcaattgggccaggaattttaacacttttgacatcaccaataccagatttttagttccaaaatctgtagccaaatcaaatcttgcatttgcaccctccccctctccaaataatgaatgaaaataaaaataagaataaggctcgaaggagagaagtgtggggtttgatcccctcttgttaacaaaaattaacaattaacatttgccgataaaaaaaaatgagtaaggaaagttacatgttgcagctgcgccagtgagagttaggatgtcacttgcacttgtgccactcatggctgagccaattacagtgctaagcagttctttctttgcccccattgcttcagctacttttgcacactgtgcagctaccagggc

SEQ ID NO: 2803 - DNA, 1252 bp, Glycine max
taacctttgtgtgtgtttgttttacttgaatcccacttgcgaatgcatgtttaattgagtgctacactcacaaaggattggggagaaattaggattgacactatgacagtgttttactgtgtaatgttgtgtgtcaatgtagaccacacctcatgctatttataatatggaaaagaaaatcaatattgattacaagatcaatcaattactgattaataggaaatagaatattctaataataaatacaatatcaggaataatatcaaacataatctcacagacaccaataggttttggagcagtatacaaaggtatgtgttatgctccggccaggcatgaatttaatgtcctaactttttgtttgtttttataaacataatatataatctaaaaaaattatcctcgtttcctttctctccatgacccaacttccaagcagatacaaggcaacgggtttgaattgttattacgttcagttgagcttcaatcctttgtgaatgtagcattcagttaaacccaaattcgaaagtgggatatgaaatgagaagaagaggatacaagagagggatgacttgcatgcgcgtggttgtggtgccaactgcagcaacgttgcatcaacacggcaccggttgttgaaaatctccttgcacatctcaatggcagtcttgaaatcacccttctcacagaggaagggaacaatgatagagtaggtgttcttatcagggtcatactcagactttgcaatctctccaaaccacttcttagcctcatccaaattaccctcattcacaaaacctttgatcacggcattgatgcagaagaggtcaggcttcacacccaccttctccatttccctaaatagctcaacagcttcacctgctttcttcacctcagccaaccccaccaacttggagcagtaactcctcacaccaggagcaacattattcacactcatttgctcccacaccttctcaccctcctcaaaacgaccttttgagtacaacccatcaagcaaagtgttgaaagtgatggaatcaggactcaaacccttctcctcaatctcccgaagcaccgacaacgccgaatcaaacgaacccttttcacaaaacgccttgatgatggtgttgtaagtcaccaaatcgggcttgatcgagagctgcgttgggaggtccctgaaaagctctccgacgacgtcgtatttgtgggagtggaggtacgcagcgaggagtgcgttgagggagagcacggtgcg

SEQ ID NO: 2804 - DNA, 585 bp, Glycine max
tgcctctcaagccataacagtgagctacaatgctcaatgcaatgagcttccttagagcagcccattgtcgcgatgccgctatagtggtgctatagcgtgcaactgacgactatgaggatgattatagttctttggctcataatattcagccatattataaatttgcatttgatacattatttaacacagagtttgacatatttggcacataaaaagaaaacataaatacaaagagaaacaggaggaatagaagagaaaacaattacttttctgttttctatcaatttccattatgtctcactcttttgtgcagataatcttcacaacaattaccataaactttattattgaactttgtcttaatacaggaatgttgagaaatataaaaaaaaataaaaaatgtcacattggagagcaagataaaaagtaatataattagtatataatatcagtagcattatcttctgtaacttcttggtttttatttatagaacaccaaaagtgtaggaactatgcagacattcaacaggatttgacaccattaaataacataataacaatgggacagagagacaggaaaggatg

SEQ ID NO: 2805 - DNA, 467 bp, Glycine max
ttatataggaattaaagaacgcccacgtaccccattaatgcattaatgaatagccaaaaccaaaccttccaagtgaacttctttgtgaggcctctgcaaccacaataacatggatcaagagaacatcaacaagcaaaagtgttggggtaaaataaaaatcatgaacaaaattaaagagaccaataagagaagcaaatttcaggtagagcacataaataaattgagtgcatgcatgttcgaattgattttttttaagagaaataactctctttcgaaagttgttttaggaaaccaaaaaaaaatacttctaaaaaataacaagaacaaaagtaacatgcactaagaacaaattgaataggtttgtcttaaaactccaacatggaagatgtattaagtttagtaaaaatttacagatcgactaaaacctattcaatagtttcctatctaaaaattttcctttctcaatt

SEQ ID NO: 2806 - DNA, 663 bp, Glycine max
aatatgaagaagtacctgctttaccattcaacttagtgactgtaagtattcaatactagagccaagttcacttttctatttagctacatactagggggggttctcttggtaaaaagaaactatctatacttatatgttatggaattacatgactttcatgatacaaatcacatgaatatcaatagttgcaagtagttctttaatgatttatatttcttaggaacatgacttgtgcataacttctttgaggtcaatccacggcttagagtaattctgggaacccgtttgcatcattgtaaacaggcatttcacactttcgaatgcatcaaatgaagcaacatttttttataattggcattcaatgtccatttggatggtttgaactgataaccatttggatggtttttacaattggcatctgtgtcttcaggaaggggacttgagcaggacagcttcctttgcagatgatggagaggttttagatggaataattactcgaagccggggtgaggttagacgtgtttgcagtccaaaggtgatgaaatccactccaaacctatcccaagagttaacaagtccaaggctcacagataaagtatacagccctcggataagccatctcagaggaaatcaaagccctcgaggtgttgggagaggatcatt

SEQ ID NO: 2807 - DNA, 205 bp, Glycine max
ctgcttgttaagatcatcacctccattgaccatttcctgaccactcttccactcatgtgccttgccaaacataaccttattcaagtcttcactctccttcttgactttttttgagggttttgaagtctttttattaggtggagctgactttggttcctttggtcgcttggcccgccttgacttcccagtctcagaagggatgggg

SEQ ID NO: 2808 - DNA, 652 bp, Glycine max
aaaagattgtgggcttaagcaaagaaagagagcaattaatcaggcagagagatgctgctattcaggaagcaaatatgtggcgttctgaactggcaaaagctagagagcatgatgtgatcttagaagcagctgtagtaagagcagaagaaaaggttagggttgcagaagcaaatgctgaaactaggataagggaggctgttcagagagaatccgcagcattaaaagagaaggaagagcttcttgcatatgtgaatgtactaaaagcccaacttcaaaggtctaacaccttattttcttttgcccttgctttttattttgttaaattagatttgttggctacttctgttttcccacctaaacataaagatggaaatagtatatatcaatacttagtgaaacagggaaatggaaggagacttttgatggtttatttgcctttttgtgagttcattgagtttgaatatcagtatgaaatgtggagcatcataaaaccaaagttcacatagcagatatttttcttttcaacaggcaacacattgatacaactcaagtttttgagaagacagagtcatgctcagatacaaagcatgttgaccccacagaagagaatgtggataaagcatgcctgagtgtttctagagccatccccgtc

SEQ ID NO: 2809 - DNA, 553 bp, Glycine max
tcgacctcgcattcacagcaatattccatcttgatatggtaatgttatatacaactgtttttattttcatgtactttcatattcttgttcttgctatgatttttttcaggacatgatagaagtgtcttctttttaccaccgacaatgggcaccagaataccctgagttagtgaattttagatatgatggaacaacataccaaaacaggctaaggaagcatcgggcaaaagtctactttgcagaagggctgcacgaattcagaaaagatttatcaatttttgaatctatgatcactaaattcttggcatgcaacaacaaatccatgtttgatctttatttcattccctcactggaatgcaagacttgcagaaggccacaattgatgtcatgacaatatatttggacagttgaaatcacacaatcaatgcttggtgcaccaggaccactggtaacaatgaaaacctctttaatgttgcttataaattcatgcttatatatcatactgttttttttcatgcagagactccccaactgtgccatgccacatgcaaat

SEQ ID NO: 2810 - DNA, 606 bp, Glycine max
gacgcggagaagggatagttccttccatctgccacctgttcagttcccatgacgccacgtggtgcctcttgcagaacttgatcatcatcatcatgctgattcaagggcaagggtaacctttcgaacatggcgttagcgaaggaagcagccaccaaaaccacgtgactcgaagccaccagaggggccaccaccacgcccccaaccacctgtccctgcgcccctgacagataaaccgacaacccgtccgaaccgggtggcgccggaggcgggagcaccgtccccgtcatggaaactatctcaaaccggccgtggagcgtgaggacgctcccggccggttgacggagcacgacgttggccaccgtgccggagccactgagcacggacactcccctccctcggcggcgcgcatagttggagaggctctccaccacgtcggcgccgggggagacctccagaacgtgcgagcggaggacgttggggctgtcgcgcgtgactatgacgggtggcttgggcttgttcttggagcccatgggccgcccgcgagggcgccgctgggtggagaagggtccttctccgtcgtcgtcgtcggactggggctggaggtgt

SEQ ID NO: 2811 - DNA, 195 bp, Glycine max
tcaaaacaattaaactctcctttaaatatcattttttgcacatccagagatacagttatgtgaatgtgtatatgaagtggaaaaaggattcatactatgactcaattgagcacatccactactccgttcagctcaagcctatcattgccctcaaaaactgcattgtccgggatcccaatggctgcattcctatct

SEQ ID NO: 2812 - DNA, 476 bp, Glycine max
atttttcatatgtagcatctttgtgaatgacttgaaattgttgatcttggttatctttcctaaactccctggagaggccaaaatctgctatcttagcttcaaagtcttgacttaaaagaatgttggctgactttacatccctgtgtattattggtggcttgcatccatggtgtaggtaatccaacccttcaagttcaaaacacatcaccacaaattgcaaaagaacatagtgacacaaaaccacttatgcatttagagggcaacaattattagtcatggtaacgtagtcatagatcatatatagatgaaatataaaacatgcacttagactgtttgattaatactaagatatgatctgaagacatgatttcatttggtatcaatgtgaaaataagtaaaagtctaaagttaagagcattgatgatatagcagaaggacactattggcttcctcgaaaatgaagttatactgaccct

SEQ ID NO: 2813 - DNA, 597 bp, Glycine max
tgacttccttagcacatgttcaaagttcaaactaccttaactgtttcctttcttgttctctttgataggtgtcacaccaatatcttctcatatgcatcccatattttatcctttcttatatgtccacatcttcatcttaatgttttcttttttactcctacaacttttttttttgtgttgtccttttaaagcccaatattcttgctaccataaagtataactagttatataaccatgccatgaaacttgattttagtaagtagtttacagtcagaaataatccttgatgttttccctcgtatttaaccacccagcttggattccacgtgtggcattgtgatggtgtaaacctatccttgtaagaaagtcttgagtttcacttccaagagttgcaccctcgtacatacatgtattgtatagcttattaatgtcgcaatatgtcgtgagtgatccttgtttgaggttttgacgagttttcgttttcgttggctatcaaggatctaatacaattttcctccattatcagaatttaggatttgttactagactataggcagagttatctttgttgattttgatattctattaaaataatat

SEQ ID NO: 2814 - DNA, 641 bp, Glycine max
acgcaacaagctgtatcgcagcaaaacacatcaacttaatagtaatcaacaataccaatatgcaaacacaaccaaaataacaatggaaacaccaagagacaagcaaataaatgaccaacagtgaatcaataaggcatgacaactagtaattaaacaatcaccataaaattcacctaattaatccacaacctaaaccagcccacaacaacaattaaatgcaagcacagtttcactgcaaatcttcacaatcctactcagcaaaggttagacactaacattgctccactcttcacaaaaacacaaacacagtttcataattgcttttagtgtggttctccagacagaattggtgtcttatctcagtaatttatgttgatctacaatgcaaacttttattagacaaattaatgaagtataactccaattctagttggagaacagcaccaaaagtacctaaggaatcacatccaagttttgtgctcgcacacaaatcttcacaatcctactcggcaaaaaagattagacactcacatcacagaccacggcgagaaacagaaacatcaaaatccaaaaaacgcgaaaacgagtaccaatttgagagcggagagggcctggttgacgtaaaatataagcctgagttt

SEQ ID NO: 2815 - DNA, 543 bp, Glycine max
cctggagtccattataataattataagtaacatgattaggtttcgggtgatgatatcaagaaatataaggtttctacagattcaatagcaattctatttggaaagattttaaacaaaggactggaatgctgataagaaacaatgatgaaaatataaggataaagatactaaaacaacctatgtaaagttcaaatgtggatcattcagggaaaaaattagaatggacgggatgttatccactagcttgcaaaggagtatgtgagaagtgtgcaagtatgttttttaagtataacaaataagccctgtacctgtttacagaaagagtcaatctcatcatgtagaatgccatgcatcaaagttaaagatgcactctgtgcagaacagctttgtaagtctggaggttgcaaggggaaggtgacatctggctgtataattcaaaacccacaatgaacaccaacatatacacaaaaagtaagacttgagtaaggatctttcttacgtgttcctggtcacgtgctatctgtgacaatgcaatcaggcggt

SEQ ID NO: 2816 - DNA, 704 bp, Glycine max
tattcccaaagaaaacaaaatcgtccaattttctttttgcaaacctgaaaattgtagataataggtattccctcaagtcaaccttctcaaacataacataaagaaatgcctagtatcgtactctataacaccttttcaaaactatcattataggttaaaattccacactgatcccccactaattaaaaatgagctccagttatttagaatggtccacttgaattttaagaaatttcccaaagagagtgtcactattgttcctaattaaattgataatataactacttcatctgccaacaaagaacagaatgaaacctggcattgttgacaaggcggaatttgatccaaaatacatcagtgtatttctcacagtcctctgcatccattggcttacacctgcacagaaaaattctcaaataaactcgatagatagaatcaaacaagaaaagaaaaataaataagcaaataaatacacaattttccaagtgatgaataaagttactcctcgacttctccataggaagaaaacaatttcagcaactcatccccacaacctagttctggaacgttcctcacaatcaaatatctgcaccttccaaacgaaacaattcaataattttttttactaaaaaaataaattgaagtgacgaaagaataaaaagagtattcaaacaggacctggattcatcacaaacagtgtagac

SEQ ID NO: 2817 - DNA, 638 bp, Glycine max
cccggggtcttctctagagtcgacctgcaggaaagggagtgcatgctataaaaccaagaatccagtgatttgccatccttagaacaacaagtaagaacatgaaaccataagtcctcaagtttggtcattataaatcaagagttaccagaaattttctcaaatccatcgtcagagagaccacatctgttgagatttaagcatgccagggaagctaaggctgtacaaaaaaaaaatatatatatatatatatatatatatatatatatatatatgattaaagaactaattaggaaaattttaggcactggaataataagcaaataggagtttctaagttcaaacatagtctttgccactttagcaccatttgattgcgtgttggactattcaaatccttaattttccaaataaaaatgacagaaagcttatgtattatagaatgacttccagaacaaacaaaattgctgtctaaattaagaataattaaaatgaaatgacacttcaaagaataaaatcagaatttatttttaccatgaataaactctaaacatgcagcagtaatattgcatccttcaacatttaatgtggtaagcatcttcaaacctgtaaaccagaaaggaatacccaggtaatgtata

SEQ ID NO: 2818 - DNA, 704 bp, Glycine max
atacattacctgggtattcctttctggtttacaggtttgaagatgcttaccacattaaatgttgaaggatgcaatattactgctgcatgtttagagtttattcatggtaaaaataaattctgattttattctttgaagtgtcatttcattttaattattcttaatttagacagcaattttgtttgttctggaagtcattctataatacataagctttctgtcatttttatttggaaaattaaggatttgaatagtccaacacgcaatcaaatggtgctaaagtggcaaagactatgtttgaacttagaaactcctatttgcttattattccagtgcctaaaattttcctaattagttctttaatcatatatatatatatatatatatatatatatatatatatattttttttttgtacagccttagcttccctggcatgcttaaatctcaacagatgtggtctctctgacgatggatttgaaaaaatttctggtaactcttgatttataatgaccaaacttgaagacttatgggtgcataggcttacttggtggtgtaaggatgggagaggactggatggttgggtgtgatggatgacgctccgtttgctgcacgctctccccaacggaccgacactccgcatcacacgaggctgggggcgatgggcgagccgcggcgggcgggcccacgccacgggggagccg

SEQ ID NO: 2819 - DNA, 560 bp, Glycine max
ggcatttagagccttcatgggaaagagagtaacccaaaaatatacatactttagaccttggttgcagcttgtgctgattataggacctgagaagaggaaaacaggcacagccaaagactttgaggaatttgtattttggcagcttgtgaaacagtctttgataaggtacttcatttttaattgttgaataaggaagtctatttattaggtaaacactagaaatgacagcacgatcccaatagtcaagtgtcgttgaggcctgagacaacatagttaatgttggatcaagtagcctcgaaataattaagaagggggggggggttgaattaattattaatgaacctttactaattaaaaatctatgcttcttaatgttactaattcaattaggcttttacaacaaagttaagaaagtaaagaacaaaaagagaaacttaaccaaaagtaaaagcgataattaaagtgcatagcgaaaattaaagagtgtaaggaagaagaagacaaacacaagagttttatactggttcaacaacaacccatgcctacatctagtccccaag

SEQ ID NO: 2820 - DNA, 573 bp, Glycine max
tgaattacaaaaaatatcaattactggataacaactaagagctcagaaaaactgctgaaatcaggctaagccctataaatgctcagaataaaaataatatgaactcatgtgaacattcccaaaaattatagggataaacaaattaatttaaccaaattattttcagactaaaaataagcaagttgatctgaatatcaagccaaaagtaaataactggatcaggctgaaatagaaccaacctgatcagtttcaattgatcgacattaaatcaagcaggccatccgttatactttgatattctgatagaagcaaaatgaagtaaaaactacctggatatatcttctgaaggtagaacaaaattgaaatgccatcttcatttttctttaggagttcagccatgctataaagcacaatctcagaataataaggagtgaaaacactgcacaaaaaaaaaaagataagcatgaaaacactaagggtaataatttcttccaagagaagagatttacctaaaggataacatctcccgaactggctttgcacgaggcatcttcataaaaagtgaatttgtga

SEQ ID NO: 2821 - DNA, 558 bp, Glycine max
aaaccatgtttgcaatatattctaggtcaatgccaccaatttaatgaaaaatgtaacatactctagttctatggactcggggccatacaaccttgcaaagattcaacacaatatttaagttttactcaactacttgattcattaatgaaatattttgtcctacacaaccacaaacggtaaagaattttcctacaaaaataaatcataaaaaacatttacctgtctcaatataatgatgaggcttctaatgtccttcagtgatagcggtttctcttgctcataaaattcttcattatcgacaatcataagcatgtgcctgataaaagaaaaataggttatggtatacttaaatgatctagatcacagagaatatagttgaataataatatttggtgagtgcacacacacatacatatacatacaataaagggcagtaaatacaaaatttatgaatctgaacattcatgtaacctcctagaccttaaatgctagtttttacaattcagagaaagtgagagagatgtagtacaaatgttgtattggtggggtgaacagata

SEQ ID NO: 2822 - DNA, 672 bp, Glycine max
cctctagagtcgacctgcagaaggggcaagtcatgtccggaatctgcacttgtctagcccgtaaattagattttgtaggtaatctgtcccacagcaacctccaagcaaacaccccaattttactcgggatctttatcttccgaaggtcctcaaaacagtcatgaaggttcccaacagctacctcctcccaaaacgatgagtaagcactacgagtagatatatatatatatatatatatatatatatatataatacatcataattagcactatgcattttctagactctgattaacagtactgaatcaaaatattactgattcatttccatggttgcagagatactactaacctagcttaaaaaataaaaataactagcctagttttctcttatttaagtaagttcttttaaacatgtaccagataaatcacagtcagttgttctagaaaagtttcactgtgatagttgttgatctttgttctccattaacttttaatttatattcaccttgagggaatagacaatttacatgctcatactgtcaccatctttgacatctttcacttcataaagcagcatcaactaggctttaacaagcttttttcattactttatgactgcttattctttcagagtgattttttctaaaacaaattcaccagagtgactaga

SEQ ID NO: 2823 - DNA, 422 bp, Glycine max
taccatgatcttcacaaatcacatgcatataatgtttacatttttataataagcccaaatttagaagtatttgaaattctgtcaatggtttgatttatgggtgtgcttaaggcttggtttatgccaaaaatgatttgttgtgggatgcctgaatccaagaagcaaataattggatgtctgtctgagccttattttcttttgggtgcaggatcaagctattgccattactacggagctctgtgaagccaacaaactaaaggtctccccagaaacacaggatgtttgcaacttattgttgcaaatacttgaaatggccttgcacttggaactttgtgttctacaaatttgtggcataagacctgtattaggacgtgtggaggatttttcaaaggaagccaaatctttatttagtggtaatatta

SEQ ID NO: 2824 - DNA, 1154 bp, Glycine max
cgggttattctctagagtcgacctgcagcaatccgggatagacacacgatatcatctgttttagagagttgcaagatgcttttagaaaagcatgaccctccaatgctgcacaagccatcaagaaatattagcacttcttcagaagacaaaaatattgaaaaaataacaaaaaggcaatggaatcagacacaggtgctacagatggatgaaaaataatattaccactaaataaagatttggcttcctttgaaaaatcctccacacgtcctaatacaggtcttatgccacaaatttgtagaacacaaagttccaagtgcaaggccatttcaagtatttgcaacaataagttgcaaacatcctgtgtttctggggagacctttagtttgttggcttcacagagctccgtagtaatggcaatagcttgatcctgcacccaaaagaaaataaggctcagacaaacatccaattatttgcttcttggattcaggcatcccacaacaaatcatttttggcataaagcaagccttaagcacacccataaatcaaaccattgacagaatttcaaatacttctaaatttgggcttattataaaaatgtaaacattatatgcatgtgatttgtgaagatcatggtacctgcagcttcttctgcacggtttttactggaggaaacacccacaccaagcatagcagttccagagtctttcatcacagcttttacatcagcaaaatccacatttacaagcccgggtatctgtaaaaagatgcaacagcaaataatatcctcaaaagctgacatcaaaatgtacttttcattaattgtccaattatggtggaggagcaacactcaaataacttgggagttgggagaaaggagatggagaatgattcaagcctttaatgtcccctcttttttttcttcacaatctaccaatctagagggatcaactaatgtttttcatgttatagtgaccaccagatagaaagtctgaaaatattgttaatcaactcactgttatgatgtctgatattccctgtactccttgtcgtagaacgtcatctgctagacggaaagcatcttgaagaggtgtctgctcatcagccatgtcaagcaggcggtcatttggaatcactataagtgtatccacattttt

SEQ ID NO: 2825 - DNA, 479 bp, Glycine max
cttctgcacggtttttactggaggaaacacccacaccaagcattgcagttccagagtctttcatcacagcttttacatcagcaaaatccacatttacaagcccgggtatctgtaaaaagacacgtaacactgaataacatcctgataagctgacatcaaaatgtactttacattaattgtccaattatgatggaggagcaacactgaaatgagttaggaggaaaggatatggaaaatgattcaagcctttaacatctcctcttttcttcactttctatcaatctaaagggatcaccagatagaaagtctgaaaaaattgctaatcaatatcaactcactgttatgatgtctgatattccctgtactccttgtcgtagaacatcatctgctagacggaaagcatcctgaagaggtgtctgctcatcagccatgtcaagcaggcggtcatttggaatcactataagtgtatccacattttt

SEQ ID NO: 2826 - DNA, 537 bp, Glycine max
gttcactctttcacattacaaaatggtactagattcatgatcactcttaaatagcatctaacataacagttaaagatcaacactatcagacactagcaaaaataatcttctacggttcagctgcaaaaagatgaatcagtcaggagaaaatatcataaatccccaccgtggcatccaaagtagtcaacatacactcatcattaacttcgcaagcagcatttaacactaatgcagatatatatggcttataccaaagcatcatgtatatataatcaaaagccttttatttagttaccgtgaagaatggttggaagatcctaggtgctttgtacagcattgccaaacccagatgctttggataatattcttgtaatatatggatagtttcacgtgacgtcttgaatgatacatctgacatcttggcaccctggaaatctatcagccaggccaactgttcctggtgtggtggcagatatataatagcattctccatgcagtatacaaaatacttaatcatgtcctgtgctggtgttattt

SEQ ID NO: 2827 - DNA, 604 bp, Glycine max
aaaaaaaaaaattatataggtaacaaagtttgaataagtttttataggtatatagttaaatagtgtaaaatgattgttgaaacatttttctctacaaatactaatattgaaacccttccattaatcatcgaattaaccaattttataggtaaaaaagtttttcttctagatttataattctaggaaaagcttaggactcctaattgtgctaaaacatttttttatcagttaattacgtgtttggtgattaatctttgaagtaaataaacttacctcatttcaaaatcaatgaaaattcactttatgttaatgcatgttcgtttgacacttaagtcttttaaaaaagactcaacatggaaagtataacccctgagaattattatctttttttactaaaatttacttatgtcattttcattcctaactaattgctcaatacaaggaagaacataattagaagaataaaaattaggcaaacataaagtcatcctaacatggattatgggataacaaattcataggttcatgtatcaaaactcccaacttggaatggtccattgttgcactccctattttatctatcatagaatatatgtatgtttca

SEQ ID NO: 2828 - DNA, 527 bp, Glycine max
gatcgtagacattttctacagaagctgcaaatttgaagaatcagaatcagaaatctaggaattcttgtatattaaaacataaattgggtacccccaacaaaaaaattaagcataattttctacaaatgctgaaaattgaagataaaaaatctgggcgtttatatgttaaaaattgatttgagtacccaccctaaaggaaattttctaggttaattttttacacaagctgaaaatttgtagattctagatcagaatttaggagtttatatatattaaaaattaatttggctaccataaaggaaattttctagtataattttctgaaaaagctgaaaaattgtagattccggatcagaaatctagagttgatgtattaaaattaaaattgggtacactaaaggaaaatttcttgcacaatttcaatggttcaaaatcagaatttcagtctggtggggtgtttgacttttgatttgatatttacctgtgaccacaaggagtggtacttggctcaaagcatatttccaaac

SEQ ID NO: 2829 - DNA, 584 bp, Glycine max
caaatcaatgtacatttgtttcatttcaagccttcatcggggccacgtaaacagacctaatttgcctcctaagtcatcactaaccaatatattacaaaacctactctcacaatgttatgtacgtttggtgtcttgagtgaaataaagaattgcaagtgttggaaaacttctaattcgcggctctgctaagcaaatgtctgctattattttgggcacgtctccacaaactgaatgccaaaactgctaggccagtaactcctgccaaaatctgtcacaaaaaactgtaatctattaatatggttgtttcctatacatctatctatctatatatatatatatatatatatatatatatatatatacctacaagaggcttgtatataactgacctttgcttctctgccatagtttgttcgagcagattggattacagatttcagcaattgtaaaggagaagccttgggcattagaatcacaacagtatacttgtttttggaaggaaaaggcaatattctttttagtgcaaactgtgcagtcgatggtgtaagggatgatctaacttttgatcgcccttcatcttgaat

SEQ ID NO: 2830 - DNA, 681 bp, Glycine max
actgaaacattcgaaattccttacataatttattcttattaaaaataacagtaatcttttgacttgaattggtacagaagtacaattattggttgaggcttttatttcacgcataccacaatgaaacacatttcaatttttcttacccctggttaatttaatgtaccgaatttatacatcaaagagaagataactttcgaagtaaaaatgattatcctaaacaccgtatgataaagtgtataagattgttcaccattacttaggtttttggaaatgtcaaaccttagcactatggtaagtttgttgccttgtaacttggaggtcatgggttcaaatcctgcaaacagcctctccttaggtaggaacctcatgcattggactgccatttttgttgctttggtgtgagcatagatactgctgaattctttgagatgccacttctcacttatcccatttttaacttgcaatcttaacttatgcttgtaactacgttcctgaaggcctagaaatggtgggataaggatttatgtgttgtttcttgatggatgttttgcagaccttcatgctgggtggatcacatgtcactggacaatgaaacaggattggatccaccaggcataagagttaggcctgtctctggacttgtagctgctgattactttgctgcaggtcgactctaga

SEQ ID NO: 2831 - DNA, 650 bp, Glycine max
ttagcactttaatctacgagctaattttcattgtattttttaaatctattcaatgttatttaagaatttttggattttatatatttttcataatcaaacctttgaatcaacccactaatcaagttaaacaaactaaagagaccgactaaattcttagcactttagctttgtaagccaattcaattcaatccattagttacaaatcaatataggtggaataaaatctcttcgtatacccctctatagtttaggtaagaccaaaagggtcactataaatattcactatgatcggcttaacggtggtgaattggaatagatgcttgatgatttagattcgaactgttattatacaccaaaaagataaggatcactatgaattctctgtagtctaattgttcttttgacaatttaactgatcctaaaatatgaaaatattagataaaagcgcaaaataggtcttgattcagttctctgttagtaacaacctaaattgcaaacacatctctagtgtgaaaagacattgataccttaaaaaacactagtcaacccaaaagcttgagctttgtaatcattcatgtttgttattgccaatgtggaatattgtccttttggcacctagtttggcaacttcaccaaccaaacatgattga

SEQ ID NO: 2832 - DNA, 594 bp, Glycine max
atgcacttcctttcttgacaaacttgccaaacttggataatgcaaatgataagcctatgaagccaacaacagacgagctgataaaggtcttagaggatgtccgccttggatatttattggctcgtttcagtttggattcaatacatgaatggtctagtgttctttctctgggagagcagcaacgccttgcatttgctcgtcttttgctttcaaagcctcaattggctttactggatgagtctacaagtgcacttgatgaagtcaatgaggtattgttgaattccaagttcacttgacatattatatggaaatttttgtcatttaataaattgagcacacttccccatatcagacgtttatgatatttcatataataatataatataggcatttgattcgaaatatttgtctatactaaaaacaaaatgctctcccccctcaggaaaaacaaaacaaaacttttccatacatctgtgaaccatagtcaacattctcactaatgcttgaatatgaatgtgcctatgtaattactagtacataatagagattctaagagctaatacataagaataaatcactctttgaaaaagatca

SEQ ID NO: 2833 - DNA, 657 bp, Glycine max
atagttcactaggtttgtactcatgccataatatgccaatctttcacagcattcatttcctgacataatgtttttagcaccttagtgcgattttaatactgaaatatgcataaaagatggtatcgaaatgaaagaagaaaaaaaatccaataccaagtatgaagcggcatgctttccaatttccagtttttttcttgatggcaggctttttgtaaatatcaactgtcccatcttctgtgtataaactatcttctcccacatcatgtgattttttgacatctcccatggtttcacagcagatttcctatttgctgcttcttgttctctttgatatctactacaaatgtctgtttgcagggtgctggaaatgagtaaacaaaataatcggcaaaaggtacacgaaaattaaacagattgctatcatgaatttcatattataaatacttgatttgagggtgtttatgaagtaggaatagcaaagagaggttcagcaaagcaatgaatatgttagctcatgaagctccaatcacaatccttcgcaaacacatttgatggcaacattgtgatttgggattattagtggtacaaagtgatagttataatcacaaagaattaatgtagaactgcaggtgacttaggaggtccgggttcgacccg

SEQ ID NO: 2834 - DNA, 633 bp, Glycine max
agcaaacgcatatgcaacaaagtttgcaacctctcctgcaatcactgtacaataaaccatacagaaacagattctgcaagaaatcagataaataaaaaatcaccgataaactaaaatttgcatattttaatcaaccttcaacttcactacaactgatctaccatatgtgagtgtataataaagaaatctagcaaataataaagcttctgaaacatcaaatccaggatccactatacaatgcagaacgaaattaattcatcctaacttatgagattcaaaaattctattaaaaataaaatccaattaattccatacaagattggataaaatcaaaaccaattatgaagacaaaataaaaccattaaggtacaagaaaatctagattctacccccaacaaacacaaaaatgacaatactaaaagcatagaaacaaaattaaaacagcacttagagcttacttgtgatcattcccacccaccataatggctccaagagataataatacccaccaacacctacaaaatgacaaaaaaattacaaagacatgcataaccaaaaacaagcttccaaatagaaattctaatagaaaaaagaaaaaagagaaatcccctcaccagccctgacaccataaac

SEQ ID NO: 2835 - DNA, 520 bp, Glycine max
agaggcgtatgtcaaaagaaccagccaagttgatagtcctaccctgtggcatgctagacttgggcatgtagactatcaaatgctacaaattatagcatctaataagattattggtgggcttccagaattgaaataggtgaaggaggaagttgtttgccaaggatgtcaatttggtaaggcttacaagctgccatttaaaagttccaacaaagaaagaaccattcctttcgaacttatacacacagatctaatggggtcgacaaaaacacctagttatagtggatgtaaatatactatggtactaggggatgattacactcaatatacttggttgtatttcctaaaggagaaaagtgaagttacacataagtttgttattttctctgacatggtggagaaggagtttgatgcaaaaatcaaatgcttgaggagtgacaatggaggtgagttcaactcaacagatttcacagttttttgtcatgaaaaaaaggatccaaaggaaatttacttgttgagatac

SEQ ID NO: 2836 - DNA, 815 bp, Glycine max
  misc_feature (728)..(728): n is a, c, g, or t
tagagtcgacctgcagaagttcctcagtctctcaagaaagagctctcgggtgtttgtagggcttgcttttctgctgatgctgtaaataagcatgttgattttgtaagggagtacaaacaggattttgaacgtgatcttgatccagaaagcactgctactttcccatccactttgtctcaactgactgagcggttgaaacactggaaaaatgttcttcaaagcaatgttgaggataggtttccagcagtattaaagttggaagaagaaagcaaggtattgcgggacttccacgttattgatgttgaagttccagggcaatatttcactgatcaggtgactgcttctggtttttttttcaaacaatgtcaaaagccttatatatatatatatatatatatatatatatatatatatatatatatatatatatatatatataaaacctcaagttgacctggggagtatttggtgcatcccatactcattctttgttttattttcttgcaggaaattgcaccagatcataccgtgaagttggatagggttgctgctgatattccaattgtgcagaggcatgggagcagttttcggcgcttgactctaattggctctgatggttcccaacgccattttattgtccagacatctttgactcccaatgctagaagtgatgaacgcatactgcagccatgtaactatcatgtcagtttatgtgatgaaaaagaggnatataatatatatatatatatatatatatatatatatatatatatatatatatatatataagaaagaatagcacatactctggcatg

SEQ ID NO: 2837 - DNA, 481 bp, Glycine max
tagagtcgacctgcagcccttttctttattttcagcttcatctgcttcacaatttcttccagcctgtagatgatgaacaaagccagtcttgaagtaaaattcccttttctgaaaactgtctccaaggaacccacaaagattaaaaccaggagaaagggagatgatatcgaaggcatttataaaatagtaagtttctaataatttaaactgtaatataaagctaaaaaaaagggcaatcaattttaaacttagaaataatatagagataggttgagagggacggacagataagaattataatgtatacggatgaaaatcaaagatagtcgagagagagtatgaaaaataagactctcatatttcttaattctaaattacaatacaaagtgaagttttgtaaaccaattttaaaatgattttgcaattcacaaattactttaaaattgtatgttatacgctgaatattaacttaatactttct

SEQ ID NO: 2838 - DNA, 670 bp, Glycine max
tttctttattttcagcttcatctgcttcacaatttcttccagcctgtagatgatgaacaaagccagtcttgaagtaaaattcccttttctgaaaactgtctccaaggaacccacaaagattaaaaccaggagaaagggagatgatatcgaaggcatttataaaatagtaagtttctaataatttaaactgtaatataaagctaaaaaaaagggcaatcaattttaaacttagaaataatatagagataggttgagagggacggacagataagaattataatgtatacggatgaaaatcaaagatagtcgagagagagtatgaaaaataagactctcatatttcttaattctaaattacaatacaaagtgaagttttgtaaaccaattttaaaatgattttgcaattcacaaattactttaaaattgtatgttatacgctgaatattaacttaatactttctaagcttgaaaaaagagatgattaggcagggcgttgttttgtgaaatatatataatagtagtgttatatatatacagatacaacaagcacgagagttgtaatacaatcttccatagttccatagttctattcacttcaaagatttggatctttcaactccaaaagaatggctggaaatcgtgagaacgcagctgcaggcatgcaagcttg

SEQ ID NO: 2839 - DNA, 457 bp, Glycine max
gctctcaagagagcaaatgttgatccatcactcgtgcaagaggtgttttttgggaatgttcttagtgccaatttagggcaggctcctgccagacaggctgcattaggtgcaggaattcctacatctgtaatctgcactactattaacaaggtctgtgcatcagggatgaaaggtatgttctttttttgttgttgttgatttggaagggtattccagtattcccacttaaatatatgaattttaattggaagggtccttttcattgcagctaccatgcttgcagcactcaccatacaattcggtctcaatgatgttgttgtggctggtggtatggaaagcatgtcaaatgcacctaagtacattgcggaggccaggttcgcttttctttcatgaattgttgatacttaatacttgggctttccgataaaagataacgttttttaaatctgacaaaatc

SEQ ID NO: 2840 - DNA, 521 bp, Glycine max
caaagtctatatggagtgcagaaatatctcctgatacatgctcacctgtggagcatatattgcatttggaacctatagaggtacccatatatattatataaataatagatagaaaaggaaactagtcagatatggttgccttggtttatctttgatattaagtaaattgcctgtggtttcatcgcaatcattgacactgccgaaaattgcaatctttatgcagttgcagtcagttgaaaaacctttatgttgcagatcacaattaaaacgatgttaagtaatatcttgctatattttgtatagttcacccttatatcattctgttccttctctttggaaggtagatatcttccgaggaatcactcctccagatgctccaaaatttgggaaggtatttggtggacaaatagttggacaggtaagaaaaactaccttgacttcatagtacagcatgttctcatgtcagtagcactttctaggcaatgattgcttacatgataatgcgtaatatacaggcactg

SEQ ID NO: 2841 - DNA, 467 bp, Glycine max
tggatgccagaagaatttgaacagcatcaaagcaaaggtaaacaggatctaggtacttggatgagccctttattttcaaaatccaaccacatcctcttttagccgtctccatcttaaaagtaacaaaatatattacattaatttaaagcataacctcttcaaaaaaaaattaaagcatagaaaaatatgttcaagacccaatcactgaggcaaagtgtgctaagcccagtctgctacacatgtagggttagctacattagagcctaaccagaacaaaatactaaacggctggttctggaatttgatcaattataatggcattcagaaaaaaaaattgttttagaactagtaaaaatgtaaatagcttttttcgtatgctcaatttaaccctgctccatgacaataaccgtaaatattttttttgagtaaaaaaccgaatgcatgtgagaaagtgatatgagcgaata

SEQ ID NO: 2842 - DNA, 650 bp, Glycine max
ttcaggaaggatgatacagcaccagcagaggatgatgtaccttatggttatggcttcttccattttgtttttgccacaggagcaatgtactttgctatgctattgattggatggaatagtcatcattctatgagaaagtatggtctcctcccctcctgtatttggcccatatcatgttatctgcttcttaccgagttttcttgtttttcttcgtcccaagagagaaaaaaaaagagtggcaaacaaaagaaatgcatttccaattggtaataggcaaataatcaattaatcatatacaaatcaagatgccatagaacccaataaatgtgattcccattaagttttagaggtgttttatttgcacggcactatctttctttttaatcaataattgtaactgtattttattctcaaaatcttctaaagtaaatctccttcacttaagaggaattaacaaggtggtacaatcgtcagtcagtactcagcagtgtcacctcgaatatgttgttttgttactgaaatgatattcttttttcagaatctcacttatagtgccagtagcaagttcatctgaagttgattctgtctttctttcagtgccctcatacatgtaatagcaagttcacaagatgtaattacctttattcttt

SEQ ID NO: 2843 - DNA, 574 bp, Glycine max
aacaatggaggagagcgcaagtcacttgttttttcattgcagcaaagtgtttcctttatggtgcgaaatgctgtcttgggtaaatctggtgggtgtctttccacatcacccaagacatcattttctgccgcatatatatggagcatatgaagggatacagctggacagatggaaagggtggtggttagcactgacatggactatttagaagcatagaaatagtatagttttctccaattctgcctttaatgcaaataaactggtggatgatgcagtgtttctgttatggacctggctcaaaaacttagagaaggatttcaccacccactataatcagtggtcatcaaacctaagtgaaggatttctccgtagatgaggattcgaatctaggcttattaattgtactagtcttactatatgttttattctgattcatcaaccaaattgttatggtgttgaactagaccagaattgtagtttgtaattttagtacctctggtactttgttaatatatatatatatattatttttggctgataaaaaaaaaaaaagaattaagaactctgactttct

SEQ ID NO: 2844 - DNA, 749 bp, Glycine max
tgtattcacaaaaaaaataacgcgctttctattgtattcacaaaaaaaaaatgcgctttctattgtaattcttttgacatccttttttgtactgcagctctcttcctcccttccatcgcaaagagcctctctttacggcttcggggaacacaccaagagctccttcaagctgcgaccgaaccagacccttacactttggaatgcagacattgcaagtgccaacctagacttgaacctttatggctctcaccctttttatttggacgtcagatcacactcctctgatggaaaagtgaaggctggcaccacacacggggtgttgctgctcaacagcaatggaatggacattgtgtatggtggtgatcgaattacttataaagtcattggtggggtttttgatctctactttttcgctggatcctctcctgaattggtgttggagcagtacactcaactcattggaaggcctgctcccatgccttattggtcctttggtaagtaagtcacacacaccgttgtacaactctttagcttgcttctatagtcttatagtttccatattgtaccacgtgattggtgttacagtttttgggatagctggtaaatggcacaagtgcacgacaccaaagcagttagctatgccattgatagagttgtgtatctgttgctacacaagtttttgggtgaatattggttttcatattatagtttatagatacatacacgcactgcaggcatgcaagtcttgg

SEQ ID NO: 2845 - DNA, 142 bp, Glycine max
atgaaacatagctgccaagtcaccacatttcccatcactgtcacccaataaactctgcttcctttgtcaaacaccgtttggctctctaccttcatctcagagaatccaccatcccatgtcatgccaattatggccaatgctg

SEQ ID NO: 2846 - DNA, 733 bp, Glycine max
actggggctcggaacccggtgtttcctctaggatcgacctgcagtaagagacatggcttggccacgggccgggttacttaactgttgttgttacaacaatcgagacgtgtattatttatgaaaaactttttttttttacaaaaatgaaaaaaaaatattgatacgacacttttgtggtactttgtaattaagacagatataatagagagaaaagaaaaaataagttgtaaaaatatgtacaagaatatcataataagtttcactctttatttatataatagatttaaatatattttttatacacttaatatatcatctttttaatttattatttaaaaattaattttttattaactaacattataatatcaattaaatgaagacgtgacagactaatattatattttttaatagacttaaattaataatagatatttaaagtaaaagtttgaatataaaagaaaatattttttaggtagtaaattaaaaaaaataattataaatgtgaaaaatatatttaagtcttatttttattattacaataattttcattaattaaactatttttaatattaaacattttaaacccatgtactttttttatcctcaatgaaatcgttttttcataaataatgttcattttacacacacgcacacacatatatatatatatatatataatgcaacctaggggagtagggagttctagttccatacgtggtgaactcagatt

SEQ ID NO: 2847 - DNA, 560 bp, Glycine max
actgggctttactttcttaacataaaccttaattggaggcctatcagcttcatacgagtacagttgaagttatgtaatattgctgtattcatgtgctgttggagctactcttggaatacttttgttttacatgtgaaaattgaccttttctgatttgtgtttcatattggttctacaggttcgaatcatggatattctgtatctcactattagaatattttgaattcttacgctgaaattttgtatctactgtcaggaccttatccaacacttgaagtacgcttgccctgctcatctttatgcaacttcaatttcaccaccagctgcacaacaaataatatcatccataagagttattcttggagaggatggctccaatagaggtttggctggcactagttctgctctttgctttgcatttgtattgtttgatgattttttatgtgcatcaatccaaataatattcgtctactttgtttaccgtgcattgaagtaagttttttctatataggtgcccagaaacttgcacaaattcgagagaatagcaacttttttaggtc

SEQ ID NO: 2848 - DNA, 780 bp, Glycine max
agccactgaggcctagcccaaaaaaccttctctaatgtgagatgaccaaaaattaaaagggagcttaaaatccttatccaaatttgagagccaagaccacactaaaaaaactgcatcatcaacaagcttgctgccattaaaggaatcattggagaaaagaattctgtttctcatcttccatatagaccaaacaacagccatccaccaagtttgccaccttcctcttctaagcccttccacttgcacaaaagagtgctgaagaaaatgctggattggattagaggggaacacccaagaaatattcagccaagacaaagtctcccaccatacaggccaaatctttgagcagaggaaaaataggtgggaaacctcctcctccattcctccacagaaaggacatgaagcatccacaatctgcacttgccttctctgcagattgctttttgttggcaacctgtcttgaaataatttccaagcaaaaatagctattttacttgggatcttcaatttccataattccacatagacttgttccttagtcacggctgaacccccttcccttaacaagtgataagcagactggactgaatagatacctgaaggatgcccagtccaagcccaaccatcttctccatgctgctggatgatctttccttctacctctccaagaaagttgacagccaaaggaacttcattatcaaacaaatttctcctccaagtaaaatgccactcccacccatgctctttgtgttgacccatctgacttatagtgttatgttt

SEQ ID NO: 2849 - DNA, 129 bp, Glycine max
atctcttacaagacaaagaattgtaacatgtggtggtcgatcacgtttcaacataaaatggtctcgggcttttgatgttggcttaccaccacatcttctcaagggtgccacaatagattttttaccatc

SEQ ID NO: 2850 - DNA, 604 bp, Glycine max
acagcggctccactatgtccttttcagtggttgaagattcattaagctctatattctttgatgaaattagccttgatcccctgaagcatcccttctgattttgaagtgaagttctgggagagaaaatcccaaggggggtgtgtaccaccagtacagaatctggatttgggaccctgagatggaattaacttataaaaccaatttattaaaaaaacgtgaaaatagcattagacataatcacaacactagagctcaaacctgtgaattgcacaatatattagcttctttgttatttgagtcccattcttctccatggaatgcaactgcaaatttatgcaataaacagccatagaaattatttatttaggatgaaactataaaggatgcctctgtcctccacaagaaaggcagaaaactagggtcatgaaaaaaaaaatctagaaaatataacaatttcagatccacatatttacacttaaaagccagatgaaacttatacctccattgtatatcctgcccttgatgcacacatcacatgaaaataagtagaacacttgcaacaagctatgcaggaaccatggctctgttcacagatcacacaagt

SEQ ID NO: 2851 - DNA, 475 bp, Glycine max
agcagtacaagtgatgaagtcaagaagcttgctgctgctgctcttgcagcagtgaaagatgatgctgccatagctgcctcaagcagggggaaacttgtggtaagcatattgctatccattgcacctatttttgggtcatgtgctaatctctggctgaaatgggaaaattttgagctattagccaaatgaaagaggaaatatatatatatatataatttgtgctttgaaattttattttatttattattttcaaattcaatatacaaccagacattcccaaattatatcaaagaatgcttttgacataggggtgcctattgttaagccaaacacaattttaagtataacatacaccaatcattcctttatcagattactgaggttcgggactttgctggtcaagatattgaagttaaaaagcttgtagattctgactcaaaggaggcaatggaaagagccaaagctcctccacttt

SEQ ID NO: 2852 - DNA, 502 bp, Glycine max
cacattacaagcacctataatggtaaactagtgaaaaatggacaaatctgaattgtataaataatataaatataaatataaatatagcattcacttggcactagtgcccaaattcctgtccatcaatcttaccagcatagttaactaaaacacaggacaagagaattaaagacagaatcagacaattacaacttcactgcgacttgcaaaaatgtgtataaatagaatagtttctttattcttgacaaaaaaaaaaaaaagagaatagtttctttatatactttttgtgtgcaaaacatcaactgatctgtatcaactcacattaacttattgcatgtcatgcaattccaacttaattggacagaagtaccagattcaaccaaaaaaaaaaaaaaaataccatcttgccagatgcaaaaatgagtgcagtagtttttggttccctgatcctcataataacagcagcaaaacgctgcaaagattcaaaagatagacataagca

SEQ ID NO: 2853 - DNA, 466 bp, Glycine max
agtaaacgccatagaaatttcagttgtctgcacatcaaagcgaatggaatttgtttgcaacttctgagatactacaaaccacactattttctctttcccatgagaaaccttaatgataccatctcctgaaatttcttttttcataacagtaagtgtatcattaagcaagtttcttaacttgatacacttgaggcggtgaagaaatagtaacagtgaaggatgaagatctgaaaacatagacaaaacactattcatggccattccttctgatagatgagatctgaatggaagcagaatgcatgtgttccagggattatcgtcacacaattcagtatcagtagatgccatcctcctgagcaccccaatgtcaaaaggaggtactactgtgggcaaaacaaaaccaatctggccttcactaatgtcaaatttaacatgaaaaccattggaatgaatttctggagcatct

SEQ ID NO: 2854 - DNA, 579 bp, Glycine max
ttgaggaactcaaaactcttaggaatggttccattcagtcggttgtgagccaggtttaaagttctcaaggatgacaagtttgcaaatggtgagggaattggacaagtaaaggtattattactgagatctagaacttcaagatgcttaagctggcctaatgaatctggaagtggcccactgagttgattgttctgcaagtctagattttttatgttctgtaggcttgatattatttgtggaatttcaccctgtaaaaggttactgtgtaaatcaagttggacaagagttttgctgagattaaatagccatgaagggatttgctgattgagattgttatttgaaagatcaaggacttggagatgtgtgaagttggtttttccttttggtggtcctaagttatcaatttgacagctctccaagtgtagttctgaaagagatggaagtgcactcagtacttgaagccacttaccttgtttatgaaggtctgagccactcaaatcaaggtactccaaggaagagagccttgatagccaattaaggttatctatctgaagagcataattgtatccaagattaagg

SEQ ID NO: 2855 - DNA, 734 bp, Glycine max
atgctcggcttcttgaaggggatcctttgaaaattgatcaagtgggttatttgtttatttatttatttttatatatctatcatataatatttgctctttgaatcctccacatgtctaattggtcaattgtcctctttttccttggtacttcgtacttttcagtctgcccttaccggtgagtcactgccagtgacaaagggtcctggtgatggagtatattctggttctacctgcaaacaaggagagattgaagctgtggtcattgctactggtgttcataccttctttgggaaagctgctcatcttgtggatactaccaatcaagtgggacactttcaaaaggtaactcccccgccccccccgcagttttattgttattcatacttcagaatttcggatttcatttttgttgtatttttttgccgtctttttcaggtcttgactgcaattgggaacttctgcatatgttcaattgcattagggatggttgttgaaattattgttatgtatcccatccaagatcggccctatcgtcctggaattgataacttgcttgtacttctcattggaggaattccaattgccatgcccacagttttgtctgtgaccatggccattggttctcacaggctatctcagcaggtcagttaggttcttttggttgagagcaccttggatttgggtggacatataagaactaatggttctaattctgcaggtcgactctagaggaa

SEQ ID NO: 2856 - DNA, 694 bp, Glycine max
tacttttaaactatgcagccttttcaattgtaaagctttttttgcttcctaagattcaatcagtaacaccaataatatagcaataggtttccaaatcctttcttaatttggtgtttgatgtagttttttattctgttagtgtagagtatgtagagtatagactatattatacagatttaatcaaagggaaatatttgcttttgaaaacaaaactattgtgtttgctttaggatcatgtatgtggttttcaatattaaagttgaagcacatagttctagcttttacaccaaagactcatttgatgacatcatttttttcttggggaacgaagttccaaacatgtactacattaaaattgtgatttgttctctcaactcgtgtgaagcaattaaataattcgtgatttaaaacaaaccctttttaatgtatatctttgacttccaaaaaagaaaaccccttgttagggtttctgagaaactaagggcaaacgtttgtaacttaaatgcagaattaatgtggaaccagtgtttactgtggggagcattccagaaacttcttacaatgttgtgaaggaccagaagtactgtggggagatcaaggttgcactcacctttaatcctgaggtaaatttatcagccatttcagtgctgtttaaccaagaacacaagcactagtgctgcaggtcgactctaga

SEQ ID NO: 2857 - DNA, 1391 bp, Glycine max
aggcttttgaatcagaagtaacagaatttaccaaagaccaggtataacgatgacagaagaagtaattgaaattgcatcttatcttggtttgagaaattagttgattcttattttgttttacattcgattccacagattagctcttatttcacacacaaactgctaggaattgttcacgatattggtcttcatatgaagggtatgaacagatcagaaaacaaccagagtacatcaggccttcctcaacttacgggtgatgtccatagaggggatgcttccttggaatttatcaagcatgtttgtgctgtcctcgcccttgaccacagtgtgcagcatgaagttttggtaataattgtttgagcaatgctagcaacactcttttaacacaatcacattttaaagcaagtattgacttctaaaaaatggactagtaacaaaggacgtgctgcttcatttttctacttgttttcctcaggtgtgttgacattactaagagtgtgtttgtgtctggtctttttaacgcaacacaaaagcaactcccctgctgctttgtaatttttgcattggaaagtgtatttttcccattcaactctaacgcattcctaaacacattgtaaatcagtagtatcattaatattatatacttgctgctcttctgcagccttaactgtaacttcgggatttatttgctgaaaaatctaggtcaaaataaatcaaggaacccatgcaaacacagaaagaaagggtcaaaatgacttaagacaatgaagcaaatagaaaattatgataattctcctttagaaaagaacagtagcgaggaacgactttcaaatacaaaaaaagcaaaaggatacataagaatgattccccagcaaaccaaaaaccacctcatcccccgagttaagcacgcagctggcactcctcttgacgagagtcccattcactacgaccgatcctttgctgcccatactttctagcacagccacgacatttccctcgcgctgatcatttccagaaacaacagtaatcatactgcacatacatatcctacaatatttacctcaaacaactataaagaaagaaaaaaaaaaaaaaaaaaacccaaccaagcacacaccttcactcaagtattctcattcacatctcaaacaacaacccagtaaaaaaaacaaaaaatcatagtgccaaggtgtgtgctcggaaagaaaaagacaaaaaaaaaataactcttccattccaagcacaatcacaaactccctgagatttatgtacctgcgtgtgcttgatcttgcacaaatttgcacttatagtctgatccttcaacgaaaaattgcaactcctacttgagccaatagtaaagctgggtgtggaaattaaaacattcggattct

SEQ ID NO: 2858 - DNA, 751 bp, Glycine max
tcttacgccgcttgcatgcctgcaggaaggcagaagaacactccaatgcctgtggctgctgctgtgatgagctttgggaagtggccatcaaggtgaaaggaaatgaagccaagaattggagcagccagggctagtcctgtggcccaagcaattgatgtccactccagagcagagaagtttgatccaccactggttcttatggtgtgatttgtcagtttgctatacctgcaattgattccaccacacatctcaactttgttactacatgttttaattttaatttagattacactttaattttcaatgcaccttcagtgtcaactaataaaaaatggccattgatagaacttttcagataattgtcaacaaacttatcatgcatggcaatctggcattagattctttaaattaactagtagcatcattgttcgaccaaatgttgtcttaatatgttgacataaggaagaaaaacaccttatacagaaagtggataatctatttattctttaaattagtagtaactactagtagcataactatttgttcaaatgttgtcttaatatgttggcacaaaatatcatgctcatgcacacataaactgcttgctgtttatgggaatgctgccatggttttaattggaactttgggaacatgcaaatgcacatggagaggactatttgcatagtgaatactgtatctttgtttagttcctgtagttatatagtaatcctgcaggcatgcaagcttggcg

SEQ ID NO: 2859 - DNA, 723 bp, Glycine max
cgccaagcttgcatgcctgcagtttggtattctaacatctggttaggagattcatgatctgtgcatccaatggcctcctatttaataaaatattttttaagtagtagggcatagctggatagtttataggtttcctggcgactcagtccttcttgttcactccaatctaaaattaaatttcatgtatataaagcatcagttaaatagtgtgcatgtcttgcagcaattttcattgcaaaaaatattgtttttctgagtcctgagtctctgatttagcagtttcagactacggtttggaggaagaagccagggaatatgtcaactcagttcatatagatgatgatccagtggacgagtatagtcttcctgagcaccagcagcagctacaagaagaacttgaaaccgaaattgtggaggaggaaactcccgtacaggaggcatctccaccaattcatagcattggacacactgtccaagaaccccctgttgctcttgtggaagagtcctttgaggagcctcctaagaaaacatatgcatctattgtatgtaatactttctatacatgttcttttttttttggcagactacctttttttgtgtgtagttatgtactatccataaaaaaggtaccacatgactggagtaaccaatattcactttcaaatcaaaacaatcttttagttagtttttcatatttccataattctaatttcctgaaatcat

SEQ ID NO: 2860 - DNA, 694 bp, Glycine max
atagatcaagagttgcaggggcacaatgaacttatcgaaatgatcaaagggaatccatctaaaatttgtgaaattgtctccagcagtcgtaaagatttcacaaaagaattttttatgcatcttcatacaatagctgaatcttatggatacaatctcgaaaggcaaaatggtgagactaaatgctttgaattctgaattagtgttttctataacagtatattttgctttcaaatatttggtcactcactgaactgaatgatatccctccagttcagagcttttttaatacttcattactacaactaaaattagatgccggtgccttctataatcaaatcataggtattctcccacagaatgatactccattttcattcccatttctccaaaaattcttcctttaaaaacatagctcatcaagtattcatctagcttagtcttagcctaggttaaactgtgataatatgcctttggatttttgtgtccttgcaatatagagatcttattgtacttgccacatgttaagattcaagaaattaatcaatttaactgggtagttctaacttgcctcttcaattaatttggtatttgtcatcatatgtttatgtgacaagatttgttaaagctttggaacacgtgcttggctgctgtaaaagtctacgatgctgcaactgaaagcattgaggcactaaat

SEQ ID NO: 2861 - DNA, 709 bp, Glycine max
tgacaagctaattaaattaaccatcgttttcttttcttcaaatggatatggtgatttcgtgatgttgattttaattttgttataattaaaaaatttcatacaatatgtaaatattttaaaaagaagggaaaagcccggccattccttcttgacttttcctactccgtttgcgtttggtgtgttcccttaacacctagcatttctccatactcaaattactcattgttttagtggttcgagtgcaaatattcttccttcgttgctctgaattcacttttgaaataaaataatgctgagtgctaacacaattgtacgcgcatcattcttaatttaaataatatttattgtttagagtttaatttgcatgtaatattagtatattttttagacaaatattaacaagtgtacttaacatactaatataattagtataaaaaaaacatttacgaatggattaagttgagtttgacaaaatatcacttaaactcaacctaatccaacttgtacaagtacaattttagaaggattgaataataaatctagtgcatatttaaaaattatgtgaaaattacttttaaggcaaaagtaattttatcaaaatattagaactcttgtttttgctttcattcattaaatttgtattcaaacacgcaccacaataattttaactgcaaattaaacatacactaaatcaaactctattcaacct

SEQ ID NO: 2862 - DNA, 656 bp, Glycine max
gaaactatcactatcagaatgcatagatggccatgatggctttgttttcccaataaagactcaaaatgcattgaatcagcatagatatctgagaccagccctggtgggcctttagaaagagttctgttatttgcacaccacttttacaccaactctcagaagcactatcttattattaagcattaattatcattcactgtttatattaaatcacttgcaacagccataaattcaatgcttaagtaactaggcgtataagttaatacagccaaaagctgtacaatcttttgttccatgttcccctgccaatcaattgtttaggaaaagaaatcatttttccctttccattttagattgaaatgaagcctaaaaaaaataataaatgaaaagctatcatacaagacaacagaagattttcatatgcaaaatagtgacatcaaaacatgaaaaagacatgcaaacaaagctaaataaactacttcttactgtaatttctgatgagagtttaattacatctcttgctaaaatgtcacttttagcccatatgaggcaattgctgcactccgtcttctccacctgaaatagatatgttgttttgacacatggaaattacatggctgcaaaagaagaaaatattttgaagaaaaactaaggac

SEQ ID NO: 2863 - DNA, 706 bp, Glycine max
acttgctgaggcaccaacataatgtaatagtaatggcagcaagtggcacagcaatgccacaaacagcataagcaagttcatatttgcctgtctctacaagaaaattgcaaaacattcaaccccttcgttaactctagccagtatttgactataaagttcttaatagagtgcagggctatactctgtcatatttttgttcttgtctaaggtttgcaaggccaccaatgaatagagaggttcgaagaacaagaagaaggttagaaattatggaacccaagagagaatatttgaccaaagaaattttgttatggctaagggcgaaaattgctatgatgagctctgtagcattcccacaagttgcattcaaaagtgctcccactgtgattcaagaaaataaaaggatttagtaacatgacaaatgattttactaaagtttcatttctatttccaacactgatatgaccaattcaaatcgcgtggtaattcgtctcaataaacagcttttaccccatagcattttgtgtgaagacaaaatccaaagagagattatgtaacaagcattgacatccttttattctatatttttctatggtaacaatttgacattaatatttagtccaaattaaagaaaaatgactagtaaagtacattgtgaagaacttccaaaacagattgctttaatagtacagctgtggatccatacaca

SEQ ID NO: 2864 - DNA, 711 bp, Glycine max
atactccctgaaatgtattccctccataagttgatcatgtccatcttaaccagtagaattaaatggaaacaagacagcaaattaaaaaaatccacctcttgttttttacaaaagtttgactttaaatcaaagttgctctgaattattgcaatcttatcatctgaagaacttttgaagcccaaatccattccaactaggattgaattgtcaataagttccaaacatttgttgctatcaagaaatgaatcttccccatttttaggttgttctttcatcctatctatggttgagcaagttggagatggagcagccacattattcaattcattttctacagcattagcatggtgaactggttgtgttgtgcctaaatcacgtgagagatacaaaattaatcaaacaaaatttaattgatgactcacattgtgacttgtacaagtccaagatgaagaagagtggtttctcacagacaagcaatgtgagtgcgcataacttaccattattgaccccctcaaagtctactggatctccctaaaattgaaaacaatttaaggaaaaataggttacaaatacatgttaagattgaatcaatataatcatcaataaaaaaatgacatttacctcagtaatctcacatgctggttttaaaaagtttatagaattctgattagcatcaacttcagatgctgtgattgtggaatcatccaccaa

SEQ ID NO: 2865 - DNA, 727 bp, Glycine max
gcttgcatgcctgcagagtattatttcatgatattgtcagaaaatctgaaaagtgactgaaactctttaacttctcagaatcattttatcttaccttctagcactgaaccttcgggagcacctttatatgcccattgacaggctgcttgaactccttcagacgcgtatctgaaaaaaatcccaagtttgttaaacaattatatttcaacaacatatgtaaatcaactaatgaatcaggttccaatatttcaacagcatatatttcagtgatgaaggaataaacttttgcataaataaagaactaaagggacatacatatcagggcatgcagtctccttagaatcgcaggtttcccatcctagtacttgatcggaccatgttttctgtttcagaaaatttggagtaagcatctctaactttgaagtaattccatggattggggataatagaaagctactgcataaaataccgtaatattctcttgaatggcattggtgaactcgtctatgttggagtcatagaatctttcttctgctgtctcaattatgttaacatcccaaacctgcgtggcataaaattggtcagcagagtagatagtgaatagataatagagtagtagtgaatgaagctgagaattagactcacatggtgaagattttgtttccttgtgtaccagtgaacattaattgaattggctcccctgtctgaggtaaagcccacatgtaga

SEQ ID NO: 2866 - DNA, 657 bp, Glycine max
agactccctctcgagtcccaacaggaaaaagggcaccatcaccctaactacctacctcagaacttaccaaattggttactacgtcgacatgaggaaggaatgcagcaaaaatttggtgtcgaggtcaagaagctgtttgaaacgggatcatgagaaataaaattttctttccattgtgatgcatgctttcggggtgctcggaagagttcgatctgaggaagattaagaatgacaaactcaaggcagaaaagattagcaccaagagacagggtttcatcactttcatggttgagggtgctactcctattccatattgaaagagttgtaaacaggagcagttattcaactgcatccttgggtagttagtagttggttattgttaaaaaagaacaaaaacagaacataaggacagtaaaaatataaaggtatatagaagaagagaggagcaaaaattgatatgatatattttagatttgtaaactcaaattttgcacactttgaacaataacttaaatggagaaactaacaagtccctaattggttgaaataaacagcaacgtaaagttaatctaaaattggcatcagtggccaacaggtattagatgttttctcttaacacaagaaaccgcttaaacaaatttacaagcaaccacaaat

SEQ ID NO: 2867 - DNA, 669 bp, Glycine max
ctactactactactactacttaaaagttaaagtactatgtgatactgaacctgtgtcgattttaacattccctgcatttttcctaattcccatgtaaaaatatctcttttcaattaatattaactagcataaagttctccaaagtgcaagtgataatatgtatgtagaacattgtcgaattgatgttgatgaacactaaaaattaaaacgcgaactgatggtttctaattcttttattaatgcttgcttaaaataaaatcttttctatactaaaagggaattaatttgtttctcttctcataacacttgaaatttttgttgtctgtacacatgaacagttacgtcgactatgcagaacttctggtgtgcaagtgtctattgaaccaacaaatattcgggacaccttgtatcgggcatctgttaactttgttttaaatgtatgcagcaggtgtgatattattagccctgaattgttgtctatctctttgttcactgcttaatggcacctgttaatcatgctgtcttctcctattttatgaaatttgtttctattcagggcaccaactcactctacttcaattgatattaatggtgaggatgctccacaattccttactggatttgctgaaaatatcggccttgaaaatgttcgtgctgcaacaattgtgt

SEQ ID NO: 2868 - DNA, 688 bp, Glycine max
agagtcgacctgcagttgaattcactggatgcatttgatgcctgatgattttggctatagactatagctattttataagtcattttcacttgcttttattccagcaacacaggcacttccaaaagccgtttccttccttcttttaaggtaatactacactaatacccattttgagaaattattgttgatggatttttattttcttttttcttttttatttattagaaaataggtgtataagtaatataaaatccttttatgattatttgaaaagacttagttttgtcctgtttttctttacactgacatctaataatatttaatcgtttaaccacattggcttaaatttattttaaaatactgtctgcattaccctttttctcaaaaaaaaaaataatgtgaaactacgttaaggtacaggctaatttaccaaacctttttttcattgaggcctatttacaaaaaaattcaacagtacccatttttggggctcaatcacaaaaacataatattcacgtcagagtccaatgtaacccgattaatcttagccaacttcagttagcctatattggcgaatggaactctgacaatgtccaaataaaatgatcacaaaagcattggagatattacggacgaaaaattctgatagcttttgtaacctgaagccgacaaaagggacaccttgaca

SEQ ID NO: 2869 - DNA, 1409 bp, Glycine max
tcatttatagaaaccaaccaagatatactaccatactattaataaaaatttgattgaatgacacgagcatgacactcatcaaacccatcaaggaaaaagaggagatcgagttaaaggttttgaatacctagtctcttgattgggtgtaaaacacccccaactcaagataacctaccgtgtactcatcagtcatcaaacgatgaggcacagcattaatgccttaccataaactttaaaaatagagcatatttttcaaagtataagtgacctcagatcaaaatttctcccattttcaaaataaaggatcaactgcatcacctaccaaaatcaagacaatcagccactgaatataatattttaaatagcatattgacaaaaagtagaacaaagtaaaaaaaataaaggaaaagggaggagtgaaatgatttacaatacggagaacgaatgctattgtcaaccacatccatagtttatatcaggtgttgcagcaacagctgaaaatggaatttcaactctctctttcactaggcatcgagcttccccattttcccacactagaattctccctggtggacactgaatatttggtctctcacccccatttttagttgtagatctctcctcattttctactctgtgacgccagccttgcacactgaaacgaacgcccaacttaggcccaaaaccagacaaacttaatattgataccacaccaactaccgtgagcattgttttggctgcagaaagagaagggggccaagaaggactttagagcaagttgtcaagagggatctcatggtaaataatatctctgaaacttaagtctttaaccaagttcaatgtcactgtatgatctatatggctttattgatgttgttgtcgtaaatttgaaagcctgaccaaatcccaactactttagatagctttagcaagtttcactagttcaataagaggtattaagtctcaatattgagatatgatgagaaaatttgagtaattttcacttactgtagcatcaaatcatttgatgatccatgattgaaaatagttgacttttcaagtagttgtcatattcaaactcatttaatgatgtcataatgcatgattagacgatagcataaaaaaaatttacagtatcaaaagaaaaaatctgaaaccatagccaaataacaccagtaccacatacccgtaaagcagatttgcgtaaggaagacgagcaaatgtaagctttaacaagcttgtggattatcatatccaaaggtatcctcatatcatcatgatgattcaccagccatggatgacctatgcataaaatcaggctataagcaacagaattaatgagataaaaagtaagaatattgataccatatacaccaccatgggaaatgggaagacatacttagtgcctg

SEQ ID NO: 2870 - DNA, 1258 bp, Glycine max
  misc_feature (906)..(906): n is a, c, g, or t
cagccttgttatgcctgcagattgtttgtctcctattttttcaaaataaaaaaaaaaaaaactcaactcatacattccttcttctcccttatactttttcatcttcctttgtttgcaaagaacaatcaaggattttgaaaaagtagtgttgacaattagtgagtgttttgtgttcttatctctgctacgtgttctgattcctgataagataaccatggctgaatcatttatcttcagcattgtggagtcactcattgaaaagcttgcttctcgggctttccaagaagcttctgaggcgctggacgtatacgatcatctacgagagtttgaaaaaactctctcattagtcaaggcagtgctgctagatgctgagcaaaagcaggagcataaccatgagcttcggcaatggctgaggcagctcaaaagtgtcttctatgatgccgaagatgtgttggatgaatttgagtgccaaacactgcgaaagcaagtgctcaaagttcatggtaacatcaaagacgaggtaagccacttcttctcaagttctaatccacttgtttttcgttccaagatggctcaacaaatcaaagatgtcagcaagaggctagacaaggttgcagctgataggcataagtttggtctccgaataattgatgttgacacacgagttgttcataggagagacacgagtcgcatgacacactcccgtgtgagtgactcagatgtgatcggaagggaaaatgataaagaaaatatcatagagcttttgatgcagcagaatcccaatgatgatgacaaaagtctctctgttatccccattgtgggaattggaggcttgggaaaaactacgcttgcaaagtttgtgtttaatgataagaggatagataagtgtttcacattaaagatgtngggtgttgtgtttctgatgactttgacattaaccaactcattatcaaaatcatcaattctgcgaatgttgctgatgctcctctcccccacaaaattttaacctggtcgatcctgaagcattacaaaatcgactgagaaacatacttgcccgtcaaaaattcttacttggcttggatgaccgatgaagggatgacccgggttaaaggggttgggttggggggattgattccaggaggggtgggttgggggggggctctttgagggtcccggggggcccggggggggggttggcgtggccggccggtggcgggcggggcgggcgggggctcccccctgttctctctgcttctgc

SEQ ID NO: 2871 - DNA, 431 bp, Glycine max
ctttccttgctggtttggctgcatcaggtgtactaacgtctgctttgaggttaattacaaaagcagcatttgagaaaactaagaacggtcttcgcaaaggagccagtaagttcagctctccagagcttaagacatttgataattcagagtttagccgcattcatgtttaacatagaaaattgaaaaaaaaaatatttagcttatgcaattgtttaactagcctttatttctattttttcaatgtgtcagaaacaagttttcaaattgatttttaactcttttcatacaactcatgaagatatgaggtttattgaagattgtggaattaatatgcttttaataagatattgacactagctacagaccctatgtgaggtgagaatcctgtggtttatgttgtagacttcacctagtagaataagactttgtta

SEQ ID NO: 2872 - DNA, 615 bp, Glycine max
ggcagggtagaatgacaagtgatcagtacctaatttatttgtatgagtcatgtgcaacaatctttattgtataaagttaaatgacatcaaacaagaaataaacaatcatcacaatttttttatgcattggaagaaattgatattgctacttagagggagaatgttttctttcaacaaaaataataacaaagtcttattctactaggtgaagtctacaacataaaccacaggattctcacctcacatagagtctgtagctagtgtcaatatcttattaaaagcatattaattccacaatcttcaataaacctcatatcttcatgagttgtatgaaaagagttaaaaatcaatttgaaaacttgtttctgacacattgaaaaaatagaaataaaggctagttaaacaattgcataagctaaatattttttttttcaattttctatgttaaacatgaatgcggctaaactctgaattatcaaatgtcttaagctctggagagctgaacttactggctcctttgcgaagaccgttcttagttttctcaaatgctgcttttgtaattaacctcaaagcagacgttagtacacctgatgcagccaaaccagcaaggaaaga

SEQ ID NO: 2873 - DNA, 724 bp, Glycine max
tctagagtcgacctgcagatagttagtgaaaacataaggcttttgataaggaagttttctaataggttccttgatagggaagcaagtcttccatactgtactcaataaaagaatatttaccataatgcttagtcctaatgcaaactatggcatacccacattaaaattttgggcacagtgaagattagtaaaaagtttataaatactgcaacttgaagcaaactaatctaacttgcaaataataaatgaggttagcaaatgatgtagctaaatcttaacgtgtagaatatactgtagaatcaacaaaaagtgacagaaaattaatgctttagtctgtttgtttagctgtttcaccctccatttcctacattccgagaaattgaatgtgactaaaaaaaaattgatatattcacgttgaacagagaatggttttgcaaagacacccttagtgaggcattgccacattgagaagtgaaggactctttctagcagacctaagtgtgtgaacttagcaacatacaaaacttagttgtaataacatggcttctctgctacatgactcctaatgatatcacctaaattgcgattaataatctcactcagacaatcaacttaggtcaaaagcctttttttttccggtgaatggaaaaaagaatcgcaagtgtgtcatacaaagataggggtctcaattttgctcctccagagatatcattgtcctgcaaga

SEQ ID NO: 2874 - DNA, 719 bp, Glycine max
tcttgcaggacaatgatatatgtggaggaacccctatctttgtatgacacacttgcgattcttttttccattcacctaaaaaaaaatggcttttgacctaagttgattgtctgagtgagattattaatcgcaatttaggtgatatcattaggagtcacgtagcagagaagccatgttattacaactaagttttgtatgttgctaagttcacacacttaggtctgctagaaagagtccttcacttctcaatgtggcaatgcctcactaagggtgtctttgcaaaaccattctctgttcaacgtgaatatatcaatttttttttagtcacattcaatttctcggaatgtaggaaatggagggtgaaacagctaaacaaacagactaaagcattaattttctgtcactgtttgttgattctacagtatattctacacgttaagatttagctacatcatttgctgaccacatttattatttgcaagttagatgagtttgcttcaagttgcagtatttatgaactttttactaatcttcactgcacaaaattttgatgtggatatgccatagtttgcattaggactaagcattatggtaaatattcttttattgagtacagtatggaagacttgcttccctatcaaggaagctattagaaaacttccttatcaaaagccttagttttcactaactatctgcaggcagtgcaaggcttggcggta

SEQ ID NO: 2875 - DNA, 679 bp, Glycine max
ataatttgatcatcatattcctaaacttttatgcttaagcagagacaagctgctcaatgtgtgggtcgtgtaatccgttcaaaggctgattatggaatgatgatttttgcagacaaaaggttagtatccttgagtccttttgcttccatgaacatgttgaacatttgggaaaatgtgagggttgcttatagtattctacgctgacgttaatttgatgaagccaacttgctagtttctagttttgattcaaaaagcacaatgcactcttctctttgtaactttatggaatttgtcctgaaatggattggaagttattggttgtctctaataatgaatgacaaaccaaaagaaacttgacaatcttcagaatccagtttgtcaagcaaagaaagaaatatgtttgttcaggtccatgacatgtttagtttcaaaaaccaatgtaactaacagatataatcagcaaaaattggtaaatgtctctgtaaatatcaataattacagtcacaaattctatacattatataggaaataaccaatttaaacttatgaaagtctgcatgaataaatggcctattttacctatgatgattgctccatttatggttttggcttctacttttctctatgacagtgttctgacagtaaatagtaatacattgttggttataacttctgcact

SEQ ID NO: 2876 - DNA, 758 bp, Glycine max
ctagagtcgacctgcagaaacttcttgccttatagatcgttgcaactcaagctgcatatccatacaagcctccagcattctctgcatgttattcatcctttgctgtaatcgagccatgtcaattctcaagtcgttaataatctccaaatcctgccaaaaagacaaatcagagaattatttaaatgacaacacatttataaaaaaatagttatacccagcaaatttaaacttttttgttcctataaatcattgcatgataaatcatcaagcaaaacaaattttataacttacattatctaataaaatacatttacaggaccaatatgcataaaaatcattttcactttattagagagcatatattgaacatagcacaacgcaattttacgcacaattactagatgctgattatttatgtcattctgtgaccagttgtcacgatggtggtgctggtcccaaataggcagaggaggcggtataggtaaagagggcaggttaagtggactattaacagtaccctcctcctgaccaacaatttgatccctactctgctgctcaaggtcctgctctactgaggcagaagaaggggttgtttcttgcaactcccagtcaatgttagcatgaccttgcctttcaacatatgactgtatcaactgatcaagactctcacggaaactgctgccaaggaggttagagacacttctcctgcaagatgaatagagacttattctagattacaattttcatgttagaaagat

SEQ ID NO: 2877 - DNA, 705 bp, Glycine max
atcacaaaaaccctaattggaggagctctctattctacggcagctgaatgacgaaggatttatttatatgtgccacgacggtattactttgggcctttttgttttactttaggtttttcttcgttttgggccgcaggcccaataatataacacgaaaaaaaaagaaaaaataagagcggtgaagttattttcccgccattaagtggaaataaaaaagagtaatcccaatcgaattgtactcgtaaggcataagcatcgaaaatggaagcgaaggaaggaacaccaaaattcccagggtttcctttcgaaccctattcgattcagattgatttcatgaacaggcttgtatgaatctctcaatcaagctggcgtgtctatgttggaaagcccaactggtgagaggtataattaactactgattcttctattttcgcggtgacatagaaatcaaggtttgtttattcgattcagttagatgagtgtgtgattggttattatgtatatggaacttcacatcatactttaactcaaaatgttaatgtttagatttatacgtctcttatttatatgatgttcaattttttcaattttattttattcgatgatgtaaaactttaactcatacttatactccaataacatgaggtacataggttgttgcatcagtttttcaaactcaaaaaaacaagctgtcattagtccctt

SEQ ID NO: 2878 - DNA, 685 bp, Glycine max
tttacgccagcttgcatgcctgcagttgtttgatagaaaataatgttaaagtggactttttttatcattcagaattaactaaagtgggattattaacttattattagtttgtgacagtttttagtagtaaagatggaagaattgggaatagggaaccatttgtagggggaaattttcagattcgcagtattggtcatgtttactgtgcagaaatggggtggatggaatttcacctaacttttagtagataagaattattcctttgcatggtgtgtttcagcactttcgtcactgcctaccacttgctgaagtgcgtgatgttttctctctgtattgctttgctcaataaaggatagtaatttataggggattttgtaaccggtttagaaatttgaactgttctaaaaaactaacgagtcacacactaagcatagcaatactttcaatatgaaatgattaatttcatttttagtcgattcaatcttatataaaattgatcattttgaagaaataaaaatcgagtaatttttcattgatgatgtttttttattcttgttattcttgtaatgacttcattgaaattttgacgagcactttgttttgtttttttagtattaattgtttatttcgtattgaataagggaatttgggagggttggaatttgacaatttggttgtgttttga

SEQ ID NO: 2879 - DNA, 657 bp, Glycine max
atgtcgacgtagtaattaacagtgtcaaaagacattgcaagtggttggaaaggtagaatcattccttttttgggggtaactccagtagctgaatcatttgccgagtcaacttttcttaatccactggtagcttggctacccattcgctgcattgctacttctcctgaaatgattcacgtattacatcaataagaacatatttttagccaaaccatcaatggttattaatgttgtgttgtatgctttaacacttacttgaattatttccatcagcagtagataatgatcgaagcattgattctctgttggatgggggccttactagtctgggttcttcgttggcatctcctccagcctccatttcactcgcatcttcctcagaaataattgcttgtttctttccaagagctaatgcaccaaacaagaatagataaaagctttagtaagatagaaaatgaaagtaagtcacttgaaagattgatcaagatgtgagctcttacggttaaggtacataagcgcaagggtgaagagaacattgtacagaactgtgaaaccaagaagagcagcagctccaatccagtaccagtcttttttagcataaacatcaaagttccttagtattgatagacccagtgtggtagttttatcagaagaagt

SEQ ID NO: 2880 - DNA, 1344 bp, Glycine max
aagcatccatcatcctatctgatgaatatactttgaaactcgcccccaacttaggaatgcttgatgttaactgctttgatcctttcaaaacagaagcatcaacaagtgacttcttaaaaaaaaaggatgaaaatagcatgaacagatctagtcttcaaacaacagaacctggaggccaagttgcaactacccattctcaaagtattgtatctcaagtccatcctcaggaacaaagcaatcaccagcagcaaagttttttcaacatttctggacaaactcaagatcttatgcagaaaggaagggggtcagatcttggtgagcaaaaaaatgccatgaggaatggaaccaatgagataagttctgccccaataaaatttaagagcaaggaacaagaaaaagagaaaaaggatgattttgactgggatagtttaagaattgaagcacaggctaaggctgggaaaagagaaaagacagataacaccatggattctttggactgggatgctgtgagatgtgcagatgtcagtgaaatcgctgagaccatcaaagaaaggggcatgaacaacaggcttgcagatcgtattaaggtacaatcaaattccatgaaatatttcttttaactttctggagacagacagcctatgaatgcaacttatattttacatgatacactgcagtaacagtttacgatgtgtatgtggaaacttttatatttttgagcgagtactgaatcaattaaaaataaccgttactttaaaaaaaaaaaaacattctttcatcttagccttattttagtccttatggataggactaaaaaaaattaaaaacattatgcgtaaagatccaaaattgatatctttaagtatagaattaaaaagaaaagttttggtaactatacaaattaaataagttgagtaaaccttaagaatattttaataaacttatcatatgcaattccttgaagtcctttaagtgcgatgcatattttctcttttgggtaagaaaagaaaaatagatgagtgagagtctagtggaagggattattaagcttccacttgaagaaccaagatccaaatctccattagaagagacactcttgtttaagaacaagattacatcccaagaaagataggtggaaagaaaagtacccctttggggggaagagaccattggtgcaagaatccagatttggcagtggtggggtccatactccatagcttccacacacttagtccagtgatgccatccatcacaattcataattcataacatttcttcttctcatctctttctctctgacacacacagactcaaaccacaaccccaacctttctaattattcca

SEQ ID NO: 2881 - DNA, 647 bp, Glycine max
agcaatacttgacgtggaaattttgacttgaactgcaacatttcgtagttgagtgttccttccttcagactacacaaatgaaaattgactcttccatcaactttctcacaataatatcattgctcaaaatagagaataagggagttcaggtatgtaagagccagtttctggaacaatagccagtgtaaatggctaggaataaaggattatcaattttttttttttaactgcaaagataatatatatatatatatatatatattaatcaaataatagtaccaggggtactacatgataagaaggagataatgtctccaggaacatgagtccaaaaatacagaacacaaatgccctacaagaaacccccataacccttaacccagcagaccacaaactaagtaaaggccatataggcatggctgaggaccattgatgaaaaggggcattgaagtccttttcccaccccctcagccaggaccaagtgaggaagttagtgttatccaccaacttagaaatgtggaaaggctgattatgaaagatcacatcatttctgagcttccatatggaccttgtagctgctatccaccaaattctccttcttgtattcgaagccttcgaacctgctatggaagagtgctgaaggaaat

SEQ ID NO: 2882 - DNA, 609 bp, Glycine max
aatttgaattggatcctttcggcaacatcctccgtgatcctggtgctaggaatggttagtgtggttagcgatattgatggttttgtaaataattaaatatgctacgtatcactgaaaatatgagttatctgtatttggtttttattgtagctcataaatttaaacccaagattaagccacagcctagagtaggcaatacgcttgcaattgcttctgcttcatctaatgttatgatggaaaagtctgttgagttgcctacttcttgcacaaacaactttcaatcttttcagtcatgtggtgatggcagtggtgggctaaaccaatcaaccagttttcctttgccaacatcagagattcttaggaaaactgatttacccaataagtttgatgataccagctcaagtattccattctctgaagaataagagcttggcagcaacaattccttcccaactggattccaatgctatgtattcagaggatgcagttcataatggaactagagattggccttctagctttggatcatccggagaggtaattgaaaaattaatggttgtttttctatttcattaatttgctaagcattgatggattttgtactttaca

SEQ ID NO: 2883 - DNA, 618 bp, Glycine max
agtggagcagatttcctgggtcctctgctcccggcagttgctgcaatttgttccgattttgatcctactttaaatgtggagccatcacttttaaaactatttcgcaacctatggttctatgttgctctttttggcctagcgccaccgatacagaagactccagtaaatacaaagtcagtttccagtacactgaacagtgtgggaagcatgggtgcaatttccctccaagctgtaaatggaccatatatgtggaatgtggagtggtcttctgctattcaaagaatttctcaggggactcctccactagtaagttgattgtagaagatcttcaaattttgggtaaaaaattccattagtgttttttagttgtgcatgtttatagttttatataataacattatgaaatctgttgctttgccttgcagtatatttatgcttcatcataatctagagggagtgcagtactatttagtttttttttccctgtgatgttattatgaagtcaatagctttctgtatcacccccaaaatttaatagtttactgtgcactagactgaagctttacttttatatcatcctgtttctgcccaggttgttagctcagtgaaatggctcga

SEQ ID NO: 2884 - DNA, 675 bp, Glycine max
ttgctgcaatttgttccgattttgatcctactttaaatgtggagccatcacttttaaaactatttcgcaacctatggttctatgttgctctttttggcctagcgccaccggtacagaagactccagtaactacaaagtcagtttcaagtacactgaacagtgtgggaagcatgggtgcaatttcccttcaagctgtaaatggaccatatatgtggaatgtggactggtcttctgctgttcaacgaatttctcaggggactcctccactagtaagttgatcatagaagatcttcaaattttgggtaaacaattccattggagttttttgctgtgcatgtttatagttttatataataacattgtgaaatttgttgctttgccttgttattgtcttatagtatatttatgcttcatcgtgcagtactatttagttttttttttccgtgctttcctaggttattatgaattcaatagctttctctatcacccccaaaattcaatagtttaccgtgcactatactgaagctttacttttatatcttcctgtttttgcccaggttgttagctcagtgaaatggctcgaggatgagttagaactaaatgctttgcacaacccaggcagtcgtcaaggcagtggcaatgaaaaggctgcacttgcacaaagagctgctcttt

SEQ ID NO: 2885 - DNA, 670 bp, Glycine max
  misc_feature (24)..(24): n is a, c, g, or t
tcggtacccggggtatcctcttangatcgacctgcagcaactcgagttagcttcccttgatactcaaccccgtaaggtgtaccttcaagtccaaggatgcgagtacaagcactaacaaaatgtcttgcataatcataggtgtgaaaactgcacaagaaaatttacaccaaaccaaatcaaaacaagaatgatagaaaaatgaaaatgattaaaccaaagaagacaatatataaacggagaaaattgcaaggtaagaacctaaaagaaatatattgtcaaactaaataggaaatgtttgcagaatcaacttcaattatagcagcataccttcaccatttgcttgattaatacataggtaataatactctcaacagttcaaatattattaaaattttatcatgaaatattatcactttaacttagtggcatgtattcatttgtattctgtttcttgtgttatgcttttattggattgtgtaagactctcatttccattcaaactcataggcatggtcatctatattcactaccaggactatcaactcttttcaatccaatgatttgcagtcactttgaccagttgtttttccaccatccctcaaggaaactgataacatttagacaatagtcaatatttttatccacacaaattgggtttacagtcaggtga

SEQ ID NO: 2886 - DNA, 708 bp, Glycine max
agaaaaaggtgagatctatagtcatgagcctgtctcatactcttgaaaagctgaagacagaaacagcagatgcaaaaaaggaaaatgaggatgtaagccaagaggttgcagccagcaaggaagagattcaaaaagttgagtttgagatagacatgacagaggaaagattgcaaggcatcatgcaagagctggaagtagccaaagcatcagaagctctagccttagagaagctgaaaactcttactgagaccaccatgagagaaagagctttaacaacacagcatagttccatgatcactatctcaaaatttgagtatgagtatctaacaaatcatgcagcctcagcacaagaaattgctgataaaaaagtagcagcggctgaggcatggattgaagctctcaaggccagcgagaaggaaatactgatggaaacaaaaatagctcaaagagaactcaaagaaacaaaactggagcaagaacaggaggtttacacgaaagagaagatgctttcaagaagagtagttagtagtagtgaggagtttgacaattggccaagaaaacgcgagaagagttcatccaagaacttccagagagccatgtctagaaagagcatcaaacttaatggcactataactcctgcaaggggagcaaagtttcagaagactgcttcacctgcaggtcgactctagaggaagaccgggtttagag

SEQ ID NO: 2887 - DNA, 707 bp, Glycine max
acccccgtttttggctctagagtcgacctgcagaagagcataagtccaattcaatttgttggattttgcatagatgaatttcagaaaatcccataatgggtaataacaaactgagttcgtctatcaacggaattgacgagcaatgctaagatccgtttgtcctccgtattccacatcgcttccttcgacccatccgtacatgtttctattagatgatcttccctacccatcccaccgagactaacttcaaccaaatacttcccttccacataattctcaccgtccccatcaagtttgatatcagtgagtttagaggaagtggtaacgatatcagtagtaggccccttggcacctctgtcgctgttagacatccttatgcaacaacgaaacacactctttgacccagacaacaccccgggtcacaccgtaactccttggaacactcccaaaacaccatgaactgccacaaaattaactgagctttactcacacataaaaaatgacctactctgtcccaaaaaacgcaagccatcagctgcgaaaaactgacgtccaaggtcgcacacgaaaaagcccataaaaatggaattttctaatccccgagttgcaccatgttttggctaccgaaatttttttcaaccttccagcagtcttggtcagcctccgttgtggctgctggtaagggtttttttttttttttttttccg

SEQ ID NO: 2888 - DNA, 666 bp, Glycine max
ctgctagagtcgacctgcagtaatgtttttaaaaatttaccatacataaatacacaatctgtcgcaattaatatccctaaacacaaatgaaaattgaacatataaagcatacccttcatatgtactctctggatgaaaattgaacacaaatatcagatctcctcgctcaaagactatataacctacaaaagaaaaaactattaggcagttaattataaaatagcaatcagttacgcatgaaattaactcaaagtctcagagtagacaatgacttgttaacggttttatcttctctagtcactcatgtttgagaaataccttcttcacattatgttcacaacacctattgtatgttttcttgaaacttgaaagcagttctattttatcaatcttgatacaagataaactcttaattgaatagcaagtggcaaaaaccataaaattgtgaataagtatagtacaatcatttgggagcatattcaccttgtcatcgtcatctgcactgctcacaatctgttttgttgatgcaaggaatgagaagttatcatcaagcaagttcattgctctgtcaaatgcattcatgaactgcacaagttccaaaaacaaaattataacatatatctcagacaagcaacacactgctagagcaaaagataataaagagtt

SEQ ID NO: 2889 - DNA, 658 bp, Glycine max
cagaacctgtcccctatatgattctagttctaggaaaaatagaaagaaataccttaaaactcgaaggatcctctgaaatggcagcaatcattgcctcctctccttcaaagacaagtgcaggacctgttgaataatccttgtattaataaattgtgatattggaaaatataatttgggcaaagaaactttttttagatattcaagaaaacagagcaagaaagttcaccagagaagtacagcccttcttttccagtaattttagcaacggaaccctgtggtgcaaggtttccatataatatttgaatgtgagccgtcttcttgatgggattttctactggccttattatttcctgaatcatgcatcagtgcatcacagaaaaattataattttgtcaagagatcaatttattataatatgctaaatttgaacagaaacaacatcatactcatacctgcccgttggacagaggagggacaagttctgcattttcagctagggtttttccagtgactggagaagaggtatatgtatgttagagataagtatatcttgcggaaattaaccttctgtttttaacaatctacacacaaaggcatgtaaacataccagtcatacagtcaccatctaaaaagccttgctcaagaaggtagcggataa

SEQ ID NO: 2890 - DNA, 705 bp, Glycine max
ttgcatgcctgcagctccaaggactggtccaaggccattcgagtcctcgattcgctcgtttctcagtctggtgcaatccaagacatctggttcggacctccattcctctccgattctgtttctttttcatcacgaatcacgattaagtttaattctcttccgtgaatgctaatgtgatgttcaatgcttgctttcagtaacagggccttctgttacagccgattggagctgcacaagcacgtaattaaggattgcaacaaagcgcttcagcttgacccctcgcgacttcaagcctacattctcaaaggtctcttgcttgttaaattcatccaattcttgatgaatctttttaactttttgtaccctgggaagtgcgatttaagttcttttaagaataacagaggtggttactggttgatgaataaaaagttaagaaccgtgttggaacttggaatttatattttgatggatttatcatttattcgttctgtttatggattattatcatcacgcgacagttttgtttaaattttaccatagaaagagtcatagaggcaaatgccttgtcttttgaacttagcactggttgattctgtcatctaggtcacgccctttctgcattgggaaggaaaacagatgctctgttagtatgggagcaaggttatgaacacgcccagcatcagtctgcaggcatgcaagctggcg

SEQ ID NO: 2891 - DNA, 738 bp, Glycine max
ctctagagtcgaccctgcagttattatagtgacagaagaggaaaagtcaccacgactcatatgtaaaagaaaagatagaaaatgatgaaaggacaagggaaaaacactacactaattaagtcaatttcattacatcattagaaaaggacatgaggggggaaaagaaaatgttgtgaggcaatttacatgggtatttgaggtgggaacataatctttagtacataccaaatttctgtgtatacattatagcatgtccctttttttttttttctattctcaagttgaattggacagtaatagattaatgttgtaggatgccaagcacacaaacattgagaatatattgatcttggctggagatcatctataccgaatggattacatggaccttgtgcagttaaacatgttaattttttgtatcagagctgtgtaattatcaagacaattaaggcaattatattaggctttaagttcttctcactacttgttattgaaatttattactaattgtattctatgaatatttttcatcattcacaaaatcaaggcaattaattaacacaaaaaaaactagttctatgtttcttttctcttacccttcttatgttcatacaccaagtcttttgaataatttttgccaaaggttccaaagtttttagacacaccgagttcatacatggagtgtttcttaattttattttcacaatttttgctgattatctatcttttataattaat

SEQ ID NO: 2892 - DNA, 690 bp, Glycine max
gccaagcttgcatgcctgcagctgcgcctgcaacgccgccgccgttgcttcctgcgccttcgccctcgcctgccaaagctgcgcctcaacgctaagctgcgtcgcgcgtgcctccaactccgcgttatggcgcgtggctttctccaactccgcttccttctccctcagcctccgcaacaccgattcctccgctgcccttagcagcgtccgataatgtctctgtctcttctccgctaatgcccgccgcaattgctcctcctgatccacccacaattaattcatcatcattattcaaattaccaatattaataataataaatttattcaaacattggttcttcatgttataaaaaaaaaaaaaaaaactagtccttttctattgcatacggattcaaagggggaaaataaagtacctgggcttgaaggaattggtctatttcgtcacgctgttgtttgatttgagaagacaagccttcggatagtagagatacgaaaggagaggagtgacacccatgatgttgatgttgatgttgtaattgttgtctttgttgttgttggtcaccaaaggataagcgtaacccggtggagactacattttgattatgaagttgagtgagttctatgagctgtgcctgtggagattgggattgcaaagagaatgaattgataacgtttggcgcaatcccggta

SEQ ID NO: 2893 - DNA, 679 bp, Glycine max
agaaccactaatgcataatgtataattatgtataccaatgtttttttattccctcctgtctagacttgaacccactttggttttgtagcaatgggaccattaattattagcattagatctatatgaggcatattttaggttgatttaacagtgtcttaaggatcattaagcatttccagcaaatataaatgtcagtaccatagattgtcgaagttgcaccctactgatatttgcagaggttaattttctggttcgtcaaaggtttaaacatgcattggcaaaaacccttcctgcatgaacgttacgtcatcatttttcatttaggtgagcaaatgtaccatgatattataaaaaactagtgaagactgttttgttctaaaatgaagaaaaaattgaactcactccgttggtggttggtattgacaattgattacgcaacaaccttcttgacgatcttattacggagaggcagcagttaagaaatttgaaattggcatacaagcctagacgccgttcacactacaaaaaaaacctggaatgttgcagccttcatagagaagactatgagctaacataccattagtcataagtcaatatgctctatattataaacagcagaattacactacaatcatatttgtttgccgtttcatgataatctgtctaagatccataatat

SEQ ID NO: 2894 - DNA, 774 bp, Glycine max
ggaaaaactttgagacaaaaactaaaacacttatgaaattagacaaaagaatgcaatattaacagaatgctacaacatttcaagaggacccaaacgtagattataaggagaataatgaatcctcctatttaaaacagaaagaaactcctatcctatctaaaacagaaagaacccaatgagccaaagtggctcaaaaatgcaataaagtattccaatattttcgcatacaaatgattgattctttgaagcagccattaaccaagaaccatcatagagacaatcctatcctatgacgactgtaaagggaaagaggtgctcttgaaaatacacgcatttcattacaaccaaatgcactactagataactacatatactgcacaatgcgataaaatttaacactctttgttcctttcaaaacctttaaggcatgtaaagagaaaagctccaacctatgattggagaaactcattgttggctaggaaccccaaaacaattcagcaggtgtaccacaaaagtggcctacctatagtattatcagcttattttagcatgtttatacctagatgtctctatttctttatgaacttcaatagttcaactaccatttgatgaatgtgtccatgatcatatcataacttatatcacgcaaacttcagaggttattatcttttttgtttctcattgtattctacaccaatgaggtaaaacaagcgagccccaaacgcatgatgaaacataatcatccattgttgctacttgtcagatcacctcttg

SEQ ID NO: 2895 - DNA, 811 bp, Glycine max
ggctaaacttttatgattctggtcatcgctttgagcattcacaacttttattggtgcttttgcgttcccttccatttgcacctaggccactacagagcagagcactgcagttgttgtgtgtgaaatttcttctggttctttttgagtgctattgaccaatgtacaacagattgattttgacatgcttcttattttattagagtactgaatatctgcaacagactaacagtgtgtttgggctggagttttaaatgcacgtatcacataattttcatgttacaatgttatgttgatgcagaagctaaaaatcgtcgcatctgaaaatacacgtcaatttggctttagaatcgtttccaaacacacactaatagtttggattctataaatcttatttgttggatttgaatattcatttatgatggtgttttctttcttttcaacaaattataaatgtaaatgtgattttatagtacaaatccatagttactacactgccaggatatttgaaattcaatgtgactttcaatatgttggaaataaggtgttttgttagatgaattgatatggatttttcttttcatgcttaatcatggattctaattttaacttagttgcttcaaagggagctgcatttataaaaatgaaagcaattttgtattttttgtttaatcgtgtattgtgtactattatcatcctgtttttcaaacggaggaacaaaagaattgagttgcttaatctgtaagtttctttaaaccaaagaacaggtggatttctcatctttctgcaggtcgactctagacgaagaacgggt

SEQ ID NO: 2896 - DNA, 726 bp, Glycine max
cccggggtgcctgtagagtcgacctgcagaaaatgttcccttggctaaaaggatagacataggaactttgaggatggtggtgcctggccttattgatgaaagacaatcagctttcataaaggatagacatatccttcatggaactttgattctcaatgaggctgttgaggaagctaaaaagtgtaagaagccagctttggtatttaaggtggacttcgagaaggcgtatgattcggtttcatggtctttcctggattacatgttggataggatgggtttcaaccttacatggagaaaatggatcaatgcttgtttgcaatctgccactatatcaatcctagtaaatggcagcccttcaaaggaatttgttcccactagaggtttgagacaaggggatcctttagcccccttgctctttaacatagtggctgaaggcttgactggaatgatgcgggtagcaacagccaagaacctgtatagaagtttcaaggtagggaagcaaaatgagcctgtgaatattctgcaatatgcagatgacacagtatttgtggggcatgcttcatgggataatgtcattgttttgaagactatgctgaggggttttgaattggcatctggattgaagattaattttgcaaaaagccaatttgggatttttggagctgaggctaactggattcatgaagcagcacaatttctgaactgcaggcatgcaagctggcgaaa

SEQ ID NO: 2897 - DNA, 678 bp, Glycine max
ctagcaaagggaaacaaaactctctaaaaaaaacttttaaagagttccattcctatttactttcagtgtaacaaaatttacatagttttctaattaaaaatcatgacaaatatatttttaagataattttgataaaaatttattatattcactatacgtcacaatgtgattaatgttaatgtgaaaaaagaaatatactgtcaatgtataaatgatttactctaattttaaatatttcatggaaatctcacaggggtttctgcatttacaattaacaacttcagccccttcaatactgatgactaaatattctgttaatctaaacttctaagtccatgtatactaaaaaattgtacacaaaatttgcaaattaaaatgatgctgctgctacaaacagctgaatggatgaagatgaagactgaataaaagtactttggctggcagtatgaccaaaaaacctcataatcaaggtccatacttatttatcgaaagttcaaaacttactgttttacagatggcatagcttttgcagaaacctctgtgcaagggagataggaacaagtttttttcatctcagaagagaaactaaacttcatgttcatgaaaatacatcacatattcgaatggcagacctcaggaacttccttctcaaaatctaagcaaagccaaccgtatgca

SEQ ID NO: 2898 - DNA, 710 bp, Glycine max
aataactcatcctttttgtctatatttgaacccaaatcaatgaaaatataaattattgatacaacatatgtaagaatttgttggagcagcttgattttctcaacagcaaagtcggacaaactttcatcagcagaaagggcaccacttatggttttaagttggaccacggcccctatgacaaattgaacacaaaaaaaaacagttccgttattttcccatcatgaaggactcatattaggaaactacaaaaggcaactacttaaagcatcaaaggtaaatttccaaaacataagcttataattcatatgaagagtggaaagtaagatttggaaataaaatcctgtcaaaattcaggaattgatttcatattttgttcataaacaaaagccagctagaacaaaatgcatagcagtatatcctttaaagtgagactgagaaacaaaaataagcaacaatgagcatttgttaagctataacagcgaaacgcataggtctaaagtctttggcaacattagtgaatactaaaggattataaagaaacaatatgcagaccataatactaaaggatagcgtctttaatgatttatgggaactctaaattccaactaaagcctctttctttgcttggagattaattcggtacagattgcctacaaataccgatttacgtcagggagaaatgtggaaatcaatgacagtatgtgtccatt

SEQ ID NO: 2899 - DNA, 828 bp, Glycine max
aaaacctttggtcttggggtgacagatttttttctgaatagcagctattttcgtgggattggatagctcgagtaacgtatctacttgggtcttgtatacaagttttgggatcttgggattttgtattttacttgctctcattttacccttgaacttacacttacataaatgaaaaaatatagatgtacactttcggagaaagataaaagtgaaaaagtatagattttataggtaatataatttaagatatagagatagaaagaaaggtaagatatttgttaggtgtataaaaaatattgatgtccatatatatatcatcatcactctatataaatatatctttctttgaccgaataaaaaaatcgtatatctatagctcagattgaggtaccaatcatgtacaataaatacaagacatttttaccataagaattcaagaagtattttaaccggtacccgtacagcaaatcccagccctaacaaagtttatttgctacaaacattgtttcaagcatttcaaaggacaaacatacctatatatcatagaaaataaaatatcccctttcgaatttagcaatgaatcggttattattgaaaagaagcaacaagttaaacattttctttaatttcttttatatattttaattaattaattaattaaactttagtgcaatccgtaggagcaaaagaaactttcttcccttcgagatcgtacaccacttgaaaatcaaactgtgcaacatttccaaagatggaaattccacttagtgagcttggcaccaccgccaagcaaagcatgttcctatcttgcaacttaatgagaaggtt

SEQ ID NO: 2900 - DNA, 789 bp, Glycine max
cgccaagcttgcatgcctgcagtatttattgaaggctgcatttcccagcacacatccgcctctccccatatagcttgacacatggaattatcaattttcaccttctttgtttcctgaaggcatagtatgtcagcattgtgcttcctcaccatcctcctaattgcactccacttgacccccctctctaatcctcttacattgtatgataggatgttcatgaggtaacactcctattgcccagcttctcggcttccttgctatctctgctttccatgtcacagattcttgcaataatactgtcatgtcctatattagttgacacccccagctcctgagccatttcccattgctgtttagcttgctgaaagtgctctgtaatgtcttccttgttctctgcttgctggttcacttcatagtctgtatgtgtgtcggaatgaggtgcttcatgaccagtggtgggtctgaggtttatcacaggagttatttcacgttgctgctggatccaagcctccgtacctgcctccattagattcgcgcatgtgttggacaagccttttttctttttgcaccatgttccttgtgaatacaccttaagtgttccaggggatttaatttttttatgatatgggctttggctggacaagggtgttagtaaagggggggtgtgactatgaaggtccatattcagtggcccatagtctatttcacaaggttgtgtgaccaggttggggcttttaaaatatgaatctttttcacaaaaggcagaggcctgcaagcatgcaagcttgg

SEQ ID NO: 2901 - DNA, 1575 bp, Glycine max
  misc_feature (611)..(611): n is a, c, g, or t
gctggtcttggggcgacgatactttctgaatagcatttattttcgtgggattggatagctcgagtaacgtatctacttgggtcttgtatacaagttttgggatcttgggattttgtattttacttgctctcattttacccttgaacttacacttacataaatgaaaaaatatagatgtacactttcggagaaagataaaagtgaaaaagtatagattttataggtaatataatttaagatatagagatagaaagaaaggtaagatatttgttaggtgtataaaaaatattgatgtccatatatatatcatcatcactctatataaatatatctttctttgaccgaataaaaaaatcgtatatctatagctcagattgaggtaccaatcatgtacaataaatacaagacatttttaccataagaattcaagaagtattttaaccggtacccgtacagcaaatcccagccctaacaaagtttatttgctacaaacattgtttcaagcatttcaaaggacaaacatacctatatatcatagaaaataaaatatcccctttcgaatttagcaatgaatcggttattattgaaaagaagcaacaagttaaacattntctttaatttcttttatatatttttaattaattaattaattaaactttagtagcaatcccgtaggaggcgaaagaaacattttttcccttctgagacgtacaccacttgaaaatcaaactgtgcaacattttccaaagatggaaattccacttagtgagcttggcaccaccgccaagcaaagcatgttcctatcttgcaacttaatgagaaggttcttaggctgcagatgtccatgatatgcattagaagatttaacaatttgtttcccacttaggatgcaatggtgttgtcttgggagttttagtgtttgcagtaaggttggactgtgaagtcatgtttcttttgcaaatggtaggtaaagtgcgcttaagccaagactctgatggagcttttagtgcaggaagggcaagaggaagtccaaaacagcttgcaccagatatttcttgatggcctaactttgtaagacattggctttctaagtcaatcttcccattatatctcacctttgagctagccaaagtgcattcttcatcaacccatttggcagctagttgtctcttcaaatcaagttctgaattctgagttaggatatcagaatttttgtccctgccatatacttgactttctgaatttatcttcttagatttaatcactttaggacttgaatctattgaagaattgttataaatgccactatctcttattgaagtctcaaaatcaccccctatgttattggtttgagacttaaccttgtgtacagaatcaacatatagagttttctcatgtacatggctttcataacttgaatcatgttgagtgcaacctctttgatatgggtcaatgccatgcttagattttacaagaatatccaaaatctctttttcttctgtaaatccagactgggaatcccttaactttttcccataaggagttctaccttctgcaggcatcaagctggcgaaa

SEQ ID NO: 2902 - DNA, 709 bp, Glycine max
cgaaacccggggtttccgctagagtcgacctgcagaacaatgtacaagtacaactacaccattatgcacttttctgtggcaaaacaaaaattaagagacccctaagtagctaaaacaatacagatgatacgtgaaggcaacaaaagctattaagttcaaatcatattttggtcaacatcaagtgaatgacagtgaatgatctaacacttcttttttgatatttgaaaatcatgctttttgcacattttttttccatcaactattttagcctatgaagaaaagatgacaatgccttcttccaatatattaaacatggaaaaaaaaattaatagacccatcattgaaatgctaaaagaatcattcatcaaatacccttaattataattccatacttcttataaatatagaaaagaattacttaccctggaatggcgcacaaattgcaacccaattcttaacatatttctcaaaaatctgaaaaagacatgaacaaaaatgaacacatgttacagcagcagataaattccaagactcaagtgtataaatcataaattgacaaatatatatgattagattaaatggaaactacaaaatagatcaaaactgatatgagaagcttatgagatgtgttacatcgctttgcaggcacatgaaacatttcaccaaaagaccgcccatagaatgagttataatgtttattttcttccct

SEQ ID NO: 2903 - DNA, 741 bp, Glycine max
ctactgctactgccttttttccccttatctatgtcatttttatcatatgtataattgtgagtcttctggtgggatcttatgatctgtattacaatctgttttaaaatcctttgacttacaatctttgaccccatcccgatcctcaataaaatctggtttttgacaatacaattcatgcatgagttttctgggagtgacaaaagtataccatttgatttttttcttgattatgtaaaaacacaattactaatgtctatcactatatgcaaccttgtatgtaagagtgtataagtagtgtacttagtttagtttactactatagttagttaacagttagctttagttacttttcagttacaactgaatctcaacagtacaagtactgttattgttagaaatctcaatgccttttgtaaattctacaatgagatatacaaatctctttccctctctctctctagagttctaatatggtatcagagctttttgatttactgtagttagttactcgtatacactacttatacactcttacattgtatgatttgaattttatctttaatgcttcatgtgctttgggattcattcaatttggtcccttgctgttttcttctcttacctttctatcactaaacaaattggcttgaaacaaaaattttatgcagtatcacaatctcactacaggattaagctactgagctagtaaatcagttgtttcaagctataagagtattataagga

SEQ ID NO: 2904 - DNA, 747 bp, Glycine max
ttgtcatggaatatgatatccacaccttacttgatttcgctactttcgtaacaacagtgtgggttatatatatgattcgttttaagctcaaggctagctacatggaggagaaggataactttgcaatatactatgtggtaagttccagtgctccacctattgtttcatcctaaggttagaagcctatccccatctatattgtcctttctgtgacattgtattaggtgaagcattttttaatattgttaattctggtggaattggaaatttgaccttcttgagtttgaacgtttcatatagatggtagcaatgtcctatgggatgtctccctgtttgaataagtcatgagttgtgagatttggtagtgtagtgtacattgctgatactgaaaatgatagtgtacattgaaatactgaaaatcatactttctcacgcttgagttgttttctaattttctgttatattgaaatagtcatattattgatatgataccaatgcaatcagccttctgcatgaataataccataaaatctggatctgtagagtgacacgggagaattgtttcccatgacattgtatgaagtggactttctatttttgtgaacaaaaaaacttgaagctcatcctattccgccacactagagtggggtttgggatgttctatacatatggtttactacgatgctcttattttaatagagccgagtgccatcatgtcaaataaaactgctgcaggcatgcaagctg

SEQ ID NO: 2905 - DNA, 728 bp, Glycine max
ttgcatgcctgcagttttgtcatggaatatgatatccacaccttacttgatttcgctactttcgtaacaacgctctgggttatatacatgattcgttttaagctgaaggctagctacatggaggagaaggataactttgcaatatactatgtggtaagttccagtgctccacctgttgtttcatcctaagattagaagcctagccccatctatattgtcctttcaaaggagtgtgacattgtattgggtgaaacattttttaatattgttcattctggtggaattggaaatttgaccttccgagtttgaacatttcatatagtgtctttagatggtagcaatgtcctatgggatgtctcccaatttgagtaagtcattagttgtgagatgtggtagcattgcgatactgaaaatcataatttcacttgagttgttttttgatttttttgttatattgaaatagtcatattatcaatatgataccaatgcaatcagccttctggatgaataataccagaaaatctggatctgtagagtgacatgggagaattgtttcccatgacatgatgccgagatattgtatgaagtggagttcctatttttgtgaacaaaaacttgaaactcatcctatcccccacactagagttgtgtttgggatgttctatgcttatggtttactacgatgctcttattttaatagagccaagtgccatcatgtcaaataaaac

SEQ ID NO: 2906 - DNA, 738 bp, Glycine max
tacttgttggtctcaactcagcttcaccaaccacaccaattggcttacagcttctactagagttataatctgcaatacctatgtgagatcaatgtttttgtcaactccatgcaaactatcatgaatattgaacaacagacaatacattttgtgttagaaggtgtattgtcacaacacaaatagggtatccataatcgttcaagcaatcattaagactagtaaaatttcactaacttcccttgagattaacgaaacctgcaaattacccaatagtcttccctcgatggtttatttcaatggtataaaggaggtgtccatgtctgaatttttttttttctctatagaagatggcctggaaaaattttaataggaggtatctgcaatacgaaaaactaacaatgtgattggtgtaatattcaaaattagaagggttgtttttttgtaagttttctaaatattggaggccaatgtaatttgctccatcaagtggtcctcacaaataataagaaaaaatgaaatagccttaataagaggagacagaataaacaaatataacgatgtacttatatatcaattcctatgtgctaataaaaagaattgtttcattatgagcaatgatggcaaaccaaaatcaaaaccaatgtttaagaaaaaagcagtgcacaaattacacactagaaaataaaagagaaagaaagacaaaaaaatgttccttgcgacctgaagaagatccaacct

SEQ ID NO: 2907 - DNA, 711 bp, Glycine max
gttggatcttcttgtctttctttcgcttttattttctagtgtgtaatttgtgcactgcttttttcttaacattggttttgattttggtttgccatcattgctcataatgaaacaattctttttattagcacataggaattgatatataagtacatcgttatatttgtttattctgtctcctcttattaaggctatttcattttttcttattatatgtgaggaccacttgatggagtaaattacattggcctccaatatttagaaaacttacaaaaaaacaacccttctaattttgaatattacaccaatcacattgttagtttttcgtattgcagatacctcctattaaaatttttccaggccatcttctatagagaaaaaaaaaaattcagacatggacacctcctttataccattgaaataaaccatcgagggaagactattgggtaatttgcaggtttcgttaatctcaagggaagttagtgaaattttactagtcttaatgattgcttgaacgattatggataccctatttgtgttgtgacaatacaccttctaacacaaaatgtattgtctgttgttcaatattcatgatagtttgcatggagttgacaaaaacattgatctcacataggtattgcagattataactctagtagaagctgtaagccaattggtgtggttggtgaagctgagttgagaccaacaagt

SEQ ID NO: 2908 - DNA, 674 bp, Glycine max
atttgacattagatgcaaaaaactctggatattgctctactcataacaagaaataactatggatggaacgtttgtttaacatgttagttcaaacatcaacattgatatccaaattctaaaccaccacttaaggtttaggtgcccaccttcgaaagaaaggttacttagatgttctttatgtactttagtaccgttctccaatcagaattatagtttcacttcggtaacatatgttggtctttaatgtaaatttttaatacacagattaccaaagtaaaactttgaattttaattggagaacaacaccaaaaacatgtaaagaactgcatttaaattttgttcaattggataatccatgcaagtgcacactatgtagatcatagactgatgtatccttcacgaattcataccacttttttccttcattggccagagcagcattttcaatgtagcatacatttataaagctttaaggtgtgtcttatcattggatacaaatgaatgaacttgattactaatctctatccagctgcaacccgggactcttgcatcacacttgttccccatcattcttcgaactccttccacatcataccaatgtctatgggaagcataaatgttagacatgaccccatagtttacattcttctctggttctttgatgaacagctttt

SEQ ID NO: 2909 - DNA, 771 bp, Glycine max
aaccgtagctgtatttagtgcgtcggcaaatgattcaatgtagatccaagttgcaaatgcatacccatggacgaatggccagcggccctcacctggaccaagcaaaccagaactttcgccatcaaactcgaaagtgcaagctggtccaattgattccttatcacttactgctttttccaacgcaagcaccaagcgaggtgcccaaattgtggtaagtgttcttgtaatgacttgaaaccatctatgaagatcactaacactgagagaatgtgcagccaagtattgtatgcagcggcacaaaggagttccatcccaccttatttggccatttaagccaacatctactgtgaaaattttttctgctgttctcaacagtattcccaacaaaccagccatcgagcacatggctctgtttcgagtgcatgcccgtaatatggcaagtagtccccttaccattcgcgtcctgggcgacattgcaacatctgaatcacctacataaggaagccaaggaatcagttcacccgacacaatggccgcccgagagttcagcattacactaggaggattatcaccgtcatcttcaaaactttcaacgccacccattgttgcaagaagcgaatccactattaagaaagacactctctccatttcttcaccattcccgaaaaattctacaccgctcgcaatgttcttcagtttctccataccttcaggtttccccatgatagctgaatcaattaagtgcaataattctgcaggtcgactctagag

SEQ ID NO: 2910 - DNA, 684 bp, Glycine max
taaaattccagtgagataataatgatgagttgaaatattcattgaaaaaaagcccaataaattaattattctttttagcaaataataccttataatttctgcacgcagggcacctgtcagagaagaaagggtcacaacagaaatgagaatttcttataagttgaggtgtatattaattttatttcagagaaataatcccacatttttgccagttttcaaagagagcttttggaaaataaaatattattttctagaaatattgaaataatctttgatcaaacatgcaccaaattgattttaaattttcaacctatttgagaaattggattcattatactctcctatgagtttattcaaattaactcatagaggtttgaaagaggaggaaacaaagtgaatggaacaaaaaaagaccattttcaattgaagccttgatagttgatactataccacactgtattatgcctttttttaaccctttactactcatagcatcaattgcacaaacaaaccatgagctcccctgactgtttctctacagctccacttaccttaactggactactagtaacaatagaaaacaccacctctctgtaaaaagcaaactcaacaaaccaatcaaccaaatttccaaaacccttccattaatatacatcatgaatccatcgcccttcactactatta

SEQ ID NO: 2911 - DNA, 600 bp, Glycine max
tcagggctgctgagtgcttcatccaagacctgtagacaataaatgaaagcaagctaagaaatatgatactccactatatttactggaggtccagttctaacctactacatagtatgattatattacataatcacaatagtctgcagtgttacataattgttgagaattaagagaacttatatgtaactcaatttccaatgtaaaagtagacacatgatagcaacaactaacaagtgaacagtgattaagcggtaaaaaaaaattggtcttttgtcaagtatggttaaaacacagatcctgctttaatgacattatttttataaatttatgcaaggattctttcatatggattcagtattaattgattttattttatcataaacaaaatcacttttagcttaaaattaaatcgcattcaaacaccaatgacatcatgagatattttctatatattctaacatcatcaaagcctgttccaaaagaggaagcatgcaaaaaaaaaatgagcttgaaggacaataacactttctaaattgcagagaacacgtgcatgaggaaaacaatccataatagaacaaccactttggtgtcctttttggt

SEQ ID NO: 2912 - DNA, 706 bp, Glycine max
gaccagatttcgacctctttccttcaatattcccaaaccgcttttccctttggctggccagccaatggttcaccatcctatttctgcttgtaaaaaggtttgcttcaattttaatgttgattgtcgacttgcatacttgtgtgtgtttttgtgtgtaaatacatacagtcttcattagtctaaaattcaaattgaatctcagcttaaaaactgattaaaaggagaggagacctgatatgttacttaaaaggtgtggagtgtttttacttactagtttttgtcttcttcagatacccaatttggctcaaatatttcttcttggattctatgaggagcgagaatttgctctatatgtctcttcaatctcaaatgagctgaaattaccagtaaggtgactagtgcattagtatgcaactttaataagagaaagtatgttaagctctgtaaaatgctggacctgatcatggtgtgttactggtatcaatctagatatttgaaggaggataaaccgcatggttcagcaggcggcctttactactttagagatattatcatggaagactgcccagttagaaacacttcttgtcactgtttttaccattttatcttatattgtgaattaacttgggaatgaataacgaataaattctaacagattggctatattttgattgcagtcacatatctttctgttaaattgtgatgt

SEQ ID NO: 2913 - DNA, 584 bp, Glycine max
agtgaagaatgaataagtcagagaatggctatgggtgtgaaaaaggcaaagttaaatgttgagagaaagattgatgcaataaaacttaccattgcctctacgtcagaataagaaggaagctcatcatcactctctatatattgctcttcctcatctaatgctggaggatttgccaccagctctgactcaagaacatctgaggatcccagttcagcacgttgcaactggtgatcttgaagtggcaagggtaaatcttgttcatttttcatgctagaaccattaggttggggatgatttctgaagtctttagaatcagcagctgatttcttcatgaaggaatttgccccatgattgcttggatcctttgccaagcaaatgctggtagcttcttcctttttatttgcatgcaaaagagcatctgttgtgtttgcagcatcatttccacctaagccaccagaaacaataacagaactcctagacactgtgtgtgctgcatgattagcaggcaactcacattttaccttagtaccaccaacaggtcctgggaagcaaggagattccatcatctgaaaagatacatgagg

SEQ ID NO: 2914 - DNA, 669 bp, Glycine max
tcgacctgcagcctcctgtttcaccataatacaaaaatgtgagatatatgaacacaaacttagattccagcctaaaaccatatagcattgtaattctgaaaacgatggacaaactaagggcgtgttagaattgattctaaataaaattgattttggttagaattgatttagaatatctagctgaacgatgaaagaaaaaagccctatatatatatttttttttgctcagctaaaaaaaaataaagccctatatatatatatatatattagtaagctaacgccctgcaatcaaaaaacagcactaacgagcaagaaagggccccttactatagttagtatagataggcgaaggtttgagctcaaaccaaacaacggctaacgaagtaatgtgatttatgtttggatgattttggttagaattgattttaaagtaaaattcactataatttttttgattcaacacagaagttatttaaaattgtttcagctaaatcaattctgaattcttctccaacgtaaaaccaaacaagtgaaaaactgtctaaaatcaattctgcactcagaatcaattctgtaacgtgaaaccaaacacgtgcaagcaaaactgaaaatattgataactataattaagactgacttgtctttgtcgccgacgctgcaggcatgcaa

SEQ ID NO: 2915 - DNA, 756 bp, Glycine max
aggagactttctctcaggggataccataggtgaggcattttcagatcttgatatttccccagcagccacagtagctagtaggttcatcccatcatctccatgggacacggatgcacttgcttcagaaattttcacacagctttcaactaatgcattcatggggcttaaatcataagtctgccctgatctggaaacaaatccagatgacaaactagccggttttgatgattctgctaccttatcaccatcttcattagccctgcatcgctcatcaaccgtttgagggcccttaccttcgtcaacaccaagcaaagcttcactagcatcacatgcctcattcatcatatttgacacatgggtcagcaaacactcaggtctagttttcattcttctgtcctgattctcattcctgtcagcaggagaagaagctttgctgcacgtgatacctggttcttcataagagccaccgctagctccccttgaaggactacgaccagtgtttggcaacctgagaattaatcgctgattattcccttgatcagtaaggggctggtcggctgatttttcatgggagactcgagttggtgaaactttttcagcaggtgaattcttagctgaattttttgcagagctgtgctccttcggacctactgcaacaccagccccatgtagaccattgcttgatttgcgagttcgagacacaccaccaggaattttgcccacactcgttgacactgcaggcatgcaagctggcgt

SEQ ID NO: 2916 - DNA, 693 bp, Glycine max
ttataagcggagtagaattggagggaccaatagttttgctcaatcccggattataatctagcaaaacctgaacaatggctgcaaaccaaaatccaccatgaatcacatggaagaacagaaaaccaaacacacattaaattacatcagcacataagaaaatcacacaccaacaaattcaagccactcaccactcatcacaaggaattacccaaaaactatcaaggactaacaatcaggacccaaacaaggcagccattcagttaagagagaaataaagatcgttatctcacgttataactttctctaaagtaaaaataaactaaataatctcagtcattgatgagaaaatcaacggttgatatttcaacatgtttataatttattataaatccaacacattcatatttattatacatatacgtgaaacaccaactggtaaatttctcatcaacaactatgtagcctcctgggtcatgattcaatcaggcctatacttaagtcacttcacacacaaggaggtgctcgcgacttcaggggccatgtatcttctctgtcaagactaggtgagtcctatactcataggaaggctgaccaagcctgagtcaccaaaccaactgaataacaaaacattcaatcaagtgttaatctgccaaaaccacgaggaggtgcaataccattgcctgacaagcacca

SEQ ID NO: 2917 - DNA, 683 bp, Glycine max
tccatatgttctttttgtacctttcattatttcaatatctcattgtgctttatggagttaccttattaatcaagagggcttatgagaatcctgtaaggaacaaataaaaagaaaaagtaataaagatttagcacaaaggagaataacagcttccccaagcgttttttttccttcttttaatttgcacgttgttgctcaatcttcatctgcaaatctaaaatagaagaggactgtgatggaagttaattgtatcaatgattaaaaaagagattattagaaatttaaaacaaatatgagaagatgaaaaaaaatcttgacacctaacacaatgatcctctgaataagttcctagcacccaacacaatacattcgaaactttcaattttgaacgtacccattcaataaaacacaatcaaggaaaatatttttttggtttaattgaaagatcttgtcccaaatattagtatatatcaaagtctcatatacccaacttattggattattgatatgatagagcaattaattataaatggttataatttaaactatagttatagatatatttaaattcaatttataaatgatgatttagtagataatttagagtttattattcctcggtattctatagtatagatattgtctcatccatgatcctaagcagcatcatcatctaaccacca

SEQ ID NO: 2918 - DNA, 1480 bp, Glycine max
aggaactcagtactgagattggaaagttgtttgaggaaccacagatttatcgtattgatcactacttgggaaaggaactagtgcagaacttggtaataaatgattatacaatggcttctttgtttgtttcatgagttttgcctaatgattaatccctttacatttaacttatattggcagttggtacttcgctttgcaaatcggtttttcttgccactttggaaccgcgacaacattgacaacgtacaggtgaggatttttaattgtcaaagttacaactttgggttaaaagttacttaaacttcatttattcaattgaaattagggaaggtattgttggttaagctttggcaattcatagtttgttctatcatatctatcaacttttttttcattctttatttttacaagcatctcaaattttttattaacaatcttttgttgccttatctaattcaactactgcattgccagagttgatatggcacaattttaaacttgagtttggctgttaattctatgacagatagttttcagagaggattttggaactgatggccgtggtggatattttgaccagtatgggtatgtgtagaattttgttttagcgaagttctcatctgagtcaaggcatgcttctctttaatagggaaggtattacaacaaagtagcccaaatcattatttactgtttttctttattttgcagaattattcgagatattattcaaaaccatctgctgcaggatgagcttatgaggcatgcagcagaggcaattgttgttttgtcatcttcttgctgccagcaagttgatgatgtgatcagcagtccatcagaaggcccagtggtggactctctaagttggtttgtggatatagtttcctcgtgtgtggatgatctacagaagaagagtgataattcaagggaaaaagatggtgaggataatgaggaatcttcctcagatggaatggactactttgaatcaatgacattgaaactgacagagaccaaggaagaagactacatgccccagccccttgttccagaaaacttcaaagtggaagaaactggaacaacctcgttacctactcggacacgaagggggccagctaggagagggaggcagcgaagcgacttccaaagggatatccttccaggccttgcatctttatcgaggcatgaagtaacagaagatctccaaacatttggaggactcatgaaagcaacaggtcatacatggaattcaggattaaacaggagaagtggatgtggtaggggtagacggcggtcacagccacaggttaccccaactcctccccctcctccagtggcaaacattgaaacaaacaccccacttattcagcagcttaataacattgaagtggtgggattggaagatagaagcctaacaggttggggcaagacaaccagaaggccccgtagacaaaggttccctgcaggcatgcaagctggcgaaaca

SEQ ID NO: 2919 - DNA, 745 bp, Glycine max
tcggtagcccggggtattcctctagagtcgacctgcagcctttaattaattagaatgaaaaatccttctcaaacttcgatcactgccttttgagattatgtgtagggacattttgccgatgagatcttcttagaacagaatgattaaaaattttgaaatcaaaggcaaaggcagagatagatagataacaacgcatatgctttttgttgagattatacttatctctagcctcttgttcttccttcccatcttcttcctcttttttttttttcttcttctttttcttttatcactcttttcttttgaaaagttgatgccaacatatagattccagtgaattaaaagcaagatcatgacaaatgccatatgtcacattacagtaacactgggcggttgatactctgtctttttaacttccaacagaattttatatattgtgcatttaattttgattttgatagaatcgacttcaattaatttcaataaaaaaatgattttgtactacataaaaagaattatgttgagatgtattcttgtgaaattaatttaacaagaaattatagatttaaatatgtttttaatttttatatcattatttttatgtagtcattttaaaatagttcttgtaaactgtaatatatatatatatatatataaagtgttggcaaatttggagtggacaaacctcttaattatgtaagcgattgccgattacaatgattctactcttgtggttgatcccatt

SEQ ID NO: 2920 - DNA, 745 bp, Glycine max
gccaagcttgcatgcctgcagaatataggaaatttgagaaaatcctagctggaactgttgttgtcttgacgccaagtataaatggttttctacttgaatgcataatctgctatcatttatgctgaagcctgcaacaaaattgtaatcaatgttgatgttgataccgcttataatgatcacttcaagtatttaaagttttactaatatttgaagtgccattgtttttctttgctgctatgtattgataatccagtgaattctctaatctctagtagtttctagttattgctatttgcatatatatgcaacaagtgctgttggcattgacttgtatattgaattttggttaagataccttttacaaatgataacaagtggaaagattaaatttttctctggccagtcaagcaaagactaggattaattgtttcctattacaggaaatgagcccgacttaacctcccggtaaaatgaaaccttccctctaaattaatatcacaaactaattctcagtttaagaactaacctcaactcaaagctgatatattttttttttccccacttagatgaacttagcttatgattagtaaaatgtgttactttgaaaatgggttttgttctgatcgaattgacttttgaaggtagactagtcctgatctttacctttatgataatatttcagatgctgtcaatgagaaatgggttgagtttgcatcctatgtgctttcctgatggcttgcagcct

SEQ ID NO: 2921 - DNA, 784 bp, Glycine max
aaacaggggaaatggaggctcagatggctgaagttggcactgagtatgttctcaaaaacatccttacaactcgcaatcctggtcctccaattcttcccaagggaaggtttcaattcaatccagaaatgcccaacaccttgccctcttggctcacagaagaagatctcgcctattatgtctccaaatttgagaaaaccggattcactggacccttgaactactacagaaatttcaacttgtaatttcttgattctccgtatttgcccgggataattgttttccactgctctaagttaatgtttctttcttgggaaaatatttgttcaacatgacgggatcccaataaaaaaagaccattaattaattaattattgtatgtatttgcagaaattgggagttgacggcaccatggacaggagggcaaatcaaggtgcccgtaaaatacataacaggtgagttggacatggtatacaactcgctgaacttgaaggagtatatccacggcggagggttcaagcaagatgtgccaaatttagaacaagtgattgtgcagaaaggagtggctcacttcaataatcaagaagcagcagaggaaatcgataattacatatacgattttatcaacaagttctgatcttgtccaaaaacgaattcaaccagatataaagtcgcagctgaagtgaaagggtgttataattgcgcttttgttttgatatttaaggtatcgagatcttttttatgggcaggattcatcaactgcaggcatggcagctttggcgtaatc

SEQ ID NO: 2922 - DNA, 722 bp, Glycine max
agtcgacctgcagtagaccctaatggctcctgtaaggaagcaaatctattaaaatacataaataatgtaagtagatccttgacaaagcatctcggattctagtgtacctttcagatcttgtacttgattgtaaagagagcggttctcctccaagactttatggtaggaagaggaggcctcttcaaggctctttatatgactctctaagaagtacatagaactcaacttagcattatgaaagaatattgcattataaaagattttacatacatgaagaatatttttcatggaaaaacaagtctttggatcattaccaagccttctcaattcttggtcccacttggattgaatttgtttgacctccaattttatctcttcatagaagtacttcagtttctatagaccagggaaaaaaacaccattacagtgaatgatgctaatctaataccgcatgataaatcttctaaagcagtacattggatttcccaattttatacctcgagctctttttgctgggcatcacttatttcagcatgcttggcagaataactggcattgtgctgattactatcgcgttttccaccgcaagtgcatagtttagagaattcatttgatgccaaactacgtctttgatttagatataatgtgatagcttctatgaattctctcttggagaggcaaccagtattgcctttcaatattttcttgaggaaatgtccaag

SEQ ID NO: 2923 - DNA, 747 bp, Glycine max
cttggcatgcctgcaggtaaaggttccttgtatattagacctttgttaatgggaagtggacctgtacttggtgttgcacctgcaccagagtacacatttctaatatatgtttcacctgttgggaactacttcaaggttaggtatctattttggtatattgaaagacagcttctttacttttgtttatacaagtttttcaatttcattatctaccttaagatgtaaataacaaattttgatccaaatcccataggtaacagaaatttgaatgatttactcgaatatagttttaagtctcggacatgctggatattgtgagaattgggatgcaacttcaatagaaatttaatttttattgggttttgctgatgtgactaaatggatttaatttgtagtacaaaaagatgaacaaaacttgcagcagtgttctaggtgtccagattgttacctctttttttcttctttgtatgatttattaacaaggcctgaatgaaatttgtctggtgttgcttgacttattttctacttctacaacttatattattaatgcattatcttaataattattatttccaacataacatgtcatacttgctttctttttgtcacttttactgttgcaattttagacatacttttctcccatcaccacaggaaggtttggccccaatcaatttgattgtagaaaatgaattccatcgtgcaactcctggtggcactggaggtgtgaagaccattggaaactat

SEQ ID NO: 2924 - DNA, 711 bp, Glycine max
tcagagagtccggcaggaatgtccgaatcagctgctctattggtgaccccactcggccattcattagtaataatgaatcaaggaagtgaacaaacagatacagattacatcaagcctatctacatagctcatatacaatgcaagaagtaactaactaactaactgtttctctaatctctacgtgagtaatgcacatgaattgaaggatatgtcaagaacaaatcaacaattccaggttcctcggcaattgctcgcaatgcatcaacatcgtcttcagtgtaagttccaaactgttgagcactggaagacttcctaccagataaataggccacggataaccctacatataactgcaacatataagacacggaattcgcgaaaccgactaaggtccaaataaaattgccaaggaaaaagagaaaaggttggtaccgaagagggagaatttgccactgcctttcagccagtacaagttgtggcaaaccttgaagccatccatcttgaagccttggttggcggagtccttggaagcttgcaggagaagtttgggggcggcgacgccgtagtcgccgacgaagtacgtcgggagaggaaagtgggacccaccttcgatgtatttcgtgaagtcctcgagctgctccggtgagtccgggaagaactgacccacgcacaagagggcgtcgaatggacctgcaggcatgcaagcttggc

SEQ ID NO: 2925 - DNA, 682 bp, Glycine max
ttaatgtaatcaaagaaaggtagtttcttgctgataaaaaaaaaggaaaactagtttcatattggtgggccatgtgtccaaatagtgatggatagttgatagttgtctggtgacatgggataggtttttaaaggaaatattgaatatggctattttctctaattgtctggtgatatgattttcaatattgggtcatcagtgaactaatggaatctttaattttccctcaatgtcttctccatcttgttctttgtgttcttgtttttcttccctattactttgagatacatttcttatgtagccttgttatagttgtttacttttttgggtgtgtgaatggaagctggtattgatatttgataccatgttaatgactacgacatgcacgcactgaagatcacattttttattttgtagagttataaaaagtgtagtgaaagtgagaggggagataaataattggagttatattttgatgattgaagtgattttagtcattatatataagtaaatggtggggtttgaggtaatttggatattaacttatttttatgacaatggaaaaagggagcatataaatttcattacgcagagtgtgtaagaaaagttttcttctggacattacctaaagtattttcctcaacagattcatgggcagagaggggttactttttcaattcaa

SEQ ID NO: 2926 - DNA, 729 bp, Glycine max
acatgattcccacatggcgcctcccagatatcacctggttcaaggaagtcatttgttaaaagaagtatcattagaaatgaatcaatagaattcaatttaaaatctcaaaaaatgaagaaaagacattggtactaggttaatttgggtaaataacttaagtgcttattgaagaagctccataagcactcataggaaaagaaaataagtaggtaaattgagttagacttctacaagttagaatcaactttatgcacttcaacttttatagaaactttcttgtcaaacttttctaaatacataaatgcataagttgattttaacttattaaaggagtttgatttattttgcttatttacttttcttcttctataaatactcacgggaaagtttatccaaagagagtctaagtgcctatcattaaagcacttatgtataagtttctataatcgaagagaaaataggattaaactattttataagttgtcctagagagcttattgaagaaaacagcaaggagacacatcaaaagctatttttacaagctgtctcaatcccttctacaagttcttatacaaaaaaccatcctaattcaacaataaattggtatctggttgatcaaagcaaataattttttaatggtgaagctgaaaaacattccaaatttccaattccaaatgttacagcaagtaacaataccttttgacctccaattgacctaatctttccatc

SEQ ID NO: 2927 - DNA, 713 bp, Glycine max
cttaagtctgaaaacaatttgtctacttgtacataatctttatcatggacaaagtatcaagaacagaaaatattttatatattgtctactcttgcctcattcttacacatctttattttatttattttgtttcaagttatttgttattgaaaaagataaaagtgttaactgtttttttaataatattctaatttaaataaattcaaacctatatttgagctctttttttaatgaggataatttaatattttttatgttataacttgtgtaattaatatttttttgagagaactcagcaaaaaataaataaatttttgagagaaaaataatattttttttaaagaagtgtgtattattttaaaaaataaataatatgagatggaggcaacatgtgattttaacaatgacttgtaacatctataagctcaaaatttttgaaaaatgaactggcgtaggataaaattaaactacctggataaagcaaaggttcttcccaattggttatttaaagcaatcttctttgtataatggataccataacttcaatctcttaactaccatgatttgattgaagcgatcgatctcacaaagatgttcctttcaatattcttaaactcaagtacaattttccctcaaggacccactatgtctatattccattggattacatagtaaaagcaaaccaataatttctctacctttagctgcatttt

SEQ ID NO: 2928 - DNA, 1387 bp, Glycine max
gttgcacttgctggactattgggaactgtaagagcccaaggccggccattgactgattttgtgaaccaaaagatagttgtggttggagctgggaggtacttcacttgcaaaactggttatgcatttatgatgaatataatattgggtgtccattacttttgttgatgttctattacactctgcattatagctactttctgcctcaagtttttcttgccttgattacagtgcaggacttggggttctaaaaatggccatccaagcagttgcaaagatatctgggtgcagtgaattagctgccaaaagccaattctatttgattgataaagatgtatgctttgatgacctttacttgcattgtcagtccttctagttacataattgtgttgacttttatatccataataaaaggtccttttcaattatgattttgaatgaattttgtgtaatctaaacaccattttaaattttttcatcatattctttgtcttgatttgtctttgcatttaatgttgttggcatgaaagaagaaataattgttagtgtgcagtaaataattttttgatgtggctatttcatatttgtgtgtagggtgtgcagtttatttcattaaattcttagattaagtttgataacaatgccatctttttatgcagggtctagttacaacagagaggaacaatctagacccagctgcagagcacacctgagtttcaagagagatatggtttgtcttccatcttggttataaccttgcatttaggggtatggctagaatttcaaatttatttgttgatatctatagtaacatattaggtataaactggtttctaaaagaaacccttttgggggttattggaaggcatggacatgttcttctatgctggagctgttgtttgttgatggttcgttataaaggattaagttgaaacatggaaaagttttatagttatgtagttctactcttggctgcttataatgtatactacatatgaaatatctctattgaaaaagagtcacacttcatatatttgagtgttgggaaaatcagttaaaggattgttttgtctttttgtgtgtggtgcaatgttcataactgtttgttttttccaatggcccagctgaaactgtcatatacagaatatattactacattaatagatcaggaaatggccgtcttaccctgagggagcttaagcgtggaaacataattgatgcaatgctgcatgctgatgaagaagaggacataaacaaggttttgaggtagatataattgaaaatttcatttcaattaacttcagaaaatgaccttggtttcattattcaaacgaactaaatatatttgtattatgatgccttaatcttttttacctttcctaaatattat

SEQ ID NO: 2929 - DNA, 707 bp, Glycine max
acaacatgtgaagtgatgcaaaacggcaacacttgtttcaccaggttagtttcatgtctcgctccgcaacttgttacactcttagatttattttgtgtctcgacatggatgaaattaatggttatacgagaaacagatcctttcgtcattgatggggaagaaaggaggcagctggttctcatctgtgaagaaagttttcaagtcatcttctaaagattcgccccagcctgagaagaaggtcatcctctccacttcttattctaatgtttagtagatgatttgcagggtgctctgctataataattgttcattttatttcataataaagataggagcatttgtttttggaatattttttcggactaaaatcaccattgatcttatttttcttttatttggaaagtggatatgggcacaggtagcatttgtgattttgtattaaaaaattacttttcccaagtttgtttgtttgtttctttttattcattccaatcaacattagagagtaaagactgtggtattactttggggtaatcagcaatgggttatatatatatatatatatatatatatatatatatatatatatatatatatatatacttgtaaatcataatcaacttcagtcgcttattatgtcattgatcaaagttcttgaacaagtcatggaaacccaaaaggaaaaaaaaaattacatatctatatat

SEQ ID NO: 2930 - DNA, 738 bp, Glycine max
aacttcctcttcgtttcgctgattttggggttttgcatcggaatgaggctagtggcgccctgagtggattaacacgtgttaggagattccagcaggtaaatctttcttctgtacttaacacacatgatcagcaagataaaagttttgatgaaagggtacattttttattgggttatatttccaaataaaattaattttctgtttagtatattaaaccaggagttgcattctttttcatgtcaaggtacactaaggcaggaagacatacattttaatactttatcatggcaagattctttgatctttcaattttataggcttacacagcaaatactaatctcatcagggtatttgaaattttgaacacatgtttgaatctcgttatttttctgttgcaatactggagtagtaaatgttttttaaagtaggttggggattagtgtttgtgaatagacacagatacaggagattggcatcctcatcttaaaaataaaacacctgggatggtgtttatatacagttattttagtgtagctaaaatgtcatttttttcctggtgatggtttttgttcattttataaatatgatacaattacaacccaaagaacattgcaattcagttatctggatcattcacattatcttcaatttctattttctgtactgattgagtataatggcatttgctttaaatgttgctcaggacgatgcacatattttctgcaggcatgcaagctt

SEQ ID NO: 2931 - DNA, 703 bp, Glycine max
aacttcctcttcgctttgctgattttggggttttgcatcggaatgaggctagtggtgccctgagtggattaacacgtgttaggagatttcagcaggtaaatctttgtgctgtactttacacacaggatatactttttattgggttatatttccaaataaaattaatttgatgtttagtatattaaaccaggagtcacattctttctcatgtcaaggtacactgaggctggaaggcatacattttttatactttatgatggcgagattatttgattctttcaattttgtaggctcacacagtgaatactaatctcatctgggtatttgaaattttgaataaatgtttgaatctcattatttttctgttgcaatactggagtagaaaatgtttttttaaacaggttggggattagtgtttgtggatagacacagatacaggagtttggcctgctcatcaataaaaatgaaacacctgggattgtgtttatatacagttataatagtgtagctaaaatgtcattatttttcctggtgatggttttttgttcattctatataaacaatacaattacaactcaaagaacattgcaattcagttatctggatcattcaccttatctttaatttctattttctgtttgagtatcatactactattaatggcatttgctttaaatgttgctcaggatgatgcacatatttt

SEQ ID NO: 2932 - DNA, 590 bp, Glycine max
gtactgtcctaaaaatgagctcttcgtatcatcccgagacggatggacagacagaggaagtaaataggtgtttagagtcttatttgcgatgttttgcatctgaacagcccaagaattggtcattctgggtgttgtgggcagaattgtggtactatactaccttccatgtgtctactggagtgactccttttgagtctgtgtatgggagaaaacctcctacattggttcgagttttgcaaggagaaaccagggtggaagcagtggaagtagaattgatggatagagatgaggcactgcaatagttgaaacatcacctgactcatgctcaagagttgatgaggaaatacgctaacaagaaacgaagatacctatcattcgaggtaggagagtgggtgtttttgaaactccaacctcacagacaaatgactgtagctaggaggattaaccagaaattggctccgaggttctttgaacctttcccaattttggagagggtgggggcttgtcgtataaactgaaactgccagacgaagctagggtgcaccccgtttttcatgtatctcaattgaagaaggcaattgggagttatt

SEQ ID NO: 2933 - DNA, 835 bp, Glycine max
ttgcatgcctgcagacatcctttgaaacacgctgtaaattgagaattgtatactgattattgaatcacctttgcagtcttacatcattgtcaatgattgtaccataactatttcatttcccattacttgtaataaaagtggctagtttatttttgaacatatgtattaataatagttgcacatgtgtgagatgatgatacatgtgcatcctgaactcttggaaaggtgctaaaatgagaaactatctttttaaatcaggctactttagttggttgaattctgaataaagtcctctaatttcttgttatgaattgatatatcctctaagaaataagaatatcgaattaaaagttgtttagagggaaaaagattccccagcttttaaatggacccagtttgttcaaatatcccatgcaacattttactctgaccatttcacttcaacccaagtaactaattgcatcatagtagcatcaaatacacaaacaaaaataagttaaaatcacttaatagaattagaagaaaaaaaaatcaaaatcaagattctagatattcattgccaaataaacaacgaactttgacagaagctgaaccagaaaagactaacaataactgcttaaaataaaatcatgccagacactgaattatgtggtcctattgattaactgaaagctccttccgcttatatcggaccatcactttccccttcactcccacaaccatggcattccaatcgatctctggaaaaggtgacaccaactccagctcaaaattcctaagcagatgagtccatattgcttttatctgcaggtcgactctagagaggacccgggtt

SEQ ID NO: 2934 - DNA, 611 bp, Glycine max
tatccaactttatatgatacacctaggccttctatttttgggagaatcgaaaagaaaaaaaaaaaagagaggttaaacaataaatgaatatgtggagatcataaaggtcctcagtgcctatgtacataaatataatacgaatattatgatcatagactatgttattatctcatgttgcaacataggggttgtcccttttgttgcaacttatcccacatacaggtcatttgtcttggagattggtaatgtgcagtgaagtaatcttcaatgcacccaaattggcagaacttgaagctgtgcacatactcaactggccttgaactgttgaattgctctacccacattcccatgctcacatcctccattttaaataactacaacattgaaattgtcatcaacgaacagccaacactttcgcccggtatgtcaagacagaagtatataaacacattcatgcaagttcacacacaagtatgcgcgggtgcacacacacaggaaatgaggtagagactggcaaacacaatcaaggacaagtcaacaagttaagatcatttgtgaacatacttttaatctgtgcttctcgaagttggatacaatgaaccgggcaatgt

SEQ ID NO: 2935 - DNA, 1512 bp, Glycine max
agagtcgacctgcagccattgcccacctcccatgaatgagttcagcttctctataccatttgaggaatgctgggtcctttcctagtcctaatgggtcgaaaccgtagtcacctggtagcctgcaattgcaacattcaacaacaaatgaatccatcaaactcttaacactatagagactgttgggagtttgggaagcacttagaagggttaaccggctaatgttttttattttatcagcaaatgttaaatgttattattattagttttttgttaacagatatttgagcctaatgtaatgactaagattatcatgaaaatcaaactctatatggttatccaaaaccttaagacattagatgagttacatctcttaatctcttatatagtcatatatacatcattgagtcatttcctgattaatgtgagactaataactcatacttgaatttcaaacaaagaatataagaaagaaaagagaaacaggggagaaattgagaagatatacgggtggactcacgagccatcaagccattctgggtcaatgaaattcccaccaccttttacagctgggatccatgacttctttggtgcagcagcaactgccacaataactcttcaaggactaacaacagcaccaactttgcctccaatgccagcagcaagaagggcatggctcctctttcctccacacaagaagtgagatccaaacccatttaacacagcactagatgttgcagctgccatcactctttcacctaactatagcctacttgaggaaaccgaagctgcagacaaaatcaataatttatcaggtaacttaaacatgtttaatatatctctaattggtataaattatactcaaggctactatgtgcacttttgcaatcaaattagtctaacttgccaatgtgtagatgcaatttctttcatgcagtgctgaaatctataccttcccccatacaacagaagtacaagagtttagagagaagatcaatagttgacagaacttgcctgaaaagcacatgcactgaaagaagttgtttttcgagtgacttttattttgcgatgctaggccataggataccaagccatccatgtaagggtcagacactaacacctcgccgttataaaccaaggtaacttcacaggaactcggtgcatgtttctttacgaactctcctttgctcaatttgttattgcgcctattcaaaataacaaattagagaagataaacaatctttaaccttaagcaaatccttgtgacattgtcttatcgaggacactttcttctaaaacaaaattatagttgcattgcttgttaagcagaacaatccttactagggatgaaattttacatcctttgtcatccatttgtgaatgaaacccaagtagtgatagcataccgtgtgtagggtagctttttgattccgatgacaatgttggttatgttgagaatagagatgaggtccagaattgctttttctgtgtcattgctttccaggagcaacgttt

SEQ ID NO: 2936 - DNA, 730 bp, Glycine max
gtcacattcacttctcctagaagcccctcaatttgttcaaagagtttgtgttgtgaaatgccaaggtagttgaggaccaattgtttgaaagcagaaaaggtgcagtatgacaagtggatgtgcatgtccatcctccctggcctcagcagagcaggatccagcctttctttgtgattggttgtgaaaataataatccgttcctctccacagcatgaccaaaggccatctattacattcaagagccctgaaagtgtcacctgttgaaaaattataaaacaaacacaagaaatatgtaaaaagaaaaaaaattagttttgttgaaagtcgtgcttgccacagttcttgacatgcaacttctatatctgctggatatcttacttaatatcaattgatttaagacgaaatctaacatggtatttgaatctacagcccaactctgtgaattgtctgttctagtaggcatcgcctgttttgacaggcatacgtcgaataccaagtgacaaccttagagtcattgttaatatggacaaacatggataagatgcatacattgaaatatgtcagatctgctaaatattttctactttagtgtatcccttgtctgtttggcatgaaaattgagactgaacttctaagatggatgatatatttaaatagaaataatacataccttactctctttattattatctcctttcttttgttcttcttcttcttcttcttctcggtt

SEQ ID NO: 2937 - DNA, 673 bp, Glycine max
aggaccctatacttctcacgcctgaggacaaagaccaaaagccgtatgtggcgattatcaaggtaaattctcttgtcaaatatataattctaccatcagttgacaatatttttcaaagatatgttgttgggttgggaaagtaagattttatgacacttggtatctgctttgatatcatatactggattttggtgatcgtcaggccgtcagggtatgacaccatgcattggtgaagaagtaatatattctaccagaagtacatggaatacaaataataattttctgctcattatgttgcccttttttttagatttggtaactaggttgccaattttttgtcatgttgtatgcagcgtatggctgttgagcagcttgagctgcattgacgttattttgggtctggcagccccccttttttcctctgtcgtgtgtgggtgaggctgctgttattcgttccttttccacaaaatctagatttatagacctttctctctccaccttctgattttgggggttgttttgccatcaggacattactcaatccctgaatggcagcatgatggtcacaggacagtggttttatcgtcccgaagaagctgaaagaaaaggtggtggcagctggcaatcatgtgacacaagggagctgttttatagtttccaccgtgatgatgtt

SEQ ID NO: 2938 - DNA, 626 bp, Glycine max
gtataaattcaaaatttattcacccttattattatcatacctaattgatgtactttttcttggttacagggaaaaaataaataaaagtgtataagcatatggatcgcatcagtctaaaggagactatgcaatcctacacgttaaaatcctgcatcagacaatacttgatttttttttatcagcgaaacacaaattgtattaatggggtactagaagaacacgagaacaacaagatcaaaaagtatccccgccgacagcttattatgcatttaaggattcattcagtagtgtggaaagaaatgaaaagaaagtgaattaagatgaaaaatttgaattaaaatgtaaaaataagaatcacacattaatttattgttcatttctttccatttccactctcttcctcttcaagacctgaaagactctggtaaatgctgcataaccagtcaagtacataagcccatattaaccaaccaatgtagaccctaacataaaggaaagacgctctcttcattgaatccaaaaccaaaggaattaaagagcattttcccatatgtacagggaaacacaaaaaaattgacaatacttgatgtactaacacctagctggtgtatggggtactatacatt

SEQ ID NO: 2939 - DNA, 653 bp, Glycine max
taatagtaatttgaaaccagtttcacttgaactaggaggcaagtcacccgtcatagtttttgatgatgctgatgtagataaagctgctgaacttgctctcctgggcatcctatttaataaggtgaaatttctttcgtgaaatatgattccttttgacaaagtagtccaattgtgcatattgcaacatttaattttcttgttcatttcagggagaaatttgtgttgcgggctcccgtgtgttggttcaagaaggaatctatgatgaatttgagaagaaattggtggagaaagcaaaagcttgggtggttggtgatccttttgatcctaaagttcaacaagggcctcaggtatgaacttagtagcacaatcatgtctacatttgttttctctagtgaccctctaactattgaaacagaaatgagagtagtaaaaatatgaaaaccatttttctctatcggctaattatcttcatgttgtaggttgacaagaagcaatttgaaaagattctttcctatatcgagcaaggaaagaaagaaggggcaactcttttgacagggggcaaaagagtgggcaacaagggttactacattgagcctacaattttctctaatgttaaggtgaattttaacgccacaaaagtatgaaataaggtt

SEQ ID NO: 2940 - DNA, 615 bp, Glycine max
tttacataccaatcaatatagctgctagctaggcattggattcttgaatactatacgtcgtgacaatccataaacaggacagccaccaatgcaatcacatgattgtgttttgttacgacaaatatataccatgtggctctctaataaaagacaaaatttcttagtaaataatcatatttaatttgacgcttcttgtgttcacgtacgtaaaaaaaaaaaaaaaaagtttacttagggttctttcaatgtatacccctctccttatatataaataatacggcatgacaatatttagtgaatattatacacatgatgataccgaataataagataatttttggtagtaaatgacatgacacagtacccggctttctttcaccttttactgacagattcttcaaaaaagtgtgactaatggcaattcaaaattcattaatttatgcttcttaataatcaatcatttcatagtacacatgccaaaaagaaaatcaatcaaacaaagtgataaggaaatactgctactaattgttttccatttcagtcacgaattaatatagagcttttactaccattatcagatatatatcccctgctttaaacgaacgagtataaact

SEQ ID NO: 2941 - DNA, 525 bp, Glycine max
atgggcacaaatagccaagcacctaccaggaagaacagacaatgaggtcaagaatttctggaactcatgcataaaaaagaagctcatttcacaaggcttagatccacaaacccacactctcctgtcttctcataggagaagctcagcatgtaccatctccaataatatccatcaaaattccaattccattttcattatgagttcacacataccaaatgcaccctttgaaactacttgtcaaaccttttctacattacctaaacctccaccaaacattgttcaaaccccctctagcattgtttcctcagaatttcaaacattatcaactattctttcagatgatggagaacccctccaacatttgccttatgaactattaatggaaaacgccaccaacatttgttcacctacatacatgaacccctcagcagttgaattgtgtaacgatgacaacaatgtgaattgggtttcaagagttaatgttcatgatttcagtgctcaaacactggaagaaggaacacaagt

SEQ ID NO: 2942 - DNA, 1474 bp, Glycine max
atacgacagttatggatgatgatgcccgtgttctcgttagggtcggttcttgcttgtgccgtcaccgtgttctgctgattgctcatcggtttcctcacatagatgttgcagttttgaagaaccgtcacggcatccccgaatatgaagtctatggttccgtatatgtcacaatcacggtagaattggcggttggcgtagacgtataaggtgtcttggtaccccataaagctgcaccggtagaacactgagtggtccgcaccggatcggagagccaccgcttggtgctgttgtggtcccgctgtgttctcaaaggttatgtctcgagcgatgaagccgtcaccagaaaccgctacaacaatcaattcaagttttaattactgaaaaatagtttatataaacactgatattcaataataactcattatataatattagcttcaaaaatcatttcaataattatttataattaaacatatgttaaggatgcaaaaataaaaagtcttcatcttcactaattaagtgtaacgtgaaaatatcttagccaccagttttgtgtgacttgattttgaaataaataaaaataataatatatgcttaatgttcattattgttgattccagctccagcatgttagttactttttttctgtttaaaaaacatgaagtttaaagtattctatccttttatttttcttttagtggtttcataggaaaatgacaaggagttctgattatgatgatcgtccgtaacaacaagttgtacaaaaataagtactgcagaaaggctcagggaacctttaccttcccatggaagaaaggagcttatcagccttgtgaatactatgaaatgtgcaaacagttcaacaataggtccttcttctcaaaggaaaagggttactgctccctcaagcaaggcagatgacaacattttttatattaccccgatgcctttgcattcatctactgttggtgggggattattgagaagcaaaggtatggctcaaatttcataagttctgaggagtgttattgctacctttaacttattatctcttggtgtgttttccaggtgatggaaagaaaaaagaaggttcatgtgttggaaccaaaggatttcgtgctccggaggtaagatcttgctgtcacttctatccacttgcattttttgacccaattaaaggctcaattttatgctgatccaagtagagatattgtctataatgaatgttgacagagtgtcatttttagatgcttgttgaaaaagagaaaataagaaacatgttagcacccggaatgacaattttatactgctatggaagttaaaagtgaatcatttgcctcccctaaacctaaaagaaatcactatgcagactttgggataccagggttatttcctttaacctatgtacaatttattagaatagtaatctgagtttagcataagtatcaacagcttacaattagctagtttcccc

SEQ ID NO: 2943 - DNA, 704 bp, Glycine max
atgccgtggcaatgttcttgctgtttaatcctgcaatctcttccagctgttcctaagaggactgacatcaaaaggcaatctattttctataacctggagtcttctcatgcagtttttccgaagaaacgtatccaccaatgaattttgaacctgcatgttgtacatgtcccttcttgaaataggattttttggttcactgatactttatatggaattgcccctatgtttacaggctccaaacgtgaattgttttatgaattttttcataatcacttgcccttcaagttcctgagacatttttttgcctagtgttataatgttgcgttgcttcctcttctaaattagagtattatacttttccttcacaaattatcttcagatattttatattccttaaagccaaatttggcttattcaaagcatctcattgacgatatttttggcttctcaaatgcccagataataccttgtttgcacagcaatggctcatgcctcattgactctggatgcctgtaagttcaggcaggcccttttaattacaatacattcttaaatttgaatgttattacatttttaaatttaattattaatcaatgataagaacccaacttcatgtcctgtattttgtgctcataatatatttgaagtttattttattttgctatacatctatctttttgctttggaacttgaatttcatgata

SEQ ID NO: 2944 - DNA, 1592 bp, Glycine max
cgccagacttcgatgtctgcagtcgtgttagttggtataactcaatatgcattttatacaaattattttaaaaaattcattaagtagcagtgttcaacaaggtaggggggatacaaattgtcagccacacataccatgtctaaaagttagaagaaagacaggaaaacaagtagaaattagggagaataacaaaattctggcacacccaaacgccactgccacaaggatacttatccattgaactacaagatttggtattgaaaatcttagaaaccgtatgaccaaaactcaccacaaaaagttctgaagcaacaggcctgtcctgccttaggtggttctcaaaagtttgaagaccacgctcaatatctcctgcatgacaatagcacctgcataataatggtaaacatagaaaaactgatttttttgacaaatgcaataggaaaacaaataccagtagcataaaacagaatgaagaaagaaggatccagtctacagccaaaaaaagttcaaattgaaaccgcattcacttccttcaccaaccatactgcaataaagtagagcaagtttgatggttacatccatgcctttttacaagcaattcataatctacttactattagcagcaccctccaattgggcaggttcagtgaagttgttttgtagaaattaaagggaaaaaggaagaaaagaagaacaaattttgtaaaatattctaaattaaccaagtgcttttattatagtaaattagtaataataatcaagctccagtattagtgtagtatatctagtaaaaacatagcctgattagattacaaacataacaagactccaaaacactgtgcaacttaatagtttcatatctagcactgggaattatatcaattgttaagcaaatcctgcaggaattctatttcgtagggagtagttttacttattgtttcttttgttttttccatgaattttaccacagagagagagagagagactaatctggacacaaattagaacccaacaaaaaaaaaagaaaataaggttgggccacatggcccaatttgtctcctgaaatcctaattccttgaggagagattgcagcgccgcaaacaataacagggaggttgcagcggaaaacaaaattgctcccgctaacctgcatggccactgcgattcagccacaaaacggagccaattctgccgcgacagcaaacatgcaccacaccactgttacagagtcggttcatgcatgaaattgaaaagaaacttgtgattcatgcgattctggaacaatacaagcaattcatacccaaaaacaatttgacatctgattcgtatcattgggtctccgaattgcattgcatcgcaatacttactaccatgttattagcaattaagttcataggttatcatacatccaacaatgataaatgagtattgaatcctcaacctctgaatcaggaatttcatagaccatgctagattgatctaagtctagactgactctgagaaaaagtagagtgctaaggaacagacctttcgggcagcaagcttgtactttttggcctctagattagccaatcctgcaggcagcgaagctg

SEQ ID NO: 2945 - DNA, 593 bp, Glycine max
tcgacctcgcggatttgcttaacaattgatatttttcccagtgctagatatgaaactattaagttgcacagtgttttggagtcttgttatgtttgtaatctaatcaggctatgtttttactagatatactacactaatactggagcttgattattattactataataaaagcacttggttaatttagaatattttacaaaatttgttcttcttttcttcctttttccctttaatttctacaaaacaacttcactgaacctgcccaattggagggtgctgctaatagtaagtagattatgaattgcttgtaaaaaggcatggatgtaaccatcaaacttgctctactttattgcagtatggttggtgaaggaagtgaatgcggtttcaatttgaactttttttggctgtagactggatccttctttcttcattctgttttatgtgactagtatttgttttcctattgcatttgtcaaaaaaatcagtttttctatgtttaccattattatgcaggtgctattgtcatgcaggagatattgagcgtggtcttccgagttttgagaaccacctaaggcaggacaggtctgttcccc

SEQ ID NO: 2946 - DNA, 1402 bp, Glycine max
aattggttacattgcacacaagcacaattaataaacatttaaatacgaaaacatgaaaaatgattttaataacgacctactagttacataatgaaaccggaaaccatgcatcatgcatgcaccaaatgaaatgggaatcaggttattttatattacctgcgcattcgaaaaccagggctgagggtgacatcgacggcggcggcgtcaggtctgtcgacggcggcatctttgggcgagggaaaacggtaatcagcgtctctgggcaagggcaaaggctgaggctgaacgcatgaggtggaggaacgatcgaaggtgctgggggagcgagacaaggggggcacgacaagggcgtctaagtcggcgatgtgggttagcttcctggaacgcgtcgacgtcgaccttttcccgaagaaccaggcggagcggctgttcttcctgggttcggaggcagaggacgtcgaaggggaagactttagagtcgccgaagaagatgaggacgaagttgatgttgatgaattagactgagaatgagaatgggagaagatgagggtagggaaccaacgcatggcgatggatatattctacaatgcttcattgtgcgtatatgatagccattgttgtgcatgcagaggagagggaattaagaaattagatcatggatagatttgtctttcagctgcgttattattgttgaatctgttatgtgcccatgcttctgcagcaatggaccctagatgaaccccagcaacttcaagactgaacattggaaatgttacatgcaatgaaagacagaactgtaatcaaagaataaaagaatcatgtcagctactcaaagagataaattcaacatacgctacaatggatttgcgcaaaggatgcaaacaatatagtttgtcatttgagaattgcaccacactaccacaggtcagaaacattttctgtttttcttccttttcttattttcagttatgcttgcatgaatagccccaaataagaataaaactgcacttgaaacctgaccaactctaactaaaggaattctacgtgcatctgaaaaccaaaactgacatggaccttagacattttgtgtcccaccaaaacaatgttatgactcaagagttttgaatgaaattttttagaaggatagacaaggacaacaatggaaacagtttttttttatataaaaattcaggtgccatgataaacagagaaaaacgtggcaaaatgagatagtatgcatttacctccctaatgtttcatagttgaagatgacagtttaacccttccggccgtgaatatgaggaaatgaagaaccagaggactgagaaagtggcctttggacaaatgaatggtttaaaagttgagcagcagtgggacgatcatttggattaacttgaaggca

SEQ ID NO: 2947 - DNA, 717 bp, Glycine max
tcttatttgatttctccaatgatatgcatatagtggtgtttaaccatgtttcttgacatttatttgtgttctatttgattatgtgactgctccagaatagagtatttatgcaatatcttggtaatggaaactaacaaagtggaattaattaactcattggagccattcattatgattgtttctttcaaattgtctattgagttcaatcatttgttgcttctattgattttatttaatattttagtaggcatgatcggtccaggggctgtagaaatatagtgaaggatttgaaagtctttgacacattcaatacttggttgcattatgaatatgttgaagacaaattatagaagataaatctaaggagcaattttatatatcaacaagcagcaagggaatatgttcgaacagatggtgggcacataggtttggagctgtcatgagcttaattcatttgaggatgacccatattttaaccgtcaaaagcaaaacatagaataaaaggaatattgattctgtttgcattttgtttggggtactggctagactagatacgttttcctggtccaatggaaacctttggatcgttggttgatttgaagttagtaatatgctgaaggaggaagctacaagagaagtttgcatttcacgatcatttttccttatgtataggttgttttctattgtttactcacattttcagctgcaggcatgcaa

SEQ ID NO: 2948 - DNA, 708 bp, Glycine max
gcttgcatgcctgcagactgtattggagatatgtctaaaaaggcctgggaaagcattataggggctgcattaagttctttcaacagattgtacagcaacagtaaccatggagctgatgaaactggaaagtttttaagtcttgcaaaacgatataaatcatctccacaagtgttgtttgctgttgctggttatttggaattcaagcatgggtaggtgaacatatgtttatgttaattgcttccagacatttcttcttgttttccaaccaaattaatcccttaaattaaagtgttagtcaatttggtacttgaaattataaaaatgtcatttatttcctaaaattaccacaagtcattttagtgtatatatatatatatatatatatatatatatatatatttgtaatttgaggactaaaaatgaccatcattgtttggtagtgctagggactaaaatgtacaccgttcaataattttagggtactaaaatgacatttttgtaatattagggactaaattgaccactttacataatttcaagaaataattttgtgtatttgtctctaccaattctatagtagtcccattttgtcaataggtgtattagtagttatagctctgtacttgtgtaaccctctcacttgcatatcacagttctttgttggaagacgctgtgtatagaatttatcatccagagcttgaagaaaag

SEQ ID NO: 2949 - DNA, 477 bp, Glycine max
accttgcaacatataagacagatagcacaagaatcaagtggagaaattcagtatggtggcggacaccaacttgctgttttaagaacatttagccacagactttgcaggtaattaaggcagactttaatgtccttggtagttcgaaccaatgcattgtgcattttagttattgacttggcattttaaacttgatgtaattaagtagtagtttgttcattaattattcttattcttgctaaaattcaagcttgtccattaccattgcttcataattactatgttttattgaaattgcattccttaggggctttaatgatgttgtgaatgggtttgttgatgatggctggtcactgatggggtggaagatgtaactatagccaaaaactcatctccaaacaaatttttgggatccaattacaatgcatcaatgtttccagcatttgggggtggggtcttgtgtgtcaaggcatcaatgct

SEQ ID NO: 2950 - DNA, 691 bp, Glycine max
aatctccagaaactcaatacaatcaaaatgtcatgtcttcttccagaagtaaaggtagattctttttgttctgttcttaaattcattaacaattaatttttgctgctactctatgaaggcattctctattatcatcattgttatgctatacctgttttttattggacaattatctttataaagttgttttagagaatgtggttgaacagctcatttggcccacaagtttctgctgctagcctgctgcactgtacccacaaagaaaagacagaattttgctatttaatggttgttgttaataagacaaagtgatggggcccctcatccaccctacagttagtaagcaattaagcatgctaatggattctggttcccctgctttcaaactgataagcactcaagcacttggggagccctccctttaaagctagccatcaaggggggagatccaagccacttaaatactctactcaactgagcatcccgtactacatggtgtgggacttagacaccccataatacccaaatctctatcatactagaagggtgatcttggtttcttagtctggggagtaccatcgtctttgtagctacatgtttattagtacaatctagacttactaactggtgaccttgacatggacattggccttattactccaattaatgccccagaaaattaacaaatagt

SEQ ID NO: 2951 - DNA, 1450 bp, Glycine max
caagcttggcatgcctgcagaaaaatagtgagtgcaatgaatggcaagcttcagttcttcaggagcctaatgtggttaagaatgttcaccgttgggcttgtgggtaagctgttaactgaatctaaatgcttagcaagagttttattgggaggatcaattctccccaacataaagtttgttaatggggttgattaatataattgtaaggggacaagaccatgcccttacgtggatgttatctcgattaataagggcttggatcatactcactaattagtatacctaaatggcttctcttcaataatcataacactacaattacatccaattttgatttatctgtttatttttcctttacttgtgtacagacgtccgactgctttacaagatgttacatgacagggactatgatgttgcagctctagcaaattatttgagccaggcttttagataaaaaaaaattatgggaatgagaatgtctaacgaggagttttgtagttgttggcatgcttgctcatgtctgcttgtgtatttttgagtccctttcccctcaattatatgtctcccttatttttatttttatttttgggtcgggcactgcaacttaattgcatgctggactaatgttttgattgtcttggttgcaggaacgtggcaaccttgatcgatatgatgaggtagtaccgtagtaattttgtttactcttggtaactgttgtaaacttgtaatttaatgattgatcattgatgtcttgcccatcaaccaaaatatctagtatgatctgcagttttggaaataagatttttgtctgacaaccaagtgtttaaggtgtctatttatacttctactcataatcatagattagacccaaaatccaataactaatccaatcattaaaaaaccttgaaaataataaaagatcatgtgagtccattacaattctgaaaataagtccaaaatacaattaaaaaatgaaaataaatcttgttttaaaagttgactaaaattgattagttttcctttttttctattttttcatgagaaaatttagtctttcgtcaagctcttcttgaaatcatttcttacttgatcaagtgattaatctatccatgttagctcaccaaagtcaaattattcctccttgaatagtcttctatcattccctctctcttagaaagaatttgtcttcacaatgtcgaaggtatttacatcacaaagaatcaagtcagtaacattaaaaacgttgttttcaccatagtttagtggtaaatcaaggagatttatatcagtcgagtaaacatgcatgagttgttatatatctcctaacatcgacttcaatctccacaaataaaaaaaaatcattttcatcattaaaatcaatcttaaagattaaaatattcttatcatagaccgtctcgacaaaaggattaattattctgcaggtcgactc

SEQ ID NO: 2952 - DNA, 582 bp, Glycine max
cacaaacatccacatgcttacattaggggattattggagttccaatatcatagatgtctatctacaccgcaggtaattgtattaaatcaatcaaggtcaaactcaattttgtaatttgatgcatagtaaataaaagattttgttctaagcctgcactgtcagctgatttttgttttttgctcactgcatgtagcttggttatcttgctgttgaaaatatggaaacctagaaatacttttattttatatttgagagaatttaagtgcgttatttcttcaacttacttgggcgacaatctgatgataatgaagttcaagaagatattctctctttgtactgcatgtgcatttaattgttcatcgaatcaacttttcttatggtaaagattttaaagtttccaatgacttacatttatttcaaatatctgcataaaatacaagtattgaatatggatttagctcctctttgcaatttcaaatatgtagcaagttttttgaaatcaaaaccttggaatgctcttatttgcaatttcatttaatattaaacgtatcatattttgtccagcagattctatgacttgac

SEQ ID NO: 2953 - DNA, 1276 bp, Glycine max
tgagttagaaaatgacataaaacagagaggcttggaaagtttttcagtatattatgtaattcaattcactgaacaaactctgaatagacttctcgtgtttatagaaacagttgaaattcggaacctagagttgctactggttatcaagtcgggtgtgacaaaattagctgttaatctgttgtaactttttgtcacacgtttggcacattgtctctgacactaaggcattcaggcaattgttcacaataaagattggattccaatgagaaattatttcaaaaagaaacaatttaataggaaataacatgcttgaaacatggtcaatgtatgagaataacatatcaatttcctcagatagtatcaattcactatgaagaacttttccaaactgtttatacaaatccagaatactatggcaaagattccgataaaacatggactatctgttaaaacaggaaaagcatgaattactgaatgcagaagataaaaccaaattaattcaaacgcataaaagatttccaaaactcaggatgattgagaacaaagtactttaaaataaatacagccacatttacagagtactttataatcagtggaaaaatttctcactacatttgtagaagtatcaactgcagcaggaaatcaactaagcttggttccaacatcagagataattaattttacaagcaaactgctttcagaatcccaagttaaagtgcagagtaacaccctgaaaatgccggcattaattttggatgaaaaagagaagatgatttccaagtttgtatccagtaatgggctggttgaagatcccttggctattgagaaagaaagggctatgatcaatccttggaccccagaagagagagaagttttcttggagaaatttgctgcctttggaaaagattttcggaaaattgcttcttttcttgaccacaagacagcggctgactgtgttgaattctactacaaaaatcataaatctgattgttttgagaaaattaagaagcaagatggttgtaagcttgggaagtcatattcagcaaaaactgacttgattgcatcaggtaaaaaatggaaccgtgaattgagtgcttcttcgcttgatattttgagtgcagcatcattgatggcagatggcattgcaggtaacaaaaaattgcgtacaggaagctcacttttgggtggatatggtaaagtgaagacatcaaggggtgaggacttcatagagaaatcaagtagttttgacattcttggggatgaaagagaaactgct

SEQ ID NO: 2954 - DNA, 708 bp, Glycine max
aaaccattagcagaaagattaaaaaggagttcttaatactagatatttccgagggagatgcatattctccaataatcagcgaaaaaaggttcttgatagtatagcagttcctaatcttcaatgttaatgcaatgtgtgggatctatccaagttcctgacccttttacccatcccctatctatgggtcatgaatccagattccctgtgctttatatttaagaaaaactattaattcagaatgaaattggaggataccaaaagtaatttgttcacatctaaatgaataaattgagcaagttctatcaatttgctagctgacaaagttacgtacatatcactttaaagagacagaaattcacatgaatctgtgtataatttaagtctgaaaagctttacaaagctaatgcttccacaaggccaaaagggaggaaaatgaaaagaagaggaaatgaaaaattcaacaacaaaaaaggaaaaggtaacatatcatgaatcatatgaacatctgttggatactcaccgtgtgggaaatatcagtaaggggcagaacaaggatttgagttgtaacaaccttgccaacatggcaagcatgcaggtggggagtcaaatagaggcaaagataaaaggaagcgggggataggtgggaggcaagcagtcattgagtaagttttggggcttcagggaagggaggtgcagacaatttaagtt

SEQ ID NO: 2955 - DNA, 737 bp, Glycine max
attatatgttcctaattatgcacacttctatggagaaacaactctaattgaaatcattcacctgcaatatatcacatatgtatcaatacattgacaatcattttctgattaaccaagtgtgatgaatgatgaatgtacaaaactacaataatgaattctcaatattgtaaggtgaaattaaaagagcctaccgctaaacttgttctgcaataatgtgattcgaataaaatgtgttagaaagattaccggagggactaaattaataattttgaaattaaaaattgagtatttatattttatattgtcatttaatcataaattatcagaattattttaagatacttattttaaaaattaataaatttaatgatggatggtaacttaatgactatgtaatttgatgcataatcctttttttcttaaaaattaggagaaattaagagaataataaccaagggagagttatctggttggttgagagactaattgaatgaaaatgaaacatgcatattagttaggcaaagtttttttttatagtcatacaatgtcaaatcagaagaaaaacacccagaataatattgcaacttcaacacaaaataaataaagaaataaataacattacaacaaatctttccaccgtcgatctgcatttacacacctggaatttcttattaacaaaaaaattgtacgagctttcaaattaaactcgatcacgaatccatttactgctgtctgct

SEQ ID NO: 2956 - DNA, 685 bp, Glycine max
attggctgcaaaatatctttagcaaaatgagtactgctcatgttactgggatgcagttgcaacaatgctctgcatatggtttgttcaatcatttattgagatggtaatgtcattagactgggatggataccatagtttagtgaagagaaagagacacagagaagttattatgtagcaatggcatcatgtgatccatgtagatgacacctcctagtgggataaagcttttttgttgttgtattcattatgttgcacataaaaagatctacttcaactaggatagagtttattgctgatcatggtattaatagctccattacatttctttctttttcttgtggcggagggcaggaagggaggaatttactgtaatttttttagcatcacataggattttttggttttaatatgtggttacttaacaatttctctgttaaaattcaatattggtagatatgtagtttgtgcttgtttgaatcagccaagctgtctggtctcaaaatgtaaataagatatttacatcatagcaagttatacttatttatatcaccaatgaaaagcatacttgtaaatacatacttttattcattgctctatatatggttgatgaacatttacttctattttacgtttgcttttttatcttgttgggatttttttttaaatttttttttgttgcactatt

SEQ ID NO: 2957 - DNA, 682 bp, Glycine max
aaaaaaaaggttgtctaacaactagctgaaaaatccaaatattccataaaacaatacagaaaactggtacaaaataaaatcttctctcatgccttcatataggcagcaacatgtccaccaaaaacatatttgcgatgcacctcagcatcaagctccttcttctccttatcaaacccagcaaacctcttgtcactatgaggaatatccaaacccccatccagagctccctgtaaacaataaaaaattattcaatttgatcaccattaaaacaaaatcacaccaattagcattgcagtatgatagattaccttaagggcaccaaagacacggttgccagttgtagtcctaataagaccaacatcaaggagagcacggaatggcctcctgctctcagcaggttccactgaatagtcctctccagtagcctgaaaaaaaataagatacaaccaattaattaacaaaactgagagaaaggcagcagttgcacacacacacacacagcatagcaaattcataaatacctcaacatttccttcgtactcctcatccatttcaagtgttttgaggactcttcgggccaacaggagaccagtacaataagctggacacagatattaaaacatgagacaaaagataatcataaaaaacctgagtgagaaaaggaattcctcatgaacaaagt

SEQ ID NO: 2958 - DNA, 710 bp, Glycine max
aaaatataaaataaggttgtctaacaacaagatgaaaatccaaatattgcattaaacaacacagaagactgatacaaaataaaatcttctcgcatgccttcatataggcagcaacatgtccaccaaaaacatatttgcgatgaacctcagcatcaagctccttcttttccttatcaaacccagcaaacctcttatcactgtgaggaatatccaaccccccatccagagctccctgtaaacaatcacagattattcaatttgatcaaccattaaaacaaaatcacactgattaacattacagtatgatagattaccttaagggcaccaaacacacggttaccggttgtagtcctaataagaccaacatcaaggagagcacggaatggcctcctgctctcagcaggttccacggaataatcctctccagtagcctgaaaaaaaataagatacaactcattagcttacacagccaaaagaaaggcactcgctggggcacaaacagcatagcaaactcataaatacctcaacatttccttcatactcctcatccatttcaagtgtattgaggactcttcgggccaacaggagaccagtgcaataagctggacacggatattaaaacataagaccaaagataaaaagaaaaaacaaatataaaaaactgggaaagttgggggtgggtggagcgaatttctcatgaacaaagtacc

SEQ ID NO: 2959 - DNA, 700 bp, Glycine max
aaaatataaaataaggttgtcaacaacaagatgaaaaattgcattaaacaacacagaagactgatacaaaataaaatcttttctcgtgccttcatataggcagcaacatgtccaccaaaaacatatttccgatgaacctctgcatcaagctccttcttctccttatcaaacccagcaaacctcttgtcactgtgaggaatatccaaccccccatccagagctccctgtaaacaatcacagattattcaatttgatcaaccattaaaacaaaatcacactgattaacattacagtatgatagattaccttaagggcaccaaacacacggttaccggttgtagtcctaataagaccaacatcaaggagagcacggaatggcctcctgctctcagcaggttccacggaataatcctctccagtagcctgaaaaaaaataagatacaactcattagcttacacagctgaaagaaaggcactcgctcgggcacaaaaggcatagcagactcataaatacctcaacatttccttcatactcctcatccatttcaagtgttttgaggactcttcgggccaacaggagaccagtgcaataagctggacacggatattaaaacataagaccaaagataaaaagaaaaaacaaatataaaaaactgagaaagatgggggtgggtggagggaatttctcatgaacaaagta

SEQ ID NO: 2960 - DNA, 680 bp, Glycine max
tactttgttcatgaggaattccttttctcactcaggttttttatgattatcttttgtctcatgttttaatatctgtgtccagcttattgcactggtctcctgttggcccgaagagtcctcaaaacacttgaaatggatgaggagtacgaaggaaatgttgaggtatttatgaatttgctatgctgtgtgtgtgtgtgtgcaactgctgcctttctctcagttttgttaattaattggttgtatccttttcatcaggctactggagaggactattcagtggaacctgctgagagcaggaggccattccgtgctctccttgatgttggtcttattaggactacaactggcaaccgtgtctttggtgcccttaaggtaatctatcatactgcaatgctaattggtgtgattttgttttaatggtgatcaaattgaataattttttattgtttacagggagctctggatgggggtttggatattcctcatagtgacaagaggtttgctgggtttgataaggagaagaaggagcttgatgctgaggtgcatcgcaaatatgtttttggtggacatgttgctgcctatatgaaggcatgagagaagattttattttgtaccagttttctgtattgttttatggaatatttggatttttcagctagttgttagacaacctttttttt

SEQ ID NO: 2961 - DNA, 671 bp, Glycine max
atgctttaatattacaacagatggaagttgatgaggttcagaagcctgaaaatgtaactggaaacatgatatatctttctaagattgagaatcaagaaaaggaaaaaggctacgactctaaatcctctatggtaaatgcacttcaagatgccaataatagtgaaaaagtggagcctagaactagtggcaagaaagggattgtatgcggagttgaagtagcaatgtctaaagaaactattgaatgtcagaaggaagataaaacgaaggtattcttctaatgttattgttaattttttttcttgatgttgtattattgttcttaacttgtgaattgtgatcacgttaagcttcattttattttcattactttcaattttcttagtatgtaccaccaatgatgaattaaagattttgatccaatgatgatccttttgatatatttagtttagtaagttcaaatattttaggctagcattgcaatgttttacacagttacccaccctttcccgtaaccaataaaaaaaagtgtgatcacattgttgtacttgtgtatgtctatatccaaagtctttatatggacaccttaattatgtggggttccatattgtggagtgactgtgtaatgattttaagactagttacattggttcttttgctaaattttgatcatc

SEQ ID NO: 2962 - DNA, 1429 bp, Glycine max
ttgcttcattgcctgaggaatatgtcctactcccacagaagaaaccagattaatgcatcacttaaatgaaggaacatgaatttaaaataagatctaagatatgtatgatttatcatataacatcaattaagaataattagaaaagagcataatagtggccttacttgtaccaattggtctaggagatacactggtagaatatttattagcaacagatttgtccattttatgaggtgatctttctgctttggacttcctaatgatgcacacaacgagtagaaccagaagtcctccaattactacaattcctacaattattccaagtattagccctagttttgtacccaaatttgattccttcttcaggtttttagctggaggcttaacagccaaagccccctctctcttgcaaaaagaaaatggatgttgttgatcattcaacctatttttggttgacaaacagttcccagaatatagcactttggcctttgaagacattgaaccaaagcaggatggcaattttccaaccagaaggttgtgtgagatatccacaaatgttagtgaagaactacatgccatattcactgataggttaccacttagatggtttgaggccaagtttaggtactgaagggaaggcaaagagattataaatgatgggatgtttccaaaaaaatcgttggaagacacatcaaatacctgcagtttcgtgctttcccgccgccgctacactgccaccgtcttccccgccgtctccgccaggttctctctcactccgcaaccagtctttccaactctctctctctctacgaaaccctaaacttgaaacctaccccactcatcgtgtgtgtgtgtgcagagatggcagaagaggattcaaagcctctgaactacatctccgaggtcattctcaagaagaggaagaacaccgaagcatgggctttaaggaaaaaagaacagttccagcaaaagaaataccaatccatcaagaagccggaggatttcatccacgagtatcgcaacaaggtaactaactaactaactaattgtttacaatatatcactaaaccctaaaaggcgttggatgcatatacagtgtttgatatgtgaattgcgaaaacctaataatgcgtttgatgtgtgtttataggaagtggaccttataagaatgaagcggagggtgaagaggaaagtgcctgaagctaactccaacactctaataatcattcggattcaggggtgtgtaaagtaatctttattgtgatttgattaattgggattgtgaatttgataagtgatgacgtggctctttatgttggattaggaaaaaggacatgcatccgaggacgaggaaggtgttgtacagcttggggttgaggagaagattcagtgctgtgtttgtgaagccaagtgagggaataatggccaa

SEQ ID NO: 2963 - DNA, 692 bp, Glycine max
atccaaatctttggtcctctgtgaaaaaattcacaaatagcgaagtttcctaatttagatttagatttatgtatgttataagatagcaatgacaagtaagggccttcttgtatcatattattactgaataatactcattaatagatactacgcagataattcaactactcatgttgatgtgaaaaatctgtattttaaaacagtaagttaatgaaaatgataaaaaaaaaagtacttacaggacggtctgcctcaatgtcatacttcaacacacggaaacattccagcctttcctccaaaaataaggcataagtgcgaacccatgcagaataatcccatgctgagcaataaaacaatgaatgacaactacaaattaaataagcataataacaaaaatgacaataaaatcaatcgtggagagaaagacagaggcaccatttggactggaatcatctttaaaatgagccatgttgagcatatgacttctgcttctcccataattgatgagttcttcatgaaatgtaggatcaacttcccttagagcacggtgaatgacaattaaagttttcaatgcaacctagaggtaaaaaacttgtcaatcaaccaatatggaatcaaaataaaaaccacacatgctcagtggtgatttacatgagaagttgagaactaaagacgactgaaggattacatga

SEQ ID NO: 2964 - DNA, 752 bp, Glycine max
atcaacaagagatggcattgcaagtgatgccccaagaacaacctcttcacatgattaatcagctaccaaatcacctcaagaaaaattttgtcactaagggtctagagcccaagaaatataccacttttcttcactgttggggcatccagggtcacggtaggccggtaaaataataagtttaaaaacaaaggaatcactaccataatttatcaaaaggcaaactacgaaaaaatattttttaaaacaaaatgacctttggaattaaatttgacttcggagttgattatacatacggaaagtcattctattaagttcgtcataaagataattacttctagcaaactaattttaacttttaaaatatttatctaacataaaaagattatgataaaaaatattttatttttaacaagcttcaaattttgtaattatttttgaaaaaagagaattaatgttttgtttttttattttttatattaaatttaggatttccatgttgtcacaacttataggtcctaaaatatgaaattgccaaagatatacacccaagcgaattctttaatgccattttgttaaattaaattgtaaatacttggttatgaaatattattgttatctaattaagttataattgttaactttccttcttcttttttttttttttatcaatattgcctatttacattatcattccaactgcaatgccttttgcataaatctcaactttttatcccactgcaggtcgactctag

SEQ ID NO: 2965 - DNA, 726 bp, Glycine max
atatcagagcataaggatgtcatattaaaagcaaaaacagaaggaataatactgaaaatgaatccaaaataggtaggaaaatcttacccttcatattgcatggtcaccgtgttaccaatgtcagcaaacttacgatcctcaaagattaagaagttatgtttttctgcaatcttcaacagaaagaaacatatattgaaacaactaaaacagaaatgtactaaggttcctgagaactcagtaaacatgttctcataaacttataataggttcaaatgttagcaattcttataacatgctcaaatgcatcaaattctactttcaataaatattagaaaatctactcaagactataaatgttaggctgcttttagcactataccaagcgaagcttagaaccgaaatcaggagtaaaatcaggtaaaatatcaacgtgagttttcagcaagcatatctcaggtccaacctgacatgaaagaacaaccaaattagtttaaataatttttataccaggagtaaacttctaactataagtccacaatctcactgatgataacaattcagggaacaggaatctaacagttttcaacccattttttaaattaagaaccctctccaacactttcactgtgaataagtgatcaaacaaaatgccatggactagttaaaaaaattcccactttgtataaataccaagttcttaccttgtcagcaatttcaagcaattca

SEQ ID NO: 2966 - DNA, 714 bp, Glycine max
tgtttcgccagcttgcatgcctgcagttacacattgcttgtgcactagatctgatgtttaattttgacaaaaactagaaattcattcaactgaagggactaggattatgcagcaatacagaaagaaaccaaaaacgaggctcaatcattcacaacggtgggattcactttttcaatcacacgacaaaagaaatagtaggttacacttggacagcaatttcttccttcaaaacaaattcaactgcttcattttgccatgcaagggaagatggagagtctcatgacaacggagaagatggaggagagctccactgcattgaatggtcaaaccaatcggaaaagttgggcattggcaattctactggttctgggtagcattgaggggaatgaggaacctaacgccacgagaaaaaggaaaacagaagatagagcaaatgttagacaaagggaaagcaacagtaaaaagtttctaatcaacaaaatgcttaaaatttgatatcaacttgtagtggattgattattaaatgcttcaatcaggatttaaatcatcttaaagcatgttatttttattgtataaaacaaaatgaaatagtacatattcagtatttgttctcaaagcacccctcagcttcaaatacatgtaaccaaaacaaactaaaaaaggggtcagaaagaaacatcattacctttatcagctctaggatagatatggaat

SEQ ID NO: 2967 - DNA, 626 bp, Glycine max
tcaaaggaaactagaagatttagcctttcaacttaatataaaaatttatcaataaaggataatttgttaatttttgttaaaaatgtcaggaagatttgaactttttattctttcactctttcccaacttaccactgaattaaccttatatttccttaatagactcatggaatttcactaaaaactgcataggatcaaaattttcattctgattattttcttgcttgctactttttaaaactctggagaagaaaagaataaatatccgaacacgtctgtcatatatattcactcagactctctctctcagagtgggtagaaatccaataaagatgacatttatggagctatcactgttttgacatttatgttcgcctggagcctttgtacagccctactgtaacacaagaacgtacatgctgcgtagttggtcctcggctaccattaccatacaaaactacctaagaaaccctactgctctaagctacattactactactattaactatagattaaagagaggtagcttatatcttcctcaagctttgtggctggtagatgcacagccatgttttacactttttactagacatgaaaccaatgtcctcctcctctttcctgcttcta

SEQ ID NO: 2968 - DNA, 734 bp, Glycine max
ttctgacaagcctatgcatgttacttctacccagagacactcaacttctgccagagagattacacaagcttttgtggagaacttcaaagccacaaatgggaatcagttgataaagagagaagagagagagataggagacacggggttgaagccttacttacagtatttgaaccaaacgaaaggatacatatacttttttttggcttctcttagtcacctcatgtttgtcatttgccagatattgcaaaactcatggatggctgctaatgttgacaatttccaagtcagcactttgcggttgattgtagtttacttcttaattggggctatttctacaattttcttgttgaccagaactctacttgtagtttacatgggtattcagtcatcaacatatttattttttcagttaatgaactccctttttcgtgcaccaatgtccttttatgactctacaccattgggaaggatacttagtagagtaagtatattaaacaattttttcctcgctcagaattgtaatggaagtaatagtattttgactctcatttccttgtctaggtctcatcagatctaagcattgtggatcttgatataccctttattctcagtttcactgtggtaggtgttatatacttctattctaatctgacagtcctagctattatttcttggcaagtcttggttatcaccataccaatggtatatctttcaattcgcctgcaggtcgactc

SEQ ID NO: 2969 - DNA, 761 bp, Glycine max
attctgaaagggttccctgagtccacctcttcagcatttctaacgaagccttcggctgatccatcggaaccatgtgacccgcatcatggacctgtttttttttccacaaaaatataaaagtgaatcatcatttaccaagccacagggaaatttggtaggtaaatgtagtatttcttgataacattgattaactgcttaggcagcaaggacaagtttgtatttgattttgtatggcgtgtgtgggagaggcagagagagataccttaaggaaacttaaaggtccatacttcttcaataatccagcttcagaatcatcaactgtgaaaggaacttcggatgagaccacaaattcttgctggccagaccactccatggcatgaacccattttgaattacctaatcattgaattcataccaccgggaaaaagaacatcaacacattgcattgaaaggtctaaagtgtgaaatattaaaagcataaacacataccaagccagttgcagatgagatcaaattccccagcatacacaagcatattgattccatcctcaagaagggcaggaataccaacttcaagattcctcatccaatccaccagcatagcctgataaactgtagaactacaagacacaaaatcaatatctccaacccctagtgcgtcccgaacagatttttggttcaagtatttctccaagttcgaaaaatcatagcaaaggctcccctcacacttctttctgatgtcataatactgcaggtcgact

SEQ ID NO: 2970 - DNA, 676 bp, Glycine max
gtctagagtcgacctgcagcatttacgttgccctgtactattaatacaattaagcgaaattacatttgtacaattttttatacaaaaaatgtacagtaaagagatagtatgagagaaaaacatgagataagatacttaatgtgagatgagagaaaaaaaaaagtcaaaaacagtattgtagaaaattgttacataacccatcaatatgctccaaatataattccacagctagcgttattaaaaaaaaatcttgttttcttcacaaactcaacgaaattccacgatctacataccaaatttgcagtaaattaggaagtacataaatccaagagaagggaaaacaaaaatcaatcagagtttttaacattcacactaatgaagattcaatctttattgagaaaccttaatatacaactctttagccataccaaacatttcagaacatgaatgatcaaattaatagaaaatcataattgtaatgctattttaggtataattgaagattataaattaaccaagaaaatatcttttcaccatgctaatgaatttatagaatcattgcccatctttttcttccatgaggttgtagctccccaatcaaccagaagaattaaacaaccctattcaatgtcatgcaacagagcaacaactttgaagcagccattaagccagtgaa

SEQ ID NO: 2971 - DNA, 747 bp, Glycine max
gcattcttaatttgggagtgcattcttaattcgatcacgtactgcccaaattaagaataaattacagatataaagtttgagtgaagcaatagatattttagagattttgtggcaatatatctgctggtcttgcgcctattttttttttaaaaaaaagaaggaattaaacaaactacttgttaatggttacaataaatcaataaatggccaaatgagcatagggaaattatgttatctcttcatatatgataataaatacgacctaaaaaatatccaacgaaaccataaaacaaagcctaataagtgaagaggcataaccaatacataattatgatttatgaactttatgttaggtagatcgggactacgacaactgataagtgaaagtttgcaatttataattttcaactcccaggtaaaaatggaggttacatgacaattacagtttccagtgaatttagttcatcaggtatcaggttttaaagttggttgagttgattcatgtgcaattcacaccccttaataacagaagggtcaaagagttcaagatcatcctccatatcccccgcttccaactccagcacttttaatattgaataaatatcctcccatcttggatgagattgatctgcaacacgaaactcatgaacttgtccatttaactcaagccagctataacctggtgttttctttagacctctatctctaagaaaactcctcattttagcaactttgtcccactttcct

SEQ ID NO: 2972 - DNA, 533 bp, Glycine max
attgaaaatgagaccagtattcattgacaagctgattgaatagcgatccttctttcttcatcaggcacattggatcatcatactccaccaattttcctgtcaatacaagtatccctttgaagaaaacaagtaatagtaaaaaaatattcttcacctttattctaatgaaaattcaacagtgaaaatcaagtacccaatattttacaagttatcactaaatcaactaattgtctattataataccctttaaccaggtgaatgcaattaaatcctctgctaaacaacataacatgcctatctatggggtgtgtcaaacccagtggtataggtagaatagtttaacataaccataagaaaatggaattagagctatgaattagcccgaaaaaggtttgttgaatgacataaaggagtcggaaatatgcatttttaccatctctgattgaaagaaccatagtgcaatccatcacggttggtatcctgtgtgctactgtgatcactgtacaatctgcaaactcagtcctaatggtctt

SEQ ID NO: 2973 - DNA, 695 bp, Glycine max
aagctataacttagaagaggctgacataattatcggaaacaattatcaaactgtaaatgtacagacactttcggagttggtatcaactgaagataactatggagctagacttttcgtgtgcttattagcacagctcttggaggaagaaggccgggaatatgatataatatgtgttctgaatgtcatggcaactatggttctcgtctgtccagctgcttgtgaacaattatctttgcatggaatagcgacaacaatcaggacttggtgttatttgagcaatagcttgtcgacaacaacatacatgtccatcttgattttggtttttaacactttgagttcagtgcatcctgaaacactatcggttgatcaaagctgggtagcgataaccatgaaggtgtgggtagctgaacttctatttattcacattgcatcccgtataaattcaatcatgatcatgattagagactctgatttttatgtctcagtttctgaaaggcaagaaataaattgatataatctaaaatacaaaaccaaatagagatgagatggaatgcaacttatgcaagtactattttctgatattacaaaaattctataattaaccaactacccctaaatttactagaaaacacaatgatttagattaatgattgttctaacaccacgttaccacttctgcaggcatgcaagcttgg

SEQ ID NO: 2974 - DNA, 710 bp, Glycine max
atctaccatctgagtctgaaacgttcaacaacatgacattttttaacaaagcaaattctactgatgaaaatgcctttgagattgctaatgaaactaggacttctgaggaaaagggtactgtttcaaacactggtttaatcacagaaccgggaagggaatcaagcagatctttaggatttgatgaaactaatgaaagttccactgtggaaagtattgagatatcaaataatggttctgcaactgagcagacaggaaagtttggactgagcatttacaacaatactatttctagttccccttctcatgcaataataccaactaatttagctccacctctaagtccaacagaagttagcccaaatattacatctccaatgtcatcaaatgattatgatgaaactgatttcgccgaggaagagcggttcaagccatcaaaagatgaattcaatatagtaggcaataattcttctatcaacagtgtgcctaaggagactaaaggttctcaaataccacttccagaagtaacaacaatttctgaaatgaatgagttattacttcaaaaccgtgcctcatatcgttctatggtaaatgatttaatgacatttttcttttcattttatgactaactattaaatattcttgagttctgtcctaatgttggtaacttgtttctagaggccaaggtggtcttcggctgttgatcaagagct

SEQ ID NO: 2975 - DNA, 640 bp, Glycine max
agtttttaatttgaaatcggttcctcttcttcgttatttagtggcgtgcaagaagttcgtgttccccctctaacttccacctctgagccaccttctctctttgacggaaccaccaggtgcttcgtttttttctttcatcccgtttttatttccgatgtatatttttttttaattttaaattttttggattttcttttaggttgtacatcagttatatttgtccctatgcgcagcgtgtttggatcactcggaactataaggttgtttctgtgttctgtgttctgtcttattccttttttttttaaatgacctattcagtattcaccttaatttttatttttatttatccattatttaatatataagtgaacccttgatttgtccttcccctaaaatgtcatcaagataattccaaaaaatcattaaattaatttctcaaatatgaaaaaataccaccatgtatctgaatttttgaaggggacatattttttggaggactaatattgggatggttgtgatattaattgtgggactaagattgggcaatgcgatgattgtggcagctgtggatgatggggggggggtgtggattgctggtgatgggtgggggggatgctgggggggggctcttttaggattt

SEQ ID NO: 2976 - DNA, 1093 bp, Glycine max
attccgcagagaagccaccatctcgttgatcgacggcgacaccggcggagactccggaggagagagagaagccgccggagaggacatgaacgccgccggagacatcatctgtctcatcggcgaaccatcgtaggactcagacgagttcgccgcgctacgcggactctgcatcggcaagacgcgcagctgctccggcgtgtgcgcgaagaagcacacccgccgccggcaactcgtgccgtccttgcaaggctgagtccgatagcgcgccgggtggagccagcactcgaaaacgccgtgcgcgaactcgcacgtgtcgcctttcttgcagtttcccttgcgaaactccgggcacgccgcgccggagtagtggaactttctcgggtcccggcgtcgagccttctcgccgggatgcgcgtacggacactccgtccagtcgtgtgacctgccacgtgcgcatcgacggaccttgaactcgtacatgcggaaatggtcgcacgagtacgcgtccaccgccgcgtcgggttgagcctccgtgtccgagtcagcgtccgtttcgttagacggcagaaaacgctgcagttggactttcattctacagttatggtttcccattagttggtacatgtattgagatcggtgcagtaaaaatattagtggttattgttttttctcttgtaagtttgttgaatttatctcgagtgtttatttatttatttttaatatggattcatttatttattctttatttaaaagatcctagtgtgtctaacgtattgtttgttttgatgtactagaacttttaatttattatttcttgctttccacagtatcttcgtaagatatctgttcttggacatcgcatatttctaatatatgcggtaagttgaacattacaatatcttacattactcttcagtagttgaaataaaattttgtggtgtagcaaatgatttctgttttcatcacctaactgctaggttcctctgggtctggcaattacatgggcatttgctttcttgctgactgaagcaggagtttacagctacaaagggtgtgatgcaaatataccttcctcaaatatggtttcagagca

SEQ ID NO: 2977 - DNA, 650 bp, Glycine max
agaactcagaattgtgggttggaatattggagtcgaagtatggtgggtggcgagcattagctgaagccagacgagccaacaatgaatcaatatggtggcaggatctaatggaggtgacacacgaaaatcagttgaatagagtgctccaaaatgaaacaatatggaaggtcggatgtggggacaaaattagattttgggaggacaaatgggttggtgaaggggagacattaatgaggaaatatccaagactgtatcaaatatcctgtcaacaacaacagctcgtccatcaagtgggaagtcatacagaaacaacatgggagtggaaatttcaatggagaaggcctttgttcgacaatgaagtggacacaactattggctttttggaagacatatcacggttccccattcatcgacacctaacagattgctgggtatggaaatcggaacctaatggacactactctacaaggagtgcataccatttgatgcaacatgaagcagcaaaggcaaatactgatcctgcatttgaggagatatggaagctaaaaatcccagcaaaagcagccatttttgcctagaggctagtcaaggacagattgcacactaaaaataatttgagaaggagacaagtacagctaaatgacacattg

SEQ ID NO: 2978 - DNA, 731 bp, Glycine max
acttttaacgtcagaggtcactggtttcttaatgacagaaatcctcactaaagaattaagctttccaccactgcgtgaattttctgcaaataaccaacatatggcataatgtgttacattcccaagttgatagtattattaaacatctcttggaagaaaaatatcagatacataaataaatcaaactatagccaactacacatgaatcaaaatgaaataatgctaatgtggatggtgtgcagctatcaacccccaccccctttctgcaaatcatactagtgttatgaaaaaggctacacaaatattaggcaaacaaagatcagattagtgcagagctcaaatcaatatattattacagagcgatcgaatcagattttctttttaataagagggggtgcatgggggctgtgttccttgactaataccacccggagagagcgagatcacaaatgtaaggtaaaagcagattagttgatataatacacaattgaagatggtccatcaaattgatctgctctcatgttaatcctctttcaatagaaatgacttcactgagcagtaacattacttaaaattcagtgtacatgatgcattggtgaagtttgatgtatctatctagttgataaacacatttaaaaagtgcacataccttgtttgccagaatcatccaaactggcttttgtcagagtgtcagttggtttgcttggacaatcttctgaaatcttttgcct

SEQ ID NO: 2979 - DNA, 775 bp, Glycine max
aggcaaaagatttcagaagattttccaagcaaaccaactgacactttgacaaaagccagtttggatgattatggcaaacaaggtatgtgcacttttattaatgtgtttatcaactagatagatacatcaaactttaccaatgcatcatgtacactgaattttaagtaatgttatcgctcattgaagtcatttctattgaaagaggattaacatgagagcagatcaatttgatggaccatcttcaattgtgtattatataaattgatctgcttttaccttacatttgttatctcactctcaatgggtactattagtcaaggaacccaacccccattaccggtttgacttgacattgatgttatacaggcaaccctcctgcctattaaaaagaaaatcagatttgattgctttgtaataatatattgatttgagctctgcacaaatctggtctttgtttgcataatcattgtgtagcctttttcttaacactagtatgatttgcagaaagggggtgtataccattcacatgtgcattgtttcattttgattcatgtgtagttgttggctatagtttgatttatttatgtatttgttatttttcttggaaaagatgtttaatgatactatcaacttgggaatgtagctcattatgccatatgttggttatttgcagaaaattcacgcagtggtggaaagcttaattctttagtgaggatttctgtcattaagaaaccagtgacctcagatgttaaaagtcctgcaggtcgactctaca

SEQ ID NO: 2980 - DNA, 648 bp, Glycine max
acacgactggaagttgatatagttggagatttgacacatagagattgacacaatggaatttgaagcagctggacatactagagagaacatggccatgctatgactagaacaaattggggctagtgtgtttgagaaagctgcaaggccagacattattcattgaaaaagacagccagaatttatccatcattgatttatacttttgtatagattaacaaaggaaacaaatatatgaaatattttatttagatgttgtatatattttgcctacaacaatctacacaaatcaatgtcacatgacttacatcacaccttgtgagatttccactaaatattggacaaaatatgaggtgagggacttaattttaacaattgagtaactacaaagactaaatgcaagcaattagaactaggggaaccaaaatcgtgcataggctaaaataaaggaactaaaagtgtaattaagccaaactagtatttgcttccctcaaatagggggaaaaaagatcacagtaagatttccaattccaaatttcattatttcagaatgatgtcagaatggcttcatcatgtagtcaatctgataccaaaaccaagcacaatttattagtaacacttaacctggcagcagagcttgtacaagtggca

SEQ ID NO: 2981 - DNA, 688 bp, Glycine max
taatttcccttttcagcactatttgcagtttttttgattgggtaccatttttaatttgtttaattgttgaatgttggtataggtagttgcatcaatggattggccttatgtaacaaagtacagaggagttgtttctgctcaaactcaccgtgaagaaatcatccaagatctttataatacacatgaagatcctgtgaggggaaagacacattcgggaattatcaggtactggggacacgggattgatgtggtatttctgctcagactcaccgtgaagaaatcatccaattgcttttcttgcctctgttttttcagggaattacttcgtgctttccgtttatcaactaagactaagccagagaggattatattctacaggttggatttggttttaactgaattgttctttttattttacattttaatttaaaatttatttttcaattgctcaacagagatggagtaagtgagggccaattcagccaggttttgctgtacgagatggatgcaatacgacgcgtatgaagaactgccttactgctcttcttgttcaggatttatttattttccatgttcatgaatattgctttgatatttcttgttttaggcttgtgcctcactacaagaagactatatgccccgtgttacttttgtggtggtccagaaaagacaccacacaaggttattt

SEQ ID NO: 2982 - DNA, 578 bp, Glycine max
agacacagcttctaatttagattttgctctcaaaatcttggaattgagattttgaactgttgagtccactttcccttccttcttcttcaaccgatctgtctcagcagtgacatgcttcaactcatttcttatgacatccatagaggccataaactgaaaaccttcttctctaaccaaagctaattctttcctagctgcctccaattcttccgttatagtttgtaacactatagagtattctgattcctcccctttcctgaaaattccttccaattgctttacactcccatctccttgaacccttttatccatatcctgaactgactttaactcgttctgcaagaaatcaacatctgatattgtcacagccaatttcatttcaagctcctttgactcatcaatctcttcaatggcctccttcaactttctcctcgcaatttccaaattgaatgaaaattgatttgcttccttttctctctgggcctcaatatctgcaagttctttcgaagcctcgatcctagctagttcagcaagtacttgctcctcattggcctcctcaatctcccttctaagctctt

SEQ ID NO: 2983 - DNA, 658 bp, Glycine max
aaaacaatagttggttgcatgtgggcagttacagcaggtctggctttgaagttgtgcaagtttgtgaagaaagcatgggaggttggggtgaatgacccaagaaaattcatccattgcttgaaagtagggattgcactttcagcagtttctctcttctactattggaagcctttgtatgatggagttggaggaaatgctatgtgggctgtcatgactgtggttgtagtttttgagtacacagccggtaggtagtgctacattatatgtatatatagctggctagctagttactattttaattgtaacaattcatatatgtgacatacgtccctcgtagtagttaattgatgacaatctcaaattgcaggtgcaactatatgtaaaactgttaacagaatgtgtggaacttcccttgctggatttctaggcattggtgtacattgggtagcaagtagggcaggagagcaatgggaacccgtaattgctggagtctctgtctttcttttaggtatatataatactaacaaaataaaattttatgtgcataaacaaataatatatatatatatatatatatatatatatatatatatatatatatatatataattgaagatagttaaattaattgatgcacatgtttttgtaagttcagctt

SEQ ID NO: 2984 - DNA, 836 bp, Glycine max
  misc_feature (670)..(670): n is a, c, g, or t
  misc_feature (725)..(725): n is a, c, g, or t
  misc_feature (800)..(800): n is a, c, g, or t
agcttgctgcctgcgggtgggactggaactttagcgggaggagaccccttttcgaaattgagattgctatggcggctgattttctagaggagacagcacagctaacaattcaccaaaatactacagattcatggatatgaaaggctgacccgagtgggaattttctagcaaaaacagtgtatcagctactgctgacagaaaaaaggggagaaaatgaagattggaccttcgtgaatctttggaagcttaagattccatccaatgcagccgtgttcgcttggaggctcattagagaccgattaccaactaaaatcaacctgagaagtagacaagtgaagttaaatgacccaaggtgccttctatgcaacacctcggatgagaatacagcacatctatttttcaactgcaacaaaaccctccctttatggtgggagtctttgcaatgggtaaacataaggggtgtattcccaaaaaatcctaaggaccattttctataacatgtaagtgggtctcctattggaactaaagcaataagatgggaagtgttgatgggtagcactaacatggaccatttggaagcatcgaaatgggagtgatctttgctaaccaaacctttgaagggagttaagtgatgaaagatgcaatttttctactatggacatggcttaancttatggggaaagggtttcacccctaccttttcgtcccttgggcctcttctctcncggggtgcgttttgggtttgggcaggggtggtgcctgccggtcgcctcttgatgttcccccggtcccgttctcgntttccctggccccgtttttcgccgtggggccggggg

SEQ ID NO: 2985 - DNA, 730 bp, Glycine max
tgttttgggtcgtttgccagggacaactgtttataggaatgttaaacagtatcctgaagcatatacatacaatggaattgtaatcgttcgtgttgatgctccaatttattttgcaaacacaagttacatcaaggacaggtaatgagaagtgagttgtaattgacattttcccaatcaagagcgtgccttaattcatttagagttctcttatcaggttgcgtgaatatgaagttgatgttgatcgttctaaaagacgtggacctgaggttgaaagaatttatttcgtgattctagagatggcacgtaagtcttgcttgccctgtgcacaaagaggcatatgctgtattgttcatgtgtttaactatttaagctaacatatttcttaacatgttgaaattttatttaaagagtaaatgaatgtgaatgtataattatcgatgtgtactagtggcactaatggtcaatatgactcaattgattcatgagactatcaaaatgcctaatttctaatggtggttaactgtgtcataactggatcgtgtggatgctgtgtgagacattttcagcaggtgtttatcattttcattacttttaagttacctcagatgctgaattacatgaaccacattgtactgaagtttgtgaatgctgttttccactacaattgttcataactaaactataactaaactatgaaaggggtaatgataataattctgacttctgatga

SEQ ID NO: 2986 - DNA, 643 bp, Glycine max
ttgaatccatgacaattaatttatacttctgcttttagttaattcatgtatgcattaaaacattcagaatgtataaattagaataaaagtgaatattttcttatttataaacactaaaaatatatttaatctgaatttgaataaaattcatcaaatgaaattgatatatttagtatgttataaatataaaacattgatgtttttcctttattagtatgatttaatatagtaaatatttttttaactgttaaataagataatataaaattgttaataaataatttttaacatatgccctattttttttttattttttttgttggattacaaaacaactagatgattagaagtctctaggaaaggaaacatgagccatatcaactcttaacttagcaataatacactgaggaggaaactcaaacacttacaccatagacaaagccgaaataacttgcttaaacatatgttctgtgtaactagatcacttaaacatatcaatgaagatttgatttctaattaactttaaacattgaaaatgttttattaagagagataagcatattttagtaattttaattaacacttaaaagggattaatatctatctagcttgtctgttaggaggtatctttatttttttttaa

SEQ ID NO: 2987 - DNA, 836 bp, Glycine max
  misc_feature (746)..(746): n is a, c, g, or t
  misc_feature (775)..(775): n is a, c, g, or t
  misc_feature (807)..(807): n is a, c, g, or t
aaaccaaaatcaaaagctaaaacaataataaatgaatttcaattgcaacacatctacagaaatgaaaaaattgagattgcaaagaatatatatagcaacgattctcatgcaagataaaatctacactcacattaagaagaataacaatacttcgaaaaaaagcagaaaaccagagccattaacacgcaaaattctctactgcaacaaaattttctagaaattcaaaaacagacaaataatctgcatttgaagatcagaaattggcaattgttatcagtcattgtgattccccaaacacggagcaatgaaaaactcatcatgtctctcaacttatagatgaattcgcaaaaattcataatgagagaaataaggcacaaggcaatttcaaaaagaaaaaataaactatcagagacttaatcacaggataaataccaaatgaagtaatccaaccttattgttgcttaagttcaagcagtgctgaaactgattctttgtcaaccttattgttgcttaaatcaagcaggggctgaaactgattctttgccagttatcaacttttgacagacggttgctcactgtgcctgcagtttatttgttcataatgaggtattaatgagctaaactcaaataattcaccaataactaaggtgattgacaccccctactcaatataactccattgtctaccatcgtatgctatatgaccagaagtagattccatgaagtacaaattataacacgtaaancaataatatgtataagtacaatgtatcanaaccactatctacttatgttaaataagtaagntattactcatgaattgccattcattattg

SEQ ID NO: 2988 - DNA, 728 bp, Glycine max
ctatagtcgacctgcaggcacagtgagcaaccgtctgtcaaaagttgataaccggcaaagaatcagtttcaggcccctgcttgatttaagcaacaataaggttgacaaataatcagtttcagcactgcttgaacttaagcaacaataaggttggattaattcatttggtatttatcatgtgattaagtctctgatagttaattttttctttttgaaattgccttttgccttatttctctataaggttgacaaataatcagtttcagcactgcttgaacttaagcaacaataaggttgggattaattcatttggtatttatcatgtgattaagtctctgatagttaattttttctttttgaaattgccttgtgctttatttctctctttatgaatttttgcaaattcatctatatgttgagagacatgatgagtttttcattgctccgtttttggggaatcacaatgactgataacaatttccaatttctgatcttcaaatgcagataatttgtctttttttgaatttctagaacattttgttgcagtagagaattttgcgtgttaatggctctggttttctgctttttgtcgaagtattggtattcttcttaatgtgagtgtagattttatcatgcatgagaatcgttgctatatatattctttgcaatctctattttttcatttctgtagatgtgttgcaattgaaattcatttattatattgtttt

SEQ ID NO: 2989 - DNA, 775 bp, Glycine max
agtgagcttatatattgtatcctctttatgaattctacactagtttttctgcttcctgtttctgtgccagcattgattaacttgctcttactaattgtatgaatatgaataagaatcgtgtcagtactctttggtttaaacacctaacctaatatataggaaaaaaaaaaaaaaaagagaaagggaggatgagatagatctatgcgataaaaaacaaagactgataaatatgagtgtaaaaactgagatacaaaataatcataatcgttattgtatattagtagctagatttctcttttcacttcattttgtttgagaaaaaagtgaaagatatgaataaactcatcaattacaaagataaaacaactcatcatcatgtaaaaacatagttgaatttttcttctgattatttttatttttattttgttatctgtacatttttccttctctggatctctcggagtgaatgaagagtttctgaaagcaaggatcattgttcatgtagccctaaaatggaacatggcagataactataggttcttggcgttttcctttgattacttcaaataatttccttataacattttacttgtgtgcataatatttttataactaatattgcctttttactttatgtttgtagcttctcctggtgacttagaagttttgatatggttttctccattctgaaataaaacagaattagttgcctaaacggagttccttacaaaaggtacttttgatcatgcgtatacttaactgcaggtcgactcta

SEQ ID NO: 2990 - DNA, 532 bp, Glycine max
aaaccaaaatccaaagctaaaacagtaataaatgatttcaatatcaattgcaacacatctacagaaatgaaaaaattgagattgcgaagaatatatatagcaaagattctcatgcatgataaaatctacactaacattatgaagaaaaattctctactgcaacaaaatgttctagaaattcaaaaaaagaaaaattatctgcattagaagatcagaaattggcaattgttatcagtcattgtgattctgaaacacggaccaatgtaaaactcatcgtgtctcttcacttatagattaattgaattctcaaaaattcataaagaaagaaataaagcacaaggcaatttcgaaaagaaaaactatcagagacttaatcacatgataaataccaaatgaattaattcaaccttactgttgcttaagctcaagcagtgctgaaactgactatttgtcaaccttattgttgcttagttcaagcagggctaaaactgattatttgccagttatcaacttttgacagatggttgcgcac

SEQ ID NO: 2991 - DNA, 734 bp, Glycine max
aagtcaccaacaaatatggtgtaatctggagaatcgtcgtggcgcgacctctcaccagcactaaaagttgcccaattcaacctgaaactctgccccccatttggcattattgccccattatatgtttgaagaattctctcagctccagcacgactattaaactcaataaacccataaccttcagattgactagtttgcttgtttcgaattactttaaccgatgtaacctacaataaaacagaacaaacatttagtatcacgacagaacatttgcatgtctagctcaatacaagttttaaactaacaagtacatatgtttaaaaaaacatagaacagacaaacagaaaaccatattcacctttgtagaccacatttattaccacaaccgagcattcatgcgtctaactcaatacacaattcaaactaacaattgcacgtgtttaaaaaacctaaaacagacataccgaaaaccagattcaactttgttgaacacatttattatcacaacagcacatctaactcaatacaaaactagaacggacaaagaaccatcttcgactttgtcgaacacaaataaaactgaatgaatacaaaatccaacctaaaatgctacaaaacccacacctcagtatcataacagaacactcttacacctaagcataaatcaacaggtacgggcatttaaaacaaaatctagaaaggttctaatttcatgctgcaggcatgcaagcttg

SEQ ID NO: 2992 - DNA, 811 bp, Glycine max
aagtcgacctgcaggttattggcattacaaaaacaaatattagatattccattcccttaaatgcaagatgagaaaagcttcatgatgttaggcctcaaatatagaaagggcatgcaagaaaacagtatacgcacaacacaagatgttagcttgagctctagaaaaaagtgattacaaggttgtgaaaaaagaaacgatttcttttcggagattccatacgagtagaacatattttgcaattggtggctataattatatgaaagcccttttattttgaaaagtgattttgggttttcaggtatatcaatgcaaaaatatttttttctctcaaaacctaaatgaacaagacttgtagtttttaaagttcagtaaggaatcaagtgattatatgtccacaagctatattcctattagcttcccgaaaaaatctgaaatttgattattttcagacttttttggtcaaaagtttacccaaacaaattaaatatttattttttatataaaaaaagaagtgatttcttcacaaaataaccttcaaaccaagcctctaaagccagactggtaacaaactactatctagtacttaaaactagagtagaatccggaaaacctggttaaaaatctgtcagaagaaattcaatcccacaactaatatcaaattctatgctcaaaaaattagaattttcttggcctggaaaagaaaatccaaagaaatcactaaatggatcgtaattacctgaaggtctcgcatcggattccagtcatgctccacaaaaacaagggtatctgcaggcatgcaagctgccaaagg

SEQ ID NO: 2993 - DNA, 684 bp, Glycine max
aatatttcccacgtttgtcactgttctcaatactgttgcagccctcttcaggtttggcactgatatggaaggaaggttgaggttcagtgcttggtgatttcctttcttacaacttgtggtggtcttagtcactttgctaatggatgcactactgtgatccatggaacataggaattggacataatcctcagtggtgatatcatatatgagtcctggatccattgctttgttggggtccacgtgtccacctccaatatcaaaagggtctgatgctttgtgtgtggaaccctcttcagatacaaggcttccatcagttccggtttgagatgctacatttttaattgcaacaattagttactatggatactgattattatttataactattaataaagacaattatcccatttaatttcgtgtacacatttattattcctaatttaaccttcaactacttttaaaatcacccacaatcacaaataattactgtctaatagcccaaggcaccgagtgagaaaattgccggtgagaaaattctaagcatagaaaataagaaaatgagaggttgtgtaatctcaagaaagttgtctgatttggatcctgtccatgtaaaataatttatatttaataataaatagaaatacagcttaaaaaattttgaacagttggataaggattgcaggg

SEQ ID NO: 2994 - DNA, 1275 bp, Glycine max
ggtgcttcgatgttgagttagtctttctgtgcaagtggtttaggatctcaatttcagaaatttctgtgaattggtctgagattccaggatccaaggtgaatcttctgagtatacctaacatgctttgggagcttgtgctcatgtctgtggggtacaggactggtatgtggagaatttctaattctgcctgagtgagcgtccatgatcaacttaactgggaagagaagtggcattttcctatctaaacaagagtcacctcttacacgagaacatatgctctcatgctgggcttaagggacgatcatgcaatttttaaagtttgtaggactaaccataaccttccggattatttcccttcagtttgagatcacagaggctttcatcctttttacttttagtattgctatttctactaggtaaaaatatattcaacaaagtatgttgttactgttggctgggaatagtttttaatcacattggtttttatttttcttaatcaaaatattctatagataacttttcattcctttcgtcccatttgaaagacattgtttagtattggtgagttgttgatgctttttgttcatctctcctggaagtaaatgttatggctgctgcagcagatatgtctaaggttatgaacatggagattcaagccgagccaaagaaggaggaggaggcacaagctaaatcatatggattgttctccaaggagttcatgagtcgccatggactgcatctgctcggaacaacaagcacatggttcttgcttgacattgcattctacagccaaaatcttttccagaaggatatcttcagcgcaattggttggattcctccggcaaaaacaatgaatgctcttgaggaggttttctttattgcaagggctcaaactcttattgctctatgcagtacagttcctggatactggttcactgtggccttcattgataggataggaagattcgccatccaattgatgggattcttctttatgactatcttcatgtttgctcttgccattccctatgatcactggactcttagggagaacagaattggatttgtggtcatttactctctcacattcttctttgcaaactttgggcctaatgccaccacatttgttgtgccggcggagattttcccagctagatttagatccacttgccatggaatatcttcagcatctgggaagctcggggcttatggttggtgcattcgggtttttatatttggcacagaatcaggacccgagcaaagcagatgcagggt

SEQ ID NO: 2995 - DNA, 727 bp, Glycine max
ggccagcttgcatgctctgcagttttgactgagaaatacctatttaaatgtatgttctatctttcatgatactcgtttcaatttccctagcctaatttttctcacaacctcttcattcaggcaaggaatgagaagatagagcaattagagaatgacctcagtcttagtgagaaggtattccctgtcatttctttggttgtaatttctcttatcgtatatgggaactttgttgataaattatttcttcccatatatttttgcagcaagtggacagcttccgtgagctctatttaacagagcaagaacagaaactggaattagaaagcgagcttaaggattgcaaggtgcattgtctaagtaactagaaccttttccttcataatttatccttcaaaaatattgtctctcaaattaaattactctttcaggtgaatttggaaaaaaccagcaacaacttgcatgatctccaagagaattacaagctattagtttcaaccttgaaggagaaggaacgcaccatttccaagctactgaaatcaggtaaattaattgatggtttatgctgacagatttatggtgttattcaattcactgtgatttgcttttattttgtgtaaatagctggcagatttatgctatttttaaccaattcactatgtgatttgctttactttgtgtgtaaacagaaaatgccttgattgtgcgtgcaaaggaaatgtgtactgat

SEQ ID NO: 2996 - DNA, 734 bp, Glycine max
ttggcacacatgtcacaaacagcagagggaagttaccttgctgctgagttgattcttgaaataggatatttgttccagaataatagagtagatccgcgtaagaagagcaatgcacctttgatagccatgaagccaaacgctgctgcttttagcattgctttggcagggtgtctcttatttgagacatctaggaaggcagaggagcttcttgatatgatgcctcgaattggcatcaaagctgatgcaaatttactgataataatggcacgtgtatatgagagaaatggtcgaagagaagagctcaagaagctgcaaaggcacatggaggaagctccaaacctaaatgatttacagttccgacagttctataattgtttgctgacatgccatttgaaatttagggatctagactctgcatcaaacatgattttggaaatgcttagcaaagcaaaggaagcaagaaattctcttgcagctgccaaatttatgacaaatgctgctgacattgatcgtagccactctcctggactggcttctgtgcatagtttgaacaacagtgaagatttggatagtttacagaataacaggtcaattacaaatgctgtattatcttatgaggagttttctatagatagaaacttcttaaggcttgaattagagtcaaaagctatacttggttctttattagctaagttgcagatgcaggtggacttgattacaaccaaacatggtat

SEQ ID NO: 2997 - DNA, 511 bp, Glycine max
gaggaagcattggctgtgatcaatcggatcaagagtttgggattaactcctaatgtggtgtcctggactgctatgatatcaggctgttgtcaaaatgagaactacacggatgccctacagtttttcagccaaatgcaagaagaaaatgtaaaacctaactctactaccatttccacccttcttcgggcatgtgctggcccatcactgttaaagaaaggtgaggagatacactgcttcagtatgaaacatgggtttgtggatgacatatatatagccacagccctcattgacatgtatagtaagggaggaaaacttaaagtagctcatgaggttttcaggaatattaaggagaaaacactaccatgttggaattgcatgatgatgggatatgctatttatggccatggggaagaggtatttactctatttgacaacatgtgcaaaactggtatcagacctgatgctataaccttcacagctcttctatctggttgcaagaattcaggtttag

SEQ ID NO: 2998 - DNA, 687 bp, Glycine max
aacagcaccccaaatactagcatctgccttttgtggcatggcatggatgaaatccaaagcttcatcaagaaaaccagcttttccaagaagatctaccatgcaagagtagtgctcaattgttggattaatactgtaatctgtcttcatgctgtcaaagtacttccacccatccataactaaacctgaattcttgcagccagatagaagagctgtgaaggttatagcatcaggtctgataccagttttgcacatgttgtcaaatagagtaaatacctcttccccatggccataaatagcatatcccatcatcatgcaattccaacatggtagtgttttctccttaatattcctgaaaacctcatgagctactttaagttttcctcccttactatacatgtcaatgagggctgtggctatatatatgtcatccacaaacccatgtttcatactgaagcagtgtatctcctcacctttctttaacagtgatgggccagcacatgcccgaagaagggtggaaatggtagtagagttaggttttacattttcttcttgcatttggctgaaaaactgtagggcatccgtgtagttctcattttgacaacagcctgatatcatagcagtccaggacaccacattaggagttaatcccaaactcttgatccgattgatcacagccaatgcttcctc

SEQ ID NO: 2999 - DNA, 820 bp, Glycine max
aggatggaagctcacccatcagttttgccagcaccttttgaaatgaggccttctgtaaatgtgaatgtcactcggccacccatcataaatccgttgcaaaaacatgttaggagtcagtttgatgccatgaatactagtaatcctattgcgaaccatgttgtaaataaatcttcatttatgccagaacagtcatttgacagtgttgagaacaaggatgcaagtattttaaagatacatcagttgcctaatcagctttctggagtaatttcgtccaaccagcaaaatcatgggcaggcacaacaactacagttttttccttctcaggatccatcaacctcacaatttagtcatgggagttcatcgcagggacatggtgtttctataagtacagccatgtcaaatccattaccagttctaccattccctttaccatttcaaagtatttcaaataaccctttacatttacagggtggagcccatccacctttacctcctggtcgccctcctgctccatctcaaatgataccccatccaaatgctggtgcatttatgccaagccaacagccaactgttggatatactaatttaattagttctctaatgtctcaaggcgtgatctcattggctaaccagctgcctgcacaggtatctaatatttatatctatcagaagctcatttctttcattttttttcctttttgatttgattgcgccacccaaggttaattaaatattttttattaggattctgttggaactgagtttaatccagatattctgaagattcgtcatgagtctgcaggtcgactttagaagatcc

SEQ ID NO: 3000 - DNA, 843 bp, Glycine max
ttttccatctcaggatccaacgccctctcaatttagtcctgggagttcattgcagctacatgatgcttctattagtacagccatgtcaaatccgttacatggtatacaattcccttcaccagtccaaagctttgcaaataaccctttcattagatatactagtttaattagttctctaatgtctcaaggcgtgatctcattggctaaccagctgcctgcacaggtatctaatattaatatctatcataagttcatttcttttttatcctttgttgatttgattgttccatatcaagagttaattaagtatttgttttttaggattctattggaactgagtttaatccagatattctgaaggttcgtcacgagtctccagcgaacgccttgtatcgtgatctccctagacaatgcaaaacttgtgggctccgattcagatgccaagagaaacacagtagtcatatggattggcatgtgactaagaatcggatgtctaaaagctgtaagcagaagccctctcgcaagtggtttgcgagtcttaagctgtggcttagtggtgcagaggcattgggaacagaatcagttccacattttttggcaacagaaagcatagattatgaagaaaggaaagatcatgaagagtttgcagtgccaacagaagaggaccagagtacatgtgcgttatgtggagagtcttttgatgagttttacagtgatgaaatggaggaatggatgtatagaggagctgcatacctcaatgcacccgctagaaaaacatcagcaggcatggataggtcacagttaggccccataattcatgctaaatgcagatcagactctaat

SEQ ID NO: 3001 - DNA, 702 bp, Glycine max
ggagacatgcttgtcttggtcatacagaaccgaaccatcaattggacctggattagttgtataagggtccactgctctcacttccattactatgactaacaaccaaaacattcaagaaataagtgaaataagaaacatgatcttcaaagttttattaatctgtttaataaaagaagtttacgaatataaaaagagaggaatgcaatggctgagaaaaatgcaaactctcggaaacaaaaagaacaaaggtaaaaacttgtcaatgcatcaaaggcataaagcctacaaaacttcgaacacataacgtatgccaatgatttactgtagaaccggaataatcagaaggatgtccgagaatgaaatttgacagatgtcagcatctatcgactcaattaaggaatggaattacaaatatatatatatatatatatatatatatatatatatatatatatatatatatatatatatgaactttctttaccatgaaatgaaggatttatatagcagaatttaaggattgatccttcctgttatctaaagcaacggataagcctcaactttgactgccatctattcttgctgcattgagttacaaaattctctttccttgtatgaaaagcattttaagggaaaattgccacagccgaaatctgacaaaacattacattactgcaggcatgcaagctttggcgtaatcat

SEQ ID NO: 3002 - DNA, 640 bp, Glycine max
ccgtacctatcaaggttgtctctaaaatgttttactatacattatgattctcccgtgagatagtttttaaaattaagatgttgtattgcatgctttataacatgatgatttgaattccccgtggttttataagtaagaaatagttattttttaggtgattttatatcttgatcgatttcatcttcacactggattttctaccggtaatctaaccatactaattgtatagtttgctagaaagtttacacgtaagacatgaaggggagttgagtctagcgtgcaaaacggtttaattctctcgtaacgtgctaaattaagatttgtatttgtattgagagaaataattagggacaatatcaatatcaatttcaaacataattgcttaaaaaaaagacatatatgtgaaataaaaaaaaagtttactcttatatacgactgtgaaaaataaattgaaaacagatatattggatcctttaatctgtaaagctaaaagaagatataatttttaaaaaagctttacttagatactaatagagaaggtcataggttctgtaatgtcactgtctttgatatttagtttcagaaaatatccctcaacatgaccgtgaggtatttaatttaatggattaccggaatgctt

SEQ ID NO: 3003 - DNA, 743 bp, Glycine max
aataagaaatggaaaattacgagtgatgagaaaaacctgataattacgaagggaaattgagggcaactgatagtgaattagaaaatatactatagagattttgcattggttcctttttacttaaattttcagtcataagttaatgcatatcgacgaactggtacctcatcataatgtatgaactcaataactgaatgatttaccaggaaatgcttatggtttgctctttaaactctttaaggcatacttaattggagtgacactgctcaatttcttgggaaggaatcattttcttatttatgaagcagtagaaaggtagatgtttctaattgtaggagggtcataggctggttttgtaattagtttgatgctagaaatagacaacctcactgccaccaaatgactagttggagatgatgacgacaatgtgttgttttagtagacaagatgacctaattaagcattatatggtaatattttgtctcacattttctattattgaaataatgtacaattggttttgcaaagccgcaagtttatggaatgaaaaaaaagaaaactgtgttgacaatctattatgtatagagcataactcaacgtgctgaatttttctcagaacggtgctctttcaatattatacacacacacacattgtaaagtgcttggcaattttggatgctttattctataatttgtatcagatgtgttttgaaagtttgatgttgactgcaggtcgactctag

SEQ ID NO: 3004 - DNA, 719 bp, Glycine max
catctatgaataaaaaacaataactcaccttcacaatggccaacaacatagttaggcaactgtaagatatatgcgttaccgccatgacaaaaatgaatcggtgcaactgctctaggccttcatacgaaacaaatggttcataaccctaagcaagataaaccaaatgcaaattaacctacattaattaaaagcagtaaaagctagtgatagtcaaattttatacaggtaaggtatattgcccatacctctttgcaggtgctgctatttattccattcaacatccttctaactaagtgtggataagaagaagccatcaataatttacgctcttcagagccattatcttccatttcttcgtcaatctcagatctagtgcatggagcaaaagcactgttgtagaactttgatggaatgcaaatattggctatcatgcgtgaggtagctgttaataagagtgatataaatccgagtaacatcaactctgaagataaaattgcaaaataaagagaattgatcagaaaaatgagacatgttactttacaacatagtaaaatcagtaaagatcaataaataaaaaagaatccttgtgtatatgtaaaaggatttctattataatttaatgcataacaccttctttcatcttctctagagctgcaagcaatggctttcgattagttttacgcagccactgcaggtcgatcctagaggctacgaccggg

SEQ ID NO: 3005 - DNA, 1452 bp, Glycine max
ctccccgttgttgtttcagataaaccgtgccgtcgagtgaaacgtcgctatccccctgttgttcttgctggtctggtcaccccctccgccgctgccgaaggacgagccgccgcagccgcagcaacaacgcccgccgaaaaaagttgtcttcaaaaagtggcagcaccccgctgcaccgtttttctacgaacaaccttcgctagttcctcccttcgttaacgtgtaaataatatataaaaaaatgaagaaaaattatgaatatttcttctatcatcttttcattttcattttcacttttatttttacacataatataccctcatagtaagcaataagagtaaaacccaatatttttttaacttttttttttcttttctttatttgtggctttaattagtgaatagaagtgtaagtttgtaacccttattattattattattattcaatttttgtaatcgtttttggagcatatagaatagtttaattcgtgtgtgtctgagtcactgattccttttgcagggattttgattcaattcaacattttatttcttatataaacgaatttcgttttcaaaggttataatgaatttatgaaaatcatgagtatataatatgatggaggttttttcttttaatcgggtaaggatttcagtcacctactctggttcactcttcattcactgttgtgtttcgctctcactcatctgtgagccatctgcagtcctctttgctttttgtagtgttgatgctgaaaacttttgcattgcaacccctgcatcaaaccttaaggtatagtttgagggtgccaaatgtatggctctcagtagagtttttatacagtcttgccactgttcagcctcgtaatgtgtacgagctaaatatagaagtatttgagagtctgtgttgtgataaaacttccgcaagcaattttgatactgcataataagaaaaggtcatcagcatatgattgtggtaatatagacttgagtaggaactcaaaagcaaataagggatgcaatgtaaaaatagcataagctcaccattttcacagccaaagtaaaattcccctgagcaaaataaacatgtgccagatttatccaaacatcaggcatctggacaaaaacactaccactggcagcttcttgaacctatcaaaattaataaaagtaaggaattccaatggataaaagtttaagcccactgcattccaaagttaagctgacatgtgacagtaacctgtgtaaagatatcctttgacacatcaaaatggcccttttctgctaagactaccgcagcaccattggcagcatataaattagaagaatgctgaatcagaacctacaaatgtttgaaaataaaagggatacatatcaaataatataatcccattattaggacaatattttaattatacaagtaaagaataggaaaaagcacagacaatgcacaact

SEQ ID NO: 3006 - DNA, 537 bp, Glycine max
aactccctctatttgaatacccaataaggaagatacgcaattcgggcttaattcatcatctgtacttccttgcccacacttttccaaaacaagatgacattaatttagtataaaaattaacaagcattagcatgcagcaacaaagagagtgaatagaaagataaatattgtaaagtaacagaacagattatcccttgttagagtgaacttcatcttcaacatctacattgcttttgctcatcatattctactttacctacatgttgatcctaaagaatggttaacagttgatgatatagaagatgaatatatttcaactgaccaaactcttaaggcttaagtataatttagttaattcttatgcgatgaagttgcaagcaatcttacgctgatcagctcacagagtctttgatcagctgcattttactaattcacagtaccagggaagtatcagctagcaaaaataaacatgtggataatctgaaaaaattaagtgataaagcatacacccaaaaggaactatcaaagggaaggtct

SEQ ID NO: 3007 - DNA, 698 bp, Glycine max
ataccataaaggatgtcaacttagcagcaacacacactgaccaacaggataatacataagtttggcattgggcaatcaaaaaaatgaaaataaagctattaataacagcagtgtgtggtcttatttccagagttaataaaaacccaatgcatttcattaaatgtgtcattgaagaaacaacttctggaactcctccatttataaatacatcaaagcagttacacgacatcaaattggtctttgaaggaaaatgaatgccacaaattatcatcaaagcaccaacctttggaggaccaatctaaccttgcaaatatctttaaggatcaaaatggatgatattttatagatgataatgaaatatataacatcgtggagatttgatgttgtaagggatgagctagcagatgaattgcaatcgaccaaaatgaattcatgaaaacattagttggaaccttcagtagttcaagggaaaaaatcagtgacacctgtgctcagttaattgattttattatgcattctaaattcatatgcacattaagaaacatagccacttaaccaatgaactagctatcctagttcggaagtatttatacttcaatggcaaccaactccttcacatcacataactaaaaaataatactcatgtaaccaaaaaatagttgcaaatcaggaataaaaaatgtctcaaaggcaataac

SEQ ID NO: 3008 - DNA, 798 bp, Glycine max
  misc_feature (776)..(776): n is a, c, g, or t
tctatctggagagcagaaaattctctccagacatgctcacctgtggagaatatattgcatttggagccccttgaggttctctcaatatatatcattaatttgattattgatttaagacatttatggagtgattaactgtgcaagaaaataattgtatgtttaactgcctgcatacatcgctatgctaattctgtccttcacaaatcttttcacaacttgtttgtgcatgactctcggaaaagacatgctaacatgcatatggtgaagataagaaattaaaagaaaattggaaaaggaaagatgatatagcaatttaaatattttttaagatagatgtatgattgctatatcagaaaagggttagtaaaactagattgatgtggttgtcctggttctctttgatagtaaaattttggtatttcctttgacacatatggtgtatctttgatggtatgtagtaataccctggaattcagccttaaattaaagcatttttttattctctttggaaggtagatatcttccaaggagttacccttccagatgctccaagatttggaaaggggggttgggggggcggatgaattggacaggtatgaaccctactggtttttccttcccatattaaagcacacctcccccatgccgaggggggcccttttatacctacgcttgcgtacgtggcaagtttattcttgtacgcccctggccttgtagcactgtccaatcctgggggacattccagggttgtacagaacgaattctcgtcgacgaancgtcccgtatccggcctccacc

SEQ ID NO: 3009 - DNA, 367 bp, Glycine max
tctacagctatggaattaacaggaactcaatcaatcaagattgaaagaaaagactaaggaatcaactaagaagtaagaaactaaataaaacattaaggaaagatatgcttaaaactgaaaataatagcaagtagatctacaagaagggcaaaggaaacctttgatttctcagtggaagatacgcatgtaggggatacatcagtgatagtaaatacttgtcctggcagagaagattgctgactatccactatcagagatgaatatggttcatgaacggatgaaactggtgattcaagagctgggtcatctactgaacatggtgaatcagacatgatggggtttacccacattccaaagctgttctgac

SEQ ID NO: 3010 - DNA, 546 bp, Glycine max
agctatggaattcaacaggaactcaatcaatcaagattgaaagaaaagactaaggaatcaactaagaagtaagaaactaaataaaacattaaggaaagatatgcttaaaactgaaaataatagcaagtagatctacaagaagggcaaaggaaacctttgatttctcagtggaagatacgcatgtaggggatacatcagtgatagtaaatacttgtcctggcagagaagattgctgactatccactatcagagatgaatatggttcatgaacggatgaaactggtgattcaagagctgggtcatctactgaacatggtgaatcagacatgatggggtttacccacattccaaagctgttctgactttgcaatctatcattgaccaaagtgtccaaggaatcaacaccacttaaggaaactgtattattcctctgctcatgtggatttgcttgatcgtccatcgtctgaagattaacacttgaaaaattgtaaggaacactgttgctcccagcaataggctgagtgagactaccaaaagaaggaatgt

SEQ ID NO: 3011 - DNA, 694 bp, Glycine max
gcttgatgcctgcagctaaggccatcgtccattttctaccaataatatctgatgttcttccaccaccaaggctaccaaatagagaaataatgctaagaataccaatcaaaaactctacctgaacctcagatatcttcagatcttctttgataaatataacagctccactcatgacacctacatctgcaaaatccacagaacaaatcatgtcaactttgactcattccaaatggctccggaattaaaattcaagatcaaaacaatctccacactaaaatccccataatagataaagagtaaataatctatgtactgacactctgtcattcaatccccaatgtttgttgatttatacaataactactttaaaagttataccaacgatgattagtgtaatgtaattttttttttttttagaaattaaactcactgataaatacatatacagttgacttctctcagcttgccagccctgaacccaaagtttggtagatctgtttcatagatactagaaatgaaaagataaatcacatatgaacaaagttgatctagatgaaccacagaacaaacgacaaggtgggaaatgaatggattgttaaaaaccatcacaccaacacaatctgattctaattaaatagaatagtcaatggaaaatgcagcaacgaaatcaaagaggtagctgcaggtcgactct

SEQ ID NO: 3012 - DNA, 706 bp, Glycine max
aggtgatgcctttggaatttttgcttgttctttcttttctcttttaatattttactttattcactgttcttaatagttccatgccttgtttatgtataacttttctattttcagttgctggttttggttgtttaagtaaggttggacattagacatttcaaaattgaaaccaatactctgatgcattacatagcagttcctgattcatcgcatgttttaaaaagtaatttatggtgtgtcaaagccatcatttttctatttttatgcattgtcgaagaatatgtggattcgacttgtcttatactgtagttaagaacatttgttgttgtctaaataagatgtatatgctgttgtgcttcttaaagcagcgtatgttatgcgttagtagaaggtacaaatggctgaacgggcaaaacctattattgttttgtttatgatgagaaatgagaaataaatgatgctgcttggtgctattttgttattctttccattgtatttgataaacataaacagtaaatatgtaaaacatgatactgtaatttcttcaattgatggatgtagtggactgcattctcatgtatagaagctgatatttgtttttttgtcttgggatgtaatttgcaggagggtgctgctgctgttgctgtggaagaagccaaaaagagtaatcatctgcaggtcgactctagagataaccccgggtacc

SEQ ID NO: 3013 - DNA, 659 bp, Glycine max
atttgggcggcctacacttttttgaaaattaaaatatacttttgtgtagctaatttccgttttgcatgtgtgtgtgtgtgtaatggagagagagatagagagaaagagttagtttggttcctagtggcactgaaattactaccaaatctccaaaagtagctatggagttatttaggatgtctaatgagttgagtttatggtcttatttatatgtggaaataatgatttattaatccagagcagatgagttaaaagtttctctagagaatggtagtttctaaatgaataaataggatagaatctctagcactcaaagaatgaaagaatgtttgcattttattatcacctgagccaatttcagatatctcgattatttcctcttaatatcccatggcaacattcattgcgttaagccaacattttaaatgaaagtatctgtgatctccaagtctttgatattcatttgtctattccaaattttggttccaactggcttcgaaagctttgatcctcctccctgctttcagcatgatttcctcactcttcttgaactttccatactgaggaagtctgagacacaatggtaaaactatcatggttatggaatccatgaaacaaacatcattattttctattaagctctgaattgtagaaataca

SEQ ID NO: 3014 - DNA, 709 bp, Glycine max
attgttgtccataccgttcacatacttgggtatcccaattagggcaaacccaaggcgttgcgaattgtgggatcctatcatcaagaagtgcaagagaaagctagtaacatgaaaacaaagacacatttcatttgggggcagagtgactcttataaagtcagtcctaacatctattcctatttatttgttttcgtttttcagagttcctaacagagttgtggataagctagtgagtatacaacgccgatttttttatggggaggaggactcgagcaaaagaagattgtgtgggtcaaatgggatacaatgtgtctcccaaaagaaaaagggggattaggaatccaggacatcaagagcttcaatctagctttgctgggaaaatggatatggagtctgtttcaccaccaaggggaactctaggcccgggtattggattcaaaatacgaaggctggagttgtatggatgacgaaagaagaggcagcaatgaatctttatggtggcaagacttaaagtcattgtttcagccatcgcaaaatggtaatttctttcaaaatggaattgcctggagggtggggtgcggagatagggtcaggttttgggaggatagatggattgatgatgataatccactaagactaaaataccctaggctataccacatttcctgccagcaaaaacagctcattcagcacatgggaagtcacacaa

SEQ ID NO: 3015 - DNA, 573 bp, Glycine max
attgttgtctatacctttcatatacttgggtatcccaatcgggacaaacccaagtcgttgtgagttgtgggatcctatcatcaagaagtgtgagagaaagctagcaaaatggaaacaaagacacatttcatttgggggcagagtgactcttacaaagtcagtcctaacatcctttcctatttatctcttttcgtttttcagggttcccaacagagtcatggataagctggtgagtatacaacgccagttcctatggggaggaggacttgagcaaaagaagattgcgtgggtcaagtgggatacaatgtgccttccaaaggaaaaagggggattagggatcagggacatcaagagcttcaatttagctttgcttggaaaatggagatggaatctatttcatcacgaaggggaactttgggctcgggtgttggattcaaaatacggcggctggagattaatcagtgataggctgccaacaaaattaaacttgcgaaggaggaacatagaaatcaattatctactttgtccattctgcagaaacaatgaggaggatgcagcccatttattcttcaa

SEQ ID NO: 3016 - DNA, 645 bp, Glycine max
agtcacggtcaatacatttggaaaattctgttcacatattttaattaagaaaataaaggagtttgtttatgctgcaatttatgatctagatccaatatagggaagatgaatgctagtaaggcactatttattgggtaaaatccatgtgggtcccaatccatatttactagttctcactccgtacttagtgtaacttacatgtgtcatccgattatggagtgttgtgctagcatttctcttatatagggaattagggatacaaaatggctttccctacttttcgtgggcaaccccaatttgataacttggccactttatggctagacttcagcctaatttatgtactagatatagtatatgaatttatacataacttcacatgccctgaaattttccacttgatttgcaggcaattgtgacagaagaggatggaatggagtcaatagctcatagatttctttctgctgctgtcaaggtagagttccatccacctgattctatttttgatgaaatgtttctggcttgaaattattactatatttattattgtattttaacacttgcctttacaacatgtagtataatactataattacactcatgcaagtttccaggtccatctttacaaaattgtaaatactaaca

SEQ ID NO: 3017 - DNA, 696 bp, Glycine max
gccagcttgcatgcctgcagaagccttctggccacagtgactgtttattaatgtactgtgtgtttgtgtacgtttgtatccatttagcatttcttcattcattcttttgaaatttatgttgtctttaaagttagatgatgaattctgaaaagaagatatttgcaacaagagataaacgttaaagcttaagtagtagtgaagtaagattctctaagcactacaggatgtattcttgcttttcagtttagtgagaatgtatcgtataaaccattgaaaaaattgatatgatcaattataaaaaaaaaaaatcaattataaattttggatcttcccaactttctgggttaaatgcattcggatcttcccaactttctgggtccctacctattgcccaagcattgacaaaaactcttgttttagctggagctctatacccctctatcacaacatcttccatggattctcttgggactaatactggaacaggaggatgcaaccaaaatatctctttgataacagctctcatgtactccaattgatgtagatcactctctgtgacaattcttctttctcccaagatgcttcgtacttccttttgtgctttttccataacctgtggattcattagtagctctgtcattgtccagtctagagttatgaaggttgtatcagttcctgcaggcatgcaagctggcg

SEQ ID NO: 3018 - DNA, 685 bp, Glycine max
acaacacagcaggaggcctcttgtgtgtctgggataacagcaacttcagggttgaatgtagaagagctgaaaggggatttatcatgttggagggggtttggctggccgagggtcatagggtagtggtggtaaacatatatgctgcctgtgacttagcatctaaaagacagctttggcagaagctttatgatctgaaaagtcagtcccaggttcaatgttggtgccttgtaggggacttcaattgcattaggaccccgactgaaagagtgggtagtaatctctgccatccagacactagcatcatatcagaattcaatgattggctagctgatatggaggtggaggatatcccgtgctttggaaaaccctttacttggttcaggccaaatggctcttgtaaaagcaggctagacagagtgctgctttcggacgattggattgctaagtggcctgatagttctcagcacaatcttgaaaggaactactcagaccactgtcctatcatgttacaatccaaaacaacagactggggcccaaagccttttagagtctttaatgcctggctgcacaacaaagattttaataaggtggtgaaggattgttggtctactaaccagcctatgggatggggggggatatgctttgaaatgtaaactgcaggtcgatctaagaatcccgggtacca

SEQ ID NO: 3019 - DNA, 699 bp, Glycine max
taataaattcgacccattaagttatggcttatttatgaatcataaaatttgaaaagaagttatctaccctttcatattcatctaaccacttttcctcctcagctgcaaatttccatttctctaccctatctaagatatctcttctgcttagagcttgctctttggcttgtcttatttgatcatccatgctttgaagcaaatcagacagatcaatattacctgcaaagccataaaagccagtattgaaggaaaaataaaagataagaacagacattatggacacacatataacaataattcttgaaagtatttaagatggaaagattaaaaaataaagataaatgtctgtaagcatccacaaaaattttgaaaaaggaaaggaaaaagtttaataatactataatctatatcaaagatatcaaaagatagttttggtaccagattcgatgaggctggtcaaaatctgtctggcagcttcactatcaacatccatgtgaactcctctgtaaacttcttcaagctcattctgcctcttaaacactaaatccttcatcttactggctttcacaacatttagtcgctggacttcaacttcaacctgcaaatttataaataatcaaacaactgaaactcaaatcttgaagtgaataactgcatgctaagttaaagtcaacaaaagtttcacctgctcaatgactt

SEQ ID NO: 3020 - DNA, 730 bp, Glycine max
tcttcaaataagaaacaaaagggcattaccccccaccccccaaatgggaactagggaagtgtttgagttatgtacttatttgaattaaaaatttatgtttttaatgtttctttttcaattattgatgatgtatcttacaatacattataagatttgattcatgccgtgtcttcaaacactaaattagttgcttaactgaactctggacactagtttgctacacattaatgagggacctactattggctgcaaatatccatgctacactttacactcgaaaaaacatgtctatctgtcattataaattatgcagatatattgaataagaagaaagccaaattcagtataaccttctgactctgaaatgttgtacttccctttgaaatagcactgaagaaataatgctcatttcttcacaacccttttgaatgcatttttggcgaattttcaaactgcatgctaagaaactttattttaatttcttatggaacatctgaatttatttatgtattcaggcaactgccagaggggaagaaggaatgacactttttttcgtttgctgcaacccaaactgtggacacagatggagagactgaaatttgtgcttcctcagatcaaaggttcaatattggggagatctaactatttgtggttatctgaaaaaacttggctgatgcggggacagtaatactgaagtatttgtgttacctgtttaactgcaggcatgcaa

SEQ ID NO: 3021 - DNA, 356 bp, Glycine max
gtagcttaattaatttacatcatatttatgaatccaaaatttctaaaatgtacaaacaccttattttataagaacctcataatttctctaataaaacaatccacgtggtgagattaacggatactcattagtcattgggaccatgtatggagaaggttggctatatacgttgaagcctcgacaattgcttgtgatttgtgtcttatgtcctatatgctattttgtcactaatatattattaactaccttcaattccttggattcttaaaggtggaaaacattgatgagaaagctggttgccgaagaacatataaacacatcaaaaacagaaatgattcatacctattttcatggaa

SEQ ID NO: 3022 - DNA, 736 bp, Glycine max
gttctccttcgaggaggccccaaatgactgccaaaaagacatcctagaatgtgtgaactacacaaacacaaattgggaataaatccatattttaaaatgacgtgaaaattcttaacctgaacataactggggtctcacccttttcccgcattttgtcttcatattcctatacaagagggattagatctagatcaataattaacaattggtagaaaccatttaactaaataaagcatataattggacgttgtgttcaaattctgaacactgaattttcagtcctccactaactatatacatataaccagacagcttctgctactaaaacaatatcaaactcacttcatgaatgttccatttacattaagttctgttttgccttgtttgtaccactcaagattaaaattgtagtaaaaaaaaacatgtgtctcaaaagtcagtttaacaatgacccattacagatgtgtttcggtgtttcaatagaaactcattacagactgtaaccaggatcgcacaaccttttatatgggtttaagaaaatatcgactaaaactaccacttacagagtgtgataaacccaaaagggggccattcagctactcttaatgggacttgcccatgacaagaaaggtacatcaaccaatgtgcatgttacaactggttttcagaggcaccaaattagcaatcacactatttgcgataacacatggtttttaatcatgacagagaaaaagag

SEQ ID NO: 3023 - DNA, 881 bp, Glycine max
  misc_feature (496)..(497): n is a, c, g, or t
  misc_feature (509)..(509): n is a, c, g, or t
  misc_feature (558)..(558): n is a, c, g, or t
  misc_feature (567)..(567): n is a, c, g, or t
  misc_feature (691)..(691): n is a, c, g, or t
  misc_feature (810)..(810): n is a, c, g, or t
tgtgcttgctggtgtctttggtacagctgcaactggatacatactccaacgaggtaagaatgctgctgctcttgcattcagaagcatatgcctttttttttaagagtcttgctaaccagtagtccagtaccctaaaggcattggttaaagaattaaaagaagaaagtatttactgtgaaaatcataggaggacgcaaaaaaagttatgggtgacacaattttttgcattccaataaaaatatttctccttttatttctttaaccactgccctaagggcactggtttgcatttgccttttttaatggtaattcgcttataagtgatctcctgactgttgtgcaggttcttgggatgatgtttttaaggttgctgttgcattgtacataataggcacattggtctggaatatcttttcaactggagagaaaattcttgactaaagaatgtaatgatgatgtgaatgaaggtgtgtgcagcatgaggcttgcgggttgnnggggctgaggangggaggggcggcggggatggggtggccgggtggggcggggggctggggngggggcggngggggcgggggcggggggggggcgtgccgccttgctcgccgggtgcgctctccctgtccgtgcgtgcgctccggccgctgcgggtgcgcgttggccggccccggcgccgcggcgcggggtcctngtcctcccggctcgctgcccccctcccgcggggtctgtccggtggtggtcgcccgtctcttcccttgctctgcccccccgcccgctctgttgcggtctcgtctcgcgcctcgcccgtcntcgcctcgtggcggggcgcgtgtgtgggccccccgcgtgtgttttcgtcctggtgtgccgggtggcttcgc

SEQ ID NO: 3024 - DNA, 565 bp, Glycine max
tgcttttacgcttccaagcgcttgacaaatttggtcattgattttgttccatctttctttcttttttcttttaatctctacggcttatgttgcatacaccttcattgacatcatcattacattctttagtcaagaattttctctccagttgaaaagatattccagaccaatgtgcctattatgtacaatgcaacagcaaccttaaaaacatcatcccaagaacctgcacaacagtcaggagataacttataagcgaattaccattaaaaaaggcaaatgcaaaccagtgcccttagggcagtggttaaagaaataaaaggagaaatatttttattggaatgcaaaaaattgtgtcacccataactttttttgcgtcctcctatgattttcacagtaaatactttcttcttttaattctttaaccaatgcctttagggtactggactactggttagcaagactcttaaaaaaaaaggcatatgcttctgaatgcaagagcagcagcattcttacctcgttggagtatgtatccagttgcagctgtaccaaagacaccagcaagcac

SEQ ID NO: 3025 - DNA, 684 bp, Glycine max
aggaaatgggctctatcaagtgggagacccttattcatcaggtagctactatatataaataaagtaaaagctcaattttgaacattgatagtttttcctctcaaagagttatcttcatgtttgtgggaagaagttccgcgaagataaaaccacttctcttcataatcatgaagtagcataataacatgaagcaagtggcattttaactgtttcctctctttatgatccatatgaactgactatttctgattgaatttcactactgacctctgaaaggtttacaaacttacatttttcaattcacactgatgcacgtatattactattagtatttgtaattgtgcatgagatgtattgcttcaagcttttcctgttaaggtcttatagtttgtagcgtggaagatggcaaattggcacttagcgttctcacaatttatgggatcataattaactccttttaattaggaaaatattcagggagtttactgtggaaatggaattgagtgtagagaatttcttcttattttcctagccctcaagcattaatatttaatcaccatgttgctgacaatttattaacatacaggcatacatgcaagctgtgaacttattagcatcttcattttatgcacccagtgttaactccatgagttacctaaattatggtgctgcaggtcgactcta

SEQ ID NO: 3026 - DNA, 592 bp, Glycine max
accataactaaggtaacccatggaatcattactaggtacataaaatgaagatgctgataagttcacagcttgcatgtatgcctgtatgttaataaattgtcagcgacatggtaattgaatattttcctaattaaaaaggagtttattatgatcccataaattgtgagaatgcataagggccaatgtgccatcttccataccacacactacaaaaccttgacaagaaaagctttaagcgatacatctcgtgcacaattacgaatactactaataatatacatgcatcaatgtgaattaaaaaacacatgtttgtaaacctttcagtggtcagtagtgaaattcaatcataaatactctgtccatatggatcataaagagagaaaacagttaaattgccgctttgcttcatgttattatgctactgcatgattatgaagagaactggttttatcttctgggaacttcctcccacaattatgaagataactctttatgaggaaaatttatcaatgttcaaaattgagctcttttactttatttatagtagctacctggagaataagggtctcccatttgatagagtccatttcct

SEQ ID NO: 3027 - DNA, 736 bp, Glycine max
tgtattggactgcattttgcagtgtgtttgatgtatgtggcttccatagcattttaaggctccttcctatcatctacttattgatgaatgtgtgccaaatctgtgacagtatggcatcatattggtctgatctgaatctcagtcttggaatttctgacaaattatgatctgtttagttcacatgcttcttgataagtaacttgtcttctctctacttgtggtttggggtcacaggtaacacaagctgaacttcattgtcagttccacgcactgggggctggggtgattgaggaggttcgagttcagagggataagggttttggatttatcagatacaacactcatgacgaagctgctctggccattcagatggctaatggaagacttgtacgtgggaagaatatgaaggtgagaattctttcattttgcatgtatacttgcacttaccttgttgggaagttaaaagtgcttctgaaacttgaagtttaaatgcaattccatggatgtgatgcacctctaacttaagcatcataacacaattaaatgcatgttcttgctactactgcttatttttttaaggctagaggtatttactcataagatttcaatgaataaaagttattttacttgatttgtgcagtgttcgtggggtagtaaaccaactccacctggaacagcttcaaacccactacctcctcctgctcaaccatatcaaatacttcccactgcaggcatg

SEQ ID NO: 3028 - DNA, 585 bp, Glycine max
tatctcaggcgcactacttggtcgtgttcgtgtaccaaatctctgagaaagtgaaatcttattgcaatgtgcttacatcttccgtgaaggacaggattcttggatagttggatagtagagctgttgtcacataaaatctcagtttcttccttttcctccgatccaagatgctctaagattcttcggatccaggtacattgacaggtgcagaatgctgcaacaatgtattcagcctcagtggtagataaacttaccacaggctgttttttcgaagcccatgaaacagctccaatccctattataaatactgagccagaggtgtttcttctatcatctaaatctcctgcataattgctatcgctgtaagctatgagaccagtttttcttccccttttaatttatagaataggccgtactcagtggttccttttagataccttaagagtctttttgttgcagcccaatgtgactcctttggatttgccatgtacctgctgatcagacttactccaaacatcaagtctggtcgagttactgttagatacatgagacttccaattgcttgtttaaattttatagcgtcta

SEQ ID NO: 3029 - DNA, 651 bp, Glycine max
tggctcctgcaatccgttggtttcagcctgttccaagttcccctcatttttctttcttccaagcaccttctcagtgagccttgccacctaaattgaaagaccacaaatcacaaacatttacatcaatcataaaatggagtgtaacagtgtaagttaacatacagtttggtaaattaatccttttagactgaacaatattattcacaaattgacaacttggtaaggtaaatttgcacttggggtaatgactaatgacatagctagtgaaattctaaacaaggcacacaaatattgctagttgaaaactagttcacaacatcaataaaaaatattgcacttggggtaatgacatagctagtgagattctaaccaaggcacacatatattgctagttgaaatctaatacacaacaaacttgctagaagattgccaatttgtagaatcatgaacattaattatcaaatcaacaattcaacaaaagttactacattcaagagctaaattgtatgctaaattgttaagtcaaagtgtgacattgtagaattcaacaagtggcatctaatatctatcaagtaccaagtcacctcagctttgagcttaaccttttccctgagaaggttgtcataattggccttgagatcattgtagcta

SEQ ID NO: 3030 - DNA, 625 bp, Glycine max
aatgtacataagatgccaaatgaattgaaggcgttcaaaaacaagaagagagagggagacacacacattctgtttttttaatcctgttcaatcaacgcaaaagattatacaatagtagtatttctcttaaactctcccaagtcaaaaccaagatccatatattataatctaactccaattgacatagtaaagacacaaaatacataaagtgatatgataaacactttgaaaccaccaggatccttttatatatattattataaaagcacaactcaagataatttgaggggaaaacaataattgagagagagagagaagttaattagctgctacttatttacacataatttgaggggaaccaaaacacaatgaaaagaaaaaagaaatatatgaaaaatagtgtttaattaattaattcgatggtcatagttaagctgaggataccaaataagattctgtctttcatgcattagaattatactagcatatagcaccattaattgctttaaactttatgaaatcataaacatcaatcgtttttttcttcttcttattctgtttgctggcccatatgctttaatcagaagaacaattaatccaggattccaccataccttgagttctg

SEQ ID NO: 3031 - DNA, 744 bp, Glycine max
gaacatttaaattgtccataatatttgttgcataagttgaagaaattgtagctactaccactgctggggggggatattgtttatgatcttctataacttatttttccattataaatttctagatgcatttgtttgagagcattttctgtgtaatgtgctctttgaattggtggatctcatcctattttttttcaggttgatccagagatcagcctttctcttaaacagaaccctgcttcttatacacaagttttgaatgcttcctcaagagggttgcacaggtatgctggtgaatagtctggttttcttattaaattcattttactagatgacagattgtttgtcagattttcttgttcattacatttttttcttaataaaactgatttggacttgcaagcaagtgtccaatgtggaatttgtatattcaaatctagttctctatcagtctttcattcacaccttttatctagacattatcaaatatcaatctctcactgttacaagtcttgcttatgttatgctctacattttgcacactgaataggttgctagttgcaggattgtgtttctttagttttttcctcacaatttgttacttgtcccttcttcactagtattgagtctttttgtattcgacagtataagtttgttgtggtcatttccttctctcatttataatcctttaaattcagaatgggaactgtattcagtcatcttcccatatccatggcaactgagcct

SEQ ID NO: 3032 - DNA, 741 bp, Glycine max
tgcagcctgctatttgtcccaacatcaaggtttttgggatttatgcactgccaaggttttaaattgcacttgtagttgcagtcacagtttcatcgtgattctcgatgttgcatgaaatttcggacaaatgtgtgttggattttatctggggcaaaagttagttgcagttttttatgtagttttgatgaagttttagaaaactgtttgtaactgatttcggttgcgacatcaaggcttttgggggtttctgcactgtaattgacagcttgctgctgcggttttggctgcaacttttttggcaattgtgtgctgcaattaactgtccattgcagctacaatgtcaaggcttttgggatctccacgaccacaattgttgacacatttgagttcagatgcaacttcagggtatttgggattagtgtgccacagttgacagtctgtctcctattttggtaaacaatatcaaggttttggggatctctgcaaccacatttgtatgcaatatcgaggattacgacagaatcacaatcacaattatggttacatttgcctgcaatatgattacgagggaatctcgtctgtaatttaaaactttttttcttcaatcaaaactagtatttcactttggtaattcacataataaatatttgcattgaaggtcaataatattactaaggtgaaacttcaattctgattggacaacaagagtgaaaacacgaggaactgcaggcatgcaagctg

SEQ ID NO: 3033 - DNA, 729 bp, Glycine max
gctgcactgtgcactgcttgctggtaatttacaaaattgcttttaaaaatgatattttctgatcaaaagagtacgcaacggcgttgcatattgttcattctttccttttagttgataacaaaaatgtataaagcagctcttatttacttatttatttatttatttatattagaataagctgtacggttcatgcaggtgtaccagaggaaatcataaaaagagcagcagctgtgttggatgccatttcaaataataaccatgttgagcggttatgcaatgagaacgtctctgctcaagatcgtcaatacaaggtgtcatcaattttcaagattcaaattatggctttggagatattgtttactctccgagacatgttaatttatatttctgaatggaatgcaggatgccatggagaaattgttggaatttgatattgacaaaggcgacttaaaacttttctttgaggatgtattttctctagttcttaatgcttcgtgactgaactgaagtcttctgttggtggttttcgtaggcattattgagacgccatttgtgatcatatgacatttgtttcaagatgagttgcatacctatcgaattctattgtattgagcaatccttttatggagaactaattgaaaaagagacacttcatgcctctatctttattacacgtgactgcaattacttcttgatgatagtgataacatcttttgctaggaaaactga

SEQ ID NO: 3034 - DNA, 515 bp, Glycine max
cagcagcaatggcactgtatgccgatgcccatgcttctgaattagcatatttccaacttactgaacttgaatcagttccataaccatgtgttccagagtagtctaaatgcaatctcaatccctacaaaattcatcaattcaaagtcaaatttatctgatactatcaagggtgataggttcaaatcccactcaaatgacagcaagccttagatgattgctcgctaaaatgctatgaagcagtttttcagttgaacgtatctaaggttctgttactaagcagagtttaaacttcaatcccttgaacctttattctatccacacatttaagttctttaaccttttaagactattgattcttgatacttacaatgaacattatagatttttctattcccatatgattttaaaaaaaatatgaaaaaatcattaatctaaatccagattttcttcacacaccccttcccccaattccatttaatcataccttcaaaccagccgtcttcgcgtggtccaca

SEQ ID NO: 3035 - DNA, 719 bp, Glycine max
acccggttttcctctagagtcgacctgcagcacttgcgcccccaatacacttcaccgcaccgtgtttgaatagcatgtcgagatcgtatgtagccgttgagtctggctctgcgatttctgatgtgacctgacctgtcactcgcagactggtggcattgcccagtggacagacaaagtgtttttcttcttcctaacacacacagggtttccccctaacaagggtttcctccttcaaaacacaaagaataacagtttgacacctcagttgccttttacaagtttggaacacaacatataatataatactatatcataataagcattgaatcataacccgtaactgcctaatttgaagttaatataaaaataactacccaaaaataatttcctaatacagaattataactgcttaaatcatattttggcctatcaatgactcacagtccagactcagccttgtcctcaaggttgaaataaggtgtctcttgtacatcctttgtatttgattccgtcaattcatcccctttgaattcttatcccccatcaccatcttcccccaaaatatgcacttttaacttcctttcagaacacttatgaaaaagtggcccaaatggttggtcacattgaaaacaacaacctctttccttcttctaacatactcttgataaggtaagtggccagtgccatggtttttaaatgatgaattttttgaattactg

SEQ ID NO: 3036 - DNA, 779 bp, Glycine max
acgccaaagcttgcatgcctgcagttcatctccactttcctttgcctttaattcaatatttaagatagttggcaagtaatacaattttttacacacttctttaaatacacgtctatactattatttcaaactcattataaattataaattataaatagagctcactgagactcatataatattataactttaaacaaatttcagataatagtaaaaaatgtgttaaaaagaaatacattataaaatatgttactagtatttctagacagatttaccatatgagctttggcgggaaatactgcaaaacccaagaagaaagaaattagtaatgaagataacacaaaaaggatattttattccattaaagtatatctaacttaagatacaggcatcacacaagttttgttgcccaccttcttaatgagcgacatatagtatggcttaactttttcaacatcaattagcacattgctcttgctgtagagatcatacttgctgtgtttcgtatcacataatttataagaaacataatcagttccattatgtattcatcacgttaagttgaagacaagatataaactgatatgctaaaatctaaagcaaaaataattagcttactgaaatatttctagccacttgaggttcttaacatcctcttcactatacaagtgtttgtacgctcctgtctggtacaaagctgcaagattatatgtaaattggaaatcacatgttatattattgttagttatatatatttgacaagggcatatattagttca

SEQ ID NO: 3037 - DNA, 583 bp, Glycine max
agaacattagcaggaggaatattgtggtgccaaaatctaatggtgtgtgcccatttagcgggttggttgaagaatccagggatcatgttctgctttggtgtaaagaggtgtgggaaatttggctgaaatgttattcttggcttgagctgtcatttgtgttttcggggtatgtacaaaaacatttctgccaacatgaattaacttaagtctcggcagcaactaatagaaggtggaaagtgatttggtatgcagctacctgggtaatatggaataagagaaataatatgatattcagagcggtggtgctggacaagaatagagtgcttcaagacgttctattccaaaacatgtcttggttgaaatcttatgatcaaagattcaactattcttttgtgcagtgggaagcaaatactggactttgcataaaaggctaaattcgattcatgattgaactgctagcagactcgagttaatggttgctgattgatgggtatataattgtcgggtttgttatcattgtcgggcaggacatatttatcatgcctcgtgtatataattgggatgggaagatccatttgcctgc

SEQ ID NO: 3038 - DNA, 659 bp, Glycine max
ctcgtttttcttcagccacacgtctttacgagacatacagtattttatttgagcgtactcaacatatgaagtttttaaaaaaaacaaaaaaaatgttgttattctctaaagctatttaaattgaattattcttgaccaacaagtaaattgaatgaaatttatgtgattttttaaataagattttaaatttgagttttatagaaagagaaaatatgattgagagagaaaattctattaaacttgatcaatgatcaattaggttcctaataaagattaataatcagtttggatactacccatagtatgttaaacccaaaaaaagtttacctatttttgttgcagagacaaaaatgaatctttcctaataaagattaataatgagtttggatacttagcacccatagtatgctaaacccaaaaaaagttgacctattcttgttgcacagagacaaaaatgaatctcaacaatgaggtttaataagtataaatatccaaagtcattgtgaaaacaaacaaaaaatgttacaacatacaatcaaaggcagaaaagttgctctctcttcttttgtgaaatctctcaaacaaagtaaaatttgacaaggaatcacttcatcttgaacttgcatcagaaaataaccatggaaacgaatgatcatagc

SEQ ID NO: 3039 - DNA, 566 bp, Glycine max
ttagacattgctagggttttggagtagtggattagctcttttaggattaaggagtgtttctatcttcatggataaagacaaatctctaggtttgccacctccgtctggacgttattccggttactcgcccaccagaagtgttttcaatgtgaaatctgagccgtcgccgtcgtcatcgtcgacgacgtcgtatccgccactggctctgggaaccaccagttccgagtctagtcattttggacatggaatgtccacggattctagtgggtttagtcatgatattagcagaatgcctgataatcccccgagaaacagaggtcataggcgtgctcattcggagattctcactttaccggatgatattagcttcgacagtgaccttggtgttgttggagctggtgatgggccttcgttctccgatgacgccgaggaggacttgctttcaatgtaccttgatatggataagttcaattcatcgtcggcgacatccacctttcaaatgggcgagccgtctaatgctgtgggagcatcggcttcaacgccggggtcaggggcacccaactatt

SEQ ID NO: 3040 - DNA, 1263 bp, Glycine max
tgacttcatttctggatatggcagggaagaaaatacatttgttttcttctcgttatgttttagcatcatcaggagtttctggcctagaaatggggccgtactgcaacggaagctcaaacactactcatagaatgagctattttgaacgaatggaaaaggcaagtagtatatgcatctttttgtaaccatgagcattttccattggcttgcatgcagagaaaattataataatagtcatacaacacaagttccaatttttggatgtgttcagtgcctgacatgatcttataatatatccctctctacaggaagcacagcgtgctatgcagtctgttgacaatgtttgttcacctggaggtttgtttctatttaatagtagaggttagcactagaattgtattcaactccctggaatttgattaaaaaaccttttcttgcttttctgatatttttatcattttcatgattctcttcatatgctgtccgtctggctctgtaaaccatagccatcaaaatcacatgtcaatgttaaagatcatatgattttactagacccatagaattgagtcaaattctacctgacttgcaagcaagtacaattttgacttctgcagccaaggaggcggtggagacaggtacggcggaggcggtggtggtggtggcaggtatggaggcggcgctggcgggaggtacggtggtggtggaggaggtggtggcggcggaggaagctgctacagctgtggagagtctgggcatttcgccagagattgcccatcaagtgctcgttgaaattactgttatggtggtttatgttatgcggattgttttaagtttttactttaacatgttgtagggattttaatggtttctgtcaaagctgtggcttcttataagtagatgcgtgagatttttcttttttttggttatttaaatgaaagtttctgtgttatcgttacaatctgcaaacaaaatctgtttggacctacattttgctataatgaattggatgattgttatcggtttctgtggtaatttgttttaaatattgaatggcataattagggttcaagtgtgatttttgatgcggtataccttgctcttcttgagttgtggtgtttttaattttttatattagaatttattaattggttagaaccgtccatccttgtgactataggttatatcactgtcattatacatctctgtttacaagaaatgcacaaacccccaagtaaatcatgactgaattttctgcgtgcaggg

SEQ ID NO: 3041 - DNA, 733 bp, Glycine max
tgagaacactgccaaagctttttggcatctttcctattaccaaatcctctgaacatactgggtcttctaaaggtccttgggacaaaccagtgtttcaccaaaaacactgaacaagttattccaaagatgctggtgggcaatgcaaaaacaaatgagaaaaagattcagaactcatttcgatattgaacattgtgtcaccatgatgttgtgttgacttttacattttgacctatgtttcccatttgaaatttctttttcttttctgcgtgggtaattaacattatagtgatagtaccctctttttgtaatttcagttgattctgtttggttgttaagttactccatttaattgtataatcttgttgatggacattattaaacatcctaaatttcattttttttagtaatctgttgcttatactttttacaggtgaaaaatgtcatgtaactgatgcttcaaatcctgctttaagttaccaagagactatggagccttctgtatctaaagaaacacctaattcagggaaaactgatatgcaacttgagagtcagatatttagtaataaagtagaaagtattaacagatctgctgctactgacatgccagagcctgaaaagttgctctcagcttaccaacatgatggtgaagcaaatgatttgctgatggcatctactcctgacaatcagggtgcaactgaaggccatacaggtgctgcaggcatgcaagctggcc

SEQ ID NO: 3042 - DNA, 784 bp, Glycine max
gctcggtaccccggggtattcctgctagagtcgaccctgcagtgtttaccaaatttttcaaaacaagatttacaaaactatatttcatccataggacgatacctttggtttgtgagttgctgaaagtgttcaaatttgtgagttgctttgtctgtcttccttcattgtgtctttataaaatatttgtgaaaagactttaagaaacacaattcaacctttcaaaacataaggaattaaactgaaaaaaatagagtaaaatttagccaattgcaaatgtatttaaacctcatgatatcagcaacatagctagcacctaatgacatcagcaacttaggattgaactggtcaaattatggaggtagacctgacgaccggttcatctttactcatattcaattcgtcctcatcatgcaaagcactgaaaaaagtcaaccgtcactatacttttattagtcagatcacttttcttttgcgtgtgcatcaattataaattttttaaaattataattcactattttaatagaaatgtagtagctttcagattccattccctttccttgaaatttctattctaacaccctccggacccacacaaattttaatagaagtgaagctctccattcccattccctttccttgaaatttctatgaaaagatgaagggtttatcttatcccaagtcaaaactcgtggtggctatcagcttctattttccagaatacaaactttgctagcttgagaaagagcatggtcttcatgttgatcatgatcaatattcagatttg

SEQ ID NO: 3043 - DNA, 338 bp, Glycine max
aaataagagggtgttgcagccagttattagaactcttgcccgtacagggatgtggaagagtatgttcaaagcaaaggctgtgccaatcagtgtcacaatcaagtttagatgaaattaatgagcatcaaagtatatagtctgattcaacttatatatataatcgtcaaccttatgaaaaagcttttaacaaaaaatgtaattattttttttaaaaaaaaaaacaagaaagcaattccaaagctgctaagaatagtacgtactgccttgttatttgtttatgaataatattagttttaatcataactgtttagatattaggctttacataattctgaaag

SEQ ID NO: 3044 - DNA, 655 bp, Glycine max
attgataatataaagcaaaaggacgttacgacaaaaagctcgttccccatgaatagttcttcgtggacaaatcaatgctctgtagtactgttggcttagattaattttactacggatttacctacggtcacaaaattgactgctgaaaatctttacagtacttcatctttttcatacattaaaaatttactttatttcttatatatatattattagtataatcaattatgcatatataccaaccgatcgagcccttgcttcatttccaaacaatatggcatacgaaaatctatttattatatagagattaaatgtgaacacttcttagttcttaactcgtgtggttgtattattatgaaacaccagcctcttcggctatactcaattctattctattaagatcttggttaaagttttacattcatctttattttaacagtatcctatataagaaaataggcaaaaagatgccacagctgcattaatttgctagaaaaatataggtgactagcctgtaaaattatgtcaatctcttgctctgctaccttatcaagccgcactgttgcactgattgcatgtagaggcatcgcaacagcacttaatttgcgagatactggtagtatatgattttaattggaccccaacaagccatttt

SEQ ID NO: 3045 - DNA, 1414 bp, Glycine max
gcataagtatgcgtgagaattcaagcaaataaggaaggaatcgttaagattcttttaagccataccggtttgccgcttagaaccctgagtatctggatactactttgtatcaccaagctgaaatcctttggattctgcttgcagcctcaacctgaactcaagcacccagaaaaacaaaaaaccgctacaactcggttaactatagaatggctaattaaaaatgactaagctgactattaagacataatcagttaccatcaaattgataataacgtgtggttatgataatatccactgtttacacaagaaaaaaaacagagtttactacaatacctataatataatattaataacattatttctataattacaatatcaaaaatggatattacatggaaaaattcatgaggttcttgattagagtgtaagcaacgtcttgcaatacaataaattttaacatgacagtacagtgtaagtatggtattgtttatttttcttccaactagtggttgattccatgcaaactcaacataaattagaatatgacaagccaaccactcaaaagacttgaacttttgttccaataatatatttcttggtgggctcctagttgacttcccaagtctacgcaaaaaatctcctctgcttttaatcttatttctcacttgatcatatcattgcattgccatttctgcaggtcaaatttgcctctaaattactctattggtgacaacactgaaaaattatgcaacataacctgattctcgataccattttcagcatgtcaagtaatgaggttggactttggagaatttcatctattaccacgattttttttggcacgatgccacgatggataaaaaaataggatgattttttcatataatttattttattatcagccctatcctcgaatttttaaagtctcattattaagaaaaatacaagcccaaagaaatagtaattatttataaagtagcattttgcaaataagctgtgacattcatcctacaacttaacccaaataagcaaggagcagaggctttcaagttgattctaactattatttgtaaaaccagaaggtacatgtagagccagattcacggttctcatcctttattttgccatataaaacaagctattgcttatgctctatcttgttggcttgattttgtaatgtgttaccacatacttccattcgatttgctaaatagatagaacaccaatgtcggatatgaatatagacatattgttaacgtgagttcagtaaggtttttggaccacaaccaatccaagggaaaggagatgtaaaaaatactggtccaataaggaattgtgatgctctagtgaaattttcctaagagtagtagttgggtgttaagtaccaaatgcaattagatgcattagcaggtat

SEQ ID NO: 3046 - DNA, 710 bp, Glycine max
tgtgatgctgtcaagagtgttgtctacaaattttgcaaaccgagatactagatgcctcaaaattaagatattaatttcagcaataggtaatgaataatttcttatggatgacagtctagattcctctctcaaaaggagaatcttctaaacaaactcattttaactcttgaaattgtaagtattaattacgttaatctttttattaattactttaatattgtcccttttttgtgaatacttatttataaaacagacaacaaaaataagaattttgtgaagtcaaagattaaaatgattggtgcatagactctaaagcaaatgggagtttactcaaaatgtttttctttttcaattggtctatatagtgacatactattttagtggccactagattgtcatgagagtggacataaaatggaccaaatcagccatatcaggtatgtgggaagcgcactcatatagctaagtgcattgtttccacatgaaatttcttactcttttgagactcaaaagtacctatctttagctaatgcctgcatgaaatgcgggcatatatgcacatgggtcctttcagattataatgtggtagaagttagaactagaaccagaagctatactaaccttggtaattcgacaaaaaactaccaggtcgcgagagaggttctggctggggctttcttctccttctattgtgtccatctaaacgtttt

SEQ ID NO: 3047 - DNA, 791 bp, Glycine max
tgtagagtcgacctgcagaaggatgtgattgtactaatggatgctccgatttggagaaatgttcgtgtgtagtgaaaaatgggggagagattccattcaatcacaatgaggctattgtacaagcaaagcctctggtctatgagtgtggacctacctgtaaatgtccttcaacatgccataatagagtcagccaacttggcataaagtttcaacttgaaatatttaaaaccgatacaaggggatggggtgtgagatccctgaattcaatcccatcaggaagttttatatgtgaatatataggggagcttcttgaagacaaggaagctgaacaaagaaccggtaatgatgagtatctttttgatattggaaataactatagcaacagtactctttgggatgatctttcgactctcacgactctcatgcctgatgcacactcagcttcttgtgaagttgtgaaggatggtggtttcaccattgacgctgctcagtttggtaatttggggagattcatcaaccatagctgctcccctaatcttattgctcagaatgtcctttatgatcaccatgacaccaggatgcctcacataatgttctttgctgctgataacattcctcccttgcaagagctgacttatgattacaattatgaaatagatcaaattcgtgattctgatggcaatataaaaaagaagtattgctattgtggttctgtggaatgtactggcaggatgtattgagggcaggatgtatcgagggtcaacaaggttaattaatgtaattgtgttttt

SEQ ID NO: 3048 - DNA, 757 bp, Glycine max
aaggatgtgattgtactaatggatgctccgatttggagaaatgttcatgtgtagtgaaaaatgggggagagattccattcaatcacaatgaggctattgtacaagcaaagcctctggtctatgagtgtggacctacctgtaaatgtccttcaacatgccataatagagtcagccaacttggcataaagtttcaacttgaaatatttaaaaccgatacaaggggatggggtgtgagatccctgaattcaatcccatcaggaagttttatatgtgaatatataggggagcttcttgaagacaaggaagctgaacaaagaaccggtaatgatgagtatctttttgatattggaaataactatagcaacagtactctttgggatgatctttcgactctcacgactctcatgcctgatgcacacacagcttcttgtgaagttgtgaaggatggtggtttcaccattgacgctgctcagtttggtaatttggggagattcatcaaccatagctgctcccctaatcttattgctcagaatgtcctttatgatcaccatgacaccaggatgcctcacataatgttctttgctgctgataacattcctcccttgcaagagctgacttatgattacaattatgaaatagatcaagttcgtgattctgatggcaatataaaaaagaagtattgctattgtggttctgtggattgtactggcaggatgtattgaagggcaacaaggttaattaatgtaatagtgttttt

SEQ ID NO: 3049 - DNA, 869 bp, Glycine max
  misc_feature (637)..(637): n is a, c, g, or t
  misc_feature (659)..(659): n is a, c, g, or t
  misc_feature (750)..(750): n is a, c, g, or t
gtcgacctgcagtcagaatcattgcctccacttactagccactgccacgattgaagccaccacaatttcctaaataattggatcgattttgtgaattgaaattattcaaggatgaattgtaagaattcgaagatgaaatgtaaccttgagcaacattaatcgaaggtgaatcggcaaaacacttctaaaactttttcatgcgtgcctcatgtgcaagcagcagtgcctctacttctccaatcggaagtggtttgaacttactttcaatcactgagatcattgtgttcacgggaagaacaggatctccacacgatccaagcgcatcgactatgtattttatgcgcagaagaaactcacgcattgttttggctcaagcattgtagttctgagttctgttcaaagtatcctaactttcgcactgtttgcttttgaaaatactcatggatctgctcccaaagttgatatgaatgagtgcatccaattattcgagataggattgaaactgaatgagtcgattggagccgcgacaagagaatctgatcttgatgttgccaatcggggggtggttggggttttgtttgttcgcccttttaaatatttgtcttttttttgtttaaatacggccgtttgtgggttntgttgggggaggggttgggccntcccggggctcgttttgtggtgggtggtgtgttggggtgggtgtttggtgtgtatgggggagtgctgcgctgttgtgtcgttggttggtgntttgtgacgtgtggtgtttgtggttgtggtaggcttgggtgcggtgtggttgttggcgttggtggtggtcggggagggtgggtggtgttgggtatgtgtcagtcgtacaaactaccaaa

SEQ ID NO: 3050 - DNA, 672 bp, Glycine max
aggcaacaggtagaacctggcatcaaggctcgtacacttcagcgtttcgtggcaagtcctcagatctcgatgcgctttctcaaagaggcagattgtgaaggtggaaatgaaaatccaacatactccgattgggaacatcaagatcagattctcttgtcgcggctccaatcgactcattcagtttcaatcctatctcgaataattggatgcactcattcatatcaactttgggagcagatccatgagtattttcaaaagcaaacagtgcgaaagttaggatactttgaacagaactcagaactacaatgcttgagccaaaacaatgcgtgagtttcttctgcgcataaaatacatagtcgatgcgcttggatcgtgtggagatcctgttcttcccgtgaacacaatgatctcagtgattgaaagtaagttcaaaccacttccgattggagaagtagaggcattgctgcttgcacatgaggcacgcatgaaaaagttttagaagtgctttgccgattcaccttcgattaatgttgctcaaggttacatttcatcttcgaattcttacaattcatccttgaataatttcaattcacaaaatcgatccaattatttaggaaattgtggtggcttcaatcgtggcagtggctagtgtcgtggaggcaatgattctga

SEQ ID NO: 3051 - DNA, 511 bp, Glycine max
atcagtatgctatagcaaaatttgctgaaagttttgaaatgattcctagaactttggctgagaatgctgggttgaatgcaatggagatcatatcttctctgtatgcagaacatgcatctggaaatgccaaagttggcattgatttggaagaaggcgtatgtaaggatgtctcaaccttgagcatttgggatctccatgtgactaagtaagctatgatctaacacaagctttgttgtatatggtggcaacctatagtttgagcaaatagtgaactgacttttcattgctgttgtgtagaactggagatttctctaaaaacccttcccatataaaaaatatatagacaataattaagggttcttgtaattgatggagctgatgcattctttgaccgttaagattttgaaataattctattatatgttgaatcagaatttatcttcattatctcctggaaaactagtttcatcttattgttttttttcctgttcaggttatttgctcttaaata

SEQ ID NO: 3052 - DNA, 725 bp, Glycine max
cagcttgcatgcctgcagtggctcatttccctaaacaagtttcaacctacaaaagaatgcagcttggcagtaaaacgcattgatcaattaagacccatttggcaatcacaattgaatggcacccatcaatcaaacaataagcaaatacatcaatccagacataaattcatctactttcaacaaactcaaccatttcgcataagtattaagcctgtaaatatagaaaataccaaaaaaaaaacatgtaaatatagcaacatagtgcaactcaaaatcaaacaaataaaccaaactaaacttggcacaaggcaagcaaaacaagctataccaaagccaaatccaacaaaacaagatgggtactaaacatacctcgccactgatgacttgattaaccatttgtttggcagactcaatttgttcaggggtcccttcaatttttaatgttctttcggtagatgtgtcacctggtggaagatgaagaggaatcacctgaaaagacaaacaatacatgatgaacgacaataatacatgggaagtcaacaacatagtaatcacaaagtaatggaaagtcatatgaaaataatgatcaaaagaatttagcatccattattaaaggaacactgaaatgaggacaataatattaaagagggaaacctgaattcttgctccagttgaagcttgcatattctttattgtttctccacctttaccaattacaagaccaa

SEQ ID NO: 3053 - DNA, 443 bp, Glycine max
gcctgaacatgtgcctcggccacatagcgacacgtctcaccgaatctcgggtctgtttcccccaagacctgcccttgaatctcaagacctgctgtataaaacagcagggaattctcaatctgccccatcattgcataagtgtctcccaattgcatgcaccctgcaaacttagccagtgcatgatcttggccatcctccaacaccggaatatcaattgaacgctccagaaccggaatggcctcattgtactgtcctaaattacagtatattgttgccaagacatgcagacacatgaccatgtccaaactcggtttcccatctgcacaaatctcaaatgatttcaaagctctaacagccaaatcaagcgcttttcgaggattctcacccgaggagatcatatctcttgtttgcttgagcaaaaatggtcccaattcaggattatc

SEQ ID NO: 3054 - DNA, 695 bp, Glycine max
ctgcatttcttaatccttcaatttcttacaacccaaacttcaagaaagatttgaggatgaggaatgggtttcaagaagccatgctcaggttggcaataactgataaagacaaaatgaaaatcaccaaagaacttcctacttacatcaacgcccaaggtgcacttgggactgactttgctgtcttgggaagaacactgaatgcccctggtatggctcttcaacaattagataccttccgttgtgttgtaatttgagagtcattgttgaagtgcattgtacttctgcttgacatacccttattgttgcatcataccaattgcatctaccaaaatagttgcaaccttttacactaactcagtcaacactcaacagttctatagctctagtacattttacagctaagtcagaaaattattggttgtagcccttgtattgaaccatgtctagaggaattttaagtatcaaggatatgaagaacaagtaacatgaaaaatggtcatggaggattagctttagcctttagatgtttcaaaagcttgtgctcttgtatagtcccgctgactttttcttcttttctcaattaagcatgcatcttgtgtttttgtgcttctgaaatgtttttgcttatttaattttatggatgtctaggcgactggtgggccagttatggttatgaaatccccacactccagaaa

SEQ ID NO: 3055 - DNA, 683 bp, Glycine max
tcaatcgggactcatcaaattcccattttgtccaggaaatgcaattcactctattgtcagcaccattccctatggatcctcaatcttttaacccttcagacttggttcttaaggagcattttgaaccgagggctatagctggaacttcactgggacattgccaatctttggaccagcaatcatctgatcgttatctcaatggttcaattttttcaatgaaggtatcaacttgtgtttttgtctgcacttgcatgtcttgtgagtttttttttttttttttctaactttccttggagcatgcagcttcatcttcctacatattttattggatatagcatgtctcctagattttgaatcctcatgcttctatagacttctgtgattctagtagttgatacttgcactaaacatctaacttaaatttgtcatagccatgcacgattatcattaggatcatattttaatttatccaagtataataacaaaagtttatgatggataaagtacaaatggttattagtctacaagtgactatgaaaaatatctaagccacagttttgtatgattagggggtcaaattgccgagtgttgaaccacacaagtttaactcatggtgcttctctgatataatgaagagtatgaaaattctaatgcatacacccttgttagtgttccagagctga

SEQ ID NO: 3056 - DNA, 684 bp, Glycine max
caatcgggactcatcaaattttctcattttgtccaggaaatgcaattcactctattgtcagcaccattccctatggatcctcaatcttttaacccttcagacttggttcttaaggagcattttgaaccgagggctatagctggaacttcactgggacattgccaatctttggaccagcaatcatctgatcgttatctcaatggttcaattttttcaatgaaggtatcaacttgtgtttttgtctgcacttgcatgtcttgtgagtttttttttttttttttctaactttccttggagcatgcagcttcatcttcctacatattttattggatatagcatgtctcctagattttgaatcctcatgcttctatagacttctgtgattctagtagttgatacttgcactaaacatctaacttaaatttgtcatagccatgcacgattatcattaggatcatattttaatttatccaagtataataacaaaagtttatgatggataaagtacaaatggttattagtctacaagtgactatgaaaaatatctaagccacagttttgtatgattagggggtcaaattgccgagtgttgaaccacacaagtttaactcatggtgcttctctgatataatgaagaggtatgaaagggcaatgcctacacccttggtaagggtccagagctga

SEQ ID NO: 3057 - DNA, 713 bp, Glycine max
tgcagtagcttcatcaatagctgaggtatgtctttttcatcaaatacatatcataggagaagatagttaaactgatattatttttatctgtgttgcacaggagtcctttggtgcaataagaacagtaagatcatttgcccaagaagattatgaaacaacacgctactcagagaaagttaatgaaacacttaatcttggtcttaaacaagctgtgagttagccagttatagtttgatatgtgcttgtgtgtagttttatttgtttacgtttgcaacatttaatcttatatctcttttgcaatacagaaagttgttggactcttttctggaggccttaatgctgcatctacactttcagttattatagttgttatatatggagctaatttgacaataaagggttacatgtcctcgggtgatcttacatctttcattctttatagtctctcaggtaagttcgtcgttctattcttcccttttacatgacaatgaatcctgtaaaacattcactatagtttaaagtgtgtatgatccatggatatcactttttagttggttaggatgctacttgttatactttcctgatttaattcagtgatagtttaatttgttgtatctgaactgccagtgttgtttttatattgacttggctcctttgtctttgtagtgggttcttctatatccggtctgtcaggattgtatacagtagttatg

SEQ ID NO: 3058 - DNA, 730 bp, Glycine max
aagttaggatagtaatatccacaatactatcttgataaattgcattgaacacacatgcatgcacaaggtgtgtatatagtgaggaagaatcctgatactatattgtaaaaaaattcagtttattgtaaataaccatcagcattaatttttatattgaacatgcattttcctaaagtgcatgtaagacgctatacaacttcactgtgtatctccccacacaacttacactactaaaaataaaacaatgtatgcccccactttttttttttaggggaggggagtgcctaaactctcagcagtgaacttttttattcttattgtagcagcattcatccttcactgaagtaacagaggaacaaaaactgtataaaatatgcaagcttcaactctaagacaaattgaaggtgttagaaatgggggtctaccgttggccttgaaggatagtgaaaagatacatttagaaactcaatacgccctgttaacctctgcaatgttacccctgcaacaaagttacactcaaacttcaatatagtaaaattaaaacagaagcaaaaagttatgcaggaattcatcatgtttcccatgagtttctgttttctcttatttatttattgttacaatactgtaggtagaggaatgagaatagatacagatactggatacctagcactagctaataagtattactattatcacaaaaataataaattgagagctgcacatgacatga

SEQ ID NO: 3059 - DNA, 609 bp, Glycine max
tacatgaagaattcacagaacctgctgatatgattgcatcgggtggcaaaacatttctattttgaaaaacttcaacacgtcgtgggacccactcatccttctgctccctatgtcctagcctacagaaccaataaggcttgatgaaattttgaacacaaggagtaagaaccagatattaaaaaccaatttgaataagaattatctgatatttgaggtttattgggagttcacaaaacattgccaacccaacttcgaactaagcactgaccttccataaccaccaaaaccccacctgcacacccaacacccaagtaatcaacacatataactatactcagggaagtaaaacaatgaagtaggagactagaggattactcacgtgtagacgaagccattcttatccaccgccactaaatatccaaaacaaaaacattaaggaaaagtagtaaataaggttatataaccaagatcaagcaaggaataacaaccacctgtatgatttgttccacatgccactttgacaattgcttccccagcaagagcagcaattgctcgaggacgtggctggggttcataaaccaacctcacagagctgtctttggaattata

SEQ ID NO: 3060 - DNA, 681 bp, Glycine max
aagcgaaaataagctggggttctttcgttccaactccacacgttccatcaattgcattgttcctccccaacggcttcaatgccaaatgagccaccttctgctttgatatcatcatcgccccaaacatcggaccctgcatatatagtgaataagggattgagagagtgcagagaacttgcgtagagtttggaaggagcagaaggcatggtatagtgtgtgttgtgtcttctgctttcacttccaactcatttcgtggaagtacaacgatgcaataacacttcttgggctttgaggcccaagttattttcctgaaaagtaaaaaaaataaaacactaaaactaaggaacaatttcttaattaccaactttttattagttcatgcattttgtggaacaactagttagcgagagcaaaacaagccacagagcagcaaacaaattgtatttcaaagacagtaacaactcaaggctagaacaagaaggatacttcagggaaacatcagaagaatacccaatagaagacgtgttctttatacaataatttcagagaaaatcaagatggattaccaattgaagtttgtctttgttaacagttcagtgcccaacggcttgcgaaccaccatggcagagaagagttgtccgccgtcacacaacggttgccctcgcaccagaccaaggagac

SEQ ID NO: 3061 - DNA, 713 bp, Glycine max
atatacccttccctaaaaaatagcaatatctgcctttgtatggttaccattttttcctaattaaaattaaaatattttgacataaaaattataaagctactgaaaaaggagagtaaactgatattcacaccttgtaaacattaataaaccaagaaaaaaagataaatatgattttcctatacagtatacatagtattatcatgtttaagtagtttttatgtatatccttgtgtttactttttttaaatttatttttggttgaattagatgaaaatatcatttgtaatatagaattcatcacaattattgagtcagcaattaagacgaggattcttaattcttacctagtgcagaacaaacaatcccaagaaagacaaaggtccccccaacaatttttggatgaatggcctctttcaaggaatgctctgccactgagatgaagttatgcagtcagcaccacgacatgcaaagtaagcaacatgcaaaggttacaacacgtggctctgtgctgagcatgtgagcctaaacaacagtactaaaaaggaaagaaagaagaagtgtaacaagatgatgaggaaaaggaaggaaggaaggaagaagtgaacagcagaacacaagtcttcggagaaaatatggaaaagtctgaactctgaaatgtcaatttttctatgaaaatgatattttgagtatattacactgcaggcatgcaagct

SEQ ID NO: 3062 - DNA, 702 bp, Glycine max
gtaatatactcaaaatatcattttcatagaaaaattgacatttcagagttcagacttttccatattttctccgaagacttgtgttctgctgttcacttcttccttccttccttccttttcctcatcatcttgttacacttcttctttctttcctttttagtactgttgtttaggctcacatgctcagcacagagccacgtgttgtaacctttgcatgttgcttactttgcatgtcgtggtgctgactgcataacttcatctcagtggcagagcattccttgaaagaggccattcatccaaaaattgttggggggacctttgtctttcttgggattgtttgttctgcactaggtaagaattaagaatcctcgtcttaattgctgactcaataattgtgatgaattctatattacaaatgatattttcatctaattcaaccaaaaataaatttaaaaaaagtaaacacaaggatatacataaaaactacttaaacatgataatactatgtatactgtataggaaaatcatatttatctttttttcttggtttattaatgtttacaaggtgtgaatatcagtttactctcctttttcagtagctttataatttttatgtcaaaatattttaattttaattaggaaaaaatggtaaccatacaaaggcagatattgctattttttaggggaagggtatatactggc

SEQ ID NO: 3063 - DNA, 565 bp, Glycine max
cttatcggcattggggaaatattatgcaatattcagcagctccctgcttattctttgtaggagaccatacatatacattattaacaatacacattctaggaatcatctttcttgcacatgcaagctaaatgtttatccaaacctggacaaactaccaaaacacatcaactttttatacctccaaatttctgttttgctctagccaagtaacattagtttcctcgcaagagttttaggactcatgaaccaactcccgcaagtctataactaatttttagtataccttctaaacaaataaatacaaacaagtgaagataattggcaaaagaaattaaagaaagaagctgtacccataaaataaataagaaaacctaaaattctacacatcctagataaataaagacgcagctttctcaccaattaaaacaatatacaatgctagacataacttcatgagtgcgctcgagaatttgaagcagaatacagcagaaatgaacttactcaaataaaaacttcacatagttaatcacatagcttgtcaaaggatggacagttccatcagtta

SEQ ID NO: 3064 - DNA, 686 bp, Glycine max
tattgatccagttaaagaattctcttctagatgcaaagaagataactgcttcagagatccaatttcaggtggtatttcaccagagaaattattgttgctcaagtaaagcttctccaagttcaccagcttgccaagctctgatgggagcttacctgaaaacctgttctttgtcaaaactatatgacttaagctagtagacaacccgatttctgaaggtacctcaccagtgaaatcattataggccaaatcaattatttctacatatggaattgcccaaacctcgtctggaattttcccagataatcggttcatactaatcctaaacctcttcagagatttacatgtaacataagactccggaaaagtcccagagaaattgttttgcaatgcaagcaaaaacctcaacttcctgttttcacacaagaactttgggaaatcacctgaaaattgattctcagatatgtcaatactttcaagtggtgaaaacctgccaaaatttcccggaatcgtcccagtgaagctgtttctataaattgagaatccaatgagatgacgcatatctgcaaatccagcaggaagttctccagaaaagttgttttcatatagttgaaaaacaaccaagttcttcatgttaccaatttcctctggcaacctaccatacatattgttggcagaaaggtcaatct

SEQ ID NO: 3065 - DNA, 730 bp, Glycine max
tccctattattcactgaagtaatgaataagtcgttgaagaaagttgggcatgtcattatgtcaaaatgcttctgacttctgagggtcaaaagtttacacctcttttctattttcgtaaaattcctgaggaacatttttcttctgacatgtaaagtgaaattttatagctcattgctgtactgccgtttaatatctgacaatcattgaagttaattaaactatctcataaaagttgttggtgatgaatgtctggaggtgtaagcgcaaaatttgcgaccagttaatgaatgtcttatcaacgaaaatacgtgtactactaatcaaccaacatatgtggcttaaacaatcctagtttgccagtagtataaatgctggggttacattatcagtagatgtttttattagagaaccaggtcatgatcttcagttgaatattgccacaagtatgacatgtgttatgcttgttttttccatcagaatagagtagtggaaaaaaatgctaatctgtgacaaatttaggttgtgtaagttgaagtagttgcatggaatgcgcttcatcatgatccttgtgtcagtttctaattttcaatgttattttggcgtaaacaggttgaggaatatagccttcggacgcatctcatgcagatcaagcaaataagtaaccaatctcggaaattcaaacacgcatgaccctgacctgcttctacgctaacaagaagtcttttgcagc

SEQ ID NO: 3066 - DNA, 705 bp, Glycine max
agtcgacctgcagacatagttacataaatacagattttgattaccagattcttgggcttctttttctttgttttaactgatgtttctccacagtcataagctacttgcttttcaaaatctccaactgactccacctccaaacttttctggatctgtgatccaacatttaaagtactctggtcatcctgaaaggaattggtgtctccactagaagcatctgtcttagcatgagcctgtactgtcccagagatcacagcaaaaggactgacaactctctgcctagaagctgtacgcatgcgtttcgttggaattgatccaacatttaaactagcgggccttcttccaaatagcacggatggctgagctccagttgaataacgcccataaggcaaatcaattccaatttcactggacttatgagtgtaagactttatcctgtttttgtgttttttctgaaatgattttgatgatctgctaccctcatagacaccaggcaaataataagtactattttctccttcatcctcgtcatatgcaacctcttcatgcccaaactctacatataaattttgaaaggaaaaaaaatattgtgattgattccagactgatcaacaatacacgtataaatcaaataatctacatgttcccaatacaactctctgcctagaagctgtacgtatgggtttcgttggaattgatagtacc

SEQ ID NO: 3067 - DNA, 535 bp, Glycine max
attttcgtcacttaagttttaaacgtgccaattgagtctttttaaatttctctcttttacaattaggtccttccatccctccaacatctccgatattagatgaaattaagatggaaggacccgattaaaaacgaaagaaaacttgaaagacttaattggtacaattagtacccaatctgagagaataaaatcgcacaattatgacacaacacaacacccgatagatttaaaatgcaagtgtacaccaatttttttattatattattttatatatgcctcaactccaactcaaattttaattaacaaatcaaggttttaaataacgatcgtgctagctttgtagtttcgtcctatttattggtatcgcggacaaatgtggtcaatgcgatctcagttgcggtggcggacagttaacaaaccttgatgttgtggccaaatgacggactagaccgttttttaaaacctttaacaactttagtgaaataacaaaacatagtaatcataagtgtagatgcagaaactaaccataaagact

SEQ ID NO: 3068 - DNA, 701 bp, Glycine max
aaagaataatgaagttactccatattcaagctatgtaagaataaaatcttaatttataggatgtggacctctagtagactaggatgtatcaatgcaacaccctaattcctagtatctatcaaattctcacatctattcagctctgtggatgccaaaaggggaatgcaaaataatagcagaaattcaggaaaaaaatggaattagtgtgtgtttgggtgagcacttaaaaaaaattaattttgaatgaaattgattttgcaagatttttataatggtaaaaaatgagttaattgaaataatttgtgtttgaatgcttttattctaaaataaaaatattagtaaaaataaaagttatttcaattgaaaattgatttttgactcaatcaattcttcaacacagtaccagacataggagcatttatctaaaatcatattagctggtagttcaacgtgattttagatgattcaacatgaatccaaaaataagaaaaagaaatgcttactttatctggtagacaatagccatgatcaataggaatgagctttatctggccatctgcctcctttctgatcaatatattcccagcatgcctgtctgcattagccaatcttatatcaagcacagcaatcttatgcacctcctccactgggaatgccgagggtccatagtcctcacaattaccatcattactcatgaactt

SEQ ID NO: 3069 - DNA, 778 bp, Glycine max
aacaacattctcagtggccgatagacccaatacttagttgaatccaagaatataggccaatggagctagtcggtatcatataggtcaaatacttaattgaattcacccaacaggagataagctgttgcgattcagaactgtaattattgtttgatgatggaacattttaatatagctactataatccaaatggtcaaataagatcctataactaagcacaaaaatgatatcttaaattacacgtatcaattttgccggttttaaaagaattcagacatttacaggcaaaaagctgtccacaactcaagttttttgtccaatcttatcaaaatgggagaccaagcagcaaactcttaacagcagcaggaaaggtaatagatgcacaaagctagaaacctgctgccagaaacaattatttgtgcaaaatgacagtttttgaagggaaagaaaaataccgtatctattcggaggcaaggaagatgattcatggattattgtgtttcgtgctccatcatccctgcaattacataatacttgattgatcaagcagactcaattcaagttaaaattaagcactgccagaggaatgtgaaagtaatatctattgcattaaagaacccacctgtatccttatataagggggtgaaaactaagcaggaggatgtcattggctcgtctgcaggaatgtttagcatatgacgtaacatgtctagctatttactgaacagatatataacatgacccttcaaaatctgtattgatttaaattttaaaaaca

SEQ ID NO: 3070 - DNA, 1806 bp, Glycine max
aggtgctatgaacattctcttcaactgacacaagttgaagaatttcagctaaatgggtttagaatttttatccttgtttcagctggaaacaaagagattgctatggcttattggcattacatttgcagtgatcttaactttccagtacctcgagtttccatatggaactgttctactctctctattctctgctgagaagataccaacaccaggaagtagtacattcaaggcttcagatgcaccgtctatttccgaattggttaacaatgttacgcttttcaatccagcaaactctactggtgaccatgcctttgagatagctaataaaacaaagtctggggaaaatgacaccattccaagaattggcttggtcttggaaccaggaagcacaccaaacaactctctaggattagatggctctgaccaaagttccaaaacgaaaagtattaatagatcagaaaatgtagctgaaacaccgcagggaggagatcctggaccaatcagttttaacaatactattgatttgagtttctctgcaaaccagttccaagaagacaacatttcatcaactgaacagaaatctggaagtcaatatgcttcttcgacaaatgtgagcacaaacattgtaactgcagatatttagtccttcaaactcagattccaagatggtattagagtctatcataacggttgttggacctatcgagtcctccgtcataggacctagaaacttcactaggcacaaactcaaattctgcattcataattcatatatataccttgggcagaggaggaacctccatggcctgaaagctatgagaagaaggagaagaagaaatcaaatcatcaagcgtaacgaaagaaggagaatcccacacaaacaaatccgaaagcccttcaatttctccaccgaagatcccatcagcgccacttccctgaggcgaagaaagaagagattttttgcttaaatccgaaaaccccacgatggataagagttcggagactgaagggcacccagtgaagccttcgaggggccttcgttcgtgaagggaatcggagagcgcagggttgtgcttctcccagtcgcagttctggcacagaacagaggtgtcggtggaacagagtatggtggcaggggaatgatcgcatgcgtcgcagagcagcgtgcgcgtgtgtttcgagaagagctggttggtggagtgaacctcgcgatcgcacgagaaacagagttttgctgaatcggctctgcagtcaacatgtccttcacaaacttctctattcatccttttggtggtgaggatacctgtagggcctgatatatggtatttgagatccagcctttgtctctattgcatgatcacatcttctagtaggaggtagttcaatggcttcttgaaaaagctctgcatattcctccaactcactccctccagtccttccactgttcttagcaaatccaagtcataaagtgttaacattcctaacaccacatagtatgactcatttcctcttttcagctcctttaatgttgcctttgccacagttctagataatgatggatccccctttatttctacctcttctccattcacattaatccttattacatgaaccttaaaactagcctttatatctcccaacccctccaacaactcatccaaaaaccacatctacccctccatagacatgcagatgctagtttatgcagacatgtcctgggtaaaaagggtcattgaatctaaagcacactcttctcctcctcttgacctctaattctttgtcagtcgtcttcttaaatgatgaatt

SEQ ID NO: 3071 - DNA, 1172 bp, Glycine max
  misc_feature (551)..(551): n is a, c, g, or t
ttcattttaaatttcagtcatgtataaagaagtattagatcaaaacattattgtcttacaccctgtcaaaccacatccagcatttatcttatatattgagaataaatattgtacttcatacaattcattttttaattagtggaagggagatttctgtaacataaaggacaattttcgtatcgaaatacaaagtttatatttaatcaatctctctcttacatttttagttttcactaaattttaactaatagtagagtgagtgttagaaaatctattgctagcattcctctatttcaaatactctctgattcaacaagataattaaaaattattttgcaatatagtagcatacattacctcgggtgcatatatatacacaattgtgaaggttgctgtgatgcatatgcgagctagaaataaaaagctcgttgttaggccttcaggcagatagaataataatgggagaaggaaaatacagcacatgaagaacatgattgacattgagagtttacgaccgagtttatctactgctgcagctgacaagaggagcncaggtagctctatgcacaaaattaagttatgtatcagtcaagcattttcctgcagagattatcataccatggactctgcccttctttctcataaagatcatgaagcactgtcctctttgcaggacttccattcccatctgtttgggagcatttgatcctgaatgaacacaatcaagcatcaaatatttgccttctatatgagagatgtttaagaaacaatactacaccttcaaactaattgtcacttaagtgggcatttcgaagagcttatagaaagcatatatagacttattatgactcttacatgctctttgcagcttacaaaggaatcagaatgacactcttcctatttgtagacaatagaaagcgaatgattaataatttttattgcttttagtaatgttataataatttgaatttgcaaaattgcaactatatatttattatgttttatgatttttttttataaaaatctagatatgtatcttcctcgtatcatgtcctatatatttttagaataataaggaattgtatcagatacacaatatctgtgcatcatacttagcatgcaatgacgagttcatagtaacacaactcgcacaaaaactgaaaagaaaaatt

SEQ ID NO: 3072 - DNA, 1090 bp, Glycine max
tagtgtatgttctaattcctgggccatgtcctccagtatccctttcccttccttgctgtgctcgcctgacttccttttgatgctcagttagttctaacctcctctttttaaaacttaaaggaggtgattcttttagtgtatccaacactagttccaccctcttagagctcctgttatgttttgcagagaccctatatccctctagagcatcattggcttcgtcatgagaataacatttttgaagacatggtaggcttctcttctggagttttaaccttccatttctggataacttgtccaaaacacaaagcagactcgaggggaaatccaaaataatttgctgaccaaacgtagaattccaaaagttgatggttggttctgaaatggaggggtatgggtgatcaagagttttttcaaacagaggttcatgaagtttgagtaaagcagaaccgaagttgactggtggtttacttcttcttaagcagctaagaatttctgtccacagaagttgaagttggtcgtttgttctttcatcctgcattcccatatttgatagccattgaagcagtgggcaggaaacattctgcagaagagctctctatgatgctgactgggtgtcagacattgatgatagaagatcaacatcaggtgctgcggtttattttggtccaaacttaatctctgggtggtctagcaaacataaggtagttgctcgatcaagtactgatgcagatatcgaagcctaacccaactacagctgaaatttcatggattaagaccttgctgactgaattaaaagttccattcagaactcctgtaatcttctgtgataatcagagtgatgtggctcccactcataatctggttcttcatgctcgaacaaaacacatggagattgacatcttttttgttagagaaaatgtcttcaccaagcagctagttgttcatcccattcctgcactagatcagtgggctaatgcactgacaaaacctctttctcccacaaggtttatctttcttaggggaaaactcaatgtagttgacactttgatagtctcaaccttcctgagtttgaggagggtattagagt

SEQ ID NO: 3073 - DNA, 681 bp, Glycine max
tcctgcagtcctctatctaattataaataattatgataaatgttatgattatgaataaggtttcttaataacctgtttatacatgttttttaaaactgaaaattattctaattacatagaatttgtaagatttataacatttatttattctaacacttaagccatttaattgctaaagtttgaaatattataatttagagtgtagttgctggtagagtacaagcctgacgtgatgtttaatatctaataaaaataaaaaagttaaacaacatataagtgaaaataaaactcataaacttgagtcttaaggttttgaattaagatatgatgttaagtaacacttatatgattgttcatggttcattagtgtaaatttctatgatatttatcaccttagtcacacaagagtgatctttctcttcatttataatcaattaagaaagaattatttcatgccaaccgtgtcttcatgataatagttataaacaagaaaccaaaaatacgattacatattataaaaaaaaaattataccccctgaatcttaaacatttacaaaagcaaataaataagagaaagttatgctacagccttcccttcacggtattcaaatttagactcgtggtaattaacagatcatttccccaagttttccctgtgcagcttcagaagaactctttact

SEQ ID NO: 3074 - DNA, 619 bp, Glycine max
tggtctactgataatctaccaacatcttccaaattatcattgggcactctttcataaaaatgatctctgagaaattccacagccatgaatgtaagcgctgaagctggaatgtaccatgtaatcctggggacgctacctctaaacatccccttcatgccttctgtagcccatatattgtgaattgcatctaaccagccattatacctaagaaaatgttagacagcaaattaccatcaatttagcttagtccaagttcatcagaaacatgaccactcaactcactccactgtcacaaaataaccctgtttgtgactatgaaaagaaaaattgagactaggtatatcacaagttattctgtagatgcccactatactagaaaatcaaactccaagccgataagttcacagactatcaataaaaaatatccagtatcccggttgcaggaacacattgtgcatgccataaccagttagaatatttactaaaggaattgatacctcaaagttgaaccctgcacttgcagtctagttttaacaacatccaaaggagtggtgagatatgcactgagacctgttcaattatagtgaacaatactgagttttatggaagacaaagaaca

SEQ ID NO: 3075 - DNA, 737 bp, Glycine max
ccaaagcttgcatgcctgcagaataattaccttcgcatctgtcgaggatcaggtctaaaggatggaggaacagcaattatgggtgctggtccacccatatgaggaccagatcgaatcttccttcctgaggcatcgtatgacgaaggtcctccttgctccctgaacatctgcattgcaacttctggtggagcagggacaaagggtcctaaaggcctgtagagatgcaaattatacaagcaccaacaaaatctcaattgaagaaacaaggcggatcagatttggtagatggagaagaatggaaagggaaactaacccagcaccaggtacaggcatcaaaactggcggaggggccatatctgaggtaaattgaggtacaccgggccctccatatgcatcatacattgcttcatcatgatttcccatttgtctttcatgggatggggaaccatcaggcctatctccgtttattctgtcactcctgtcctggtctcgccggttaccacggtcatccttcaatcggccctctaaacctcctaatcttcgcttaagaggcctatccttctacaaacagaacaaaaaaggactgagcatttaaaaatcaatctataccaccaacattgtacagaaatacattgctatgctaaaaccataatacatcaggctactagccccatagacagagcagcacacattgaaaggaaatactatgctgattccacaagcagtacagaccccat

SEQ ID NO: 3076 - DNA, 1802 bp, Glycine max
cagacttagtaagtgcttttgcttgacagaactagagattgattgttgttaagtgggggggggcggggtttgcatttccggacagaagtggagacaactctgctctacacatacagatttataaattattcttcacaaataacagaatatcatttaactgatgttgaaatggcttcaaaagaggttgacttaacaagcttcaaaatccatatcaggggtgaggagtaatatatctttttgaaagaaaatcaaaacaatatcagaagaataccttcttttttcctttattcccaccacacttattctttttactggcattatccaactgcagctttagggtgtttgggacagctgaaatttgtttctgagagaaaaaaaaaaagttgtttgaaaaataatcatgttttgggatatcaactgaaatttggaaaaacttctttttggaaaaaaattgtttttcatacatctgaaatggaaacttgtcttttcaccctaaaaaaatgtaattcccaaatttctcaaccacctttttctatttcagtttcatacatactcttttttgcaattgactatgtaaaaactaattttgtgttgtatccaagcaaatttgcctaaacaaaaactgatttgattataatcaattgtacatataatcgattattgaaataatctaatcttctaaacttgatgtttttatttgtactaacagcttcgattttttcttcttttttacaatagattgactcttaaatttttggtccttggagtgagaccttttactcttttttctccttcatagaacctggtcctctagtacaactaggatgtgggacaatttctggggctgttggagctacttgtgtctatccattgcaggttattcgaacaaggtacaatgctttcagtattactgttgtttctctgttcttccccaaagaaatgatggagtgaaggatggtatcagttgggtactttaaagctgattttctagttatgttatggttgctctttgctgtcaatataatattacattaccatccttctcagactgcagatggtttctctccccatccatactctgcattggacaagtaacaatactaattatttatcatgtttcacaatttgtaatagaattaattaaaaggttaataaagaaaaagttgtaaggattctaacctggaggtatgtaaccaattgagcccctaaggacatgagtggagcttatggaaacttgatttgttgagttttgaatcagcgacctagccaatccaaagtctccaacctttgctgtcatgtcttcatccaatagaatgttgctaggcttcaaatcacagtgcacaactgggatttcactatcattgtgcaggtaatccaatgcacaagcaacatctatagctatgttcagtctctccataaggttcaacccatttccgtttgcgtgatttctcctccccttgatccaatcttccaagctaccattgcacaggtactcatacaccagagccagaaaatcattgtttttgaagtcaacactagagcatgatgtgatcagcttaaccaaatttcgatgccttgagttcttcatagcctcacattctgcaaagaaactcttcaaagagccagttcttagggtgtcaagaactttcactgcaacagtagctccatgacttagatggcctttataaactgagccaaagcttccaactcctaataggttttcctggctgaactcctcagttgccagacgaagttcatcataagagaccattggtacatgaggtttcagctgttcagatgtt

SEQ ID NO: 3077 - DNA, 738 bp, Glycine max
tggggtgtttgggacagctgaaatttgtttttgagagaaaaaaagaaaattgtctgaaaaataatcatgtttgggacatcagctgaaatttggagaaaaacttatttttgaaaaaaaaaaatgtttttcatgcatcagacatttgaagcttgtctttcaccctaaaaaaacgttattcccaaatttgtgaaccacttttttctctttcagtttcacacatactgattttttttttgtaatttactgtgtaaaaactacttttgtgttgtatccaaacaaacttgcctaaacaaaaactaatttaattataatcgattgtacatataatcgattattgaaataatctaatcttctaaacttgatgtttttatttgtaataacagcttcgactttttcttctttttttttttatactatagattgactcttaaatttttggtccttggagtgagaccttttactcttttttctccttcatagaacctggtcctctagtacaactaggatgtgggacaatttctggggctgttggagctacttgtgtctatccattgcaggttattcgaacaaggtacaatgctgtcagtattactgttgtttctctgttcttccccaaagaaatgatggagtgaaggatggtatcagttgtgtaccttaaagctggttttctagttatgttatggttgttctttgctgacaatattatattacattaccatccttctcagactggaggca

SEQ ID NO: 3078 - DNA, 1120 bp, Glycine max
ctttaacattcacaccagatggattttcaacacttgcatgatataccgttggcccttgaccataataagtaactgtacgatacactgatgaacttccattcaagctggacacaccaattgaagggtaattgaagttggaggaagctgtaagaggtttctgacattgactaataaccccagtgaggttcttaagttgtgccgggcttgccccattgctgcacagaaaattgagaacatcttgggaattaaaatcatatactaatccaggattgagtgatgcaaccggattaacatgtccagatccatagtcaaatggtgtggtttgtgttccattcggatctcttcctatgactcgacgtgtgttatcaataactgtcgctgtaacatcagaacaaaggcaccaatttaggatcatcacacacaattacaaacatctattctcatggtttttgttgttgccaggaacttttctagcatgaatgaacaacttacctgttgtcattattgaagacattatggctgcagtcgaaagaaattatgaaataaattattatatatatatatacatattaatttatatatatatatatatatatatatatatatatatatttatatgtatatatatacacacacatacacacattaacttttgttataatcactcaatgatttattattatataagtattgtattaataaaagtaaggagtatctggcacgatttgcaggaaacacagtgagtgcaagtgtaatcgtaggccctttttccagtaaagtgtcaatggcgtttggtgggaggggtacacggtattattcttggtaaataatttggggggtttttatagggtcaaataatagaggggtattaaacgcaattcgctaaaaactcagggagtacaggtgcaatttcctctttttctaataaagaaaagtttaatttcgacacaaggaatatgggtttgtggtttgtccattatctgcgcataaattccagagggctcttgaatgagggagcatgttagaaatataatataaatgattcatgtgtcttcacctaatagcttaaacttttgaagttggtttattacatttaatgttatgtactgtcttgttgagt

SEQ ID NO: 3079 - DNA, 307 bp, Glycine max
ctcctcgccggcgaaacctccattttcggtggcgacgaacgtttaatttggccagctcctcctggaatcgcgatggtgacgcactgagaccagtggcgacgaagacacagtaagcagccggcagcggcgacggagacacactggtacttattgaaacttgagatacttgctcctgttaaatacataaacataaatataactatctgtgttggttttgtcttttggttgtctttgggcttctgtgtacggtgcatttgaatttgataatttcttattgaaagcattttctcctgacataaaactgcgt

SEQ ID NO: 3080 - DNA, 1277 bp, Glycine max
cgccaaacttgcatgcctgcagtgaaccaatgctgtaatgaaagttgagcttcttatgcaaaagggatgatgatactgcatccaacaaatgctcctatatatctcatgccattgtccttaaccaaccaagcaaccgaagcagcatggaatccaacacaggtgacttcttctccagccctatttaaaggaataaaaattaaataaaatgagggaaaatcaaaatccaattagaagttcaccattctcagcaagagcaattcaacagtgttatataccatgatatcccaatattcacaaattcaaattctggcaatgcgtactaaaaagtttgaaattaacaggagcaaacatatatgactaaaatataaatttaactgataggtaagcacaatagtaacaacaactttgtgcattggaaggaatgcttataaaatgctttctattaacatttgaaggaataacacatgcatttcttcacattatgtgaaacatacacataatgtaaatttgccagaacatgagtgattacaactttgtgcatttgaagcattaagtaagggttttccagaatttgaaggaaagcttgctattaatgtgttttgcatttgaaggaatggtctatcttaccaatatctgcagaatacattatttaatacacattgcaaaaagaccaacgaaggaacaagcagattcctacatccttttctctttgtataaccgttaggaatctttgaattcaatctagccaaacttttaatcatcacatgtgctcatgaatccaccaagaaagccagctccattacaagatccacacaaaatatccttttttcccctgcaagaaacatatatgttggataggattagattgaagctaaaccaagaaggcactggcaattataattcgaaggccttcgtcacggcctatttgtgattgttatcatacaaatgaatctacttaacaggtttatcttaaaatatgtttgagacttggactacatattatgagtattgggcacctaattttttaacagcattatactcaacaaaaccatgactactactaagtctaaaagttatattacattattggagaatcatttaatcttactctatgcattttgtcagaatttgtttgtttatatatttattctatccaggcagtatagtttaattgactcaacgaattgagtagtgtcctcaaccaaacttgaacgcttcacagattagtgaaagaatttctattacttttacacattctgcttatgctaaatagtaaa

SEQ ID NO: 3081 - DNA, 731 bp, Glycine max
agacatcaacatgcatttaaaattttcattcagaagtagcccagttcaacaactttctctatcagcaaataatcttatattgtttaaaataagtgattctgcaatggcctaaaagtctctagaaaacgattgatccttggctcatcatctaaagaccttagatgaatttcaaaaagagaagtttcctgattttgtacctattttattttactaaatacacttccaatcacataagtaaattgtgttgtatcacaaacaactacaacttgttatatatgcatctagcaattagcactgatttttatttcggtacatgcccgtaaatgatgcattgagtaaagctgcaaaaaactttactaggagtgaaagttgtgggaaagggacgtaagaagcaaataaaagagacaactggcttgatgggtgaatgattaaaagatcccttctaaaaacatttcttcattttgatggaaaaaggacttgtcaataatctgtggggctctcgggtatctatcacccatgaaaatccactctgctttgcttctactttctacttttaggatatcaggctaaggaaaaaagtgattttgacaagtgacaaatttgtagctacctgtaaatggctgagggggaaaagatgctgttcgcgcttgatcaaaagcaacgttgtaaaggctttggaaatcaccaccttcccaatttgaggagggtagaatttgctgcaggcattgcag

SEQ ID NO: 3082 - DNA, 517 bp, Glycine max
tggcatcacatattgcataccatcttatgtgaacctattttgagaatgcaagcttgtgtaacactaatgacaacattaccttgcatattgctatcagatcatcaagcgtatcattgattaatttgagagctgcattaaccttccttagacgtggtgatacgtctttccatattgggatctcccagactggaattggagcaacacttcgatcttctgcttctctcagtacagtataaacagcctgatataattaaattaagtgcaacaatatgaagcttgtatacacataacttccttggcatgagcaaattgtaaactggaacggtggacatagtacaatacagaaggataagggaatattccaaaagctatacctcaactataccagtgtcatttgataaactatcaaaatcataattgaatactgccttgccaatgatgtccaaggtcaatcgagagaaaagtgattccatctcaacatcttctccatcagatgcagcagcatctagcttctggc

SEQ ID NO: 3083 - DNA, 648 bp, Glycine max
aggttactgattttattattttaactcgattgtagacttgaattgatcatttttctttctgggaatgtgaacacataacttatttgttttaataacaataaaatgtttctttcataaatgttgtgtgccttgtgtctgacgtttatgaagctttaattgttatataatgaataaaatatttccgtgtttcccttttctctctcacacaatgtgcaggaacacccaggtacagacacaaatgcagagtcaaaccatcctctgatgcactacagttcaatagtaacttattgtgtctaaggaaaaatagaaatttacttgatagtttttcacacccaagttatttttttttctgttaaataataatagtgttaggatgttacatccatttcttgttctgtttttccagtgtgtaatcttaattttgataggttctaattcagtaactgctatatgcatatgaaaatagaatggttttgaaagtggtctataaactacatagttgtttctccattgatgttgcagaatggtcccctgaaatatttgagcaagactgtgttcaatgacatttcatcagagatgctaagaaacttctacatggacaatgattacagaaagcagtgggataaaacactggttgagcataaacaa

SEQ ID NO: 3084 - DNA, 327 bp, Glycine max
agtccttgttgtcaagagtcctaggttccaatcattcgtatcaggtttgggaggtaatgatactaagtcccaagtatgatttttcagcaaggctcttgctgcatagtagtgagccaatctttgtttgccagagcttgtttcacagttttaggctcagaatgattgagaaaaagtgaagggtgtagtctaggattgtgaataccagatttagaccttgtttgcatagggtgagtgatagatgcagaagaagtatatggacaatgtacagaaacagtggtgcaaaggattctaagatatctcataggtactctgtttcatggtcttctt

SEQ ID NO: 3085 - DNA, 599 bp, Glycine max
cccggtgtatcctctaggatcgacctgcagttgaagaggcaatttctaagaaaataaatgaggggatatcaactcttgaccttttattgcaatctcttccaaaaacaatcccattagacgaaactgctgctctaaatgtttctttcatggacaacccagtgctgagtgattctgctattgaattagaaattaatggtttattcacagggagaaatgaagttttggtacctcaagcttactacagaggatcaggcctttctctttctgcttcctgtggtggcagttcaccaaagatgataacaatttcattacatgaaagtgttttcaaatccggttccatgctttacttcactgtaagtttctgaagtttttactttttcttttttatggcttagtccaataaatggagttttccctttcctcccttctgctttttattttaagctatatccgtgatgtataatagcatcatattacttgttgcatttgttctgatgcatcaaaaaacaatattacttgttacatttcttccaccttaatatttcaagtgaaccataatacgttagcttgtttctttaggctttggcattatctagaat

SEQ ID NO: 3086 - DNA, 567 bp, Glycine max
taatatcttttccattttagaacatctggttaattaatgtaaacttatttttattgatcaggcttagttcttctaatatcttacacattagaattgccaatatgtttggtttgtggctttgctttattttggtgtccggacaacttatggcccattggatctaatgaccacacattagtgtataccatcaccattcttctgaaccttccatgaccacacatcagaatttactggttgaactatcttgtaatgcttttaattgtgacaactagttgaaatactgtataacattcattttataaaaagtattatgaaaaagaagagaagtacaccaaaggaagggtaatgtatgctaaagagtcaataagctgagaaaaaaaattaaaacaaggaaacaatcaagtttcgtagttaatatcaattttaaaattaaggttgatgtgaactatctattttatttgaattgttctcttgctaactatctattttaatctccttttttcatgtatcttcaggtgaagtcgatcgccgaattacatttggtcaaataaaaagattttcctggaa

SEQ ID NO: 3087 - DNA, 484 bp, Glycine max
tggaaaacgaatcaagcgttgaattggtttgaatttgcatcccaatccaaccaacgtcgcaatttcattcttttcatccaataattcaattcaccaatggagcttttgaagcctttgcaccctcaccatgcacccattttgcgaattccctttcacgctgttccctcctcctcttcttcttcttctcaatctaaggttccccttcctatgatttctaaggttcatgtagctgttgggaaatcgctcgacaaagctgtccccttgcttcgatggactttaaatcacttccggaacgcggaaatcgtcattgttcatgcttatcaaccttctctcaccatccccactctatgtaagctcatttcattcaattttgattctgaattttcatgatctccactttttccccccttttgcgctaattgattggatgtatttgaattttgtgcgttgaacagtggggaaattgccagcatcacaggctagt

SEQ ID NO: 3088 - DNA, 499 bp, Glycine max
aatttggagggtgcagctgttgttgttggagtagaagtgggagaagttgctgctgttggtggtttctttgaggtggaaggagttgcagccacaacgggttgttgtttggctactgatggtttgctagaagagggggaagttgctgttggcaatgttgagggtgcagttggatttgtagttggcaatgttgagggtgcatttggagttgtggttggcaatgttgagggtgcaactggggttgtggagggcaatgtagagggtgcatttggcgtggttgttggcaatgtagatggtgcatttggggttgtggagggcaatgtagatggtgcatatgtggttgttgttggcaatgtagaaagtgcatttggggttgtggttggcaaattggagggtgctgaaggggttgaaggttgccaattggagggtgtacctgttggtgcttgggcattgattgtggctagcgggtagcagaggctagctaaagccaatacccataaca

SEQ ID NO: 3089 - DNA, 725 bp, Glycine max
agatgcagaaaagggcttgatatgaggaccttggaagaggctatggggcagacacttcttactctacctttaaagcagcagtatgtgctgttcatggaatggtttcgccatttctcaaggcatggaactgagtgcccaaatatgagcaaggcattccagatttggtggcgcagatctttcttaagaggctctgagacttatgctgttgaatcaagataaatggtactgtggtttctcatttctagtgtgtgtagagttggaataaattagacattttgaataacgtagataagtaggatcattgtcttagcagcttcatgactaactggtgtcaaattttctagattttttccccttcattatttgtttgcttgcctgagttgaatgaaaagctgaaggctcctactgtattttctatgactgctgcccatgctttgcaacttgattgggtacacttgggtgtaaatggaataatgctatgttgttgggtacacttgattgctgagaagatattcctgctggaagagggatgtgtataaagcaaacaaaccccaatctgcattgaatcaagagctttgactagatttcatctgctaataacctatttattttgaagatttgtacctaaccatttgttaagataagttatgagaaatagttatgcagatggcctatacggcatttttctttctttaggttttagaagaggaaaattggagttgatt

SEQ ID NO: 3090 - DNA, 795 bp, Glycine max
tttcgccagcttgcatgcctgcagctgcaaaaatggtaaaagcaacaggtcatgtgcataggagaggtaatttgagtcaactcagttggtgtttggaagaaagctagattatgcagtccaaggtgcaggagaatggttttacgtggttggatttgggggtgcaatttacatggagcaaatgtgggcattttacaatgtttatatgtcttcaagttaaggttatatgtggaattcaaagtctgtagccttgtcatgatctaggactaggcatcccttgactggtcttagtagctacatgcattttatttgtacaccttgtacagaaactgtgttttgattatattttcttttggccattccaaaaaaaaaaaaacaataagtgtaaggagaatcatagataacttgatctcttatgaagtgtaaggacccgagctcaacatggtttgatgataggagattcaagaaaccgtggcagtcatggaattttgtctctactaaaatatttgacttaatagcatatttcaatttgaaacaattttttaaaaacgaaaaatcaaaataaactgaaactagaaactcaaaccctaaactggttgtagtcttaaaaaaaaaaatgaaaccaaaaacaggaaagcaccccgaacaggcctaaggaattggccacagtaacttatgtaaatatatattagttttccataattgagaaatccatgaatagctaagccagtccaggataattcagcatataaacattccagatccttccatattcacatcctgcaggccatgcaagct

SEQ ID NO: 3091 - DNA, 731 bp, Glycine max
aagcttgcatgcctgcagtagcttgcagtgtaaggaagcagaaagaagatgagttacctgaatcaacttgctattattgattaattgtgagagaagttgatacaagagtttatatactatagctcaactaatcaactcactcacaacaaacataactaactctaactaacttggtatagctaactaacccgagtttagtaactctaattagctaaactatactaagttaagttgggtaataagtttgttaatttttattactagaagaaacaaacctgtgacattttcttcttctttttttttttttaaccatcaaccagtatctcctagttctgctaacgtacatgggtttttacaatttgtggtaacaagattcaagaggatcaaacttcaaaccattttagtcgtgtaatcttttatatacttcaacacactttcctgatacctctgcctatttcaagacatttgatcctataaatctgactgatagggccatgatattgccttttgtggcaaacataggaatggactgtttatttgcggtgctaaaattgaacaagtatatatattgaaacttttttgaaactgatgtgcatacctaataataataataataataaaagcaatttgactccacaataagatgattttggccttaatttaacagtatttcgcttgtatgacatcctttttattttccttctttttatccagttgtttttgataatcat

SEQ ID NO: 3092 - DNA, 816 bp, Glycine max
cactggtatgcagatttctattatagcgtcttgagttactgtcaacaaaagcgacatgaatcctaagatcatcaactctgcagaagcgaaaaaccatcagttaagctagttgatcaaagagattaacgcacctgttctagtatgtctactctcacgtaccctgactctcagcaaattgcaaatttaaatgaaaattttgtggacctaatgtcttctaaaatacaaattacatgtaggcttcagtaagttttgtcataggagaggagtatttcgaaatttgaacaaattctgcaattgaactaggttccatctgattatgtaaaggatataggaacatatataaatgatctttagttgcattttcatggacaaaattaccttcaactctttgctgagaatcactctggacttacaaacacaagaaaatgcttctccaaatattcagttattagtattaaaggaagcaagcttattgataagcttaacgtttgtcatcacacatcatccacttttatctgtgcttcaatatcaaaatcctttctaattggaaaaaagaataccccagccccctaaagttgatattcttggaaaggaaaaagaaagttcaagttgtgacagtaaatcgtcctttcgtgcatttagttggatttttgttgaagatgcagaaaagggaagagcaggaccgatcatgcaatgaatagactttgatctaccgatgaataatctgctgaatcataaaagtggctagggacttcagcagtaagccttggatcataatactctgacatatctatattctgcaggcatgcaagcttg

SEQ ID NO: 3093 - DNA, 491 bp, Glycine max
tgccggcgcgtcgtttaggccgtctccaatcatggctgttgggccttccttcttaaattctgagatgattttgaccttgtcctctggcaaaagttctgcatggactaactccagagaatgccccagctgtagatgaaatcaatgttgcaattagtatttaactcaggttccatgacttcaacttgtccatgggaagttaatacttaatgctaacagtagagcatattcagatatctatgcatagaaaaaggaattgcctagtgacatcttcgagcataaaaaaaaaagttcaattcacttgacaaagcatataagttcagaatggtgcagcttgctacaatttagccatattatattcagaaaggtttaaccatataaaatcacacacctgctcctgtgcttgcattgcagcagattgactatctccagtgagcatagcggttttgattcccaatgacttcaactgccctattgcctcctgaacccctaat

SEQ ID NO: 3094 - DNA, 691 bp, Glycine max
ctaaaattgccttaaatatataccgcagctggacatgaagcgacatgactttccttgctttccaactaaggaatacgtccagaatggctggaaaagtataaaagacagcataatcaagttgcaacttcataaagtagaacacattgttgtttgataatggaacatatagataaaaaggaattggaaattttattaagttacaagcactagagtccccaaaaacaactctcagtaactatttaaaatgaaacatcaataaaaaaaaaaaagagatttaacatcctgtgaagcttttgaaaaagcatttcattatcttatgtgatcttgcttcaatacatctataataagcctcacttggaagaatagtttctgaattctattgctcaatttctgaatttgctgctatgaaatgaatccacaaggcacaaagaatgaattactatccaatgttaattaaatgaaataatcagcatcattcagcctgtttggcttcattttcatgatcttgacagaagaaatctcctgaaataaatttttaacatttttctgctaaaatgaagaaaaaaattatagcggaaagaaagacacgtattttgatgccacaaaactgagttatatagtcctttctctccatctctgcttcataaatttaagacagaaaaacaataggaaacaagagctgcaggactgc

SEQ ID NO: 3095 - DNA, 549 bp, Glycine max
ctaggtggaagtgttggtgggtggctcttacctggtcgatttggcagcatcgaaaccggattgttttcctaaacgaggcttttaatggatccaagctaatggatgatgctattttcctagtttggtcttggtttagtcagctggagaaaggctttgccctgccctacaactactggtctagtaatctatcaatagctttttctgtctagggtagcagtgcagggtttctgtgttctttttagagtggcaggtggctctcaggaccttatggttctgccagtctgcttgtttctaccttgtaattttagtacccctggtactcaccgttattaataatctttataatttgccgatcaaaaaaaaaaaatgttccgtttcagaccccacagatttagtgggagaagcccattgggagaatgttctagttttgaaggccctgctgagaggttttgagctggcttctggattaaagatcaactatgccaaaagtcagtttgggattattggagggatggttagctggacaaatgaggcagctcagtttctgaa

SEQ ID NO: 3096 - DNA, 729 bp, Glycine max
tagagtcgacctgcagtcacgattcacaagtccactgtcagaccatcaactctgcccattcatcattgtccatcacccatcatcattcaacatgtttcagacctctcagctaataagcttagattaattttcttactcccattttcattgtgagtgaggccatgccattacttatgtaacacttcacgcataggcctcattgtgtgctagtccaaaacccaaatttgtgatgtacactaacagcaatgccctatgctcaatcataaaaaatatttttcttttcagaaacaagatatttgactaaaatgtttttgcccctgtaagttgtaactttctgatactaaaaaagcagctctagcctggtattgaggggggaattttcttacttaacatttgcctaaaaatctacacacaatgttggctaagaaaaatcacacagttttccaaactcggaaaaagaaccagcaaacaaaataaaagtaggtattgaccaaaatacaaagctaatatatgctaataagagggtattacagattcttgagcctagtcatcctatcagcatgtaccaaaataaagaaacgtatacccttaaatgcaaaaaaaaaaaatcaaataccttgatttgtttgcatttataggcgaattgcatcaacaacggctcagttcactgcgtatcaaacactcctcttacaagaaaaagtagtattttttgcacacaacctggaacct

SEQ ID NO: 3097 - DNA, 667 bp, Glycine max
aaaataaccagattgtttgacatgtatacactgtaataggactcgggagaaaacaggaatgaacttaccaaaagagtctgctcaaattgagcacttcgtttaccatctgctgtaacagcagtccatccatcaggccacattcgatcccgccagacacctattaataaacaataatattagagctgccacatgtatctatcaaagttatctatttaagagatattataaagaagtataccggcattgatcataggttcaattgtaaaggtctgtccggccttcatcacaccaactgctttatttcctgacagtgattaaggtgtatacattccatatgttctcgttctactttctagcaacctttgttctttgttagggggtacgggtagaaaagctagaggtgcacgttgggaaagaaagtttggtttaagaaaaaatggcacatatgaatgaggaagctggctgcttctagcaagtaatggtatgtataacagaattgtcaataggaagtgaatatatagaatcattcctagttttgtaagtcattttatgcgtaaacaaaacaattggttgcttagtattaaaagagaagtatatactgtgctgaatgttaaagatcaaaacattagaggatgcaaaaagaaaatttccaaatatttttttcaat

SEQ ID NO: 3098 - DNA, 821 bp, Glycine max
cgaaaataaccaaattgtttgacatgtatacactgtaatatgactcgggagaaaacaggaatgaacttaccaaaagagtctgctcaaattgagcacttcgtttaccatctgctgtaacagcagtccatccatcaggccacattcgatcccgccagacacctattaataaacaataatattagagctgccacatgtatctatcaaagttatctatttaagagatattataaagaagtataccggcattgatcataggttcaattgtaaaggtctgtccggccttcatcacaccaactgctttatttcctgacagtgattaaggtgtatacattccatatgttctcgttctactttctagcaacctttgttctttgttagggggtacgggtagaaaagctagaggtgcacgttgggaaagaaagtttggtttaagaaaaaatggcacatatgaatgaggaagctggctgcttctagcaagtaatggtatgtataacagaattgtcaataggaagtgaatctatagaatcattcctagttttgtaagtcattttatgcgtaaacaaaacaattggttgcttagtattaaaacacgaagtatatactgtgctgaatgttaaagatcaaaacattagaagatgcaaaaaagaaatttccaaatattttttttcaattaccctgcagctcatttaattggtacataattttttggtttctataatgatggaaagcaggtccaaattaaataacaatttgcttttaattagaatctttaaaaccctaagatttgaaccaggaaaccatccggatcaaccaaaatttaa

SEQ ID NO: 3099 - DNA, 673 bp, Glycine max
tgttgtgacattagagattgttttgttattgaaagtattgttcagagttgaaatattttaaatgatatatatacgcggtgactaatgatcaagaaagtttatggacgttaaggtaaaaaaggaacaggattaacgggaagactaaatagaaataagaatgcagtagggttggcctaggcctttgttttgtataaaagtaaaaaaatttgcacattcttagtgttgaagctattgattgacttcaaacgattgcaactagcatcatcatttgaagcttgatatgcctttccttgatgtagagattgttttagtatggagaaaggtgcttagctcctatgttccctattttaaaaaaatgttattatgaatctgtcgctgtagttcagttttagttactttatacccaggattttgctctacgcaatgcaatgaaaagaaaaaaaatgtgactttgctggtctccttgtgcttgaacagttgagaatttattggctatttttcttttcttaccatgatattggatatttcaattgtgtctgtttatttgaatatcattactcgggccaattttttttattgttcagagatagacgccccaatcaaagtacgcaatttctggttgtttcaaaataactaggggaaaagggaaatgatgcacaatatatgggtcggt

SEQ ID NO: 3100 - DNA, 806 bp, Glycine max
agcttgcatgcctgcagatttgtcataatttagcattttttttcttttgaaacattccaatacctttctttcaaatcattacctaaagaggtaaaataatgattgaaacaactgtgaacaaattgttcctaatggctaaaagaggcaagacaaagtcatctaatacagttttgtggatgaataaaattgataaggaacttgaccatggcagaagtatttgtaagcaaagtatttcatcttgaaattagcaaatgtaagttgtgtgaggatctttagagaccaaaatcgagttaaacttttggagccaatttcggttcttgaagatgcataaagattgagtagttgatgtgaaaagatgaagcggaatggaaattttttttaaaaatgagagaaaaattgaggggagaatgtgttcattgggcaaccgtggaagaaaaacttgatctacacgatattatttcagacactcaattgccataattaaatttaagggtttaaaatctcagtaatacctgaaagattaaaaatacaattaaacctgaaaaatatggctcacattttgagaatgggggagatatgtcaaatgaagtataaaccaagttatttattgacaggcttgtatacaaagtgatttagatcaccggactatcaacaaaataactcattctccaattacttttatatagatcttgtagtgctgtttcgctatagcaaagaagaaaaaaaaaggaaacaaggagagaaaatgaagaaatgaagcaaagattatagaaaaataaagaaatgggagagagatagagagacta

SEQ ID NO: 3101 - DNA, 682 bp, Glycine max
gcaacaaatggatgtacacagtccgagccctgcataattggagcaaattgcatattccaacccttaatgagaatacagaaatcaaaacttgataaataaaatacttcaaatttgcccacattggttgctaatagctattgcagagtatacacaattattccagtaatacaaacttgcatattaccacagaactcttaatcataccaacattaaaatagtctctgtagccaggctttgagggcacaagaaagtgcaacaaatagttgaaaaaacactgtatgttgtggttcactaatctcttatgaaacaggttatgtagaaaggcttcagttgtcacctactaacatcagttcaccttacacttgtaatcgtagctacatcttgcttccggaaacaaagctatgtatctaatcactaataatgacatcaaagtatgaagtaagatataccttttcttcagaggtactcttgacgaaacacaggaatgcctctgagaactgagagccactggaaccggttcgcaagtcagcaacgcaagggcattcaagggctttctgagtcatttcctccacagactgaaaaatccaaaatttccaattgttttcattcgttcaacctgccaagttgaaagcaaaagatcaaagcaattcaattcaaacctcagtgttctgatttccatatt

SEQ ID NO: 3102 - DNA, 687 bp, Glycine max
cttcctgtccagaggctagtcaaaatttagcacattgtacataccggatttaacggatattctcttgataatctggccatactgtttgtggccaattttaaaacttgaagcttcttttaactatattgatttattacatcttcgtctaaaaatgattacaattttaatcttttaaaaaaaaatcaatttgacttgatattctcaattttcaataaaatattaaaatctgttctaattttgtcgtataataaatagtattatcttcaaatacttaataatacatttattaaaattaataaaaaaataaaaatattttaataaaattattccctaataaatattaattattttgaaacaattgttttcttaatcttaatctgtgtgaaaatttttaaacatcagtcattttacgagagagaaagtactttctagtatctttagtttcttccatcatcattagtcaccaataagccaattaatatatatctcctaggcaatgtattatcaacttatcatattaaatcggcattgtaatgtagaaccgtccacaagaccacaacaaaacgtacaggggaataatattctcatctctaatgcttaaaaaacaattttaactttgattatgaaaaataaaaatccacatttacagaaggatggcccataatcatagaatagtatcttatcaga

SEQ ID NO: 3103 - DNA, 545 bp, Glycine max
ttcctatcataatgcacaatgagagtgaacaagcaagggaatggagtcaagtttttagtgaagatacaaaaaaacaatccattccagtcatagcagcttggcaattgaatgaaagaatgtagaaatctccttcctactttcaatatttgctactcctgctttacaaccttgtgtacaaaatataatctataggccatacttgttaatattttcaggtatggggaactacagggtctcaataagcaagaaacagcagacagatatgggaaagaacaagtgcatgagtggcgtcgaagttatgacgtacctcctccaaatggtgaaggtttggaaatgtgtgctgaaagggcagttgcctatttcagagaccaagtatgtggtagtttagaattttgtaatctggcaatctccctttcttcattttctccttttatgctattcttcatggtctatgattataatagttaacaagtcagtattatatgtgttaaaatttgatgttatagcatctatattctatatggagctgattccatgacattata

SEQ ID NO: 3104 - DNA, 156 bp, Glycine max
gaccgagccactctcgggttccaactgctgttggtggccccattgcaggacattttgctgtcccgacgaggtggaatctaaaggtgacgatgacacaatgccaagcccgcgaagaagggaggcgtttgtggcagcagcacccatttgtgctgcctt

SEQ ID NO: 3105 - DNA, 567 bp, Glycine max
cattaagagactcactgctattcaaagacaatttctttggggtggaaatttagaaggaaaaaagatagcttgggttgcatggaatcaagtgtgtgctcctaaagaaaagggagggttgggtgtcaaagatatcaaggcttttaacagagctctccttatcaagtggaagtggttgatgtttcagcaacaagatcatctatggagcagaattcttacttcaaagtacaggggttggagaggcttggaagagggccctcctaagcagattttctcctcttggtggtctgatttaagatctattactcagcacagcagcatggatgatgtcaataagcattttcgctggaatttgggcagtggtgatcaaatcctattttggtaagactcttgggtgggagaaggaattgttcttaaagataaatacccagatttatatcaggtatcatcccaaaaattaaagacagtggcaagcatggggatctttggggaatctggttgggagtggcaattttcttggagaagatgtctatttgacagtgaactggggggtgtttcagcttttattga

SEQ ID NO: 3106 - DNA, 791 bp, Glycine max
tcccattcatatacctagggatgcctataggtgttaaccctagaaggaaggtggtgtgggagcctataatcagaaaatttgaagccaaattgaacaaatggaaccacagaagcatctctatggctggcagaattaccttaatcaatgctgtcttgacagctttgcccttgttttatatgtcttttttcagggccccttcagcagtcatcaagaggctcactactatccaaagacaatttctttggggtggaaacttggaaggaaaaaagatagcttggatctcatggcagcaagtgtgtgctcctagagaaaagggagggttgggaatcaaagatatcaaggcttttaatagagctcttctcatcaagtggaaatggttgatgttccagcaaccagatcatctatggagcagaatcctcacttcaaagtacaggggttggagaggtttcgaagagggtcctcctaagcagattttctcctcttggtggtctgacttaagatcaattattcaacatagtagcatggctgctgttaataagcagtttctttggaaactgggcaggggtgatcaaattttattttgggaagactcatgggtgggagatggaactattcttagagacaaatactcagaattatatcaaatatcatctcaaaaactacagacagtggcaagcatggggatttttggagaaactggctgggagtggaaattctcctggagaagatatctctttgacaatgaattggggggagcctcagcttttattgacaagactgcaggcatgcag

SEQ ID NO: 3107 - DNA, 518 bp, Glycine max
tcacttgtttggtttggcccttggtttggttggttacccttgatttgtgttctttagcccttgttttgggtgtatttttgctacccactctcacccatggttggatctacctctagtggcttttgaggctatgctagctatttttaccatgtcattgctctattgtctactgacaagttagatggctaaagggataggattactttgatcacttcaccactgagactgatattgttgctgaggttgattactccaagtgaaataagattgatgctctatgttgtagcatcatcaagtccacccattcacacctcttcaatgcagatcttttgtgttcacgagacgtgtgaagctgtttgggagcaagtgaaaattctttatgccaataaatataatgtctacatagggtttgcccaaacctcatgagtattatttcccctagacggtttgatggcactatggcagaatatttgggcaaagtccatgggggccctacattacttaaatgtgctcatgcc

SEQ ID NO: 3108 - DNA, 594 bp, Glycine max
attcctctgccacaaagcaacagaaggaaagtaggaaacttttctgttttacctctaggtcttgtgtgtaaagaacattaactatattgaaagagattgtaatttaccataccagagtttgtggcaagagaaggatgataaccgatacgctatatacacttgttaatcaatcccccacccccttgggttacgtaaccaatattgaaccattccatttatccctggcaatgtatttattttgtactgcacctggaatattcgtttagaagaacttgtttacagtttatttgaacttattttgggacataaacacttgtgtaaatgtataagaaaaacttaggaaaataacttgtgtcaataaaagttgttttcagcttatttcaataaaatttgctggataacttataaacacaaattgctgcttatataaaaatattttaaccagatttcttctttgtaatggagagacattggaatgggatcaattttgagaagggaaacctctctttttggtggcattgtttgtgcgcaagcaagatgataaatacgtaattggtgctcatttatacaacagttaagaaacttaggtcttcg

SEQ ID NO: 3109 - DNA, 612 bp, Glycine max
gtagtgttcggaatagtttcgtgtaatgttctgcgtagtgtgaagccgcctcgaaaatggtttggtggtgtctactagttgaatattcttggatttgtctctttgtttcaatgtttcacttagttttcttggtttaatttgctgtgacttgcgcttgggtcttacagggaagataagcaacggatgtgactggcatgggaggctgtggaaaagctgtctggcggaagatttctgtgtgaagccttaggttttattacccttgcattcatcattttattgtttgtttgttttggactggctatgcctatccagtttattttggaatttgatggtagttgtttgtcggtgtaagtataataacccctgttagtgtgggagtttttgagtgggtttgtaacagtaacaatcaaagtattatgcatttggggattgctacaatgtcacaggaagaatttgggactgtgtgattgggtggttgactctttgattggtttggagaaactctactctgctcattttgctgttttcttgataatgtctttagtagtctcatcttctaattgaatatcctgttcgtcacagtggcacgagacctcccattttcaatggagt

SEQ ID NO: 3110 - DNA, 1385 bp, Glycine max
gtgtctaccttcaatgaaagcaaattgtgtttcctcaattattgctggcatcacttttctgattctgtttgcaagcaatttcgccactatcttgtacatgcatccaattaaggagatgggtctatactctcccaaatgttgtgggtttgatatcttgggaataagagctataaaagaagcattacaaccttggggaatagcaacattagcatgaaactcgtggatatatctaaatatatcatgctttaatgtatcccagaactgctttatgaatctgaaattaatgccattaggacctgggctcttatcattgccacactcccaaactgcattctgtatttctatctcctgaaaaggggccacaagcatggaattctgctgttgatctatggttttgaaactaataccatcaatcttaggtctatgaatatctgcttcttgaaatctcttggaaaagaaggttctgatttcttccttcaccttgttaggttcatctatccatataccctcaatgagtagtcctttaatgcaatttctgtttctatttacattcatcctgatatggaaatatctagtgatacaatcaccctcctttagtcatcttgatcgagatttctgccttagcaatgattcatgggcttgggcagccatccacaaagcttcctgcagaacataaaatacagtcagttagtggttgaaaccaaataaatagagatgctgagatcattgtatgccaggatatggtgttattcggtagtatggctaacagttccaatctactagaggtatccaaaccaatcaatccaattaaaactgaagaaataaaaaactccaaaaattgtgaataaactgaaaaaccaaaaaaataattaaatagattgggttgtgggtttcaaatttgataatatatatacgattggcaattaattttgaacctgtatttagtgtatttttataaataatcttagccttgtacatgatgtattttgatgaaattagatttctatattttgaagaatttatatatgaatttttttaaaagaaaaactgaaaaaccaattcaattcaaaacaacaatttaagatggacaggatttacattttgaaaccaaatcattgaatgatattgtaagaaaaccaattaggttggatcaggtagttttcccctcaaaactgattcaatgtgatacatgaatgcccgtgcaatcttcttttcttttaaggaaacatatagttcatcacttcatcgtaatataacttgaacacccagatatttatcacaagcatatattctagtttaaattttaaacagtgtttgaaaacttcatagattagtgaacaaacaatacaactagaaaaggttctcttacaactttgacttgatgc

SEQ ID NO: 3111 - DNA, 733 bp, Glycine max
aaaacacctttgactacattgaaggatttgtgataataaacagaactggtctgttaaataactggagattatccttcaacccacaagacccggttcaagctagtcatttcaagtcggatggaagaactctcttctgtcttgaaatggccaaatacttcaacgtggaagaaatcgatgcagcaaatcaggtgaggccagcaacactcaatctaactcattagtcataaattttctttaggaaagaaaaaaaaaagtctgattaaatgaacggtgtctcacttattttctttttgtgtgtgtgcttgtgcaggaagttgaggaacatttgtcccgattaagctacatcccgtcgacccttttttcaacagaagtcacatttgttgatttcttagacagggtgcacatatcagaggtcaagttgcgttcaaaaggcttgtgggatgttccacatccgtggctcaatcttctaatacccaaaagccaaatacacaacttcgcagaagtcgtcttcgggaatatccttacagaaactagcaatggccccgtccttatctacccagtaaacaaatcaaagtaatgaatggttcagaaaatatattagtattaactctacaaacaaatattttagccgtcaatatttaattgacatgttgttttgtttgcaggtgggacaacagaacttctgttgtgattccagaggaagctattttctacttagtggcatttcttacat

SEQ ID NO: 3112 - DNA, 637 bp, Glycine max
tgtgtcaatgccctcaaacagatcacctccaatgcctcgtaggaacccacctcctccaccttcatctggagaacccaaaacttcaccacaaccaccccctgcttctaggggagggggaagtgggggtgcacttggtgctttctggtccactcagcatgcaaaggaatcacttgttgctgaggataagagtaaaccaatttttgatgaagaaccatctagccaccatatttcaccgaaacatgataggattcttcctgaaaacgaacagttacccaaaaatgttggtcctaacaaagtggttaacacacaaactcataccgtgaaaagcagtacacatggaaaattacacaagcctgatactgtaccctccaaggattttgaaataaatttgtttaaggataaagatcgcgtacgtgagagtacaactaactttcaaaaccaggcttttaacacttttgttgctgaatttgatactactaagctcaactctggacttagtaacaaacccgaaagggaacaagcattagaggctgaggtggagaaactcaaagagcagctgaaggaagctaacttggaaaaagctgaaataacatcaaagtatgaaaagctttctgctatctgccgatcacaaaggcaa

SEQ ID NO: 3113 - DNA, 542 bp, Glycine max
aggactgaggagagaagatgtgtacacgggtaagggggcttcagaaggtgtaggttgtggtggtgtgtgttggtctgttctggttatgttgggaggagagacgggagggggagatgtaggtgtggtggaattgggtgatcggcgacgtagtggggaagattggatattggcatgagggataatattggttaagggtatatgaggcacaggtggtaactgttcagaatttgagattgatgagggtgtcggaggatttttaggagaggatgagaaaggaaaaatagcttccaaaaactgaacatgttgggaatcatagggttttgttatttttaaattgtaacagatgcaagcgctgagtggggttgtagccaaggaaaaggcatggtttagatctctagtttgttgtttgtatagggtttaagcctgggaaaacacaggcagccaaatgttttaaactttgtgtaattgggtggtttgtcaaacagaacatggtaaggggtggtcatgtctaggctggtggtaggtaatcgattaatgagata

SEQ ID NO: 3114 - DNA, 359 bp, Glycine max
atatctcattaatcgattacctaccaccagcctagacatgaccaccccttaccatgttctgtttgacaaaccacccaattacacaaagtttaaaacatttggctgcctgtgttttcccaggcttaaaccctatacaaacaacaaactagagatctaaaccatgccttttccttggctacaaccccactcagcgcttgcatctgttacaatttaaaaataacaaaaccctatgattcccaacatgttcagtttttggaagctatttttcctttctcatcctctcctaaaaatcctccgacaccctcatcaatctcaaattctgaacagttaccacctgtgcctcatatacccttaaccaa

SEQ ID NO: 3115 - DNA, 529 bp, Glycine max
accatgttaaactgtctatttttcttctccctctgttcgcacagcttctaagcatggcattcctcaaattggtgccaaattgcaagaatttctggctgatttttggaatataattttacttcggaagagggaggagcaacttcaataaaaaatactttctaatttgaaattttaactccactattttataagtaataatcccaaacatttttcttcgatttttcaataacaatccctcctctttcctctactttgaaaattaattcaactcatcccagtttagaatttgtgatttaaaattttgatcatagaaattaggaatatacagtaaaactttatttggggctaagaaaatgataaccagaaaaggaataaaacataaaagacaacaattaattgaaacatacatgtcaataattagtttaataaggacgctcacagccacatccgttgatggttttccactgttattacttagtctagttgatgctgtagtagcattggtattcggggaataagcctctgagca

SEQ ID NO: 3116 - DNA, 566 bp, Glycine max
tatcaaagttccaattgtaacctgaccatgaaggccattgacactattcctttccattaagaatttcaagacctatggatcaaagaagaatgaaaacaaatttaaaataacattaacagtaatgtgcaaataaaatctttgaagatatgcgagtgacaccaaagaagaatgataacatttagaaaagaaatgatcatagaaagagcttagtactttaggtttttcatctacaagaaaacttcactcaacttctagtgcattgcacaagaatttctcctcagtcaaacactaaatagaactgtatcctttataacattctagccataatcttcgttttctttttttgatgaaataaatcttactaaaggattgcaatattcgcatcactgcatcagtaatcaatattcacatcagcaatttaataacacttagctgaaacactatgacggctgtacagaatatagaaatttgaatcaccaaatctaatccaagtgcaaccaggcaatgattgcaatagtatatttcaacaattaaagtgcaggcataggttacttaaaatactatat

SEQ ID NO: 3117 - DNA, 707 bp, Glycine max
attataattgaaagtataactatcgaacatatcagtaattccctttttcttttaaacagttgttataagtaatcgttctcattctccttaaaaaaaaaaaaaaaaaactaaaaatgtggataaacaagtaggacatctttgtgcaagtaataatagcaatagcaaaaaaataaataaataaataacaagtgcacaaccactgttcaagtatatcgacggcaacgtttcagcatgcaaaagcatctcattctcaaattctcaacaactgaccctggaattttataaaaacaaaaacaaaatgaaacaaagtctcatttttcttacagtgtgcctaactaaccacttcgcacagcttaatcacgtttgcaatttgttttgtaccttcaatctttaaaatccgaatagaaaacagcaaatacatataattcatttaaaggaaaaataagagaatcagaaatacatcacgaaccttcgtcaattcttggattttccaattccgctagaacctcaacccaagtaagccgttgcaaacctaaaaagtcactactagaaatttgctaatttcttgcagattttgttgcgaataaaaatccacaggtgttttttgtggattttctgagaaaaatcatctccaggtatttgctgcggctatttacgcggataaaaattcgcaagtatttcatgcggatttttctgcgaaacaaaat

SEQ ID NO: 3118 - DNA, 734 bp, Glycine max
aaacaaagtaaaagggttgctgggaaaataagctgagggggcgtgctgaattttttttcttccaacatgacttgttaatttgcaatattaaaatggaaacacatatggatcattatattcagtatctttattagataaagatgaggaaaatgtttataaaaaattcaattaatagcgttgttagcaaagaataacagttaaagaaattcattttttaagacacatccacatcaaattgaattcataggaatgtcaaaaacaagagacagatctttctgtcgatatgaccaattctggtaattaaaaatactagtttctatctccatgggtcgcatagtactatgttcatactggcagcagcttgatcctagccacaaggtgcttttagggggttaatttcaaacactgcaagtaaagtccaacctcataagagattgattttcatcttaaacttcattgcgttattttattatttcatccaaaaatgctataagtttggattcttgtttgactttggggacccaacccaagactcattcatctacaatcatacattcaatactgacctctcttctcagttctcatgactatgcaaccgtcctcatcttccttcggttatggattcacctacgatgtgctccttagcttcagaggggaagatactcgttacggtttcactggcaatctctacaaagctctttatgacaagggaattcacaccttcatcgatgagg

SEQ ID NO: 3119 - DNA, 764 bp, Glycine max
aagtcttgctcatccgcttatgtatcattggcatcccctagcatctcgtcacaatctgattgggaatgaacaaattaataagaatatatcaccaaatctaagccctagttccttctttcttctattccgaatattgctgtcttcaaggattttcaggataagcattaagatgatcttctggttaattttctgtacttacatgtctttatctaagtaattaattacttaattatctttatttccatatatataatgaattgaacctagctaagagatcagttaggcactttctctcccttttgcaaaagattcatcaacacaaatacacttgaatccaaaggtgaataaactatatatatatatatatatatatatatattaatgtgacagaacatatattgcataattatacatttattacatatattgtatacattttaaaaacctgattgcaaaaagagggttcagaagaagctatgccgcagtaaaaaaaaaaaaataagaagctatgccagttatgcacgctaattatttaagctttttgttaaccaaactgataactgtgtagctaaatgtagaggaaggcaacactaaatatagagaaaagctaaaaccaaattaaaaacttccactgtgtaatatccagattaattgggggatggtccccaaagatagatttctcttgtataaaaatatttcaagtcacgtatgttaactcatccagaaacatagaacataggttttaaactgcaggcatgcaagct

SEQ ID NO: 3120 - DNA, 708 bp, Glycine max
gactaaacttccaccaatattcagttcctgatatcaatagtataatgtaaggaactttgtcagtgcataataactcttattgccatacaatagactcctatactcgctcacagtcaaacttaaacattaacaaccagaaacagtaatgtatgtttgcagaaaggtatttttattgtataaatcaagggacctttaaattggctgctggattttagtggcatttttttaatttagaactaggaaaatcctctttcacttcaactggagaagaaaattcgtgcagagtgacatagtgggccctgcttcctacatgctcacatgttgtttaccataaacaacaaataaatcactagtgtgttccatgctgttgtgatccaaagaaaacaaaggaagaagaaaatggaaatagcaattcaaagaaaaactatgtgtgacagttttgatacaaagagtcaccctcaagcaacaatgaaggactaaaatgccacatataacaaattgtcaatgtgttcatcaaggaactcaggtcctagacttttaaaaacttgaccacagcacacataaaagagcaaaggaacagcacaaaggttttacttttattttttcatttatttattttgaattactcagctgaagtttcattctcattaatgatacaaattataaatccaaatagtcaaggccagaaataaacataccttattttca

SEQ ID NO: 3121 - DNA, 720 bp, Glycine max
tagagatcagataataaacacagacaaaaggggttcatgtgtgtcactcattatgtctaggacacccatttaaccgttaatgtctttcaattccatagacagtacttttctagtatatactactataatatataaatatattaaacagttgtgacaagaagctcacccacttagttaatcattttattatttattgttattttacttatactataatccaatgttaagaaatttcacaattttagataaaatggtagataagcctaaacatgttaaaaacaaggcttaattactaatttgatccctaaattatttaaaatggctcaagttggtctctaaatttccaaacactccaattagatcctctaatttttaaaaaggcttcaatcaagaccttttggtcaaattgaaactgaaaccgttaatgaaaaccgtcattatttgtaagtaaaaatcgccagaatttagtggaaaggacccgattgaagcatttttaaaaattagaggacctaattggagtgtttagaaatttagggaccaaattgaatccatttttaataatttagggaccaaattagtaattaagcctaaaaacacaacaggcaatgaatatgtttgtgtctagattaatctccaataattatcatcaaaataaatttcatttgattaatgaaagattactaaggaggaataccttctgaatctgcttcacaaaaggct

SEQ ID NO: 3122 - DNA, 184 bp, Glycine max
agaaaaaggttggttcacttgagaagcaactaagggaattagatatccaactacaaaatgcaaaggcatcttctgaagcaagtcaagaacagcagaacatgttatacacagctatatgggatatggaaatattgattgaagagctaaaatcaaaggttgcaaaagctgaaactaataaagaaag

SEQ ID NO: 3123 - DNA, 716 bp, Glycine max
taaaacctagacattttctgacatgttttgcaatgtcaagaatcaaactaaatcaagactgcaatcaaaaacctgaatttcaaaaccttgactaacaccaaatacaagaacttcaaactaataatacaagttcaaattcaaactaaataaaaagaaacaaaactcacacacttctcttcaactcgaaaaaaaaaaaaaactagcaaactaataataacgtgaacaagaaaaaaccgatactgataatcaaaatcatcttgctaacctaaatgttcctctttcattggccgaaagtcaaacacggttaattcccaaagaattgaagagaatagaaagaaaagggggaaactaaaagaagcgaagtgagaaactgactcaccatttgtagcgcaggaaatgaccgtctaagggtgtggtttcgggaacatcgtcggtggagacggtcttgtcggggcggcggaggagcacgtagggcgtgagctcgcagcctacaatgggaatttccgagggcaggtgcacgcgcaccacgctcagcatgcttcactcttcttcttcttcttcttcttcttcttgaaaacaacaatcgtcacagcagcgcggtaaccctattatcaataaggcgcggcgggggagatccgtcatttacttgacccgaatacccgccagccttgcaatcggatctcgggattcggatcgattaagatggctagggtttt

SEQ ID NO: 3124 - DNA, 640 bp, Glycine max
aattgggttcaacatgaagcaattgcaagtcaaaacttccacaacagagaaaaacaaatcatcttgcatcctccgtaaatttctccgtaagcatttacaagaaaagaaaataagaaacacaggtgaattgagtatctcttgtaaactgaaatcaacttatgcagccagctttcatcgaagttttctatcaaacttctccaacaactgagatgcataaactgattttaacataaaaaaaaaaaaagagtaaacagttttcttttaaaagtgcttacagttaagtttatccaaacaaactctaagcttaacagtcgctgaaaacaaaattgaaacttcaaggtgaaattttgcatgactccgagagaacccaatggggaaaaatgtaggaaaaatgtagaaataaagaagaagaattacatgggtccattggtatcagtaatttggcgagcttcatcgagagaaagatgatcgtgaggcgcgtgaggcgcacgatcgaggtcaatgagcgcatagcggacctggtattggaaggaatggttgactgggtggcgacgttggtgccaaactgtgccttcgtagagagatatgggttcagcttcgtcatcggagaaggaagaagcggcgcgtgaggaattccacc

SEQ ID NO: 3125 - DNA, 523 bp, Glycine max
taaaggttacaatatcaattaccacacatgaatgaatgttagacttttcttaaaatttggtttagatgtaattcaaccttaatatgcagttggtcctataatggatggcccaacaggcccagaccaataacaactactaagatacactttatcatattataatataaatctaattcaatctcaaaagttaattcataagaaaaaaattatcctccattggtataaactttaaaaatatgaaatttccattgtggttgttgacattcaaaactagggaattactttgtggcaaaggccaaatcaaatttgtctaatactcaaaataggatacctcatggtctttccagaacgccaagtacaaaaataaatcatttagtccatttacctcctgctttctattttcaatctctaattagagatgctatggggttatctttgcctcgtttagtttgtgtgtaatttgttttttcgggactctgccccacctcaacataaaaaaaaaaaaaagaaagaagataaatca

SEQ ID NO: 3126 - DNA, 524 bp, Glycine max
ttgcctttgaagagattgattctcctcagacattctgaccttccttgcacgaacctgagactgcaaccgtgaaagagtttgcatgcattgcaaggtagtagccgcttgtcgttgaacagattgcccttgcaccaacgttttcaacctcgacaaacctctcaagccacgcaaggattttcttgcctgaaaccccacataacatggaactattacacacaaaaagaaggttgaataaattaaatttctcctgtaaattaaaatcaacttatacacttatctgagaagaaaacaagaatgtaaaatgcacttaaattttatagataaattttattaggacataattgactttggtggtaataacatgaaccttccatgttattagtcgtttcatttgtgttcccaataaataggattcataaaagtctataccgaatatccacggtatgctgtttgaatcttgatagctgtcatttcttgattcgcttttccattagaacgaggcgtgtttgtgagacgagtaacct

SEQ ID NO: 3127 - DNA, 775 bp, Glycine max
gaaaccataatccattatgaatttaaaaattgtagtaaaagggaaagattaccatttatgtctacctctacaagacctccactagagttctgttatcaataaaattcatcattctttcctttttatctgatccagttctatcagttttgttcttcatttatgcaaaagctaaaagtaaatatttttcccttgcacagattttaaacctccatcaggggaaggcaaaagaacttatctcatactggccatcatcatagtagctggtgttttagtggttgttcttctggtgctggttctcttgaggaggatgggatggttaggaggcaaagatccagtgtataaaggtatggaatatgcccccaagttcttccaattcttttagttagaacaaatatttccatttgtttccaacacaacatcttttctgtatccagcagtatttgcctgagcttcttcaacaatttgtttgaataaatatttctacaaactttattcaaatgtcataaaactgaagtgcaacaatttacttctatataagatttgtaatttatgatatttctccatttcaccaaagtcaaggctttaagagaacatacgagagtatacttgcctgccctatatatttatatactagatagaaatgaaatgaactatgtggcagatattgtagagaaagttataaactttcttgttgaatccaaatttccaatcttttgttttttattttcagagctcaggggcatagatctgcaggtcgactctagagcaaagacgg

SEQ ID NO: 3128 - DNA, 574 bp, Glycine max
cactgtgccaaaaatgtcgctggcgagcgactagatgatggtttcttgtgagtatctttagtgcttcgacattaattcaggaatgacactttttcttttcttagtttcattttaatttctaataagatatgagtgagatattgtacaaattgaatttggaactgtttattatatttaatcaggttctaggaatgtttagaggaaacttccgatgttatttaatgtatatttttgtatttttgtttctcagatgttgtggaagctgtgggagggtgttggaagattacttttttgccgaggagccttcatttgttaagaatgcagcggggcaggtaatggaagcttgacaagctaaggtggttttctgggagattgaaactttattttctttttcttaaattaacaacatcatgtcacgggagaaagaggcttgagctacttctatgaaggactgatggggatttggattacttgaggtttaagtttgattgtgggtatggtttgagagagaaaggaagaatacatggatcccaccatgaggtcctatatttgagacctgcatggtatcttttct

SEQ ID NO: 3129 - DNA, 543 bp, Glycine max
tgaacattgccatcaatgccccacactccagcctcaccaaaagtttggcttctttggggtcccttggtgacttcagaagggacatgcttgctttctcttttgtgaacaaggccaatatggtcagcacttgtcctattaatgaggctagtagaagtgaaatgtgagtgaggtaacagaagtgtgtgagcggggagtagaagcccacaaaagatgagaggagtgagatgccagagaccataaggagagccatgccgaatgaagttgggggcatcttgaggagaatagtgggtgcaaatgaggaagcagagaggataaagagtgagaaattcaaacagctaaggaggaggttggtgaaagaacatgcccttctaacctttgattttgaagaagccatttcttccgtgtgtagtttctgttctgctttgattttttatttgaatttatttatagggaggtgaaaggtgccgttaagaatggctataacggctagcataagggaggacccactttctttactcattggagagtgcaacaatattccct

SEQ ID NO: 3130 - DNA, 544 bp, Glycine max
aatgcagacaaactacatttaattgatcagcaatggaagactttgtatctgtacctgttggattttagtgcattcgaagtgccgaagagtcaagtctacaacgtggaatattgattgaagtgaaaaatgggttaggtggaccgagcaacaaggcaatgaatgaatcagtctgagtcgatctcacaagtaattaaccagttactgtgcttacttataaagacaccgcatacacatgttactaaattggcttttctgttatccttttctcagttgttcctgtgttgtccatgtttatgtagttgtgttaatatttaattttattaatatataattttgtgattcaattttaagactgtgtaattttcaaaaaataacccaggaacagctgtgaaagaacaacagataagacatgtcacctacaccattctatctttcacaaacatggacccttcttcccctttaaccaatcaattctcaattccttaatggattctttgacttccagaaaaatctgatcaaattgtgtccccatcaattttaccaa

SEQ ID NO: 3131 - DNA, 543 bp, Glycine max
aaaattgatggggacacaatttgatcagatttctcgggaagtcaaagaatccattaaggaattgagaattgattggttaaagggggaaggagggtccatgtttgtggaagatagaatggtgtaggtgacatgtggaacctggcttctctgctgtcttttctgagctgttcctgtgttgtttcttaaaaattacacaatcttaaaattgaatcacaaaattaaatattaataaaattaaatattaatacaacaacatagacaacacaggaacagttagaaaaatgatattagagaagccaatttcgtgacatgtgtatgcagtgtctttatgagtaagcacagtgattggttaattacttgtgagatcgactcagactgattcattcattgccttgttgctcggtcctcctaacccatttttcacttcaatcaatattccacgttgtagacttgactcttcggcacttcgaatgcactaaaatccaacaggtacagatacaaagtcttccaatgctgatcaattaaatgtagtttgtctgcatt

SEQ ID NO: 3132 - DNA, 547 bp, Glycine max
taaccactggtacagttgaatggctttcgagatctgtttctattgctgacactggacctactgtggaatcatcaactttgttcacgttgaaaatcttgcctgaataaatgcggataatgttgtatgcaaaagtccaaaggtagatgtttcctatctggtaaaccaaaattagaaaatgtaaaatcttaattcaaaactgtcaagcttttggtatgatgaacccattcaattagataagtgcacaaagttagattgtcttactgccaaggacaaagaagcatatgccatccctttattattacaaacatccacagctccaaaaggactaccgctttccttacagactgctggaactatgataagaagcaaattacctacatttcctgtttgcatcaaatctaaaatagttagaaaataaaatttctaagtgtcaagactatatgtgatatcccttgtgctgctatatatcttagaaaaatattattgattgaacattgacttgatctgatttattaaaataattatttaaaatctgaaagtgagctat

SEQ ID NO: 3133 - DNA, 839 bp, Glycine max
aagcaatgcatatttgattctttggaacaaatctgaacagtattggacaagtggtgcttggaatggacaaattttcagcttggttcctgagatgaggctgaactacatctacaatttcacctttcagtccaatgagaacgagagctacttcacctactccatgtataactcctctattatctcgcgtttcgtgatggatggctcggggcagatcaagcaactttcgtggctggagaatgctcagcaatggaatttgttttggtctcagcctaggcaacaatgtgaggtctatgccttctgtggtggatttgggagctgcactgagaatgccatgccatattgtaattgtttgaatggttataagccaaagtcacaatctgattggaatcttacggattactcaggagggtgtgtgaaaaagaccaactttcaatgtgagaatccaaattcctctaacaaggacaaggacaggttccttccaattctcaacatgaaattgcctaatcattcacaatccataggagctggaacttctggggaatgtgaagcaacatgcctgagtaactgttcttgtactgcatatgctcatgacaatagggggtgagcaatttgacatggggatctcttgaatctgagagcatgcaagcttgacgaaatgatgggcataactggaggactgagggaaattgaggtgcgctcacgttggccgcagggtagcgatcggtagtctaagctgagaagcctgaagagactaatgagtggactgactgggcattgatgaggagaggactgccttggccagttgtacagtagagaaacctaggagaggccgagtgcgt

SEQ ID NO: 3134 - DNA, 631 bp, Glycine max
acatggattagcttatgtattcgtattggacgatagacctttctgcttttttaaactttggtattgtttgtttgctattttaaaacataatttaatttatgcaatggaaaaaaaaaaaaaaacgcatccgttattaaaatggaatctatacattggcctgtttgcccttgtttctataatatgggccaattcaagaagattggcccattggcacatcttttcaaataatggcctatctgcttatttaaactttggtatagttttcaaacataatttaatttacgcaatggaaaaaaaataacatccattttttaatttgattggtctatgtattaaagtttaaaaaatgaagttaaatagaatttaaaagaatgtttccacatggaaccgagtgtcagcatttctgggatagtattaattacctataccgtgcagggagacgtatttgtctcttgcttcgacgggtcgggtgttgttgctgttgctgctcaacaattcaagaagattaaaaaaatgaagttaaaataaattaaataaaaggagaacgaaaaaaaaggagaattaaaaaaaaaacgctgcacctcttctaagccttcgctagtagcagcctgctggtgctcttccaaatcat

SEQ ID NO: 3135 - DNA, 718 bp, Glycine max
attaattgcagatcccccggttcatcaacataaaagagcctcccattcaggtccactgactcaccgtgcggcatgggctaaagccgggaagaaccaggacgatgctccaaagatttcaatggtgggtgacttatcaacagtatcgggcttagttgcagcaaggaggagtatgttgtctgacgatcgcagagaaaggtctggatcatcacaaacagtggccccaaaactaataaacaggttcccaggatccttcaaagaggcttctgagtcaatgatgcaacaggatcagaagtatcatgcacatgttcctcaaaaggaagaagggagaggcagcagcaacaaagactcaaatcttgtaagtagttgcactttctcccttgcctacctcttagattctttgaatgtgactttaggcctaactcaatcccaaaagctaactcattggttaaggtttgtccctcacttatataatccatcttggttttatctctagtcaatatgggacttggatttttcccaatactatcctctctatcttggtagagtaatgatatttgtcctgctgggttatgtccttgcctaccctctctatacgtgtaattaaccatgtgtccaggtggatgttgggtggacattagtctatttccatctcgatattcgctgcttggttatagttttgtcttttgcttgcttgcttactctactatgtattcacaat

SEQ ID NO: 3136 - DNA, 538 bp, Glycine max
attgtgaaaaagataatagagtaagcaagcaagcaagcaaaagacaaaactctaaccaagctgtgaatatcaagatagaaatagactaatgtcctgctgggtcatgtccacccaacatccactccgacacgtagttgactatatgtatagagaaggtaggcaagggagaaagtgcaactacttacaagatttgagtctttgttgcggctgcctctcccctcttccttttgaggagcatgtgcatgatgcttctgatcctgttgcatcattgactcagaagcctccttgaaggatcctgggaacctgcttattagttttggggcctctgcttgtgatgatccagaccattctctgcgatcgtcagacaacatactcctccttgctgcaactaagcccgatactgttgataagtcaccccccattgaaatctttggagcatcttcctggttcttcccggctttattagcccatgccgcacggtgggtcagtggacctgaatgggaggatcttttatgttgatgaaccgggggatctgcaa

SEQ ID NO: 3137 - DNA, 742 bp, Glycine max
tatttagaggagcgatgaagggaaagcttattgtgaattgtcctctcccgccagaaagtataccaaaatttcagatactatacaaggatgtctgaaaattgaactcaaccctttactgctttttttttttctttttcatagggatagtttgtaaatacaccaatggtcactgttctgttttcttgtctttctcctttttgcttagcatgcactgacccgtaagcttgtgtctattgaattttttctcactgttgattcatgaaataaaagtcggttggttctctacctgtaattgttcgattatagttccaggatctgtatgctgtgagtgtagtatatatttatccgatttggatcatcttatgttactgacatgaaattggtgaaaggttcaaccgtgtggaatcaacattttataaattaatgtctatgtatataaagaggttgttgaagttttatatatttttcttgaaggaaattttttattgaaacagaatttgtcgcacaagatgtgttccaaatcaccaacagaggttaagtatttatgagaataaagaaaacatccccccctgatacaatgcctcccaaaagagtaagtctgatcaaaacaccacataatacataccaaaacctatttatcagcttattcaccaagacaaaaactccaaagctttccataaaagcagtcaatttgtgctgtttctgtcactgcaacattatattatacttctgtcattcgact

SEQ ID NO: 3138 - DNA, 570 bp, Glycine max
cgataacaacacagagaaagagaaagagaaaatgtgtaaaaatgttaaaggcgtttcaacaaatgtggaagcatagacactagacagggacaaatgagaggcgagggacccaacgctgcacaaatcagaagcgtcgaatctcgcatacggcagggtagcagcgagagcagcatgtacccgcgtcgcacccgaacactcccataaaaaaatgtacgaacacacagcattttcatttctctctcttaatagagaatcagaataataataataaaagcacatcaagccttctaaggccaaacttttgttctcttctcttcgttttctccttaaccatgaagaagctctaccgtaaaggaaccgtccacccctctccctcgccgtctccgccaaccatctccgaccacctctccttcctccccgccgccatcctcaccctcactctttccctctcttcggaggacagagaagtccttgcatacctcatctcatgctcatccaacaacaacttttccggcaaccctcgccggaaacctaaggttgtcgcggacggcgatcaccctcctctcttca

SEQ ID NO: 3139 - DNA, 704 bp, Glycine max
aagaagatcaatgaagttccttccacaaaacactgtacaagattctttcttttgtttgtttgatacttactcatgactcatgactattcaatttattcaccgtccgtgcctcattctctctcacgcacaaataaatgcacccttctccctaataattcaccgctgtggtcccccttcatatcaccatggagccggacataacttctcatcaacataggaatcatccaaataacatttaataatattttaaagatctcaccgataatgatgtaaagaaattagttaaaaaattcaattgggcaaacaaaaaatgttaaagcttgatagtaagaatacattaaaaatttcagtatatacacatttataacacgttttataaaaacttcattaaaaatattattagtgcactctcacctttaattttcaatgcattttcgtttagcaagaccagaaatttaaaaacacgccactttctcatatgataaatgcatgcatgcgacgtaaatatacaagcaaaaagacaacagtaacaccatccatattaaataacatcaaaccaacgagatagtatcatccaatcctttaagtagtccatagtcatacaccaataacgatacacacaacacaaacccataaatgtagtaagtagggcacaactcagagaacacaaatatctgtttcccacatgcgtcctacactacact

SEQ ID NO: 3140 - DNA, 629 bp, Glycine max
caaattataacagcaattaatggacattttttttaaaagcagtaggaaatgttatctgaatattatgaatataaaggacagttctttgactaatagcttaaggttagcagagaaaaacaacaacataattgagtgggttagaaactcctaccaaaggcaagttgtgttgcaccatatcttgtgtgatatcaattgtaaagacgtgccttctggtggtaaccactgaccttccacgtgattgcccatcgataggtctgatgacatcaatctcgaaagaggtatttttgtcgggaacaaaaaaccggataatgacactatcgttaatgtcgtgggtccttcgaaattctttcagaccatcagcaaaaaaatattgggtgccatattccgcaccctaacaaaatgtttgctttcattatagtcaaataaaacataagttgggtaatatggccgtcattgtgtatggtaagacaaagggacctcaataatgttctacaaggaaaaatgtcaacaataaaaataagtttgttttcttatttggataaaggaaaatgggaaaatagttgggatggtgaatgccgaccttgtcaacatgaaatgccgctaataactgggtttttggcatccaatgg

SEQ ID NO: 3141 - DNA, 729 bp, Glycine max
aaggcattcgatatgaacgtgaaacaacgaggaagggagaaaatgagtcacatgatacaatgtcttaaattaatctataccgttagattttaaataaacgaatggacaagataaggagtaaatcttcaaacttgctcttggagtaagtggatccctcctctctctcttcaaacctaccagtaattatagatcatttaacaagaaattagtcgctgattccccacctttccatggtgttggatggctgtagcaattccaccagcattaacctcagaaatgcttttgtcaatatagaatgcagctttttgatgaggattttcaccataacggagagaacttttgagtgaaagaggcactgtcaagctaggtgggaatttatctgttaccaaaatgctaacaagtaaatctatggagcacataaaaattaataatatcacttgaaatatttagactaaatacatattctgctccgttaatttagaattaaatatatgatttcaattttgttcactgatttcacaaacttcaaaattagaaaatatatgaaaattactacaccaattaatctgctggctgttgattaagctttaccattctaggattatattcataaattatttgcattttcaagtaattgacatttccatctcacattgagagtaaattaataatcctcactaactagaaacaaaagtacctcccacactctgcttccacaaccactcagat

SEQ ID NO: 3142 - DNA, 240 bp, Glycine max
aaaatgtgagggcagctgcatcacgagatgtagaggagcgaacacggagattgagaactgtgatgcttataacaccaattacaatgacagctgctgcaccaatggcaatgagtgcagaaatgctgagaatgattcttttgtgacccaaatttggaggcaatgaactagggccggtgtcagtagaagtgttgggatttagaacaataggctttgggagaacagcagggcatgatttgttta

SEQ ID NO: 3143 - DNA, 636 bp, Glycine max
aagaaccggacggctgactatccatttctgttgtgcaactgtccacattacacgatgcttttacttggttcttacctctacaaataagcagtgccaaatcaaattaacatttcagactaatcatagatactcatccacctaaaagaaacactacactatatacttacctgttaggtgacttttggactttgtaatttgaaaaagagttccccttgtagtggtcattcatcaccattgatggtaatgaatcagtagaacatgttgaagaactgtcatccattactaaactgctccttttctcagccattccattttgtacagatgaaagactaccaataccattgctactagcctcagtgggaggatgaacttctgatgcatcagtatcccaatttacaggactcacatctctgtcttcagaatcaggctgaagcacttcaccaaccccatccacagaatcagacacatcagaaacaatttccagggcataaagcttttcatcaagagcttgaacttcctccatgttagaatcttttttctcatcagcagtattgtcttgctgcttgtcatatacagccacaataggtctctcctctctacctttatcctttcctttccgattggtccgtttctggt

SEQ ID NO: 3144 - DNA, 741 bp, Glycine max
tcaatcttacaatgcaatatgtgtgtggttaatttgctggtaccatctagcatcaaatagctactgtggtgcacgagggtcctttatatgtttacaatgctctatatcaaacggagtatcatttggaatattctcacgttaaaagagtttggtcaatggattaactttgtattaaaataaatttatcgggttgacgtcatgttatctcataaataatcggaatttaatcgatcgatttgactttgaaattaaataaattatcttatcaattttttgagtgaaatagaaataaagacaaatttgtctcaatccctctcacaaagactcctacttaataaaacactaaaagtgtaaaatcatcatctttcaattaattatttagtgagaaatttatccttctttcaaagattttacttaactgcacaaagatcatggtttgaaactactaatatatatatatatacaaacatactcatgaacatgatgtatacggaagtggttgtttggtcttaacttatgactaataagaaatagcagtatatttcatccaaccagggtctctttttttttttttttttaacaatcgatggatttaattaagtttcgttgttgggcgtatacgttcaaaactaaagttgatataactcaactgtgacgttggattggagcattaatccactaaattgcatgcctcaatcatgacaatcatattatttggaatgagcatttctgatatgcctt

SEQ ID NO: 3145 - DNA, 569 bp, Glycine max
ccggttctttcctctagatcgacctgcagagcatctgatgactaacttaacaaagaactccacttaaaagatattataataaatgtgtatatttgtaacagtggcatttcaaatattttatagataattaatcttcctaagaaaatctggtcatctttaatgagattcttttctcccaatttttttttctatctacaagagttaaattcaagattcttgcttaaggaaatcattaccactcaaaccaataattgttgatagttggtagtgacgtttcaaatatatgtagtgttactaacgtcaatgtcacgggtccaaaaccctttataggcggttatcttgggttcaagaacttatttgtacaactttaacactggttgttatcttcgattagcttcttggtatgaattataaagttaagtgaggtagattgagcctaagttgagtccataaaagcaaagtacggaagaattgatgcatctcaccctctttggtttgatttatttgctttagtcatgtgtgatggaaatgaatgctcaagtaatcagtgactaatgtttttttattga

SEQ ID NO: 3146 - DNA, 831 bp, Glycine max
  misc_feature (745)..(745): n is a, c, g, or t
  misc_feature (781)..(781): n is a, c, g, or t
gaccacagctaaaaactggtcaaaaagtatggaagctcaattcagaaagaaggtaagctagcaacaaatgtagcaaatgcaccataaattgtgatcctacttctaatctttgcatggttgcagattgcgacattatctagggtgaaccacaagaattttgtgaatctcattgggtattgtgaagagaataagccattctcaagaatgatggtgcttgagtatgctccaaatggaacactatttgagcatctacacagtgagtgacattttgatcaaaatttactaacatccacaaccatatcctcctttgattattacaggctcatagcaacctaacttcttcaaccagaagtaaaaatataaattagccctgtttaaataatcttctccataatcatttataagagaaaaataaaaataaaattaattgaacttctctcataagttaaaatcaacttatatacctcaacttttgaagaagtaagatgggaactataaaagttaaatacataagttgattttaatttataggaattcaattattttatctaattttcttttcccttaagtgtttatcgataacttattcaaacatgactagttcataggcatcttgaaaattgtttgcaatatgcaccggcatttaaagttttttcaattttgacttcattcttgcatatgctgcagctgctacctacctcgaattggtaagaatttcggagaaaaaaaatcgttgcgttttggnttttctcttatttttttcgttctctcaatttttggnttgatcctttttatttaatctttagtattgagttatataaaaagcaccga

SEQ ID NO: 3147 - DNA, 493 bp, Glycine max
agcaccagcattcaccaatcagcatttgcatgcaatggtagttgtagttctagtagtgttttgtatgatttcacataatatcttgttcatctttcaaaacatttgtagactagtgtgtcagcgaattgaagaggagattgcatgatttttagtctggtaaaaaatgaaaagagaaagataaaaaatgatgttggaggaagtcaccaatgaagatctcaggctcaataatatttattgaaactttaatttttattcatgtcgaatgacatcggttgattcatgtagccgacctcgtctagtgagataaggctttattattgtggttatagtgtgtcagaagattcaggatcatctctcaataaaagggtatgtcctccaccctggtatctttgcataatgtcctagcaaaaagctctaagattccttgatcaccactctctggtccccatgagacaaggtatcagtaacactatatactaaggttgtaaccttg

SEQ ID NO: 3148 - DNA, 227 bp, Glycine max
gatttcttcaacagttgcaccatccttgccataggcaatattctctttaatgctacaagtaaagagaactggttcctggctgactaggcctattttttgtctgatccatttcaattgaaattctctgaggttgatactgtcaatgagaacttcacctgcctgtggatcataaaatctctctatcaaactaacaactgtggatttcccactcccactttctcctacca

SEQ ID NO: 3149 - DNA, 704 bp, Glycine max
aagatgataaacgaagaaacaagccaatctattttagttagtggagaaagtggtgctggtaaaactgaaagtacaaagatgcttatgcattatcttgcatttttgggagggagagcagcaactgaagggaggtctgtggagcaacaagttctggaggtaagaaacaaaatattaaggccatgtttgattgtgttttttgtttttatttttaaaaatgttctataaaacaaatttcaaaaaatgattgttagataactgaagtgagggaagaaactgcgatagagagaaaaaatagaaaaccaaaatgttttggttttaaaaaacttctcttaatctctgtagttgtccttaagttttaattcctatatgagaaaattgtaagttttagttcttatatatgcataaaaattaaattttggtccatatcattaacatcagaaacaaactttcttgcgatataaaatcactacaaaaactttggtgataaactatcaccacttgaaaaaatttataggaaggaaaacttacaattctcttgaataggaactcagacttaaaacaaaaacaactatatactaagtaaagagtttaacattttgtttatttgtttttgaaaactggaaacaaacaatcatacatgcctgagaaacataaatataatcttgtatgttattattcattctggtcaattgttattcacactt

SEQ ID NO: 3150 - DNA, 476 bp, Glycine max
agaagttagttggagcaaatgtctctacacaaaacaaacatggcaggtgagccaacataccaacatggaacccctattttaagtacttaatcgccgacttcatgcgtgagagagtgtggagggtggctacggttctgatttttctgaaatgtcaatccaaagtcccttaaacggttaagctccggcaccacaactgttgcaagatcaggcctgtcctttttgctgagctctgcacaactcaatgagagtttggcaaatgctagagcctcttccagtggcacatcactgatcataatatcaagcatttctgagaatgtttccttctcaattgccctcttgacgtggtgtgcaagccccattggaggcttggctgtgatgatttgtagtagcattatccccaaggaataaatgtctgatttttttgttaaccttcctgtttgttggtactcaggatcaatgtaacaaaaggttccagc

SEQ ID NO: 3151 - DNA, 713 bp, Glycine max
agttaggagtgccttgtagtctgaagggtagagatcaagtttggcgttgatggagattaagaagagaaacaagagaagaaagtagtgagtttgagttttcccagccattgttacactctggggatcgctcaattgtgcttcgcattcacctctgtttcgttttcgttaactcttgtagcgccaaaccgtgtggaaaactttccacacagtcaatttctttgaattttcttctacacttctatttttgattggtttttatttaattaagttatttttttcttattatattattaatgcaaaatagtcttcaattttatttgtaattaattaacataacaaatttgattgatattttttacgagttttatttttcttttaactattttttttcatctctgatattcaactttactaacgccgagaaccaagtctagtataatttagacttattgattatttattttatttctctcctttagttgactgtcatattcattttatttatcttgaattcttgtttcagcaagtgatagaataatctgctaggtctgagtggtcgtataatgggatttttacatttatcatttcgttattgctacggctgccagcttggcttgacaacaaatgagtgaatgacaactattcatgaaaccaaaaactcagtaaacggtttctgcatattttttcttttgtaaccaataaccacgacggtt

SEQ ID NO: 3152 - DNA, 728 bp, Glycine max
tttgtctctgaaatgttcaagtagcttctcaatactcataaccttatgttctgccaagtctctaactcgtacactcacctggaacaacaagacagcatgatcaataatcaaggagcaacagcgtaaaccctgaatgtctaggaacacaggcactataggaaaatagtaatgtcttcaaacatatcacagaccatagccacctctaagataatgtaaagcctccaaaattaatagatgatacggttggaatatggcaaaggaaaaaatgggtataagactgaagcataaaagggtaacaaactatgctgtaaaactgatcagactgaagcaaaaaacagaacagataataaatcagacagagcatcagattgaagaaaacaactatcagactgaagcggaaatagctatcagacggagcaacgatctaatcagactatgcaatcagactatgcagaagcataaaagtagtgaagtataaaccagaaaacataaacatatatgaagaagaagagagtaacaaaactgctttgatgtatttcaagtttataattcagttttgcacactatgaactgataaaataagtttttaaataggaaagctataaagccccctcattgggcaaaacatacagcaaattatgacaaagctagacatcattagccagcaactacaagttgctttccgagcacaagcaagctttaaacatagttgcaagcaaccacaaaat

SEQ ID NO: 3153 - DNA, 876 bp, Glycine max
  misc_feature (668)..(669): n is a, c, g, or t
ggccaaactcgcatgtcttgcagcaaaatatagaagtttagttgctgccatagctgatattctctggattcaaactcttctcttggaacttttagtccctcattgtagacctaggtaggttaattattcaccatgaagtaaaaagagagtatcatttgtatatgcagatagatatataacataacaaggcagctagagagagagagaaaaatagagaaagagaatgatagtaagggagaagttcatttatgttccaaatttcagtgacatgattgattcattgattaaattccaaccagcatggctaaaagcttttgagttctgcccttaattctttttttattcttctgtattttatactttttttttctatagttcatttcatcatcattgtaactatagctgcccattataaaatagcttagaaaatctaggtctgctgcttctgaaccttttatttatccttgaagtagtttaattatttttttttatttgtgttcaactagtgaagagtgaagactgaagttgttctgtcaaactcattgattttcctttcatttcgacggaagcctaagcaatacactgccactgaattgccagtaagaaaaattggtcatgaaacacacacacacacacacacaaaccctaatgacacacacacacacacnngtatgatagaaagacacagacacacactgatgacacacacacacacacacacacacactcatcatacaaacacacacacacacacacaagtttgataataaatttgttcaattatacatgcaaaaatttgttcagttgtgacttgttatttgtgacaaggtagttggcctcttcataaggtacttatctaagtttaacttaaattct

SEQ ID NO: 3154 - DNA, 764 bp, Glycine max
ttttctgtagagtcgacctgcagatagaaacaaccgcaagcactactacagattcatcattcagcatcgtcaaatttacatctgttattgaaaaaccgatgtaataaaacatgcagtgacaagtgacatttttgtaatttaaaccaattttttaaaagtattaacggcagtttttatcaaattatctttgatttgaatgctattaaagcggttttacaaaaaatggtctttgtttgtaagctaactactacgattttagctagcaccgtctttgaattcattatattttaattccattatttttcattttctaagctgatatacgacttcttgcattcactttcagtttcactccttagcctggttataggagctagggtttatcgaggctttcgattcgttccttcctcgctgctacaacaatggcgaaacctgggttaggtcgtcgctctccctccggttccgtttccggcccctcttccccctccgactcccgttcctcctctcgctccggctccctttctcggtcccgttctccctcgcgctccatatcgtcttccccctcctcctcctcttcctcccgaagctcccgcagccgcagccctcccccgcagaggcgccgaaggtaccgctaatttagagattgatgaaacatttcattgctattttagagattgcgccttattgaaatattttagtcccgcagagtatagatattgcgccgaaggtatcgctattttagagattgcgccgaagctcccgca

SEQ ID NO: 3155 - DNA, 762 bp, Glycine max
tttcgccagcttgcatgcctgcagtttgggttcttttgtcatgggattgttgcacagatcaatggtttttgccttgtattttgtagcattaccacaccatgattcacaccatagccactcttgcggcaaagagaaaattggcacggtatgctgagcataattaggaagatcctagaccatttcagggaaaattttagcaaaaaggcatctcaaaccaaaatcaaaagcatgcattcaaaagagagaaggctaatgggaaatacattggaagtacataaagattaatcttcataaaaaataatatgaatctacgatactagtaacttgattttacagtcctaagtatccaattttagcccttcataaaatttatgtaattgactctttttcaaattctgaaatattttttcaaatttcaaatggtaagaaggaaggacctgattccaacttgcgcaaaaattatattgattcaacactaaggtagtgtttgtaccagcttattttggcttttttttctccttaaaagtaaaagctaggccaaacactcttatatatataaaagtccttaaaattataagtagcttatttttaagactaaaagacgaaaataaggagcttataaaaagctcctcggagtagcttttttatagcttgtgcggagcttttctagcaacaaccatccttcgaatcccatctaccgatctttcatgtatttctttttctaaaataaattcttttcctcctttcttatatgttcgtgcc

SEQ ID NO: 3156 - DNA, 725 bp, Glycine max
ggcacgcacatataagaaaggaggaactgaatttattttagaaaaagaaatacatgaaagaccggtacatgggattcgaagtaaggttgttgctagaaaagctccgcacaaggtataaaaaagctactccatggagctccttattttcatcttttagtcttaaaaataagctacttataattttaaggacttttatataaagtgtgtttggcccagcttttacttttaaggagaaaaaaaaggcaaaaataagctggggcaaacactaccgtagtgttgaatccatatcatttttgtgctagttggaatcaggtccttccttcttaccatttgaaatttgaaaaattatttcagaattattgaaaaagagccaattacataaattttatgaatggctaaaattggatctttgggactgtaaaatcaagttactggtttcgtagtatatttcgtattattttttatgaagattaatctttatgtagttccaatttatttcccattaaccttctgtcttttgaatgcatgtttttgttattggtttgaggtgcctttttgctaaaatttgcccctaaatggtctaggatcttcctaattatgctcagcataccgtgcctattttctctttgccacaagagtggctatggtgtgaatcatggtgtggtaatgctacaaaatacaaggcaaaaaccattgatctgtgcaacaatcccatgacaaaagaa

SEQ ID NO: 3157 - DNA, 570 bp, Glycine max
ttcttttgtcatgggattgttgcatagatcaatggtttttgccttgtattttgtagcattaccacaccatgattcacaccatagccactcttgtggcaaagagaaaataggcatggtatgctgagcataattaggaacatcctagaccatttaatggcaaattttagcaaaaaggcacctcaaaccaataacaaaaaatgcattcaaaagacagaaggttaatgggaaataaattggaactacataaagattaatcttcataaaaaataatacgaaatatactacgaaaaataagctggggtagtgtttgccccatcttatttttgccttttttttctccttaaaagtaaaagctaggccaaacacactttatataaaagtccttaaaattataagtagcttatttttaagactaaaggatgaaaataaggagctccatggagtagattttttataccttgtgcagagcttttctagcaacaaccttacttcgaatcccacataccggtctttcatgtattttttttttctaaaataaattcagttcctcctttcttatatgtgcgtgcc

SEQ ID NO: 3158 - DNA, 711 bp, Glycine max
gcgcggcgcacggccaacggcgtccgcggctcctccgtctcgaagccgacgccgtcggaggaggaagagggagacagtgaatggggactctccatttgagagaataaaatctgtttggttttaagaggctgaggagaaacgcaaagtctgtttcttgttttggggtggaggctcctgggagaggcgttaagcaacagttatttgtaactttgagagagagaaagaaaagttgtttgtctcctagtttcaagtttcctaaaaatattagaataacattcatttatttatacattcaaaaaaaatgtttcatttatttattagtattgcatttacttattattatttttacagaccctgcgtatttgtttagacaaactagagatatggaattattaatttattacttataaattaataactcgatatcattaattaatttcatatttattattaacattttaagagatataaatataaaaaaataattaatattatattaaaaaataaaatgataataattcttttatatacaataattataatggaaaacaaaagtatataatattatatattatatattagttgatccactggatttataatattttaattattctttaggctctatgcttatttggtctagtcttcgatcaatgtgttacactattttgtgtgggccttgggttgggcccactattattgttagctttt

SEQ ID NO: 3159 - DNA, 769 bp, Glycine max
agaagtatttcatttgagataaaaaaaaatgatattacaaatatgtagacaagtgagaaccttttcttgtgtattctgttttcattttcaataataaaaaaaaaaaggctttgaaacatgtttggtccagtttaacaaaaatatttcacaagacattataaattcatttactgtttaggagttaaaaggcacccagctgacttaatagttaataactaaagagtttaaacagatcatcacagtctccccgaaacaaatccccaataagtcctccttagacacaatcaatggcctatagactaatccaagatatccaccagtaatctggaatatcccacatatccaggtgatgactgcttcaataccattttgtcacacctaaagcccaactaagcataagacaaatcttcttggccaatcacattgcctaaaagactaatctgagttgttttattagctagtaatcagtgctagtcattagctgataatcagtaaagtctaatccatgtaaacacagatgaaaatgcactttatcatctcatctaacaggtcctaagcataatcagcatttaaatcaggactactgcatcaaaaaataaagcatgactctaaataaaacaaaacattgtcaaaggaaaagaaaatatttacctgtgtaccagcaaagagcatatcattattcacaacaagtgcatatacttgtccaacaggaccattaagacttagctctgataaattttgtgtgttccaggcctgcaggtcgactcta

SEQ ID NO: 3160 - DNA, 690 bp, Glycine max
tttttagtttgcataggtgataggcctaacaccatatactgctcggttaaaaaagtagacaaattttagcttgcttctccaaaagtcaagtgtctgcgataagagttataattgcagtgcttataattatgatgatgtgcacaacctaacattagtttcctaactacaacatacacccactcttggaatttcaaattgggcctaacttaaccctaaaagttagcttaagatgtgatggttgtcccctacttgtatacactattttggtcatattattgctagttgatgtgagatatccaactcactcccctctcgagcatgaagtttgtaggactaaacatctgcgagtgattcaataatgacctgataataggtggttcgataagcccaacaacaatagctagaataagttttgatatcatcttaaaatttggaactccaacacccacttcttttcctttggtcaatgatatcctctcatccatgtttctgtgtcatgtctgctacaaacatttctctctccaagtaataacttgattaacatttttattatattctctgttctttggatagaacttaatctttgttgttgtaaaggacagattaattgtaaagatcttttatttttgttgtatttgaagataattgcacttattttcagtaatgaagaggttaactttcttctcttcg

SEQ ID NO: 3161 - DNA, 544 bp, Glycine max
ttgaggcaatatcagagagttttggagagtggattatcaaaggtttaaagaaggaaaaaggataccctgtagagaatgttagagtgtctctcgggcgtgaccctcgagtcacagggtccaaattgagcgtcgcagtctttgcaggtctggctcgcgccggttgcatggtgtatgatatgggactagccaccaccccggcttgtttcatgagcactttgttgcctccatttgcctatgatgcttcaatgatggtaggctaccaaaatttataatagcaataacttgctagtagcctagtgctactttatgttgaaatttataaccaaattgagtatagttcaattagttggataagatgtgtgagtattataaatctcctggtgccgtgttcaattcttacggataaaaaaatgttaaaatttataaactaacaaaaaattcaaattgttactaaatttataataggaatattggaaggcttataatgtagatgtgcacaataattaggcctaatactaatgctgcaaatgaattatgcattttg

SEQ ID NO: 3162 - DNA, 521 bp, Glycine max
tcattcaaagtggtgtacaacaaacgcaagaagctttttgtgtcggaaacgttggcagtgtttcgcaaacgcattctaggccttgtgtccaccgtggagaagaaataccagttggaatagcgaaccaaacactcgtcataccaaattatagcacttttggcaaacttgcatgtatctgagctttgattgcttagtctttggattgcgttcaacacgcactgttggcaaagttgagggggcacgtcaccacggcagaggaagaggccgtagacggtgtcggaggagcttttgccggataaggtggtgttgtagaattgggtgtttccggtggcgttggaagatagagaagacaagagggttatgaggttgaactggaaagtggtgttggagatgaaggtttcgatggttgtgcagttttcgcgaaggaaaataggaacatctgatgatgcttcagtgagagtaaacataagaaacgtgaagagaggataatgtttgaaggaatttagggccatggtgttgta

SEQ ID NO: 3163 - DNA, 684 bp, Glycine max
ccacccacctgcaccatgagtttgccggagtattcgccgtacatggcgatgagcagcgggatccccatcacgagcgtgttcggcaatgtggagagggagaaaatcgtaatcatccactccaggctcccgttggcggagaagttcgtccagatggcgagggcgaagagcatgatgattttctggagcgtgtccgccgcgatgaaccggaagttcatctcgtacgggttgttcatggagatgaagtggaacgagaggagcggaacggcgaagatcgcgacgaagcggtttatgccggagcattggtccggtgagaatatcttccaccaccgcaccgagccgtacgccaggatcatcgccacgtacagcggaatcaccgccgacatcaccgtgtagaaatctccccaggttatcattttgcctttttcttaatttctaaataaaatctactcgattcgaataggattcgcttgtcaagaggatgtgtttagaccaacagaattctaaataaaatggaaaagcttttttgactagctagttggatggcataagagagaaaatgaggagcaggaagaagggtaaattgggaagaaaatgagaaaaatggaaaggagaaaaccgttacttaactaactggtctgagagggggatatatgtctctctgcaatggcttatgcctgctataca

SEQ ID NO: 3164 - DNA, 538 bp, Glycine max
actctaattaatatttaataataatagctttctaatttacactgaaaatgaggacagcgactaaaaaatgcaacatgctccctgaatgccacccaatagccattggtgtatgaaatgttaacaaacgtatccgcgacaaaaatcatccgtactggtgcagcagataccgcacgtgttcatcgctcatactggtgaaggctgaaaacaacaatactccatctctgatgatttatttttggttcactgaaaatcaaaactattgtcatgcgttgagatgaaaggaatcttgtagggtaacacagattagctggcatgctccctaactcccaccagcgagacagagctgcttcaccctcttttccaatcactcgcccacgggtctcaccacctaaatataataaattttccagggttctatataaactcatacgtaccatacattcctcataattatcccgggtgttgagaaaaacacttgctacctacattaattcaaaagatatatatcagtttgtttgaaagaatgggtcgtgtttca

SEQ ID NO: 3165 - DNA, 480 bp, Glycine max
aacttttaccaaatttttaattatgtcccgggaacttttttcccctttcaattggataaaagttcaaggacccaattgaaacaaaaaaaggttcagggacatatttgaaaatgacaaatagttcaaggacctaattaaaaaattgtgaatctctccaagctagtcttttcacccctgcatgttctaaacttgttgaagaacctaagaatacggagtttagaacctgcaaaagtgagaatacaagcctacaaaggtgagaatacaagcctacaaaggttggtaatttttaattaggtccttgaactttttcatttttaaataaggccctgaatattttttttcaattaggtccctgaacttattttttttaattaggtccaacatggacctaattaataaatacatacaagttcagggaaccaattaaagaaaaaaaaagttcaggggacctaattaaaaaatttagtaaaagttcaggaa

SEQ ID NO: 3166 - DNA, 834 bp, Glycine max
gagcaagagatttaattgaaagctccacatcctcaaccagttcaccgaggaaggggattgtttcagctatgaacactagatactcttctttcaagttctccacaaaatatttaacaattctgaggcctaatattttagctcgcaatttagaactaactatttataatttatctattggagaattttctgcattaaggttggaaaccatgaaaaaagccctaaaagggatttcaagttacacctaaataaaattagggtttaaataaacacaactcacaatggaaacaaattcatattatcataaacaccaagcatgcatcaatcaaactggaggcttatcgaggacaaaaacaacaacaacaaacttgtgcatcaaaacaatgtacttaccgcacgactgtcagcgtgaagaacaacaaagttgtgcctggctatggagacttacacaggcaaggttgcggtggagtgaaggttgcggcggagtgaaggaatgaaggaggtatgacccaaggataaagtcgccatttaaataccaaaatttcaatggccatggttaaaagaaaaccgtagtaagctgtaaacataccaaggcgatttttataaaatcgtaacattaacatcaaagatggtttgtgagcatctctcagcacatgattccaagcaacattgtgaaacctccacatgtcgaaattattgcaattaattaagggtgcagactgttacattcatcttcttctggcagcaatattgcattgcttgagtctgagtcacccgatggaaacatataaccttcagcccaagcaagtttcaaatcaaatataatcgccgacagct

SEQ ID NO: 3167 - DNA, 498 bp, Glycine max
atggtaatttaagtagagagagagagagagatttttcagttgcaagtagatttaattcttactatgatgtttcatgattgatcagatttaactgtaagtgcgtattgaaaaagttgcattctctttggcaggttgaaggctagataactctatcaggtccagtgaaatgatttctacttggttctatgggatttatgcttgattcaaaacgtttgttgaggaaatggccattataaaacagacgccaaggcaaaggataaaattcttacctgcttttttttttcgctccggagaaattaaccaactgtgtctgtgacgagaaaatgaaaagaatgtagtgaagttctctctgtcatgttattaaatgccatgcttttgttgtacagctccaaaagcttgaatttttaactctcttttatattattattagcaaattttgatgaaatttgatccacctaaactaaaaaatgaagagaccaaagatcccactgggttctg

SEQ ID NO: 3168 - DNA, 667 bp, Glycine max
tcgataccccggtacttctctagagtcgacctgcagaatatgacaagtagacaattaaggtgaggcagaagcctccatcatagatgcaactcggcaactcgcactttgcacatttaagatttctccagatgcacttgaacagatgcaaggttgtccttacaacatcggtgtgatcatcaaccagaaccattatcaacaggtgaacttctcatgtagatccatcaacttagcactgtttctgagttcacatgactgccactacccccagtgttgctgttaaatcctaccacaggaatggaacgttgcgcaaaatccagcaataacttcctctggcgctcgtcagtgtgagggagactagcacgcaagagttcaacaggcatttctctaccaatagatttggcagcatctgggccaatgtcatccacatcagaggtactttgtataagcatggattgcatgatactatgatatttattcatgcaatacttggtgagaaggccaaaaaattcatcaaatgaggcctgccaaaatgaacgattacccatgttgaagttgcaagcagcatgtcgatcagttagaagttcagtagccctctcaagaacggaaattaaaataagggaagcaccatctccagaagtgcttccaatggggcgtagaggaggctgct

SEQ ID NO: 3169 - DNA, 764 bp, Glycine max
aaactactgttgggccatccacattccatcgtacaaaagaattaaagaccccactgaacctgacaagtaagctagttaaccacaaggaaacccacaaaataatctcaagttttctatacagtaatgaaaacatcacatcatttcattacaagtataatagtgatgtatgcaggtctgtatagagattagactcagcacatgacggtagaagaaaattgatataaccattttcactgactcaattcttgaccattgaacagattctggaaaataaatcttgcagttaacttacaaaagtaaacaggacctgccagcaggttgagatttatgaacaggccaacttgcacattgatgaaaaaaaaattgaggatagcaaaatcagatcaccactttttactgtataaaaatcaacatattttaatgccaaagtttctccaatttgaaaattatatctgaaccacttctagcttatctgaaacaaaaccaaccaaaaccttttcccctaattttcaaagcaactttttctcctcttttaaaatggtccatgccattactcatccctgatagatgcatcataatatcataccattctatcttttaacctttcctaacaaaatagataccaaaatccaaaacataagaaaagaacacagggggaggtcagggaatcttgctattaaccagaaccattcagatccaaataatcattggaaagactttctgctataatcagggggagggcacaaggaaacgatatagatatt

SEQ ID NO: 3170 - DNA, 719 bp, Glycine max
acaagaatagcaccagaaagaactgcattcatagttacagctcttgctacagaggaaggtacatacatgactacaaaactatgattccatcccatgatttgtgccaaaccagcaccatttcccaaacacaaacaggacaaaggagaaaagcagtatagtaatatggagaaacacaatctcacaaacgcacagcgaaattcaagcagagtaaacaaaactaaccacaagagatttcattaaactaccatctcagaataagcttcataatctagaatttaagattaaagagtttaaagttcccacagtataacttcatccttgcagctacatacataatagtagcatcaaaagcaaagtagtaacctaaagcatatgtgatctggaacaatcatcactgttcagagatttattctataaacaaaagaatgaaactatatttctgaaatttcaaaagccaccaaaaccatccatccatccatctatctcggatgtatcctaagcagccaacaacagaatgcctctccccaatctcaacgctacctctgccaaaaaccaaatccaaaacaaaacccaaaattaaatccttttttaaacctcagataacaaaattcacaaaaaagcagagtgtaacattcacataccttgcgagtctcagcatcatcgggaaccttgtaggaatcggcacaaacctccgacaaccactggccagggaaaagggt

SEQ ID NO: 3171 - DNA, 750 bp, Glycine max
ggaaggattcagctttcaaggcattgtttggatgagatccacccttgttgaagaggaaaaccattctttcaaaggtggaagaagaggtcaacaggatgaatcagcagtgggatgagctgttagatgatttaaggcagaatttgttgaaggcccgggacagaatgagaaagcaagctaaaaagtataggagatgtgtggagtatgctgtgggagatcaggttttctcaatttgcagcccagtaagatgtgctctctagctagaaaacctaatcaaaagctcagtcctctttttatggcccttttcaggttttggaaagaatagattaggtggcctatgagcttgatttacaggaggatagcaggattcaaccagcttccgtgtcattgtttgtgcctcttcaagaaggcagtcagcacaccacagtttgttccaacttttcccctggccttagctgatgacatggagttccaggttgaaccagcaaatatgttggatctcaggcagaacctccgcccttgtgaagatagctgggaggcagcataatctacaccaggcctaccatgaagacaaggacaattttttttctgtgtgtgtgggtgggggtgggggggacggagggcaattcataagaataaagggcctataactaaagtgtattctagatgacaaacccaactaattcacaagtcaattactaagtggttatatgggtcagttaggaagttaggtgttaattgctatatgtagat

SEQ ID NO: 3172 - DNA, 720 bp, Glycine max
atagataccaaatcccaaagtgcaaaaaatcaaaaaaggaccatggaattaatcaatcaacaagcagaacaaatctggtaaacgaaacgccgaaaacaaagtacgaaccaggttgggaagtaagaaaaatgaaacgatcgaaaagataatagagttgctctctagttaacattccactactctgcgtcccagatgccattcgcgacgctcacgaaccacacaagcacaaaccaagagacaagagccacactgtacaatttaggcgaaacaattgataactctattttactttatttttcatcacaacaaaatttcgctttcaaaattactattaataactaaactctgattaaattaaatgaataaaataaataaataaataaataaataaaccatgtgataagctgaaaagtatactttatcatttctcaaggagagatcagagacaaacaaaaagcacataaccctaacgaaagaaaagaaaaaaaaaaaaaagcactataaaaaaagcacataaaactggagtatgtaacaacggtaataatacagtgaaatattatcatcatcagcatccggtcctaaacctaatcccaatcccataataataaattagaaatcctcatccatcttgaagacgtgggtcccaccgttcccgttcaagctgttcataacagaagccttttgatactccccgacgcgcttctcgaagaagttggtctt

SEQ ID NO: 3173 - DNA, 569 bp, Glycine max
cgcagcggggctaacaaaccaaggaaatggctcactatcaagtgctaaaattgactctccaaccttgcaagagtgcaaagcacaatgcattgaacaacaacaacaaccaaaggaagtagcagaaagaaaggtgttgagacaccaactgagtataatcgcgatcactagcctcgagttctctgaagccttgccttttgctgcatttgcatctttgcttgtggagacagtggcaaaattagaccttgttatagaagaagttgaagaattggggagattagcacgcttcaaagagtacagactcgatgataagattattgtcacttgtgagacaccacgagttgatatattagaagaccatatacctactcgtggagcagaataaaatatatataggaggagcctaggaaatgcattctttctttcttgtgttggaatatgtttcatctttaattcttggtttaattatctatttagtccctataattttcaaacttatcatttttaatctatatagttaataagtgaattttttagtccccaaagtttatattttaattcccaaaaggtct

SEQ ID NO: 3174 - DNA, 815 bp, Glycine max
tactcactgtgatttaggatgtgttgggtaaaattagcttatgagctagcggaaactgacaagctagccgaagcatataagcaagctgaaaagctggaaacttataagctagaagctagtcaaaggagcttataagctccccgaatgccttaccaaacacaccggtgttttaatttttaatagtttaattttcatatactaagagtttaaagatttttacacgttcaatcaagcagaaatcatcttagatgtgactattttttaaataaatattataaaactcggcaagttgactacgatacatgtctatctgtgtatagatgacagtgtaaaaatcttttagactatcagtgcatgaaaactaaattatttttaaaatgcaatacttgtttatttaagtgattaaaaacatttaatagtgtgtattaaatgttccttagttagtgtccttagagcactccttgataagatatcccattggggttgtcttaattgtgtttctaaataaataatatgttaggttttatagtgttagataatcagcaattataaaagtgtgaaatgaaaaaaaaatatgaagtttgaaatgtttctagaggaaagaacaaaagcagaggttgcaatttgtgtggtgtgtaccttgaaagtgagtgaaattcaaaatctttccattccactccattttcactctgctctcaattttccactaagcataccttaagtgttggcttttggtgtttctgaactgaatgttaattaccttctgcagggctgcactgtgcactgcttgctggtaatttacaaaattgctttta

SEQ ID NO: 3175 - DNA, 798 bp, Glycine max
gcttgcatgcctgcagaaggtaatcaatattcagttcagaaacaccgaaagcaaacacttaaggtatgcttggaggaaaactgagagcagaatgaaaatggaatggaatggaaagatttcaattttcactcattgtagcttggcagaaagtggaaactcactttcaaggtacacaaattgcaacctctgcttttggtctttcctctagaaacatttcaaacttattatttttttttcttcatttcacacttttctaattgctgattatttaacactataaaacctaacatattattcattttagatacacaattaagacagcaccaatggggtatactaccatggtatattagatgtctacatatacaccctcaacttaataaaaaattgggtcttatcaaggagtgctctaaggacacttaacatttaatacacactattaaatgcttttaatcacttaaaaagaaacaaatgttgcattttaaaaagaatttaattttctctaaaagatttttacactgtcatctatacacacaaaatagtcatgtatagtagtaaacttgtcgagttttatagtcattattttaaaagtcacatctaacatgatttatgctcgaaatatttacactcggtacatgaaaattaaactctattaaaaattaaaacagtgcggtgtgtttggtaaggcattcgggaagcttataagctcctttaactagcttctagcttataactttccagcttttcagatagcttataagctaattttaccaaacacaacaaaaatatcagtgagta

SEQ ID NO: 3176 - DNA, 767 bp, Glycine max
agttaagaaagcatggagtttaacgtctaaaactggacatgaaataataacatacatctgagaatgaaccattattcttaagccaattcctagcaaaaaaatgttatgtccaacattaaaatgagtccaagtgaacttctgtagcccatgcatgggagacatgttggactcttagtagtagcttagcttagggcctaggcaatttacatgcaaaccaatttaagaaaggaaggagattgtgggggtcttggaggatcatagaggtccactaaggatgtgtgttcaaccattagttgatgaattacgaacacatttaagatgaagttctctatggagatgataaggaagtatcgacatacatagagtagcaagggcagctattgctgaagaagcaggcaaaaatacaagaagccaagccaagccaaaatggctaatacaagcaaagttagcaaataaggcccacagtcatttcttgtattgcttaaacattttattcttttatctttaccacaaatgccatgcctgagtaggtcatttaagttgcaaattgatgcaaaatagtcagaatttcagttccttgtattttcctcttcacttgtcactaacatcaatccttctcttgtgttccctcaccttaagacattaataccacctaacattaacgatctctttctctttaaccagaaatatcccatgagacccctttaacgtgcaaatggcaaacccccaaacctaatctcgcaacactgcaggcatgcaagctggcg

SEQ ID NO: 3177 - DNA, 705 bp, Glycine max
agtctttgcacctgaatatgtggtcagatgggtttttagttagaatttttgttatgagaaaaagctgaaatgacttaatgttaagtcaattgtttgcataagtgggtcgagacggaaaaattattatatagtttctaactatcacgtgtccattgttttgatgaatttctaagtgatacagaattaaattttgactaaataaataatatattctttgtttaattcattatctaactttttttatttaatatttttaaatttttatttttggtaatattattagtctcgattcttgacgtgacaaattaataaaatatcatattattatttaatagacttagattaacaataaatactaaaaattaaaattaaaaaatgtcagtagtaaaataaaataaaaaatatcttttaggtaataaactaaaaaaaataggatattatatatatatatatatatatatatatatatatatatatatatatattatgaaaaatacttttaaaccttaaattcttttatttatgagaaagagttagaaataatattcaattaggtgtcatacgtaaattagttaggaccacgatggtctctcccataataatttttcaggttgatgggatgaaaatgcatgcatggtaatggtataagtttgtttaacacacctgaagttgctcatttagtcttctctgcacctctatttgcat

SEQ ID NO: 3178 - DNA, 773 bp, Glycine max
tttttcgccagcttgcatgcctgcagtgtttgaatcagaaacattttcagatgcttcatccccgatacccaggccaagtcttgcgtttacctcttctgagggaatagatcttctcgaactgcttccagcattatcctgagtaggaatggtgtgccatgcactaccatccgtatgctgactgtagctagaactcccagcatctgacgattgtccattatttccttcaacagcctttcgtttacaagagacccgccgagtatcaagagaacaactaggcctaccatcagtatcttctaccaggaaggcattatttccagaaggaagcagaaaagaaccagatccaacattaggtggtatacactcgtttgctgacccactagacttgtttaagttagggagctccagatgttgactatcatcactgccactgtccgctaaacctgcatttaagttgagattctgggacatcaaatgagaattggggctacagatgtagataggacctgtattgacattgtctagtgaaagagcattggttggttcaaggcgcctttcttctagtcttggaccagccaatgcaccagcagtaatggttgatgaccatccaagttctcttttttgctcattattgttgatctcattcggtgtattactagaacttggctcccctaagctccatccactcaaattttgccattcatgattaataatagaattctcataggatgagttcatatcacaaggagaaagtatataatcaggaatttgattct

SEQ ID NO: 3179 - DNA, 477 bp, Glycine max
ccgggtatcctctaaagtcgacctgcagtggtgcattggtaaatgaatagtcaatcatcatgtcaatgaaaccaatcgctttcgctgcacggcttcccaatggacctagccattgaaaacaattcaagtcaacatgtttatcaatttctactgaattcattgacatgcaaaaatccatcttgaaggaaagagttaacttgcacttagaacactagtagttacaaagtgcaaaagggtaaaaggagaccaaaacgaacataagagaaaaattttaaaagaaatctcatggtgaataatatttcaatgaatttggtctttaaccaagcctgatctatgtagctaacatcaccttgtgggatcagactcatgttgtatcagcccataattgggtctacttttaataattgtgtgaattatgtacttcaaatataaagtagtaaagcattctcccttacgctcattctattttggagggaa

SEQ ID NO: 3180 - DNA, 650 bp, Glycine max
tattgatggcttcttatgacttcattagctaatgattttgtctgctttccttttctccatgtaacagcatataaatcggtgatctggcgcaagtgatgccaattgcatggaaaagaagaaagtgtcgtaaaatcttttttaagccctgcttttgtcatattatcaacattgttgatatgtaattccctccaaaatagaatgaccgtaagggagactgctttactacattatattcaagtacataattcacacaatttactaaaagtagacccaattatgggctgatacaacatgagtctgatcccacaaggtgatgttggctacatagatcaggcttggttaaaaaccaaattcattgaaatattattcaccatgagatttcttttaataattttctctaatgtccgttttgatctccttttaccctttttcactttgtcactactagtgttctaaatgcaagttaactctttccttcaaggtagatttttgcatgtcagtgaattcagtacaaattgataaacacgttgacttgaattcttttcaatggctaggtccattgggaagccgtgcagcaaaagcaattggcttcattgacatgatgattgactattcgtttaccaatgcaccactgcaggtcgactctaaag

SEQ ID NO: 3181 - DNA, 656 bp, Glycine max
tattgatggcttcttatgacttcattagctaataatttcatctgctttccttttctccatgtaatggcatataagtttgtgatctggagcaagtgatgccaattgcatggcaaagaagaaagtctctgtaaaatctttttttagcactgcttttgtcatattaccaacatcgttgatgtctaattccctccaaaatagaatgagcgtaagggagaatgctttactactttatatttgaagtacataattcacacaattattaaaagtagacccaattatgggctgatacaacatgagtctgatcccacaaggtgatgttagctacatagatcaggcttggttaaagaccaaattcattgaaatattattcaccatgagatttcttttaaaatttttctcttatgttcgttttggtctccttttacccttttgcactttgtaactactagtgttctaagtgcaagttaactctttccttcaagatggatttttgcatgtcaatgaattaagtagaaattgataaacatgttgacttgaattgttttcaatggctaggtccattgggaagccgtgcagcgaaagcgattggtttcattgacatgatgattgactattcatttaccaatgcaccactgcaggcatgcaagctggccgta

SEQ ID NO: 3182 - DNA, 407 bp, Glycine max
agagaacatacgcatacctgttatgtatatgtaatatgtaattggggggtttccgttttcttcttcttccttctttttttatctcccatttccattggaaatttccttctttttcttaatgggaattgcatatccaaccatcaaggatccatcttgttaacctatcatgttcaattgtgcaaaattacagattccacgtgttgactattatattatactttcttttcttctctgcttgctaaacattgttattactatcgtaacttgatttattatgcgatgcggcatgtctcttatttggttcacggattgtttagtgattatgttaattcgggtatttgttctgaactttgatacatgtgactgttcccatgtattgatatgaagggtggaattcgccttagaaa

SEQ ID NO: 3183 - DNA, 737 bp, Glycine max
agagacaattgcgcaattaataacacttatatgaaattgagcagacatgattccataaactatgatatcatcataatttgcaacatacaaacagttcatcagttaattgaaaatacgcagcttatgtcaggatccatggtacaattttgattgattttgtaatatgattaggggggggggggggggggggaagaatgattatttactattagatcataccttgcaagcaacatctcaatgtcacattcaattatcaaaatcaaaatcaattaaaagagatagattttttttacatatattcatgctaaatttcatttcaaactaaacactggccataaagcaatgcactagaactacaagttagaattaattcctttctgatagtttgaggaaaaccaaaatgcaaatagtaatcctcatgacagatggcatctcaatttattgaaatggaaaatacaaaaacaaagacaatgtaatagtcactaacctcaaaagaagtgccaacgtcaccagaatagactcttgattgatagctgtgcaaaatcctatccagccagtaataattttcctaaaagacgagcaaataagaaaaaaggagcttataacttttatcattgtttacagttgagaattgagggttatacaaattcgtatgttttggtctctctattttgttccattgactgcatagtaaaaggctacgatgctaacaagacaaacttcaagagaccaactaa

SEQ ID NO: 3184 - DNA, 598 bp, Glycine max
atattagagtatacttacaccaccgagtgtttttactttgtgtattttttgttttcttttatctgtgagttgtcaattaactcatattttgttatagcttttgctagaattagtttgtaacagataaggctcgtttacagttagacttcaagtccctctctctatatagatatgactttattctttgtaacaagtcttttcattttctgatcaatgagaaatcagtgttttcccaaactctattatggtatcagagcactcgggttgtgatccgtgccatagattttttcgttttttcttgatctttgattgatttcttcttcttcttctcttcgatcctagtccctcctccaccaccagcttccgccaatcttgttgattttcaccgatctacgaagtaatggctatgcctgcttctgctgatcatggaggtagcgatcctccaccgaatggagttctggtgtcgccttatcagagttcagtgcacacgaacttcagccattccatcacagaaaagctcgactacgtgaagtatctcttctggaaatcacaggttgagcctgggatttgtggacattgtcttcatcacttcattgcg

SEQ ID NO: 3185 - DNA, 560 bp, Glycine max
attccaggttcgtactttttcatgcttgttaattatacatcatttcagtacatctagtactgaagttttattaatactatcagatttttgcagtgcaaaaaaaataaattatatgattgcttttaatgattattagttatcttcaattttagcatctgtattgattcattgaatttcagtatgaaagttgcagttcgtatttgatgaagatagtggagcctatcatgaaaagctatatggtatttttagtagttcttcatgatttgatttaactttgttataatgttttaataaaatattctgatttgattatatacattttgtgtagaacgaaatccatgtggatagttatgaactctctgtaactgaatccaaacttgcttggttcacacacatagttgctgcaattctcagaacaaaacagatttctggttctaggtagtttgctttaaccattgcagtaaaatcagaactgttgcacagtaaaatgttaagctgtcttttatttcttacagtggagaatcgcatgagatacttgatgcggagatttcagcatgttt

SEQ ID NO: 3186 - DNA, 460 bp, Glycine max
aagttgatgctataaatatttcaaagatttcttgacagtaatggatttgaccatgtcgttcttcctaataaagtttctagttgagatgtcatgcaagtcttatcctatacttgacttgcggcccctcctcttttaggtaggctatacagtgagtgagcaattgccagccacaatgatgattgagacattctgttactgtcacactccctaacaaggttttcctttgcccctctttcctttcctcagtttctctgcattttttctatctataactgctaaagttgtgccttggtgacttgttggtcatgggttcgaatccggaaacagtctctttgcatatgcaagggtaaggctgcgtacaacatccctcccccataccttcgcatagcgaagagcctctgggcaatgggatacgaaagttttttataactgctaaaccttcttcataccttattgttgc

SEQ ID NO: 3187 - DNA, 481 bp, Glycine max
taatgcaggtgtagctggatgttgcactggtcttgctctaagttttccaggtatcttttatttatttatttatttaaataaattgataagtttgtcctttttttgaaacttgtaagaaaaaattaggataaagcacttgtcaatctaactattctgaataggtcctattggcattcttgatctctctttaaaagcataatcatatgatctaaatgcaaagataattttgtcaatattcagtatggtgtaattttttttttttgagatgtattactcttgaatcctctgtctccatccctcaaaccatcacctaatatggaggaggggggacaaatttgctgatgcagaatgccttccaataattgctattgttaaaattcaattcattgtttagctaaatacacgtgtgaatttcattttgtgtacttttttgttattaggacttatattctagtattttataggtgcaccacaagctctt

SEQ ID NO: 3188 - DNA, 568 bp, Glycine max
gaaacgggactgctgatggaaagaagtccccaagatggaaatgctggtggattgctctaacatggacaatttggcagcacagaaataaaatagttttccaaaatgcaagttttgatgcaagcaaaatgctggacgatgcaattctcttaatctggacgtggatcaaatccatggagaaggattttgcactacattttaaccaatggtcctctaatctaaaggaaggatttagtaactaggaggggatgggtgatgctgaatttatgtaacttaatgtggatctagcttggttctatgaaaaactggaaccagatggatccctatctcatgttatgtaattatagtactactggtactactacagcttaataaaatatatatttttgctgagcaaaaaaaaaaaatttagcagtacatcaatgaacaagtaagctatattgagaagtccacttacatgcaacaagcaagagcaaaaacacatgaaacagcagacacctcataaatcaaattaaatgcaatttataaacattagatgcatgttgtaaaaaatgagcactgttaggctaat

SEQ ID NO: 3189 - DNA, 960 bp, Glycine max
ggacaacactagctggagcaaaattaactataggcacctcttcctgaaaacaaaaaacagtgaataattgaaaattacatgacccagtatgtttctgctcatcaaacagggtaaagaagcactaaccccatcaggaggctcagcaagcggacatacaactgctccaagaggaagatgccaccttgaagccaaggactgagagctaggaactgcactggttgtgagtcgtagataccggggattgcagttcatgggatacatgtcaaccaaattctttggttcaatatcaccttctaatggccgtggaagttccttggcatcaaataacggatccattgttccaggacgagtttgcaatgtgagtgcgttgaagtcttctgccaagccctgaatggcacccattgggggcacagatcctggctgctgcattggctggatacctagtgggggagccattgggggtgatggaacataacctcctgggtgagacaaaaaaggagaagaagccgcaggcgggacaggcccaaaatttccttgattagcagggaacgaggagtgcataggtggagcttgcatttcaggactggcatgcttactcgggtacccaggaaaagatggctgaattgtaggtggcggaggaggaaaatttgaacctaaatgtgcaggagcagcactttgtggcggcggcgggggagagcccattggaacagaaggcatctgtggttgagccggaagagacgtgggaaaaggcagtgcttgactaggtggagattgaattgatggcggtaacattggctgcggaggaccacgtggctgcattgttggggaaaagggcggtggcggaaactgctggaaaggtccagcagccggtggggcattggaaggtcccactggaggaggtactgatggatcattgaacctccctggtggtgcaggtctaaaactgggtgctccgggtct

SEQ ID NO: 3190 - DNA, 1200 bp, Glycine max
atatttcaatatcttcacaatccatttgaaattagagcatatgttaacaaagctaatttgaaactgagtaaagcctaaattctctagctgagtcaagataatttgcttaaatatataaagaaaatggaacttcatgtcttcggacaaggtcttttgctcagtcttagaagtacaacaaattttctctttctttaattttggtcctcaatcaagcatattcaaggataactatatcattaatgacattgtcacattattgtgtatgttcttctaatgaatcagtagtccctttcagtcagactcaagattacaacatgaaggaacaggatatagcctatgcaaattttgtagttatttaggtacaacatcttatcactttatgctttcatttcaggcaaggaaaaatctagtggccatatttcaatctattgtggatgagagaagaaacttaaggaagggatatctgccaggaaaagccaaagatatgatggatgctctgatagatgttgaagatgatgatggaagaaagttgagtgatgaggacatcattgacattatgttgatgtacttgaatgcgggccatgagtcttcaggacatattaccatgtgggcaacctttttcctgcagaattcgtggccaagttcatgagcatgtgcagaaaaaactctggcagtcggaaatatgtgtagattaacatggatgccatttgaggatgaatccttactcagacacaattaagaatgtcaacatcatattcatatgagcagcactaatgaatgttttaattagtagaagaacgtgattccgtatcccatttggaaagaaaaatattttagtagagatcagaaaggaaagtacttaaatcagattctgtttcattcgtagaacgcatgcataaagtatttaatattgttcaaactaaaagtcagcttgaagccctcaaagctcatagtgaagtgtgaaccagagagttcggtgagccttaacatggtgatattgtaaaatgctcttttcttgggcaggagtctcgagcacgcgttcacataaaaagcctaaaaaagtcctcatttaatggttctactcttggaaaactgtcgccagtattagtatatctttcgttcaatactacattatcacttctttaactttttagtctggcaacgtacacgttgtgttgtggtcacaactgggtctatttt

SEQ ID NO: 3191 - DNA, 107 bp, Glycine max
tctccccctactaacaataggagatgaatgcctccttggcatagtaactggggaggcttgagtttcagaaccatttgccttcatagtgacaccaccaggacgtgatc

SEQ ID NO: 3192 - DNA, 566 bp, Glycine max
gttctttgctcagtcaaacaccaagtaatggagggcttgatctttgtgccacctttactcctgaccgtgtgactatggcagccagtattagtgaaagtgaggattctacagggaagacagtggatcacttccacgcagagccaaccaaacagtcagcaaatcggactttggaatctgttagtatcaaccagataacctcagaagcagtggcttcaacttgttatcctatgggaactgggacagagacaagaagtcacaaacgaagattggcattttaccattctggacacttcccaaatatgaaccttcaacgagaatttgaacttcaatcaaagaaagacgtagtgcacactgatgcaactacagatgttctatgtgatgatcaattttataatgatcttgatcttgacgagttggaggcacaagcaacattgcttctaaaacagaaattagatttgtctaatcagaaacaagatacggtccctcaatctcacacatccaatcttgatatttttcagtctccatcatttgaccttgggatatgaaaagcatgacataagcactga

SEQ ID NO: 3193 - DNA, 667 bp, Glycine max
cttgtgatggtgataaaagcccaggcccggatgggctaaacttcaactttattaaacagttttgggatattttaaaacctgattttatcagatttatggatgagttcttcataaatggctctttccccaaaggaagcaatgcatccttcatagcccttatccccaagaccaataaccctcaatctctcaatgattatcgacccatttctcttataggatgtatttataaaatagtatctaaagtccttgctaatagactggccctagttttgccacacattattgatgaaaggcaaactgcatttcttaaaggaaggcatattctccgtggtgtgatgattgctaatgaagtcttagctgaagccaaatgcaacaataacccttgcatgattttcaaagttgattttgaaaaagcctatgactcggtatcttggggatttctaaactacatgatgaaaaggatgggattttgtgatagatggagaaagtggatctatggatgcttgtctagtgcaactatatcaatcttgataaatggcagccctactggagagtttgtgcctaagagggggcttaggcaaggcgaccctcttgcacctttcctctttgacataatagccgagggccttactggtttgatgaggacagctgtttcaaaaaacatttt

SEQ ID NO: 3194 - DNA, 509 bp, Glycine max
aactgatgtgttggatccacatgttaggaaaattagggatgagaaatatgggtggaagtatggttgtggagctaagggctgcacaaagctttttcatgcggctgaatttgtgcacaaacatttgaagctaaaacaccctgagcttgtgatggaactaacatcaaaattgcgagaggatctttattttcaaaattacatgaagtaagtattaattaaggcttcttttatttagtggtcagtattgctggtgtgggtgcacatatcacttacaatgtcattactatcattgcagtgatcctgatgctcctggtggaacgcctgtcatgcagcaacctcaggtagaatagtttttttatattccatgcacttgtatacataaaaggaaaatattattaatgatgattcatgatttgatagaaagatctttattgttgcatcatgcatgttttggaaacattttggtccaggttttagtagttgtttatctgtatcgtggcattttagcaaca

SEQ ID NO: 3195 - DNA, 750 bp, Glycine max
tggaaaagaaattgaagagctgtgccttgaccgtatcaggaagttagccgacaattgcactggcttgcaaggattcttggttttcaatgctgttggtggtggcactggttctggcttggggtcattgcttttggaacgtttgtctgtagattatgggaagaagtcaaagcttggcttcatcatttatccttctcctcaggtgtagtaaaatgaaatctgtttgtggtggagcatcaaacatttgttgactttacaacatgctatgaccttttattccaatccttcagtatgaagaaaatatctagtggagaatattccagtaatgagaaatgctacaccctttaacaatttttgtgacattttctctccaattgagtgaaattcatgtgagttctattcctcatttactggggatcctaatcccaaactagtgggatgtacataaatttcaatcaataaaaaagaatgttttaagaagagtgttcgagactatgttattagcactcctctgtattagtacatgatgaaaattgcatatacattgcagtaatgttaacttccaacatatgatgttaaattgctagagatgctttcacatatgttgctctacatactttagaatattcttggcttccttaattgtgcttcttattgattatccacatttctatattattataccaaattgtccgagtggaatgtccttactgtagtgttgttgttaacatgcaggtatctactgcaggtcga

SEQ ID NO: 3196 - DNA, 571 bp, Glycine max
aaccttcaatttgcctaactcccatggaatagtacctgataactgattcttgtcaagctgaacagtggaaaggctggtgcagttgcccaactgccatggtattttacctgtgagtgaattgtctgatagatgaagctgttccagaaccaccagcttcccaaagtccccaggtatttcaccagagagatcattagaagagacatcaaatataacaagcgatgaacagttggaaagctctgctgggattggaccagttaaggaatttccccaaagtagcaagctagtaagcttttgcaacttgctcaattgaggagggatagagccagtgagcttgttcatgtgtaggtacagatttctcagctccgaacacgacccaagttctggtggtattgaaccagaaatttcagtatcataaagtgctagagtttgtagattgatcaagttaccaaatgtagagggaatgacaccagaaagtccagtggcagctgcaccaaaagtggtgaggttggtgagtaggcccaactgtgaggggatttgtccggtgagatatggattgcccccgatccgaaac

SEQ ID NO: 3197 - DNA, 1518 bp, Glycine max
ttgcatgcctgcagaaaaagggaaataacagtaaaaggaagaagagaaaaggtttccagagagctatagccctccctagtgagagaaatttctctgcactcccatattcattagtgatctccacaatgtggttacaatccccacccttataacaaaattctccctctccactattctctaactaactcagcaatgtccattctacccccttctagaataactaagtaaatgataataacaaagcatcagctcattaacttggtcttgggcctatgactatacaccttaaagggcttctcccattttgaggtgcatttcctgacaatacccccatctgtcaaatcagccttgttctcaaggctaaatgttggaaatttggcatggatggagtctgctgcttcccaggtagcttcttccacaggttgggatcgccacagaaccaaccattctgtttgtccagcagtcttaccctcacgagaagctagaacagcttctggaacaggtgcatcaggatcatcagagagcagccccggaggcagagctgaggcactggaagctggggccaaggacttcttaagctgtgacacatggaagacagaatgaaccttagcagaatcaggaagttgcagcttgtaggcaacctcgccaacgtgggacaggatatgaaaaggaccaaaatagcgtggagagagttttggattgatgcgacacatgatgtagcgtagttttacttacgccaatcaccaacatcaaactgcagaagaaccaaactgtgtctttgtctgtgtctatcttatctcttttggtaattcattttctttatgaaataggcaaacagagaagcgtagacaattgggtacacaatgagcaccacagccacaaggcttaatctgtcatgccggaagccatagtaatctcttaaaaaggaaccaactgattttcgttccccaaatacgagtacctccttctctatgtctccatattgtgaagttaggaggccattcaaggaccaagcagtaggacaaatccagtagcaccaaacccaccatttaggaattttctgcataaaaaaacttagttgttatgtcaggctttaaagcatctttcttatccttattttccaaattagtgttgtttctgtgtgcatcatgctataaagaaaaattcaagtaatgattatccatgatagtggttttgattatgaatttgatgttgatagactctatgatctttcaacaatggaatggattacattttgggaaaggataaaattcatctttaaaagtaagcatttgactgggattggattactaaaaacttgggttttgcatcaatttatgcttttctcaacatgtcaattttggatccaaattccccaaaaaaaatcttggatgcaaatataatataattaaggtacaaattcaagcccttatggtgctataaaagacttaccggtcctggcatgagaaatccagaaaagagattgaatatggtgtagactgcagagcagtgcgagct

SEQ ID NO: 3198 - DNA, 629 bp, Glycine max
aggcatcctcttcaatttttggatccatctttgctttctttgaaacatcaactgcctcattaatttgtaaagccctcttagatggagtctggtcattgggttcttcagttaccattttccgaacaaagagattgacagataagcctgtacttagacggaatgttacaagcttctggggatgtccatatgtatcctgacataaagtaatgtacatcacaagtgtgagatagatcagcaatcccacagtaactaaatatgcttcagtgatatacaactgcaatatcagtttatcaacatgaaaaaaaatatcctcgttttgttgaacaagagataaaggcaacgtcattgagtccatcagattttggcagggggatcaaatacatgtctagcttcaaaacatttttattagaacaaataggttcaaatatatgatccacatttatgtgtttcattagctcatctaatcaacaagcagttttagtgatatcaggtagaaccattggacattggtatacaatatatgtacctttaattggcttccttggacattttcataggccccatctgcctctggtggacttctaaaaattgcaaaggcggaataatttgctccttgacctttcctggaa

SEQ ID NO: 3199 - DNA, 496 bp, Glycine max
agtaaatagaatatgttgtccatgtaaaccacttgaaggaaaaaatcaagcaccaaagttaaataagatttgagaccatattcctgagaagcaggtaagcatatgacaaacaaatgcagttgatcctgcaagtgtgatgccgacactgcccactttttatcaaccaatccaaaggagaatatatttggaatgacacatcaacagtaagccaatcgtacttaaatcaataattcaactctttttctgacttgtacaggagcaatccagtcttctgtagcgcactattttgccgaaaattattagttgatgcctcaaaaattgactagaaagaaaggtccatcatgaactaaaggtgttctaattaagtatgttcaatatattgagctaattcaattacaaattaccattaatggagaaacaatagcttaagcatgtttagctttgaatgagccgcaacaattatttgtccctatgcatagaaaagtcctcaaagtta

SEQ ID NO: 3200 - DNA, 487 bp, Glycine max
attaccctcagcatcaactggaagaggtataaggcagctactgagtttggtatacctaaccacaatcatgcaaagaaaattagcagagatagaagttaaactaacactaacagtgatatggtacatgaacattttctattgtctccttttgaacaacatatgttataaattgatgcaaaatgtcaggccattccatactgtgtatatatacacatatcaaaaagctaaagcatcatacatgttggcattacagaaaaataaaatttggtggaaatataaatgtcaaaaaaatacaaccaaaaactttagcatatataccatgatgagatacttttcctatcgctagtttcacataaaggaggagttctctctttgcgttcctgataacaggaagatgaggtaggcttttggtatataacaagcccaattccagatgaatcaagagtcttagccacaacagtccagcacattgcttttgttacggtca

SEQ ID NO: 3201 - DNA, 772 bp, Glycine max
ccaaacttgcatgcctgcagtgcctataagaatgaatgatgtatcgtgatgaaggtagcagagaaaaatattagagtttccttcttctctttctttcttcttgggagggtcctagacctcgaatgctaggaaacattgagctgattttcagttcataacaaataatcaaggcaaaatatggacaagatgcatgtaatgttggagatgaaggaggatttgctcccagtgttcaagataacagggaggggtttgttttactcgtggatgccattgagaaggctggttatactggcaaggtgggtgaagttttgattatttctgttgcataatttgaatattcacttgtgctgatctggaaataaaaaacaatggtgcagattaaaattggtatggatgttgcagcttcagagttttacactaaggatgggaagtatgatttgaacttcatgaaacagccaaatgatggagctcatgttcactctactcagagtcttggtcaactatataaaaattatgttaaagaatttcccattgtgtcaattaaggatccgtttgatcaagatgatttgggttcatgggcttcattgcttgcttcagttgatattcaacttgtagatgatttgttagttacaaatcctaagagaatagctgaggccatcaaaaagaaagcttgcaatggtttgcttctaaaggttagcatccttaaacaaaatttctttcaattattagaattatttcattatatttttgtttagtttcccgaacatttcct

SEQ ID NO: 3202 - DNA, 1915 bp, Glycine max
agaaaagccactgctttggcgccgcaaagaagctaaatattcttctcttgaaaccttgtccatttcctcgaggtccttggtataagtttctatctgcacggttcaactataattagttaatagaataatttttttatcatattataaattattcaaaaataattaaaattaatataccgggaaattcagggtggcatcttttccccagtacttaagggctgcaaggtcataggtacgtgctgcagttcatcaggtaaagcaatactagaatgattcaatctttagtgtcattttttctcttattatatataccataccacttatatttttctaagtcatgtataggcttattttaaatccctaaatgatcttattttgacagttaatgatttgttgtgggatgtcattgacttatcttattggagcatatgtgaattggcggatcttggctacaataggtaatattcttctttcttgtgttcttttcataaagcaaattaaaaaaacaaaagggctccatgtaactctcatgtttttttgtctttgtctcaggaattattccgtgtcttgtgcaacttctgagtcttcccttcatccctgattctcctaggtggctggtgagttgttcatagcgttggtaattttattgtatgggctgctcatgttggacactgctcacactaggaattgatccttttcatcacttttatcaaattattggagtcaagacatgccattggacaaaatatcacgagtgatacttgcaattttctgcaggtgtcagttcttcagacccttgctcagccacctccagctgggggggggggggcatgttacagtatttttcacagggtattattcagagcgcaattgtactgtataggactattagtgttccattacaactgaaccctctgtagctcttcatataaatatctgttgtatcccatcagttcaataatacaatctctattttttttcattctcaaaaccctttcaccattttctgaatcttaagaagggaggtgggattgatgaatacctcaaatgctacttattctgtgatcgtgacaggtgtgccaatgtctaggtttcaaggacaggtggagatgggcaaggagaccagcattgcctttactgttcatgttaatcttaatgtttgcaaagccaaatagttaatggcagaacaaatcatgaagcagctagtctaaaaagcacatatagattttttttttgggatgagggatcatgcatgccaaaggttgtcataacactcacagtggagagttcagcagataattgttcttcgttggctgcagtcttcatggttgttatgtatgtgtggcattatggttctaggaaaaagtatttatttgacatgcttaacaaagtttcaatgaggtcgatccttacattaggtcctagtcttggaattgttagggtgcctggattgggccttatctacactgaattggctactggggtccctgccagttttactcatttcttgacaaatctgccagctttctaccaagtggttgtttttgtttgtgttaagactgtacccgtgccttgtgtgccacatgaagaacgatacctcattggccgaattggacccaaatcttatcgaatgtatcggtgcattgttcgaaatggctacaaagatgtgtatagtcatcaaaatgattttgaaaatgacctggtgatgagcatagcagaatacattcaattggaagcagaaggttgctctggaaatgcagagggttcagtggatggacggatggcagtggttaggacgtcggggaagtttgggacaagattgcgaatgtcagaatctgctggttttgaagaaggcagcagtattaatcttcccggagctttgactgttactagcagtaaatctccgacattgaag

SEQ ID NO: 3203 - DNA, 1278 bp, Glycine max
agagcagaatcttgttgcatgggtaagagtcttctacagttgtctcatctccttgggttggttgatcatttaaaagcagcacaccaaaatatgaattgtcacttacaccaacccgtagaccaatcttagtgaaaatgctattggctcaattacatataatcgattaaatttaagggtaggcattaatttcatatgaatcagtcttgttgcaaaaaaaattcttacatgttattggttcaatatacttaagcttgagaatttgtggtaagaaatcctttacaatcctctagttcacagttgcctcttaaaaataacaaaacattgcatatgattaatggataatgctttgagagaaaatttgtcatcatgataggagagtcccttcaacatgatatttgttttagaagtaatgtgaactttttaagttgcatagtgcatagatactctttaactgggtttgtatatctccttacaggagaaattggaaattttcataatcaaatttgatacatgtcttgcacttgctccttgactatttgagtagtaactttgggatgaactattctgatttatctgcagcagaaggagcttcagctacactatcatcatgagaagcacagtgtgtattttttccatctagttttataggtgggaaatggaagagagagaagctttggacggttatgttgtttccttcttctccaacccaaggatggttttgtgtgtataaatggaaatcatcgaaaccccagatttgttatatttaataaaatttctcttttctctttttttccctcttctcagacttttttgatactttacttgactacttttcctgtttacaattctctttcacatgaggtaactctgttagaataaaatattatgagtaacgaagtttttcatataaatatttaacagaaactgtcatgtcaaaattaccagaaaatatttagatattttctatagctgttaaatgaatttaacagttgttgttgtaaaaaaatttatatattatcatcaatcagtcaagaatcattcatgatacaatttataaagtatttatgataaaattaataaactcactatatatattaaaatttagaattacatgtcaatgttaatgtttttaatccttcatagaaataattttttatttagtctaaattatttctatgaaatatttgttaaacaataaatataaaattcttacacgacaacatgaaactttaacgtaagaatccattcgcggtggtgtgttttttcgtgttattttgt

SEQ ID NO: 3204 - DNA, 622 bp, Glycine max
agaagcagcttcagctacactatcatcatgagaagcacagagtatatttttttcacctagttttatttatgggggataaatggaagagagagaagctttggccggttatgatgcttccttcttctccaacccaagaatggttttgtgtgtataaatggaaatcatcgaaccccaagatttattatttaataaaatttattttctttcccctcttttggtacttttacttgactactttgtgcaaaacgtaagagaaaatatttgtatattttctataactgttaaatgaatttaatagttgctggtaaagaatttatatattgtcatcaataagtcaagaatcattcatgattcatgacacaacttataaagtatttataattaaattaataaactcactatatataaatttatatatattaaaatttacaattacttgccaatgcatttatatggtgaatatattattatgcattcatattaaatcagtgtaattttagaagaaaaaattataaaacatttattaaataaataaataaatataaaattcttacacgacaacatgaaacttttaatgtaagaatccattcgcggtggtgggtgtgttttcatgttattttgt

SEQ ID NO: 3205 - DNA, 725 bp, Glycine max
aaagaggggtgctccttccctcatccaatttcataacctttgacggccgagtaaaagattctgaagaatcacgaaccatgtttgttttctcaactcccaaaggaatgtttgattttgaatatgtattagttctcttggcccaatttaaatcctcaataactttagaagatttatcacctttactcaataactgagaattagttgttgacatggaggggccaggctgttttagtaaataaagttagatgatttattttaaaactataagcatataaaaaatagaagctgtagacagctcagcagaagtgacgagaaaataagcttctacagattatctgctccacagcatcttatgttgaaagcacatagccaattatgctcaaccaataacttgacatttctatgtatggcaaataataggaaaacattataaaatgtcagtgatgcttcaatagtagatgctttagtgattttcttcatcagtaatcacctcttttttttcttttgataaacaaagaatttattaaaaaagaaaggatagacactgttggaaagccaccttaatcgcagtcacccctagcccaccttagctgtggcctctagggatgtcaaatgagccaggatcttaaattaagtaattacagtgtgtcataacataaatagtaattccgggattttaacataaattaagtaattccgggattttaaagtataaacattctcat

SEQ ID NO: 3206 - DNA, 1597 bp, Glycine max
agcttgcatgctctgcagtaacatccttctccaacactttccacaatcctgcaccaacataaactcacatcaacaatcaagtgtgtcaaagtaaaaatgcttttatcatgtacttcaaaacttactctattgaccaataaggatttggtttagcagaaagagttagtctctcctaatgtggcaaaccactgtccacatttaatatttggaacaagtttaagatataaggttgacagtctaatggttaaagaagaatgaaagaagaagagaagaaaaagaggttgtgggttcgagtttactaaactgatttttttaacataactaacaaatggcatgttctaaaaaaaaattaccttgaagaagaatacacatggaaaacaaaaaaaaaaaataagagtgtgtttggatggaggaatttaaaattctgaaaaattttaaattttagaaattcttttattttcaaaattttgtatttggataaaaaaaaagttaaaattatgagggtgaaaaaaaagaaaaaatatgattggtgtgctagttatacgtgttcctctacgcttagacccgatcgatgttccacaatctcatacggtgtttcttgaagaagagaatttcaatttctcaccttttagaaggaaattgaaatttcagatttttagttgtttaaaattctgttttaaaattctaaaattttaaatttttcacaaaaaaacatccaaacaatgaattctaaattaccgatattcaaattctctgataaattactttcctcagttaaaattttctatccaaacatactctaaaagtattttttttagtccatatatcataccctgcagatttcttcgtttttgtttctgtgctctgtttttctttttccttcctcttccatatcttccacttctattttcctttttgtcctttgttttcctctttctcctttgcccactatcaattttcttttcttcctcactatcaattttctttttgcttttttttttccttactaccaatctgctgaccaccaaattaattagccgtgtgatataaggcattgtttattgttgttgaatattgatcacctttttttataaagcttccttggtcctcttggcttttggccaaggcatcggtcctcctagtgcaattaaaggattctacttcttagcttgtcctttttcacttgatggcctttctggatcttcagcacctgctatagcggcgctagtgggctattggttactatatgaaacaataaatatcttggacatattgcttgccatgtaataagtaagaaataaggtcctttaaatagtttgacgaactttcatttgattaagtagttatctttggatcgtcttcgattcctatgtataaaaaaaatagttatcttcagatcacttgttatgcttgtagcaagctgttaatggaacccattagtttgcatgcaaaattatttactttagatgacattgggattttactcaagttttggtaacagtaattctgaacacaaatacctcttcattggaattcatggatcattagtgttgatgaggaatgtccaagtctggatttgtaattttacatgttattt

SEQ ID NO: 3207 - DNA, 682 bp, Glycine max
  misc_feature (171)..(172): n is a, c, g, or t
aaaatttagaacacagttcctcgcattcatcaacaactcaagcttatacactaatacctcaaaagcatgaatttagaaaaataaagaaataaattaacagattgaaaagaaaagagtgaaagtatatatatatatatatatatatatatatatatatatatatatatatanntaatgattaaaatcaaacatgtaacaagctgtcaaggaggagcaacacatgtagtcaataataatgaattttcaatgaaaggtgaagaaaagttaattattacaaataattatctgataattagagagactaattgtaggaaaaagaaacatgcattcaacttgtaagcagttaatcaaagtgcttttaatagtcttactacatcaaatcttaaatatcacccagacaccactaccacattagaacacacaaaatattattaaaatcaatatcgtgatgaaaaaggaaaaagctaagataaaaggcaacataaactcacaaaacgaatgataagtctcttcaatgatgttcttggtagatcgatcaaccatttacttgaatcgaatacccgccagccctgtaaatggatttgcaaattcgggactaaggtttaatttgaagaattttctacacatttcagatcaaagattcgtgatagaaaaaaataagggagccatggttagggtttta

SEQ ID NO: 3208 - DNA, 364 bp, Glycine max
ttatggtttacctgttgttgcaacaaaaaatggagggccagtggatattctaaaggtatactataaatcctttgtgcgctatttttacatttcatttgctacatctttcagattttcagacaagtagtcaattcatagtcaaggtaatcattaattaacaaaacttttgcaacctcctatttaatttaatcatacttctttactatcatgttttgcatctcatcattgcaggcactcaacaatggactcttgattgatccacatgaccagaaagccatagaagatgcactgctaaagcttgttgcagacaaaaatctttggctagaatgccgcaaaaatggcctaaaaaacatccatcggtttt

SEQ ID NO: 3209 - DNA, 776 bp, Glycine max
  misc_feature (582)..(582): n is a, c, g, or t
  misc_feature (587)..(587): n is a, c, g, or t
  misc_feature (625)..(625): n is a, c, g, or t
  misc_feature (644)..(644): n is a, c, g, or t
  misc_feature (655)..(655): n is a, c, g, or t
  misc_feature (666)..(666): n is a, c, g, or t
  misc_feature (669)..(669): n is a, c, g, or t
  misc_feature (675)..(675): n is a, c, g, or t
  misc_feature (692)..(692): n is a, c, g, or t
  misc_feature (695)..(697): n is a, c, g, or t
  misc_feature (704)..(704): n is a, c, g, or t
cagcttgcatgccttgcgcttttggttatcgtctcgtaacatggcgacggaggatttgggtatacttctgaagggccataggtaccagggtggtggaaaggatgtggcacccaatcgcagtggcagtgcacctcccagcattgaaggctcatttctggccatagaaaaccttttaccccagcataacaccacccagaatgcaagctttgcaaatctaagcagcgctatgcaaaattgcgagtctgaagaacaattgcgagctgatccagcttatttggcatattacaattccaatgtcaacctaaaccctagactttctcccccgcttacgtcctgggaaaatcgccatctaggacgacatattggcagttttagaaataattggagaatgtctactacggatgatagtggtaaaagttctttacatttgcctcaaaggactctttccacgcacaaggaggagtctgaagatgattcaccccaacagccatatgatcatgaattagttaaggcaagtggaatttggcgtggtcctggtgcagcttcattggcatctgggggcaaaaatatggggtggcttgnttggnggggttgtgtgggggttggcctgtggggtgcgttggcncccccggtctttcttgttntccttcgtttnccccctgtgtngcntgtctnttttcttttccttcttnctnnntcccccngtgtgccctgttgccgcgtggctgttgcgttctcgtttgctcgggttgttttggcggctgccctccccgttt

SEQ ID NO: 3210 - DNA, 737 bp, Glycine max
cttgcatgcctgcagttaagtttaattttgagattccatgctttagcctttagaattattttgtctgttttataatatgatttatgttgaacacacctacaaaactgctagtttattttgcttctttgaaatttgttcttagcttcattttttcttaattcattgacacggtaatactgtaaatattaaatatttatcttatgaatgggatgattgggggtgagccccggcacataaataaggttgctgtcttgtgagttggaggtcatggtttcaaatattggaaacagcctcccctcttgtggtaccttccctagacctcactgtcgggaaccttgtgcaatgaatcacccttttttaacgaattggactggattacttctacatttttttttatactttcatttttttcttgtgaaggtgtaccaacattgcccccaaattttgaggaggaaacatgggcaaaattgaagtcagctattggtgctatatttatgaagcaacctgtttcctgtgacttggagaatctttatcaggtaatcatggaaaacctttttattttattaagtaatgggtttaatttagccctgcgaatattcgtcacacattagctcattagagttttatgggaactcaattcttttccataggctgtgaatgatctttgcctttacaaaatggggggaaatctttatcaacgaattacaaaggagtgtgaagagcatatatctgtggca

SEQ ID NO: 3211 - DNA, 797 bp, Glycine max
  misc_feature (655)..(655): n is a, c, g, or t
  misc_feature (708)..(708): n is a, c, g, or t
  misc_feature (757)..(757): n is a, c, g, or t
caaatctaggcttattacttagttcaacaaagacaagagattcaacaaccattaccaatatatgaagcaaaacacgttgatggaaacttctgaagatggcatattacactcccaactcccaagaatgacaaaaaactaaagcatccgagataaaataatagcacaaaaattcacaaaggttagctttaaagcttacagcaaaaattcatcttcaatatgactcctaacagcaaagacaccattccactagaaacaatacaaacaggtttccagggttccattggcacaaagtttagaatttattttgaattataaaatttactgggtcaaacataccaaatggtaatgaaatacatggattccaatcgggtataaaaggaattatttgaattttcattgggtaggactcataaaatcatatgccaatgaatgcagagcaatagtgcagaacaacaatagacaattgacaacctcacatctgtttgtttacttgtgtctccaatatcaaccaaaggaccatcaacatctacaagtgctccagtaggaacaggcttcggtttctcagtatgattttgagcagaagttcctgaagcaatggattcatgcttggccaggacacgctgcagtcttcacttactgatccccactctcgttntgagataggatttagtcagcccatggtaaaacttcttacaaaactaataactntgatattttagcatttcttttttagtgtgtaaacatattttgcttatgncttggtatttttccctttgtaggtatgtgcaaaatatcct

SEQ ID NO: 3212 - DNA, 1250 bp, Glycine max
caaagtaaggaacttacccaccaattcccggcaaacatgaagatctgaaaaagtttctaactcaaagatgtaacttccctggaacatcacattgtaatactcataaatattcagataaaaggaagagacatgagcatgttaagtgtagtactacttggtgaaccaaaagcattgaaaattcaaatgagcagtactcaatcataaagcaatatacatacatacatacatacatacatatatatatatatatatatatatatatatataacacaacactaaggcaacataaatggcacatcaaatgtaaacaagagccgcaagaataaaaatagaaaaacctgtgcatggataagattaagccatgctggtttctttgatccctctttagtgactttatgacctaaaatgtttcccatcagagccaaaaaaaatgacacaatcaaaatcatgcatatgcagtatcaataaaaatactcatgcaattaataatcagtttaaggactcataagtaccctgaataaatctgaactccacatcgagcttggttttcgaggtaggatcattcggcttgaaaacgaacttatcttgagtctgcaggaggtagtgtattgtgcaaagaagggtggggtgactcacatccttagagctggaggagctcaggtctgaagcatgatattttacccttgttttaactgtttatatagtatgatattaatatccttatgtttaatttaaatctatgtttgtgtatttgtattattatggttatgattaatatgacattctttgatattgtaggccatatctgccatggcttggggaacagaaacttgtcccaaggtgaatagttttattggaatttctattcaaattattgtttgtagctattagattgagctttattcctgtaattggaatttgtgacattatgtcaaaatttgctgaaattgaagatttaaaggagatattaaatttagtatgtaatatacaacatagtgacataacattatttgaaatttaggttaacataaaatttaaatacttcatagttcttaaattttttgcataatttcttgtaatacttttgtaggttgagaaaatttttggcccaggaaaccaatatgtcacagctgcaaaaatgatactacaagtgagctttgaatctctctctatctattttatacattgtgtttcactcttcagatcttatattatagtttatcccgctttacattattgttgaaaatatt

SEQ ID NO: 3213 - DNA, 590 bp, Glycine max
caaagtaaggaacttacccaccaattcccggcaaacatgaagatctgcaaaagtttctaactcaaagatgtaacttccctggaacatcacattgtaatactcataaatattcagataaaaggaagagacatgagcatgttaagtgtagtactacttggtgaaccaaaagcattgaaaattcaaatgagcagtactcaatcataaagcaatatactcatcatatacatacatacatatatatatatatatatatatatatatatataacacaacactaaggcaacataaatggcacatcaaatgtaaacaagagccgcaagaataaaaatagaaaaacctgtgaatggataagattaagccatgctggtttctttgatccctctttagtgactttatgacctaaaatgtttcccatcagagccaaaaaaaatgacacaatcaaaatcatgcatatgcagtatcaataaaaatactcatgcaattaataatcagtttaaggactcataagtaccctgaataaatctgaactccacatcgagcttggttttcgaggtaggatcattcggcttgaaaacgaacttatcttgagt

SEQ ID NO: 3214 - DNA, 542 bp, Glycine max
ggttggcagtgtctcttcttgcggatggtctggctgttgctgggcaggttagatattactttgtccaatcaatgccttgctatgttattacatgatggtttcataccaaaacagtggataaaataccaatgatatccacttgaataatgttttcttgtttgaaaaaactgaaaaggttttggataacatgattgattctttgaattcattttcatttttcaatgcacactttcctgtgaaaaatgggaaactgattaagttgtaaaaaaacttggttgggaatgaaatgaactatagaaagccattattttctcatgttttcaatggccagttgaatcatcaatatggaataattacacatttatgttatccaattgattataatgtcattttccatcatgaaacagaagtaaaaggcaatgtttttttccctaatcatttttcttcaattagtttatagcttctaaaataacatgtcggtttcaggcgattcttgcgggcgcatttgctaataaggacttcgacagggccacagcaactgc

SEQ ID NO: 3215 - DNA, 581 bp, Glycine max
attcttcacttggttgaagtatactctttttattacttttgtggcttatactgctgatgagatcccccgaagaacttatgttttctacaacaatagacattggcttttccattgaggaagaaatactattaccagtgatttgttgccggactgtttcagcaagtggttcctccacagcatgaatttgggtatcttctacagatgatatttccaatgctttggaatccagttcttcttgaggattattaagaaattcagctaaagttggcacttcaaagtcaacttggggttcctcatttggctcggcaagttgatcttcctctgttataaataaaccaataattacttttggagacaataaaaatttaagatagatagatttatatataatttttattatttttttaaagttttaaatttaatttttcaaaataatagaacatatttattcccactttcaaaaccgttgcttccttctaatctgaattatgtcctcaaacaagacttaatgtccaaatatattctgtcattgattgaataaattatattacttaatgtccgaatatcatttcctggactat

SEQ ID NO: 3216 - DNA, 702 bp, Glycine max
cctcatcctgccttatcttcttctgttgatacttctttttcccctagaacacctcctttgcggcctcaatccactagtgctaaagaagttcatgattctcctcgccaaacagaatcacccccttcttatcttttgcctttgcaatcaaaacaccaaacacaagacagaagttctatccctacacctgggacccaattgtcatctacttttcatagtaagtcaccagcagacaccatttcccatccttcagcttcagcaattacttcaactcagccatctcctttactttcttccaaaaatgtgaatgagattcctcctattagaacaagactagagtcttccccttcacgacctccaactccacctcctcctcctacccctccactgaaggatcatagactagttcgagctaaacctcctccacctccacatcctcctcctcctcctccaaagaaagaactacatgttaaagccgaaccccttccttctcctctatctcctatgaatgtggagccacaggttagaggtgggccctctccaccccctccccctccaccaaaagaggagcaacctgttacttttaatgctcctccacctccttgtctctcggggaaagttgcaggttctactatagcaccaccaccaccaccaccaccttcctcagatcacattaattcttcattgcaaaagtctccacctcct

SEQ ID NO: 3217 - DNA, 292 bp, Glycine max
aggaggtggagacttttgcaatgacagaattaatgtgatctgaggaaggtggtggtggtggtggtggtgctatagtagaacctgcaactttcccctgagagacaaggaggtggaggaagcattaaaagtaacaggttgctcctcttttggtggagggggagggggtgggagagggcccacctctaacctgttgttccacattcataggagatagaggagaaggaaggggttcggctttaacatgtagttctttctttggaggaggaggaggaggatgtggaggtggaggagg

SEQ ID NO: 3218 - DNA, 515 bp, Glycine max
aactgttttacttttgatattctgggattaagaaggattgaacagaatctacaaggaagttggtcaggtgattcaattttgaaatttttaaggtggtgtttgtgcaatacttgttattgctgtggttattgaacaaaggataagaacatgaatttctctgctgagttgccttctttcttaactagcatatgtgactttctcttacgttttcttaaggcagttttgatttggtaatcaatcgaacgaggttggtcttctcaaatctcaatttaatctcgcatgatgtagtccaactacaaaacaaaattctatgttgtttggaggattacattttagtgaagtcgatagtacaacatatgaaagaattgattttaagaaaaccattaatctaatatttctcgcatagtttttgaacgagagaaagaggataaactgagtttggtttgatttttctttccccgtcaaaatcataggtgtaagggagtggttgtatgagtttcagaaatattctatta

SEQ ID NO: 3219 - DNA, 1279 bp, Glycine max
aaaaaactcctttagcgcattattttttgtcatttaataatttgttcagattcatccaatggcctaatcttgacgtattcacaaataattaactgatggggtttttgggttgggtgaatattaaacatatcataacataggaatactgaatttgaagtcataataccagtttcttatacgagtttatagtacaaacatgccatatttctacgatttgcatcaccatgtcccccccttttctccctccaaaaaatatggagagcaactctttgtcaggcttcctatgttttctctaggcaagaaataaattccaaatgcttatcctgatgggcaaagaattcagctactacatgcatgtctaatgtcttcctaggatcctaaaacttctcatctgagaaatggtcacatggctaagtttgactggtggaccgatgcttggtttagcccaggactaagtttggttaggtgtccggtgtctgtgtctggttttggtccatgactaaatttagtccattaaaaccaaaatttcttggacaaattgcctttgtaacttttttaatcatttacaagtccctgcaaccctgatatcagctgtgaacattgctcgtacaggcctatgatcagaaagttttgactcgctcctgttgtattggatttgcttcattcccttcccaaaccatattattctatcgcacctgcagcacatgacttgaacatctgtggcttcccctaatggcacaagatactgtttctggtgttgactcgcctcggcgacgtctattacgagatcaggttcaagtggttaaaagaaaggattccaatcgctatgaaattgttcctatccaagattctttgtcatttgagaaaggattcttcatatttattcgtgcatgccagttgttggctcaaaagaacaatggaatcatattagtaggagttgcaggtccatctggagcagggaaaactgttttcaccgagaaggtcctcaattttatgccaagcatagctgtcataacaatggataattataatgattctagtagaattattgatggaaactttgatggtaagttttctcttcttctatttactttcacataatctacaatgagtgcatacatctattttttgtttcattttgggttttgcaaagttttcttgatcttatatatctcttttttgttctgagagtgaggattacagggctaactattacttcgtgttacctgtgacttcatgattatatgactttgaacttgtattttgccaaagttacttc

SEQ ID NO: 3220 - DNA, 703 bp, Glycine max
aaaaatctgtcaaggattttggttgtgaacagtgtttttctctttaaatctctgcgaagttgctggaaggtcacaggtgatgttacaatttagttgttttttgtggtcattgatttttttgcttggttgctttttgtagctactttgatatttattggcctcatttttcctgtgtacacattcaatgaggttttactctctctctctctctctgtctctaatttggttattaagtacaacatgaaaccgattttattcactttttatgttcttttggtttctaaagatttgtgttttccaaaaacttttgtgtcaactagttgcaattttctttcacagctgtggttcatggttggttgatttatctgggatttgaatgctgagtttgtcatatgcaatttagttttttttttctccttttccttttgcacgtttactggggaactgagtttctttcagcaaatgaatgcacttttctttttgtttttatatatgagaaggatgtcaaacaatctagtttcttgctggaattttgtatgactggatttgagattctctttctcaaaaatagttgtatgtggtgcgaggaatccgatgcacgagtttggtgtcatcccagtaatttgccaataatgtgctttattttgcaacatgatttgctgtgtgctttgaagtgatttcttatagctaacattgaaaactt

SEQ ID NO: 3221 - DNA, 506 bp, Glycine max
cctaagtcgacctgcagcagaaataactttggcaaaatacaagttcaaattcatatactcatgaagtcacgggtaacaagaaaaataaatgcatgcagtcattatagattatgtataagtaaatagaagaagagaaaacttaccatcgaagtttccatcaataattctactagaatcattataattgtccattgttatgacagctatgcttggcataaaattgaggaccttctcggtgaaaacagttttccctgctccagatggacctgcaactcctactaatatgattccatcattcttttgagccaacaactggcatgcacggataaatatgaagaatcctttctcaaatgacaaagaatcttggataggaacaatttcatagcgatcagaatccttttttttaaccacttgaacctgatctcgtaatagacgtccccgaggcgagtcaactccagaaacagtatcttgtgccattaggggaagccaaagatgttcaagtcatg

SEQ ID NO: 3222 - DNA, 634 bp, Glycine max
ctagagtcgacctgcagagtttcaacgttgtatggtaccattgttccaccaaataagtcgttgtttgagcagttcacatttccaggtttgataacttttactagttttcagtagtttctactttctcttgttatcatatatacaatttctcaactgctcaagaaagaacgaaaagaaagtttagccgttggggcttatttttcacttggggtgatgaaatttggtacagaaagttactttccatgttcatgggtttagacataacagatttgcctaagtcaataaactagaatgtctttgacggtaatctgacatttggggttaatatgacttttacacggagcagtagtagaatattattttgtagtttcttaaattgttgtttagatactctcgcttttaattcataaaatgacctttaactttcatttctaagaagtttactttcaaaattgatggaggatgttggtaatttggactttcttatggtgttttgaatgtttcttagacccaagagattgcacaacaaatagcacaattgtatggataacaattatggaattatatcagaatttaagagtacagaattgctaatgcaggccattgtcctaataaggagtttcctccttcaaca

SEQ ID NO: 3223 - DNA, 1864 bp, Glycine max
cagcttgcatgcctgcagtattatatgaccattcatctagggacaaaagcatgcaagtattgttccaacacacggttgaaaacctcagtctagccattgaattctgggtgatatgtagtactcattcacaatttggtgccacataaatgaaatagcttgcaccaaaattgactaatgaaaatcgggtcacaatcagaaacaagactctggggaaaaccgtgaagcttgcacaccatgtcaaagaagaaggatgctaccttgaaagtagtgtaatctggtcaaagaagaccaaggtgaacccctttggagaaaaggtcaacaactacaaggatggtagagtaaccctgagaggaaggtaagcccgtgataaaaatcaagggaaaggtcttcccatatagtagaggggacacgaagaggttgaagcaaacctatagggcgtttagtctcgcttttcacctgttgacaagtggtgcattaggacacgtatgttttcacatcctttcgcatattggtctagaaataattgccttgcaaacaatgtaaagtctttgtaatacccatgtgagtaagtaacgctgcaaaatcagaatgatcttgaagagaaactcgcagttgatccaagaacacataattaggcatagacaaagtaaaacatgctgctgagaggtctgcagttctcttacaatactccgattactccccccctgcccctcaaactcaaggtggttgaggctttgtcattgcatctgcccactgatcaagagcaggaatatgatgaaccatttagttgttttgtcagcacccattcccgaacaaagaaaacatcagtctccatgtgcttggtttgagtgtgaagaactggattatgtgctagtggtacagcactttggtaatcacaaaagatgactggtatggtgaaaggaactcccagttctgtcagaagagtttgaatccataaagtttcagctgtagcctgagctaagctgtcgtattctgcttcagtgcttgaccttgccacaacttgttttctggaccaccaggacaccaaattaggacccagataaattgccactcctgatgttgatctatgatcatcaacatcagaggcccagtcagcattacagagagcatgaatggagagaggtctgcgtggaattgcaggtctgagatgaagaccatgagaaattgaccctttgagataccttggaatacgtttgactgccacccaatgagtgtctaagggattagacatgaattgacaaactttgttgactgtaaagcttatttcaggtcgagtaattgtagtatactgcagatgaccgtcgcttttacatcaatcatggcaatattcatcattgagcggattgatgagaggaagggaacggtttctattatacctctagttttggcgggtataataagcattgtgtattggaggcaagcccactgtttctttcgttttgcatttttcttcaacggaattccattttttatggataataacaaagaactacttgtgaattctgcaaatatatttaccatatatagttacatgattcactgtgagggataacagaatcatggaatagttcagattgccaaaagttagattagtcattttcaatgttattattcctttatgtgatttccatttgaggttaattgttgagtacacaaccattcagttgagttagttacctgaactgtaaactattgaaataattgctcttgtcttccatttgcccccagattctttgatgacctgcgtccatatgctctagtccaatttgtgccatgcattgtcattcctctaatggctattttgttgcctccaatgtacacacattcaacatattggctctgg

SEQ ID NO: 3224 - DNA, 550 bp, Glycine max
tagaaacaaagagagaagatatcaacaaaatacctcccaagcaaattgaagggaggaagagggcaaaagaaatatacaatgtaagggaattacatgttcaattactctttccctcatatcttcagctactttttcacccaaattctttcctaagttacactctcattctcaaactcatccttgtatgaatcccaaagagttgtgcactggataacctccatagtgaccaactgtttcaacagtaacctatggaatgatatatagcatgtgcatcaaattaatgagaagggaaaaataagtaaaacatctagcaagacacgcaactccaagattaggaagacatacttaaagtttcgaatctcagacggattcttatcctccaaggtagaattgataagacttgactgcattggaatacgcagtgatagaaccaaataccaacatattttcctcaggatctacatgaaaagaaaatattcagagaaaaagaaacacaatctgacaacagataaataaaataaagagtagggaaagcctactgaaatccact

SEQ ID NO: 3225 - DNA, 666 bp, Glycine max
aaggcacacagtgcaattatcctcagtctcggagacaaggtgttgaggcaagtctctaaggaaacaactgctgctggggtttggtcaaaacttgaaggtttgtacatgaccaaatctttagttaatcgtctttacttaaagcagtctttgtattcatttaaaatgcatgaagatagatcaataggagaacaattgggtttgtttaataaactgattctagatcttgaaaatttcgatgtcactattgatgatgaggatcaagctttgttattgttgtgctctttgcctaagagttactttcatttcaaagagactttattgtttggaagagactctgtttcacttgatgaagtgcaggctgctctgaattcaaaggaattgaatgaaagaaaggaaaagaagtcatctacaagtggtgaagggctaacagcaagaggcaaaaacttcaagaaagatagtaaatttgataagaagaagcaaaagccagaaaatcagaagaatggtgaaggaaacatcttcaaaatcagatgttatcactgtaaaaatgagggtcatacaaggaaagtttgtcctgaaaggcagaaaaatggtggcagtaacaataggaagaaggactcaagaaatgctgcaattgttcaagatgatggctatgaatctggaggtcga

SEQ ID NO: 3226 - DNA, 780 bp, Glycine max
acacttgcaaacttgcatgctctgcagtccaattcaacctcagtaagtaattgaatgatggatgagtagaatttcgcaatcaggaattttcagaccatggaattttcactgaactcatattgtcacaaaggattttaagtgtctgaaaagtgcagtgtaatttggtgagcaatgactgaatccatagaatctcagctgaagttcaggccaagctgctatagtcagctttggaactttccaccaaattttgcttctttgatcaccacaaaatgggtcatgtttggataatattctccataagtatttataggaaaaaaaaaagaaggtaaaatgcattgagcttcttcataagctaaaatcaacttatatttgtattcaaagctattcttcgtttgtgattgcttgtaatttgtatttgtatttcaattccgatatcaaacagcagtgtatacacatattttaaaccaaaaaattaagaaggtaaaatgcattgagcttcttcataagctaaaatcaacttatatttgtattcaaagctattcttcgtttgtgattgcttgtaatttgtatttgtatttcaattccgatatcaaacagcaatgaatacacacattttaaaccatacccaagctgtgaaagtgatctattaatattgccagcttcctttaaacggtctcctgctgcacctgttaatttttgtcgttctgacccagctagatcaacaagatttattttacttgttctaaatctgcttacaccatctgcaggtcgactctagag

SEQ ID NO: 3227 - DNA, 519 bp, Glycine max
attgttgttttagtatttaaaaacttaatgagagaaaagaccatgaagagttacaaagcaggaaacatatcataatcataacagggtagtccatgccaatgaaagtataacagaagagacgcacaatgatagaacgaacgcaggcagaagatacctcagactgaagaacacacgacggtggcctctgtcctctgctagcaggaacgacgacgtgcgattaaattaggggtctttgctctgatcattcactcatttgacagatagtttaggttagggtttataatttttaaaatgtaaaaaaataatataactatatactttcaaacttataaattatgggtagtatttgatcgccacaaattgcccaggcccttttctcttttcatattccccaaacctcaaaacccctaaagccgaaccgcacagattcattgcgttttcaatcctcaatccttcttgtcaaggacaaataagtaacaaggatgaaaacaaaacgtatttcagatctagggacgagaa

SEQ ID NO: 3228 - DNA, 595 bp, Glycine max
ggaactattggacaaactgttgcttaccctcttgatgtcattcgtcgaagaatgcagatggtgggttggaaccatgctgcttctgttgtagctggtgatggaagagggaaggtaccacttgaatacacaggcatggttgatgcttttaggaaaactgttcggtatgagggatttggcgcattatacaagggtctggtgccaaattctgtaaaggtcagtcttcatctaatactcatgattcatgaattatgttctgctatgaaaaaatgtgggtaaaccatacctgcataaacatgtgcatctattcagaaagtaaggttttctttccttcttttgaagaagatattattgatttactatatctatgaagcacgtaaaaaatgtttgtgcttgcattatgtcacctggatgattcctttgtgtgatccctccatcatactgtttgtattactttctgatcaaagctgtgaacttaaaaagcttctacctgattagaacaaagtctgcttttcaaggggttattgcaagactcaagtctgtggtcttagtcaaacatttgatattttgaacgtaaattgtttactactctggctca

SEQ ID NO: 3229 - DNA, 753 bp, Glycine max
aaagttcaatgtattaatgaatttattttttatcctacacatgcaatatataaattaattggtggtgtatgaagagataaagttttcattcaccccaaaaaaagtgagaaatcctttttatctatgatgatgagaaatgaaaattataaatctcaatcatatgattaatcttatcatatataaatgatgaaaattaaatttagttagaggtcacatggatacattaaatatatatatatatatttcttttaatctttaccatgtaagtaaactctaattacaattgcaagaatgtggggtttgacccttggataaaatcatgaaaaattaagattagatcataaagtcctgctatacttttttaagtggtcataattaaacatttcaattttaatcttaacaaattcatgtatcattgtttgatttaaatatactcttctcattgtctaaaacaaacactcctctcaattgatataatcatatatgtagatgcttatcaagtaaccatgtaaattttcatgaatgaaggaaaaactgagggaattgaattcactcaccatacaatccattctttatgcaaaggaagaacagtgtagtccactcatctccttctaaaatgccagtagtcaggtcatagagatgcctagccatgtcatcttttccttgtaaggcagccatgtaaaaaggagtggctccttctccgccccgaattttcggtaggcctgcatttttcttgatcatcagagaagcaat

SEQ ID NO: 3230 - DNA, 539 bp, Glycine max
tcattttcaattttctagaacttgacacatcaaataaaaattgtttggatgagataagcaatcccatttggccttgtaaaatttgtggtgcatgcactgaataatttctagatgatactttttattgtgtttgcaatataactcttaaccagggttaggttaaaactagatagaataagaaactaccaccttgagacctatatacactgccatcacgaaccatttccccacagccaccatcatcaccattcatagatgctactacttagtacttactactaaaaccattgtcacctccacctgctctcccttgaaaaaatgacacttttatctaagagggcatttggtaggggaaaaatttttggtttcccggaaatcaaaggctaggaaacttagtttttcatgtttggtatcaatttttaaaaaataacattcctgggaaatgatgtttcctgggaatgttttttaatcagtttcccactaaaactttctcatggagggaggtgagaatcttacttttttgagtattttttatttta

SEQ ID NO: 3231 - DNA, 608 bp, Glycine max
agtttagatgttagaattcattccatatttccatggtttcgggtttaattacaatgattggcctacatgcatggaaatgcgtgatgctggaactctgttctcttccatcaacaatgatatatttaattaggcaaacgccaactaaactaagagaaaactttatcttaggatgcgtaaaattatattttttattttttattttttatgatttttataataaatattttttaattacttaatcaatattttaagttactaattgataagaaccatttatttatgtagtaaataatttgcagacaattcaacacaacaaacattctcttgatattcatttcttttttatttgtcttttccttagctatcatgtttacatttgtttttcttctgtatattttgctatcagagtgtttactagcaggccaggggagtgccatacaccattttccttaattaattaattaattatatatatatatatatatatataatattttcccactatttatttttctttcacttcattttcttatttatttctcttgtattattttaaatcatttatcatatatctacctttcatatctttctcttcatttcttcaattt

SEQ ID NO: 3232 - DNA, 424 bp, Glycine max
ggagccactcgacaacagagaacaacagaacatctatttgctagttgaaagagctggagtcaacagcattgagctaagtcagcacctaaatgatcagcatgaaatacacagtaaacacaatttgaaatttaatgtcacttacctcttcttcaagctcgctgtcaagaatataaacaaggctggtaccatcaataatcaaggctaatggagttgaaacagcatctgatcttccttcagaattgtgagtaaccccaggcacagtcatgtgttttctagacatgacaagggcgtcttgcaaacatcttctacatgactctctattgttggtattaattataatttgagtcatgttgctcgttaggagcttcgaggagcatccaattgatatggcagtttgctgtttgtccccagtcaagacccatac

SEQ ID NO: 3233 - DNA, 1858 bp, Glycine max
cccgggaccgctgtagagtcgacctgcaggcacatattccgggggagatgtcaggacaggtacctaatcaagcagggtctcaattgtctggtctgacccaactgaatgggaatgcactacctcaccagatgccacctttagggggtgtaccgcgttcaacaattaatatggatccggattttcttagagctcgcacttttattcatgataagatgtaagcatttttttttcatttgtttaactgcactctttctgggtcttcgttgattcttattaggaattttatctgtaggtataagaagtggagactgatatttttgttaaaacgaactacaaacatgctagcttaaactcaactatgaaaggcagtatatagataggttcataaacgaaattgatagttggagttatctgaaaacagaagtgaaaggaaattattattttttgacacttgatcattattattaattctcttttatgtgcgagtgtatgctttgtggctcacttgcatggactagttgaatatttaagctaacctataagaatttaatgtaataattttcataattttattaagaatctaagaacctgctgtgagtgaaactgtatttgcaacttgcttgacaacattgagtcacaccgtgcttctttatcttccactttataatttatggctatatcattctatccaagttgttgctatgggatccctgcagattcgtaacatggttgcttaagggcctacgttttggtgaagtagaagacatatgattacccagaatgtttgccggttttttggcttcccttgagtttatttgggaaacagtagatgattgatccttctgcatcaagcttcatgaaaaggccaacatccaaaaatgagtaaagtaaattatttgcaagtaatcataaatgtcatgaaccaactatctcaaaagcttaaaatttatgtgaagatacatgaatgatttcacattatatctctaatacacacccttggataagagcccattgaacttaaagtgtggataatgcactggtccacctaccatgtgctgaaattttactttttaaagaatgggaacagcaagtattgaactgagaggctttgataccatgccatgaaccaactatcccaaaagcttaagcttttaggtgaaggcacattaatgattttatattaaacaattacatctctattctctaacaatagataacctaggcatgcatatacaacaaaatatgcaatcctgaagcacactatcatgaatacttgtagagtatacctggagggactgcctgcagaaacagattctggctctacaaactgtgaaggagtttgtaaagaactcttatgataattccgtagctaagtactgggaaactgatgagcaaatcaaggaattgcaagagagagtttccattctgcaagatgagcttggagaaggtgttgatattgaagatgatgaagctcgccgtttgatggcagaagctgctcttaaatcatgccaagaggcattgacacagttgcaagagaagcaggaaaaatcacttgatgaaaccagaattgaatccaaaagggtaaaggatgtcaattccatgttgggctctctcatggaggaattccattatgatcagaataattctgaaaagccaagggtccaaagagatttaaaagaaatagcagaaacaaaggacttggaagagaatgccagattgactcagaagaaacaggagttgcaattattaaaggagaacattaaagagcactttgagactagctccaattcatcactcagtgtggcagaaatggcagagcagattgatgagctagtgaacaaagtaatcagattggaaa

SEQ ID NO: 3234 - DNA, 575 bp, Glycine max
gatacgccagcttgctgcctgcgtttccatctgatcactttgttcactaactcatcaatctgctctgccatttctgccacactgagtgatgaattggagctagtctcaaagtgctctttaatgttctcctttaataattgcaactcctgtttcttctgagtcaatctggcattctcttccaagtcctttgtttctgctatttcttttaaatctctttggacccttggcttttcagaattattctgatcataatggaattcctccatgagagagcccaacatggaattgacatcctttacccttttggattcaattctggtttcatcaagtgatttttcctgcttctcttgcaactgtgtcaatgcctcttggcatgatttaagagcagcttctgccatcaaacggcgagcttcatcatcttcaatatcaacaccttctccaagctcatcttgcagaatggaaactctctcttgcaattccttgatttgctcatcagtttcccagtacttagctacggaattatcataagagttctttacaaactccttcacagtttgtagagccagaatctgttt

SEQ ID NO: 3235 - DNA, 612 bp, Glycine max
tcctggcattcagaaaacttttaagtcaatacactattaaatgaatatccacaagtatttatagtattacacattttccatgattatttatgcacaaagctctaaatttcagtctgcgctgcatcagatgattgtaaaatcaacaacttaaaataatattaacattaatttcttagacaccaaagttttgtgtggcatcaattaataacagctaaagtttggttagctaaacactaggaaacaagctcaccaacttcaccaaaaaaaaaaggaacaggctcaccaaatgcagataaccttggcaagctcggaaacatttagatgaagaagaaaaagtaagcacagagcacagaactacagtcacagaaatcctatttcttgagcatggttaataaaaaatgattggaaatacaacaaaccaagagcacaaaagtttttcagaaagaggtctgtataatatgcaaagagacaacactcatttatacatgaaagtaagtgtcttagagctagatagttaacgaacatacatggaaatcaacaaattgaaaggaaaaagccctttcaattctgtttttctaagggtaaaaaaattgataagatactctgatcaga

SEQ ID NO: 3236 - DNA, 736 bp, Glycine max
ggcttcaacaggaagttaagacaagctttcctctaccttacattcattttcacaagacattttctttaactctttttcgggagttgaagttgtaacttgagacggctcaactgattcactctcttcaaatttcttctgagagaaatgatgaccagggttgtaaattggatacacaaactgggacttaactcgaggcttaccatttggcaagtcttttgctgaaggataagcagttccaggagtttgcatctcatcagatagcttcatcggggtaggattaggcgatggtttatatgtactctcattatttagtgaatctgtttttttcatatgtcgcccaccataatcggatgagtcacaggacgataaatcactgtcacattcaaaacctacagacttgttcctcctcgtgtatgtggttgatggccaaggtgaaacagaagctgtattcttgtcattcttatccaaactgtgaagactccctgtcctaattccttccatagaatcaagagtgtcacattgagtacttagcacattggagatacagctgcaaaccaatatgtaattttcagaaatggactaagtatgaccacaatacatgtgtacaatcagtgaaaatcccatagaaaattttcattaaaagaaatcttagagaaaaactgagaatcaatttcatcattttttatagcaacgcttattaaagaacatattttcttagacttttcaatcataatga

SEQ ID NO: 3237 - DNA, 481 bp, Glycine max
tataattcaggtgcaaagattcagatcacgagggatgctgatgctgatcctctctgtgcaacaaggtctgtggaattgataggaagtttggaaagtattgataaggcagaaaaactaatgaatgctgtgattgcagaggtttaatatcacatccaatctttatctcattcttgctgttcccttttttcttgcttttattcttacaattttgttgtttcattttgagattctacaggctgatgctgggggttctccttcacttgtagctcgaggcctctcccctgctcaagctactgtgggatctgaacaaattcagatacaagttccaaatgaaaaggtgataaactaataatgttgccattctttttaccttcaaaggttatttttcatgttttatgtttatgtataaaacattgagtaacattggtttcttttatgcaggttggattaatcatagggagaggtggggaaacaattaaaa

SEQ ID NO: 3238 - DNA, 768 bp, Glycine max
aaaggtaaacgaagttattgtaagatagacaaaacattgaaccttttaaccactccactttttaaagttctcagtagagtaggaaagaagtcagagatacaactattgacaattctgagaaatgaagaaatagcacagatgagaaactcaataagagagaaagagatggtggtgagagaactggaacgtaaaattgttcaacttgaacaacataataaggaattgggagatttacttaaagaactcagggaagctcagatcaataatggtggagcaaattcggtgacatcaaagctccgcaacaagcttagatggttggaagaggtgcataaacactgcgcctcaattgtcaagtctaaagaatctcaatggggtgatcaagtggcgaagatggaagaagatattgttacttataagtctacactgaccaacaaagaacaagaaataagggagcttcagatggaattggaaaattgttattatgccattgaagagaatcacttgggactcttgatctttaaatctgaacttgctgaggcttactccaaatcattcaggggtagggcagaccttgataaagcatttgatatcaaagagaatgaagacatggttctaatttctgtagagcaattgagagtgaaagacaagtctctaaaaactatggcacaagctgcacaacaacactctctgttggaggaagagcttaaacaacaaaagaaaaagctcgaggaatcatctgagggtcaactaatcttggaagagcaacta

SEQ ID NO: 3239 - DNA, 236 bp, Glycine max
gatgactgggtttggaaaccagaaccctctggccaatactcagcaaaatctgattatgacatgctaaggggagttgtagtgcagggggcagatgttgcagattttgagcaattatggaagttgcggattccatcaaaagctgcaattttcgtttcgaggttacttcgagacagattgcccactaaagcaaacttaaataggcggtaggtggaaatccaggaccaaacttgcccttt

SEQ ID NO: 3240 - DNA, 564 bp, Glycine max
acaaccagtcgagaggcttttggagatcaaagttggacccgagcttgaggagtgaagatacattgttagtgacacaagcttcctgtacaatccaactgttatagctaatactattcacttactttatcaggtttttccaataatcccaaaaaatagaaattggaatttatgtatgacattatgtttgacatgtacagcaggctggcattgcacctgacttgtattattgtataagccaatgcctccgccatgcttgtttggttttacttctaatttttaagtggctttcccttctgaatcatatttatatgtttctcacttgtcaccttctcttcagatggcatcttttttttttttttttttggtctaaatcagtaaattgcacgtaactcaatccaactttaggccagttgcagaaaatttcttatagttcacaattcctaaatttatcaattagtgtcaatttaatcttatcaagtgagttgctgtattttgaatactgcatttgtgcaatttaccatttggccaataattgaagggtggtggttcatttcagtttcggtc

SEQ ID NO: 3241 - DNA, 914 bp, Glycine max
agcatcatctggtagacagcaatggtgttcatcatcatcagcagcagcagcagcacctatggactactttctggggccttcctcttctagaacaacaacaacaccaccacacaatcaccatcaccatcatcatcaatattcttcttctggtgggttctcattggcacaaatccaactaggacattctcttcctgaggcaatgaatcacaatgtttcagcattcaacaataatgtgagtggtgagaaccaaaaccactcatcatcagatcctcatctgcaacagcagcaacacttctcattcataccggatcatcttatgtcagctgtggttacttcttcttctcatcatcaacctagcgggagcgactacaatctgaacttcaccatgtcttcgggcctcgctggttacaatagggggacccttcagtccaattctccgtctcttttgcctcacttgcagaggttttcgcctctagacggatccactgtacctttcttcattggagctgctccttctgctgcagtttctctttgctggaatttgcttggtggcttaggtaagtgatctggaatctgattttatggaacctctgcccgtaattaatcaattatggcatgaaccaacattggagtctgctttgggaattgggatgaccctacgaactcttttttaaggctgtctgttactgttctttttatttcatctgtaccaaaataaaaatgatgactcagatgaatctaacaagcagttgattacaacaagcgtgtggggtcaagaaacatgttctgatgctaatatgagcacaacattgattatacatatgtttatgaactattatactcacaaggtggttctagagatcagtttgatgatttttaatttaaatgtcaattttcaaaagtttgattcaagt

SEQ ID NO: 3242 - DNA, 579 bp, Glycine max
tacatcacccttccattatatgctcttgttactcaggtagcacatactttttttttccttctgattttgttctatttgatcagagccattctaatgctttgattgatgttttttcagtgagcatgaactaaacagcgatcagtattaatacaaatgttttgctttgtgagatgaatgactaaattccaataattaatttctataagaaaaccgaggacagatgcaagtaattccaggttgatgagggccaaagctcattaagctcaaagaatagcaaaggacttccatgaaaataacccattttattaatatgatgaaagatacaattatagtgtgtgaattctctatttatagagcttattagagactaataacaacctaactaacaaatcttaataattcctgattcccctgaaacatttaggataaatcctccttattcatagagcttattagagcctagccattcagatggtattttacaaaatttgattttcatgatgcaatcgtcatttccctttatacttacaagttactaagatttctaggtgaattaattgactatgatcatggtaaaca

SEQ ID NO: 3243 - DNA, 236 bp, Glycine max
ccattttccttcttcattctcttcttcttatgctcgctttttttcttctctcctttcttttctagataggaatcgtaaatcaggatcttctaaatccaagtcgtctttatcattttcaccactattgtagattttgtttttggaaattgaaatcccaaaagtagcccccccaaaagtcctaatctctctgttcagagggactttttggaaccaacacaaagccattatcctgttca

SEQ ID NO: 3244 - DNA, 1154 bp, Glycine max
taaaaggtattttgtgtaaacttgttgctgtactacatcagtagaaagataaccatgaattcgtttttggtgcaatgatctaactgccctgtttgattcctctatacttaaaaaatgctaacattccaacttaccctttccacaggcgaggagcagggtgcttgctcccatatatcgactcaaagatgtgattgttggtggcaaccgtcgtggctccttgatcaggggaagctcctctggtgaaagttaagggaaaggtggctcagtgcgtatgggctcctatccttgtggtaaaagtgaagatgatgacgaaaaaatgtatgtcagagagaggttgagaatgaaaagtgctacaattgtgaaatgcaggtttggtactaggattggttgacctttcccaattatgaatgccaatgttcaaacattttatgttatggattttcttctttgtattgattagcaatgtatagctcttgaagttattcaacttatgtattctgattgtgtgaaattggcagtttaaacacaaaaagatgtaaatgattgctttaatggtgggtgttcagttttctttttactctaacggctgcaggtgatttagttgatttggatttggagattgaagctacttgcagaagaaacaacacagaaaggcggagaaaaatcttgcaagaaagggcagtacctattctagaggagccttgttcatcaaaatcatcttctattttcccacaaccaagggaatctcacacaggtacatctgaagctcataggatggctgaagatcaacctcgcagagtcactcttgaggactacttaagctctactatgccgcaattctttacaagtattgcgcggccagaggtgcaggcacacaacatcacatacccacattctttaattcagctgatacaacggaatttatttcatggtctacccaacgaggacccatatgcatatttgacaacatatattgagatatacaatactgtcaaaaattttggtgtgccagaagacgcagttaggctaagcttgttttcattttcactatccagcgaagccaagaaatggctacactcattcaagggcaacagtttgaagacttgggatgaggttgttgaaaaatttttgaaaaagtattttcccgagtcaaa

SEQ ID NO: 3245 - DNA, 497 bp, Glycine max
aagcatatatttagctctaaatgcctgaacccatactgcaaaccctttctatatacatccaaaagtgaatgtactaacaatctaatcagttgagcttagatttccaatagtcaaaaggttggatcaccaccctaacccatattatagccaggacaaaaattgaattatacagtcaaacagattgtgaaatagcaatttgtttaaaatagatcaacataaaatgatagtatgagaattatgacaataaactaaaagtgtttttgaattaataagagtgtaagattatcaacccaggagaaccaaccaggaactagtctttcatatgtttgtgaatggctgggacaagaccagcttgctaaggaggcttttttccccttcttgaggggggacaatgtgaaaacctgtttaagtttggaaaaggtaaaggtctatagaaagcttttagtcaagaatacatgataacttaccagcaacagtaggatccaaatcagcatcat

SEQ ID NO: 3246 - DNA, 721 bp, Glycine max
ctctcgagagtcaagactcaaccttttctcacacataattgttatgattacaaccacgaaagtcctatcataaacgaaaaccattcccaccacaagctcacccacttcacaaccacgaccaaatgcaatgccagtttaaggaacaacatcgaatgtcaacatgtcttggcccactcatggaaaatgaacagccaacaacatacttacatcaccataagcacagaaaggatgaagagaacagatagaaaacaacaacacctacaacacgaacaattaaataataatttcacttccatgcattgtgaatgcaaagattgttgcactgccgatcaatcagaaatcatcttaggtatgtcaacaatcagaatccatcttaggcatgaagtaattattacaaaaatcaacaaacttaccatatatgttaatatgtatgtgatcgaatgatttacatgcaataattacaacttacaagccacgaggcacaaaacacaatgaacaaagtagtagtaccagaatacctaccagccttgacaagtgcatcccagagctcttcagggagaatgcagccattgtgctccacatcaatagcctgaaatatgcggtaaagctccaactccttgtcatccatgtaccgcctaaagtcgcggtaatcgatccttccgtccctatcagcatcacacaccttgaaaagctcctttgcatacttatactcagggggaat

SEQ ID NO: 3247 - DNA, 881 bp, Glycine max
gtaagcaaggagttccagtgaatgaaggtgaacagtttgatataaggttaactgttgaagaatttaaacattctgtcaacgcttacactctatggaaacctggaatggatatccatgtgtcccatgtgaaacgcagtaacattcctaactacatatttcctggtggtgtgcgacctaccttcccatcaaaagtaactgccgagaataaacagagttccaaatcaagggcttctggccatggtcaaacagaaaagcctcaaggaggtaaagctgttgcagttggagcagatgatgtgaggaagagaaagagatcagaggacaacatggataataacccaaggaattccaggtcccctgtatctttacctccccccagcagggaagttcatgaagatatatctcctattagtgcttcaagttcttgttctatgaaatttgatgaatcagaagtgaatagtatttgctggacaaaagagcgagaaactttgtctgaaatctccaggagagattccttctggggatagtgagaccattggattcagagacaagcaaccaacaagtcaacccctggacttgcagctgctgatacatctaattcttaaagaagaagaaaagctatccatttgaaagattatttcccggtcttgtattatgcacatcaacgccttttcaagtagaactccaaaagctttgaagaatattaactcaattataaatatccaagataaagattttttacggctgaccatcgaaagaaccacacgtggaaattcttataaacttcaaagtccttggctggcattccaagcctctgaccttatatcttatggcaacagccttccgtcccctgggctgagaaattgcatttactccttccacat

SEQ ID NO: 3248 - DNA, 640 bp, Glycine max
ccagcttgcatgcctgcaggttcgctttgtcaatgaaaggtttttttaaaaaataaaaataaaaattccactcaggcaacgagtacaagtggtaccacacgtggcatgccaatgtgtccggttaaatacgaggctaatggtgtaaggttaacgtgaatctactaataatatggtggaaggttaatacgaggtcttaagttaaaccgtgtaatttggtgtccatgtcacggcaatgaataaggataggataacaatctcgtggacggcgtcaaagttcgttaaaagtcagcaactctattcaatcttaattttgagaagcaagaaaattttcaaatttgatttttctccttgacagggtataaacctaacttaaattttaccgtgaagggcaagctacacttgcagcaccagcaccagtctaaacggtactactgactgactttgcagtcgtgacattttaccgtgtcttgcaaaagtcaaacgaactcgtcttcattcaccaaaggcttgtttgtttacttataccataagtatagaaatagaacaccatttcttcaaatcccattgatacatatggctgcaaaaactgttcttgtttgtgttaccgttatccttctccccttgctgcaggacatgcaag

SEQ ID NO: 3249 - DNA, 601 bp, Glycine max
tgtgacatgttccagacacctaccgaggatgaaatggtactattgtgttactactttgtcctcactgcataatctcatgcctgcaaattaaatataattgcactacttcatttttattgttcaacatgagtgatatgaacattctcttaaaattaaaatgtgagaatttcacgtacattgctatatatatatatatgccgtgttctatcttctatacctattaactcccatttttcatgttttacataaataagtaaaagaatacacttaagggtacatgttgcattcatgacacaacaatgacattttaggtttgagctttattcttattaatacagacaattatatagaatcttacacacgccattttactttatcaaatatcatgtatggatggttttcaaatctttataaacaatctccctaccatctaaaggatcgaatttttcatcattttcttctccggtggaaccactactacctcccttaaggtctcctttatcaccttttccatctaaaattttaaactacaaataaataaatttgtttagctaggcacataccgtatcaaaatcccttccaccttattaattgctagcta

SEQ ID NO: 3250 - DNA, 302 bp, Glycine max
tgaagaatctaatctaaatgatgccggccatgcaggggcgataaaatacttttgacccaacaaagatattacgagggaaaaggtataaaggatttgatgaatgaaaagatgaagagagaagaaaagcaatttagagaagagatgtttaagtttacatgcttcatacgtggttgtcatgatgcaagcaaactcttgcaatacaaggtaagggttttcttttttttttaaccaagaaatgcaaggtaagttggtaaaattattgtcatgcatagtaacataattttctcaataaccctgtgtac

SEQ ID NO: 3251 - DNA, 614 bp, Glycine max
atggatgttatcaataagtgcttctctaaaaaggctgttgaggaaatattatcttctctcgtaagttgtattgagttacactattgaaaatgtctgattaatattcttcagcatgatcaaggatgaacttttgccatttagcaacctgaattttagcctgctgttttaggaggtggaagctacgagaaaggctgatccttggatttctgcaactattcaatccttaaagaaagcatctccaacaagccttaaaatctttcttagatcggtatgtgtccagaatgtattaaaagttctgttttatgtacattctaaaattcacttctcttctgtgttcaactgttgaagtatcatttttatcatcatcatcattttactatcattattgtgattataacaactgttttttttttaaatttattttggcctttttcagattagacaaggaaggctccaaggtgttggacaatgccttgtttctgattatagagttgtttgtcatattctaaaaggacactacagcaaggatttcttcgaggttatctgatgattcctatacatagttatgcttttaattatttttctttcatgccctatggttaatgttacccttt

SEQ ID NO: 3252 - DNA, 568 bp, Glycine max
aacttctgaaagggaaggcattggatcaattctcatcgtaacgaaaaattcatgaaatggaaatgcttaaatctcttcaaatgttcagattagatgcataagaatttgaaatcgtagcagcaaagctaagatatgtagttagcaattttggggtgtgtgtactcaccgtatgaaggctgagtaattagcaagaacacttttgcgcatttcttctgccgaagccttcttcagatcaacaagataagcacacaagtgtcttatctcctgtaaacggtgtacagaaattgatgaaataggaaggaagcaagatttcttcaatcaaatggagaaaaaaacagtacaattttatttttccataattccctgacttcatttacaaagaatcattttggaacttggcatgcattgcataagaacgacatggaataaaaattacaattatcattacattttcaaagcataagaaacttgtttaattctaaaaagtttgggattacttaaccagcctgcatttccctgttacaaggaataggatgaatgtctaacacttttacatcacaaatttgta

SEQ ID NO: 3253 - DNA, 827 bp, Glycine max
cgacctgcagctgagaacagcctagctcttttgtctatatttctggaattgattttatgtatactgttgtctgtcgagttatatgtctcatgtcttggagttcactacattaacatcatgtcattattatgtgagttttacaacaaaaactatgaaatattagcctttttcttttcctaactatcaaaattggtgatttgaaattctcatatattgttgggaagatgattctaaagaactgctgcgtggcagttcgtcatctaatgattcaggtttttaaaattacctttaatattgttttctaccatctaataaaagtcttttttttttataaaaaaaaaattccatgtgatcaatgtatgaagagcttgataaagttggaggctgtcatctccatgtttctgatagcacgtggattgtttgcagcagaaatattcaccatcagatttacatgcaacagttatagtgtgtttagaacttcatctgcaatacagattgattgccaccctctattcacgtctatcattagaagcaagaagtcgcttctgcatttgggtctgatttgtataaaaggtgagaatataaagagaatatttttataatgaaaaggtggaattctatgctggagaagcatgatgatggttgtagaaaaaccaaacctgatgaaactaaaggtcctgtgaattgtgatataattaaagtacgtacagctcccaccgaaggatgacctctgaatttgtaactagtgcgagggattaacgttcatgtctatttcttgtgctatatttttatgttaagtctcgcaacttggctgcaggacaggcaag

SEQ ID NO: 3254 - DNA, 723 bp, Glycine max
tttctctttagtccattttttgagtaacacttagcaaaacccaaaactaaagaacatagcattcatggaattcttaccaatggtcaggatagatgtgaacagaggcgaaatcaatatttgatattttggagttccgaataaaatcagacccaagtctggatgcccaaagctcagggttgacagttgaactttttggatcatttggaccataaaaaccttcgagacccacagtcaacagatggttcttgtcaatcattttgacaaaagttgacatttcgtctatccatccctgcaattttatcacaattatgtaaggcgtatacatatgtaaataaaacagaatgaacactgcctccttcctttttctatgaatttgaaaggaagccttgacgcaactattagaattgctgccatgccactaggaagtcacaggttcaagttgtggaatcagccacttgtaaaggcaaggtaagaaactaaggatatcgaagccttcgtatcaaactcagccattattgtagtttttgaaagttattgatattgctagcatacttcttccataaatatttcaaggggttaaagcacaggtaaaggacttacttgtagagtgtcacctgaaggatcagacatgcaacgaggttcattaatcaattcccaaccaaaaatggtagggtcatttctatattcaattccagtgatagtatttttccttgtcaagacagt

SEQ ID NO: 3255 - DNA, 193 bp, Glycine max
ataatctaggctcctctctttctcttccaacttataaaccaagctatctttctcatgcttgaggctttcaccaaaatctacttgtgcaagaagtgaagattccagttctctacgcaccacatgattttcttcaagatcattcttcaagtgctcaacaattgacttccatatttgcaattcaaattccttttca

SEQ ID NO: 3256 - DNA, 602 bp, Glycine max
atgctgctcaataaatttgcctttctttcattctgttaatttctacattcagaaccagtatctataatactcatatgataggaacccaaaccccaagcccctcaaggtcccaaatcctctacaggtttacagcctaaaccactattctatccatgaattcctaactatagaccatctaaaattcctgtactttactgctacccataaattgctgctagcacatgcctggagtcctgtatctttcaaacctcagattagccacccattcacaaattcataaaccatgattcctttcttcaaagttcaaacctgtgacggaagcattggcgaaggcagagtgggccgacgatggagatgacagtgagggggagcaaacggaatttttctgagaggggtcttggaggatcgattttgcttctgaaagtaggtcttctatttcatttttgaactgggtcagcaaacctgacccaaatagcccaacatatttgtttttttttttaaaacgcattcaaactggaccgcaaaaagctgcacccaccttcaggaacagaacggttaacattccaccgttctcgcaagtaaacccgcgcttgattaccgtt

SEQ ID NO: 3257 - DNA, 1270 bp, Glycine max
agcatgattgagcagtttcttttatccattcacgagcatcgttgagcagtgcttcatgcttttccacaaaaagttgctttgctgttttgttgtattggttcttgtgaatggtgtaatgataagggagtctcttttctatccgctgtacaagtatgaatgcacaatatgtagacacaaaaagattagaaacaagggtatcagttagagacatacaactagagatagacacagattagattgtaagcaatgattacttgtagtcttttttactacctttttttttttttgcaaactttaataactatgtgaatgatgttttgcaaaattaaggttttataaagttaagactaaaatggtggtatttacaatgctttactaaagtgagagtattgtatcagcaaggttatttttatttttctcttgagcacatttactcttgttatgattagaatatgaatgaacacatcaaaattgtgaagtaggaggaaactgtttatgaatatcatttctcattaggacaaaatataatgatacttacatcgaaccaatgcaactcctcttgcagttgcagagcaaaacccggttgggaacccccttgaaattctgcagtttgtgacaacactcatgcattcttcaagaattccagcaacatcatctggacagacaatggagacaatgttgaataaagaagattgggcttggcctttagatgccagagttagtaaacctttcattttctctccatcaagtaactctttgagagcatttatatagcatggctcacaagccaagctatcacaaacatagctagtagcaaaaaggaaaccctcaatctgatttgcatctagcttatcgggtgccaaaatccaactcagaaatactttgaccagttccataagatgagatttaaatgctccttccaagatagcaacctggcaaaatcttgcgccagccattggagcccttttcaaaagtgtaatgcagcgattacatgcctcctcaatgggtatttttgagggaaagtacgaaggtataagtaattttgttatcttctgagctacgggaggttgatcactagcaagtgcagacaatagcacatctagttccgccacctatataccaaacagaagaacggatcagtcagaacagatactactcagaaatacatcagttattagagacaactttcttaaacaattctaatttaaagaatacgagtaccttgttgaactgaaaattttgaacatcatttagtgtagtaagagatcca

SEQ ID NO: 3258 - DNA, 654 bp, Glycine max
ggatctcttactacactaaatgttgttcaaaattttcagttcaacaaggtactcgtattctttaaattagaattgtttaagttctttgtctctaatgtcttatgtgtttcttagtagtatctgttctgactgatccgttcttctgtttggtatataggtggcggaactagatgtgctattgtctgcacttgctagtgatcaacctcctgtagctcagcaagataacaaaattacttataccttcgtactttccctcaaaaatacccattgaggaggcatgtaatcgctgcattacacttttgaaaagggctccaatggctggcgcaagattttgccaggttgctatcttggaaggagcatttaaatctcatcttatggaactggtcaaagtatttctgagttggattttggcacccgataagctagatgcaaatcagattgagggtttcctttttgctactagctatgtttgcgatagcttggcttgcgagccatgctatataaatgctctcaaagagttacttgatggagagaaaatgaaaggtttactaactgtggcatctaaaggccaagcccaatcttctttattcaacattgtctccattgtctgtccagatgatgttgctggacttcttgaatggataggtgttgtca

SEQ ID NO: 3259 - DNA, 560 bp, Glycine max
aacatgactgagcagtttcttttatccattcacgagcatcgctgagcagtgcttcatgcttttccataaaaagttgctttgctgttttgttgtatttgttcttgtgaatggtgtagtgataagggagtctcttttctattcgctgtataagtatgaatgcacaatatgtagagatacacacagaatagattgtaagcaatgactactgtagtcttttttactacatttttttttgcaaactttaataactatgtgaatgatgttttgcaaaatcaaggttttataaagttaggactaaaataatggtaatactaaatactaaagtgagagtatatattgtgtcagcaaggtcatttttatttttctcttgaacacatttacttttgttatatgattagaattagaatatgaatcaacacatcaaaattgtgaagtaggaggaaactatttatcaatatcatttctcataatgacaaaatataatgtgatacttacatcgaaccaatgcaactcctcttgcaattgcatagcaaaacccggttgggaacccccttgaaatt

SEQ ID NO: 3260 - DNA, 753 bp, Glycine max
atcaaaatacactggtatgcttcaggcaaccaaggatattcttagagaagaaggcgtacaggtactggaaccaaccagattttccacccttttcagtttgtgattgtgtgtgtgtttttaaagctaatagtccttttttttttctatcacttttttgcaggggttttggcggggaaatgtgccggcattgctcatggttatgccatatacagctatacaatttacagttttacacaagttgaagacttttgcctctggttcttccaagacaggtattctattttcttattcagtgtcactatttttttttagttgaattagaaatcactgttgatttgacttctaaggaaattatcatcaaagccaataaacttacaatatatgatagtttgtgttaggatgagagtggataaaagctttataatgcatggattattttatttttgagacttaattggtgtttaatcacatcggtgctggctatagcttttaaaagttaggtccgtaagctcttcaaattcattgcaatattttgctaaattcaattataccaatttattttgcataaggctcttttggggaggagggtgctttctgtagttaatgggagtgtacactatatatgctagccaaaacctatgcccatacactctgcacactttagaaaaatacgattacatactaggaattgtcctttatcttctccaattctaggtttatgtttgttcattggttacttttttgtttttgttt

SEQ ID NO: 3261 - DNA, 758 bp, Glycine max
attgatttgtattccttcttttctttagtcacaaatgaaagaataaagaaaagacctgaacaagaaatgatgtgattagtgtgctaagtgcttcaattggaccagcagcaatttactgataactagcatgtttggttccacatttcagatgtttttcatgtttactaataaactaatagttataggctatttcatgaatataactaatagctttcactattttatgaatatatttatagcttccactataatttaatggttatgaatataagctaatagcctccacgtctcagatgtgactttttacttcacaacaagtttccaaacacactagtacaacaactttcgctactgatctatctagaacacgggaaaagaacacgaataatagcataattgagtgctttccccgtacatgaccattaggatattcatcacttgagtttgaaaagagtctttgaagttagtagtacctgtataagtggaatttgaagcctcagaagcagtgtcaagtttactgaggaatctcttgcgagttaaagaaatagttttcatgcgtgagttgatggcttttaactcgtgtgcaatccgataatgagctttcatattcctgatactgagataattagagagtccatttgtatggttatgtagctgaaccagttccaattcatcaagaagatcttctgcctcatgaacaacatctctgacttgcctaacccaaactttgagttcctcatcactctcttcaaatgcat

SEQ ID NO: 3262 - DNA, 637 bp, Glycine max
tgcactcacagttgattgaactaaccatgatgcaaattgccaatagatcaaaactgcactttcagaaaaacaaattacaaggttttgaattgcagtcatagtcgcgatttcgttgcaatccttgatgtcggggaagttgcagacaaatgtggctgatgtggctgcaattgtagtcacggaatctccaaaaccttgatgttgtggccacaattgcgattgtggacagttttttaaaaccttgataaattagaaactcacaacacaaaggagaaaagtaaaatagaatggtaattggtaagtgtaattctcaaggcacagttgcacaacatatgcagctgctgaagaaggaagaccgaggctttcgcttctcttttcttttatgtgaagtagatgacactgcattctttgtgccaacatggttatgttgtatctgtggcatgtttagaagatgagcttcttcctcttctttcaagagtccaatgaatggagctttagatttcctagagtaacttctttccatagtaactattttttcttgcactggcatttcttcaatatgtaacatgcattgctcatagtcatcatgaggcactgacttgatgagattttgactagtcttttttgacaagcttttatt

SEQ ID NO: 3263 - DNA, 504 bp, Glycine max
gttcttctgcaagtacaacgatcccatctatgtaaaaatggaaaagttagaaattatgataaaactagcttcagaccgaaatatagaccaggtattgtttgcataacactattatcaattcatattttcctccccatccccaatttttttagatgctcagaattgatttctgttgttgtagtgagcacttcatgtgtttcttaccaaaaatttagtaacaagttacgctgtcacgtagacgagagtcacaatatgagccaacaaacaattttatacttcatgttttggatgataccttaacattgcagtttctttattctcaccaacaaaatatcttcttttatgaaaagaaaattgtcccgtgacctgtgtcatgtatgagattcacatatcttttgtgcatttggtgcatttctgcattaccatttagttgagctagtttagccgaatatcttgtaaaattcaattcagtttgtttgtttaattttttttttattgtaatat

SEQ ID NO: 3264 - DNA, 857 bp, Glycine max
accatttgacaaagtctccatcatatctttcctcagaataatttcagaattcctgtttgagaaatcattggtgctagtacatccatttgtcaccaaaccagggtcttcctgatcaaatattggtgtttgatcacaaaagcttatacgatttgtagactgctccatcagcaacttaagatgcaaatgaagaaaaaatgtaggtgctgcagcaaaagagagagcaaatggaggaagtttcctctcgccagcatcagaatactgatgagtatcagcttgagtggacacttcggaaacacccatgatgttaatccctggcctactcctcttctgcctgacctgttgcatgatttgattcacaacaaaacccaagataagctaacttgcagtgactgttgtcttttggaagctttgatatatgatgttgaattccagtaacaagtgttaaacatggcaaataaattcctaaaagggggttaagcctggggttaccaatcaggacatataggaaaataggaaaaaaggaagaaaggaaacaagtaccttgactgaggaagacccactgatagaagttatggagaaccttcttgatccattttgaagtgcctggatgttatcatatgtgcattcagaaagatggagctgcttactgagcaggcaatgcctctttaagcttagaatccaagtgcatccactttgaattcttcacttcagagaaattatagaactcaaacacaagcggcttcttaataacatgaacactagaaaacttgaatccaatagatgtacatggaaattgcaagtcaacatacttccctcggtaagcaggttgatgaaacaccctaaggacaaaaaagaaa

SEQ ID NO: 3265 - DNA, 722 bp, Glycine max
actgtacaatcttcctccaccttctcttgacttttcccccaaataacagcataaaaaccaacaactattatggcagctccgatcacactgtacataaagttggacccttgtaattagacccgaaacaaatgttttaaattgaacatgttaacataagagaaattatattcctacctacggtttttacaacttcttatacaactaataaggtagacataaatggagaaaagaaagaagtataaaataagctgaaaagtgtgatatagagtgacagaagaaaatggattttaacaaaataatgtgaagtatgtaagaagaaaataactctctaacaaaacactgagttataccttccaatataaagagagtccccaagaaaagtaacccccaagatgactgcgaagacaatttcgagtggcttaaacattgcaacatagacagggcccctcttccccatgatccatatatggataacacctcgaaaggataagacaaaaattgcctgcattcagaagaagatcatgttaactttccaagtcagaagaagaagaattatgttgacataggaaatagtatcatgtctattcttactgaacatccaatagctataagctccatattaaaccccagtctcaaagcttttagatcctttactgaaatcagtgcagcaggaacagatagtatagatgttaatgcaatgcgactgagtaccaccaccagtt

SEQ ID NO: 3266 - DNA, 498 bp, Glycine max
aaatgtctaaaaggttcacaatctctgtaaaaagatcccatccaacaaagttcatctaccactttggagttgaacattcatattcacataatgttacgggctcttcaggaaatgggaaaataagaggcactgaaatccactattgagtattgacatgttcatggtacagtagtgtatgtcattgcaacaaaatactttaatatctaatgactcgacttgtaaaacaagtatagacacaccaaaacactaaagagcaatatagattctgttcttagggccatttcaattatactcttctaagcatatctatatcttcatcaaattactaaatgagaatagtattggatgaacatcatacgccctggaaggagtgtgtgtgtgcacgaaggaataacgaaaggaaatgcagtgacaaactcttttgtgttatcgtattggagtatcctttgtcttttctgtagttcacagggcatattcatcaggatcaaatggcttaca

SEQ ID NO: 3267 - DNA, 526 bp, Glycine max
aacagaaactgtttctgaaaaagtgagtttttaattctttgatgttgtttattctttttttctttctctctaacactaatataagaaaaagcagaatagtttatttcctactaacctacctctctttaatggtaattgctttccgagttgcctggctttgaatgcttttgtggtggcatatcaagcattgtatagtcttggatggtttagcatttgtttcattcttttttcagcattaaagtttttaggtgaaaggaaaataaggaaattctcttttatgtgcttttgtctctgggctcaagtgggaagtctctgtcttggagttacattttcatttgaagaagtgatgatgaaaacttatatcctttttctgggaaaatgatatacttgatattgaatattagtcttagaagtacttttgataaaagagccaacctaacaattcatcttcatcctaaattatccctttccattttagaagatgtaaagtagaaaagtagtaggaggttttgttaaggtttatttt

SEQ ID NO: 3268 - DNA, 1100 bp, Glycine max
ttaactacggagttctaagactaactaattacataatgtgaggaacctttggatgatggccacgggcagacatcaatagatacatttgatcttgtttacacctgatgtaacacactttcgacatgcaattctcccaccagcaaaaaaattacaggcccagaatttcctattgattaccttcgccgtgacatgttggtgtggtgattggctttgctatcaattcttatcctgtctgcatacatgggaaggcgaattatctcacttatttcattcaacaggatatcctctgtgatattgtctcttatacttcgcatcacctgtaatagatcaaccgaatggtccaatcaaatacagattgatagacgagggaaactgaaaattaaaggtgttggcaaaaaatagaacctttctataagtattaaagtcatttggagttgatttatctgttctgattcgcttgaatatccattcctgtctatcagaatcccaagaacactcaatgatctttccagaataatgcaagggattcgaaccttctgcagataagccgctgcatcttctttctcttgaaccaatgcttttgaagctctggactcagctacttccacaacaagttgctcagacagccaagattgagctttgtagcattgctgaagttccacttgtagattctcgactttctctttccactcagagcccttcaaagacataaatacatacaacattaaactcaacaaaagcattccaattgttaaactgctagactcagatcatgatccaaccaacaatattaatacccattccccccaaaaaatattcaaaagatgtaaagggaaggggaaatagtgcccataatcaaaagccaataaaatgcagaatcgaagatgggtaaaattgtagacatgaactattctatcagaaccgatgattgaacaaatttctaaaacataattaggggtggaaatcggtataagcatagtcccacaaattaggtaattcctaagaagcatgaatattgttcatagcaaatataaaacgatgggtctagaaagagctagaatagcaggagcatgagcagcttcctcaagcaaatggcactt

SEQ ID NO: 3269 - DNA, 597 bp, Glycine max
ttgatatgaatggaaatgcaggcacaggaggtgtgcttcgggataataatggcaatgtagtggtgacctttgtgtttaagattggccgatgttctgttacacaagctgagctttgggcaattgttctgggcatccaagttgcaaaatcaagaggtttctcagaatcgctggtggaatctgattcgaagttagctatatcactaattcaacataggtgttctcctagtcatgtatgtttccagcttgttgagatgatcagaaaatttgagagtgatggaggtcgtttcacctggatccctgcttacccggaggccaatcaagttgcagaaattctgtcaaagtttggattatcatctgatactcattccagaatttttcctttatgtcctagctttgttttctcagctgtaatggctgatatagccagtgtaagtgtccctcgtggttattaataaaagcttttttgttggggccttggcccctcttgatcaccaaaaaaaaaaacctcattcattaacccgaattatgcagttcatttttataatggagaaaccttaaaaaatgcagcagcatgcatattctctgtcaccatattta

SEQ ID NO: 3270 - DNA, 1421 bp, Glycine max
aagtgcatcatagtgttaagcacacaaattcaatttcttttttacagccttctataaaaatattttaaaaaatgcagacgagtacaagaaaagtctcgttataaacgtaagagcaaacaagaaatatctcgttataataagaatcacgtcataaacataagagcaaacgtattcacttggaaaggagacagatcccaacgaacccaacccacaaaggttaagtaataaataagaaatagatccactgaaaagcaccaaactccgaacgtgtaatgacccccctctagaaagaaaaaaaaaatggatccactgtgacaagcagttcagccagccaagaacaaataactgccagagggaacaatgggttgggatctttttctgcaaaaggctaaaagaaatagaaattttactaatgttaaaattacataaatatggcaaaagaaaaggattgtttttgtatcactgcataatctcaatggctagacttctaaacaaacactgcctattataaactacattccttatgatacatagtacaacccatgattccagaacagatgatggagacgaaaaagcccagaaacaaggagcagcctgatatccacatcaacccccattcacctttgttcctcatcatgggatcagaacaaacaatttggatctctgatggctctcaaccacctgcaggtaatttgattccaatagacttggaaattgaagcaacttgtagatggaacaacacagggcgaagaagaaaatttttgcaggacaggacagcaacatcaattcttgaagaacctcactcttctgagtcgtcttccagttttccagaaacaagggaatctgaaattgcagtgcctgaagccgacataatggctgaaaagcaaccaaaaagagtaacccttgaagactactcaagttttactgtgccataatttttcactagcattgcgtggccagaggttcaggtacagaacattacctatccacactctctaattcaactaatacagggcaacttattccatggtctgcccaatgaagacccgtatgcacatctagccacttatattgaaatttgtaatacagtcagaatagttggtgtgttggaggatgttgttagattgagtttgttttcattctcattggctggagaggcaaaaagatggcttcattcatttaaaggcaacagtctgaagacctgggacgaagttgttgaaaaattcttgaagaaatatttcccggagtccaagactgcagaaggaaaggctgccatctcttccttccaccaatttccagatgaatggaaagatttcgtagtctgcttcggaagacgcctactcatgggttctcagaaccgatttagctcaacatattcattgacgggttgaggccataatcaaagcagcttttaaatgctt

SEQ ID NO: 3271 - DNA, 999 bp, Glycine max
aacattggctactgatagaagatggaaaatctggtggttggcagctacaaattcaatctggaagctcagaaatgatatcatcttccatagtcaatcctttgatatttctaaactggcagatagtactcttttccttatgtggacctggctgaaggggtgggaaagggatttcagtgtcccttttctccagtggtcctcagcaatgtctttagcatttaaataatgcttctaggaagggcagggtttgtgttttgttattgtgatggttgtttgtatgtttagtttcttcagaagtcaatctttcattgtatcctgtagtaccactggtacttttaatcattaataaattatctttgcagttaaaaaaaaaaaaaaaaaactcttacagtaaattcagcttaccagagcatatgctgggggctgagcaacagcggtatttccaggaattgctgaattaataacttcagcagaaaagcctccaaatacagcaccagctgcagtactaaacaaaactcttgtggagttgaaattgaggggcttacatgtcaaaactcctttttcctctgttcatcttacctcgcttcaaatcctgcatttggaagctgttattttctcagagtatagacttcttggggagcttctttttggctacccaaatcttgaggatttgacaatcacgctgccacattttttaagcaataagattgaaccagagtttaaacaactgcccaagttggtcagagccgttatagataaacatgactttccattggaatttgtcaacagtgttcagttcctgcgcataaattgggtactgagtacttcacttcctttgttttttgttgttttttttttatcatttttaagaaaattgatgatttatgatattttgttgttgcagatggatgatggtggagaaggcattgaaagctggattcctgaatttcacaatttatcccatattgaattacactatgtggattttactgatgagaacag

SEQ ID NO: 3272 - DNA, 564 bp, Glycine max
gaacaatatcgccagcaatgctagcagatattatttgtgcaacaatgtccttgttgctctagtaaataggtcaaggtttacactcacaggaaaagcatatttaatcattcatatgccataccaaaggcataaataaaataataaacaaatattaagtacatatgtatatttgcaagaatgctggcaacattgattttaaacaaaattatttttgttaaattgattttcaagaaaagtgatagtgatttattacttgatgttttatactgaaagacacagaagctacttttatcacttctagtcaaatctatgtttttgaggcaaaatcatttttacctagcaataaccaatctatatttttactaaatcaagtttaattgcagtaataatcaattatcgttattcccattcactaaaccatcgctccatgcctgaattaacctaattaagatatcaataaacaaaaggatacaaagcgaacaacaaatcggtatttcggagtgttatatttgttcttgtcctgattaatcaaccgaatcctggcacggtaatcggtttttccct

SEQ ID NO: 3273 - DNA, 546 bp, Glycine max
aagaacaatatcgccagcaatgctagcagatattatttgtgcaacaatgtctttgttgctctaaaaaccaggtcaaggtttacacccacagaaaaaacaaaaaacatcaccagataaacaacttcaatcgttcatgtgctatcctcaagccataaataaaagaataaacaaatttgaagtacataaaaaatgatgttccaatgaacgtttacaacattgattttaaattaaaaagattttggttaaaatttatattttcaagaagagtgtgtcataaaacttaataaaaatgttccaacccatagcaaaagctacaatttataatttctaggcaaatcgaggttgaaacaaattcaaatttacctagcaataaccaaaatcaattctcattattcctcctctaaaatccatgtcaagcatagattaacctaagatatcgttaacaaaaggatacgaaacgaacaacaaagcgatatttcggggtgttatatttgttcttgtcctgattaatcaaccgaatcctggcacggtaatcggtttttccct

SEQ ID NO: 3274 - DNA, 659 bp, Glycine max
aggcgggtgcggatcatgtgcaccagcatgaccactttgacccagacgtggatgacattgctgctcagcaatgtcttgcctagcaatcataactccgatctccctctgccgaagtgccagttggtgtatgccatcctcacgcggatgagcgtccacatggcccaggtgattgctgacgccatctatttttttgtaagtatgtcacccactaggcaccctctagacccggataagtctaacagggccctggggtctccggcattgatcacgggcctatgccagtcattcggggttcccgtcacccccatcaaagtgattcgaccaccaatcacccgagccttcattgagaagtactgcacacctaggcaggcagagggtgacgcacctcagggcgcgggcgcaccgccaccacctcatcaggtcggtcccgctggatcactaggcatggagtgttgtctaccgcacttggtttgccagcaggcggccaaccaccgcggacaggtgcagatacacgagtgtctctaccgtttcagccgcagtcaacaggggcagagttccaccccttttgtgtgccctaccccggagcagtttgcggctgaggtcgcatgggcgggagactggcccgatgccagggcgggggaggaagccagcaggttgtg

SEQ ID NO: 3275 - DNA, 556 bp, Glycine max
ctacagttgacatggaattctagtggtgatagatgcccaataattgatgagaggaatgatcattttatgcaatagaaaaaaaaaaaaaaagacctggtaggttatgtgatttgtctagatctggtctacttggttagatggaaacgacgttaccttaatttaaaggcgaaattgcaaatgttgtgaacaactgttgaaccatataaattttagaccttggtcatgattaattggtaaagtgaagagctttttaaaaaaaaaataataataagatgtcctcatagtcgaaaataatgaaattaatcctaacaacaaaaaaagttattaaaatgagttttgtttttcttccaagaaattctttttttggatgcatggtctatgaattctatgttctacatgaaagcataaagttagtacaactatatatatggatttgggtatccgttgtacctcttacctaatatatgtttgttttgttgataattaagaaaagacacacacatgacaaatgtagacagatagagaaagtagcatacaatggtttgattagttgtgg

SEQ ID NO: 3276 - DNA, 1560 bp, Glycine max
aggcttgcatgcctgcagtctcatgacaaagaaagatcccataacattatcaagcacctagtaaaaagtggttgtaagaaattatgaaatgcagaaatcaggaagtgttattttcaagttgcaacatgtgagtgtattgataaaactgaatactttcagttagctgttgttgtaagagagcagttacaaactgactctctattagttagggtacagctgtcatctagacagctcatctgtaaatactgagttgtaatcctaaactcattgactgaaatgaaattcagatccctttactctcttttcagttttctctctcatttcaacacaacacacactataaatatttcttgtataatcctagcataaatatctatctatttttctaccccagtgggctcaatcaaaaatcaaaatctcagggatattatacaccatgacatgtctctaaacaatttcctccaacgtctttcctaacttcaactccctaataatataaaagtatgcccagaaaaccaacatatgcacaggttatggtcatgtttaatctttatgtacaaagaattttcatatccttattggcaagggctatgtctacatacatatcatttagacattttcctactcggtttggtacatctattaacaataatgatagcaccaacacaattaaggatcatttaagtttttattgagaaaaaaaatatgagaaacaaccaatgaaaaagttatggacacttcaccccccttcccccccccccccccacaaaaaaaaaaacaaaaacaaatacctactgttgataacatcatctgcagcagtttccccgctaagcataacacagtctgtgccatcaaggactgcattggcaacatcggtggcctcggctcgtgtaggccgaggagatttgatcatggactctaacatctgggtggctgtcaccacaggcttgcctttaatgtttgacttgtgtatcataactttctgagctagaaagatcttctcaattggaatttccattcccaggtcacctcttgccaccatgaatgcatctgaattttccagtatttcatcaaaatttgcaacaccctcttgattttcaacctaacaaagacaacaaataagtacaatttgggagattaatcaatgccagaactttgtttcttgttttcatagacttgtacggagagcttatacgtatgtttgaaaatagaatcaaagtgaaagtaaaatgacatttctgtaaattatttgaagagttaaagtaaaacagaatacatttacttgagaataaggatggataccttggacatgagaagtatgctttttgcatgctttccaagtacatttctgacctccacaaggtctgaactttttctaacaaaagagagagcaatgatatcaatcttattaggaaccccccactccaaaatgtcctccttgtccttctctgtcaagattggaagatcaacaaccactccaggaaggttaacattcttcctctcccccagaactgcagagcatgcaagctttggccgtaaaccatgggtcataagctggtt

SEQ ID NO: 3277 - DNA, 799 bp, Glycine max
  misc_feature (308)..(309): n is a, c, g, or t
  misc_feature (667)..(667): n is a, c, g, or t
  misc_feature (683)..(683): n is a, c, g, or t
ttgcatgccttgcagccatttcccgctcaccttgtagcaccttgatacctacctgagtttgattgtcagctgctgttgaaaagacctgaaataatgatacaagttaggaaaaagattcaaccacatagcaataatacattccactaaatcaaataggatctatgtattgcagcagacacaatactttcaagggaaatttcaattaaatataaaatgcatgatttcaatgttaaattagaaacaaatgtctgaagcaaagtctgtagagttaaggcttacctgactcttctttgtaggaatagtagggnntgcggttgatcaatcttgtaaagataccacccaaagtctcaatacccagagagagtggtgttacatctaggagtagtagctctttaacatctccccgtagaataccaccttggattgccgcccccatggcaactgcctcatcagggtttactcctttactaggagactttccaaagatctctgaaaccacctcttggactttaggaacacgagtcatccctccaactagaaagacctcatcaacatcccttggtagagatgttagcattctttcagcagcttttacatgggaacctggggcctttgatccgggggttcccacaaagccccagccttgggtcttgcctattttttgtcnttttggctccctcctntgccctccccgcctccgtcggcctgcctgcccccttctcggcgtccgccgcgcccgtcttccctctcgttcccctcctgccgcgcgcgcctcccccccccccgcccttccgtgccc

SEQ ID NO: 3278 - DNA, 716 bp, Glycine max
tcagtttgtcaggaatagcttaaattctaggaaattattgctttttcaaaaaaaatctcagaaaactggcaaaaacagccggttatttcttcaaaagaactaagcacacacttaaatgagaagggaaatatggaggaatacactttacagacacaagttttgcttcattgtctggctgctagccttcactgcgaaatttgcacagtagctacttggttctgaaatatctgcaatatagggagttagaagcttgaaaacgtacaccctaaaattatacactcgcagaggcagagctttgttttctgaacattgccaattgctcaactccactccaccaacaaaaaattcctcctttaggtaattatatattataacatccctaagttatagtagcttttgctctcagcctttatcattaaaatattttcctcaatggcaaccttttatctgttttttgttgtttttatttatcttgcatctggatagcatgagtattgtttttctcatatgatgtatgtatgattattctgatatcaagataacgagtattgtaattgctgatatatgtttagttcctactactgcacatggtttgtctgtatataatttaaaacttggtatttgtttcattattttatcttcttcagcttctttgctatggaagactcggattcagttgctacactgatagattctactacttctaagatacaaca

SEQ ID NO: 3279 - DNA, 502 bp, Glycine max
aaggtcatagtaaaccttaagggtcgtgaaaatgaattcaggaatatggctattggacttattacacgttttcagaatgatgttggggaggtatgccatgtcactttgctgtgttatgattatcatgtttcttaggcattaaaaacctgactactttccaacaacaaaaaaaaagaatttgactgtaagtagccaagtaggtcctgggatgttatgccggtaatgctctcccttgcttgttattacactttaataattctcagtcaccatttcatttgttatttccattttgatttcatttgtgcgttggatttacatttatggtcattggagacatttcttattacctgcttgaattttatatccaaaccacacttgggtgtgtgcagcttggaatagaggagacaaaaaacttccgtgacagaaacatcttcataattttggttccaaataaagttgctgtgcagaaaactcaagaaccaccaaagaaaagagacaagtc

SEQ ID NO: 3280 - DNA, 582 bp, Glycine max
agcttgcatgcctgcagaatgtgtcctctctcaatgcaccctttttgtttgatcactcattaggaagtagagctagtcacttttttccctacaccataaagttagtcagcactttctaaatgagtaatattatacggcagaaagtattaaatgaaaaagtaaatacatttaaatatttggaaactttaaagcattcaatattttctctctttaattattcttagttcattagaggctagaggcaaacaatgtattagcatgctctcttctataaatcaacaagtcgaaggtcaacgtggatggaagaaacgtagttatgagggaaaatcctactataggtgtccagccaggttttcgggcggagattaatcatcaacaaaactagtagatactcggcaccaatgttgaaaattactctcttctataaacctcagctatcctgtctataatcacaatatggacctataagtgaatattcaatctaacttttgtttttcttaaacatgctgaaatcaatgtgttggccagatagtgcctttataagttgtgaatttgaaaccattgactatcctcaaacatgca

SEQ ID NO: 3281 - DNA, 529 bp, Glycine max
aacaaatataatcaaacatccaaacacaatcaacagatctgaaaggaaggtctacagcaaagtcactacttaagtcacacctgaatatttgtgagaaggagtgttgtgtgctggaagagtgcctcaatcaaatttttcaggtagtcagcacaagatggatcagaaccaaatatctgaaatgcaagacaccaaccataaaagttatggcaaactagttcattgaccacaccatgaacaggaagggggaggaatttgtagaacctatagttgatgataatttttttatacagcaagaaattttttattaggaaaaaaattaggggagtaaattaattgaggaaacaaagtccacaaagaagcaagaatacacaagaagggaaagatggaaataggtaaagctcgtttttattgatatctcaatcatagagaaaaagcatacaagtagaataagaaactggggggtaatgagaagtacatctatcaaaactcctttttaatttaaaataagaaattttattaggaaaagaaa

SEQ ID NO: 3282 - DNA, 683 bp, Glycine max
aatgagaagttattacaaaaggtcatatatatggatctaacacatttttaacaccaaaagtcaattaaaatccatgccttcagaagaaaagcagaagaataatatgccactcttgaatctgtgtcatccaaaagttccctgcaagatgcaagaacattcatgctttatatgtcaatgtataaaggtgcataagtaagaaagccaactaattcacaaagagcaaagtttggagtcacctaaaaaattgttcctgaccaacctcctggaaagcaacaggatctgctgtgcatttaccaataagtagtagaagaagtgtggcccgaatatcagatgtagcaccaggcaggtttcctcttcctttacttccaacagcaacacccaatgcaatatcatctgttgctgctccagccaattgaattagtggccaatatagtatggcagcagggacgcgtgcaattaattgcattgggacaacggctcgtccttggaaaagtgctgccattgatgcagtctcatgatccaggtggtagttattatggtagccggaccttctatttgcttcttccatgtgtccatcccaatgaaaagtatcttgtttgacatgattatcaccatcaaaccttttgcttacattagtgtgatttgaatttctgccatgttgcacatcatctccaaaggtaaga

SEQ ID NO: 3283 - DNA, 499 bp, Glycine max
gcacttcttctccaaggacaagccattgcctcaatgcaattaattgcgcgcattcctcttgatttgctattttggccactaatgcaattggctggagcagcaacagatgatattgcattgggtgttgctgttggaagtaagggaagaggaaacctgcctggtgctgcatctgatatccgggccactcttctcctacttcttattggtaaatgcacagcagatcctgttgctttcgaggatgttggtgaagaacgtttttttatgtgagtgcaaactttatgctctttgctaattagttggcatttttatttatcacctttacacatacttataaagcacgggcttcttccatctggcagggaacttttgaatgacagagattcaagggtggcatattattcttctgcttttcttctgaaggcatgaatttgatttcattttttgtgttgatcatgtgtattggtccataaatttcatcctttgtaacgatttcccttta

SEQ ID NO: 3284 - DNA, 638 bp, Glycine max
tttatctttttaattgaaaacattaattggattttttctttaatttatttcaaattagcttaatctttagtgtcctcacgtatgaaatgacaattcacctgtatatgtttggttctctcatgaaaaactggattggttgcattgaataaggctattgtcataaatcagtggcttcagtttgattttgactcttttcacccctctaagatgttttcgagaaatcttttttccaatttccaaatcatttgttgaattgggccaccttccatcttggcaaattcctttggtagccaaagctccctccgtgattatttgaactgccatgcttaatggaattccattaagcaaagtgggtgaagaacttaatataccctagagtttccatattgtgcattcttttcatattatccaatatttaatttcagtgttttgatgcgaagtaatatatattctcaggcttattaaaaaaattacttgtttctttggtagttggtgaacactggtaaggaaagagctaaagtcagccttttgtttacttgggcggtaagacattattttattctgaaaagtgttgttttcacttgtcacaaaaagatatttgggagagtggaagggggataaccatctatattaattat

SEQ ID NO: 3285 - DNA, 461 bp, Glycine max
ttgctttaggtgaccagagaggttgggtttgacaaaggtggctgaagaaacttcttggtggttgtgaacatgatctggattttcatggattcgttgtataatgtgttcactgtggagggttgagaaggctatgaagaacagtaaaataagcacaagcaaagggaaaacaggtggtttcttcctattccacttccagctctgcatggtggtgttggagggttgtggttgattttgattttgaattttgattttcctctataaggaaaccaaatcaagggtgagcctgaaatttgaaaaagcaaatacatcacttacaacaagaagggaaataaaataaaaaaatagcttcagattcattaacgggtatgtaataaagagtagtcagtactcacaaaatgacagaatcaaaaactttgattttgaagtttaaagtttgaacaataatgagtcggtgctgcttg

SEQ ID NO: 3286 - DNA, 492 bp, Glycine max
ccttagatcatgctgcaacatcaaggggtgctgccccagttcctgaagcacaacctaatgtcagtgaagaaggaatatttttgtctaatatactccgtgaaatcatgccagtgatatctcaacaagtagggtctgagggaaatccttcagaagatcatatggctcaagattcttcaacccaggtctgcatgcttaattgttttctttccttattctattgtgtgattacattttctcttatgtcaacttcaactgtcaaatcctctctcacccattatgagtgcttctggactttgacacacttggggaatatctgttagttgaatgattcccatttttgtatccttgttcaaatcccactcggtttccctttccctgaggttgctgaatagatataatgtagcaaaaaatcaggcgagattgtgcaggagaattttctatttcttttttctttttgccttgttcaaccagagaatatcgagttgtaaaaat

SEQ ID NO: 3287 - DNA, 462 bp, Glycine max
ttttctgcaatgctgtccaacatctctgtctatattttattgatcctaatatacggaactttgtcagtttcttttttctagttgatcatccctagactcagttgtgtataggaggctttctctttgctggagaatagtccatctcagttatctctacaaggtcatggtagtgctcctcagggacatctttgtgcttcgaagtgctcaatgtatccacatttctagaattgccatttaccgaggggtcaaccttggactcttccacattctgtccatggaacacatatataatattaataagaggaaaaatataaaaagaaattccaaggtttacatttaagttgaaatctacaatataatatagacaataatttaattattttcctttctctcaaaccaaccttggagagggattgggttgtagaaacgggaatggtaacgagtttcctattctttatgttt

SEQ ID NO: 3288 - DNA, 569 bp, Glycine max
ttgattaatatttgtggcagtgggtttcatagtaaggtatgtccgtatgtgcttatttgggaataagattggtatatcctataatattaaaaagtttgcatggtctgtgttgtggtatgtgcttttttcttgttattttctgttcactatgcttgagtatttatttattatacttttaacattttcttttgtaaacatattattagctttagtaggttatcttaactaactcttagttagtgttgacaactagcacacgactatctctagtataaatacctcttatctacatttagagttgagtttgttgaataacaaaaactccatttctgattttcattttctctctgttctctctaactctattcctaaaaccttttaaaaagcaacctcaaatggcaatttagttctttttcttcctcatgtttaccattcacttagatgttattaccatactcttgccacataaagatgcctctattattctttgatcatggattcttaacagcagttgttgtcttatgcctgtcattaagtggttattttgcttcaaaatatgattatcatct

SEQ ID NO: 3289 - DNA, 781 bp, Glycine max
tacaatattcagcattaaagcaaggaaagaaaataaggaaataaattgcaagataaatagttgtgactccaaaggaaagagaaatgtttcttaaatcatcagaaatataattgtattccagttgaatcagaatttttgcaactgataataatatattcacaagattggggaagaaaaaaaaatggtaaaacattattaacgatttattttaacatcaataatgctaaaggaattttgtcttgattggaaacaattgcattttagttaatcatgctaactaaattatcatttttgtaaatatgccacttaaactgctagattttcaaggacatctttctatactgaagtattcaacaatacttacacatcggaagtactcaacgaaacggggttcctggaaaacaatggagcgatactcctctgtagcaatgacagccatctcatccatgagggcacgccactctggttttggtgccacaggagggtgcattccatgctcaagtgtagcagcagtgaagcgctgaagtgttctgaagcacaagtgctcctctccaaatgactgttcaataacttcaccttgcactgttacccgaagtgagccatgaatagtatccggtggctgagataatatagcaagatgagtgggacctcctcctcttcccacagttcctcctctgccatggaacattgtgagcttaacaccaaactcttttgcaacctttatgagctcttcttgagccttgtatagtgcccatgctgcaggcatgacaaggctggcgta

SEQ ID NO: 3290 - DNA, 218 bp, Glycine max
accattcttatcaaacctgactttctccttccaccatgctctaatgttatcagaggaaccactaactggctttcccttctcaggaatgataccatacacaaatccacgagctttgcagacttccatgagcttcagcatatacttaagaatcccatcttgtgctctagacattttcttcctacgagcttgatcactggactgcctcggcttttgctttt

SEQ ID NO: 3291 - DNA, 751 bp, Glycine max
aataatgtttctttctgtaagctttgatgtccccaggcttatggtgtgcctgtaatgaagtagaaaacctttttctgatttaagcttggggaggaaaagccaaacacaaaaaatggaacaaaatcttatatgtgatggttgtcaattcacaaataggcttgtcgtgggacacctttgaattcaaatgtgctcctcctggtagaaataaatgttgaaataatattacctcagagagcttcaatcaaaagtgatatgattcatagttcttacacaacaaaagaacaaaaaaagaaatgggtaaaccatcctgacatattatcagtaacccaggacctaaagaaacctgttgtttttacactgagagactgccttttgggttaactagaaatttttacatcaccttatgatgcaaaagagagtgcacagattgcaagaggttcacactagtgattttctttcgtccagtttaataaagtcaaatagaaagcacagttccacattcattctaaatcatttttcttagttttttctcaaggaaacagtagataactctatagtctatacacattttcagatgccaaaatgggcagaagcaagaggaaacaaaaaaaattatctgctcaagcttgactatataaattttgcagataaccagggattaaaaataaaaaataaaccagtaaatggaacgatatactcacattgcgaagcagctcactttctgttcaagtttaattttgaaaggactgca

SEQ ID NO: 3292 - DNA, 676 bp, Glycine max
aaaatattttgaactactgatactaagattcgaaatgaaaagttccaagatccaatcatatattagcaattcaatgttaaggtttaggcacctatatacatttctgtttgttacatcaaaagaattctacaaacaatgtcacttctctacaaacctaagatacacagcttacaattttacacactcctatgtacaaatgtgtgtatttattattattattattattattattacgcatgtacgtagcaaatatatcacaggttatcagtcaaatgtttataccaaggtccatgaacactaactgaaatagtggctgccacaatcaaaacaccagcagtttccactaccttatcagtcagaataccagccccaactttcatgagagccatttctgctaatttcctcccacggatcccacttccaccaagcacaacgccgcgcaaagctgaatagacagcattaaacaccctctcgaaaacaacatccccagcttgtaagctctttcctagcatactagcagcaactaccttccttgactcaagtttccccgtatcttcaacttcaactgtgggaaaattgcagagcacttctacaatgtcttcaatatcagcatcttcaacacggtttaggagatccaagagttgtgcagcacacttagacaataagttttccatat

SEQ ID NO: 3293 - DNA, 752 bp, Glycine max
atgatgtgtttctggggaattttcggggtttggtttctcgggaacatgtcaacaagaacatatcatcacgtcagtaagttcgtaaagcaaatctctttatatatttttgaaaaatttcctagagaatggaatggaaagaattgggaaggaaaagtatgagtgtttgttttcccttaataatatgtttactcccaaataaggggacttattcctttccattctttccccttctatcatcctcattgcctttcattgaataaagttgatttctgtttgtatctgatataatctagctttgtatcctatgctatgtattcatgtaagaattgatgtaatgtagatactggcggtattccatcaatgagcacgggactgaggatattcctgctatgatagataaaatccatgaagtaaaaactgctgaattgaggcttactaaacctgatatagaggaggaaactgatgatgatcagctttacaatctttgtgccatttgccatagtttgggaggagctggtatgatgatgtatgttattacacaaaggatagaagggaaaccccatagactttcaagattggttttattatcaccggctggttttcatgatgactctaatgcagttttttctatggcggagcttctattagttttactggctcctgttttgtctcttcttgtgcctgccttctatataccaaccagattttttcgtatgcttgtcaacaagttagcccgggatctgcataaccta

SEQ ID NO: 3294 - DNA, 647 bp, Glycine max
agcttgcatgcctgcagcataaaattttcttttgatattttaaaataatgaattttaattatgcccgcataaaattgttaattttttaaggttagatgttaatttaaaaagttaaataatcgtaattttacaaaaaaaaaattcaagaaatagaaaaaacattgaaaaatgcacagtaccttgcatggtgcagtgctgcaaatgtgcacatatatacatgtatgtaatttactatacagcttattttatttacaggtgtgagattctgagcatgaattgagaaaagaagaaaaagtaaatactaacacgttcagttcaattcaccatacgaggcagcaactgaagcttacgtcaactgtggattataccctgtctgtcacagtcattatttattacaaaattactgctattattttttttatctgactaactagtactcttagatattgatttagcttataaaaaaaatatttattataaaaataataaacataaaaaatattataaataacacaattttacctatctaaataaaaaaaaaattcactaactctttaattaatgttattaagaatctgttagcatttatcttattttattctgttttgttgtggttttgggggtcgaaccattcatcctgtagctgt

SEQ ID NO: 3295 - DNA, 1307 bp, Glycine max
taacctactccagagaattatcccgtacaacaacaagccttggtggaagttttcgatcagataaagaatctattggccgggtttgtgctgaagaaacagaaaatgcaggcaagaaaaggcatgtttcagcagcaaggctgtactctatggttggtcctgactggttttatggagttgctgggaccttatgtgcatttattgctggagcacagatgccactttttgcacttggaatttctcacgcacttgtatcatactatatggactgggagacaacatgtcacgaagttaaaaaaattgcattcctcttctgtggagcagcagttattactgtcactgtccatgccattgaacatctttcttttggaatcatgggagagcgacttacccttcgtgtgagagaaatgatgttttctggtaattttgatcaactgattattactttctctatcacttattcacttgtcttgctatgaaatgcttcctttcaagcttcttactcctatcaattttacactgcatgtgaatgtatgcaatatgtgtatgctgtgttacatattttatggattcattatgttcatgatcaaacaattttctgatgaattctgttttaaaggtgcttttacaatttactgattattacttctcttgttcatctggctgcagttttatctaatatactcagttgaaaccactccttttttatttgacccaatggtagtttgaaataacataccccatccctgctattttaattccacattactgctgtgttaattacattactgctttgaatgccatttcaagaacattaaaagttgccagatgtagcatattatattgagaatgaatgatatagtattttaatttgtatatgtcctatttgacaatgccagaagctggtttcatatcttccatttgttgttctacagctcaaaaaacaatattcctgtatggccattcctgatactttcatgttttggtggtgcatatgttcttcttccatatttcgtactttggaaaccgccagctcctcctgtcgaagaaactcagcttaaaacatggcctttgaatttcctggaatcaaaagtaactgcaatggtaatgctcatctcaacctcatcttgcagagaaatcatagtaatctaaataatgattccatggttagctgactttgcttaggttaaggcctaagaaaaaacacctgattgcagtcatgtttattttttgagaaaaccttaaaatatttttaaatcatcatttattttattctttttggtaaattcaatttgcttaaccatagttca

SEQ ID NO: 3296 - DNA, 630 bp, Glycine max
taatcgatcactctcatttccctgtataactaaatgatccatagatgggtcaacaactctatcccatggcctcatagttagaactcccgcaaaaagtgcatataaatcctccccagctcccaactttgtactgtattccttgattgcattagcatcagcaaataccaatgccttccatagtgaagcataattagttcttgtttggaagtcaagctctttatagagtccatggtctaaaagaatcaactgtggttttctcctgcctatacatgagaaaaaaaataagtatgcaaattaaaaaataaaaaacagataatcacacgataccaacaatgcagttattgtaaaaaaccaaacaagaagctggaacctgaggtgaacaaacaaaccaaaagctttaatggaacaagaatatagatatttaaggagagagtaagtatctgcatttggatgattgataatcgaaagtatgaaaaatgttatggtatttgcaaattgaaattgcatttttattagttttgaaatcagaaaacatttataattgtctttaaatattttttgtcaaccaaacaattgagaaataagagcttttgatagaaataaaaaattaaaataaataaccattttttc

SEQ ID NO: 3297 - DNA, 604 bp, Glycine max
acaatggcaataatggtgctgaaactaacgttgggagtgagaagggaattcaaagcaactgctttgcaaattacctcatcccatcgatcgctaaaatatcccagacaaattatgccataaccaatggacatggtaataatgatctttcgttgacctgattgataatgaaacatgttgctggtgacagtgtgcagcccggaatttctgctgctgatgtgcatgttacatacaactgatacaagccctgttctctgctgttaaattagagcttgtctagatctttatatgataatataaataagaataaaaaaagaaaaataataataataataatatataaggtacaaatagtaaattgaggtttccctttcatgataaactttccttccattttttttcctttaataggtctagtatttccggcaattgcaatggcttctttatttcttcatgttaaaaaaaacaagatttttggatacagaaaaccaagtcaaattctggggttttttattccccaattataatactaaattaaaaaaaaaaggagagtaatgagtatactcatataattggagcctcttctttcctgcaggcatgcaagctt

SEQ ID NO: 3298 - DNA, 607 bp, Glycine max
aaaatgcttcaggctttggctatcttgttaccaacgatcattacaggagcattctccattcatgaaatggtgaaaacgaccaccatctctgaggaaaatctcgcggtttcgagccaaggagatgtactttgctgctgtgtgacagtcttgacaaattcttgtgttcttcactaccctgattggtgttcctcctttaattttcatcagtccatacgtcatagccaacttctctgtgtgactgagcagaaccttctccttctcactgtcatcaatgttctgatgcacacaattagtatcaggtacataccccagcttttttatctcagagattaattgatacaagtcaaaatatatttctccttcttctggatgtgatttcccttctgtggagaacacatgaatagtctgcctaacttgtatccaactccaaacatttgggattttcacccccatggcagtcattgactctttaaggcgctccacgtccccccatctctcaaaagtggaatatatgttcatcatcaacacatagttagcagaattatatggctccaacctgaaaagattccttgctgcaatctctgctatcttaatgtctttgtgaagt

SEQ ID NO: 3299 - DNA, 1623 bp, Glycine max
atacagaatacgctgagatcccacttgcagctgtcaatgcattctatcaacggaaggtctttcctaaattttacattcttctttattttagttttaaggtttatttttccttttgaaaatgtcacatttggagtcagtttcaaaacttaaaatggttaatttcagaaacattcttttggttttggttacaaaaattatatataaagcttctgctttagtttcaattgtaatttgcttgtttttcacttttttttatcttgtaataaaattaagtagatagcttcacaagaatttatctttgtaaacaggattaatacaaactaaatagtgaaaatttacatggtcatcttctttctacagctcaggttttggaacttatttgaattttcataatgataccaagataatgcttcttaaataagtctaatgacgtactgtatttggatgttgtttatgctcgtttatgtgtatctctgttatgttgagctgtggcaacttatatgtgtatctcatgtcatatgttgcctatgtgtttacattgtttggtaatcgcggtaatcatgggttcaaataaggtttctatctcaattaactatttgttaatttcctgcagccacacgcgacacacatgtaataaacactgggtgcagtccaatcaacgctaccaaccctggtagcttctttgcgaatgtcaatgagacattctcagctgagagaagaaattaggaaccaaagcatccactttgaagcatcaaagaaatccagtggagaggtcaatacatattctatgtttcaatgcagaaactatctgtccaataatgactgtttttcttgcttcaatactgcctctaagatagaatagagaacatccaggaggaagtttctacatccgtccacaacgtggcttagactgttcaaccaatctaatcaatcaagatggttattttttatttgtaaataacataaatcctagaatatatacagattatcatatagtattgactaaatcatatggcattgattaatgcctaaactctgaggtattttattaaatacgtttttcttaaaaaaagtggattcatatttttaaattatcaaacaagttagcttataactcgtcttactaaactgcagcggatagacacaagtagctccaagagcacctgaaactgtcccacatccgagttgtactagaggaccgggatctgtaaaggagaaaaaagaataacatgttttaagtttcaaaggttgaatttacatgtgttaatttgtcattaaaaaatttcaaactggtaaaataaaatcattaagttcaagagataatgtggttgcagtaataccataccactgtcataaagaatatatctcttggatagatctttcaaggtgtcatatgcagtgagatcaatccctgcataaggaatcataccaagaagagatggaacaagccctctgtagaaagcccgaggtccctcatggacccatatatcctttgtaagtgtgacaagcttaggaacccttccaccatcagaagcacaagtctgtagcctagttttgacaagatccattggatagatagccatctgtgcaactgcaccagccataccacctgcaaaaagtctt

SEQ ID NO: 3300 - DNA, 400 bp, Glycine max
aaacgaaggggtaattccacgagcttgcatcaagtcccatatgtagttagcagtgatatatcccccagtctaccatttaagaaataagaaaaaataatacacttttaaaatccagggcaacaaatataaactttgtatcaatcacgtaacgagatatagtttcataccttttctcccgcagctgtaaataggagctcacttcccaatttgttattcacaaaaatgtttctctcattcatccttacctacatatacaaaattaaatttaaagtctttaaacagatcatataaatcacattgtagtgaagttgatgacgaagctatgatgacctaccagaacatcttgagccatttgcattcctttttcagtgtacccaatcattgccccttctgcaagagt

SEQ ID NO: 3301 - DNA, 658 bp, Glycine max
agatccaactttaatgcgacgttttgggcatgatggcgcctcaacgtagtattaaaaaggttacatattactctaaagaaaccaaacatcactagcaaaactataaactagtgctatttaccaaaaaatgcatgagaacgaatggcacagagcgtgtttgctctttgcccctatttgggaacctataggacaatatctaggggtctctaataactactccccaacaattcataactcacacggttgttttctagaggtatcatcactcaagataacaatattgtggcggtatggaataccagcgacaacacattataaagagagaaagctctagacgaggtttcactattatcaagcaagtcggagacctagcatgatgatagattcacctccactccttaaattcccatgaacccgggtatagggccccttttttactcaaacccatgggtgcttagaatgcagtgtaaagaatgcgaaatatacaacaattatttacattttacacagttcaacaaatgcacacacaaagtttcacaaatccccaattccttaaaataggcctaactcacaaaaagagtccccagtggagtcaccaactgtcgcaacgtgccctttgcgggcaagcgagggcgaggctcacgggtgcgctttccaa

SEQ ID NO: 3302 - DNA, 631 bp, Glycine max
aagtttttctggcatcagtaagcatcatattttcccatcatatttaacttaagttttcacaagatattattaacaacttttctagctgagtcctagacttctttactatatttatgtacttttcacttgttagtacttagtatggtataattaatatgtatcctaaaatgggtaaagactgatctgcatgttttcttgtatggtgtttttttttaatcttgtattgcagttagaattttctagctttttgtgtcatttgtgccaatgtctctcctatgaatttttgaatttagagagggaaagaaagagataggacagaagaatattttaggaagaatatagagaatgaaattacgggaatgattttttattcagtagaatcaagaatgtaatacatgggttatggaagataacctatatataaaggttctgaaaatagacttactggagactgtttcctaggctactattaattgaatgcaacttcgtagacactaatacccatgagtactaaatgcatttttatcaatttgatacttgaacatattatttcctaagtgcattaacttttattgtttccaacatgaattcctgcaactatttcccctaatgtaaaacatgatgtttgcat

SEQ ID NO: 3303 - DNA, 598 bp, Glycine max
ggacgtaatgtgaatagttacgaacaaattacattaagagtaattacactaacttaccaaacataatgttttgtaactatcatacttaagagttttggattcgaattatgaggtattccacaagtttagattcctttaaatcagttgaaactaatttagtttgaaatttaatcttacataaaaaaaattatcctatccaagacataattaaattatattaaaatgagttatttatgacacatagacattggttaatgaattaaaaatgactttctttaaggaaaaataatttttttttattattattataaagtaccacaaatttatttccttcgtaatttttaaagtatcttattgtattttttaataaaataaaatatttattacttccttgacatagaactctaatggctgattagcatgacccatggtttattacacttcaagtcttatttttatttaaacataacttccttttacatacaatttctataccattatttattgaaaataacaaagataaataaatgtcctttccttaaaaagaacaagtggtgtaataaatcctaacgctttgtttggctgagatgacagtcta

SEQ ID NO: 3304 - DNA, 550 bp, Glycine max
ctctagagtcgacctgcagcttcatccccaatcactcacctcatttcttaagcaatgtggaactccgccgagaacgccttcgccagatcgccgtctttcagggaggaaggggaggatgaggaggcgctgcgctgggcggcgctccagaggctcccgacgtataagcgagcgcgccgtggaatcttcaagaatgtcattggcgacatgaaagagatcgacgtcagagatctccaggcgcaggagcagcgccttcttcttcaaaggctcgttgactgtgtcgacaatgatcctgagaggttcttccaacgtatgagaagccgatttgacgcgtaatttctctctctctctctctctctcttgtagagtaactgagtaacaggacttgcgattcaaaagcaattgcgtcaattatgtttcctctgttagctagaaagagttctgagcattaattgaagatggaaagagtctgttatgtatatttcatgcctggaagagaatgtaggtggctactggctaattttattgaatgtgttttactcgatggtgatct

SEQ ID NO: 3305 - DNA, 461 bp, Glycine max
cgctagagtcgacctccagctacactggaaatgttcccttcatggccaatgagattccagcaaaccccaagagtagtactagtcttcctacttgtccatctttgaccatttatttaaacatgctcttaattgcttatgcttacaagttcaagaaatcttaatattttattttttttccctttccttgtgaaaatgatattgtccaaatcctcagccttgcaactttgataatatatagtatgtgaggtgatttttattttttctagttgaattttctgaatcaaattcttcttttttttcttttggtggctttccatatacaggttggttcaaagtcaggaggagaaagcactgattcaggtctctctagcaaaactgagcccccctttgaggcagaatctcccataagtaaaaaggcatcttcttcagatcatcatcatcagtcttttgatcagcagcat

SEQ ID NO: 3306 - DNA, 730 bp, Glycine max
atggaacttggaatctttgagaaactccaaaacccagattaaagcttccttagaccttaccattggattgcctgcatcaatcatggagaccgaaactgctgatccattattttctgtccaaactatgaaaggtgtgtctgttcttctcctattcccttcgaatatcttgctcgaattattattttttaaataaaaattaattatatttaatattttcaaaatatacaaatatttaattttttccatgttagagaaaaatttaaaattattttaattgattttttttttatgtaaaaaacaatggtacgtaacagttagactgatcccattggaagatacataggaaggtggggtacattatacataatacatccatacatctcttccattctcaaaatttaccatgttttcggttaaatctcttaggaagaaaagctccaccaagtcaatacacatttaaaatcaagtccttctcatggctttccaaggcctcggtacaaaaatgtacctccgaagagtttgaagcagggggttataaatggtatatgcatgctcttttgctaattcagtgatccctgtacttttgctcattgaacattacaaattaaatacaaccttattataaacattttcaccacattgataacattattgatcttggcttgatactttgtttatgcttttccatcttctatatatattgtgaattatgaatctgatgcacaatgga

SEQ ID NO: 3307 - DNA, 208 bp, Glycine max
aataaagaacctcaaacagaacaagcaaaaatttctgatcgaaatatattaagtaaatttctgcattggagatccaatgacaatggaagtattccatgtccccctaaggagtatggtggctgtggttattcttcattaaatttaagcccaattttcaagatgaactgggttgcaaagttggtaaaaaatgtagaggaaatggttagtg

SEQ ID NO: 3308 - DNA, 165 bp, Glycine max
atagtaaaataccattcataagacatacagaacactaatcaagtaatcaaccgtcttcaaacacagagagaagcattcaataggaatccttacacagctgagtttatgtataaatccttcagatcacttttaagctcctggttggtattttccagatcaaacaat

SEQ ID NO: 3309 - DNA, 502 bp, Glycine max
aggggagccagcaggaggagatagagagtctgtagttggccgttgaatggacttagtggcctcccttggagcaatcattgcttccggactattttcatcttcagaggtactgagagatgaagaatgaaaactcggcatctcccgggacttgttagagttcaaagcaaccagagaaataggttctctgtctactgaatgaaaatcataaccagaataatcatcagatgaaaagttagcaccagtcctgctcacgtgacctcgggaatgtgacatacggctactcacaacctcattagagctattatcacctcttgagggaactccctttgtttctaaattaggagaaataaccagcttcttattgatgacagcaaagctgatttctgaagaacaagccccacattgcaccttttgctggtgatttttcactagaaccaatgcttttttaggcagtagcagcaactcaaagcaattatgacatgagatgaagggcgaaccacca

SEQ ID NO: 3310 - DNA, 952 bp, Glycine max
agaatttcatgctactgctcaggttcctgccaaacctaagaaaccttctctaaaagaaagaaagcagaagttgcttaccttcttgcaaggtgacttttacttattctgtttgcatacaacttttcattttgatgagttttccaaatgaagttctcatagtgataattttactgtaaactatttctctgacagagaagtatgaacctgttcatgctaagtggactacagaacgctgtgctgtttgtagatgggttgaagactgggactacaacaaaattatcatttgcaacaggtaatgtaacagtttcagttcaattttttattgcatatattcggccaatattcaacccataaagagatagggatttgaacaagatgctgcatgtttctacagatcttgtagccaataatgatttaactcagatttaatttttgtctgtattttgaaatatcatttagagcaaaagtacctctagtgcatttgacaagaatatgctcctcacttgatgatttcaattatatttactttttgccattctgactaatcaatgttacagctttgtcattgatgcagatgaagcaagatttttgtggttactctatgttgtattgcaattaaatcacaaataaattatatatgttacagatgtcaaatagcagttcatcaagaatgctatggagcaagaaatgtccgagattttacatcttgggtttgtaaggcttgtgaaacacctgacatcaagcgggagtgttgtctttgtcctgtaaaaggtatgtctttgacaaaatttcaaatgttgggtatataaagtggtcatcttttttttcctgggtatgatgtagacttacctctgtgatatctatgttttggaactgtcctgcctgattttttaaccatgaaataaacaaagttttactgttacataaatgctcaagttattatcaaggagct

SEQ ID NO: 3311 - DNA, 809 bp, Glycine max
aaaatcaaattaagagaaacccagcccctctattgctatctttttgaaacattctcttttgtccttaaaattatttcgaaatttgattaatgttgtttctacatttaacaaaagttgtggttttagtttctcatcaggactagaactaggtgtttctgttaaaatgtagggattaaacacattaaatttttataatgacaaaaaccgacattttgaaatgttttgagaaattaaaaatatgttctactctattaaaatccttgtgagtccaattgaacatgtagatcttatttctcatttagtggatcttatttctaaactaatgggaaccgatataagagagagtgtattagaaagagagtatcaaagaacgtgtggtgttcattagttaagtagatatttacttacactagggtttctgacgcaattgttggattcatctgcttcacagttctcagcagttgcccatgatcccttacccatgccatcaaaagtaccaccaccgataagctttataccatccagttcctcaaacatgagccattcaccattcgcatactcactgatgtctgttgtagccgcaacagtgcctacaacttggattgtaataggccctggagtcaaacacggtcctgcgaaaaacatcgtggaaacgacgaatcttcccttagggatcagaagcctggcttgcacattggacttgcatgctgctctccatgcatgcatgaaagcctgcgaggttcgacttttaaaggatcccccgggtcaccgagctttgaattccatgggccggtggtttttccaaggct

SEQ ID NO: 3312 - DNA, 385 bp, Glycine max
aaaacttgcatgacagaggcacaatctatctcatctcctatggctttcagctgcaaactcaccaaaattggctcggatctgttttctgaccccactctctacagatctgtgataggtgctttccaatacttaattatcactagacctgaattaagctattcagtcaacaaggtttgccaattcatggccaatcccttagaatctcactgggttgctgcaaaaagaatcctaaggtacttaaagggaactgttttacatggtcttcatctcagaccagctatcttgggtcaatcctattctattagagttctttgtgatgctgaaatgggaatctcacgttgaatgacagaagattaacttctgggcaagaaggcaggcatgtctg

SEQ ID NO: 3313 - DNA, 783 bp, Glycine max
ctagagctggagtttcacaggtatgaatataaattattacattatcattcaagtaatcatttttctatgtcttacatagaagaaataagattgatgtttttgattttctgcttcaggtgctgaatcgtttaacttatgcatccactttatctcacttgcgaagattgaattccccaatagggcgtgaaggtaaactttcttggctatgatccagccttcaatacttccctccccacctgtacattgcttgcataaattaatatcattaatgcaatatggtaatgcattctcagttgtttctttagattatgcactattgcactattgcttgtttgcctaagttgtaatttttattgttttcttccttcccctttttattccagggaagttggccaaaccaagacagctgcataattcacaatggggaatgatgtgtccagcagaaacacccgaaggacaagtgtgtattttgctttccaagcatactcctatattactacttagtatgaggaactcatcttactctctggtatttatgagtgtgattgggctattatataggcctgtggactggtgaagaatctggcattgatggtctacataacagttggttcagcagcatatcctattctggagtttttggaagaatggggcacagagaattttgaggttaacggctttcctgcataaagttaatttgtttctctctatatatgatttcttgtttaaatttgtttattctccttccacataggaaatctctcctgcaggtcgactctagac

SEQ ID NO: 3314 - DNA, 840 bp, Glycine max
atgatgaacttggagcaatttgtgatgataaatttagaaagtggaaagatgaaaaaagagggtatgtattggcgttagaggaggaagaacaaataaaatggaaggaggaacattttaaacatctagaagatgtgcatgaaaaacttatagatcagtttaaggcaagtaagaaggagtgggagttggaaaaatctacattgcttgatgagatttcctcattgaagtctttgttagactatcatataataaaatgacatgatctgcaacaccagttacagatgtgcaaccaagcccttgctcatgaagaaagcctgagaaagcgtctggaagatgaagtctccaatttgaacaagaagtgttttcaattgatgaagcagttggagttgaaagatgctgttttgatcagttccaagaaatatatcaatgaagagcgagagaaagcagcatgtttgatgaggcaggttgagtcctatggatttgccaatgaactgctacatttgccacacaacgaacttgataggcacaaggatttgcatatggaagatggtttcaaagaacaacttaaggaagtttatgatgctttagacagggcaaacattgaattggatgagagaatatgtgaaaaaagtgaaatggagtttgaattgagaatatggaagtcatttgttgaacgtttgaggagcggtcttgaagaaaatcttgtcatgtgcaaagaactggaaaattcactccttgcacaagtagattttactgaaagcctcaagcaagagaaagatagcttggtttttaagttagaagagaaagagaataaaatagaatgcctgcaagcatgcaagctgg

SEQ ID NO: 3315 - DNA, 777 bp, Glycine max
aggacacttgacctgattgaaagacgatcaagatatgtctcacgatcaatggggaaccatttgggaagctgatcaatcatccaggataatgcgagccagatttcacatgtcacagatatgaaccatagtccaattgcatcaggtactgggtggaagattctgtactgaaagaacagtaatagaaggaggagcctagcgacaaccatcattctgtaaggactgagtctgccggatggtattggtactttccttgacagtggctctttcctgcatcatgttatatcacatcattaaataatttaggatttttctttcagattatatggttattaaaatggtactgtggtgcttacatggccttttcgggatcaactgaggcatcagtttcaggccatagattgccttggtgcaacatccactcatctactttctccttgtcatccaactttgcacctgcttcatgaaaatatgttagttataataagcgtcttgtcttcaatctatttatcctttctctttactaatcttaaaaaaggttcacagatttcaaattacaaacttataaagaggattttgaaatacagtgtatcagccatttatatggtttagtttataaacttttgctcaaaaggtcattgcacagtacatattgcatattccacgtgaaggaagaaagactaaaataagtgtggcagattccatcaactgataaaagagaagaccaacacataccaggttctccaacactgtgagaagatacgggcaactccccattca

SEQ ID NO: 3316 - DNA, 391 bp, Glycine max
aagcacaggagtttgtggaagactattaacaggctgtgtacttaatcctgaagcactgcctcgatctacagcattgggctccccactcctctccctaggatcaatctggctggtagagtgaacagctctatctgagacattacgttcagcatttctatctctagcctctgagggaggaccgatagatgtttgggaagatgcgaattgctgaccttgtgcaaacatagctggtttattgctgattgaaggaggagggcaaacaagattgactaaaacatttaatgccggttgaattatctgaaatggaaaagtgtttgcaaacaaaagttaagataccatatattgggatactcagtatgtcagtcaaaatcctaaaagactttctattacc

SEQ ID NO: 3317 - DNA, 198 bp, Glycine max
agaactcatgcaaattctgttctccaggggccaaagactcaaataatgacaacaggttttccagcattaaataaataagtctttgtagctgaaaatatgagaggaataatgcttaagaccaactaatgaaatacaatggtgcaactacaagcatcaattagttgacttacggtatacattctacctgtaaagtctcct

SEQ ID NO: 3318 - DNA, 747 bp, Glycine max
aggtatgggctttgcagtccccctggtttctacaaatttgaagctgtttctatattttatatgatgttaccttaaatcatttgcttctttttggaaagatctgttctttgcttcatcaaaggtacaaggactttgcaccaagcctggttcaagggcttctcaaagtcttctctcctggaaaacctggtgatgaatcagatacagacagaaatttgaaggcaatgaagaagcgcagctctctaaagcttctattggaacttttttttgttggagttattgaagatggtgggatttttatcaatatcataaaagatcttagcagtggggaacagctaaaagatcgggatgctgcacaaacaagtttgacccttctttcgagttttgctcgccaagggagaatttttctaggactttctgttagtgggccggaaattcatgaggaggtatttcttttgttaatcttcattagaatattctcatgttttgtattattaatttttgtccatttttcctttttagctttccattgactttcataacctatagtcaattttcatcatgacggcaagtttaacttcatcttttgtttgtatttatatatcattatttgtatcgaggtttgttctctgttgccggctgtgttttatatgttcctgtactgacattctgatacagttttttaaaggccttaacatcacagcagatcagaagaaagttttccggaaagcatgctattccttttatgat

SEQ ID NO: 3319 - DNA, 747 bp, Glycine max
atcataaaaggaatagcatgctttccggaaaactttcttctgatctgctgtgatgttaaggcctttaaaaaactgtatcagaatgtcagtacaggaacatataaaacacagccggcaacagagaacaaacctcgatacaaataatgatatataaatacaaacaaaagatgaagttaaacttgccgtcatgatgaaaattgactataggttatgaaagtcaatggaaagctaaaaaggaaaaatggacaaaaattaataatacaaaacatgagaatattctaatgaagattaacaaaagaaatacctcctcatgaatttccggcccactaacagaaagtcctagaaaaattctcccttggcgagcaaaactcgaaagaagggtcaaacttgtttgtgcagcatcccgatcttttagctgttccccactgctaagatcttttatgatattgataaaaatcccaccatcttcaataactccaacaaaaaaaagttccaatagaagctttagagagctgcgcttcttcattgccttcaaatttctgtctgtatctgattcatcaccaggttttccaggagagaagactttgagaagcccttgaaccaggcttggtgcaaagtccttgtacctttgatgaagcaaagaacagatctttccaaaaagaagcaaatgatttaaggtaacatcatataaaatatagaaacagcttcaaatttgtagaaaccagggggactgcaaagcccatacct

SEQ ID NO: 3320 - DNA, 801 bp, Glycine max
ctagagtcgacctgcagggtttagagaaatatataatgactaaattgttctctcgaacattcgctgcttctgctgaggatgcaaagattgacaacgaaatctcatcgaaaatatgcttgctccaaacctttctaaagcctgaacatttggatataccaccaattctccaaaatgaagccttatggctggtacgactcattaggattcaagattattaattctatctagttattattttcattacattcaataggcttggtcttggacaaaatggctggtatgactcgttgtacttcaatacaataattgatcaaggaaactgttaatttattagcattgttgaaggctggataaaagtttatggggataattttattctgacagcagtaaaacattggcatagaagagaagaaaggacaaaatgctttctcataagccttggaaaacaaactttctttcacatgtaatataaatcatttgtgttttcacataatagattaagcttctaatatttttacttcgtcacctaatatcctctatagttaagtgatcaagagtttgtccttggaactcccattcttctaatttagataaaaaaaaaaaaacattcagcttttctataaataagaactatttatgggaaggattgcagaatttgttgatggctatgatcaatattgacaccattttccttttccattcagcttgcagagaaagaattgctgaaaatcaatgccttcaaagctcctcatgagaaactcttgagcattatgaattgctgccagcatgcaagctttggcg

SEQ ID NO: 3321 - DNA, 819 bp, Glycine max
caaagcttgcatgcctgcagttctatgatttgatgaacagaatcccatcattctaatataactatgtaacactagaggtgatgagttcaatccctctcctccatatttaaactgggaaaaaaagatgtaggtaaattaaagaaaataaattctgtaaagaaaaattaatttatatttttttagaacaaaaccaaacacattcatatcatatataattggatatctaaattaaaaagatttcaaaatctaaaatgtaaaaccaattacttttttaaaactaatccttttagaatctaatccaatgcaaccatattacatttaattggatttctaaacataaagggtaaaagctaatgagattttaaatatcaagtctttttaattttttagtatttttcttgatgcttcgtgccatttatatgaagttcatcctttgctgcaaatattaaattgagcagtatgattccaagaaattaaacaacaatttttctttacatagagtttcaaattccaaccacctcttaacaaatatattggattttagatctcatcctcatgtcttgatattgcaagcctagggagtatgcttcatttaaattagcatttttgttggtcatttctttccttagtagctcgtcatgttgtttttaattagttatcttttttaactgatcttttatgttacatgtgatattttagtcatatatatttcttatattaatatcatacacttaattttttagtctttcatcctcaacgatgcaaagaattcatcattgttcttattgtataaatctattagaatctgattctttattc

SEQ ID NO: 3322 - DNA, 834 bp, Glycine max
aagagcagcagcagctgcttttcaagagaatgttggaagacaagggaattatccacatggaattgacatagtgaatactgcggattatttttcactttcttcgcgagtaaactcttatcttcatgttgctgtttccattgctcagtatgaaggatatctttttccatttgtggatgacctgctggatagaaaaatctgtcactgggtatgttctgattaaatctctctctctctcactctgcaatcagccaaatcttctgctcccgtgttgaccctaattgcacctgtaaattgtgatatggatttatggtttactttctaagtgaaggccataaatcactctagcgtgattttctggacgttgaatataataatatttttgtagggaaatcatgcatagaagagagatgacagaggtattttctcaatgtgtgcatgctttttggtctataatatgatgtttgatgaagttttcttctattcaggagtcatacattagaatttttttctttgtagttttattgtttccttaaatttattttttaaaaacttcttcaaaggatgaaagaagtcatgccttatgtacgtattttgctatttcatagttgtgacaatagagtaaagaggatggtctagccttttaatttttgtttcttcttttcttattattccttgtcactgtatattttttggcataaatttgttcaaattttggcatttagtaacaatttatggttattctttttgttgcttcctgtatctcaattttcttgatatattttgagagaagttacttggaaattatgtctccaggagaaaagcttgcgagaactt

SEQ ID NO: 3323 - DNA, 812 bp, Glycine max
ccagcttgcatgcctgcagaggtttgaagtatttgtcaaaatgggaggaaacattgtgtggcaatgttcagttcctgtagtcctttggttgcagctgaaaagctgtctttgaagcttaactatttgctcctaaaagtactttggtataaggttgcacacctctttgtgtggtgtttcatgaattggctgtttcagggttgccatgtatagattgggttgctttattgtgtattttgttttgtctccagatattttgttttggttcactctgttttgaaagatttcttatcctccatttagttgaactttctcttaaatctattttcttacaagacaaataaatgtgaaaggtgtagaagattatgtagcttggttgtgaaattattcacacttagtgcaagcatagttatcaatcccaaataattgtgtggactggccaaccaaagtgtgaagaaagaagccaataacaaatagaaatttgtatgaaatatgaataaactgagcagagatcaaagaggttgaaatcaagctagctgtgcaatgcatggacatagttatcaatattgtgctttagaagcataatagtggcatatataggttactgaaattcagttatacgttgttttgcaacttagttgttttaagagtgatgtaataagatttttttccttttagtgattgcaggcacatttagtgcgggctgctgaagtgaaaaaggccatcgaatggatcttaagcaaccgtgatggtcattatgctgctgattcagttgtggcggcaattgctcatggtgcagcagctgcaggtcgact

SEQ ID NO: 3324 - DNA, 801 bp, Glycine max
cctctcgatgtgtgatgcagcagccaatgctattgcttcatcaggaagacgactcattgcagatgaaatattagtcgggtgtgtttcagtaattcctaaatgttttagacggtagaggctagcttgcatgctttcgtaagcacaaacctaaaaaaatgtataacaaaaacaagacaaagaagaaaccatattaaatgaagcaatataacagatagatcttataacaaataaacaacaaagcaattaattcactttcaacacacaaatgcatcccaagctaagcagcatgtagattacagaccatcaaacttacaaaatcataaaaaataatagaaggcgagcatacaaagcacactgagcatccaataaaatgcattattgtttggctaaattactccattggtccctctctttatttaattttaagggaccaaattgaacaaattaaataaaaagaggaaccaagagagtaatttagccgtattgttttttgaagcctcattttttcaacaacccaaaagcatcagatatgaaccaaaaagaactctacaaatcatgctgttgagggattaagttttacaatgcaagttccaaatctccattgcatgttttaaagatgatttattttgctattaatagtgcatttcaacagaatgacatgttttaatttataaatgaaaaaacagaatgtcatatgatataacttacaagctctggtgtaaccatttttctcaattcatcctctgaccaaatgcgaaaatttcgctttttaaccaaaattgactgtccatttgttcccct

SEQ ID NO: 3325 - DNA, 582 bp, Glycine max
gggagattaaatggtattggattttaatgttgaggttgctggctgaatttcagaaggaaagtgttcaaaggatccaatccatacatgagacgcaatggcaacaaacacactcatgttagcttcaatttgttattattgctgccactgtgattcatgaataagtcactgtctcaaaagatatggagctgttttcttccagtgcatctttggtttgaaatttatgtaattttctctgaaaagtgattactagtttcctcgaacaataatggaagcagcaaaggttctttcacactgcaaaactgccccttttggtttctctatcgtgagcaacaaagtgtctctaagacctttcaacaaacattttcatgctgatgtacttgctaacagacccaagaacattagttttcaattgaattgcacctttggaaacccttcttcctcagtatcaaaaccagcaagaaaaagggctgatttgttacattttcccagatgctcaatttccagtaatgccagcactgaatctcaaaattcagtcatagatttcttcagaaatctatcatttgattcaataaaagctactct

SEQ ID NO: 3326 - DNA, 799 bp, Glycine max
aatcgcatgtaggtaagtacactaataaatttgagtctaattatctatttatattgtaaaagggaattctaaaatctgaactctcattaatattagaaatattaaaacctttttgagacaccattttaagaaaaccaaaataaattctttatatttctctcatcaaaaccaaaataaattccaccaagctataggattctacaaaactcctgattcatggaaattggtacttcaataattcaatatgttttagtatccaatccggtaatgctatataatttcttaatggaatctgagtctgttatgaacacattccccattatttgtgaatctcaactttaaccataacatttatgtcctttagctagatcaacagatatggtacacctcaatcatgagttataatctcttatttgatctcaattttattttatgttgaatcacttttctagaagagtagtctttggttagcacttaaagtcacggttataaaaaatgttggcctcatgtaactccaaaaggaacagaacatattccaattttaactctcaaaaccaaaaaatccgaccaccatttcatttttacctttttgttcccattggttgtgtttggtttaagacatgaactgagacatcttatcatcacaccatcatcacatatatttaaatatatttatgtggacttagaatatgtgagtgatgggtggccctccaacaaatttctttaccccatctgttcataagtcttagggacaaggacccctccgtgttggtgtatgttaatagctgcaggtcgactt

SEQ ID NO: 3327 - DNA, 813 bp, Glycine max
atgattacggccaggctgcatgcctgcagctacactgtctgttttctttttcttgagtgaaaaactagatctttataaattatcttaacttcaatatataggtagttgacacaatattacatttgaaagctataatcatgtgggctgaccagattttgtgaattcagaagctctattaaataccaatctaaccttgttgcagcatcacttcttttactttattaagtcatgtaatgcagttttatcctctaacttgcgataacataatgatgtatggtgttacttattttttacagcaattgttgattgcttccagaaatctggatttcttcaccagtggctaccgctatctaattcaagttcttcctgctgctgttgttgcccccctgtatttctcaggaaaaatcgagtttggtgtaatcaatcagtcactttctgcttttaatcatatccttggcgacttttccctcattgtgtaccagtttcaagctataagtgctttttctgctgttattaatcggttaggtactgcattatttttcccttatctttcctgtaacattttgatatatgcaaatctcatgatagatatgagcatgagtgaatgaactacaaatttttactctgcggaaaaaggaggatccattttgatataatttgtggttatgtttacataaacacattaagatctcagaaaagaaaaagaagtattacaatgtgttaaagatgttatttgtgaagtcagccaactataactgtccttgtctatgaatactttccatcctcaatttcctctctctcatccttttgtgc

SEQ ID NO: 3328 - DNA, 818 bp, Glycine max
tacgccaaagctgcaatgcctgcaggttttccacgagcatataccacccagagaaaaggattcccaatattggaacgtacacttcagtgattgatttagctgatctcacaatgcaagcatccacatggtccaaaacataagcattgcactctgcatgcgagagaatggtgctccaacaacaatggttgcagcactagcccaaagaaacaccataaaaccaaatggctcgagaaagaggaccaaatgacaacagggccatgtagtttgtggaatggctgaagctggttaatcggtgagtgggtgcatatggcaaagataatccaaagaaacacaatggttgcagccacaaaagatgaaatatgttgcgcattttgcttgcgtttggctagacactgaagggttcttctttctcctccttttctccttgcattcccttacccagaattgggtttagattacaaccagtggacttgtcttgcagttgtgaagtcatttttccatcccagtccaaagctaccttagtgtacaaaatattattatcgttccgtactttggctggtatggaacaaccttcatttgcaacattcaggacccaatacgtgtttagaatggacttgtcttgttgcagttgttgggaagtgattttgccatcacagtccaacgctaccttagtgtataaaatattataataaatatgattcatggctattctggaataactcctttcctgtggtgttcaatagcttcacaatttctgggatgccctccagacttcttatcatctctctcaacataatagctgtctgcaggtcgactct

SEQ ID NO: 3329 - DNA, 841 bp, Glycine max
atagagaataagtgagaggaggtgctttgatgtcattaaaggaaggccatcctgaagctgttgaagagacgccagctttggggctttcacatacccatttggcatcagaaaccagagattcatgagatgcctacatttaattttcattagtaacaacctacaagtaaacatgtgggagttgggattttgctagcacacccaatattagtattcctttgcaattccaattttcacaaagttgaagaaactcaagaaagtgcagcctaccacaggtagtgacaatagccatgaaatataaaaaaaaattcattgttaaaattttgaaaagctaatatactaatgtgtttaatgtgcatggtcaagaaaatttcatactatgtttatagtagtgaatgatgcaataaatctcatagattttgaaggaacagaaagttacattgctcatagcttggttgcaggttaccaatcctctactgtgaatcttgtaactatttctcaattattgagtaaatgcttttataatttcaaccagaagaagaaagaccatagcttttccatagattatcatatatcaaaaaattattctcaaaatacataaactaaagaagcaaattttccctaaataacattataacctagaacaatacacataggaggcatttaaaaatggaaaaaataaacaaaaaagtgtaaaggtgcatgtttctattcagcattcataatttgatatagaccgcaactgtctcaccttagctacttcttcccccttttctaaactcagttctgagaccttttcagctgaattttcacctttcttcacaaaactctgcaggcatgcagc

SEQ ID NO: 3330 - DNA, 736 bp, Glycine max
accaatttttaacactcaatgagcaaagcttacacaatatccagccaaactactaataaaataacagtgatataaattatgaacaatttttctagttaatcagattagataatagtatttattttcagtgtcatttatccattgactcagctcttcaataacaatgagaaaaagatgaactatattttctcagttaaaatttgttgcaacctaaaagtcaatgctcataattgatcattttgattgtatttgttcattttattatgaagcccgggttctatttgtaggggaaacacataagaacatatatttatggaccagggttgatcttcacaaaaaaataaaggattaattttccggagaataaccaaaatcaactgtctgactaacagctaacatggaactaaaaggaaccatcttcacaagattctggacagctacagcttcatttcattgaggtcaatgaaagttcagtttcaagagacgttttcttctatgaagattcaaaagctgttgattaggcttgcttaaatgttagacaatctttgtgtaggcagagttaaatatatcaataattgtctacaagtctctttagagttgcatgcccaaaagaacttagctaataatgcctcaagcatagcaatcatataatttcatatttcctatatgtaaatgatcttttaaattaatcctctattttataaagccttccacaaaaaactacaagagcatttct

SEQ ID NO: 3331 - DNA, 776 bp, Glycine max
tcttttgcggatattgtaaaatttttttgccaatctatctcacttgatctcatttgttacttgagtctatgatttttgttcatctggcaacaaagaccttttcttcaaactttctctttccgattttttacctactgtcactttagccatgattcccaaactcaatctcaagggattgacacttcccatccttcttttctctattagttgattatgtatttatatttattgtcgtccctgtaattcacttcttggtttctccctcctttttgcttttggtttctctcagtaattcacattttggtgtctctgtccttactgctcaatacttgattaactgaatgcccccttttgtgtttgataattgatactaggttcttcactctgtttttcctcttcaacgcttgtattctcttccctgttgtgtccttgagtcagcttgttctgtccatattcattaatctcactcctggtcaggttttgacaaaattattgccccatgtgggtataccttaaatgtgtttcactgtcccaaaaggtttatgttgttgtttttcctactcaacacctcatctcagccagtatttcctttgatattattctcttctttatgtcttctactttgcctattcctcctcttcctgggctagttgaggtggctacaccacagcctctcttatcaaggaaccttacactatttcttgccccttctacaactatcatgaggacaacagcctccttcagagcccctacctcctctggatgctactgaagtc

SEQ ID NO: 3332 - DNA, 798 bp, Glycine max
cttggccagcttgcatgcctgcagtttatatttgttgctgctgcaaagtattgtgttgacattgcaactcaccaacacggatgctgtgttctgcaaagatgcattggccattcaagcggggagtatcgagaaaaactgattgcagaaatatgtgctaatgcacttctgctagctcaagatcaattcgggtaacttttggaaacataattgtttataaagcacaaaattcctttcaccggttcttctttttctgttttgtatatctacttttccacccacaaaaatgttttctcttttctgttgcagaagcaataatcttagctgttgtcaaatgtctttggcaattgtataaatgattttaacccgttttaccagaggccaagtctagtggggactggaaaatgtggtggtcacacagtatgaaaagtgaatagtacactaggaaacaaaattgttaataactaccggatctaaattacagtgttttcttttttataaaaattcaaattgaaattcatatgttgttataccagctttaacttgctgataaaaaaaaaaaaaataccggctttaacttctctattgattgaacagatttctttctatacacctttttgcttttgtctttgcatgggactcacatctaacaaatcaagcctgttgatcgtttttaataaaacaccaattctgtgttgacctactttggaactatgagataaatgctgcttccactactctttgatttttctaccctttcatctctctgttctttttgcctgctgcagagcatgcaagctg

SEQ ID NO: 3333 - DNA, 803 bp, Glycine max
aaattcttggtgtgaccttgatgctaaaggaacctcaaatgttaagctaaagttatttttcctcttctcaaatttgttttcaattatttaatttttttaccttcccagacctaatttacttggaaagaattgaacatccagtccttaaaaaccatcatccttccttgtgcaggctggcccaagaacccatcaaacccagaatttcaattcagcaggtaccattcagttcaccatacccaagcagatgctaagttttccctaaaactacatgttttcatttataatctatccattttacacctacaaaacctaactatcatcagtctcgatcctaatttcttaggtttcctacatgatttagttatcagtagcatctataattatatgtagttatgtagtaaaggttaaaaattaaagagatgaaaaaggatcaattctgtgacagtaatatgacacgtgacttaaattttaccataaaaattgctagataacaataccaccaaggtaaaaaaattccattgaataatccaaatttcaaatgaaatgcataccttatctgctccagctattatactcttaactactggaatgatcttgctactcccatctatatcataccccaagaagtatttcgcttgagataaaccaatgacaatagctgaagcagttgtaaagccagaaatcactgaatggctaatgaaacgaatcagccatccaagcctgaaagaaccaaaagacaagtgtacataggttatcgttaaaatccctttcataaaaaattcaggcttgaaactgagtgctga

SEQ ID NO: 3334 - DNA, 828 bp, Glycine max
gtcgacctgcagaaaaattggttagaacacaataacaatgtttaaagattactgttaaagactttgcattttataattctatctaatttttgtttctaaactatggaagacttttatttcagaaacacgatgacaattcaacaaaactcacaatctaaaaaaaaaaaaatcagagtcataaaatatattaatatttaaaagaaagaaaaaaaggatgcgcaattaaagttaaaaagtcaaattgtaattaaaaaaggttaataaaaacgagggtccacgcgttttcgcgttctttccctgtattggcgtccacttgatatctttcgttctctagtctgtatactatctgtccacaaactctcgagagtttccacccaagatttcctgtttcgaagaaatggttgatagtgttgttacttttctgctagataacttgtctcggctgcttgaagatgagcacaagttgctttctggcgtggaggacaaaatcaattctctgcgcaatgagctcgagtttatgcacgccttcctcaaggattccgagggcaagcgcagtaatgagatagtgaaaaaagtggtgagccaaatcagagatgtcgcccacaaagctgaagatgttgttgacacctacattgccaacatcgcccaacaaaaacagagaagaaaactgagggagtttttccacctcaaagaacatgtcttggtgcttcaccaagtcaactctgagatagagaagatcaggagtcggatcgatgagatctttgagaacagggacagatatggcattggagaaggtatttccgaagcgaagaagctgctgcaggtcga

SEQ ID NO: 3335 - DNA, 845 bp, Glycine max
gctattgtaagtctactcttgtgtgtgtgtgtatgcatttgtaataatttatgtttattttttttcggtccatgaatttagttgattacaagtgtactttaatttacacatctggactttaaaatgttaggaatgtattgagatatgatttcttttttttccttggtattttgagagttattcctatgtgggtgcatttcagctgttattaacctcttgattttttcattctttgatcttcttaatgtaaaaaacctttgtggttggaaattttttttatgtactcattaattgtattggtaaaatataggggccacacttacatggtcaaggagtttcatcttcacctgctgtaagtttttttattttctcttaaatgtcttctcagttcctaatcttctgatcaattccctgaatactaacattatcatgtatttgacttggcaaaatgatgcaggttgggactccttcaagcgtagaatcaccaaccaaattctctggaaatactaatcagggtttagtgaagaaattgaaagggtttgatgagcttgcaatgtcaataggcaattgcaatgctgagagtgctgagcgaggagctgaaaacaggctgtcacagaggtttgttgatctattttctttctatatgactattagtttattaccagaatgaactctacttccctcttcccccatatagaacattggtccatgagttattctagtaggttgatatgaataactgacaaaatttatattcacatgaacagtgtggatactgagggttccagcgacggaagtgatggcaacactgcaggtcgactctagacgctaccccgggtttcgag

SEQ ID NO: 3336 - DNA, 770 bp, Glycine max
cgccagcttgcatgcctgcagcttttgtttttcgtttttctatttgacacccttttttaatttttgacagccatttttatttttttctatttgacaccactttttttttctgttcagtcctcttttattttatgaactcatgaaactttttaaacttttttagtttatttgaatgcaatccattgtttttttcaatttcaatgagtttattttgtgttggtacttggttatttataattatatatatgtatttttttttgtccgccattttccgctacgccatccgccatatttttatgacggatttttggctttctgccattaacaacactgatttcaaatgatcccttttgaagtctaaattttacatttcaaaacacagaattagaaaaacacaaccataaggaaattttgataacaattactaaattaaaccaccagctaagtgcaggcactagcaaaatctattcaagcaagtatcatgaattgcttaattgagaattccaacataatttatatgattcacaaaacacagtactgtaaaatttatcaaatattgaatgtacatgattaatgaaagtactccatacctctaatgtaataacaccgcgaaaatgtctttcctcttgttttttggtatatccaagctgtgaagttgaaaggttaaagtcaatatcacacagtaaattgtattaaaagtggccaattatatatctcatatctgaatgaatcaagatgcaacacagattcaaacatatgataaacagtgg

SEQ ID NO: 3337 - DNA, 799 bp, Glycine max
agagtgatctagagtcttggattgagcgtttactaaaacaactccaacaagtaaacacacagatgcaagcttgggtatcatctggtggttcagaaatggtttctcatactttgactagacaccaagaaattcttcaagatctcacccaggtattctacagtctgggcttgagttagcctatatcattttgtgtgagcctatgcattatatggctgttttattattttgaattgctttctgcatgcaaatggggatatacatttcatgtaccctgagaccaatggtttattctgatttctgacaactaaggattttaaaacaaatattttcaacttcttcacttccattaatggcaagtaaatattgtaggaactttcccaatttaatttataaggttttgtatagaaagaatcctttcactgccaggagatttgacaaactgctggtaactgtcatcagcaatatatcttgctagttccataaacttgtgaattgtgattgaattatatacattattgaatctttactttatcaactagtattcaatgctatgatctccctccctattttgtatctcaatttctttttccaagtgtttaagatattttaagctaggtgatacttgatactgattttcaaagtcttattatatattatttccataatttgttctcattagatatttgacataaagtttacctttgtctttactttgtaataatgttttatttgttttttttattaattactttatttcttcaaatgtttaaactttttgcactaagcttgaatgtaatta

SEQ ID NO: 3338 - DNA, 749 bp, Glycine max
tcctcgtcacgtcacttggagatgtctttttcttttccgctcgtcgattccgcacaatcctctaccataccaaaacgaaggagacttaatatggatttcagaaaacaaagctaataacagtgctctgggtcaaacacccacatcactacatgaaagagctgagagcatttcgggttttacaaaggaacatcattttgaaattccgaccatgccaatgtgaccgaggttcagtgtaggttacgaaaataacatgaatttcatgaaaagataacgtttacaaagtctttttctctagggtttttcagaggaaacataaaacatgcaatggtggttccaaagtaaaaaaagatgcaaagacaagctgaaactaacaagaaacaagcgtagaaccatggttacctcgaaagaaaatgaaaggtcagattagggtttcgttctctaccgaaaccgcaagccaagttggaagatttcgcttcgattgaagggttcctctcggtgtgggtctcaacggagaacaatggcggtttgtggtggctaattgtggctgtgggtgatggagaaagtgcttgggacgttagaaatgaatttggaataaagaaaagagaagaaatggcgtttttcctaagctacacgaaagcataggctgaaatgcttaaatgagaaatactctcaggaacggaagcttcgtgcacactccagacatgttctcgaagatcccaacggtcagatcgtggacaagtgtcttataa

SEQ ID NO: 3339 - DNA, 820 bp, Glycine max
tttgtaaaaatgtttatggccattgggcatgattcttgaatagcctttttaccaagaaactgcatcatcattctagaaattagtaagttttgtctgatcacttcacaagagacctttaaaaaagatttatatggcccaagaattttggaaatgcatgcgcaaacccataactgaatgtaaagaaatttactagtttaattgtagttctcggctgagtttgtagccctgcctttgttttgttttgttttagaccgttttgttcgggcctcttttgttactcaaatgttcaccgttattaatggattttattatttgtagtttaatttctctgataaccattattgttattatttgttcttaccattattaatggattttattttcaataaaacaaaaaaaagttgaaatgtgtgtgtgcgcttgtgtattatataatgtgtctgagctattcttgtttgatcaataatacaggacacgtttaaatcacagatatttatcgggaaggtatagatgtgttgatgctctagccaaccatgcacattagatgaacatagactttatgatgtttgagcaacctcctactatgttgagccattttgattgctgatttaataaatttggacttgtgtccatcctggtaacaagcactccaaaattccttcttctcttccctattggggcactccctcataagtcatggaaatttccaaatacaccccaaacttttacttttgcaccacctctcttatttttaaattgttattacaaaactaccctcaatttctttaacctgtctattttgcagacctgcaggtcgact

SEQ ID NO: 3340 - DNA, 802 bp, Glycine max
actatataactcaaactaactaaactgttttgttggttacttggttttgagagtaccataaactatgcataccaaggctagtaaaatacaggtaacaagtaaagcatgaaaaaggcagattttatctgttaaagcataaacaagagtgtgacatctcaaataatttgattgcttgtgagcagccatggtttgatattggaattgataatcgagtaaccaacatgttacaatttacaaacaaatatttttaacacagcaatagatagactaccagacaccaatattattcataaactatccataccaaggctagtaaaatacaggtaacaagtaaagcatgaaaaaggcagattttatctgtgaaagcataaacaagagtgtgacatctcaaataacttgattgcttgtgagcagccatggtttgatattggaattgataatcaagtaaccaacatgttacagtttacaaacaaatatttttaacacagcaatagatagagtaccagacaccaatattataataactacgaatcaacacatgaagtaaagaaataagaatagatgacagtgacaatagacacaatttttcatacttgaagcacgtgattttttggagtttggtttcatagtgaattatgagtgaactaatacctgttcccacaccaccgatattaggaaaagtttagatatcgacaaggtaagtgcagaatgcatatgcgtatatgaacataagacatgaatacaaacttactgcatttttatagttattgtacacttcttccattcctgcaggcatgcaagc

SEQ ID NO: 3341 - DNA, 821 bp, Glycine max
ttgttactactccgcgtgttgttagaaaactcttctttaaaactcatgctttgcacctttaactactcatgcactgccaggaaaaaaatgaaaatacttgatacgctttaatttgctaaaatttgtgaaaattttaagggtatatagttgttggatgattcaaagtaatgggaatcacttgtatatccttaactaaataacaatgacaactcttcctcctgcaaaaatttctgataacaaaatggtattcatgtagcatttccttaactacacattttcaataagggattcggttattatgttgtttcctgtaatcagcaaatttgtttattcattgtatattattagctttcctgatttaggttttataaattaggaaatagaattattgtcttaatggctgtaaatgtgtcttcaatgacggtaaacgaatttgtattatttatggatgaacaacagaatgaagagagagcattcaagacaaaaattctgacatggtatgagcaggttgtcgatcggacctatgatttctttagcgacaccctccaaggtcgctcttggcttggtcttttcattgcttttggttcctgtgtttgggggtctcttgttctggtttgtgctagtgggtttcgtggttgttgtttctggttcgtgggtcacttttttttctcagtttcagtatcatggctacggaaagcttctgtgtacactttaccggaaaaaattacccttcctggtcgttttagtttatgatgtttgtgaaagggaaaagattgttggatcatcttgatgggtcttctatctgcaggtcgactctagac

SEQ ID NO: 3342 - DNA, 815 bp, Glycine max
agtaagcagtaagaatgcaagggcaagctctttcttatatatctggttcattttctttacaggaactgtttcttggcattcctttattttgttaagctcagaaagtccactatcagaagtccctctgtgaagttggagactcattgcctttgaatcccgttcttcggcagctaataggtcaggttctgatgaccgacctgcttttttggtaacaatccattcatatgaacttcccaactggaacaaaccggacaccatggcattgaatttggttactgacattgtgttctcaaaaaggaggtaaggaacaatgaaggggaaggatttcggggcaggaagaatgttcaagaacgacatgaatacaggaatataacaaataacccagattggaagctcagcttctgggacaaacattgtcaaaggaagaataatgcagaataatgtgaaagaatagaaagggaggattagctttctaagcagaaagaatagaaatattaggttggttttcttccagaaagcaatctgcaatgtgatgaaatcagaacatgtttagattgtattttacttcaaaacagtgcatagactgacaataaaagaaaatacatcaccttagaggttataatcgctggaaggcacaaacgaaagagttgcataggaccagaatgccatcgatgttgttgtttcctataagcttcatatgattcaggaagctcacaaagcacctgaaagaagtttctttagactaaaactgcaacctaaattgtacacatcaacagtttttcaccccaaaatttagtgtagcatgcctttcaatt

SEQ ID NO: 3343 - DNA, 823 bp, Glycine max
ttataccaaatgttccaatttgccaaccccttgtggtaggcttgacaccttttggacaatctgcacctcttgtaaggttcagtatgagtatctgcgcaagtatgtgaataaaagactctcttgtaagaactgtcgtggcacttttgttgctgttgaaactggggcggccccagcaaatggttcgtttccatattgtccttggtcatatgtggcaggaaatgggtatggaagtcattcatttgatggagttacatatgttccaactagtgccccctatttcaatgggaatggggtcacagggtaccattctggacatggttatgagtacgttccaaatgtttcatttcagtggggctctgctggagttgtcaaccaaaatggatcaactaccttacctgctgattctgttcatcgggccaatggaaatgtgaagaggggaaggccaaaagtcaagttgggagctgataagaggcatcacgtgatagagactatggtcaatacaaattcagatgtaccattctcctgtagtgaaccacaggaagataaactaagtagacctgacaagaaacagaaagttgttgtgggagccagtttcagaaatggctatgaagaaaagggttcaaaatgtgcttcagagttgatagtggctaacggaaatgatagcatgggacatggccaaaagccttcctgcacagtcgaagttcaaaccaaacagtgttccatggcaccagcatttgacgcaagaaaattattgattgagaaagccaggaaagaaatcaggaagaaactggaggagatgaagttgtcgtctgcaggtcgactc

SEQ ID NO: 3344 - DNA, 809 bp, Glycine max
gaataaaaatgtgggaagcagtctcctccccccttctacagaaaggacaagtcagatccaagatctgcacttgcctggcccttaaattaacttttgtaggtaatctgtcccacagtaacctccaagcaaacattaaaaatttgctcggggtcttgatcttccaaaggaagcagtcttgcccaatgcatagtctgaaactaaccatgaataactctaccaatggggatttgaaccatgttcgtcattttgtgggggattagcctctttcactagaccccaacccctgttggtttgcaaatgctagattgtactttctgaatttttaacatagggctatattgttaatgttaaaagtctgggaaatttatttatttttatcagcaaacataatatatatattaataaataaattgagtaccagaggtactaaagtacagctatataattgcccttactctggttccaataccgactaaatggagtctggttaggaaccacagccaggccataccctgatgttaaactctactattaatctatggttatatcctctagtgatacacaaacccttctcttaggttactagaccattgattaaaatgaattacaaagtccttctccaaattcctaagccatgtccacgtgaggaaagctgcctcttccatcattttgttgttgtcgaaggagtcattgtcgaaggagtctgggaaatttatatatcaatatattcttatgagacactaactcgaaagatgcaagaggtagtcctctgaaaatacaaccagatagaagtgcctaaagggtcccag

SEQ ID NO: 3345 - DNA, 1574 bp, Glycine max
acgccagcttgcatgcctgcagcatgcttccatttgtgtcacgcaacttagggtcgctggagaaagatacatttccaccttcattgagataagcatcgagggcgcgagctgctaaccaaacagaatcatatgcataaagtgcataagaattgaagctcacagtctcattgtctctttggcttttcaacctggagagaaaactcttcttgagatcagtatccggaatgtgatgatgaaatgcaacaacaccttgcaagagatccattgtgtcagtatcaggtgaatctaaggaatccagcactgaaggaagccaatctgttgcaatccaaacatatccactgtccatcattcttagcctcttggcaatagagaaaattgctaaaccatgatcaggatttacatgtagaacatagacacgcgattccattaagttcacctcatttaacaagtcactgatatcactttctgtggcaccaggagggaaagcagccttgtaagagatcttggcacgtttccttgacattgcatcccccaaaacagaaactccattccttccattgtcatcatctatgtaaatggcaattaccttcttccatctgtaataatcaacaaagtctgcaattgcatacatctgaaaatagtcgttctgagtagtgcggacgaaatatgggtattgtagagcagatagagtggggtcagttgccccaaacgatagaagaggcacatggagttcattaacaacatgagatatgacatgagctattccagatgacagtggaccaacaacagcaaccacatcattctccatcaactgcagatatgggtttttttagccctgtctatgcggggataaaatatgatattttcttcatccaaaatgctatttacacctttggcagtttttaatttgaataaacaagatttcaaattgttcttattaagctttattctataagaaaccaaacacactctaaggttgaatgccatttaagccattaaaattcacacataatccaatgccatattagcgtcaagcaacttgcttttaggtaaataatgatgaatatatatatatatatatatatatatatatatatatatataaactgaaaatggagaacaatcaaaagcaaccctgtatttcaattttattagaacttcgtcttacttttttccctgtttccacagttttaatcacttgaaagacttaatgtattcatgcttcaaatacaaagagattggggagaatgaagtggagatcgcatgtttttggaatcagtgaggaagtgcttagaggaggaaagttgagactggcattgtcaaaacacgccctcataacactgttaacagctgaagaagtgaagatttcaacaccatttgctgcccttggggaaagtattattcattcatttgaaaattggacagcttatacaaaattcaaaaatcgcttcatacttggcataaaaaattaattgtattggcttcaaagggtaaagttattgaaagatgcaatataagtgattgatattcttccatgaattttttttgctgaatatattcttccttagatatta

SEQ ID NO: 3346 - DNA, 798 bp, Glycine max
aaattccactcattccacccagttgctaccatcctcagctacctcaccaaggctcctctggtgagtttaatctaatcttattcaatgatgattgatgagtacatatccttatttctatataggaattaagttgaaagaaacatatcctctgaattttagtatcgagataaaattgttccaattgtgaagttaaatcattgttgttcagtgaatttcccttttttgtccttatgattttttttttatcaaaagttggcaaggttactcacaacagtactctcacaggttccaccgggtacaccagtggtgaatgcattgtcaaagcagcgtgcaatgctggaaaacataatgagggcttgtgttggattggccccagagaataacatgattctcgagtacaagtgaagcatgggaccgaagaataatatagttggggtagcctagctgaatgttttatgttaataatatgtttgcttataattttgcaagtgtaattgaatgcatcagcttcattaatgctttagagcggggcatattctgtttactaggaacatgaatgaatgtagtataattttgtgtactttatcctcctacccttctccatttttagtatatattagaggcaagcgacaacattaataatatacatggtataacgttaaaagtattttcttaaaacctacaaaatcagagattacaatagtaactacatggttacaataattttttactagtcaaaaatcaaatatcaatcctcatgcgattaaaattgatgctaaaattgaactgcaggtcgac

SEQ ID NO: 3347 - DNA, 806 bp, Glycine max
atcttaatcgttatattggcaccaagaagcctatatttgaccggtattcagtgctattcactgtttcaagtgcatggttatttgcactgtttctaacttcatgcactctgtataaccacaagccagaaagtacacagaatagttgccgcactgatcgtgctggacttatgagtgccgctccatggtaagattaactcaacactggtttttttctcaattaatgatctatcattttaatgcttttaaaggttaacatgattctctgttgtaaggaaaattgtagaaagtttgagattaagaaatgtgaagatagggccacatgaacaacaaatgtgttgtatgtatgtatgtatgaaaatttagttgtgcaaaaatgcttaatgattttgcctatagcaagaatttctaggaacatttggacgatttcatttccaaacagtggatttcaagtagtgttcgatcgatttcatatttaatcaatattcaattgattgatctgaggttatgaattgttcatataacataaccttacgagtcctactaccactcttgctctttttttatttgttctacatctacatgtatataagcctttaggggtttaagcagatgggcttaaagttcaccatttacgcagggtgtattttcctcgcttcttcccatgggggtctcctactttcaatgctggggaggcttttgctatgatggctgcttcttttgtttctctttttgaggtaggccttacactatacctcttaatagaatcccatgtctctcaatcataatgaaactgcaggcatgcaagc

SEQ ID NO: 3348 - DNA, 768 bp, Glycine max
cagtcgaatgcaatccaaaagcggtgaaacttcacctccatttatgaaatcttccagaaactgtgcagaataaaaacatcaaatttagtaaatacataggcaggaatttatcttgggaacagatcaaggacaaaatattagatatatctatacaaatgacaacttaaaattaaggaattggtttctcatcaccactgaaatatcaaaggaaaaaaatggtatcaagcattacctgtcatacatcagcagaaatacccgtaacaattaaattaacacaatgctttttcaagtctaagttttacaaagtcagctgagcaagcaaaagaaagatgttccacagtaatttcacccaaaagatagcataaataatcagggtaaatatgcaatgtaccagctaaagtcaaaggagagcaataccttagcaggatcatgtgtattaagtccaagaacaatacaatggaggaaataacgaacatggtgaaccaagaaaacagatcaaggccaaaatgaacacaacagaaaaatatgcatctattactgatgccaaaatgaacacaatggggaaaaaaaatcagtcaaagaggaattaacaaaccttggtatgaggccaaagttgatcaggagatacatgcatagtgcaaccctctttaccagattcccattcaacaacaaaacgagcaaggacacttgaaccaaagctaaaccacaagctcatcagtccaactgcctcaattctaaatgcccttctcatctgttcagttagtttgt

SEQ ID NO: 3349 - DNA, 790 bp, Glycine max
aacatgtttactatttgaacaagaatcaaaagtaaaggaaacagaagcttctgttccagcaaattgggaaacatctgagtcttctgaaactgttgaagggacatatctccagatcatagaggagaaggacaatattttagaggagctccagaaaggggttataaggcttgaacaagagtcacatagaagagaatttgaaagtagtatgattgcaaaaggcaacatggtgagaaccaacgagcttgagagagaatcctatccaaattataaagggaaggaatatgagaacagatgaaatcatgcaacagatgacttcactggaatagaagttcactagctccttaacctccattgcctcacagcttgcatagaaacaggctgaaattaaattattcatgtcaaagaagtttgtgataagatcacagcagctgaggttctagctacacttgaaattgaagagaagttgatgatggtggaacttgagtatgatatccatgatatggagcagaaactgaaattgcaagaggaaaattggaggcaatcagaacagcttgcattggatattgaagaggaaatggaagcaaaacaattacaaataaagaagttgattgatcaaatggagaacaagctaagaggctcagatgtttttcttcaaaaactcaagatagagaatagaagtttgcttgaaaatgttactagattgtcattagaaaggtaaaacttgttgggttttgttttaggattgggtgataaaatgtgagtgcgctactgcaggcatgcaagcttggcg

SEQ ID NO: 3350 - DNA, 770 bp, Glycine max
aacatgttctcctatttgaacaagaaccaaaagtaaaggaaacagaagcttctgttccagcaagcggggaaatagctgagtcctctgaaaatgttgaagtgagatatctccagataattgaagagaaggacaagattttagaggagttccaaaaagaggttcttagccttgaacaagagtcattaagaagagaacttgaaagtgctatgattgcaaaaagcaacatggaaagaaccaatgagtttgagaaagagaatcctattcagattataaagggaaggaatgtgagaacagatgaactcatgcaacaggtgacttcactggaacagaagttcactaactccttaacctccatttcctcacagcttgctgacaaacaggcagaaattattcatgtcaaagaagcttgtgataagatcacagcagctgaagttctagctgcacttgaagttgaagagaagaagttgatgttagtggaacttgagtatgatatccatgatatggagcagaaactgaaactgaaagatgaaaattggaggcaatcagaacagcttgcattggatattgaagaggaaatggatgcaaaacaattacaaataaaagagttaattgatcaaatggagaacaagcttagaggctcagatgtttttcttcaaaaactcaagatagagaatagaagtttgcttgaaagtgctacaagattgtcatcagaaagggaaaacttgttgggttttgttctgggattgggtgataaaatgtgtgagtgcact

SEQ ID NO: 3351 - DNA, 839 bp, Glycine max
ttgtttaagaactcaacttcatcaacctcagtgtggctgctaacatgaccagaggattgaatagtagcattcatatgcaatggagatgcgactgacacaattgaatccactgatgaaactgttggatccatattcaatgaagctgtgtttgcattattgttcaataggccttgtgttgacccctcagtttgctcatcatataagctgtagtcatctgaatctgagcacccttccatcatggactcaagcttcacaaacacaaagaggttgtggaaaagctttttctcaaaatcctcatctttcttgtgcaggtctttgtatccgtatcgcgccacgcatcgaaacatgtggaagttctttggtccgatccgttttacaaggaacctttcatcttctgggacagtgtagacagggagatatttcacacatacaaagacaacaacagaatggatggctggtaggtttgtgatgaagtgagaaaagatgtggggtactccacttgcaagctctgtgtatactaaccctattcccgggacacgaacaagtcctaaactcggtccaagcccgagaatccatgccattgagaccttactatgcatctcaaactcgtagcgtttcaccgtgccgtaatgccagacatacataatgagaagaaatgctccagcaattgctaggggagcccatccaccttgatcaactttgaagagaacagcagagaagtatgtgcattccacaatcaacgataagccggtgaacaccaccaccagaacccaatggcagcgccacacaagtatcatgatcaaaatcataagcaatgttgtaaccagcatgactagcac

SEQ ID NO: 3352 - DNA, 759 bp, Glycine max
gtttcagagacgataacaaacatgacttagtaaaaggaaaaataattttatcaatgacatgacttaaacatcaaacttaataccattgcataatacagtacgaatatgccaatcccatcactcaaaacactttgtaaaccctaaatatggagtatccaagtaggcttctcgcatttaatcatttgagtttggaggttaatttatactcagttctgttgcagtttttgctttatttccgcttggtgacggactttatcatttcttaccatctccccactctgcaacccttttttctctacttttaaagatataataaccaaaaagaataaatcagctcctcattatgtaagtgccatagctagtgtaaagcaaaccttagatatcatttcacttaaacaaagtagtttaagcagaagactaaaagttaaagaagatatggcccaaacaaaaagaaattgtacttaataatcttccctagctcatcataatcatattttcctaaccagcatatatggcaaacctacacattgtcaggtatagagtttaataaaatgtgataattatacccataacagaacattataaaaggaacatcaagatgaccaaattgggtggaaaacaatatacctttgttggcgaagtttttcagccacaggatctaatggttcttcctttattggttctactgtcttacccttcttttcagtggctttatcagaagattttttgggagccttttcagtagtttttacagcaggt

SEQ ID NO: 3353 - DNA, 825 bp, Glycine max
gtctagagtcgacctgcagaacatgtgcttacatgcatagaaacagagaacaaacaaaaacaaaaagtaggattttaggaaccaagcatacactgaccttgaagctcagcagaatcaggtgctacagatattccatcaccacctttcttttttatttttgattttttagaagacaacgaagagatatcctgccaaatccattttcaaaattaacaaatgaaaagaatcaaacatcaactgtaaatattatatatattatataatatttgtatatttatacatttgtggaaaaattatcaagctggcgactatgtattgcattatagtctttttgagtctgactttggataggaaaacttgattctgattgccttttttcaggtactgcggcactaccagagatctgctccttgacatgacctgagaaacttgaccaatacaataaacaataagcagatcaccattaaattatttaatggaaagccataagaccaaagtaaaacataaacttcaggagcaaaatgtgaacatagctataagtttgacatcacaaaaccaagttctagttttatcaaacaagcaaatcacagtaagcatcttgaaagttataattataattgacagtaatttgtcagcataaaatcaaacttcattatattatggcagtttctcttcataaaaagatctcattcagactaaattttcccaagtgcaaaggtatcacaccctcaatctctgtcagatcattatatatagaacaaattccacaatggtgatattcagggcagaaaccaagtactctgtttacctgcaggcatgcaagct

SEQ ID NO: 3354 - DNA, 773 bp, Glycine max
ggtagtgaatttgaagagatgtatgttggtgttggtgcacgaagggtgagggatcttttttctgctgcaaggaagcgagcacctgctataatattcattgatgagatagatgctattggaggaaaacgaaatgcaaaggaccaaatgtacatgaagatgacgttaaatcagttactggttgagctagatggattcaagcaaaatgagggcataattgtgattggtgctactaattttccacaatcattggataacgcattggtgagacctgggcggtttgatcgccatgttgttgttcccaatcctgatgtaaaaggaagacaacagattttggaatcacacatgtcaaaggtattattttatgccgtgctaagaatgttgtagaacactgatttgaaaaggataaaaataggattaaatcacaccaaattacagaagtttcagcaatttcttttgtttcatattaagaaactcttactgaggttatctctgtccagaaaactaccaaacactattgtcccataacatccctgtcttccctacataactttaaaggggaagtagtacatacttcagcaaaaatttccattgttcttatgcaaaatgtaagaattatttactggttgtgtgttgttcagaccacacgaaatactgttatttataatgaatgggggtttacaaaataataagtaataatggaaataatcacatactaaactgctgtaattaaaacatatcaaatcatatatttcacacacaacatagattaactt

SEQ ID NO: 3355 - DNA, 797 bp, Glycine max
ttgcacgattaccctgtgttgtggcatatcgtgcccatattttgacagaatggtatatttggtacaaagcgaagatacagtatatatcacttaccaatattcttttggacaaagccattattcctgaagcactctttcaatcttgcaaaccacttaacttagccttgttgctcaagtaaggctgaaattcaaattatttcgtctgtattactaatttgagaaagctgagaatttatcagttatagccagtatttttgttggaatgtttgacacctgtttttggctctatactacagagatttattacatgatgatggttgtcgagaagaacaaataattgcagcccaaaagattctcaagcttctatggccttcagagagaataaagctcaaccttctacaacaaaatttgaaaacttgtgctgattacactccaagtgcagttgcagcattgactatattaaaccatgggaagccaatgactagtatctaaggacatatctttctgcaagggctctgggattggattttttcactgcaaagtttgaaggtttgaagctggaggatattttcatttcatatgtaactgagaaaaaaatagctttcaaaagtgtagaatcaagttattgataaacatggagatggaaaagcattgctccatgttttgtttcagctaactcaaaaattcccgaccttgcattttttcttctattgcagcttgtttgtctgcattgatttactggtgtataatattctttatgaatgatgatgattatgatcatgatctgcaggtcgact

SEQ ID NO: 3356 - DNA, 824 bp, Glycine max
atccaggtgcttatctctgtatacccgtaacccatctaaagagaacaaatgctaatacatataagaaaagaaatattcccctctatcttgtaggtttgtttttcattatgtgggactatgttgctattcacgcgggactatacttaagattcttgattaccactgctaacgaattcccaagtaactactttagcagcaaatacaagctacctttcttatatttcatgcttcttgagagggtggaccttacctgtgaaaccaaaaaatgcagattatcttccattatggttgaacacttcctttctaggtgtttgtatttgcttctgatagatggtggaggaagtgatgaattttaatgatgtgattctgataattgtttgccattgttcacaggctcaaaatgatgagttctctgttatcttcaatcttgaagattacaaaggtaaatcacatttggttgttttctagattgaatctggtttttataacttgccttcatgttgacgaggttaagtctgtttttagagattatgtttaatactgcacataaaattttatgactaaccagtaaaagaaaattttctcaattgttgcattaatgtacatgaaatttcagtttttgatttttccattcattttgtgctgaatgctccaatttgagtgcaccctgtatcatagttgacctgatggtttcttgtatttatttcagcttcacgtgaaaaagcctacaagcagattgaagctgccatagcaaaatttagagaaataaaggacaacatcaatgaagggttaaaattctatgttacgctgcaggcatgcaagct

SEQ ID NO: 3357 - DNA, 793 bp, Glycine max
atgctttcagcctaagtttcggtaggtaattgtcacctcgaataatttagaccagttttttgttgcatttatttatatataatagacataacataagcatgcttgtttgcatacgtgcattatatatgtttttagcaatgttgaggacataaagttgtggtaagcatccgcaagcaaaaagagagcgggaaatgtctaatattatgaaagagggttttggagcatccttagatcatactgaacccaaaatctaagtattttgtgtccaataaacaagaacctattaacttcgaaagaagtaagacttgacatgtaatgctgtttgtctcctatatattgttttatgattgatttggatttatattcataattcataacttaaccatttcttgtggttatctcatgctggttgaagagagactgttttatgctgttagaacttagaagcatggtagtcaaaatcgaaatcttaccgagaaggggagttaggatcataaatcgggatttcataaaatggattgggagattgtatgaaagtcatatatatgctatacattcatatatatgttcataaaaaagtagcataattgaacttaaattcaaaatcataagtataaaacagtcctagtgcagcaatctgacaagtgggatgacagaagcagagcaaaaaataacaaagttataaaacacttcttgtaaagaaaataaatgagaatcagagatgagagacacgaacaaagaacccacaagcctagttgttgcagagaagccacttaacaaaacccactagagt

SEQ ID NO: 3358 - DNA, 800 bp, Glycine max
gttttatgcaaaactaatgacttagcatttgaatctttgaaaatctgagtgggaaaggatatgtattgttttatttcttagtattgaataacaatagtcctcgcaaatgtagagtccattatcagttaatcttttgacaatagtttcatgatgttttaaatgcttcattttttggagtatttaatgattgaagacctcgctgtaaacagatatttttctcagtgccataaaacaggataattaaatttattgcatttgcctatgaacagactttctcatattcttgttgtattcttattctttcttaagtttcttaaaattggttggcaattaagtctcatgatttcttcatcaattttctttgagaatgccagcttaaccttccagttatttatccaatttccttgcattggtacgttttgtgatcatttaccatcttgctgggttgtaccagacattttataatagtttacatttccactagaatattggaaagggttttggaggatgtgctatataatgtaataggctcttgatcatcaaacaatattggaagctggagtaaattaaataagattgtagtatagtacccttccgttatttgatagtttttaatagcagtgaaagccttttccttcttaggtggagttggctacatgaaaaggattatgactgattcatttatttttaaataattttagtaattcattttgaggtcttctctgcatattagaactatgccattatgtatgagtatgacaggaggttcttttcctgcaggcatgcaagccttggcgtaa

SEQ ID NO: 3359 - DNA, 847 bp, Glycine max
tacgccagcttgcatgcctgcagttctagacttctagtagtcacataaaacacccaaaggaaattcaatgtcatgggaaagaaaagactatgtcaaaagggtaatcctgtaatgacagaagctggtgtgttacaaaagatggggcatcgataggagctgaactggaagcaccttctggccatggccataccaacacctgagcagggattggtcacgcaccttcaggagtgaaataccttgtggccttaccccaaaatatgttgcagagatggcttcctcaatcacagactaagattgcatgttttatacattttattttggatataatacgcatttgggtaagcaacttaattaaaaactaattccataagctcttaccaaatgagctattttaaagttactaaaaggaacgtatttgataagcttctccatgaagctttaaaaaacatgtaaggtcataaactagatccatgagctcaaataaactcttccaaaagtccttaattggtcatgaaactccctcaataactggacattaccaattatcttataagttgaagctattaaagctagtttgtcatgaataatgtgatatgatatatcagcagtacagccaatactttctctagagtatattagaaatatagacattactagtttataagtggcaatactcccataggaagggtatttattttgcattggcattgttttgataaagtgaaagggtatgaatctgaaggtatatataattacaaaggacacaactagacctcaatcatatctgatagatggtttttgattgttatctgcttcacatcaccacctgcaggtcgactctagagaa

SEQ ID NO: 3360 - DNA, 793 bp, Glycine max
ggcccattgctttgcttgtacagatgttattgatattgtgaacagtatcaatgtatttgtatgcagaagtttaacacaatctggtggtctgattctttttctactagatatgcaaggataaagatgaagctgaagtttggttcagtggtttgaaagcattaatttctcgaagccatcaccggaagtggagaacagagtcaagaagtgatggtattccatctgaggctaatagtcctcggacatacacaagaagaagttctcccttgaattctccctttggcagtaatgaaagcctgcaaaaggtataaacttattctttatgtccttctattttctccctttttctctccattgcagttgaatttgtttgttaagataatatttatttttcctattcaggactgtggggatcaccttcgccttcatagtccatacgagagcccccctaagaatggtttggataaagcattagatgtggttttgtatgctgtccctcagaagggtttcttccctccagattctgccagtgcttcagtacattctgtgtcatctggaggatcagacagtatgcatggtcacatgaagacaatgggtatggatgcttttagagttagtctatcaagtgctgttagcacatctagccaaggttctggtcatgatgatggtgatgctctaggggatgttttcatttggggggaaggcacaggtgatggtgttttgggtggtgggaatcaccgagttgggagttgtttgggtgcaaaaatggattctctatttcccaaagctttggaat

SEQ ID NO: 3361 - DNA, 783 bp, Glycine max
atgggttcaaggttaaaaatggccattttggtgatgaacattaaccaagaaaacagcataaatacaaaagttgaaactcctacaaagtaggcattctgtgttccttgttcatgactgttttggtcggttatgctaattctgcggccttggacatatacacgttcatcagcttccggagctaaactgtttccaattggataattgtgctgagaaatttccctcaacaaccttgaaagcagcaaattcacatcaaaaacattgaatgttttttatttagcaagcaagaaaattaatagtaaaaaactcagtacttttttgttgagtaaaaaagtcacaaaatttgagtcacaaatcaatctttatcaattgcgattcattcctcttaaatgaataccatatttattcatttattttgttattatcctttattgctgttcctcttacctttatccgtgactgcccccattgacagaagggacaacaccaatggagagaaaaaccaaaaaggtcttatattataaaaccaaaacattcaaagaaacaccttaggaatcatcaaaaaccataagtgggaaaagggaaatggaggaaaaaaataatgctaagctttttggaaatactttattttaaagagggtgagatagccacaagagattcaatcaaccaaaagcaagatatgtagtggatccaacccatacccaacaaaccccacattatatatatctttagatcaaattagattattgtgtgcagtaccaaccagaaccaaactttgtgcctttt

SEQ ID NO: 3362 - DNA, 809 bp, Glycine max
cgatacccggactgcgtctagagtcgacctgcaggtttggcatgttgctgatgttccaaagaatgataaattccagtatacatactttgcacataaaataaacagctttgacactgcccctaaaaaattgttggcatcagactctcgtttacgtccagatagatatgcacttgagatgggtgatctatccaaatcaggggcagaaaagagcaggttgcttacctttactttcattccccttttgcttgaaaatatgatagttagtgcattctaaaagcaatacaaatataaaaccgagtaacagttttgcatggtcagtgttgtcttctacagttacaatatttagtacaacaatttgctattttgccttctgagttttcctaggcataacttcacactaagatgttgtgtgtctttcctaacagtttggaggacaagcaacgcactgaaaagaaaatccgagaagccaaagagcataaatttacaccgagatggtttgatttaactgaagaagtgacatcaactccttggggtgatttggagatctatcaatacaatggtaaatacaccgagcatcgggctgctatagataactcaggcagcattgatcatgttgataataaagaaattgaattcaatccatggcagtatggcaatttgtccaccgaatgagtggttttgatgtgtttttggtttttggatgccacagttagttgatgtaacttcttttattgatacatggaagatatttgtttctagctaacggttggccagtgtacattatagctgcagagcatgcaagcttggcg

SEQ ID NO: 3363 - DNA, 762 bp, Glycine max
agcaggaataacctgttttgcctgcttcagctccgaaccttgcttctctagaagctcttgaagctgtgaattcataacatcaggaaacagtatcgcactcttcaacgacttgatctcttccctttgcttcaaacacaaatccttcaacttctccacctgcaaattcaaaattcaaacgcccattattgaaacacacgcccttttccattcccaatgtgaatcggatccaaaacaactcttaaaatttgaatttgaaaccaactcaatcccaaaagctaactcatatagttataacttctccctcttatatatagtattttaggcataacattaaacatctccggccaaacgtttgcaagactcaacatttgggagtgatatgataatggtccgataacagatggatcaataaatccaataataatcactaagataaactttaatagtatcatatttaagcttgattgaagcccaaaagcaagttcataaagcgagaattgctcctattaatatacattgttttgtgcatcactgatcaacgtgggatctggaacaaaaacacaacattttttttacctctttgttcttgtcctcaagcatttgcttgagttgagaaacctgctgctcctgctccttgttgatgctgagaagctccctctcgctcctgagcaccatagccaatgtcctcgtgttgttcttcacctccgtcaaggccttcaccttctccttcttctcggaagcgccctttccgaagagcttctt

SEQ ID NO: 3364 - DNA, 761 bp, Glycine max
gatttattggctctcaggcagtcataaagatgaagagctttaatctgccaaatcatcaaagccataaaaacttgaataaacaagcaaagcacaaaacgaatgaagagataaagagagaatataacgatttgagcacgcatgaaactttgcaaaataaattaaatcaaacagaattacataacaattattgcattacttttcgacatgtttcttcatgaaactctttcttgttaggtgccttgtgaaaatacaggtaacctccaaatatttcatctgaaccttctccagaaagtaccattttcactcccaaggctttaatttttctggacataagaaacattgcagtacttgctctgatagtcgttacatcatatgtttcaatatggtaaatgacttcttcaagtgcatctataccttcctgatacagcaaaacaaaaaattacttctgagtgacaataaaagaactcatttgaaaaaaaataaaatgaagagagaatgagagatgattacctgaaccgtgaaataaagttcatggtgacgagtaccaaggtaatctgctacctcttttgcagctttcaagtcaggagagccctgaatggtggaactgtcagatcatgaagcatacaaaatctaatataatagcttccttgcgttgaagaagggtaacacaactcattctgacctttaaaccaatgcagaaagtatgtaactgtgatccccattgacgagcagattcagattcagccaaataacgattgacc

SEQ ID NO: 3365 - DNA, 754 bp, Glycine max
tccaatccagtgtttgaagcatttggaaatgccaaaactgtcaaaaacaacaattcaaggtaagttgcatgaatattttctcaggtcccattttctacaaaaattcccattttagttgattttacaaaattattggaatttgtggcagtcgttttggtaaatttgttgaaattcaatttgacaagaatgggaagatttctggagctgcaatccgtacatatctccttgaaagatcacgagtttgccaggtctctgacccagagagaaactatcattgcttttacatgctttgtgcagcaccaccagaggtgaactttctacaattatcctgaaaggaattcatcaacatacaattacctcaaaaaatctaatagttaaaagtttcttgataggatgtcaagaagtacaagttaggggatccaaggcaattccactatcttaatcaatcaaactgttatcaagtgtcgaatgtggatgatgcaaaagaatacttggagataaaaaatgcaatggatattgtaggcattagccaagaagagcaggtattggacaagtgcataagtgcatcacgttctaatgaagcagtggtttgattttatccaaacatttgatcaaataaaattttccttcacaggatgcgatcttccgtgtggtagctgcaatcctccatcttggaaacattgactttgtcaaagggaaagaagttgattcttccaaattgaaagatgataaatcactcttccacctccgaaca

SEQ ID NO: 3366 - DNA, 796 bp, Glycine max
tcgtacccggggactcctctgtgagtcgacctgcagcttctgaaaaatttcctgtggcttccaagagatcctggtatgtaaagccttctttaggaaagtagtagttatctaagacatgagtctttgtttgcccttcaagtgaaacaaaagcagcacggctacgccgcctcatggcgaaacatatacacactatgaaaattagagaaactagtccaaccaccccagaaacaatactcactataatttcccttgatgaaccatttctgatccagctatgttttgcagcatgagagggagatagagattgatggcaatgattggtaccaacacggcacaagccgttgttcccagcaaagtttgtgaaatccatctttctaaatgtagtggtgtctggaacagttcctaccagcttgttgttagatacattgcatattacaagactgagaaggttaccaattgatgaaggaatttcaccaacaagttcattgtcatttagataaagggactctagcatttgcaagttcccaaggctatcaggaattaagccagaaagtttgttatggctcaggttaagtgcaatctgaagagctcccagtcttcccaagtgaaaagagatgcttcctgaaaactggttgccacctagttccaggtctgtgagcctaataagattccccaaagtgcctggtatttctcctgagagcatgttatcagaaactttcaacagctccaagttcaccaagttgccaatttcatttggaagcatgccagtgaagtggttcctgctaagatcaagcct

SEQ ID NO: 3367 - DNA, 424 bp, Glycine max
agaagaaacatgaataaagatcaagtagggcgttcacaaatgtttataagtttgcttctaaataaaatgacaaagcactaactaagccaatatacatgagtacaaaacttcaaattaattggagttatcagtttccctattagcgatcctatcacttataagtagcagaaacatatgctgaaacagacatgaaatgttgttccaaagcatattcaccaacgcacacaataagtccagtgtacagttacttcaaaatgacaagtacattcatcaaacagttttaagcattgggagaacatgacaaaaaatagtcatcagaattacatattatttacaccattaatgtcaaagttgctgaatgaaaaacaaactcctttacacagcgttaacattaatattgcaagccaatttgaagggagtgcta

SEQ ID NO: 3368 - DNA, 853 bp, Glycine max
ttgcatgcctgcagctactgaaattgagttagctaaaagggtgaaagacttttccttcaaggagacagggtactttttatttcccttttccctgtaaaagatagtggcttgcattcttggggatacattgatgtattgtgttcacacacatgcctcttccattcattgattttttttttaactacatgaggaattttgtttgtatgattttgccttatggttatttgcggtataaggctatcaatgtcctgttattattttataaacattttatttcatttgctgaaggccatgcaacttgtaaggcactttttagcaagtgctatattggagagatgcacatgtgggtaaaaaagaggtgtaccattattctaattttgattttaaacaaaaaaatcttaatatgtttatgtgcatgtttgtgcaactgattataaattcatggggatttctataacatttttttactatgttgtctgcatcttgatacttgcatgctttaacatgccttcattattatgtatttgcgtttcactggcttctagcccttagggatcactcaccacttatgtacacgtttcaaagatgttgctattttttttatcacctgtcttgtgctgtttattgggttatgtcaatatctttttgttatcaagaattattgaagtcagtataacataaatgtgttctaaaatctaactcgatattggatgtttttaactcagcaccatatattactgtgtattatttggaattagttattatgtctctattcatccggacttaagttattttgttcaatgcttatttggtatttcacacgtgaatgggatggactaaacgtttgcaatgg

SEQ ID NO: 3369 - DNA, 764 bp, Glycine max
tataaaaatgatgatatttatgttcctaatttatggaatatcgccgatacagtaagagtggtgacagactcacggcaatgtagtgcatgtacagcgacctcagagtggaattcaaatttataaccccaattgggatacagaaaaataagcaatataacttatatcacccagttagaaacattaataagctgagaattttcaaatccattcatgaaaaaaaaaaaagcaagattatagaacatagaaacttgtctttatcgctagctctatcatttgaattgcagaaatatgccttcctaacttgaggaaggaaaaaataaatcattggtaaggactcgcatgaaagaaattgtatgccttatccattctcatcatcatctccatttcgcaacactaattacataacttctatcatatacagaagaaaaataatgagccagggaaatacatacaaactaactccgaaaacttcagctctatgcatggcaagaaagaaacattaacatgatcatccgcattcctattcacacctcagaacagcacctcacaaggggagaaacaaacccaaaatagcaataataataatcaagaacagtaacaatcaatcagaaaaaaaagttaaaaaaatagtaaacacaacaatttcccagaaattatacagaaaatagaaaaaaaaaaactcagaaaatgccaagaatctccaaaatgaaattgttgcagagagggcaattccccctactaaccataagctcccttgagcacat

SEQ ID NO: 3370 - DNA, 1629 bp, Glycine max
tgtagagtcgacctgcagatgcactggagttgcttctagttatatcaatgtaggtatatttttgggactctaatgacgtgtcttaatattatattatagtaacatttttaattgaaaatggaaatagattagttttgataacctgagtccaagatgccaataatgacgtctgacgagggagcagagttgtagaccgtgtttgggtggtggattttgacaggggtactttggtccttaaggaaatcgcaagaacgggttgtgtggaggagcttcagaattgggtctgggaaaacagacacaaccctaggtttctgggcaattgagttcgcctcctcttttgttaaacgagctgcaaacccggagaaaccatgcttgaagttgcgaactggggccttctcattccttccaattaatcaaattttctcatcataatatgtaatattcatttcaggttttggtagaaaaatacaacagttttggtataacatttgtcattaatttgatttaaaataaaaagaagtcatttgaaaataaaatattaaaaataaaattaaataatttttttttaaaaagaataaaattaattagatttatttatattcaaatctaacgtccaactgttttacttatatatataagagtattgagggaatagaattcttataatgtccatatcatatttatttcagaatataagcaatggtcatccggaagagaatctttttttttgaattggcggcccccatgtacacaatataaagttcacggttagtgtcatcatcacttccattccctgcttgaatgatgtctgcagctgtgttactgttacaggtttccatgaatcaactataaaatttcataattagttaggtcctaagtaaaaacttttagggtcctatttgaatgttttcgtaaaaaatttctgaactttagggaccttttaaaaaatttaatggaactactgtaccgggacctagagttgtgtaacctgaaatgatgatttgttggttatgtgataatactcaaacccactgatggaaattaaggccagagtatgtaatggctcctttatcccctattttttttgttttttttttcagaaaaaagaaagaagcgacttggacttaactttgtttcctacttgaatgtgaagataagttaattattaagggtgcatttgatacgctctagagtacagtacaagaagaacaacactagacaaacactgagttacaggacaattgtttcatctgtgaattgtttgatagccaatgaatagcacaaacaaaatcttaaaaattactgaaataacctttttaatattaattattttaatataattcatattactattgttattattgtcattattatatatttaaagataatatatattatgtgtttggattcaatgattcaagtcactcatcttatgcaattatgtgagctattaggaaggacttcaattcaattgaagattttttaaagcgtgaacagggctgagatttaagaaaattaattgtaagtagtagggcttcgattcaattgaggaaattggtacaatttttttgcaattgaaaaaactccattcaattgaatatttaatccttcaaatcacggattaaattt

SEQ ID NO: 3371 - DNA, 757 bp, Glycine max
aagacaccactcctcagactgacctacagctccaaatttactgtaagagtatgtttggtttggaaaagaaagtgaaagtaaagaatgtagaaggaaagaaatgagatggaaagaaaaggagtggaaagtaagatgattttttaggtttggtaagaaagaaaagaaaaggaaagtgtagaataaaaataattattttaattaataaaaagttgattagtaacttttttatttttatagtttgattatttaaatttagaatattgacactacaaatcatattatatatactttttttcatgcccttttcaataaaaatcaattttccttttaaaaaaagtatataactatttttatttattactttatttttattcatatatggttgaaaataatttctaaaatttctattacatattctacatataaaatttgctgcaaaatacaaagttttgaaacgctgctgaagacccatccgctagctttccgtccagtttaggaaggattgctttttttttttcatgggtcccactcatttcattctttcatctccttttttggtgtgttccaaactgtagaaagaatggatttttactacttttcattccttttccactccttcattctattttctttggtaccaaacacaccataaagtatgtaggttatagaaatgtcattgctgacaataatactgatttggttgatgaagattcagatagttacaagttaatctaacttctgcaggtcgactctagag

SEQ ID NO: 3372 - DNA, 802 bp, Glycine max
gtggttgaactcctatcttctcagtcaaacactcatttctccttagtttcttgcaggtttggtggttctcttaaactactttttgccaggtgtggcagccacaatcttgtaaaaacatgtttttcttcctttttcttactggtagtaaaccttgagtcgtgaatttcatatgcattttttaattgaagattgactaaatgttagttgcatttttaaggttactttgcctatttatgttattttatgtatatataatttgttcgaatataattttgcatttcaagtaagatataatgatccatgttacgatcatgttttgtttttctccctcttccaatctatcttaggacctggattttgacaacattgctcacttcccaagtttcaaaaatattgcacacaataccctctcttatttggcagatgtactgtgtttcattaatatatgcattctgacatcattgtacacagtacacacttgttcaagcaggaggagtattgcatgttttaatgaaggtaagttactgaaatgactcaactacccttttgtaattaaaatagatctgtgtcctcatctcttattattctttcctttttttttcactttcctcctccttattgatcctataacctcctccattgctgtcctcaagttaaaccactgaatgattacaatttacaacagccaccaaactatgaagcttccatccatctaacctacaggcctacacacaacctaaacaccaagtcttcccaaaacagcatataaacctccatttaaccagcagagcatcatccctct

SEQ ID NO: 3373 - DNA, 806 bp, Glycine max
cagcttgcatgcctcagtgactcggcaaattctggaacacgtaacacaataaaggatacgctactgactttaatattttcaaggaagtatatctcatccaaaaaaaaactaactagacaaatttaaaaaaaaataaaaaaaatcaatgatcagtaaagagactgatattttcaaataccttgatgctgctatctcacaatacttgaaaggtagtcacaacaacaaacaatgtcaataagaataaggcatgcccaaggaaaatgtgcaagttcagcattatgagccatttccctattttgggaatgaacggcaatgctagactttatgggttactagaatttaggtaagagagaagaaaggggaagatgttatctgatcattagattgaaaattacagagatgaatattatatgctgagtcggcaagaaactaaataataacagaaaagctaattctgttacagagaaactaaacacgattacaaatgaaaatgaaacgaatatgtatatctaataaggatagtgcagaaggccagccaaccatggactatggcaactggaaatgcaaacttgtttcttaaattgttggagacattacatatgacaagtaaacaaaatatgtgtgtgtgtgaatgtttaacttgcgacctaaacatttgttgacatatacgcggaactggggaacataacaaaacaaaatgcacaaccatttcaaaagctttgaatacatcataagtgaggaatgcagagaacaacacgagctgtgatgaagactaatgtttaccgtaagcactgttttgcgtggca

SEQ ID NO: 3374 - DNA, 842 bp, Glycine max
cccgggggattctcttagagtcgacctgcagagtacaaagagggttctcctacagattcttcagcaactgcgattttggatcggaacctcttctgcggcgtagcaatgggacactccaacgtttggaattctcacccaaaaaactacggtcctggttctcgcacttggtatgtcactctttcacttccatcgttaagtcttttgctttttattattaatgttttcttttgatcccaaatgtaattcccttgagtcgttgctcttaatgatttcccatgttttttattgtgtaatcatgttggttagatttgaggattagcatcatagcaagtgtttttttaggtttttttttttgttgcatttgtttttaatttaaattagattacgtatttgctgcctttattttgacataagtatgtttggttgcaccatataacttaagtgatagttttatagcttatgggtaggtggatttttgctgaccatatcaaatgttacccttttgattttactgggtctatacattttagcgtagttttagttcgtattggtatgctgatccaacccattgggaatgtgttttgatgttgttgttgcgttgctactgaataaacataagagttttggattattagattttaggttggtttagaggtgttgggtgaatttttctatagtttgttacatttacttttgtgtagttcaattttttttatgagctttgctgattgtgatggttggtttcgtgttctcattttcttgcagccgagtgtgtgggaatccacatggattgatcaggaagtatggccttatgtgcgcaggcatgcaagctggcgtaaaca

SEQ ID NO: 3375 - DNA, 807 bp, Glycine max
tgcataatcaaccaactgatatgacattttctgtggaatggacagaaccgttattatcatgatgttaatcagtagatcatttgccatctggcttccagatgttaatctcttagtagaatttttcattgcctagtattgagaataaaacagatttgagacttaaggttctgtatgcaatacaatgaattgtttattagcattgtctacttcttgatactgatggttgtcattacagtaatatgtcgaaatctataataactaataatcacttaagcaacaagttaaattctgtttttggtattttgtcatgggtgtctttaatgcaagtttatatctttgatgcttttttggttttatttttacaaaatagtagatgaagttcattaagatgtttttccttattgattgtgaaatggaatgcatgataatatttggtgttctgtctacctctcctgaattagaccagtcagtttaattctgttgctctctctgttttattttactctcaatctttgtgagtttttcggttcacttgagttgtactgtctctagaaggtcctattactttattggtcaagaaaaatatagaaggatattaatccaaccttgtgatttgtgtgcattacactcatacacattttatgttcatatagtcatctcaatctaattagttgttctatgcaaactttgttgtggaattgaactgcttcctgctgtgcatttaacttgccttgcttactgttctccttctgtgtgtctcaggttagaaattctttgaatgctcagccttggatccataataatctg

SEQ ID NO: 3376 - DNA, 770 bp, Glycine max
atctttaatcaattaaagtaaccattattattacttcactccacatataaagtgaaacttattcttgaaaccaaaacaaggctgaaaaaccttgtattagtgatggaccaaacttttggttgttatgaatctagctcttatccaagtgtcataagatgttaatcaatttgtacctttaggttcctccctttgtgaaaagattgaaaatgacccaaatagatcagatagccgctccaaagtagtctctgaagtggatcttttgaaagactacaataagaagcaaaaggaaaaagaaaacatgcagctataggtcaagaaagaacaatcaatttatctatgttggtaagcagcagtattctagacaggatactgatgacagaacacacaagataaatcaagaatagcttacagattctatgttggaagaaccaccatatttactctgaatctgcacaaatggcaagccaaccattacgtagataagtaaagtaactgaacaaagtataaacaagttatgcgaataaaaacttcttacactcactcaccttcaatgaaaagtcagttaaatctaacagaagcaacttggcctcaaagtaatgagctaaagccttggcaagcatctgttggtaaagttcttttaagacatgaaaagggaggtgtgtgagatatagttagcttaatagtaacaataaaaacatcaaagaatatgaaatcccttatcaatagaaaatagcagattccaagtaattaacctgcaggtcgactctagc

SEQ ID NO: 3377 - DNA, 849 bp, Glycine max
atcaaacatgtttcgacactaacacatattcaacacatgttggacactcttcattaagtgacttgttaaaaaaaatattttttgtcaactcacacttgaacaacaacctccatatattttggacacttgtttggacaccttcataagaatggaggcatataacaatttaacattaatattcactttttaacttttagaaaagtcagcttgaaatataatataaaatattgaaaataatgcctctaattcttttttgaggttcattatcatagaaaaagatgtaaaacttggcaagattggcttgaaaaagtgtattactttcttatatatatgataatttgatcttgctttgggattttttgtaaagaaactaagagcttacattgtaacataatgttttttaacattcttttgcgagactcattttcataggaaaaagttgaatataaaaatattgattatcaatatagatcttttatgttactcatatttcatttcatttgagtttctccctcccaccccctctctctatttttgtaggtggcagtgttctgtattgtaggcattagttgtgttggagtgtccgtgtccatgttagagtgagcttcatagtttgtaacacaaatctggcaaaatcaaactacaacaaaactttcaaagtaattttcttaaacaagttcataagagccataatgcatgctagaaaataagaatttctaatgttataatgaaaaattttaaaataaaagtttctgttactactaataatttagtattcaaacaacattctttgtcaatggaggaattgtaggatatacctttccctcccactggtacaccgattcaata

SEQ ID NO: 3378 - DNA, 806 bp, Glycine max
aggcaaaaaatagagaggccaggagagagaatagcaaagtgtggtcttgaagtttagaaagagaggaaggaggagaaagatagagaggatggagcaagctggatagttatctggaagcctgggaatggcttataccactaaggtgcccctgcacacaaaagaactttggccttgaaggtaggacagacctaatctttaattagaagaatggagatgggtaggatcaaactccttcctaacagaggagcagcctatcagctgaaaaactaggtagaacaaagagctgaaaactatctttcaggaattggcaaaaacaatgcatgaatactacattcacccatatcagagtttaagtgaagaatgatagcagggggaaagatagcaagaagtgtagtagtcagataaagcaaggacagaagtagtaaatttcatactgaagtactagtgtaaaagccacgatccccacagaattgagtatagagatactttggattttgaaaaccttagcacacatgcatatatgccaagtctgagtaaaaatagaagtggtatttccttcaagacacaggctcgtaaaaaaatgtaagaataatcattgtaagcataaaaacatatactcgcacagcacttaacattggcataactgaatgccttttattgtcaaaatgtagaaattcaaactttttaaaaaaataatacctttaattcatcacgtttccgagacttcaattgagaaagttgtgtctctgcatcatgtaaacggtcatgaagagctttcttctctgcaggcatgcaagctggcgcaa

SEQ ID NO: 3379 - DNA, 782 bp, Glycine max
tgtacatatgttttaaattaaatttaggataaatcgtgaaatttatccatttaaggcgtgaggagttgaaaaattgatttgtgaaagctgaaaatttaaatttagtctctacatatcttgaaagtgacaaattaatctatagataatttgatgattaattggtttctaaatttttgttgaaaaatataatttattgttaaattgatttttaaatattataatttaatgagaaaataatttaacacatttaactgtatactttgttcacatttaccgcatttactgattaaatttaaattttttatatttcagtaattaatttatcattgtaacacaattttgaggacaaatttatccttacttttattaatgtgatatattttattttaatattgactttttataataatgatggaaatttagaggaataaatagtgggcatcaatgtaacattagatatggtcaacttatataccaccgcatgtcaaatgtttaaggtctcactttttaaaatgatctttgactatctttattttaaatttataaaactgttactttgtttttaatttcttttttaattttaaggatttatacagagaggaagtagtgaaaacattctctctctctgtctatttttttgtgtacaaattgttaaaaaaaaaaaaaacagattagaaagtattttattttcaatgcctcaacgagaaccatgccgcctaggacccctataatatcgaaaggcacaaaaatggactctattattctcatttgttcagggaagg

SEQ ID NO: 3380 - DNA, 839 bp, Glycine max
ctagagtcgacctgcagcatagtaacaaagccatgcacttatttagttaatgcccacaaaataaaacaaaacaaaaaaagcagatgtgaggtatggcctacccaagaggaccaaatggtagccatataacatcccaacggaacttcggcaacctaccaaaaaaattattattatttaacagtaaaagatgagaagcacctacagatagcagaaaacaaaaccgaagagtgtgcatgaagcagttgtaaacatttgtttgttcctccttcccactactactgtgtacaagtttcttttattgtttatccgctttatttatttgggcccaatagtagagcctctagattgagtagctagaaaatccaaaccgaataccaatgtccagagttttataatatgtttcatttcactctatatttaccaatacgcagaatcctgtatggagcatataaaatgcttcaatcagtggttatcagcttatctagtaactgtacctcaacatgtaatatagccagaagattgccagaataacgccagtgtaccaggagtaatggatccatctcctgcgatgcaccgactcatgaagcaatcctatgatggcaaatgagcatgctaaaacagccacccagtctgttgaagttattcaattaaataagtttacagaaatggtcctcataatttgtgatatgtggataacaagcagataatgagggcaaagggtgcaaacagaatataaagggactaaaatcccacaactaatacaataagaatgaaggaaaaagttcacaacataaaataggaagcagaatcctgacaaaagaagtgaacctgcaggtcga

SEQ ID NO: 3381 - DNA, 866 bp, Glycine max
agagaagtagcgcagtcgcgtgatgctgccaaagcgacggaggttatcgccgcgagggcggcggacctggagacggaggtggcgaggcttcaccacgatatggtagcggagatgactgcggcagaggaggcgagggcggatgccgctgaattgaggaaggttttgggagagacagagtctagggttgagtctctggaaagggaattggcagggttgaagaaggtgaaggctgagagtgaggttagggttagggatttggagaggaagattggagttctggagactaaggaaattgaggaaagaaacaagagaattaggtttgaggaggagactagggataagattgatgaaaaggagagggaaattaagggttacagacagaaggttgagggattggagaaggttgctgctgagaaaaaaacagaattagatgagttggttaaacagaaattgaggttggaggaatcacttagagaatctgaggagaaagtgactggtttggagtccagtattcttcaattgcgtgaggaagcaaaggaagccgagagggtgatcatatcgctgaatgaaaaggcggtggagacggttgagacaatcgacagaggtttgaatggtgtacatggtgaagggaagaagggattgaagttgcagtggccagtggtggcagcagggtctacaggagctgttgttgcagctgctgctgtaatctacgtgtgctatgggaaacggaggtgattttctgtgtcggagactgatcaagaacaaaggaacaaggggaattccaatggaaggaggaaggtgtagaggttagacataccaggtctttagtagtcatagatttgctgctgcaggtgactctacagaag

SEQ ID NO: 3382 - DNA, 830 bp, Glycine max
gcagcacctgaaattcaatatacccacaaaaagtgttatctaaaatcttaaattagaccttatgagcaagaaaatatagcctacaatggaaaaatttatagacaactttctattataactgatcatagcggtagattaatgctcagggaacttattgttaggaattttataattcctaactaattaatataagctacatattataatatttagattagttatttacatttagataagtttaatataaagtgatctaattcaataagtccattagactgtccaataaaaaattgatatgaacttaataagcggaaaccagtttgatccattaggggataatgtgaatcctaataggttaaaacaaaagtcccccaagacaccaaatcaagaaacagtttctctcctctctatttgaagagaaaatgaaggttccataaggaagaaagtgatttgattgaggaaggtcattaaaccaattgttcgtgaccgctgtaagattccgctgcgtgttgatcaaactctatggatccaggtattccttaaaacctcttgataatctaagttaatgtattttggtgctcatttattattttataaggtttattaaaattcccaacacttgatgtagttagcaatgaaaccaataagaaaaaaatgtgaaatgatgccaagaattatgctacctccgtaaaacaaataacaagaacattcctcaaccccgaaacacaacttgatatggtttcaaaacagtttagtttcactttttttttgtgtcaagcttggatgatctgcagtaaatgactggtctttcttgaaaattgggcgtctaa

SEQ ID NO: 3383 - DNA, 786 bp, Glycine max
agcttgcatgcctgcagtaaaaaaaatacactatataataaaattttacaattttactccttccacgaagattgattcaattatttatactctaaaatatactttagatcgattcaaactgaaccatgaatgctccattcttccatagcaataaatcgaatataaaaaaaagtacgccaaagagacagtagatactatcccataaagcagaactatgcgcatattctaattatttactttcatctttaaataaaagattctacaaaatgcattgaatctttaaaacggtcaactaaaaacgacttgatgacatccctccctccctccctcccacagatttgtaagaaatttgtgacctatttaggactatagtacacccgccaccgaagaatggcatctgacataaaacaagtaacttaacaaaatcaaagaattacaaaaacagacgaaccaccaaatatccccgccggaccttgttagtcctttgcagaagaggacagcagcactaaatggctgaactcagatctttttctgggacaaagatgtcgagatggacgcaaggctacatgtaccctacgtattccattcacaaaaacaatcactgctgtcggagcataggtgaaactaaggtatacctctgtctagagcatttcttcaaagtgccacatatttacaagtataaattgctcatccagcattgttagcaacttctgcggctctctgcctcatcatttccatcacagcagctctacgccgtgaatcagactgttgctgcaggcatgcagc

SEQ ID NO: 3384 - DNA, 787 bp, Glycine max
cgccaagcttgcatgcctgcagctctcttgttttgtacattatttgcacaagttacgtttgaggtgtaaaatgaaaaggcctacacagtgagaaattattacatggtttgtgatcatgtgatcctaactatataatctcttctacatagtttacatgatacatagagattagtcgaaaccacactatactgaaccatgtaataatttctccaacacagactcaatttatgctcgtggaagtaccacacttgaatcaaagtattcattgttgtaaggatgcagggaaattttggttgcattattataactagatgaagtggatactgatgctgatgctgatgctgaaaaaattgggcttgaaccagccaactgcaacatgttttcaatttctttaaccacataattcattgtaggcctgtcaaaacttgactcttcaacacactgcattgcaatgtccacaaacttctcaaaaccgctcagtgctgtccccagatcaatggttggatcaagaatttcctcaagaccatagaagccttttgtcttgtcgatagcaccctttaccactttcacaatatatttccctcgctctattggccttcttgcagttatcagctccaacaatagcactccaaagctataaacatcacttttctcagtcaactgttgagtcatataatactctgggtccaagtagccctacatcaaaaacaaaaatccattgtcatcacttgattttgataagatcaaaataattattgaatataagatgctactgcaggtcgactct

SEQ ID NO: 3385 - DNA, 781 bp, Glycine max
acacagcaagaaaattgtagaagcacatagaatcaaaaaccctgcacctgaaatctagagatggcagtagtctgtgtacattgatacgaggaccaggcaatcactactgcaagatgctaatcacacgaaaattttccaaaatcagcaaaaagaaatctgtagcttttttaacctagtctcgcgctctgccttgtcttgatcatccgcttgagtgaacctaaccaggattggcattcgtcccactcagtagtagtaagaagaacctgcaacacgaaaaaaaaaaagaggctagaatgtagatttgatggagttttttacacaggtaaatactataatttgcatttgcaattgatttacctgaatttgtagggcagtaccaaaatcaccattgtctaatgcctgacaaagctgaaggagcttgtcagaagcatttttcgatatgtctccactatttaacttggcaaacaacccaccaagtctcttcgagttgtcttctatctcccgcctcttagctgggtttgcacgtgaacctccaagggcgtctgatgtctcattgaaaagccttgtcaaagttgtgacaataggcatttgatgccctggcacagtcaacacaagcaaatagctcaacaaatatgatgagtttaagatttgtatcacgacccatattaaaataagcacaagcaaactcatgattcttttagtgcaatttaaaattcccagatactaaaaaaaattaccaggtacttttgaagtatcagcagtctgcaaagtaggaggagga

SEQ ID NO: 3386 - DNA, 808 bp, Glycine max
agttgcggcggctccgggaccggtcgtcccttgccggccaaaatcgcgattcgcccaccgaaccgcccaattaattaggtcacctattcgttgggctcgctcgccactactccttttagcgttagtataacattttatttttatttttatatcaatcaattatcaattattatgtaatataaagttgaacgttaccacctaagcaaattaattgttaggttccaatcatatactactagtattactgtaattcgtattcttgatttcttatacaagcatagatttttgctcctcttttgtttgttgctctaacaatgaattgaagaaagcgcgtaattaattgatcagtaatgcgacgaatcgaatatcaagttgctctggcttcttgttgtgcaatttacgctcgtggttgtacttgtaatgtgaatcgttgttgttgttgttgtatttgaattgtgctctgtctcactctcagtcatagtgaagtgttcaaacttgaagctactgcgcaattgttgaatacaaggccacacttgttgctgagcttgactcaatcaaattggaccatttcattgaattcccattttattttgtcatagtttttaaattaaacaatgacttgataatttttctttataaaaaaaagcctaactaccattttttatttcaaatttcaataacaagatataaaagaattgcgcatgtctttgattagttgttagtggcaaaacattttggactagtcttattggtaaaactaatgctcaagttagctcttatattgagtttaaaagctgattagaagggt

SEQ ID NO: 3387 - DNA, 843 bp, Glycine max
aaaagaacaatggtagcgtggtcacagaaagtatgaaccacaggagtgatgccacaaagaataatgcaacgaacgaaaacctcaaacggtatttaacaattcactctgtacataaccacacataccataatacatactgaacatgtgatgtgatggagtatactctacagatcatgaattaatgttaaggataatagtgttatccatgaatttttcatctccataattttaagaggatatatacaactataaactgattgagattatttttcatgtttgaaatctagagtgagaaagctgacaaatatgacagaaaagttaaccaaatctttgcttgatggtgttggaataatgagtggatcaatgatggctcctgtgctgaaatcccaaccaggacaggcattcctaaagatgctccctggagaggtgctgttggcttcccttgatgcagtcagtaagtaacaacccaagtctaaaatactacttataaggctagcatggtcttcattatgaaattatcatacattaaaaaacacaagtttaatttgtaactgttagttttaaaaaaattatattattaattaatcagaaatcatggtaagtatgactcataagataattattcaacataccatatatatatatatatattaatttatgattggatgacaatataaaataaaactaaaactgtgaatgcatatattatttaatcttaaagaaccaatataccaatcttattcttatactggttacttgcataagcactgccacctaatctctttcttttaaacaagcagcatcaacttgatctctatttaatgctgcaggtcgactctagag

SEQ ID NO: 3388 - DNA, 553 bp, Glycine max
actgatggtgtctgaaaagaatccagaaactaaatggataatggattcagggtgttcatggcatatgacaccaaatagatcatggtttgaacaattttttgatcaagcagatgggttagtactccttggagataaaaagccttgcaaaattgaaggaattgggtctataaggttcaagtttcatgatggggctgaaaggattctcacagaggtcagatatgtacctgagttgaagagaaatttaatctctcttggtgaatttgataaaagagggtatgtgttcaagggagaaaaaggaatactgaatgtagttaaagactccatggttgtcatgaggggaattatggagaatggcctctattctgtagatggtgaagttgtaattggctctgtagccactgcaactggaagagttttatcaaaaactgagttatggcacatgaggttgggccatgtaagtgagaaggggttgattgaattggcaaaacagaagctgctatgtggggacataatggaaagattaaagttctgtgaacattgtgtctatggcaaa

SEQ ID NO: 3389 - DNA, 818 bp, Glycine max
gtattctgcattatggtttaatcagtcattttcttttaatcttgcttcaaatttttctagtggctcaacaagcttttacctgatagctatgtctatttttgtgtttaaattatcttgtggcagattctacagttagagaaaaggctacaagaccaatttgaggttagatgcacgttagaaaaggcacttggatacaggcctacatctcttgttaattcaaatgaaacgatactgcccaaggtttggaacattttcaacaaattttgagccaatgagtgtgcattttcttttgatgtcataattttcatttatcaacatgtgtgacacatcaagaattaatggaccgatttatatgtgctttcttaactattaaaagaacattgatgttgcaaacattcatacagttttgctttatgcatgctaggctgatggtgaatatatttgtggttcaatccttccatttatgtctctgcaatcataagattattttgcagcccataaatgattatacattgtttaggattaaaggcctggtatgattttcttgtcatgtatagctttctgtttgtcttgacttctcttttttgttttttgactccagccaacgtccaaattaattaaagaaattgcagtgttagagttagaagttatgcatttggaacaatatcttctctccttgtatcgtaaagcatttgatcaacaattaccctctgtagctccattcaccaaggaggaaaaagtgaagtcgcttccatcaacacctagagcaagattcgttgaagtttctaagcctgaggtgttaatcaaaagaggaagct

SEQ ID NO: 3390 - DNA, 769 bp, Glycine max
aagctgcttccttgtacaacccacaacttgttgagatgatcaaacaactcaataaggaagttggttcagatgtcttcgttgcagccaacacacaactcatgcacaatgatttcgtcactaatcctcaaacatatggtaattaattcattttaagcctttattctaagttagatagtttgaatatgaattactctcttcataaacaacaaaaaatttcttatttttttaatcttaaatataaataaatctcaattaactaggtctaatttaactagactctctctaaaatatatcaagtttcaataaacaataactttaaaaagtatttatttattaattaaaaataatacaatttaatttaattaattaattttcttaagaatactttttaaaatatttattttcttaaacttataatccagatggcaataaataactgacaactaaaggagacttaaatgattgcataatgaatttgttggtgcaggatttattacgtcaaaagtagcatgttgtggtcaaggaccctttaatggtattggactgtgcacggtggcgtccaacttatgtccataccgtgacgaatttgcgttttgggatgcattccatccatcggaaaaggctagcaaattgatcgttcagcagattatgtcaggaacttcaaagtacatgcacccaatgaatctcagcaccattttggccttggattccaagaaatactaatcatgcatacatcttccatacattacagactacagaataaaactgc

SEQ ID NO: 3391 - DNA, 810 bp, Glycine max
cttgtataaatgatagaggatatcttttacctgcaaataaatgtttcattttacaagctaaatataagacaataggaaaaagtaagtatattatacacagtgaaagaaaaattacgatatagttttctaggtattaggataccaatctgaaatgagtagatttgatatattcacaaaactaaattggagctgtgattatgttcaatcaacaagatactcatatattgtaataatatcacacaagtcaaattattttaaagcatcataaaagtagtttgtcaacagcagattcgtaccattccccccctctaaaaaaaaatggcataaatatgtaagcatgactcattagcttcttatatcaccaaaaatatgccatctctccaatctctctttgcaaaaaataaaaacggaaaggaatttaattatgttgcattctgtcgtaatcacatgctagtaaaatgagatgggtacactgttaccaacattttgttatctttttattagaaaataaaataaaaacaacaaacaaccaaacttatccacttggttttcttcccaactgtgcatgtgctgatgtgcattgcagcctaaagaagctattctgaagttgcaataatcattcaaaatttcttaccctccatgttcatgaaattaaaaaagaaatggcatacataaaggatactgatgaggtcaccatcaatttacctcatctttcatcatgttcgactccttggaagctgaccaagctttggtgatcatcaataccaatgttgaatcaagttcttttttttcagccaaattgtctatctt

SEQ ID NO: 3392 - DNA, 722 bp, Glycine max
ataaatagattaagatgtaattaaatccttcttagctttctgagattttgttgttaacaaattaaataccaggtctcttttctatattaaaaacctttttttgtcgttgcagattagttgttttattttctatataatttcagttcgtgcttatttatttatatcaaaatgcaaaggatgcatatatatacatacatatatatatatatatatatatatatatatatatatatatatatatatatatatatatatatatatatagatatggctttactaaggatgcataatcgtatctcacaaacccacacaacttaacgtaaatcataaaaattgaattggaaatagggttgaattaagttttcaaatttaaaaaaacgaccaatctaatttcacctcagctaaacttttataatttaatttgaactaaagtagaaagttgaaccatgtatggtgtggataacgtacagctcaggtgtgctaagttttgtccataacagcaggtggccacgtgaaattaaggtgctggaaaattgaatataaaggaaggaggcgtgttagattggtgcatattgtcgagtttaggtgcagaaggtaaacactaaacagagggataagataaaggatcgacggagagcatagtgcacagaatggtggaagtgaaaaaagaatgtttctgtatcattaatctaattgtatgatcatgtcatggcataggaacc

SEQ ID NO: 3393 - DNA, 788 bp, Glycine max
agtcgacctgcagacacaaggatccttattttcattggaaagggaggacattgtagaaaacctcaatttcctttcttcaaactgctctccagcaaaccagtatatatcatcaaatccaataatataaacagtataaagctcaccatgggtttatcaatagttgatcaatttttagatgatcgataaccagtgatcagctaccacagtccccgttaatatatttgtaatgagttcattcgttcaagcaccattaaagcaacttgtaacatctgtctagcttttctatcaggagtgcatctatcattctccatttccttgtaaataatgggaacctgaccataatattatcaatttatcagcatgaaataggcaactagattttacagcctgagtttcttccttttactaaaaagaaaattgcatattatcagaaaacaataaaaacaactttgttttgcagaagaaaaaagacaataaaataattgaagaattcacactacctcatcgaactttttggcccttataaatgccttcataagtgtagtgtaggtgaccacatcagggctaacacccttcataaagttatagcaatagcatcagggacttaaaaaatattgcattaatagaacataatgatgatatttccactgccaactagtaaggcttacactttcttttatatgatgataaacagacattgcttccatatatcttccagcattaccaaatgcattgattaacatattgagcatgacaatgtttggttcaattccctctgcttccataat

SEQ ID NO: 3394 - DNA, 793 bp, Glycine max
tatttagaaaaaatatcaattcttaacaatttagaccaaataactgctaaataattatttttaaacacaattttactttatttttctattatcaacagtacaattatttagaagttatcataatattacttacatccaacaaggaaacttattttcttcccatgcttagtaaacacacgttttaagttttctaacttcataacacatctgcaaaacatttcaaagttctgtttcaagctcccctgtttcatttcaggtaatctagtatctatcccctgcatatctgttgagataaaggtatgctctccataatgtcatacattattattctttggtacatgtcctgcccccctaccattagacaacaacttagtttaaactttaaaattttaaattaattatcaaacttgctctcctttactctctctttttcctgttgttaacatttaaagtgttgttctgaacaactagcccaaatgtggatttattcctctttcaagattcatatctgaaggaactgctatcaaaaggaggataactcgctttcaaatgcaccaagctctgaaattgcatcaaggagaggtaccccatacacaattttgcctttaacagtggttcagctgctgcgtagtgcatacatcttcctgtggtcatatcatgtagtctcaaagtcataatttaatctgttgttctgttgatggatgttaatataatatcacttaaatatacactatcttttttaacctttaaatttgagacagatttaatccaacatatctgcaggcatggcagc

SEQ ID NO: 3395 - DNA, 776 bp, Glycine max
aatcatgtcagttgcattatcgattgatgcagttgcttcatccaacaccaatattttgcttctccgcaacatggcacgccccaaacagaacagctgtctttgtcccatgctccagtttgatccctctccaacaactaggtaacaatttcgtacgaatcattactaacatgggaagaagtgcttacattatatatagttaaaatagtgaaagttgaaagtgcacctgaggagtttaagccctcttctttctcttgaaccacttcttgcaattgacacttgccaagaacctgagtttatattaagcaagaattagtccatatttgctctgaatagcaaagaaaagcagagtgtagctctagtaggtgttacctcccatatctcttgatcagaatgctgagataaagggtccaaattatatctaacagtcccattgaaaagagtaggatcctgaggtataatacataaacgtgacctcaaatcttgaaggccaatagaagaaatgtttatgccatcaacaacgatttttccgcttgctggctccatgagacgaaataaagcactgataagagtagacttcccactgcctgtcctgccaacaataccaatcttgtgccctccttcaaatgtgcaagtgatgccatggagtacaagtggcccttcaggcctatatcttatctgttttggtatagaccacaaaattatgcatttcatttgaactcccatgctttttaatattatatatgttgcaaattttaaagtatgcaattagacaaata

SEQ ID NO: 3396 - DNA, 570 bp, Glycine max
tccctgggatggtagcaggcatgctacttcactgcaaatccctaagaagatttgagcacagtggtggttggatcaaagcactgctggaagaagcagagaacgagcgtatgcacctaatgaccttcatggaagtggcaaagccaaagtggtatgagcgtgcactagtgataactgtgcaaggtgttttcttcaatgcatacttcttggggtatttgttgtcacctaaattcgcacaccgcatggttggttacctggaggaggaagcaattcactcctacacagagttccttaaggagctggacaagggcaatatcgaaaatgtgccggctccagccattgccattgactactggcagctcccaccaggctccactttaagggatgttgtcatggttgtaagagctgatgaggcacaccatcgtgatgtcaaccactttgcatcggtaattatccttatatttacatatttttctattcagctaattaaaatgggaagttaagaaaaaattgaagcgtttttctcctttgattgtgttaaatgatctataaagaatactgatggtgttttat

SEQ ID NO: 3397 - DNA, 804 bp, Glycine max
tcgacctgcagtcacccacaaatagcaatgaagcttatcctttgaaagaacaaaatgtgtctgaaggattaccaaaagccttgaaaagtaatgaaaagtataggtccaaagaagctgttacaaaattgtctgaacgaatagaagcatgtttctggtgcttccgtggtatcaatttgaagattggcacttctaagtttgtcataactagtgggaagatcatgcttggttgtttaatattgttcatctattatgttttcagaaagaagcaagctactttaaaaaggtactcacttaagttcatagctccatagtagaatgtatctcaagtatttgtttctgtatcctcttaacttcgaggatacaatcaccattgcatatcaaagtcatctttagtttaaattaaccatttttgttttttcctttctggtggttgttcttgttggaaactatctcttatttagggaaattgaatctctaatttgggcaatatatgaccttatatactttaggatctgcattatgctgatttgtatagctgtatttctttatttccttatatactttaattccactagcaatttgatagactcctgatccaaaagaaccgttttattcatataaaagagatttactggcagagtgatctgctatcctcctttatgagaccctagcttcaaacaaaaaatcagatttgctcaagccaattttgtgtgcagctaaaattgggcaagatctcaaccattgattggtcattgcacagtaactgataaagagagagaataagatgaatgtttcagattttgg

SEQ ID NO: 3398 - DNA, 794 bp, Glycine max
gcaatcacagtgaaaataaccagctattatggcgctacagggaagcatttttgaaatcccattttgcctcaatgctgtgacattttgggggtttgttgggggcaaattagagattttcatcctcccttttcaaaactaaaaaaaaaaaaacaaaaagaaactacttggatacagttttccatgcttctctctcctgtgtgaccaaacacctgtctacccagactacccatctatgggttccgtctgacagtatttttggcaacacccaaccaccattattttctctgttttaaactctgaagcacttcctgaaccacctctgttcttttctccatgcaatggccatgccattatctcagctgctacacgtcgctatctgagtttgataactatgatttatcctatacaaattttattcttaaggattgacatttagatgcaatgatattgatagatattattcttaactcaattgaataacttcttgtatggcaattcatagcatcaaatcattgtagagtagatatgtttgtgtattcctcttgtatttatctaatggaacaaggtgctgtgtgtatgctttatttctttaaacagactactctcagtgagcatgataatgaaatgtcaaggaggctggtgaaggtacttgagaagttgagatatacagatcgtgcatattaccagttgtgccaccttgtgaggcaaggtgaacaacccaaagaaggattcctccttctttcaaaccttgttgaggaccagatgggtggtaacagtgggtatgctgaatggat

SEQ ID NO: 3399 - DNA, 857 bp, Glycine max
agacaaaaacaagttgatcgaagcaaccaaaggcttgataaaagtgaacatacacaggcacaaaggacaacaactgagccccaccccaccctcatctaccgaaaagaaaacgaggataaaagcaacaaaaagaggtcagaagaggagtcaataaaggagatacaaaatttggctgaagcaattacaaaaaagaagcatgcacaggaatcgaaaaataatagaggacagagacaaggaggtgggcccaatgacgcaagaaaattttgaatttgtgagcacaaagccacgtgacgagataaataatattgggtgtgatgggcccttaatgggcctcacataaaacacccttcacgacaaaaatgaaggtgcagaaggcaatgtaaaatgtgaacaaaaaggcccaaaacatgtggagaaggtatactccagaagcagagggtgtagaaagcaaatggagcatgggcacactcttgggcttctaaaaaaatcaaacataaaggcccataaagtggtcagcaacgtaactgacagacacgatgagtactcaccagaaatgagaggtagtgggctgaatctgggaggtaatgtgtgatcaaagtggaaatgatgaggaggatgcaactcatcttttttttttttttttttttttttttgctctgcaaaaatatataatatatattgatttagtaccagaggtacttaattacaaatattgggatgcccaacacagaattggttccaaaactgactaaaatggagtcaggagaggaaccgcagttggctaccccaactagaacaaactagattagatacaaactgttacatgaaccctgcaggacatgcaagactggcgtata

SEQ ID NO: 3400 - DNA, 783 bp, Glycine max
caactaagaaccattcttacacacaacaccacttgcattcagaaaaaacatagacgaatccatccaaacaaagaaatctcatctatttaattcaaaatcaccaagaaacatcgtttagtccataaacattaaaccaataggtattgatatcaaaaaagggcgtaacctgagtcattagatcctactatacaacataaagagcgtaagtgtgccttacgatgagagcatgcgtgcaacgtgagagaagcaaagcataccgagaactgcataaagaatttcaatttctttaattttttaaggaatttgaaatcctaagattttagtttattaaaatactaaaatctcaaattcttcttaaattctttatccaaaccccatattttacaaagaatcaatctttaaaaaattaaattaccctatcaaatcaccccatccaaacacacgaaggtatttaaaaattaactaatgcttcatagcacttttttactttaacatatagtatgaaatttaaaatataaataaatcctatatcaattaaaatgcaactgtgttaagattaatgaataaagtggcgcaggccgctagggtctctgctccttagtcgttagatatgtccccaactccgtattactaaaagtgcaagagcaggaaaaaaagaatacaaatatgcaattggcagggccatgtatatttaactacttagagccgtttttcccatggctgaaggaatttatatcccgtgtagaagaaaaatttgcacatgcattcgcttatgaaatttac

SEQ ID NO: 3401 - DNA, 331 bp, Glycine max
ggtaactaggtgattataagttacacttacagaaaacaaaccgtcaggagacaagatatatctctaggtatcattctgattctgaactaaaaagtccccggccagcaatgcttccagttctgcaatgagttccaactcccattgaaaaggttgtctactccaacaccaattccaggaatcagattgttctacatcccaagctgacataccttggactgatatgtctttatccattgctaggctaaagagtcttgcatgtgattgcattaagggagtctcgttaaggcatctgtgtctccaaaacaaagtatccttcctatcaccaatcttt

SEQ ID NO: 3402 - DNA, 787 bp, Glycine max
agtcgacctgcaggcaatcgtcacatgccaagtacaatgactctttccgaagatcactctgagaagaattctcacgcagcatcttcgacactaaccctttcatctcgcgcctggccttctcatccttcccttcaagaaccacacgaataagcttaagtagaacctcctcgttatcactcccctcttcatttccattggcaacaccagtcgaaaccctcttcaaaacctccccagctccaactgcttcaagacgaagctcagacaggagcgatgccaccttctcctcctcatcctccgcccatggcgctgcttccaagtactccaaacaagacaaaaccccagcatcaaacccaatcgcagctgaaacctaagtaaaaaacccacaaaaccctgaagaaaccaaacaaattccaaacacacaggcactaaaaaaaaaaacaacaaaggaggagaaaaggcatgtggtgtaataaataaccaataacctaaacaacagaaattccatcctacaagtgtccataaacagtttcacacccgaaattcaaactcatccaacgataggctcaacctaacccccacagtttgattatataatgtaataaaacagaagaaacactaaactgttccaaaagagagggcgttacctttaaaatgccgagaactcgggagacatcctccctcatgagcttcttcctaagatccttacaatacatcaacctcaaagtctcaatgtaaacctcaacatcgtcgcagtcggcgatttcaacttcgtagggcaccggggagc

SEQ ID NO: 3403 - DNA, 780 bp, Glycine max
agtctaaactagctagatcttgcaagttgcaacaaatggttttctcgattaaagaaaaaaaaatagattgcctctcggattgtttctaacatctaacagtatttttaagcacaacacttttcaaacaactaaaaactcagctttttaatttttcatattggcgtataatatacatagtcacacttctcacattcacatcagggactcgtgggtatcatgtctgtcctacactcaccaagatatcattttgagagttgcaatggtacccaacagtgatgatatatatagacacttatatatatcatatactccatcaataattattatttctctatcactcttgttatcatattatataggctatcatacctatacttctctctctttctctctctgggtgacatctagtgttaagtgtccatggattattttccaaaaatctaagggttttgatacagcgagcaaatagttgaatgagtttagacatgccacacgagaaagaagaggagagattttctccataaaccaaaacccttaaattttctaaggattccatagaatttttctttcattcaacacatgatcagtcatcaacaaatagacccatttatccaatattgcaatggaactcattaaaaacatgaaattaatgttaaggtaaagagagagtgaccttctcgttcatgctgcgggatttggaggcaacatagttattgggatcaaaggtggagcttttgaaaaccttgagcttatcgctgagtgtgagattggcatcaagtt

SEQ ID NO: 3404 - DNA, 745 bp, Glycine max
acaaaatggcctgatatatttgactgtgtgctttataattatcaattactattgttgtctaggtagaatcatacattggcacaaaacatggcttcctctagatagaagtggcattgtattgattcccatatctttagatcataaggttggatgctataaagattgggtagaaaatactgatcaagcaaattaattgcattttaatgtataattagaatatgaatgcatctctgtttttttcatcattcttctttaacacactaccttcatttttgtagatcttatgcattatctttaactatacaggctgagccttgtagatgtctttgatggtaaaaagttctattttaattgatgtaaatatcttttggcagtgaggactgctttagttgcactgattgcgttcatgcctaccaacccaaatggtgcattgggatctttagactacaagaaagaagagaggcatacactggccattaagtctcgtgaagctcctccaaaattcgggactcctgaacgtcaaaagctgattgatgaggtaaaatgttgctgattgttttctcctcagattgtgttttctgtaatatactgtgctgctgattatacttgcctattctagatacacgagtacatgctaagcaaagcaccacctgttcctcaacctagtgccacagaggcttctgaagagaaccccagaaatgaagaggccgagacacaggtcaattcaccaaatcccgagtcctta

SEQ ID NO: 3405 - DNA, 803 bp, Glycine max
aaagactcaggattcagtgaattggcgtgtgtctcagcctcttcatttctggggttctcttcagaagcctcactggcgctaggttgaggaacaggaggtgccttgcttaccatgtactcgtgtatctggaataaagaagtacaatcagattgtagcacaatatattacagaaaacacaatctgaggagaaaacaacaagcaacattttacctcatcgatcagcttttgacgttcaggagtcccgaatttaggaggagcttcacgagatttaactgccagtgtacgcctctcttctttcttgtagtctaacgatcccaatgcaccatttgggttggtaggcatgaatgcaatcagtgcaactaaagcagtcctcactgccaaaagatatttacatcaattaaaatagaacttttcaccatcaaagacatctacaaggctcagcctgtatagttaaagataatgcttaataagatctacaaaaatgaaggtaatgtgttagagaagaatgatgaaaataacagagatgcattcccattctaataatacaaattatgaatacattaaaatgcaactacttcgtttgatcagtattttctggttaagtattcccaatctttttagcatccaatcttatgatctaaagacatgggaatcaatacaatgccacttctatctagagtaagtcatgttttgtcccaaagcatagtatgatcctacctagacaatgataataatggaaagttataaagtacacagtcgaatatatcagacagttttataactgcaagcatgcaagcttggcg

SEQ ID NO: 3406 - DNA, 790 bp, Glycine max
agcttgcactgcctgcagcattctgttgttttgcagaatctgcattgtcatttacagttatcttcagcatttaatagagagctacctcagctcataaggaacatgatctccctttttctcattctaattttgcagaatttaagatagaagaaaaatatctttccaattaccaaagaagaaaagtatggtctgccttatcaaagaagaagaaaaatattttaccaataaaaattaggaggaaatgaactcaaattagaggtggtgtatctaatattggtcataggtttcatctcagaaatggtagccgtaatattattttacactttcattgttaaatttcaatttatggaagttagtctaatcatttcaagcctaaattggatattattttctctttttacctaagaaaaatatatcaaggaatatagatttcaaatatcataccatcatccggttgtcaatatccatttcctgaatgcagcgaaaaaccatgtcagccattccatcaccttctacatctataagttcctgtgagaagaggaaaaagccatgcaatcataaggcagcaaattacactcatagagtttctactgagagaaagagaaagagatagagagagagagagagagagagagagaaatgaagaagtaaaatatcatttactaacccaagtaacttcagatttacaaagactaaatatagacaattctgttagagagtctaacagaattgactaactaactaacttctactagaagctagatgagactgcaggcatgcaagtctggcc

SEQ ID NO: 3407 - DNA, 532 bp, Glycine max
attggtggggctccctcgctgacatcattttacgattacgccaacagtcgaagaagcttatgcacagaaaaatctttttcaataaacactccgggacaagttttttcacatgtctccaatattatgattcgggaaattatgaattatattttttataatcaatagatttttatatagttaatgaagtgttaaatgattgttatgaaatcaatattcttaccaactcaatttgctaccgttatgcattgagatatgtcatgacataaccagcgaatcgaacctcatcccagaagcctgatatcatacataacttccatgccaagctttaaaatattccaatcgagtgttattggctctaggcaaaattcgataagatgacgataaaggaactaattactccactccaactctatccaggtatgattggggattaaaaataaaaatccaaagaatttaggaattaaaagaaataaactctttaaaaattactgactccacaactgtcaatgatttagtgtaatagtgagaatta

SEQ ID NO: 3408 - DNA, 597 bp, Glycine max
gtttttcctcactctctccatcatgttcatgtcaccactctccaagtagttactcccttgcaagtcatgctaacttggagagctgattgcatgcttctctgtaacataatcctagtgtacaccttaataggatgggtttcaattattcagttgttgaaaagtcattactactcagctaggaaaggcaggcatggaatggccattttctaaataatttgttataacaattgaagagagtgataacagggtaagaagtgagtgaaagctacagcctacacaaaagagagaacttactttgaaaggaatttataaaattgaatcaccaaatccaggtcattctcatataccgtactgagttttcccaggcatgagatgccaaatcttgggtctgttgtataaattatattaataacaatgtttcagaataaaatactatgaagtttggttatacaaatacaatagaacagattctgcatgcaaccattccatgtatcaaaatgctcaagttaaccccacagctatcctagactatataatgggaggaaaagaaatgtaaagtaaaataaaagttaagaaaggtcattcctttcaaatgta

SEQ ID NO: 3409 - DNA, 764 bp, Glycine max
tgcgagaagcacaattagcacaatacaactacatcttggttgttggagaggaggaagctaatacaggacaggtttttcccttttcccttagtcattaaattaaatttgtagtgtaattagatttcaattctatccccgccccccccccccccccttctctataaataaacttctgcccttttctttctgtaacatatctttatatgcatttcatctgtgtttgacctatattaatgatcttcttacacttggaaaattaagttggtactacttagaagtgtataaaggagaaagacagcttgctgagatgaactgtgcacacatagtgctttggctaaggattctagcttggttaaaagttaaaactttgtttaagctccatcttgattgattttaattaaaagcatgctagtatttgtctcattttagagaaattattaagttgtccaggcctaccaagtgttcatagtcccaagtcccagccaataactatataacacaattttacaatttctgtgaaaaatttaacacttaattatgtgttgtgaagattaatgggaaccatagtcctcttgaaccacctaacaatttatcctcattatagctcaagtaactgcatcaaatttgaaagggatttcaagttagatgtaatgtataagcctcagtttaatttcaataattctgattaaggttgtatctgttggaagttgagttttttctctcactgttataattaagatatctctgcaggtcgactttagagg

SEQ ID NO: 3410 - DNA, 608 bp, Glycine max
taagccgctttgctcagatttgtggcttctgctgatcttccatattttctgaggtgcgatgctgcaatttttcacacatcttttgcagagcttttgggtccactttgaccgtctgctacaatatatacatctgttaagggtctttctttttttttaatgcatctgttaagagttatttttagtcttttgtaacaaggcgtgttaaataaagttcatagacatattttaaattacataagttaataaacttgtcatatgtttaagttcaaagaattttcagaatgataaaaataatacgatgattttaactgaatagacttttcaaacagtattgtcactcttttctagcagacgaagaagttaaaaaatctaattaattaattgacatcaattttaaaaataaaaataacaacctggctgggaaaacagtaaaagggaaatagatgaagggggagagcatcttgtggttcccaccatgggaggttgccacacgcttgggaaaaaccataaacctttgatctgatgcaacagtgtggacgccacacgcttttgttttctattaaaaaaattcacaacagttatggatctgccttgcataattgtccaac

SEQ ID NO: 3411 - DNA, 808 bp, Glycine max
cgccagacttgcatgcctgcagcttttgctgcatctcatcaaacctgaaaaaccaaaaaacaaaattaatggaatcatatactacatcatacatacatgtactgtccctcaccgatttattaaacaattaataaacggtgcccagctgcacaaaattatgaaaaacccaacaaataaatgaagaaattaaatcaaaaccatatgttaaatttaaggttgaatttttattacctgtgttactgggaaccgatctccaatttccgggtccatgttcttgaatgtaagagaccaagatgatgtcttcctcaggagtccaaggccctttcttaatcccaattttatcacagcaaggtggtcttcccattttgtacaccccaaaataaaaataaaataaaaatggtatatctaagccagttatagctattagctatagcaacttaattctataatttctcttttgtttttcttcttctgggttgaagagatttgatccctttgggctcctcaattgagagaattatgatgatgcagagacaaggttctgcaactggggctatgttgtctattttccatgaggcagatacatatatatatagagagaagagaattagaggaaatagaagattaatggttgattcgctgactagctagagagaaaaaatgaggtaagtaaatgaagaaagaaagaaaaaaaaaaaaaaaaggagtcaaaacagacaagaaagccatttactcgtgcattgcaaaaagtcagctatgcgtccaccccttcactctctttctacattaacctttcacacaaatccgt

SEQ ID NO: 3412 - DNA, 799 bp, Glycine max
ccggaccttcgctagagtcgacctgcagtcatcaccgatcgcattcaaggtttataacttattcaagcagcagtaaaaaaaaaaattcaagcaggaaaaaaaaccgaaatgagatggtcttaaaattaaccgatcatttaatgtttctttcaatacaagataagtagtttatgtatgtattcggcaatagagacaagtacaacaaaatagagataaatatagaacattttctttttattgtttaaggtatggtaagaaaagaagaaagaacgaaaaaagtctcaaaaacaataaatactcattaggacactgagctaagtccagctagtcttagcagcaaagtcccaaattagagtctcccaagaacgacatgatgtcaggaaatcatcccagttactatattcgttgagagttgaaaatcacattttgaaaaacaaaagtatagatcatcaatcatatcatatcatatctggctgctattgtcattttgatgtcttcagtagtatgtgccaagcttgtgaacccaacctcaaattgtaaaggtgcaaaatatacaccttgcttcaacattccccggtagaacctagcgaacttggctaagtcactcttcttagcatcggcgaaattgaagacaggtccttctgtaaagaaaaaaccaaacatcccatttatatgcccaccacacatggaatgtcctgcactctttccaacttgaagaatcccttgaacaagttctccagtgactttatctaagtactcataagttcctggttccttaataagcttcagagtctctatt

SEQ ID NO: 3413 - DNA, 806 bp, Glycine max
aaggacacaaaaaatcatcacagtacaacatttcaccaatatttttcccaaaaaagaaaaggccaaatttattcatggcaacaatctgcccagaaccatgggaactacaatggatactagagcggcatgacaaaacatgctgagtaaaagtcaaacttggtcaagcttagttttcattttaaacttgagctgcctgacattccaaataatgaatgtcatcaaaccaacacaatgtaaagacaagaaaaggttctcaagctacgtataacctatatatcacatatctcttagtatcttagtttctatgctgtagtcaagatacttttacaaccctaagcaaattgacactacgcgtaatatctgtacacctttacacattatcaaattgttcagacttttaacttttattaagtttctctccttatacaattcacttcttccaaattaagaggttgggaatagaaagatcaacactaatgttaaacagtgaaaatttgtactatatccacaaaataataaacttataaccatcctcaaatttcacggcactacctccacatcgttccatgtacacaaggaagaagggaatacccatctaatgtgaaacaaaatcatgaaggcatgcaatatgccctaaccttggcagggtacattgtacaacctatcttccctctaaattcttaataccaagatagcaaactgcaaaagtaacaaaacaattcctgagtttcatacttagaacaaggactttacctggaaaaagacagcttcaccatgattgcattgactgcaagcatgcaagctgg

SEQ ID NO: 3414 - DNA, 787 bp, Glycine max
ctgcagccagcttacccccactcactattcaagcatgccctcagcttgaataaaatatgaaaactcccagagttccaaaatcaaagtactacatcaacagaaaacagaagattgcatatcttcccctctatgcaaacactttcctgagaaccactattggcacgtaagctcttcctcttctttgctttcctataatgttctgcttcagcgtatttaccatttctttccaaaccagctattagtacatcataagtacctaacacaggacaaaatcctttgctgcacatgattttgtatatctcaagtgcctcgttaactcttctaacagagaagtaaacactaattaaagcagtataggtagcactgcacttatggttatcaggtaataagttgaaaatcttcatggccaaagtgtgcttcctagcacaaccaagcctaaagatcaaaagtgaagccagatagattccaagagaatgcccagctctagtcattttctcaacaatttccgccagctttgaaaacatatttgatctgatcaacaagcctattaaggaaagatatcctgttctctcgatacttattcccattgtaacactgtacttgaaagccaacaaagcaccttcaggtcggcaatgactacaatttacctcaataatggttgagacaaccttatgatctaaagatattttcttatccatcatccctgtaagtaaatggtcaatagcaacaacatttctatttttcaagagaacaaatagaagttctttatctatattagtaggacaat

SEQ ID NO: 3415 - DNA, 793 bp, Glycine max
atatcttgttttacctattcttcttgtcgtttctcaatacgtttcaatggaaatcatgaaaccacctcaggtaaacacatcagttctcctctgtttctttttcttttttttggtgttaacaaactaaatgacttcttttgacagacagatccttctcaaaagaatcaacttcttattttaaagtttcttccactcatgattggctacttctcattatctgtcccatctggactaacaatttactggttagtttttcagaaactatattaataccatcctttctagccaataaattcttattttttatgattttgctataacttcaaacattctttgctttattattggttactaatataaaatgtatttatcttctacactatctaggcaagtccaatttggtcagaaaactcccgtaatggtatctatacaactcttctttatttcagaaaccatttccttgatatgcctgcctaatgtgggcaacaaaaacatacaaagaacaaatgcacgagagctaaaattcttctttcttattgaaacaatagcatgttcatcaagtgaatgctttctcatgattaaaattttttattaagagatggttttgatttttgacaacattgattgtgtgctagagcctaggggaaataaaagaaacaatttcattgctgcctgattttctatttcttttactaggtttataaacaatgtcctgagcacagctcaacaagtatggttgcgaaaattgggaggtgcaaagcctgttgtgaatgaaaatgctggtgggattatt

SEQ ID NO: 3416 - DNA, 637 bp, Glycine max
acaaagtgcttgcttgaactttatggactaaaggtaaaatttattctggaatcttcaattcttagtgagctatgtctaacttcaatgcttatattgcaagcctcgtctaactttcacaaattgattgctaaattgtttacagtataagtatgacaaaattgctttctgtttatgagatacgtccccccccccccccccctactcattattataatgaagggaacagctgaaaataatttatagtaaggaaattagttgatttttttttttacatttgtttgttgtcgactgcaaccgagaaatgacaataattgtgtccttgttggcaaggacttcttttctggcagctggcagagttgcagatgaaggttcggtctgatgtgagttctgaatactggctcaatgctaagtgtgcatatcctgacaggcaattgtttgattggggcatgatgaggttgcgccgtccattgtatggtgttggagatccatttgccatggatgctgatgatcaattaaagaagaaacgggaggctgaggtaactttcttttcttcttcagtaatatgtattccccctctccccttttgtgggtttgaacttggtttccatatcatggatatcatagactatagttacat

SEQ ID NO: 3417 - DNA, 793 bp, Glycine max
ttgcatgcctgcagaggatctgtttccattcccaattactacttgcaacatgaagctattctacttgcagaagccagattcaaattcaatctgatggtctcatatacattaattaatccattctagccaggtgagaaccaccattactattgctggtgccaccttaagcaaattcaaattcaaattcactctgatggcctcaaatacataaattgatccactctagctttgcttactcaccaatactttcccttataaaaattgctttactgtggaatttatcttgctgttgctgagaatcaacatttctttaactttgttaatgccatgccagttgccacaagattaatctcttccagcatgaatcattcttctagcaaaagcaaaattcattctgatggcgcctcactgccagcaaattgctgactcacaagatgccttcacttggaatacaagggttgagccataacaatgacatattataacagagctccttgattttctttttgttttttcaggaacaaactataaggcttgaaaatcaatgacatattgctataattccatcctctctctccaacaaaccagaataaaagaagaaatattctactcaacaactggtgaataaaaaagtgcataaatacacaatctgatgaaatctttctatctttattaagatcaaccatggtataatatctttcagacattaagaaacctattccaagataaggaaaaagaagtgaaaaggcaaaaaggcatacatgatatgaatttgtattgatgcaaagcacat

SEQ ID NO: 3418 - DNA, 698 bp, Glycine max
accataatgtacaattttgtttatcagcactaaactgtacaattatccaagactgatactatatatttagacatctttatatatcaaacacatgcatgtaatatatatatatatatatatatatatcatattgcttattatttgtctaaaactgaaaaagaaaattccttattacctgtccatacgtttctctcttctctatattctcttttcttttgtaagtgttgaataggttttaccgttctcaaactattttttataatttaatttctagtggctgatcagagcacttgcggagaagagaatttttattgactccacaaggtgatctaatacaagtacatacacactaaacactactagactcactagtgtgtttttgctgtcacccattagcttgatcatattctcgtttgtgctgatcaagagttattataaagtatagacctaatggctactatcagataaaacacttattttgtattttgatggatttccgactcattcacatatcatgttcacacttagcaccatcggtccgagcaaaaagaaatagcatttcaacattaatcttcagcacgttttaattaacattgttctatatctatttttttagtactagcactatttcgattgatctattaagcttttttgccttcaaaaataaataaatctattgaacttttctttttcctcct

SEQ ID NO: 3419 - DNA, 758 bp, Glycine max
taccatactgtacaattttgtttatcagcactaaactgtacaattatccaagactgatactatatatttagacatctttatatatcaaacacatgcatgtaatatatatatatatatatatatatatatatatatatatatatatatatatatatatatatatatatcatattgcttattatttgtctataactgaaaaagaaaattccttattacctgtccatacgtttctctcttctctatattctcttttcttttgtaagtgttgaataggttttaccgttctcaaactattttttataatttaatttctagtggctgatcagagcacttgcggagaagagaatttttattgactccacaaggtgatctaatacaagtacatacacactaaacactactagactcactagtgtgtttttgctgtcacccattagcttgatcatattctcgtttgtgctgatcaagagttattataaagtatagacctaatggctactatcagataaaacacttattttgtattttgatggatttccgactcattcacatatcatgttcacacttagcaccatcggtccgagcaaaaagaaatagcatttcaacattaatcttcagcacgttttaattaacattgttctatatctatttttttagtactagcactatttcgattgatctattaagcttttttgccttcaaaaataaataaatctattgaacttttctttttcctcctccgcaaggcatgcaagctg

SEQ ID NO: 3420 - DNA, 777 bp, Glycine max; identical to SEQ ID NO: 2326

SEQ ID NO: 3421 - DNA, 825 bp, Glycine max
atctgcacttcttacaaaaacaacttgagcactaccattgtctcttaacaactgagtttcagacgccttcaagggaccaaaccggcaaaacgttgtcattaaatcttcttttgatgggatgtaagctacaggggcaaattttaggagaagacaggttccaagtgattctccattgctatccggtctattgcaagaagtagttttggtagatcttgaacatacagatacgcttcttgactgctccaatttaaattcaggtgaaacgaaatgtacagtatcaaattctgtgctgattgaattgcattcagcaccagtaccgttcaaatcaggtatctctacagcaactttagtattgagaggcttttctgctgccttctctatgctattcttcagccctgttttccctatagcaagtttagtattgagaggcttttctgctggcttctccatgctattattcaacccttttttctctacagcaagtttagtattaagatgcactcctgctgctttccccatgctattgagaggcactccaacagcaggtttagtattgagatgcactcgtgttgctttccccatgctattcttcaaccatgttttatttaccatgacagtaccaacctcagccttagtacttaccaacaagctatgatcagtaatactcccaacatgtccttcttgggaaacatgtgactccagatttgaagctaataaaaccagttcttccttattttgacttctatttctctcaggaatatcgacaggtataggtggggatgtaaactgcaaatctattactaagtgaactgcaggcatgcaagc

SEQ ID NO: 3422 - DNA, 863 bp, Glycine max
ctcgtacccggttttacctctagatcgacctgcagatatgcatgtttagccataaaagaatacaaaagatcctcctaagttgttgcagacatactttttcttgttcctattttggtactaagtagctgcttatgttttgcatatcgttagaatatttcgttttctctttatctgcatgtattatacttgctcttcatctgttaatgcgttttgtttctgattatcattgccagagtggtttgcatttcttggtcagaaagttcctcctggttttcctggttctccgtattctatactttttaagacaaccattcttgactcttctcctatgaaacttatgaatgcgtctgtatattcatgtaatgacacttcgctgggctgctcttgtggtgattgtccttcatcacctgtttgctcgggttcagaaccttctccacccagaaaagatccctgctccattagaattggatctctaaaggttgaaacaatagaggctgatttttttttttataattaattttcatttgctttataactgaataaattctgtcctttttctttcttgaaagtaatgccttatgaatcatgatctagtggaacaattggttttctactgaaaaactgtctttcagcttctgatacatgttgtgaaactggttttcgtataatgatacctacaggtcagatgtgtagatttttcaatggccattttgtacattgtattggttttcgtgttgtttgggtgggcattgctgcaaaggacaagaggaaggaggagacttggatctggtgtggaaccattattggatgatatggttgatgaagggagtagttttgctaacctccaaaaggatggaactcat

SEQ ID NO: 3423 - DNA, 716 bp, Glycine max
ctcttccactgatgaagttgactctgcttcttctatacaccctcttcccacctctagtggtcatgaactacaggtctttctctctctctctctcccatttttttaatacattcttttcttattctctcctccatttatttaataaaattcatgtttccatctaaataataaatgaatagaagaaaatataggactccaatctgttcgtagaattaacatgacgttctatcaaaaaggttttaatcaataatttgcaactataattatgatagcaacctgaaggtttttggagtatttaagaacataattgaggtagcatcaatcatatttattcataatttttcataaagatcatgataaaatgtcaagtacgaccataatttaaaattatttttgaatgaaaaaataaataatagtaaaacaaatattattatcagtatttatcatctcactctatttatatatatttgtcattgtacagttctctaacttgattatagaaactggacaatattatagaatatttgttggttttctgtttatgttagtatacttgcacattaatgttctttgtgcatgataaatgtgttaattattatcaaaactataagtattatagttacaatggcattcacttttgatccccattgaccattgtctatctgtcttcatattttggtggattactgattggggtgtcatattctattgtgggt

SEQ ID NO: 3424 - DNA, 815 bp, Glycine max
agggtttttctttcctttggaaaaattaatctttctttccatgccactgttgccagcattaatgaataaatgattctagtggttacacggttacacctctggtgtgagtgagaagacacagcagagcgcacgcggggcacaccgagaaaacgatgagttactactagtagcgatgaagagaagggggcgaggtttcactgctacaaacaaaagcttttaccttcccaatgaaaactctccctctcttttcctgcactgccactgatacgctgccattcctggcataaaacaaaacacaatagagagagagaaggaacgatcaaatcgaggaagaaaaacaagttacccactactggccatcaatggagaaagatgagatggtttatgtttatgtttatgtttatggggcacggaatcaaaatcaacccttccttctctctctctctacactttgatggcaatccctccactcatttaatattctcaccctatttgtcctcgatcttctcaccacagtgattaaaaaattctctagtcccacaaacaagtaccaacatttaacagaacattagggatttaatttatcaaacctaatttgttcttcttgttagctccaaaatagatgtatttagtgttttaacattagcgttagttactattaatactaaagtctaaacatgaatatttactatatgatgatgcttacttctctctcttcctatggtagtatatagtatactagtatgatctaatttaatacgatacagtataattaaccatggaaaaagcgcgtctgcaggcatgcaagctttgcg

SEQ ID NO: 3425 - DNA, 784 bp, Glycine max
aacagcagagatgggaaacaagacaattgccccatgaatattctgtctctcaacactagaggattgggcagtggagtcaagaggtcagccattcgaaaattaaccctggccaacaaaattgatgttttatgtattcaagaaaccaagaaagactccattgataagaagctgtgtcaatacttgtggggagatagcaatgtttcttgggaatgccttccctctattaattcagctggcggtctgctatgtatttggaataatgattcctttgtggtgaataggaagattgtgggaagtggttttattatgctggaaggcctgtgggtaaaggaaaataagaaagtcatcattactaatgtttatgcgccttgtgatctacaagggaagagaaatcaatgggaagagatcttgcatctgaaatcctcttatcaaaatgaattgtggtgtatcttaggagacttcaattcgataagaaatcaaaatgagagattgagctcatctcagaattcggttaattcatccagtattgctgaattcaattcctggatttctcttatggcagtagaagagggtagatctattggcagaaaatatacttggttcagacctaatggaagtgtaatgagcaaattggacaggttcttcatatctgatagttggttgattcaatggcctgacacaacacagtttgttctagacagagatttttcagatcattgccctatccttctaagatccaattttgttgattggggacctaagcctttcaaggtcctggattggt

SEQ ID NO: 3426 - DNA, 738 bp, Glycine max
aagaggaaaaaaaaaggtaagttagccaaggtccactgattcacaaataacaatttcttgcagaaaactgaagataatttcacctctgaagtttcctcttttcaaaatttcaaataacaaaaggtataccaaaagcagagcaacaagaacaagagagacacaatcatgaaaaagttaagagaaaccatgacaacagtaaaaaatggagtaaaacttcagcatgctcattaatgaagaggaaaagtatgttcccctgactttaagcatttcatgctttctatctcaaaggtcctccaaatagtagaaaaaccaaatcaattgcatggagagaaaaaaaagccttgtaaaccttctactctctctcctccaagagctcaaaaggccaaacacaaacagaatgtattttgaagctttacttacaacgaaagaataaccagacaacaattaacaaaagtcacaaatatgtagcttttaaggatagttatccacaatagcctggtaaatgttacaagttcataaaacacccaatagctagtacctcctcaaattgtactattgtctgaaggccaacagacccagaaagaatatggcaatttacaaggaatgtataatgtgctataaatagaatgtatctgaatctgatagtaaaaaaggaaactactagccacaataaatgtatatgaagtcttcatacagtttggtaatttagggaagtgttatggatttaaggaagttatt

SEQ ID NO: 3427 - DNA, 770 bp, Glycine max
agaatcctagtccgtcaaccttatgggctgagctattttaagtacaactccaaacatgggttatggtggttaatctgagtttaaactttaaagcgggttgaattctgcgttacatttcacatattcttatttaaagtgacaaataattgactttaaaatattaccatacaatttaattggcgccatcaaaataaaattcaaaccatatatagcataataatattgactctgaagagagagagagagagtgagtatctatataaaaagtgataaacaatatgctgtgtcgacatatgctagagcagaccacaaaaactataagcccaatccaaataatggaggcaccaaaattaaaaaatgctctaacatctgttactgcaatgtgccaatgtcatactataattttatttcttgactgcaacttcaatgttaaataatttattaacgtgcaataagattacatgatggtaatctttaggcgcaatggaatgtagcttcatattgagcggagccaatgaaagatgatcaagcgtcaaaatcttgcaataaattctcaacacaatccacacggggtagctgggttttagatgacaactaattagtgcatttaaggatcataatatcacaacgccccagcaaataaagctatgtttccatcctttgaatgcgagcgttcaacttgttgctgattatatggtccacataaaagacatgacacaacacaaagacttttcaaacaagtggcaatcaaccactcaaaagattatttt

SEQ ID NO: 3428 - DNA, 866 bp, Glycine max
tgctctgcgctattagcttatgaaactgttaacaagaacctctcaccaaagccggggagcattccaaactccctattccagcatcattgatagcaggtgcttgtgctggagtttgttcaactatatgcacatatcctctagagttgctaaagactcgactaactatccaggtgtgtacatataaaaccaaacaggctcatgtttcccacatgagtttaatttctattattgtcagtataaaagtttttacattattaatcaagaaaaaatcatgttagctatgacttttaaagagttattttaaaagtcaacgaacatactatgcatgatgatttctgattagttgacaatctaaaaactctttatagtgtcggtgcgtagactctgttactcttcccctatgtatcttgtatcatcataccaaaaataaaagcaaaatttaagttgaattagtaattttgcagaggggtgtttatgatggtctactagatgcattcctgaaaatagttagagaagagggtgcaggagaactttacagaggtcttactccgagtctgattggagtaattccatattctgccaccaattactttgcctatgacaccttgaggaaagcatacagaaaaattttcaaaaaagagaagattggcaacattgaaacccttttgataggatcagcagctggtgcattttcaagtagtgctacctttccacttgaagtggctcgcaaacacatgcaagtgggagccctcagtggaaggcaagtttacaaaaatgtgattcagtgcccttgcaagcattcttgagcaagaagggatccaaggattattaaagggttgggacctagctgcatgaagttggtgcca

SEQ ID NO: 3429 - DNA, 784 bp, Glycine max
acccggcttgcgtctagagtcgacctgcagtaagtgaggtaagatgattttttttttctatgcatatctcaaatcaaagttgtattttctcaagttaattggtagttacttctcttgaatgttaagtgcttatgtcatattttcagacaagccatgttactgaagtaactaaaccaacttatcttatactgccatgctaaatagtggaaatgatttctcaggtggaaatagatcttctgaatggcgaaaccagatttttgcaaacagatattatttacgattgtggacagagtctaaaccctgctgtggatttaggacaggtaagctaactacatattttcaatgcaagctcagccctaaccaaggaataacataagaattgggtccaaaaatagttttaattaacacaacttctcacatcaagaccctctgagagtgaaaaaaggacaaagaactggcacaccatttcctaagctataaattatatttaatattctaagtggaaaaggcaagagtcaactccagatcactttgccaaataggctccaagtgtgatatcttgttatgaaacaagatatcagagcttgatgagccttgttaacaaccaaagaggctccaattccctatgctaaaaatgtcttgttaagaaccaactcaaccacaaagcctgagatactagttggaggtcctagaatgtctatggtctgttacaatgtacaactattgttcagttattacactatgaattaatgcttatccttctcaacaatttaattgtatatat

SEQ ID NO: 3430 - DNA, 637 bp, Glycine max
ccaggaaccactatcatacaattttaagggacaacattattgatgactcggttcattttttttttttgaagatgaacacatcaaatttaagagaacaaacaattcataattccatatgcataaactatatattcatatttaagcaaggtttgggtcatttgactgtttattattctttggaaataaatagaattatttattaaaacagtgtttatactataaaccaagtcactgaaggttaggtcaagtctaataacatatcttgagtcaatggcacttgggttattcatctttataaataaaccctatcatattatgcctgttaagctgttaccgataataagactatattcttggctgtaacattatattggtggatcagcatctccatcccttcaaacaacctctgtccaataaaattttcattgtgcatgtgcataaatctagaagcgtacaagtacataaaaatgttcagcattgcacatatagacaggctatgagaagtttgttaattgtaacacataccttggtgcaaacccaacacactcaatggaatctgaatgagaagcaagggcattattatcaacaacctgtcaaacatgaaactcattattagagacaaagcaggaagctaata

SEQ ID NO: 3431 - DNA, 824 bp, Glycine max
caagcttgcatgcctgcagcgtgcccttgccctctacggcaagcgtgggggagcctggatgcactcatagggcgcctcagagctgcctttgaagagaatggagggaagcctgaggctaaccctttcggtgctcgcgctgtcagactctaccttcgcgaagtgcgtgattcgcaagccaaggctaggggaattagctacgagaagaagaagcgcaagcgtccccaacaacctcctttgcctccctcaaataatgcaagttagtaaggccacataaataacctcataaatcctcttctacactcactaatttaagggttttcatcatatacactttaatatatgctcatacattgatatataatgtaaaacagtttttaataataataataataatataaaataattttgcactctcaatcaattataaatttaaggtctctttaatggtatgttttattaaaaaaacactcttctctttttttaatgatatgtttaaactggttcaactattgattaaaaaatttattactgtaccaaactcttgattttctcttgttgctatagcaagtctcataactaacttgcatgtgtcatgttatcttcttttcgtttggatttaattttacatgacattggcagtttagcaattagcattattatattacatgtatatctaactaaattatatatgctccttaattttttttttgttggtttttttggcttactaattgtgcagaagttgtgatttgacaatgggctgggggcactgcaatatgggcacaccctttgcaatggcattagaaaaatattgtgtaaaccta

SEQ ID NO: 3432 - DNA, 832 bp, Glycine max
catgatacgccaagctgcatgcctgcaggcacttgaccttatacaaggcaaaaattttctgttgctgatggactcatgtttggaaggtcatttttcaaatgatgatgggactgagttagtgagattagcatcacgttgtttacaatatgaacctcgtgagagaccaaatgttaagtcacttgtgactgctctaaccccccttcagaaagaaacttcggtatgcccttctttttgcctccttgctttttgtctcaagttcttctattactagtcaatcaaggatcgaactttacttggttgatatgtatatgttagtgaagccagtcggaagcttagaaatgtatagggtttaaagtttgtggtatttatcaggtaccatcaaatgttttaatgggcataccagataggagtctatcatcaaaggaaacagtttcattgacgccttttggtgatgcttgttcaagaagagatctgactgcaatacatgaaattttggaaaacgtaggctacaaagatgatgaaggtgttgcaaatgaggtaattcatcatttctatttcttcctcaattaggattttattcagagaatgctgtaggaggcttatttttttgtctacataatctgcttgatagatgtagtttggaaaccttgttttgccccccactcacacattgtgcaatgctattgagtttttaccaccctatgttccagttttcagagtgttacttaactgttctttaagtctcttccaattggctcagttgctttgagggcaatgtttagtgaattgccagatgcttttccattgtgttaaaaaggtcacatgacatcat

SEQ ID NO: 3433 - DNA, 819 bp, Glycine max
gaagaaaatgattaggtagtctatcacccagatgacttatgtgtgcaaaggtcaaaaaatgattcacaagaaaagacactcaaagaaggaactagagccacataaacataaatgtagtgctatagatcaaaaagagccaaagtaataagatggaaaaacatgatcaattctaacattgttttcttcattcattcacaattttggagaaatggccaaaatcacaatcccactttggtacccaaatgatttatatattaatacagacaaggagatctatgacagttaagaaagtgaatggctttattaataagaaggacttacacggaaatctgaaatttatggtaagagtacatttcaattttcaaagagacttaattaaacttttttacacttaggtattcattgaagaatgcaatttcagcctctattcaatctcttccactcttatattgaagttttagtttcgattatgatggagatgtttgtttacccaggggagaagtcaggtaaacgaaagacctcctggtcaacatttttagattgggatatttacattcctacatcagataatgcatgggggagggggattcaagcactccttcaagcatgcagactgctgaggataacagaaggcaattgaataaaaattctattggtcaaaaacaaaagaaataaaaattctaaattattcacttgcttaagatgcaagacttacaatagtcacaaaactatctggataaaatttggaaatcaaaactaacgaaagataaaggaagaatgttgaccaatgaccacacataagccaaaaagtcagaagat

SEQ ID NO: 3434 - DNA, 787 bp, Glycine max
aaagatcacgaatactaacgcgcattgctgatatgattgagaaacactgatgagcatgcaacactggaagcatggaatgatggcaagctttttgaacaggcagacaaagttgaattaccattggtcatgcgtctgcttcattactatgctggtgagagagaccagtgagacccatataatatgtttatttatgtacttatttatgagtaaatgttgtatgcattgacagtgtaaagactttttacactataattcaatcgtaaatcaccatgaatgataagtttattgatttttataataactacttaaaaaaagtcatatcaacaaggattttagatatgtatagaaattaaactttgttcattcagatatactcaattatgtgatttttatgatgatttccgtccttcattaattcaggttgggcagataaaattcatggtctaatggttccagctgatgggaattatcatgcacaaacattgcataaaccaattggggttgcagggcaaatcatacctttgaactctcctctatttatgttgctttcaaagttggtcctgcactagcatgtggtaatactctggtagtaaagattgcggagaacgcacctttgactggtttatttgcagcacagctatttcatgaggtaccattaatgttgcattggattttaagaaacattgataatcaatgttgcattggattttattctatctcaaatgcatattttgtcactggctggtcttccaccaggggttccaaatgttgtgtctggttttggtcc

SEQ ID NO: 3435 - DNA, 779 bp, Glycine max
taaactgtctcagtcaaaatggttgccaaaacatgtttgtcatgtatcttatgtccatgatcatgaaactcaagaatagtttactagcaaatggtgagaaagaaagcaacaactaagaggtacacactcacaaacctgggtattatttgcacgaggttggaatccacatttttcaaccacagaggatcgcacaagttcaggcgttgttaatggagtaaagcctctcttcatcacttcagagagtgtccaatttacaagagccatctctaacaaaactgcttcatttttcaggtagtagaactttgacccactgacctgtgaagcagcatatgttagatgcatctgagacaaaactgaagtcaagtgccaataatattctagttcttttgaacatccaaacttcatcataaagtttttaaaaaaaattaaggaataaattactgtcaaagttagaacttaaattaaggtctttgtattgtatacaagaacagtgatagagatgaagcatttaattttagaaaagtttcagacttcttcaatctcatatcataaacaaaaccattcctggctacatttgcacaagagagtatgctacctccaaggcatctgtgcatttcccagaaaataataagagtactactaagttaatagaatccaacaccatgtcatgttcacagtgcaacatttcacatattaacctgcatctcaagatgacactagaaattgccaagcttcaaatagatggtgctttaatgctttaaaataatctgagtatacct

SEQ ID NO: 3436 - DNA, 793 bp, Glycine max
gcttgcatgcctgcagaagtaacagcagttgtttttgggtttctttccaagtcagggcttgatcctgttctaggtataaattataatttgaagttaaatgtgaaacttactatattgtattagagcttgtttgttaaagatattaatattcatgattgcaaaagctaaaattgagcagttacgaggcaagttttctcaatggaaaaatcttccttctgctcaaacataatttgaggcacttgcactggtaaaccaaatgagcactaagttgttctttggttgcaaactttacaaggaaatagaaatttatattctgactagagatatcttatgagttactataagcatttgaagtgttttcccattccaaattcaaatgtgattaatcattacttaaaccttagtatgacaacgagttatccaaaacatcatgacttatgtattgttaatcttcagttaagctcaccttatttggtttgatttgtggcctgataacaacattaatgtaaaattgtgacactaaaaggtttgccctcttatttagctgagtgttgtgcaaatttatcaatttacagacattaacatctgtgtaatgacttagccttgatataattttgttgattcttctgttgacaatcacaggatattaccttacaaactcatcatctgatcctggagccggtgacattctaatgggatttttgggatctgttattctctcatttgccttctctatgttcaaacaaagaaaggtaaccatctagatttgtaatcgttacttcatgaatcctat

SEQ ID NO: 3437 - DNA, 486 bp, Glycine max
ccaatatccaaccaacaaaattccccactttgtcgccatttatagctttaacaacaactttagaatctacttgaatagtaaccttatcaatccctttatgaagaacaaacttgagcccttgaaaaaaaaaaccccacagctcgcaacaaagacactttctttccctaagtttctggaaaaaccccaaatccacttcccatttatattcctaaaaagcccaccacaaccagtaatacctccttgccctttgaaagctccatccgtgttgagacaataccagccctcctcaggaggaatcgactttatgtccacttgattgtaagctttagccaccattccctgcgtgttcttgctcaaagaaataaactctttcaacctatcacaaataaaggtctgatggcaataacagcccagaagagcaactcaacaacacagaaagcacagaaaacaataaccggccaaagaggattgcaaggaagcccaatt

SEQ ID NO: 3438 - DNA, 804 bp, Glycine max
agaactgattccttcagtccaagaaggagatcttccatgcatatatggataattaggtctgctaggggaatctcgcactatgatcttctcctcatagggggtatttttggattcatttgatggtttcttcaattcttccttgcccgtagtaggcccgcttacatcggattctttccctgcatagccaaaatactttgatttattatctttatccagagtcccagagtctgaagcttcttcagatgaacttccaaccccactgctgaatgatgctacgtgagacgaatcaagctctcttgatgaaggactggctacaaaggaagaatcatcaaactcaatgtgtgatccagtagcatcagatggaataagtgttccaggagctgccattaggtcaacaatgtactccctgaaattcatatcattatcaatcacaacttccagatacataataacaaggctttgcaactcctacttaagaaacttacaaaaagaatgagagaacattcagctataggcaatattaaatgattaattgaaaaaatgaacaaaatgctacaacaggaaagtctaaccaaaacaaaagatactagtaacgtaacacatcttccaagtcaggaacaatataatataacaaagcttcaagtctgtacacagccttatctcagaaaactatatataagcaaaataattctgcacacttgcctataccaccaaaatacaactttaactgcactcaccttccatctatcttgacaaagttcattgccacatcattggaacccatatactgcaggcatgcaagct

SEQ ID NO: 3439 - DNA, 1160 bp, Glycine max
tagattgattgaatcccagcttgatgattgaattggaaatttttggaaccactgccttgatgtttccctcaagccatacaaggacttgtgtaacttgcacacttgatgctccccatttccaagataacctaagggcagatccatgcacacttcttcaaataaatccccatttaagaaggcattgttgatgtcaagtcgtgtgagattccactgtttctgagctgctatggcaagcaataacctgattgtagtcaactttgctacaggtgaaaaagtgtcaacaaagtctacacccaactgctgtgtgtaacccttggcaactagacatgccttatgcttgtctagactatcatcagagttgaatttgttcttataaaaccacctgcaacctattgtttgctttcctggaggtaaagtgacaatggaccaagtcttgttctcttccaaggcttttatttcctcattcatagcattcctccattgaggatacttcacagcttggtgatagtattttggttcataatgttgatcaatattgcatatgaatgtttgataaggagtggatagagaagagaaactcatatagtcaaacatagggtaggtagtttgatgtatgtaagcatctaggtaggaggggggattacatacacgagttgatcttctaaggacagtatcaggttgtgtcacagtggctggttcagtttcctgactaggctcatgtggttcatctgcaggaactggtttattttctgcagtgattggaggttcgcctgtagtggatgcaggctctgtttgaaggtcaattgtgtgtgtttcaataggtttgggcaagacaatgtgctcaaagggatcctcaatggttgctggttcactagcagatgtgaagggaaatttatgttcaacaaaaacaacatctcttgatataataaacttcctgttaactatgccatacaatttataccccttataaccaagaggatatcctagaaagacagtaggaactgctctaggtgagaatttgtttctctgatgcaatggtacaacaacataacataggcagccaaaaactctaaggtgttcatatggtggttgtttttttgtagagaagctcatatggtgaacaacctttaagatcaggagtaggcactctattaattaga

SEQ ID NO: 3440 - DNA, 794 bp, Glycine max
gacctgcagtcacaaaaaatatcgtcttcaatagccatccgacttttctctcagcttcttcctcaatggttagctcatctggaaatcaaaagagttacaaatacaagtgaagtcgcgcaacaaaattgcagctcaaacaatgaaaccaaaaattgaatggaaaaagaaaaccactttctttgtattttacagtgcaaaattttggcttgatgatctaatcccaaaaatccccaaaatcaacattatgtacctaccatttactactagaagtctagaacatacaacacaagtacacatttcttctttttaattatttatttctgcacaatagattagtcctacaatttgagggctttctcgttcttaacagaatgattccatagcctgacaagttggtttcaaaagtaccgatagaaaaaacaagatgatacctttgctattatatgatgaaaaattacgagatcgcggattgaccccaacttttcttctgcataaatactgcaaaaggggttaaaaaaaacgaaacgagttgagaataaaatgaattagcaaatgggtacatacttacgacccagaaaacaaacatcaacttcaaatatgaattgaatttgaaagtgattgcttttttccttctttaaataataaagggttaaaactgaacaaaggcaaagacaaggattacagagaacattacattagagaacttagctgctagggcgcgcattttgctgaagctcacaacactccctaactcttcatcaaaatctgatcagtgatgacactgcaggtcgact

SEQ ID NO: 3441 - DNA, 172 bp, Glycine max
aagtactactagagtccaatcccttccctgttggattcccaaagattctggacagaaccacaattgttatttaaaaaaaaaaggaaatagcatttgcaggcatactttccaaggagaccttgacaatggcgtttgcatatgcttcacttctttcttcaaaaagggcagacaa

SEQ ID NO: 3442 - DNA, 1194 bp, Glycine max
gaatggaaattctttcataggaccaattccaccagagatcggaaacttgaatcaactcgtcactttatccctttcagaaaataggttttcaggtcaaattcctccagaactttccaaactttctcaccttcaggggatctctctctatgacaatgaactacaaggtacaatacctgataagctctctgaattaaaagaactaacagaacttttgctgcatcaaaataagttggttggtcaaatacctgattctctctcaaagcttgagatgctttcatacttagaccttcatggcaacaaacttaatgggtccattccaagaagcatgggaaagcttaaccatcttttagcattggatctctctcacaaccagctcacaggaataattcctggagatgtcattgcacacttcaaagacattcagatgtatctcaacctttcttacaaccacttggttggaaatgttccaactgagttgggcatgttgggaatgatacaagctattgatatttcaaacaataatctttcgggtttcattcccaaaacacttgctggatgcagaaatctgttcaatcttgatttttcaggaaacaatatttcaggtcctattcctgcagagacaagaaaaactagacttatcataaactagaagaaaaaactaacaggataacagatcaacttccaggcttcaaagatatgatatttatacttgatttaaactaatgtctgacagcgaagttggtaatatacaatgtactgaacatacaagggttacactgttcttgatccttttttaaattagctactatatgctgccagagctaatcaaacattcattcaagtctaggcttcctcacaagaaaaagaaaatggtaaatcctaattgcatgtgtgtgaaaattattacatccaacaagacaaacatgaactttgtcagccttgtctttgttcgtttatttaaacaattactgacttaaaaacaaagtagtctattctcactctggagacaggctctgtaactgtaagtatcatcttcaaatcaagacagtaactatctctccagaagtcaacggagaaaaatatgcagtctgtggagcctgagtttattggatgaactcgttaattcaagacaactcgttcagtcttccagaactcgttaagtcttccaggaaatttactcatgttacaagaatc

SEQ ID NO: 3443 - DNA, 574 bp, Glycine max
gattcttgtaacatgagtaaatttcctggaagacttaacgagttctggaagactgaacgagttgtcttgaattaacgagttcatccaataaactcaggctccacagactgcatatttttctccgttgacttctggagagatagttactgtcttgatttgaagatgatacttacagttacagagcctgtctccagagtgagaatagactactttgtttttaagtcagtaattgtttaaataaacgaacaaagacaaggctgacaaagttcatgtttgtcttgttggatgtaataattttcacacacatgcaattaggatttaccattttctttttcttgtgaggaagcctagacttgaatgaatgtttgattagctctggcagcatatagtagctaatttaaaaaaggatcaagaacagtgtaacccttgtatgttcagtacattgtatattaccaacttcgctcagacattagtttaaatcaagttaaatatcatatctttgaagcctggaagttgatctgttatcctgttagttttttcttctagtttatgataagtctagtttttcttgtct

SEQ ID NO: 3444 - DNA, 826 bp, Glycine max
tgcagagagacatattggaatagttccccgattagcaacagccgcgaagaatgctaccaacaaaataaaaatatacagggaaaagtggctcttaaagattacttcttctcctcctcgtttgatggcttgtcgtcattcttctgttgaggctggataaacaatacaatcagaaaactgatagcagcacaggaagttgagcaaaataccacttacccccacccagaaaagaaaatgttgaaatttaagatagagcacaaggcataaaacatcataaggttgatagcatattagtatttttataaaattatcgttatccattaaaataaaataatatatatatacacacacacacttcagggcaaacttacgcaagcacatctaataatatacttaaaggcacaatataaacctgaaaatacattttaaaaacaagcactaatgaagtaatgagtaacataatttctaaaattaggttattaagaacacatttattttcttactcaacctagtataatcaaggttgtgtggtctgattatgttttcatattaaaaaaacaaaactaactattgtccttaaggcattcaatgggcagacatcataaacacttcacaaaggatttctaataaaaaaaaaaaacaattaaaagaagggagaaaggggaaaggtgttcaaggttaacgtttactggcctgcactgaaattttctaaaagaaattcctttcaaatccaatatattctttttcatagaaagactaacctcagactgattttgcatggacgccagcaaatccttgacagaagggtcatttgggtcaaccccaggaa

SEQ ID NO: 3445 - DNA, 768 bp, Glycine max
tgcatgcctgcagcaatattgaagaggaggggggctaaaggatcgccttgtctaaggcctctttgaggggtgaattcattagtggggctgccatttactaaggcagagaccgtagcagatttgaagcagccctcaatccaagagatccacttatggcagaacccaagcctcttcatcatgcatgataggaactcccatgatatggagtcataggctctttcgtaatccactttgaacaccaggcaaggtttgtgacatctctttgcttcttccattgtctcattggctatcagcacgctatgaagcagttgccttccacttataaaggctgattgtctctcatcaataatacctggcagcaccttcttcaacctatttgttaggagcttagccactattttataaacacagccaatcaatgagattggcatgtattcgttaaggttctgtggatcgctcttccttgggatcaaggcaataaaggatgcattttcgcccctcgggaagatcccgtttgcgtggaattctgctatgaatctgctgatgtcaggcttgatgagctcccagaaatgtttgataaatttaaagttcagcccatccggacctgggcatttatcgctgccacaatcccacactgccgtccttatttcctcctcaagaaactggcccaccaacatatcattttgatgcaacccaatgctgccaaagagaactcccctcaaatctggtctgcactgatcaacttctttaaatctgtgagcaaagaat

SEQ ID NO: 3446 - DNA, 820 bp, Glycine max
atgccaaagtagcttgcaatggattaggcaatcctcttttctccatccccatctccaagtctttctcctcattattcatctctctcttcatttgacctacctcaacttcatactgagtgcacacagctacaaactctcctatcgccatgccacaagtccctgcaactaatcctgcaaaaccagcaagtagcatagccctttcatctttcttaacagctcctacacccatcatcaatgaagaaaccgaaaccaacccatcattggctcctaaaaccgctgcacgaagccactgtgccctttgtacatagtcaatgttgttggtatgatcttcagtaacttggatttgcttctgatcagtattttttgctggattgggaagtacttcttctgcatggctgagtgtactagtagccattttggtgacaacaacaaaggaaagagagaaagaaaatgaagacaaggataaagcaaagagttagcgaaggttcaaggctttttgacaagaaaagtgtggagattcagaggggtaaatagtgaaagattcgcttgtttaggtattatcttcattcggccaaaagataaatttaaccgccgaggtttggctgtttgtgctttcgtgtgtggtatcagtgggacactcaataaaaaagaaaaaccacaacaaacacgtagcggaaaatgagatagagagaagaataatatttttgttacacactacaaactcaatgcacggtactagctagagagggaggaagataattttctctcaaacttcaattcattgattcattcataaaattgatgccaaactgattttaat

SEQ ID NO: 3447 - DNA, 1102 bp, Glycine max
agactaaactgtggtgggacatataattgttatggcttgacctgattttctttcggttttggacttttactcggaaattcctcttacaagattcatggccatactttctgttctttaatttcatccatgtgggcatgtaaaaaatgcacggtacaaaaattaccttaccgtgaacttgtttttaatgcatgtaaggattttaagggaagttcacgagagatgaaggtctcaatcacctggagatggacgaggaagagttatgagatttgatatatggcagattatggttagtttgtttgtctatggctttactaagtaccttgtagcaaagaaacaagttcgtattatttgctaaatgacttgggctcaaaataaatgtatttctacatcgtcattatttcacttacatgccaaatgacttagcaaacgagaaaataacaacttgccagactcaactccaacctctcgaaagttcctcacatataaatacgtgcacactcttattgggttcttcaatggaataactccaaataaaatactgcagatttatgtcacaactgcatccaatgcacaagagaatagttggggaacttattgtcctggaatggatccttctccacctccagagtacatcacttgcctaggggatttgtacagtgttgcttggatggaagataggtactaaatatagtgttcttttgtgatcaacccatatactatgcataatattctaatccaaactatattttttctcgacaaatgttaacaattacaattagtatgttatgacactggaaggatttgaactcatctcatgacctccttatcactccaatcctttatgttcctttcccaagcactaaaccaccttatgactcccaaataacaaaataacactagttgtattattcttttctttttaagttgttgtgcacctcactctctttgatcaacttccctttgtcattgacattgaaattgaattgtaaggcctggacttaaagtgttacagtgttaaatggattgatcatgttggcaccctaaacattattaactttctctcattttgaatgatgaaacttacctctgatgcttgaatttt

SEQ ID NO: 3448 - DNA, 792 bp, Glycine max
caatgctgatgccattttcagaatttgatcactcagaaaagggtgatgcattatatggtaagtttttttttataaatatatatatatatatatatatatatatatatatatatatatatatataataaatattgaacttttatttttatttttatttttaccttggtttgctcatctttcatgagtgttgttttgttctattattcgtgaatttgaatggtttctatgattatacttactatttctgtctcgccctatttcgcagcaatggaacttgcattatctttggaaaggctgaataatgagaagcttctaaatttacacagcgtacgtcacttctatagttctattttctcagtacttttgtgaattcaactcaaacctttttaattccactacctcccaatggaatcttactatgttgttgaatgccaataactagtttttatcactatatatgcagttagcaaatgaaaacaatgatgtgcaatttgttgactttcttgaaagcgagtttttggttggtcaggtaaatcaatgtccagtagtgtgattctttctattgctgtcaagagtagttgagtagcatgggagaaacattgttctcattaatttctttttgttgcttaaggtggaagacattaaaaagatctcagaatatgtggcccagttaagaagaatgggaaaaggacatggtataatatatgttaactacttgcatcttataaaccaaacggttgattcatattcatatactttgtggtgaaattaaagtattttattattggtgga

SEQ ID NO: 3449 - DNA, 1053 bp, Glycine max
acaatccattgccccgggcatacaccttactcgcttataagataagctcacttaaaagaaactttttccatttacatcctcggttttaccaaaaggagtgacacgcccattactcccttaaaatatcatagagattgttccaaagaatagccaaccatacaaaattgagtcgtttattgtttctgaattagatatgcagataccacacaaatttggagaacgagcaatatgacaaggacatacacaatgcagcatgttgaagcaattttgatatccatcatgaaacatggttcttatatcagacagaatatgttgtgagaaaattagattcaggaggtaaaacatataaaaacaaataaaggcaaacgaatagaaaatcatagtgtctacctgaaggtgttatcttaagcctaagcgggagcttgtgttacatttcctattgtttttcgatcaaagatttcaatccagtatccatcaggatctttaataaatgctatacctttcattttccctgcagaagtaacaaagagcatgcttctgcaaacagaggttggagttgccgaaatggcaatccaaacacgcactaagtctgtaacttattctcaggttactgcaagtgcaagtggaacttccttgttatctattcaaaagctcacatcataaacattttttttaccaagatacaccagttgaatttagaggaagatagaacggaatatcttagatagatttaggaaatgagaatgctttataattcgaggaaatgccatacataggttcagcatatcatccatatatatagactcttgacacccttagtggagactatttgctagactaaaaattaatcaagtgcaactcattagacactgataccacccatgaacacttaatagattttatcacgcacttcatcaacatacaatttcctaagtgtgtcaaactattattattggtattatttccaacacatactgtgaattcacaagggagctttatctacagactacatacagcactagttattaaggaataatgaataccttaaaagct

SEQ ID NO: 3450 - DNA, 782 bp, Glycine max
acattatagataacaaccatactcatagtgaaacttctaatcatattcatgtttttcaagcaaagaatgcaacaaatttactcagcttggtctaaacaaaaggaatttagttataaacttacaagtggtgggttgtttttcaagtttcgccatatcccagacctgcgaatacaagcaacaataattagcagaagtttatattatctgcaatgataaagttcttaagggaaagagggtgttagtttggaggggtggaaggaggaggatgacgagaaagaacctttagtgacgagtcagaaaatcctccagcaatcaatgatccatcatgtgatattgatgaacaacttaaactgggtagttgagcaaaaattgaagtgttacccaacagaaaaccaaacataaaataaacttgttctgccaaagcataagacattacccattatgtgtatttacaattgtgtagaagttaactgaagggagagcaacactactcaattgtacacgattccttaaatcttctaggatggaaagttctacatcagttgaactgcaacaatgcaacattacaacattcaacagaatagaactacatatcttcaatggagtgcttatgtatgactttaatgttatctggtttgtattatagattatagaatagagctactatctttgatgtcttctggtttaatctatatcctacagagtatacaagccaattaaaaaaaaaaatagacttgggagaatacaatgtgggcaagggtagctctggtttaatgcgaggt

SEQ ID NO: 3451 - DNA, 751 bp, Glycine max
ttggttgaatgacattgtggactgagattcaccaatggcaaagagtgtaagaaggatcacaaaccagagagccattagggaaaggatgagaatttgcttgaatgtttactgtttgtgtttgtgtgtgatgaatgcaatgacatctcactttgcttggtatttattgctacgttattgattcacgcctatgttgccacactttcttcccctttctaggaaggtaggtgggaggccggttgtgcatgatgaggtactgagaatgtagtagatagcccagaaagccgagaatgttttggagtttagaggtaggtgttttatttatttattaatattcaataataaatctctttgtatcttggttaattcctatgaataaaaaaacaaactttttttttataattatcttgaaagttgaacctgaatctccatcgttttatcactttagatttttatgttttacatgaattacccatcaaggagtgattgatcattgtgacttaatcatcgaaaatcaacgagctgtatcctagtttgacccattttcttattctactactatgagcacaatcataaaagagatgaaagatgtgtttaatagagacaggaaatccttttcagattttagctacgaaagctcctaggcacagagaactctatcgttggtaactgttaacttcagactgaagcagttcgttgagctaaacaaatggtcagtgtcatagtagaggtgagcaggcgattgtacaggtat

SEQ ID NO: 3452 - DNA, 786 bp, Glycine max
ttgcatgcctgcagcctcttcgctagcattggaagcaggtacccttcattcacttagattgattattacgcacctttcacttttcccactcagatgtcacttgtcagaagcttccctaaacatgaaaaccgtacaaataatttccaattgaagaaacaaccagtcttttttttctttcacttttttggaaatagaatatgcaagtacaataccgatatgaatatgatgtgtacttttagatgatctgcatcagttcttgcatgccaaatttagatctgctatgaatgctaatgtattagtactagtaagtttcttatagtggaagatattttcactgagtgtaggtggtccataatagcatctcagttgccagggaggactgacaatgatataaaaaactactggaacaccaagctcaagaagaaaatgatggccatgaatccttcagtactccaaaggaagcctcaacaaattacccttttatccatccttcaaagttcagcatcatcattcagagacagcaacaacatctcatactaccaccctcacggttccttttcctactcatcatcaagtcttgtgagtggtaacaactcttctgctaatgctgattccttgtttcaagcacaagagagtttcatggaccccaagtgccaattcaaagatagcagcatctttgtgtctggaggtgaagccacagccacggccacggccactagttgcagctcttctgatgggagctgcaacaaccagataagccatgtcatggagccctgcaggtcgact

SEQ ID NO: 3453 - DNA, 632 bp, Glycine max
tgaacaccaccttggtcgaatctcttcgaccacctcaattccgccttgctgttgatccattctccattctctcttattcacctcacaacaagaacaaaccggaaaaccaatcactcctagaacaaggaaaaacagttaaatggttaaactattgtctcaaaactataaatactttaataaccaatccccccttttaaaaaaatcttccctttaagtaaccccctgaacatttttttaccggccatcataattgaaacccttttaccaacagttcaagctgatcaatgaaactaagttactgaaactagttttttcacaattaaggaaatatacgcagataaaggcaaagctaaatggaaaaaggctaaactgaacaccttctcgtggcaaagacagagagtttgcggtggaacagacaaagggtccattcaatgaccctcatcttgttggttgcgttttcccttgtcacttgtgacttttgacagcatagaattgatatcaacgtcggtcggtcgtaaacatagttttagattgaggcctcaaggtaaagtttttactcatcaagactacatgcaatagcaactgcaactgcaactgcaactgcatgagtgtcccattttctctatattttt

SEQ ID NO: 3454 - DNA, 758 bp, Glycine max
gagtataaacccctccatgtggataaattgctgcataaggaggcccataaggtggcatcataggctggaagaaatagtaagttagcaagttactcatccctgtcatctaggatacatacaaaacatgcaaaaaaaaaaaaaaaaggaaatcatagaacatacaaatgattgcacataggtactactacctgtggtggcccccacatgtacgggtgaggagcgtgaccagaagcaacagctgagttgtagtatggtggcatggtgactcttggcccataatatgcctgaagatatagcagacactttaaatcataaatacagtcactattcactacactagaggccaaatacacttaaaaacttgctgggtgaaccaatttgaaagggataaaattaatagttttataacatcaaatcaatatttcttttaaagattaagcaatccagggacaaagcacatctcatcctagatattaccccaactgattcccaaatccaatagcaattcagtgcataatttcagtctgacgttgattaggggtacatattgatagcaacccacaaactacagaatagaaaatacaatgcaccgcaggacctgcacactaatatttatattcagagagaatgaacagtaattcacaagagggaatataagaagctttcatcagctcattgcttcatccacaaaaaagaaaatggaaatacagtaacagcatttaaataaaaaatagctggtgtcttcccaggaagatgta

SEQ ID NO: 3455 - DNA, 857 bp, Glycine max
ccactcaatagataacaagagcaacattgatgaatttacaggcaaggggtatgtccaaataaagacggacacattcccccaactggatgttagtgattcatgttagtattcatcaacttatgatgcattctgcatgagggagtcaatctgagcacacgacttagtagaaggctgttgcatcatctccacttcatccaactcttgagattggatgtgtatatcctgtcagagaaactgactgtcacataaaacactaatgcagtaaatgggaaaaaattggattgcattattgcttttaaatcttaatgcaatttatccaacagatctgctgtcttagaggctcacttagggagaagtaagatcaacggtttttgaaaatcatgatttaagaaaaaacagttttagtgttttctcaaacatgaaactttttcgaacatggaataaccataatttcccagtttttctaattcttccaaattgaaatatattcatcaggatttcctaaaattaccaacacccaaaacacttcgtcagaaagtgtgaaaaaccaccaatttcgagtttcttccatagaatttaaacttacaaaataagcatggaaagatatagatatctgattctaaattcaatacctgtgtctgtaaaagtggttgaggttgctgatcttgggctaatggataagcttgcagttgagacattctatagtaaggttctttgagatcaagtttacaggatgatgtttgaagaatccctccttgttcagcaccaggaccccacgttttagctaaatgaaaatagaaatctgttcattgctgcaggtcgactctagaggaaaaccgggttttgagctcaagaag

SEQ ID NO: 3456 - DNA, 764 bp, Glycine max
cgccagcttgcatgcctgcagccgctgccaccgccacagtgcctgtgccagaagcattcgacggggctgaattggagacactggagggtgctccattactagaaactggcaaagacttcacagatctaggccgaacagatgccgcagcagctgcttgctgctgattcagcgggaatatgaatgcagggccatgctgaaatttgtgacaaagcacaaattaattttggaaaaaagcaaaacagaagaagaagacaagagaatttatggttccagaagaagacaaacaaaagaaaaaagaacataccaagatattactaggtgctgctcctgggggtaaagcttgctgaagcaaaatttgttttcttgatgaattatccacaatggcaggctgagaggctttgtccttcccaatatgtcctggaaacatggcaataccatgccctttgtcctgagaagagtttgcagccctgccgggaacattcccatgcaactctgtggagggtacaacattaagattgctgggcttagccccgtatagtgatgcagaacctgctgctgctggccagaatgaattcatcctcgcaatttgctggtgacacaatatattgcgagcaatgtagcagtgggttgcacaccttttcggccgaggctggttaaaaagaagatggggaggctgtaatttaagggagaaagtgattaatcaggaattcaattccacattgtttcaaaatcataagtttaaaaagggggaaagtaccggtatt

SEQ ID NO: 3457 - DNA, 215 bp, Glycine max
acttcgctgttttgcagtccgcagcacttggtttgccatgttgaaaatgattttgctttatcttgcatttctgtggttcgaaggttgataccctgccaaatccgaagaatgatgtgtaggtaaacaaacatatcggagtataggtaaacaaacaacataccgactcaaactctagtgttttatcagtaaggatacctgcaattttttcatgttct

SEQ ID NO: 3458 - DNA, 559 bp, Glycine max
aagatacccctgaaccattgatgagtggtttggatgagcagtttgaagatgcaaatggaagaaaagaatcaaggcctagtgaaagctgtagttgtgcatctagagtaaatttaatggatctagaagagagaattaacaggctggaggaagtgactaaaaaattaaagatgaaaacttttggtcattgttgaataattattagtgtatcaaacgaaatgcttagcacttgttaatactacagtgtttacaactactacatgatcttgtaggattttagtgctggtatttttttgtctaggtttcacagtattacccaccaacatgtttataacttagtagctaatttgtagaatgcagcttagctatttggatctttgcttatggaggttcaaggaatgctagcaaaacttacttcaataagatattatcagagtgtaattcatatgagaccttctatgtgcgtgattgagtatgcgctaggttgtttcaaacatggatttttaattttaactaaatttgggccaatatttagttcatgtggttttgctttttttgctct

SEQ ID NO: 3459 - DNA, 808 bp, Glycine max
aagttcttatctcttcaactatcttccctttctctgactcgatataagccttcatgttggtgtgagtcagtaatgatagataacattgtttaaattattatatcaaactttcagtaagacaaattaatatataacagtgagttgtaacctgtaaagcagaaaaagtttctggatgtgtcaaatcattcagcgctttctgaaaaacatttccgtttcttcggagagcttcagctgcaatgtccttctcaaacctgatagaatcaacgtcataaagtttgactagctaatatatagtatgttctgtggagcaatttcatggtcatggatcattattcattatcatttggcaccaatttacaagaagaaatgcaaccattgtgccaaccttataaatgttgtgcaacaacatatgtcacaatatatatatatatatatatatatatatatatatatatatatatatatatatatatatatatataagttatagagaatgacatgtagttagtaattactactaactacgtagtaacaagttctaatcctacaaggcaatgactttattataaatcacaaagtagtagaaacaagaccaaaatgatactcacccaacagattccagctcgttcaatctttgtagatctacaggtttctgcttcctgggtgaggaagctatttagaatttctcatgaatacaaaaagagaatagaagtcagtaaataaaagatcaagtgtcacctaccggatttcactttctctttccttctgcttttgatctttttctgcattttcctcaatcaggaaattg

SEQ ID NO: 3460 - DNA, 521 bp, Glycine max
tatggttggttgatcaaatctggcttttggtttagttcaaagtcattgagagactggccccttttcatgtgttggtaatgagtgatgaattcccttgtggattaactgtgtactgtgtaattgttttgacggttgcttcttgaaatgttgtttaacagtatgtggttgtgcgcttggtttgcagtctttctcttttggtatttcctttcgctgcctttatagtggagaagttggcacaacggaagtgtatacccgaaccagtaagtgaccaggccatgtgagcttttattagatttcattcgttgtataatctaaaatagttttgggatatggttagttgtatgtgctattattaactgtttaatctttaatatttgcatacattggaatattatattacttgaatattgcaggttgttgttgtacttcatataatcattacctcaacttcgcttttctatccagttttagttattctcaggtcagtttagttctttgtatacattcttcaaaatttattc

SEQ ID NO: 3461 - DNA, 547 bp, Glycine max
gagctcggtaccccggggtatttcctctagagtcgaccctgcagccccagaatatatacaaaagaacttaactgacctgagaattactaaaactggatagaaaagtgaagctgaggtaatgattatatgaagtacaacaacaacctgcaatattaaagtaatataatattctcatgtatgtaaatattaaagattgaacagttaagaatagcacatcacaactaaccatatcccaaaaatattttaggttataaaacgaatgaaatctaataaaagctcatatggcctgatcacttaactggttcgggtatacacttctgctgtgccaacttctccactataaatgcagcaaaaggaaataccacaagagaaagactgcaaaccaagtgcacaaccacatactgttgaacaacatttcagaataattacatagtacatagttaattctttagggaattcattacactcattaccaacacatgaagaggggccagtctctcaatgactttgagctaaaccaaaagccagatttgatcaaccaaccata

SEQ ID NO: 3462 - DNA, 882 bp, Glycine max
aaaacgacaaccattctgatcctttgccaggttgtaaatgtagcactgcgcatcaggcacagaataaaaatccagcagcatgggcagtgatgagaaatcaccaccaccacttctttgaccagaaggagcagcagcagaagaataaaagttcttacgaacaacactccgacccacaccatgaattgcagcagcatcatcatcgcgaggactccttctgtaagaaccgtactcattctcaaagtagtgttttgcatctctcccttgtaggaaaacgtcattgttgtcacacctaaacgctgtagcagggtctcccccgattctcctcggagatagaaaaggggaaagttcagctttttgttttgcagcaacgtaataatgtgatggggtaatattggcattgggaggatattgatgttgaggcgttatctgagaaaacctaatgggacttttgactcctcctccatcgtggagagactgtgaagccgccatgtaacgatcacggagaatctgatagttattatcagatgtaccctctagctgcctcctcctctgatcgacgaggtgatgatacacgaggttgtcgtgatcatctggggtgccaagagtgtaacctttatcgaataaaggcacattgttgacatgctgatgatagggaagggatgggaaggttcctgtttcgttgaaacaaaaagcgtaagggtccagacccatgttggtttgggtgttgttaacatatgggagggttcctgtttcattgaaataagaagcgtagggttcgaaaggcatgttatcggtttgggttgcatcgaagaagttgattctggagaaatcatggccccaaacggggtatgcagggtccaaccagaatctgcaggcatgcaa

SEQ ID NO: 3463 - DNA, 1091 bp, Glycine max
gaaaaatcagaaccaggaaggtttatggtgcattctaggggactttaatagcatcagaaatgctgcagagagagctggtgcttgtcacagggctttggaggatggaggatctaggaaatttaacgcatggattgaagagttggaggtagtggaaccagcatgggtgggcagcaagttcacttgggttagacctaatggtttatctagaagcaaactagataggttcctcgtatctgcggattggcttacacgatggcctgatacagctcaatatacactagagagaaatttttccgaccattgcccgattctgctcaaatcgagaaggtctgattggggaactaagcctttcaaaataatggagtgttggctagcaaatgcttctttcaagaaagctgtggtgggaagttggtcatctaaccagctaagtggatggggagggtatgtattaaaaatgaaaataaaagcactcaaattcaggttgagggagtggaatagagaccattatggggatacacttaagaaattccagaagattgagcaagagttgaataagctggaggagatcactgctgatagacaactatctcatcaagagacattaggcaggaaacagctgcagtcatatatgctcagccttagtccaaagaggaaaagaaaacccctactatgtgtaggtttggaaggctcaaacgggaattgaagctattttcaacatgtttagaaaaatgtttggtgaatgtttcaaatggcaaaatgtagcccaatttgattatagtggaagcaactatgtagcttttgcattggatggagaatttgtaaaagtttccaagcaaagatcaatcttaaccaaaatcaattttgcaaatgctcagccattgactcttcacttataaaactgtcaaaaaaaatgcaactattcaagaacttcatatcaaaataacattcttaaaaatcaagctgattaatattgtagtggaatgcttataattggggcataagtgagaacaataccaatatggaaaatagagaaattggggaaatgatattccccttggaaatatgccaacaagtaactaaattagcaggac

SEQ ID NO: 3464 - DNA, 559 bp, Glycine max
agcaacacttgaagtaccattgccatgacctccaatttgaaaccccatttgagaaccgttctgtgcttgaatctcacgcaagttaacacctgtattccctacaccatagcggttcatactctgaagagaggctatgaagggtcgtgggaaacgaccaataagctcagggattgcacttgtggaattaggaagtgatggtttgtcagtagaaaccggagattttgagcgactccgtttgtgcttcttgttccttcggcatcctccaccaacaggaacgttcctgagagcaccacctcttgtccaataacgcctacatgtcttgcagaagtgccgtggctgagagaggctgtaattgttgaagtagcaaaactttgtgttggtggattcacaccgaggacacttcagaactccttcctgggccggaatcttggcccgatccgccatcggaccggaccgggtttggccggcttcaacccccacgtgaggagcctgtggcggctgaggtagcggcgaaagcagctgaggactgttaattccatttgcttggtgttgatttttg

SEQ ID NO: 3465 - DNA, 809 bp, Glycine max
aattggtatgcatagaatataaaatgtttgtttaaattgtaaatttataaaaaagacataaaccctttgtttgtagagaggaatgaaaatgagaaagaaaaagaaaattttgaaatttaaatctgacgaatagtgaaagaaaaataattatttgttaagttaacttttcttcatattttttttttcattttctctctaataaaaaaaaacatgttatacgtatttttttttctcaattttctttcactttgcaaacggacccaaaaaatgggttgccttcttcaggtgtgaacctcctaatgtccgtttttctcttttttttcttgctgcataaacccttcgtgcttccctaatacaagcatcttctgcaactcccaaagcaaaaccttgtgcgacacagcatcagcgcaatgcatcaacaaccatgaatccacgtttcaccactgcacaattacaatcccatgagcctctcgtgcatcctcaaacacaggatcttccctccacccccttcccccttcaccctcttcatccaacggcgatggaagaaacccaccgtctccgcccaaacccgcttagaggacagagtccgagacccccacttggacaaactcatgtcccacctcaaaagactcgaccttgttctcagaatccaccacctcatgtccgcgcgcaagcgcggtcccttcgtctccctcaccctcctctcccgctggcgaaacatcctcggactccacatccccgtggggctcttcctccgcaaatacccccacgtgttcctcgtgttcgtccaccctttagaaaaaacacgt

SEQ ID NO: 3466 - DNA, 809 bp, Glycine max
ataatttcccgcggtgttgctttttaaaatctatctaaagattcaggagcaaaaggtaggtgcaaatgaataaagattgatagagtatccttaaggtataaatgaaaaaaaaataaaatatcaatcgtattaaaaaaattgacatttttttcttaacacttcttaactattgtccttaaaatggctattgaaagaaatccaataaaagctgaaatatatcattaattggcttgaagttagactcatataacccatacctaactctaggccgaacaatggtatttcaattttccaagaactaaacaaaaaaaataaaaagacattttcaattttatagtaacaaaaaacatatcttggcgacgtgttattctttttctaccttacatatgttcatccgttttactaatcaaaggagagattcaattgttaagtgtttttttactgtatcattgatcttaaacggatacaagttattttcattgtgtcattggtcgtaagactaacctttctttgcttatttttttttaataaaatcatttgatctatcaaattgctttttataaagattacaaaacataactcttcctcctgtttttttatttgtcttttacaatcatcttaccgttaattgggattctcacccttcacaattgaatgataacagcactatttcgtacccctccctcttgaacaacatgggggcaaaatgttcaacccgtgtaggaaatataattaactttacttgcaacaggaacaagagacatcagagccagcaccagtggctagcatataactctgttcccacacat

SEQ ID NO: 3467 - DNA, 857 bp, Glycine max
actcgcatgtcctgcagaggagagtcatgatatagaagagaggatagagaatgaggttaaagagggtgaagatagtagagaagttaatcaagaagttggtattggtataagagaagaagtaggagtgaaattgatgctgagaagaatagatttctggttatatttctttgtctatttattcggtgcaacacttggtttagtatttctgaacaacttaggacaaatagctgaatcacgaggttactctggaacttcatcattggtgtctttgtcctcttcttttgggttctttggccgtctcatgccatctataggggactacttctaccggtaaaggacactttttttcaaccttctatctattcctgtctaacaccaaccattaccctaatgcattccctttatcatatacttcatctgtcataaaatgacgcaactttaggtttttggaaaaaaaaattgattgatgtttttattttttaatgagatattcaaactatctattttaattttgttttgtaataaataatgttgtctttaaagatttaataatatatttattgaaaataacaacaaaaaaagaatactttaataaaattgtttcttaataaatattaattttcttaaaatatttattttttagtttgtgtaaaaaaaatcttaaacattgatattttgggacggagggactactatttcaaataatggctataaatgtgttagttgatctatataaatgaaaaccaacgtactattaaattacccctctactcgttttgacattttgtgatggtttaattatgcagaggtaagtttacaatatcaagaccagcaactatggtggcattaatggctcc

SEQ ID NO: 3468 - DNA, 375 bp, Glycine max
tgaattcgttttttttttcattgagtgaagttagtttttcattattcactcaaacacaaaacgtggaaggttggaagattttcaaaagcgtgactctttgaccataacatttacattactcctatttttttttccttcatgatgtgaactagcctttagtctctctgatcaaaccataatctctgtgtccattattttcctgctgccattatcctctaaccaaccttcaatcaacttaaatttaaggtaccaaaagcatggaatttcttatcaacggttgacttttggttcttttcttttctaaagtgcaatgagtgctctagacgatccaaatccattttgtaaggaccaataagttgcttgtttttactttta

SEQ ID NO: 3469 - DNA, 560 bp, Glycine max
gaagaaaaaaaatatgttttcagtctcgagaacaaagttcaaagacgggcataaagccaactaagtcctgcgaataaagtttagttgggcacttcgtcatcgattttctcacagaatgtacaaaggttatcttctgggggtacaagtatcttacgagttgtggagcatttttggagttcatcaagtaaaagtaaaaacaagcaacttattggtccttacaaaatggatttggatcgtctagagcactcattgcactttagaaaagaaaagaaccaaaagtcaaccgttgataagaaattccatgcttttggtaccttaaatttaagttgattgaaggttggttagaggataatggcagcaggaaaataatggacacagagattatggtttgatcagagagactaaaggctagttcacatcatgaaggaaaaaaaaataggagtaatgtaaatgttatggtcaaagagtcacgcttttgaaaatcttccaaccttccacgttttgtgtttgagtgaataatgaaaaactaacttcactcaatgaaaaaaaaaaacgaattc

SEQ ID NO: 3470 - DNA, 883 bp, Glycine max
taaaaagggcaaacttgacaatgtagctatcagtttatttctaggccaaaaacaattttgaatctggtggtgaacctccgttctagctcaatgcaatcatccatttaagattacaaattttaaaagcattcaacttggacattcattcaggaaagactccttctataattcaagtagattggcttcctcctcaacataactagattaagtgcaacacggattggcttcttgtgagtattttttgagacaaaagtgttgtgttccttggctgcttctgtacttatctagggatttctcctgtcttcaatgctgaactcactggtgctatgcttgctactgaattagccatcgaaaaaggatggactaatctggtttcgtagtgatttagaaatagatggttaaactatatagaattaaattagaaagattaattttagatactcacatttttagagaagaaaattaaattggcctattttgacattcatgtacagaaatttacttggtggaaaaccctccctagctttatatgggaggattttcttcgcaataggtatgtattgcatttctttaggttcaagtaacttgtcctgggtgaggtttatgccaccaatttttttatttttattttcttgcctttataataaatttggttgtgctgcatcttagcactcctttttgctaaataaaaaaacaggagacatgaactacaaacaagagagagagactcagttgctagcagagacaacctagaccttttaaagtaacttttaagccaacataaagttagaacaaacatagtctacaagggaaaaaaaatgaaaagtaaaacttcacaatttcaagcccaagtaatctaacaattaattccatttactttgca

SEQ ID NO: 3471 - DNA, 759 bp, Glycine max
tgtctatgcctttttcctatcttggtatcccgattgaggcaaatccaagatgtagggagatctaggatcctatcattaggaagtgtgagacaaaactagctagatggaaacaaagacacatttccttgggagggagagtcactctgattaatgcaatcttaacagcgcttccaatttacttcttttcatttttcagggcacctagcaaagtagtacagaagctagtcaatattcagcgcaaattcctatggggtggaggctcggagcaaaggaggatcgcatgggtcaagtgggaaactgtatgtctccctaaggagaaaggaggattaggtataaaagacttgaggaagttcaacacagcattgcttggaaagtggagatgggatttgtttcaacaaaatggacagatgtggaccagaatactgaattcaaagtatggcgagtggagaaatctagatgatgaaagaaaaaacagatttcactctcattggtggaaggacctaaggcacctcaaccaataggaggagttaacagtacttaaaaagcaaatagaatggagggtgggatgtggagacaaaatcagattttgggaggacaaatggactgttggggacagaccactaatgaaaaaatttcctactctgtaccaaatttccaatcaacaacagcaaactatcagcctcatgggagtcacaaagatgaaggttgggaatggagcttcaattgaaggagaaatttatttgatagtgaagctacaac

SEQ ID NO: 3472 - DNA, 794 bp, Glycine max
ttaaatagtattgtaactccatcacttgatcaaaatcttatggactgaagatcatttatcaaaagaaaaagaaatccaaatcatgatgaatcaaatatgctgtccaaaaatttactaaaaaggttcatgatttaagtcatctcacaacaaaaaggagaaataaaactaatgataaagtgtttagtgtgagattaacgaagatggagagaatgaaaaacatattatattgctttacgagagctatatatcttttcataaatttaatatcgtacatggcatttgattctcctactaattttggtgtgcaggttttcgtttagttggtagtagttatttgattgagatgataccacacgtatggacaaaaagtaagtatcatggatataaggaaaaaaacgcaagagaagaatcatatgaactgaccatacatcatatctgttattgaaagcttaatgtaatacaaagaagttaaacatccacacacacacaaaaaaatgaagtaccctaatccaagaaataaaaaactattagtagtcatattaaatatagtaaaatttgttacctaacaagcaggaaaaaaaataggatagcttgaaaaatttattcccgcttgcattaaagtgtgagcagcattgcattgtacaaagtaggaagcaagatttcattcaaaataataaaaggagtaaaggagaaaggcaaatttctatttctcaccacccaagaagacaggttttttgaattgaaaaatgaaatcaacattcagtatgttgactgcaggtcgactctagcgaagg

SEQ ID NO: 3473 - DNA, 832 bp, Glycine max
tcgacctgcagaacccatttcaagcagagtcaaccaagagttactaacatctcaatatcaacagtcaaaacaaagaacagctactaagaaatgtccgataattccatctactcttgactcaccttcagaagacgtaatatcaaggcatttcgaagttgcggctgattccctatccccaatattttgacgagacccattggacgatcggcctcctatggaaatcccatataatcaaatcatcaggccataagggacttctatatctagttaggtcacatgtcttacctgttacatggctctcctgaggcttcaggttaggattctgtaaaagggacagtatttgattggctgcgaatagcagaaatcagttgcgtgtagaaataatgaagtaatttattaagatcagcaacccaggacacatcctagactagtcatgacgacgtctcttgttgcagaataatcagccccatgcaattttacagatgtcaaaaggacctcgttatttatctattttacagtcgacataatagtattacctacttgtctgttccctctatttttcgcataattcaaagttagggatgccatgataatggaataatatcataatatcaattaagtacatttgaacgtaattgtttgaattagaaatcacgaataaacttaatcctattgtggatattcatattcatatttatgaagaaaatcattatcattgatctacaaaaggcatgcaaatgaataaaactgaatcaacttcctattgaagacgggaggaaaaagtaatgcaaatgaaacagtaagatgagtgtcaacactgcaggtcgactct

SEQ ID NO: 3474 - DNA, 1362 bp, Glycine max
aaatggaatgcctaagttctatgtggggggacgggggggtggtagcagcatgttctgcccacaattcgacttccatacaactttcatacaaacctttgatataactggatcagaaaaaataagaaaatgaaaaatttattcaaatcaatcccccctttgtaactcaatggagatgaattcataaacagggatggacaagacaaattactgaaacagaaaatataacccaggtattagagacacctgaattctccccattgaattctgatctaaatctaagtacttactaacttttctccttcccaatttattccttctctctttattacaattattttcccactaaacatctactggtattataaattcttatactctggtattctgttaccacacttcctcttcctgcctgttaacctattcctttactaatcaatgatgttaatggcggatggcggaaagccaaaaatccgccataaaaatatggcggatggcgtagcggaaaatggcggatgtcatggcggaccaaaaaaaaaaatatatacatatatatatactcattgaaattgaaaaaaaaaacaaaagaggactggacaggaaaaaaaaattgtggtgtcaaataggaaaaaaaataaaaatgggactgtcaaaagtaaaaagagggtgtcaattagcaaaaggaaaaaaaaagctgcagactaaccttattagtgtgccctttatattcttgtaacagttcacctgtggacctgtcacaagaaagaactatgaaacttgcagagggataaagacccataccatagtaatttttccaaaaatgcaataaacatacctgtccaaaagacgcaatgtagagtctaagcaaccggctagaatgcagttaccatcatttgacattgatacacagttgacagattgccctaaattatcggatatttctctggtgaatataaaatagatcgtcagcaaaaatttcacaatgcaaacaaattttatggccacaacaaaagtgtccaacagcactctactgcgttacttgatagactgttttaaacatgaattacaaaatgatggtctcgaagttatgtttgcaagaaacctgccaatacgaatgtcaaatgttcgaacagttccatcaacacttcctccaataatttcagtttttgttaaacaaacagacatcacactatccgcaaatgtgtcaataatctgcatgtcaattgcaactctagattaataaaagacaaaatgtagaaacaaatagagtactattgcatgtaatagataactgttaaaggaaaaaaaatacgcaagagaatgattttgatgaaatgcacctgaattggctctgtgctgtgggat

SEQ ID NO: 3475 - DNA, 528 bp, Glycine max
aatgtttgctccatctaaaatggatgttaaattggagacaagatcagagaaattatatgctaattcaatcctttcattctactgataagccttcagatattttgaggaagatatgatgatactcgagccatttggattacttgataatcaagccggttttgccaatttatggattgttgtgcaccaagttctggataccaagacttgaatttgagaatccaacagacatcattcttctgctttcccattctgatctttttttttcctgttcaacactgattctgcctttctctctcgattcctttcttttcttcacttcctctcttgtcccatactaacttgacttctatttagctttctcaaccgatcagtgagaatgatgtcacaaatggatccatatgctaacaaatcattttgtcctattagtttgacatttttcaaattaaagtagtcgagaagaataatttactataaaataaatcatcttagttagcaattgtccagacaaagcactagggtaactttctt

SEQ ID NO: 3476 - DNA, 799 bp, Glycine max
agacttcgcatgctttgcagtaaacaactgctctacaccggcccagcaaatagactgttctccatacacttctttctcacacattgcacactgtctcaagccagtacttgagtatgcttttgtgtcattgaatgtgtcctccctaggtggttctacatacttggtgggggtcgagccagcacttgcactattagatttttcatcgtatgcctgacccggcgggtgggaaacggtaacagcaacaaggtcataacctcccttggctacttctggaggccactgaacatcaacagtctctataaaaggttcaaaacacaccacagttgaatactttggaccactttccctgtcaacctgaagtaaggagtgcaccagggaaatggccttcatgaatgcatagacaaacctaagctcttcaatgcttggatttctaaatcgaagatcgccagaaggtgtgcatcgagcaacatcaataacaggaaaacgatctgagcctgatgcttccaatgacaaagacttgatcatcttgcggttagaagggaacatcaaagagtccacttcatatgtgaccctcagaagctcaacattgggagagtgaatggtctccctagaccctgtcattttcttagcatcattctctgttctaaacatgtaaaatccaacatctccaccatcccctccaataaactgaacacatggaaaaggctgtttcttgccaggccaatccgaatctttcccaacccggacgccaaacaagtgccccggacgcagcctcttccacggctcagttctatacaaa

SEQ ID NO: 3477 - DNA, 567 bp, Glycine max
ataacaaaaagtaagaaacgtatgtacagtacgcaagcccgtttgcaactttgtttctgcaccgaattacagagctcacacaattcaaaagaagaaaaaaagccctaagtgtccttgaaatccagaagacacggaaatagaaacattcacaaaacacagctagataaataactctcagcgaagttcacagctccagcggtggtcaaatcaagtaccgaaaaataaaagatagcatcgacaaacaacaccattatgtagtgattcagtgaaaatcaaatcggcgcgcggcgaagagagagacaaatcggaaacgaaacgaaacgaaacgaatcgagtagagcagagaacggatagatggaagaacctgccacgcgtccaaagttcgctggaaatcctggagatagcgatcggcttgcatgcgcaccgcatcatcggggtgatggtacagtgcatttagggcttctttgacagtgttctgaaggtccatgctcctcaaatcgaaacgaatcgcagcactgatacaagaagacgaaagcaaagctcaatctggcactttgggatttgtat

SEQ ID NO: 3478 - DNA, 1066 bp, Glycine max
ggtggatcaattacttaaggcctgatttaaagagaggaacattctcacaagaagaagaaaaccttatcattgaacttcatgcagtattagggaacaggtaatcttaattgtaattgtaattcaatctctctcatgattgaattaatcaattctctcccttttttattttctactgtggttaacttttttttcttttgcttgacatgcatattattatcctgtgctgtttcaggtggtctcaaattgcagcacagttgccggggaggacagacaatgaaataaagaatctgtggaactcttgcttgaagaagaaactgaggcaaaagggaatagaccctgtcacacataaaccactttctgaagttgagaatggagaggacaatggtaggagccaagagaaagcaccagaagtgtctaacgaactgaacctcttgaaatcagagagctccaaatctgattcagcttcctatgagcagagaacatcaatttctccaaaagcctatgcacctgaggtggatggttcctgcaggactctgaatgtatgctaccttgtcagtaacttcatgtggtatgcatgttgattcatacctaaaaacaatttcaacaacctgatagatacaagaaagtgaaagttgtactcagcattatagacaactgtaagcataaattcaacacattatagcactcaacattaccttccttgaagcaattagtgaagcaactccaataggaacgaatacaatgctaacaagcaagaatgctgaaataacctgcatggaaaaaattaaactaagtacaagctataccaccacataaataacgacaccaagatgcattgaggtacacatttaataacgagcaacaatgcaaagtattacaaaaaagtagatagtgttaccgctcgtggtgtgagaatcggcttacacgctggaagttcttgctgagtaaactttgaatctgaaaggcattgaattttcaaagagatctcatgtcagctcagtattcagtgggcacccaaaaaaagcactgttaaatcagccaaatgagatcccctgcgatttatttc

SEQ ID NO: 3479 - DNA, 532 bp, Glycine max
tgaatgtatgctaccttgtcagtaacaccatctggtatgcatgttgattcatacctagaaacaatttcaacaacctgataaatacaagaaagtgaaagttgtgctcagcattatagacaactgtaagcataaattcaacacattatagcactcaacattaccttccttgaagctattagtgaagcaactccaataggaacgaatacaatgctgacaagcaagaatgccgaaataacctgcatggaaaaacttattaagtgcaagctataccaccacataaataaggacacaaagatgcattgaggtacacatatactcatgagcaacaatgcaacgtattacaaaaatagtagtaggtaatgttaccgctcgtggcgtgagaattggcttacacgctggaagttcttgctgagtaaactttgaatctgagaggcattaaattttcaaagagaactcttgtcagctcagtattcagtgggcacccaaaaaaaaaaaagagacaaagcattgtcaaatcagccaaatgagatcc

SEQ ID NO: 3480 - DNA, 813 bp, Glycine max
ttctagagtcgacctgcagaaaagtggaagactctctccctcagaaaaggtgcttcaaagttgcaaatgaactcgtcatgatgtttgaaaggaagattaacagacggatcacaatcactgggaaaccaacggttgagaatgggtgggtgtgaaatgggaacattgtattcatggccttgagcttgagattgaaagatctgagaccatgtgttgaagaaattccagtaggaagtgccatcaccaagagtgtggttcatggaacaaccaatgaaaacagcatccactagttcagtgacttggatggacaataagggcatggtgtggccatcatggttgactgctttgtgatggtcaaagaatgaatgaagaatgggtgggacgtcaacaggggtgagtatgtcagatatggtcatgtccaaagatgcatagatgaatctagctccatcactgtttttgcaatcaacgaaaaaagcatacgagggagggtcttgggttgtgtgggtgacaaggcgaccagccaaaggatagaaatgggagagggtgaacgaaagagagtgtttgagcttctccaacagattttctatgaaattctgttgatcgacaagtgttggaggcttcttgaagagtagacccttctggatatagtgataagacaatagaataatatcccaaggtgctaaataacatatttggttagactcttcgattggacgatgtggcttgatgaagcattcggaaatgcgtcgaacgacaggggtactcataatgcagatgctggtcacacacaaattagatttgtgctgcaggtcgact

SEQ ID NO: 3481 - DNA, 818 bp, Glycine max
ctctagagtcgacctgcagaatgcatttaatactaccatgatcaaggagttctgaaatttaaagaaaaatcttatttgattcagattcctccattgttcaaattgtggtggaatgtacaaacgttcaaatacactcatagccacagaaaatcatgtattgaatgctacttaccctaacacaacatctctaatctctctgcctcaaccacattggaacaaacatgtatatgaaccggaaattatttaagatcaaaatgtgcgttatcttgtgttgtactcgtgtactgcattgtagttgttgccacttaggtttgtcattccactaaggcactaattgtaggtctgataaattggttttaagcctctttttcttaacattccattctggtagacgtccactaattgccagggtgtcaccattatcctctcatttttgggagccattgttttctttttcagacatacaagtatggttagcttttacacattttttttcttttgctatctatgcttaggaaaaactttgcgtacacatgtacaattgtgcatcggactaatcagaattggcaattaatttaacactttttagttatcccaatgctgtatttgtcaaagtagtttctttttatggtcattaatgggcacattttctcaaatctatattgtagctgatcactttgtgtaccaattttgcttttgtgcagattgatagttatgtaaaaatatttcctaacgtctcacacggttggacagtgaggtacgaccctaaagatccaaaagctgtagaggctgcaggcatgcaagctggccgatagaag

SEQ ID NO: 3482 - DNA, 612 bp, Glycine max
gagagcatcctcctcctccttcccaaaaggacaattcaaatcagaaatctgcacttgtctagcctgcaagtttgattttgtgggtaacctgtccctaaggagcctccaagcaaaaaccgctatcttacttggaatcctaattttccataacacccggaaacaatcctctaaattctcctctgcaaccccttcccataacacttcataagcactttgagtagaataaatacccgactgatctgctacccaaacccacctatcagccccatgagtgagaataacttgaccatcaacttcagagaggaaagtgatggccaaatcaacttcactatcaaacagcggtcttctccaaataaaacgccactcccaagtggagttaatatgctcccccacttgaccaattagctgctgctgctaggaagaaatcagatataacctaggatacttttcagctagagattgatcatgacaaatccatctatcttcccaaaattttaccttgtccccagcttctaccatccatttgaattgttgttgaagacttataccatggtgagagtgctggattgctccttttaagtccctccaccaaatggactgcaggtcgactct

SEQ ID NO: 3483 - DNA, 601 bp, Glycine max
aaaccgtagcataagagtcaaattcaaatcacatgatgaagctttcatcccttaaatctcttgatgcatgcttttttgtttttctgttttatccatttgctgtaacagtcacatcacaatcaaaatatattaatgttgaaacatcaatataattgttgtttcaatatattgaaacaatagtgaaggcaaatttcaaaccatatgggagggatttcattggaggagaggccacatgaaggtttagcaatggcttacaaatagaagagaaatgatttctgcgcaacaaattatacatcaaagaggcgataacagacaaaaatacgagatataataattgatgtgacagaaagagatagacatagaaagtagcgttgtatgaataacataattctaaatagaatttgccactagaaaatgctgtcatggttcgttatgcttagaaatttgcatataatttcagctgaaatacttggaataaaggagaccttccaccctatcttgatccaaatctgaagatcgaagacctcttaactggggtgtgttttgcctctgccggctcaggatatgatcctctaacggtagaaatagcagtaacatcact

SEQ ID NO: 3484 - DNA, 791 bp, Glycine max
tttgaggagatgccaacaaataatttcgttgagagcaggttattattgtttggatcatgttcctttttgtcatcaagttctccattcacatgtgggtgttcttcccaataacgattaacttccaatccattaaatgtgttgcaaaattttaaataaatatccacatatcatcttttaattgaagatgttgatggcaatgatgtaagtaacttgatcttatttttgtcttgtcgtttttatatcaatggcttcctagtgtctctgattgagatttagataggtcatgttgctttcctgtcctctcaaagatgttaaatgatgtgtggaatatattttctttctaagaaaaagttatagctttgaatttttttgtgagtattcattgtcttctataagttgtttcattgggcctttgaatgatattgaagtaactaatggaactatgttcttgttatgatagataaatcctcttggaaaggttctttctgtagttgcttgaggccttgaaaagaaactgttgttctaaattctgaacaatgcattgcaacatcacaaatgaagtgacatttaaaaaatatatattttttaaatctcatatcatatattttcttgcttgtatgtgctatttaattggcagcttctggaactttgatgccttgttccagccccaacaacacccagcccgtgattcacatgatacattctttttggaaagttagtaaaaccttaattttcatcgtgctaatcttgtattatatgtttgtattctgagaacatgtgacacagtatat

SEQ ID NO: 3485 - DNA, 809 bp, Glycine max
aaactcctcgttgcttacgtcaacttctggttgctcatcatttgatgttccagcagcaacttggactcttggaatacccgtattgctcaaagcagcctaaaagaacaacagttattagctgcattggggttttccagttaattctggaaataggtttctcggtttctcaacatcatggtattaaggaaatccatgtggaaaacctccacgaaactgattgcagattcgtttgggaggataatcttattataaagattaaagaaaacagctagtaaaaggatatttttaattttagcttaatgaaagtatgaataacttctaaccatttccttgaagtcatagattacatatttcaaagagtccaaatggcatgtatgtaacatcaatagctaaactcaggttaaatgaaaaagaaaacttgaaaagtaaacaacattgaaaattgacatcaacaaaaaagcatgatctctgaaacgctaattattttagccaggaatccatcattatcatcttttctagctttttatagtagattattctattagagcatccaacaaatttccatctgaattaacaagaagcccatcaatgtaaagatcccaacaaatttttccttcaacgacaataagcgaggagaggccaattctagcacctgagggaaaaaaataagagctcaacagctatattaaaaagaggcaagaacatggaaggaaagcatatggtagtaagcataatcttcactctaggggaaaatagacctgctccacttttaccacccaagagacaacgttgaagagcatttgacagtt

SEQ ID NO: 3486 - DNA, 790 bp, Glycine max
atcttgttgaactctttcattacttagtagatagcctttatctacctaggatattagttatcatcatcgaaaggcatgacaaattttttatatatatgtatagaaaaaggatgattattcttaaatatggcttttgcaagtgattgcttgctctcgtgatgatatgtgggacatttaaccattttcaagctgttgaacggcactggttggttaacattttttgttgcaaaacttatctatcggatatttattcaacagcacaattggtcggaggttggaaaaagagatgaaatacaagtatcttgatgctgatgattttcattctgaatcaaacaaaggtgtgtatatatatgagtatacacaattgcacatatttcaatgcatatttggctgatagaacaggtaggcacgttgattaaccctcgataaggaacttgtttctatctgtttttcattctttcttttcttttcttttctttttttactttgttttcatctcacttcttccaatacaacagaaaagatgcgaatgggaatcccactggcacttacggatgaagaccgaatgtcgggcttgaatcactatgtgataccataaacgaatacttaattaacaaaaagggtctgattcttggtcgttctgctttgaggaatcaatatagagaaatgcttagatcagtgaccctggttatgaatgggggacttatgcaagtggtgttaacttcattctcttggatgctcctgctggagtgcttagtgttcaagtaaataagagagctgcaggtcgact

SEQ ID NO: 3487 - DNA, 565 bp, Glycine max
tcttagactctgggaaatatttctttaaaaacttctcaaccacttcatcccaagtcttaagactgtttcctttgaacgagtgaagccacctcttagcttctcaagacaatgagaatgaaaacaagctcaatcgaattgcatcttcaggcacaccagccaatcgaatagtattgcatatttcaatgtaagtggccaggtgtgcgtatgggtcttcatttggtagaccatgaaacagattattttgaatcagctgtatcaaagaaggaggatatgtgattgtttgtgcctgaacctctggttgtgcaatgctggtgaaaaattgtggcacacttgaacttgagtaatcttctagggtcactctccttggctcttcagccttgataacttcttcaattaaatttgtatgagattgccctggaataggaaagctagaagatgcctcggaagatcgaggttcttcttctggagttgttgctgcttctaagtcctgcaaaaattttctatttctctctgcgttgcacctcctgcaagtagcgttaatctccaaatcgatggggatcaaatc

SEQ ID NO: 3488 - DNA, 657 bp, Glycine max
cgtatcttctagagatgatagacgggtgcggctgagttgcgtgtgttctgttctggagtctccaacgttagaggacacttaggaatttagggttagaataaacaatggatcacgcttggcagaattgggccaggcttaacgctattttaagtcttttatttccttcctttataagtctgtttgacctctgttttgatcttcaatgagggataatattcatgaattcatagaatttattgagttatttattttttcttatttttgcatttatttttcttccaataataagtgtgattttcaatgagttattaagtgtaaaatatatattttaatgctttttttaatagaattatgtcttctaatgctaatgaatactcaaacatgtatggatttgttataatatatatatatatatatatatatatatatatatatatgttttagtaatttagtagctactaatttagtcttattttaatattttttaattagatttttactttggatatctcatagtgatgaaaaacctattaattataggctattaaagattatataatgatataaaacattttaatgtaattttgtgcaaagttgtgaaacattcatagaattaactgctgttagataactaacttaaacaatagctaggtgagt

SEQ ID NO: 3489 - DNA, 214 bp, Glycine max
cgaaccaacccatgatcagggcctgaacaagcagcctctgacctcagaacactacaaacaacagccaccccattaagctcaagaaatgagtcctggtttgcagcttctccagcacacaagtttctgaggagcttgaaagacaaacaaagaatatgattatgctgatggtgatggtgatgtgaagcatgagtgagtgagtgaactatattaagta

SEQ ID NO: 3490 - DNA, 448 bp, Glycine max
gtcttgcctaaaggtgatccatgagaagttcctcttgcaggagatgtgggtccgtagtgtcctggagaaccgactgaaacctgactataggaacttggtggagtaaattgagatgggctggcaccaaggggcaggggagcaaaatttcccgctgccggacttatgcccagcccattcccaggttggtacttaactctcctcctagcatctggactattcccaagcattgacatacttccctgattgtgcatgttcataacagatggaccaataggtgaatagtaagcaaacatgttactgctctctccataacttccatagctgcttccaagcccaacactatcattatagctcccatgacttcctacactgccataactattagcaggcggatgttgaaccatctgaaaatgtggactgctatagagggaagctctgctttttcctg

SEQ ID NO: 3491 - DNA, 494 bp, Glycine max
  misc_feature (486)..(486): n is a, c, g, or t
tgtaagaggaacttcagtcaaacaaattgtgattacataaatttcaaaataactataaaaactgttaataaaaaaggcatgtgccccatcatcttatcaatgtatcaaagtttatctcatctttgttggctagggggagaagagggaactgttgcaacataagaatgaaggtattgacaggcacatagcaaagtcaggataacaattacatttttgcatacaatttataaaaggaaggctgaacagcaaactgccttatttcaaattcaaagccaataaacaggctaaatgaccaagatgaactcatttaaacattatcataagaacaatgcatatataacttaatctgacataatcatcaagcacgtatccaaaatcaattcaataattcgtaccagctgcttctggtgtccagttagtaggagctgctgagattggttgtggagcttcttcagtccagggttgttcgactgcaggcatgcaagnttgcgtaa

SEQ ID NO: 3492 - DNA, 839 bp, Glycine max
ttcatcttcttccaccatagggtaaccagattcctcgtgagaaacatgtaaaacattcacatctttaatgtttgacccttgagggctattgtggttgctttgttctacagcttcatctctttcctttccattttcacaaagatcttcaagaagattattttcaccacccaaatgctcgccttctccctccaccaaaggtttgttaaattcctctactgcaactataactggtgctgaatgcaaacctccctgactgttaacaacttgttcctcattgagtccacttttcatgtcttcctcaactccacaaattccaaaatctccccttgttatttcccgggaagaattcgtttcaaactccaacctttcaatctctgaacttttcaaattcttgacagaaacaacactcctttcctctaaacccgggccaggagtcaccaaatcaatcatttccacatttatgtctttgccactaacacaacggggggtgtctttcattgttccaacattaccagaacctacaggatcttctatttcctttccctatgtgcaaaacaaaactaaattacacaaaccaacaacacaacttagacgtaatttctaaagtgtttttagtactattctcctattaatgttttttttttttacaaaactctaattctgagcgaacaacaacaccgaaagcaacaaaaaaaaaatcgtacttgaagaaaagggtataaatataatgataagaaccttaaaaatgagggagagtctgtctgccatttccttgttcttcaaatttgcagggatgtcatgtttcttgcacaaagcctgcaaggcatgcaagctttgca

SEQ ID NO: 3493 - DNA, 1652 bp, Glycine max
aatctcttgaatgctcttccacatcactgccaccagcatgtcccttctgaagcttaaggtatctgaatgtttttcaaaaaaataacaaacacattcaatgactagcattaaactgataggaaatattagtatgtctgagacaaacaccagtttggctttggtaaactagatagtatgcgtataggattacatcgtagcatgtaatttgagctagtatgttatattattagattgaaaaacttgtaattccattgttttacttgttttaaacttaggcatttaaaaaagtggtttaattatttttctatatgtttttctgataaagaaatatattagagaatgacgaatgacacgagttcttttaatgaagaaacaaaaagtaataaataagagaaaccattttatttattttttcaattaaagttgaaatattaattaaaatatttggcatatgaaataaaaagaaactgcagccatttatagaagagttcaatcatcccttgccagacaaatgttctggtggaaatactggtgtttttgtaaatggtagggaacttcaccaaaaagacttagatttgctagctgggagaggactcccctcagatagagatcgatcttatatcattgatatttctgggagagtcctggatgaagacacaggtgaagagctggacagccttggcaaacttgcaccaacgtaagtgctattctgtttctattctccaataaatttctaccttttttgttttaatgtactactgttgttcctattatatacttggcgatgatagtgttttaccaaatagttattgctactttactaaaagccgtgttcattcccttttactagcaatctacattttaacagttgcctttctcatcttgggccatagattggatgggagccaggaggtttccaagatacatgtggaatctttgtaatattttgaattggtatagaggtttcttatgttagaaggaaaacaatcaacatcttgcatatcattatagatttatcaagagatgggatgcacagttttgtagcaggctgcagtttttgtgttatgctgcaataaggaacccaaaagaaggtgattacagccacctaatatactgatgatcaaatggaaccaactcatcatccctggatacttttaacattgatgctgccggcccgggaaaagtaattgtaaatgcttccccaatccaagttgtatgtaaatagcaatagtgtggcaaactgaccagtaaaaggttaaaatgattcgtggtaatttgaatgaagaaatgttttgctgaatcaatgtctttgtgaattgaatgtttggtgcactctatgtatcttacatcacattattttgatttataaaacgtgctagtttccccttaatcattatcagtttggtgggaatggttggagttagtaacagaatggttggagttggaccaggtgagtgaacaagtgcattctgttcagtcttaaaaagttttttactcaaaatatcttgagtttcaagagacatactaaccaaagattcaaattgtgacccctaccacagccccaatcgcttctgagcattgaaacttgaatgaccgtttaagcaagacaaatttattggttgatagtaaaatgagataatgaaattcataat

SEQ ID NO: 3494 - DNA, 553 bp, Glycine max
tgctaaaaaactgtgcatcccatctcttgataaatctataatgatatgctagatgctgattgctttccttctaacctaagaaacctctaaaccaactcaaaatattacaaagattccacatgtatcttcgagacctcctggctccatccaatctagggcccaagatgacaggcaactgctaaaatgtagattgctaagggaatgaacttggcttttagtaataactaattagtaaaacactatcatctccaagtatataacaggaacataagtacattaaaacaaaaaaggtagacatttattggagaatagaaacagaatagcacttacgttggtgcaagtttgcctaggctgtccagctcttcacctgtgtcttcatccaggactctcccagaaatttcaatgatataagatctatctatatctgtggggagtcctctcccagatagcaaatctaagtctttttggtgaagttccctaccatttactaaaacaccggtactcccaccagaacatttgtctgggaggggatgattgaactcttctataaatg

SEQ ID NO: 3495 - DNA, 2011 bp, Glycine max
tagagtcgacctgcagcgacgaatattgataccttcgagatcgtcgccgtcaagatcgtatgctgctttctgttcctacgcttttttaattcaattagtgcagtttcagcttcgtttgatttattttttttatcagcaaaggtaagctatatattaattggagtaccagaggtactgaatagtacataaaggaccatacaaatggttccacaatcagacattcatattctgaaagggaaccagagtatggatatagatttgttctgaaatttacattaaataggctcataacgatgtagtctactactgatactaaaagctttgtgtaaagctgcttgcccattgattgaaatggactgtgaaacctttctcaaaaccccttagccaagaccacagtaggaaagtcgcatcttcaaacagtgcattagcattgaaagtggcattagagaacactatgttgtttctaagcttccaaatggatcatgttaaggctaaccaccagtattgccatctgttcatccttactccatcaagttgaacacccaaatgttgtaggaaatgctgctttgggcttaatgggaaagcacctttaatgtgcagccatgtcatagtgtcccaccaaatgggttttatgttgctgcaatgtaggaataaatgggatgcatcttcctcttgagatctgcagggtttgctatagtaatgaaattgtacaaagcaccaaagtttctcaaaccaaacaactctgaggctgtagctggaacaattgcccaatgagctccataaccaagtccaactagtaacgtgccaacatacattgaccctggccatcccataccaaggaaaacatgcccaagagtcataatgagttgaaatacagccaatgcaactggccttggatatgcatgatccctgctcaagaaaaaaacacaacgaaatttgaaatcaaataagtagttatgttagatacatcgtacacctaaatatttatatcacgtttgtcatgtatgataagattattaacttttgtataattgctataaaaattgattgaccgtgtaaaaagcataataagctgaattaaacatgcaatcaatgtataaactgattttttttacctcacaacaagctcagatatgtaacctcctccgacacggccaaggaagttccaaatactgatcatggaaacaaatatatgtgcattgtcgaatcctagagactggctcatctgacccagattgtcgattacagtcaatccggatccagaacccatgatcatggaaatgaaaagaagccaaaagtctgctttgatcaatgcttgtgtcaaggtgaaatcttcccctctgtgtggtcctctccttctcttaaccctcactgctccttctgcaggtagtaaacatccatccttaaaaaagttgcatagccctcgtgatagtgatcataacggtttcttgttgaatgtagaaaaacaagaggctccaaaagccagagttaagcgtagcctttctgaaaacatgccggtcattagtagattcaaaagtttccgtcaaatatctcacaggacttcatcattgaaaataaatttgatccgtagtgattctgctcaagattgtgtatgtcatgattcttctcttacattatccaatgcgttggatggagatcaatctgaggcatcgggtgaaagtactttggtttatgaaagggaatatgtacaaggagttctaattatggagagaatttgtgagtgctctgagtcatcacgtgaaaagaaacagcaaaataagtttagtgtgaagcaagtaaagaagagttcatgtttggacatttttgaaggccggcgaagctattatcttaagcttaatttgcagcttggcatcaggtaaaataatttactaaatgtttacagtgaccccttctaaattatttttggaaaaattgatagttatgttaacattaatagttgtcgatattaccatactttcaagtaccttattgttttggaatcatggccact

SEQ ID NO: 3496 - DNA, 1380 bp, Glycine max
aaattttagctcctgatgcatggatacttatcatgcatgatgagtcttgacttcctgcattcgaggtatgtgatctgggccaatcacattttgtacttaattgttaattaactgtgataattacatgttaattaatgatgtgattggcctagtgctctctgaattttattcagattcattttacattttttggaggcaatgataggagctaagactcaaatcagaatgctatttgtcattatttggtaacacattttgtttctcaaaggtgattattcataaaactgacatttgttcactgtcaatcatatcactctaagatgactatattcataatactgacatttgttcaaccttcctcacaacttaggaattttttctatccattgactattgaatattttcatatgccttgcttattagtattattacattaccttcttgtaatttctttgtttgatatcattagctttgatctttacttctgggcagaacaagggtatagtgttgtactcccagagaaattacaaacaggaaagtggaacgtttacaggtatacctcttccaatgttcttgatcttgatttttatacatcattctggggctaaatttatgagtatgatattttttttaattctttctggcagatctgtacgatctcctctgcagggtttgctatagtaatgaaattgtacaaagcaccaaagtttctcaaaccaaacaactcagaggctgtagctggaacaattgcccaatgagctccataaccaagtccaactagtaaagtgccaacatacattgaccctggccatcccataccaaggaaaacatgcccaagagtcataatgagttgaaatacagccaatgcaactggccttggatatgcatgatccctgctcaagaaaaaaaaaatggaatttgaaatcaaattaagtagttatgttagggacatcaaacacctaaatatttaaagcatttttgtcgtgtatggtaagatcattgatttttgtaataactactataaaaattgattgaccgtgtaaaaatctttacaatgactacgcataataagctgaattaaacatgtaatcaacatataaactgtttttttttacctcacaacaagctcagatatgtaacctcctccgacacggccaagaaagttccaaatactgatcatggagacaaatatatgtgcattgtcatatcctagagactggctcatctgacccagattgtcgattacagtcaacccggatccagaacccatgatcatggaaatgaaaagaagccaaaagtctgctttgatcaatgcttgtgtcaaggtgaaatcttcccctctgtgtggtcctcttctcctcttaaccctcactgctcctt

SEQ ID NO: 3497 - DNA, 587 bp, Glycine max
ttagctatgctagttatgttagtttgttttttttatcagcaaagataatatatatatagaatggagtaccagaggtactgataatacagaaaagaaaaggaccatacaaatggttcctcaatcagacattcatattttgaaagggaaccaatctatggatatagatttcatatgaaatttacatgaattaggctcataactatgtaatcctctgctgatacataaaactttgtgtaaagctgcttgcccattgattaaaatggactgtgaaatctttctcgaaactcctaagccaagaccaaagtaggaatgttgcatcttcaaacaatgaattagcattaaaagttgcattagagaacactatactgtttctaagcttccaaatggaccaagttaaggctaaccaccagtattgccatctgttaatccttactccatcaacttgaacacccaaatgttgaagaaaatgctgctttgggcttaatgggaaagcacctttaatgtgcagccatgacatagtgtcccaccagatgggttgtattttactgcagtggaagaataaatgggatgcgccctcctcttcaatt

SEQ ID NO: 3498 - DNA, 889 bp, Glycine max
attttataagcagactttgtggaatataggtcattaggatcaggcttccagcaaaggaaatccctgctggaatgattgatgttgcctgactcaatgtcagctaggaagtcagctaccatgtcaatttcatagtcaaaaaagttccttctccatgttagcttccattcccatctctcttccacaaaattccccatagaattgattgaagaggtctgctgattgcttattaaaaaaagagtaggatattttgtttgaagattataattatcccccagccatttgtccttccagaagctaattttggtgccacaacccactctccacttgaggttatcaataaaacagttgttgtgctgctgctggaagatagcctttaagtcttgccaccattgagagtggaatttactcttaccaccagagatcatctctttccacccaccatatttggagattaaaattctagcccagggctggttctggttattggccagctcccacccccatttgccaagtaaagcctcattaaagatggataaatctttgatcccaaggccccctttgttcttggggaggcaaactgaaccccattttacccaagaaatcttgctggcctcttgctgacctccccacagaaattttctctggatggagacaatcttgtgcaccacttttttgggaatcttgaaaaaagaaagaagatagataggtaaggcagctaaaactgagttaatgagagtgattctgccccccatagataggcttctttgcttccactttgcaagtttatcttcaaacttccttataataggctgccacacactccagctcttcgaggacacccctagaggaattccgagataagaaaaaggaaaagcctgtgactgcaggc

SEQ ID NO: 3499 - DNA, 1469 bp, Glycine max
atggagaggaagattaagcctgagaagaacgtgagcgtgagtagttttggacacgggacagccagctacagaaggtacagcattgaggaaatagaagaggcaacaaacatgttctcggagtctctcaagatcggggaaggagggtatgggccagtatacaggtgccaaaccattttttttctttatcaacaaataatagttgttaggcttagaagaatttgaacttaactcaaccctaaaaaattatagctcatagggatgaggattgtcttccatctatatactctattttgatactatttctatttttccaatactttttagcttagtacatgaataaaatgatgaatggtcttttgaatatagactttgatatcatcttataagaatttgagtctaaataggaggattgtcctccacttatattttctatgtgagagtaggatttttccccatagttagtatcattaattttattagtggaaggactaatttgaagccggcacctcttccccccaggtgtgaactagattgcacccaggttgcaataaaggtgttgaagccagatgcagcacaaggacgagagcagtttcagcaggaggtggaagtgctgagttgcataaggcatccaaacatggttcttctgctgggtgcttgtccagagtatgggtgcctggtgtacgagtacatggccaatggaagtttggatgaatgccttttcccaagaggaaaatcacgtccacctctcccatggcagctaaggttccagatcgctgcagaacacaattgagaaaagtgtagatgacatatacccattacttagttagatactataataattggagttagttagttagttgagggctggaataattagaaaaataaggaatgtttcctataaataggaagaggggttgagaggagtagttaatcaattggagggttaatattgcgtctagggagagtcctggatctctcgaatatccatgaaaattgtgcattctttctgttcatcaataacagtatgttctttgtgtgctcaacctgaacaagtttctatcagtatattgtaaggaccaaaatagtttctctccatctttatagtttccctagcatattaaaatgtatctaagcgaattatcttcagtatacctgaatcagaatttccaatcaggactgtaacggtttatgggtagttatactgaaaggaacaagtggagatagttaactttatggtagccatcagttttaatctctatattttgcataattaatatagggaataaattagtaatttttccttgaaagaaagaaggatacccaaaaagtaacatgatcattttcaagttatgattgtgtatttagtacaagttttaatttttcttcaaaatagtatggatttattattcaacttttgctgagcaatgatacactaacagggatattaacactcttatcactatgttcat

SEQ ID NO: 3500 - DNA, 749 bp, Glycine max
atggagaggaagaagcctgaggagaagaccgtgagtagttttggacacactgcgaggtacagaagatacaccattgaggaaatagaagaggcaacaaacatgttctcggagtctctcaagatcggggaaggagggtatgggccagtatacaggtatgtgaactattgttgtcagatactcttatttaatcatgttgtcagaattgtcattaaacataaatatttggatattaagtagacatttttattgatgagtgggtaactattgttgtctatcttggataacaaaaaatatcgaatgtactaatacttgtaaacaaagatatagttagaaaagttgtgaatttagtcttggatttataaaacatgtatgttttggaattgagagagtaattgttagtttttattggcaaagttcaaacctgtgaggccacgatctctcccctctccttcctttcgaccattatgactagatcaaccttataatatctcatgtgcaggtgcgaactagattgcacccaggttgcaataaaggtgttgaagccagatgcagcacaagggagagagcagttccagcaggaggtggaagtgctgagttgcataaggcatccaaacatggttcttctgctgggtgcgtgtccagagtatgggtgtctggtgtacgagtacatggccaatggaagcttggacgactgtctgttcccaagaggaaaatcacggccacctctcccatggcagctgaggttccaa

SEQ ID NO: 3501 - DNA, 1149 bp, Glycine max
atccgcaaactgtgttgaagtggactttgattctgtggctgaaaatggactcctcgagtgagcagcaacactagtgtctacttccatagcagaagctctgggaggtgatgctggctgcacctccacatctggataagcagccttaaaccttgcccgcaacccctcatccaccaaccttacaccactcaattgattaccaagagacatccatctggtgcagaacaaacatgaacataatcaataacgaagaacaccaacatcctatgattttttatctacataaatttttggccctaaacctacaactacttgtctactgctatggttctaccagttaaggtttagtccaagaaatcaaaaccacatgagaagaaagcatttaatttgtagaaaattattatgtaaactccacttacaaagcatcaaaaacaatttcatttttagactacattaatctctatcaaactatttcaagaataccatgaaagaaaaactcaaggaaaaacaccagtcaagaaaacctaccctgcatgagtattgtgcatgcgagcaaatagttctagctttcttgttcctggacttatcctctccagcataggatacatctgcaggaatgtcctaatctaggaattcatgatgggagtgaactttgtgaaggtttcaatgttgataaccttcaattaaactttgaaagtgctgatgaaatatttggctgttcacaagatgccacaagataccaccttgaagatggaggaatggactgtttattgatggataaaaacatatcagtcacagaatctaattcacttattgagagtgccttggaggttatcctcgaaactcattttattattctccactctaactttatggtataaggtttactagtaatgtacagaactaattgtcatccatgtgattgttttaggcatcatcatctatccaacaagattgtgtggcttttcaatcatccagggcgggtgggtcagctagtgtgatgcaggttatcaacagcaatacaaattctgcactaatgaatcctagctgcactagaaacatcagtctgggatttcctcagggtgttcattcaaagatgccacttcaatttcccaacattgttggtgaaaataattctactgaatatcaaga

SEQ ID NO: 3502 - DNA, 149 bp, Glycine max
tcaaaaactttttgaggcaaccagctacacaatcttccgtagtgggattgccatgtcctacaacgacatcagtccattcaacttcagctccaatgctgaattctataactcattgttctaattcctgtatagatagtggttcacatgtg

SEQ ID NO: 3503 - DNA, 816 bp, Glycine max
agcatccagacaaaagggcctaatatacaatttttttaattagcttccatgcatattgaagatgtatcgaaatatagagagttagagacatggtaaacctggttggccttctgcattcccttgaacaataattcctgcattgcagcttgccatattttttgtcctcgaaattgaagctgtgcaacctgaaacaaatatattttgaaactatgaatcattgtgtcacaagagttgcctgcaagagatgcatggcatatgagtgggagaatggagtaatactaggaccgtaattttaactctccctgctctcacaaagaaactaagctctgcttctttgctattgatgtatcagacattatgtaaaataaatagcaaaactctgcttctttacttcaagtgacagctaattttctgaatgtaccaataactatatagataaaaggtgaaaaaatgtatactattatactgccatactctcactaacctcgttttgactatctccactgaaagatgctccatcacagtaccgtactttaactctgttccagttaaagaaatctgtgcacacaagaaaatatacgcaaaaaagagaacacacaagacttgagtaagcatatcttgtaatctccagaagtgaataaagcaagcatgcgtaaggtaaagagaaaaaccagggttttcttcagctttattgctcaacaaccctgtgaatgctagttgcttttccatgtattttgaggaaccacgacgagtagtttttctaaagacacaactactgatggtattacaccatcctcctccctgcaggcatgccaa

SEQ ID NO: 3504 - DNA, 786 bp, Glycine max
attgagatgggtgaattacctgaggccagacctcaagaagggtcaaataacaccacaagaagaaagcataattcaagagctgcatgctaggtggggaaacaggtaaaaaaaaaaaaaagaattccaaatctctttgaacttgcatgtttttataataaatcttcgaagctaaatcaaaattaagcacttcaggtggtcaacaattgcaagaagcttgccaggaagaactgacaatgagataaagaattattggaggactcacttcaagaaaaagatgaaaactccatctgatgctgctgagaaggcgagaatccactcctcgaggagacagcattttcagcagcaacaacagcagttgaagcagcagcagcaacaattccaattcaacttggacatgaaagggatcataaacttgcttgaggaaaatgaccatagagtgccttctatatctcaagaggcacaagaaatggccagcatgtacccaaacacttcagaacaccagggctacttctactcaatgttcaatgtcaatgacaatgacaataatgtctctgcacctgagtcctcaaatgaagaaattctatgggatggactgtggaacttggacgatgttctttgcaatttcaatgcagctagtgccacaagcaaagccagtttacacaatttagtttctcctttctgttaaaaggttttatttagccttgaaaacagttaggaagaatactagtgtactaatgtcagtcacggcttgataaggctccaaaatcctgcaggtcgactctagcg

SEQ ID NO: 3505 - DNA, 743 bp, Glycine max
agaaaaaaacagaagcaacagaggtgcagtcattataagagcagactcactcactcacccatcatccagcacattagagaaatagagaggaggtggcagcaaagccagaaagcatcatcagactcttcagacccattagtattatccatgcacaggagaaagaatctgctacccttgaaaaaaaaatattaaagaaaatatcaaaaaatgaccctccgaagtccaaattactatcaccccatctagagaaaaaaattaaactctcttttagtcttttattccactctttgaaatcttatatctttgttgttcttcatttcaccactattttagagagaaaacacaaacacaaaccctttcttctttttgttgtctcaaaatgatgagtgcaagtgcaggtgcaagaaataggtctccgttcacacaaactcagtggcaagagcttgagcaacaagctcttgtttttaagtacatggttacaggaacacctatcccaccagatctcatctactctattaaaagaagtctagacacttcaatttcttcaaggctcttcccacatcatccaagtaagtgctttttcagtttagctagcatattactaatatttttttttctaaggccatggatacttttctgttttttttaataaaatactctagtggttattattatatatgtcttacttttttatgagggacaaataaaatttagagcctggtttgttgtcataactctctctg

SEQ ID NO: 3506 - DNA, 730 bp, Glycine max
ttctatgacccccttaccaccaaaaaatccacggccaaggggactgaatggtactattccaattccaagttccctgtaaaagttgtcaccgttcaccaaaattatttagtgaagatttattaaggatatggacaggtaggaagaaaggaatgaaacaaacttgctgagctacattctccaagaatccaaaggttccagtttcaatatatatacataatacacacaagggatttacttccctgctggaacaagtttaacaagtctactgaacttgttccatttatgcatctttaatttatctaaaatttgatattcattgttatcaagatgacatattatatgattcaatggatatatttattaaatttgcattttacaaataaggtatattcgactttgaacaaaattatctcatatgaaagatacatttaaatttgtactaaaaatatatataagatattaaaattttcgaaataacacttttataacgttttatacaaaatagtccataaaattaatcaaattgataaacttaaaattattaaaatagtccataaaatttcatttaatttaaaaattaatttaaatcgcatcccattactttatgcatacatatctaactcataaatatatttaaaatacaaataaatgtctactattaaaatacatttttaatggtaatatctatctcatttaaaatttgagagatataatatatcacataatttac

SEQ ID NO: 3507 - DNA, 562 bp, Glycine max
gtctcaccattgaaggatgtccgaaactcgatcttgacgtatccaagactgaatgggagggtctgaaacacctcaaatgtctgacaataagggaaattccaaagctcaagtcccttccatggggtgttgaggatgttacctctttggaagagctcgagctttacgaatgccccgccttaacttttctaccggagagcatggccaagctcacctcgctgtgtaagctagtgatttctgaatgcaaaaacttgggttcacttcccaaaggactagaaatgctcaagtctttgaataccttgaccattacggattgtcccttgttattgccaaggtgtcagcctgaaacgggagatgattggccacaaattggtcatgtcagaaatatcctgctgaagcagaattctcaagcattgagggacttgtggagtcaaggaaggactggttgacatgcatcaatagatccattcttaagaaaagtgccgtctaacacttcatatgctgatcatatgctccctcacaaatcgcaattccttctgatgattcagctttggtaggtgaatta

SEQ ID NO: 3508 - DNA, 1275 bp, Glycine max
aatgacatttggctgctcatttcctttctctgggaaagtgattttggttccctttttccagcccggatggatttcaatgtttaatatttcctccaccagaaaaattctcctgcaaacataaatatggaggagagaaattatatcaatttacgtggctgtgcttatataggcacacataacatatgaaagaattgcataattcaaacagcctagaaaagtcacctatgtaaagtcaagtgtaaacacaataaccagaagaaaggtagccgagggagtcaggtatgcacattttgaacagttgagtgataaattaaaaattaaaaacactgaccacctacactggttaagtaggtcaagttgtgaacttttaagaaaacctattaggcttgacgaactgacttgtttgtaaataatatcatttttaatagttaacatgtaatattatatcattattttatcaactaaagtatttcgtttctgacttgagctggttgtaatggctataaaatgcaatctgttttcgtatgtttgttacctagtaagtttattgacttgtttagtatacgtctatttaacttgtaagctattaaactattattagagtattgtaagagagctgcaggcattaagcaatagcaccaaatcaatttcagaaagaaaattattactgtttctgattttacaactataaatagaagatacagagcaacagtttcccaagatcatttagtgataccaacctgctggccaaggctcaaaacaacatatggatcgcttgactttatatctctgatagctaaatttgtgcctttaatcactttcaccttcaacattccaataaattccaccataccttcctgttgttaccaccaatatcagtcacattccaagaaaatcactcatgaggataactgcattgccaatgctgtcaaactagtaaatttggataatgcagcatgcctcatctcatctatattaactattttttttattacaaggctttcatctggtccaacaacgattcaattcaataaaaatctattttgcaaacaaaaaattacttactccaaaattgttccctatatttcttccacacacgtaaaagtagtcagataactagaggaactaacacataacataaaattaccattctctgtgaactactagtacttttaaaactgtccataaaactacttttggcagaacttgattgtagactgctttttccagacacaatgcgcaaactcggtttcagaaattcttgtaattcatatt

SEQ ID NO: 3509 - DNA, 702 bp, Glycine max
aattctactatctgtaaatagaacatttaccaccccaaaccaagcaggagaaaaccaaaatttaaacatttcaaccaagagaacaataaagcatcatcacatgcattaaaagaaaaatttatcaataaaaacaaagagaactgaacaacaaaaataaggtgcttacacttttgggcaagcagtatccatgatcaattggaatcaaaacagcctggccattttcctccactttgccgatcaaaatattcccagcatgtctatctgcatttgcgagtcgcatgtccactactgaaattttatgcacttccttcactgggaaagccccagggcccatatcctcgcagcttccattattctctatgaacatttgcaaggagccaatcttagtagtcaactccccgggatggttaaatcctttatgcaagcacttaaccataactgtcgggggaaccccggcaaaacccttctcatcaccaaataatgatcggcgaccactcattgggtgatccaaaatataagctgcaacttccctgaatgctccctgaccaactgttgttcccttctttaagccttcaccgtcttctgagaaaggtaaacccctagggttattcacagccattggctcttcatcaatgggcttaaaaacagatatatacttttgcccggttgaatcaagcataaagtaagcaccccctgtaccct

SEQ ID NO: 3510 - DNA, 676 bp, Glycine max
ggagcctttgtttggcgtcgaatttgccaacacttaacctgagaacacccaaaagaattatttaatcgatgaaaggccacaaatgccgcgacgttagacatggagaaagaatagaaaaaattgttagtgaattattgtagacattgcaatcgtcattatcatacacacaaaagaaacagcatctcagacacaatggaactgtggaatggcagagtaacaactattctaaatattagttactttctcagtgcaacatcgctactcgacaatctatgaaattatctatggatgtcaatctccttcatgtgcataataaaggctaagtaattttatgtgttcaccaaatgatattaagaagtgataaatgcaccttgggaaaaaaatgaaaagattatttatagtaattttatatatttatcatttatcataacaaagctaattaattatagagttgtaaattttatctctaattccaataataaatcttttttgcatgatagaatttatacttgagcacaatcttaacagtcaacagcaaagaaagtaaaagaattatagtttagtgaggctgttgtacaaatatcagagcaaatttataaaaattaagacaacttttatcagtaagaaagtaggtatgcagatacattacctcatcaggtcctgcaggtcgactcta

SEQ ID NO: 3511 - DNA, 512 bp, Glycine max
acccggatattgctctagagtcgacctgcagcttggggagcctttgtttggcgtcgaatttgccaacacttaacctgagaacacccaaaagaattatttaatcgatgaaaggccacaaatgccgcgacgttagacatggagaaagaatagaaaaaattgttagtgaattattgtagacattgcaatcgtcattatcatacacacaaaagaaacagcatctcagacacaatggaactgtggaatggcagagtaacaactattctaaatattagttactttctcagtgcaacatcgctactcgacaatctatgaaattatctatggatgtcaatctccttcatgtgcataataaaggctaagtaattttatgtgttcaccaaatgatattaagaagtgataaatgcaccttgggaaaaaaatgaaaagattatttatagtaattttatatatttatcatttatcataacaaagctaattaattatagagttgtaaattttatctctaattccaa

SEQ ID NO: 3512 - DNA, 808 bp, Glycine max
tttttcctcatgagtcgacctgcaaaggtcaaatttagttttttcggatgtatgcaggacgcttaactccaatcattttcgtgaaaagtaagaatctcattcaaagaggtttgaatgtcttaatggacaaaaggaagtactccaagttaatatgcaaagtagggtaaattgggatgaagaaaacgtatcacggccttataaattggttgtaaacgatattaaccagatcgtgacgtatttttttaatttaaggcttgtttcattcaagttcgttttgaaaaaaaaaattattattttttgaaagagtttctgaaaataaaaatattttttaaaatttaaaactgacaatgtttgggcttgggaataaaccacctttggattaattttgttcggtgcaacctcacataatatttgaaatttataattctttaattaagctaggcatacatttaaataatttttttttagcttgagataagactagtattattttgatatggctcatttagaaagatagttatcagacatccttggtgttagtatttgcatttttaaaattttaagaagtcgttagagctgaattgttgatgagagtcttaaataattggtgtaagattgcgtatctaaattttataattacatattcttattcaaaacttgagttgacttagttacaatccaatcgccaattaaagttaacatctagttgagattaacccaaaaaaaaattaagttaacttaaacacgagattaaatgagattgattgcaggaaacttagattcctataacaacggatttaagttagtg

SEQ ID NO: 3513 - DNA, 866 bp, Glycine max
caataatctatactcccttgttataggaatctcaattttttgcaatcaatctcaatttcctctatagcaatttcgtgtttaaattaactttttttttttgggttaatcttgactagataagtttgattggccattggattgctactaagtcaactcatgtttaaaataaaaatgtgtaattataaaattttgatacacaatgttacatttaccgtaaaaaaataaaaagaaaaaaagagatacacaatcttacaccaattattcaagactctcatcaacaatattcagctctaccgacttcataaatttttttaaaatgcaaatattaacactaaagatgtctgataactatctttccaaatgagccatatcaaaataatattatcttaaggcaacaaagaaatattaaaattatgcctaacttaattaaagaattataaatttgaaatattatcattattatgtgaagttgcgccgaacaaaattaatccgaaggtaatttatccccaagcccaaaaaatgtcagtttttatttttaaaaatatttttattttcagaaactctttcaaaaagttaaaaaaatatccattttttcaaaatgaacttgaacgaaataatccttaaaatttaaaaatacgtcacgatccggttaatatcggttacaaccaatttataaagctgtgatccgtttccttcatcccaatttatcctatttgcatatcaacttggagtacttgcatttgtccattaagatttaaggcattcaaacctctttagatgagattcttacttttcacgaaaatgattggagttttttttttttttttttttacagctttttacgaaaatgattggagtttaagcgt

SEQ ID NO: 3514 - DNA, 780 bp, Glycine max
gggagaaaagactagagactattgttgacttcaaccttaatgaatgatacaacatagaagattgtacaaagtgcattactctgcacacaagcatcacccgaggatcatccattaatgtcagaggttgtaagaatgttagagggagaacggctagctgaaagatgggaggaatggcagtatgtgtaggtcaatacaaggcaacattatgcgagactgcaaagaagaatgaaatgggaagggaagggagggaaacaactcataagtgatgaaagcaaatctatatggatgaatttggggtaccctactcaactgtctgcctgctacctttggttaactctgtttgagtttgttcaactactaaatttatatgctaccaccaagcaatggatcatatatgctgaggatgttccaccttaattaacatgtttttgagtcttacatatgcaccttagttaaatacttacagcaatcttatactatttgattatttttggtgaaagagaattacgatttaggaaaaaaatgctaaacatgaacatgctaatgatgcctaaaatgctaaacatgaacatgctaatgatgctccgcagcccaaaagcattgtagatttttcaatcccccagacaacatcgtatgtaaaccaagcttggtataacaacgacacaaaaacaaaaaaagaaaaaatcaaagacagcctgaagtattctaaaagggctaatttagtatgaaatatactctttatgctaaccttgtctaatgcaagactgaggcagttctttg

SEQ ID NO: 3515 - DNA, 1346 bp, Glycine max
atgcctgggatcccaaggaagatagacatttggcaattactcctggtatttttctggcattatgagtagttagatactgatgcaaaacttgataattagtttcgattttgttatgagataattagtttctatcttgtttagtttcatatttctatcttgtttagtttccttttctatgttattttcccgagttttctttttattatgaattctatttagagcctttggatttgaaattatttagttgcaatttgtaatatgaatgatatttctttgatttatatcaaaattcttctagaattatgtgttgaattgtttcttactccgctgcactagttactcattaattttcatagttttagtaattctctcagcctctcttttttttattgcttcaatgtggaattctagtcatatattagataagatttggaattaagaatatataatgaaagctagaatttggaaattcctggcaaaaatgtcatttccatttgtagttcatcaaagttagtaaatttgtttttttaaaagtaaattatttttaattttttactaatttttttattgtaggtgggtctgccagccagaggtaaaactttcactgcagaaaaggtaaaaaaattgataagaaagaaatcaatttaaatatcaagttcttacgggtattcgcgcgggaatctttacccggaagtaataatctgtcccagtcgcacgcgtcacttctttattggtgcgatcctttccctctcgcgccctcaaaaaatctacactccattactgcaacagttccaactttgatcaatggcttctcaaaaccctaatcagagaaattctctgtatccacaagtaatcgattctaaccccgatgctccctcacctctccttatcaccaatcactcgtcctcttcgcaaccctgcctctacccttccgttgactacaacgacctcgtcgagaacctattctctgaggatgccaccgccgcctgttccccctctgcgccgccggaggccaccgaggaagtcctcttccggatccccggcgcgatcctcaacctcgtcgacaaggactacagcgtcgagctcgcatgcggcgacttctccgtgatccgtctccggcagggcgacaacgccgtcgccgtgtacgcgcgcgtcgccgacgagatccaatggccgctcgcgaaggacgccgccgccgtgaaactcgacgactcgcactacttcttctccttccgcgtccccaagggtttcgatcccgatgaagaagaggatgtgctcagctacggcttaacgatcgcgtcgaaggggcaggagagattagtgaaagatctggacgcggttttgga

SEQ ID NO: 3516 - DNA, 814 bp, Glycine max
cgggtaacttggtacttacaaagaaacttgtgtttggttaaaattgggttattcaagaacatgtatataatagactaattgagctttgattttgttttaagggtgctacataagaataaagaaaacagagaaatcagatgttgggaaagcatcccacacctggagagaagtttcggaatcttatctgtgcttgggtaaccaatccgtgcgattgttactttctcacaacacatgttccaaagaagaatatttctaatcaaaggagcaagatagtggaatgaatcaactccttgtctaacaagttaagaatcactgttgtatacaatgctaagaatgcctctattccatagccatcaactcagcctataagaccaaagcagtaccaataagacccaagaaagcccttatattttgactcgcaaacctaaggttatgaaggaagttatacctgcgcgctttttagaggatgcatatatgtatcaagttaaagattctaacctcagtataactattctacacattaaaaaagaaaatattacacacctgctatgaccccaaaccatgatggtatcttcatcaatcatctccaccctcgtcaacaaaaatcggcaagcatttgatttgaggcgaattaattgtcaaaatgctaagagacatcaaagaaaaaatcctttaccctcaagtcagtgttctgtatatatctcagtgcaagttggcccatgtcaacccatttttttttaaaatcgacaaataaaaaaattatatatagaaatgaggtaccagaaataccactgcaggacatgcaagacttggc

SEQ ID NO: 3517 - DNA, 477 bp, Glycine max
ctgtctcggagagatgctcatttttgctgtattgaccacggtcaattaactttagcactgagttaacaaagaaaaccctctctgattccccaagatgctgttcggtgggtctgctattatttatgcccctataatacagaacttcttcagttgcacaaagcagacaaaaaataaaatagatgataaattataatcaatcttacagctgttcattctgtagacgcttttgaaattgaaacaccaaatgaaacaaaaaccgctccaatgcataggtccatcgacccccatttgagggatgataatatctacaagaataaattccagttaaaaaattaaagaaataacagaattgtaaagacaaagcaagcttagttaagaaaaataatcagagcaataagtgagtaaacaaactgttccaaaatgttgatcaatttctcaaagtgcttttgtgatgaactaccacgttttagtaaatat

SEQ ID NO: 3518 - DNA, 483 bp, Glycine max; identical to SEQ ID NO: 458

SEQ ID NO: 3519 - DNA, 837 bp, Glycine max
ttctggcaaatgtttctttggcgggaaaacagcatcaatgtgctgtttgggaagagctctgtctggatgggtttgtatcacttgctagacttggcaccaaggagacttgtgacccgttgtgtatggtgatttatacatgttgtgatggaaaccctgaatggtttaaacggttgtccagtgaggatggaaggctcgtaatggcagaaattgtgagaaccgcctcttctggtgagttagtagtagctttatgtattttgcttttttctctatgctgtcctgtcatttgggactatgggggtttttaagttatagcacttattttattttcatttgtttattcttttttgcttgtaattccttgatttaaatggtgatcggaatgggggtgtgagcttagaaataacagagagacccaagatatggagggtgtatactagaagaaacaaaggtgagaaagggaaagatgaggtggcaaggggagtaacagaattgccaaaagtgtgagagagaatctgagggtatatagggaaggtgtgtgtgagagagagagggtatgggggaattttggaattctgttatggagagagaattgtgacctctctagaggagcttggctctgtggcagttggattactcccaactatattttcgatttggctatcaataacactcaccttctctcatttactgtgttattttccattactgtgtgtttggtccctaacaaatggcctttttgaagttttggttctgttttttttttttttttacaatgcacaatgactttgtgtgcaccatatagctgacttcatctagtggggcagtgcttatgttgtt

SEQ ID NO: 3520 - DNA, 502 bp, Glycine max
tctttcagcgctggagattaatgggtattggagactagtagacgggagttacatggacatgattctgggaatgcttttgaaaaatgcagtgttgaatgactggtcacttaatgctttaaatgaagatgaagttgtgagtatactggaatcagatggatttcctagggtgcttgcaaggcattgtttgcacgtatatggcaacaaagtaaatgagtgcatgcctagctttgtttggaagttggatgagaagcgagtatgcatacattttgcaagagaaatcctgaaagggggtaagagaaagttagagagtttcatggatgaatggaagcagaagattccagacggaatgcatcccacttttgatcttgtggaaggagaggtattaacagagagacttggagttgagacatgggttcgtgccttcagtgtcgcgtctttgccttccactccagccgagcgtttctccattcttttcagagagaggccaaaatgggaatggaaa

SEQ ID NO: 3521 - DNA, 819 bp, Glycine max
ttaagagtcgacctgcagacaaagtttgataggaggaaactatggtttgctgaatactagtactttcgtgccaaatccagactattataggtactaaaatttgaatttcatagttgaacaatgaaacataataaataattaaatatggactgctatatcaaagtttgtgttcccatgtgtgtgatgtttgcttcattaattgcttgccagttgttaaggaacctattttctaatagaacaaggagttttattaagtggggtcccatttgaactacaatcataatgctgttttataacacctttgtgtggttatgtactttcttccttacagtgcacttctatggcaccgactcatgggaggccgtgtcctcttaactaccttctatgggacaaagaagataagaacttatgcacattgtgcaaaggaatccgtaagtaaaattctgtatctgtatatggtatatgtattatatgtgaaatctgatttgatactctcttacagaaagggatcacaatactagtgctcaacttggacaacagcaccactgttcaagtcaatgtggccttaaaatttaacaagttaccataccgtagagtgggtgaaccagccagaagagagtaccatttaactgcaccagacaggaatttacatagccaaactatgttgctaaatggaaaaatgttaagtgtaaactcagctggtgaaattcctcctttagagcctctatatgtaaactcaagaaagccaataatagttggtcctctatctattgtatttgctcatataccaaatgttcttctttcggcctgcaggtcgac

SEQ ID NO: 3522 - DNA, 628 bp, Glycine max
atgagtggaggagatctcggggtgtcggcttttcctgatggagagagtatttttacatggattggcacaattgaaggtggaaaagggactcagtatgagggtttatcttataaactctccttacgttttcccctagactatccttttaagcccccccaagtgaagtttgagacaatgtgctttcatccaaatgttgaccagtttggcaacatttgtctggacattcttcaggtattcatgaacctagagaacaaaagagaatgtcttagagccaaaatttccattatctgtgtcttttggtgggtctgaatctaccatttagtttttactatggatgccaagtgtatgtatgtcaaatttcaatttttattgcatcaatctggactaagtgttccatcaactgcattctcttggagctaataactctcccacttgtgtctttctacaggacaagtggtcttcagcttatgattgcagaactattcttctgtctattcaaagtttattggaaggtctgttttttttaattttatttttatatatattttgagttttgcattcacttttgcatgcttgtctgagcagtttactttctaataacagagcctaacctggagagtcctctaaa

SEQ ID NO: 3523 - DNA, 1188 bp, Glycine max
atgagtggaggagatcttggggtatcggcttttcctgatggggagagtatttttacatggattggcacaattgaaggtggaaaagggactctgtatgagggtttatcttataagctctccttacgttttcccctagactatccttttaaggccccccaagtgaagtttgagacaatgtgctttcatccaaatattgaccagtttggcaacatttgtctggacatccttcaggtattcatgaacttatgaattagagccaaattttcaatgatctgtgttttggtggctttggatctctaccatttagttttactatggatgcttaagtatatgtagatgaaatttcaatttttattgcatccatctgcactttgtgttccatgaactacattctcttggagctaataactgtcctacttgtatgtttctacaggacaagtggtcttcagcttatgattgcagaactattcttctgtctattcaaagtttactggaaggtctgttctcgatatcttttgagttttgcattcacctttcagtgcttgtctgagcaatttactttctaataacagagcctaacctggagagtcctctaaacagctatgctgcagagcaaaaaagaggtatactacatagtttgctaatgaacatgtttagttatacagatggaaaagaaaagagaataaagtaatggataaattaattctttgttatgcttttgtatacagggatagaaaacaaattgagagatacagagtttatttgatttttagaatataattatggagttttttttttctcgtgttttgcaactttttgaacatttccattctgccaaacaaatcataaatttttaaatgttatgaatacaccaaggaaactttctatacaatccagtgtcaatcatatctttgtctagctttgtctgagagctcctagaagttagtattttttagtctttgaccgggtatctctacaagcatacctgagagacccattccttggggcagggtcttggttaaataaaacttttcccaaagtggtgactcaaggatcccaaaaattttgttttgtaaattatcattgtaaattatacaaatgcagtgttgtcaagagatatctattcatgcctttaggtaacgatatttagtgtttcttgggaatattgactcaggttggctggtccta

SEQ ID NO: 3524 - DNA, 488 bp, Glycine max
accagattcttaaatgtctgatgtttaaggaagaatactagttaggagacaggtaaattcaccattggtttcctcaaaacattttttttttttactttgctctcagttttctctgtgatcaccattttcccataaacttctcaggggagggcagagacaccatgcttgcagaggtactaattttgtgctttccttgtatttttttgcactaataagaacaaaggttttctcatttctcacattgtgccttctttctccattttcttctggcattcagtatctcttgtccccatctactaccttttcagcttgtttatcagttggttcactgttttgtcagtgaaagatcaagacatcttttggggtctgtttaatgtaatttgatccacagatgtcaatatgtttggactgttaagtgtttaaactggaatgaaactgaaccttttttctggctctggttttgctctctatggatgcttagtctatat

SEQ ID NO: 3525 - DNA, 876 bp, Glycine max
aatcgtcctaatatgcatgaacaaataggagaagttgagcaagctatgtaacatgcaaagtcaataaataatgcttacaatctcctcccagactgtaccacgagatatgtcactaaggtaatgaacttcatccaaaacaatcacatcaacatttacaagtccacttccagaagaaacattaccaacactgcatgaaaagcagtagtcaataagtactcatatttgcaaccactgattcaaatgacaaaataataattcagaagggaagatgccattactttagacaagccatcgccaacaaaataggggagatatgattaaataataaatttgataataatacaacttaagatgggaacaaataaaaatgacaacaacattgtcataatcaaattattaaacacaagttaggagtttaggagtgtgtttgaattttgaaaagtatttctaggaatattaaaatctaacaaactcctgaatttactaagcaatatcattcatgactatagtattctagggatgtcactaggaaatgtagtaggatggcttaaaacaaacaccacctaagactggaactggatactaaatttctcctagctcaagacaccaaatccagcaattatttctaacaccatgggcaactcaaccttctcaacttcttaattattgcgaccagcctcaatatagagctattaatgaaattggaaacacaaggcctacatagtacaaaaccagaatccacacttctacagcataatagcaactacttgggcatcaaatcgctactttccccgtattttaatgaaagtgtacctctgatacaacatgttgcgcaatatctccgtggtcataatcaaaacctgagcatccttgttc

SEQ ID NO: 3526 - DNA, 512 bp, Glycine max
aaagaaagaatcatgtcagtttggctccaaagagacgtggaagctgaaaattatcgcaaaacaaaacattgaatagcagctagtaatgccaagcaaaagaaaccattttgatactaagcttaatttatcagttaacattggtataatttactggcattacttctatgggcacaaaaggattatcctgcacagatcttctatatactacttagacaccaagcttaagtgcttaacacataaagctttctcaaactaaactttaataaaatcgaacaagaagaaaaactggaaatgaacaattcaaaatttctgctaacctggtgcaatgtacccacaagacccagctatgacggacatggatttagttcctttcccggtggcatcgactaccttagctactccaaaatctgccactcttgcaccgaagtccccatccaacaagatgttgttagatttcacatctctatgaacaattgaaggaacacagtcatgatgcaaataagagaggcctt

SEQ ID NO: 3527 - DNA, 662 bp, Glycine max
agaaaaggttcatgttagtttggctccaaagaaacagaaatgctttgactgcaaaagaaaatcaaaagatgctagacaacctgtatcaactacctagagcacgtattatcttacatctatattcttgttggcattatactataatactattactaatacaaagacgagcgctataatgccaacaagaacaaaccacttgtcactaagcaacaaaaacattaaaaagtgttgcccatgcaggaaactaccatcgtgatttgtagggtctaaggaggataagatgcaaacccttctagttttagcagtaatggaccaacaatcaaattactctaatgacccgccacaaagccataaacgatgagttaagcacaaatgcagaagtactattgccaactaaatgtacctcaacctcatcggaacatgatgaacaggagaaaattaaaaatatgaaacttctgtcaactaacctggtgcaatatagccacaagagccagcaatgacggacatggatttagctcctttgggcgtggtttcaaccgccttagctactccaaaatcagccaccctcgcaccaaagtccacgtccaacagaatattgttagatttcacatctctatgaacaattgcgggaacacagtcatggtgcagataagagaggcctt

SEQ ID NO: 3528 - DNA, 553 bp, Glycine max
aggtatctctacctttagaatatgcctctgctgttgactttgacaacaagctgctgaatgactctgataatgtaaactatgatgattacatggattttgaacccaatacctatttctctctaacggaactgctggagccagatgatggtagtcaatttgagggattaaatgtgtctggggacttgtcaggatatttggaaaattctagtaccctttttcctgaagaatgtggagatgttataacagaacctacactttccttgcaagacaccggctttagttgtatgcaatgttcacaaatggaaccagcccctgatctcttttgtgagatttgtgggattttgattcacagccaatgttcgccttgggttgaagtaccatctaggcttggaagttggaggtgtgggaattgccgggattggtaatgctggttttgccagtgctgtagaattttgctatcgatcatgcaagctggttgcaattagctcaccatggatgaattgaattcttagctctgcgaccttgggggcaagtgatgagggatgcttttcaa

SEQ ID NO: 3529 - DNA, 791 bp, Glycine max
aatttagatccacatttagcttgtcaataccatccatgacatcagatggaagaagaatctgggtgacattgatagtttttgcaagggagagatactctgtgacatttcttagagtctgcactgtataatcagactgattgacaaaataatggagggtatccaaggcttgaccatggaatttatcctgcgcaacagaaaggaggatacatccagtcctgtgtgataaagagactagggcatgttagtaaccacactcgagtgcatgatgaataaaacttagagctatggcagtaaacagaaatttcacatgtattgtgcaaaaactaattcttaaaatttcacagcaatggaattaccaaaaacatcatcatcgttggattttttacactgaaaaatgataataaaacatccatggcacatgattttgaattataaatacagaagaaaatctgggtaatcaatcatgaaaaagctcattaaagaacaatgttaccatatctattgacaaagggggaaaggacgaggggaattttgaggatatacagcatcccatgaagaaattaacaaggggaacatgaaaatagagtcttacgcggcagcaaaagtgaatgatataagaagtataagacaaatcctctgtgaatgatttgatcctttgtccttgatgttaattccccatccacagcacagatgaatcataagcgccaagccaaatgagataaaccacaggacagcaagaatgaaaccagctgcaccagtgaatccaactgactgcaggtcactcttagaga

SEQ ID NO: 3530 - DNA, 167 bp, Glycine max
aagacttcgatgctctgaggattgaagaattgttgcaggttattactagtctattaataaaagcagccattactttctgagttctaatggccaatttttatgtatcttgagagatcaagttgacattcaagttatgtgctagtattagtattttagtgactatatgc

SEQ ID NO: 3531 - DNA, 467 bp, Glycine max
aattccagagcagaaagttgctgttttcccagttccagactgggcctgttgtataacgtcaagtcccttgcagaatggaactattcccctttgctgaatagctgatggcttctcaaaacctaaaacacaaatcaaactagtttaaatatacagttaaagattgataccagcatcaggacaataaacaccatgatttacacaaaaatgcagtggaatttgaaggattaaaaaaatggaatttcagtcccataaatacataacaaataaaaaaaattacaattgtcatcacgataaaatacaaaataactcttggtttggaaaataaaattaaaaaagtaagaggacataaagaaagttaaatctaccatatgcataaatgcctctcaggagattctcttgcaagcccatagcatcaaaactgtcataaacctcatcgtaggatgtgaagaaatcctgtccatcggacg

SEQ ID NO: 3532 - DNA, 622 bp, Glycine max
ataaataatggcctcaaaccaggccttagatgtgaagtgtagactgtaaagatcaagtggtcaagttattaccgataaaaggttctttggtcacaacaaagagagccagcagtaaaggatgttaacattttgttatttaagtagttaaaaggaaaaactaaattaagattgcagaagagcagataaccccattcaatattatggatccaatgaagatatgaacaaagaacaaaccatttacacacatgctaaggtatggtaagcaaattggaacatggaagatgttatgaaaaccattcaagtcacatgagtgatcactaatcagttgaaataagaactttttgagctaaggtgtccataccaagaaaaggaggaaatacttgtaatttgatgccccaacacagttaactacccagacacaatggtggtccatcttcagtacacaacgtccacctggtatcaaaccagaaaaggtcaaacttatcctcacttatttcaatttagcaatgaaaataaaaactttggtgtgccaaaactcacaaacagaacaatgatgacatcgtggcggcttgggctgactgcacttccgacagtatctgaaccgttgatttgaagtatcaga

SEQ ID NO: 3533 - DNA, 445 bp, Glycine max
aggtgttaatggggatttctaaaggtataatgggacaccttcaagtaactgagttcaacctcaatggttatatacaacgagaaaatgagctgagatcaaaagttcagattttgatagagcagctcaaggctaaagatgcttctttagagaagcttgaggcatgtaatgttgagagtgctaaggaaaagtctgaggtgttggcattgagggaaaaggtgaaattgcttgaagaagaacaaaaagattttgagcttcggataaataatgtgatggcagagaatgaagcatgtcacgaacacctaattgaaatggaaaattttgttgactctttgaaagaaagcattgacatagcagaaaatcgggctgagagtgcagaagcaaaggttacacagttaactgagaccaacttggaacttactgaagaggtgagttttcttaaagggag

SEQ ID NO: 3534 - DNA, 504 bp, Glycine max
aaacataagagcacttcttcgaagtctttagaagaggctcgcaaagcatttggcattaatgaggaggatcttcttttggtaagcatcatatacctcaaatcatctttcactaagctatttgatacatgctactaaacattgcctcaaaaattttatcccaggattctgttaaacattatttttttcaattgaccaatatttaaaaacaagttttagaggtattgaggaatgctaggaatgatcttaggtgggtaagaacctgagatgtaatgaaaaatttaaggctctaagcactagtctcgcgttgaattaaggcgaaaatacaagaatcccatttcaagataggtcaattttaaagaaaccccagttgttcaaaatcaaaactctataacttgattcattctgcacatacacaagggactaattttacactacgttacaggatgtggtaagtttggggaatcaggttgttgaacttttatgaagaagtgagttttctgaatc

SEQ ID NO: 3535 - DNA, 188 bp, Glycine max
agctaggcaatgctctaattccaatgagatacttggaggctctatctatgatccatcatactactcatccctatttgaagatgctcaagaaaacaaatattcatctgaggtaggcttaactttgctcaaaaccatagccatgattactttttcagttggtatcaattaggcactgtgcaatttttctt

SEQ ID NO: 3536 - DNA, 487 bp, Glycine max
ataatttcccgtagtgttgcttataaaatctatctaaagattcaggagcaaaggaagatgcaaatgagtggaaattggtagagtatccttaagctattgatgaaatgaaaaaaatatcaatcgtattaaaaaaaattgacacttatttttaataaaatcatgtgatttatcaaattgcttttataaagattacaaaacataattcaattcttcttctcgtgtttttaatttgtcttgtgcaatcatcttacagttaattaggattctcacacttcacaattttagttttatgataaaatataaagataaacttttcgtgcattgaatgataactgcactattccgtatccctcgaatttgaacatgggggcaaaatgttgaaggctgaagccgaaaagaaaatatactaattaacttcacttgcaacaggaacaagagatatcagagccagcaccagtggctagcatattactctgttcccacacat

SEQ ID NO: 3537 - DNA, 476 bp, Glycine max
taagagccagggtcaaccagatagattcagataacaacaatgcaatcaccccatatggtataaccagtacagtagtacaaagtttcatctcattgtgttcagaatacaatacattattcctttaatttcctgtaccaagcattccaacttcacttctctcaccaatgcactataagaagattaccatcttttgccagcacactactcattttaattatttggtaaaaatgcacagccctattcactgtgtctgtcaaggggatctaattcaattgattgagcaagtttgcatgagttgtagtaaatcccctgacactgtttttaattcccaccaattaaaagaaagaagaaagattcactgtgtcttcagattttcattgaatccattttttcagattttcattttatctattttccggccttattattcctagaatagacaaaccaatcagtcaagcaccattcacagattcact

SEQ ID NO: 3538 - DNA, 685 bp, Glycine max
aagtcgttgctagtgcacagtaggaagaataagatgagaaggagtgatagttaaggttgttgggagttagttagactgccagctgtcaacaactggtaggttagtagttttgtataaataacaactttcttgagaaggagaggagggaaattgattgtattgagagaacctaagaagtgtctcagtgttgtaagggaagagagagctcttccttttgtaaagagtgaaagaactatcaataacaatgatccctttatctctaagtgtattgtcctatgttggttcttatgtgcatccgttctacctctagttgcagtcagtaaagtagagaagattgctaacaaaaatgatgacatacttacttccctacaccatcattacatgtttcacaatactgcatttaacaaatttgattagtaagcatccttgttattcctgtttttgtgcaaacttgtgcatttaacaaatttctgtcagtccctactgtgctaaggctaaggcaaagactgttaaaaagtctattttgaatgttacaagggaatgaaagtgttttgtatttgtactcttcctataataacttaatatcactgaaagtgttttgtatttgcaggagagaggaatacttggagaaattgaacaaaacaaggaaattgtgaaggagtctcctgcaggcatgcaagctggc

SEQ ID NO: 3539 - DNA, 504 bp, Glycine max
aggtaattggccttttatgggtgggtttcgattataaactatagatcactaagtgttttaggaggacttctctttgataagaacctagagagaaccacaaccatgccacaaaatgtaagagtagtatctaatatttgtactaacagaattcagatgctattcaatttaatagtaagagtagtatataatatttgttcatattgctaacttctttacatatttatactaatgcattgtaatagaattgagtttgttaaaacaaaattatctaatattctgctcaagaactacctagcggaaattgctcgtaactggctgtgagaagtggattactacaaccagctttggtggttcttgccttggtgccttaaacatattcttgcaggtaagtgggcttcttagtaactctcacaaattgatgtaagacctggaaggtgaagaaaatagttgattgttgaatgagagttataagacaggatttattttattagtagaatctcaatt

SEQ ID NO: 3540 - DNA, 569 bp, Glycine max
aaaccgaaagcgcattggagatgcagtgattgctcccgaaagaagaataccttcaacatcaacacgagcagctagcactgttccattccctttggctgcacctgcacctccctcgtctcttgcatcatttgttccatcggaaactccttcaaattaatgaacaataatcctcaggtgatgttatagtatctgcctatagcccttactccatctacgacattgggccttatgcacatgaaacagagttagtttcaccaccctttttctcctcaacatatactacaaatactgaaccatcaactggctccattcactcttccaccagctgaatctgtttacacaactccactttcttcaccctgaaaacccccgtgggtcaattccttagtttcaccacgatctgacttctcagtttaattaattaattctcgtacgtcaaaggaaggttggagaagaagagcattatgaatatgatgtcaaatttaagatcgacaaggttcatatatatatatatatatatatatataagatcatagattttgcggtccttctaaaacaaccaacttcca

SEQ ID NO: 3541 - DNA, 299 bp, Glycine max
acagtttctaattgttcatacattttctccccgttctttcaaagttgtgattatgtaatgggttacgtgtgccagcgagtgtaaaacaagattaccattaccttggactcttaatattgttatttgtgatgttttaattgcagggatctttttggcctctaggatttttcatgaaatcgtgctctatgcttcgcaatcgaatgctagctgatccagcatttcttttcaaaattggctcagaggttggttgggcttgtcttacagtaatcctagcttttactattcatattattttatgg

SEQ ID NO: 3542 - DNA, 437 bp, Glycine max
tgatagctctcaacagcaagaggaagcatgcttcctatgaggttgttggttacttggttgaggagcttcgggacgcggcgacgtacaagaccttctgcaaggacttggaggatgccaacatcttcattgggtccttgatttttgtggaggagcttgccctcaagataaaggttgcagtggagaaagaaagggaaaggcttgatgcagttttggtgtttccatcaatgcctgaagtgatgagactcaacaagttgggttctttcagcatgtcacagcttgggcagtctaagagcccctttttccagctgttcaagagaaagaagcctcagtctgctggctttgctgatagcatgttgaagcttgtgaggacattgccaaaggttttgaagtatttgccaagtgataaagctcaggatgccaggctctacatactgagt

SEQ ID NO: 3543 - DNA, 536 bp, Glycine max
agtgcaaccgccattacgtccacaccaacatgaccgaagacaactggagagcaatacacgtggccttggccacaaaagaaaacggggcaaaaaattgaaggtgcaacacgtaggcttggccattgaagaaaacgggggaaaaaattggaggggcaaaatgataaaaaaccaggaaaagtgtcacatgtcaacattttaggtacggacataatagacttttcattgttaccaaactcatgttcatagaactctagtattaacaatgaaacttttaaaccgaaaggacaattaaaaattaagtcctccataatatataagatgtcatttcacttgtgacaccagaagccgggtttctggcttctgcaccagtccatgacttcaagtggtcactgctaattactgggtaactcttgccggcagtacttgcactttcagacttcactcttaagagcttcaatctctggcgtcaaaatgaaccagcttccacacagaatatagtgaactacaaagaagattctggaggtcgactctagagg

SEQ ID NO: 3544 - DNA, 495 bp, Glycine max
aacaaatatcaatgcattaaatgtgcagagtccaaataacaaaaaaaattactacaaacaagaaaaataaatgtaagacatcaaacctcttttgcttctactatcttggttttctggtttggaggtgccaaaaccttttttattagagtttcagcaacctcttgaggggacccaaattctgtaatatcctgtttgccagttggtatcacatttacactgacgttctccagtggttcaatgacatctttgaacaccttatcttgaccttcaattactacttcctgctcactccccatgataaaaaagagatgaaggagctaaccttaacttccattttagttgtgtatcaataaatcaacttgatatagataaaaaaagtcacactggtgcagagtgcagacagtattataacaatgctcacctgccacccgaaagggtagagaaatgaatatccatctttcttgtccaaaacaggcaaaaatcccttcttatttt

SEQ ID NO: 3545 - DNA, 1249 bp, Glycine max
aatgatttatgtttgtgaaaatgaaaatcagcacatcattaaatgataatatgatggaaggacaaaggtgagagggagaggaatactgaatccaaaagtccacttacttatcccaaaaggaatcctttggaaatatatctgggtacttctctgctggctgcaatgaaaattttcccgaagtattagaaaaccaagtgatgcatgtgcacattaatgtttggcacaatcacaacacttaaatactcacacagaagcttaagtacataacaatgcaacatgtaaaagtcatgcaaagagcccatcttttttaagatggcggatggattatttcaaaaatttctattactcaattaaatacataatttcaggcttctacattctcaaaagccagaagcctttcaattcaaaacagttcatcttacgaacatatgcaaaattcaaggctttatgaaagatgcatcttaaattgatacctgagccaaatagcctcccaaggccgggccaatgattaaacctatgccccaaactgcactgacctaaaagcaaatcacactttgaattattatcgtggaaatgtagttctaagaattggtgtaaaaagttggtgatgcttacagtagagagtcctagagcttggtgttcttctcgaaaaagttcagtggcatacgcctgcagaattttgataatagatcatagcaatatgcatgctttctactatatattctacatttatattttagccattaggagtgccttaattaaaaagaaaaatatcatttctattagaatgaattatttcaattctattgttagaagtgttccaaactctgcataggttcattggatgtttttaaacataccacatacctgttttttattttgtttattgatttgcacctttcatccccaggttctaggatttggtgagtacattgaagaagtttatgcagcatatgaacagcacaaactggagaccatggtaattattaatattaatgcctcatatgcatgttgaatacttgagttgtacaatacaactttacatattcgctctcttctatcccttggcccaccatcttaatttcattattgggggtgaacacttgaaaaataatagtgtgaaagtggagtgctccctcagatgaaccgtgtttggttgtttatctgaccatcttgaacaatatttgggaagctgaatttctggttttcaaactggggtcagatgaaagattgactgtcttgggggagc

SEQ ID NO: 3546 - DNA, 645 bp, Glycine max
aaaggttacaaatgttactctctacaaactaaaaagtgttacatgtctactaatgttactttctttgaagaaactccttttttctcatcctccatgcagaatcctggttccatacagcaaattctacctgttccatcttttggtcctatgatacttcctacccaagacctttctaaccaagaaggacatcagccttagtctcctattcctagttcagttgatagtgcctctctttcttctccacacaggacacagagagctagttgttcaatgcttccagtttctcctgattcatgtccttcgccatcagctccccatacgacggatccttcctccacatcacatcctagtgaaccaagttctgattggccaattgctattaggaaaggtatccttcctccacatcacatcacatcacatcacatcactcgaaattctcaccctatttacaattttttgagttatcatcgcatatctccatatttctccttcgtctcttccctgtcttctattactattcctaaaaatgttcaagaggcacttgatcatcctggttggcgacaagccatgattgttgaaatgtaggctcttgagaatagtggcacatgagaattagtttctcttcctcctaggaagaagacagtt

SEQ ID NO: 3547 - DNA, 653 bp, Glycine max
aattttgccttgtacagtattaatacctggattatttttcatacctgaatcccccagatggttggtatggatatgttattcattatgctgatcaaattttgtacttttaatctttgttaaaatacttgttccttccagaaaagaaggatggctactcattctactcttgctaattatctttctgcttctcttttattttattttcctggtttggtggctaatcggggaagtgtaggccaagatggggatgatagatgagtttgagacttctttgcaagtgttacgaggatttgacactgatatatctgttgaagtacatgaaattaaggtatttttttggctcatcattgtggctaaaattttccacccaaatgcatgataggatgcatatgtgaggtgcagttaagtatatagctttataatatgtatttcagaaacatgccctgctaaccattttacttttctagagatctgtggcttcaacgggaaaaagagctgcaatccgatttgcagatctcaagaggaaaagatattggttcccgttaatggtataatatgatgctgtataagttctgattttctaaaccctctcttcccaagcatgacttattgtcatttatccaaaaggtcaagcattatttgctaactgagct

SEQ ID NO: 3548 - DNA, 168 bp, Glycine max
cttaactctattaggctcttggacccactcacctgcaatgagcagaccttgaatagcattaactctccttctgtgattgatcactctgtggaaataagctgagtttctatccccttctcttagccacttgactcttgatttttgcctcagcatggattcataagcaag

SEQ ID NO: 3549 - DNA, 96 bp, Glycine max
aatcctgcaattgataatgcatcaatgctggactctgtgcctccagctaccataacatctgcatccccaatagaatgtgaactagtggcgcaggca

SEQ ID NO: 3550 - DNA, 854 bp, Glycine max
gctcagaacccgggcttgcctctagagtcgacctgcagtaaggaggaaatatattatctaaaaaaatagccaataacattaaacaggatttcaatcgtactgaataaagtcaacaatacctaattaaattgcttctcaattctttgtagatggctttagctttctcctgatatggcccattctctacaagatttaaaccaaaaatttagtttcaggagggtataaatatagtgggaatatttgcagatatttttagccttggccagtccatattacctttggagtaatggtggagtgcggaaggaattctgtaattcatgtttatccaaacaggacctctccagtatggagggtcatgctctgtgttgtgcttcatgtacaaggaactgtgtaataagaaatattatttttggttcactataatccacaggctgaataatgtcactcaaattaaatccattaaaaaatgcatgcattagagcataggctgtaaaccttgttttgccaagtgaacgtaatccatagttggtccataagaggctgcgatttgaaatgagttcaagctgcttttccagaatccatgatccctgaatgaaacagtaatattaaaatatacatctgtgaaatcattcaagcaactaatgaattcttagttcattgcataaaaaggcatgtaaatgagaattgatgcacatccttacagatggaatgatcctccccatgaatgggaataaactaacgtaaccaatgtgaggaaccaatctcaatacaggcatatccataacatcccggagaagttggtgagtagcataattttgtccagcctgcaggacatgcaagattggcgcagttag

SEQ ID NO: 3551 - DNA, 964 bp, Glycine max
atgaatagcatggctatttttatggcttttcaaagtccagatgtggaggttctgggtttgacaaccatttttggtaatacaactactgaagtttccacacgcaatgctttgcttttggtatgtgtttattttcaaaattcctgtcttcatgtttggataaacttctttggaaatttttgcaaaactgaaatcaactcatgtactttagttgattttagcttacgagttcagttcattttattttattttccggtgagtgcttatggagaagtttgtctaaatagactaaaattttccatgtcttttgtgttagtggaaatgtgatcttgattgtgtttttaatatgcaaaaaggatagtgtgagatcgcaggccgtgaaaatattccagttgcacagggaagccctgagccgttgaaggtaactattttaatgtgtaaatttgagcttctctaatgttgatttggtcaaattttgttttaattgaatgcagactttattttctgctatatccctttgaactcggcatgatccgatttctccattttttttttctggtattaattatgatttattttctgcaaaagggtggaacgcctcgtgttgctgattttgttcatggtaaagatggactagggaacacattcctacccccacctaaaggtgagaaaattgagaagagtgctagtgagtttttggttgagaaagtctcggaatatcccggtgaagtatctgtgctagcacttggaccactaacaaatgttgctttggtaagttgtacattgctgtattgtattctatggtcctgccctttataacttcaaattatagttccctacgtttgttgatttgacagtgtcacttccattattaggcaatcaaacgagattctgcgtttgcaagcaaagtgaagagaatagttattcttggtggtgcattctttgccttggggaaatgtgaatcact

SEQ ID NO: 3552 - DNA, 349 bp, Glycine max
gggtagcgtctagagtcgacctcgcgaaaattatatgtaaaactaacttcagattagttccagttccagctccagaaaagacgataacataaacttttgaatagaattttattacagacaaaatcgttctccaatgcatgaattatacaattcaaaacaaaattcgaccacttgtgtgtagaccttgcatcagtgtaaataaatggcttacaaaattcgactatgcaattaacattcctcaagctcagttctcaaatacacttagcaaaggaaagttgaaaagataagcagaaaacaggaaaaaatttcaattcaatcatcttacaaacagcaaaatttgtagtgaaat

SEQ ID NO: 3553 - DNA, 503 bp, Glycine max
tctgttctgtttggtcaccctgagagcataatcaaattcaataatcacagatcagaccagttccaaaataagcaaatatttttgcactatgtacctagcttcaatttcaatcttcgtccctaatacattttttgatgcattgattcaagtagttctattgttgatgatgaaaaaataacataaagtagatctagatatcattaaattgtttcatccaccctaaaacaataatatgaggaatagatccaaagaaaagaattatgcaagttttcaaaaattatggtgcagcaattaaacatatatatagctacatgtctaacaataatttacatatggaattgtatttcgatcaaggaaacattgaatctgaacaatgaaaaatcaaatgaagtccaaaccaacaacttgtatacatatatgaaagatccatatatacctgacttcaggattggtggttatattcctgacaagttgcataccgcagatcccaacagccacaccaa

SEQ ID NO: 3554 - DNA, 320 bp, Glycine max
aaccgaaggctcaacaacaagggacacacgaaggtcacttcctcggacacaagaccccatcaacaacattacgactttcgagacaccaatcacatcaaatccctcaacaggctctgcaaaactggcaagtgcaccgaagccctctattttcttgagcaaatggtgatgaatggttacaaacccgacgtcattctctgcaccaagctcatcaagtgcttgttcacttccaagagaaccgaaaaagcggtgcgtgtcatggagattctggaacagtacggtgaacccgattcttttgcttacaatgctgtcataagcgggtt

SEQ ID NO: 3555 - DNA, 523 bp, Glycine max
accaccacaagtgcgtcctcaaagactgtggatatacccacttctgggctgaagcctgctattccatcagttctgttgtctacatctacacctgatgtgacagcttctgggactacacccacaagtgcagtgagttcattaccttctgggttttggttgaagccttcaaatccatcagtttcattattgaatcctacaccttgtaagacacccactctgtcagtgcccgcaattccatcattttcactattgtcttctacacatgatcagcctgtgactgcatcagttccattgtccaggcccgtatctggtaagccagtaactccctcagtttcattgcttacacatactcctgcgcttgatatgcacaggcctgtcagcaaaaattttcacgtgtcaagtggaatgccccctgctttaaatagccagtctcagcaagagacagctctggcatctgggccaaagcgagccgcatcattggcgtccataccttatagccaattaagctctggtccattgcctt

SEQ ID NO: 3556 - DNA, 852 bp, Glycine max
agacttccatgttttgcgcacaataggagcacagagttcagcttggtcacaacttcaatcgtcacatcctagctttgaagtcccaagtaagtcttattttattttatctggtgaattcactagaattatgccaatgttgagggattaagaagggatttgcttgcatgagattagaaattcatgatgacattagagtttgtatccggtattggataatatggacaatttagtcatttcttggaacatagtaataataataatgataagactcttttttttctgatcattatcagttgtgtagaattgttatatcgtttcagtccacaataacaattagcagtcttcagtacttgtcaaataatatccatttttacatgttgccaaagccagattctctttttatgcaaattattagaatcatttgaactttctattatcagcactaaggttaaagggacatgaggaacctcgggattaaagtttctatgtatcaaaaaaaatgccaagaagtttgaaacagttctcttaacaccattaacaaatgttttcttgtaaattatattaaagagctatctagctatcagttgtctcaaccattttgcgaaggtttccataacttgcttctgttatgagcggtataatattacctaaagcacctgattctgagtacattattgaactgagcatgttagaccaaatttcaagtacccctaaataaaactctcgggaagtcacagcaaaacaaaagcacctctaacagactgacacaatcactctcttcaatcacacctcccatttaaaatactaacttcccttctttttctagttaaaatgctgcaggtcgactctaga

SEQ ID NO: 3557 - DNA, 742 bp, Glycine max
ggaacctaaaatgggttagtacattagtaaacattaattaaattttgttattttgtgacttacccatttaggtaggctccaagatacacatcgcgttgtgaactctgcatccaactctttatgtaactttcagattcaaactgcgattgcccagacctctgaatggactgaggctcgaggaatccatagatatcagaattccccgctcgcatacatgtttcagtgagatgcctgtttatgttaagtcaaagttaaatatttatgaattgaaagccataacttaggtaaataaaagccttttatataaagacttacagaatccacaactgtaacactgatatgctgagacattgaccaccgtgtgcgatttcggagaggtcttcgtgctttatgtacagggggaaatctggattaacgaccccgaacacggtggcatcccatctaacctgataaggcctcaagaaaagctctgggatggtcaatgtcatcagataaagtggatcatcgacctccggatcgggcttcggaggtggttttggcggagacacagctacctgttcatgaaacaaagttaaatagccaaattttgaggcacgcttaatgaattaatttaaaaagaagaaacatatagtaaggacaataagtacctggtttgataaagacttgatcagatgtgtcgaccaagcaaggaaggtgtgaagtgcctgccccactaaggaaacctcagcagtgggtacaggaa

SEQ ID NO: 3558 - DNA, 907 bp, Glycine max
aattgcatctattgccaaatatgggcatatagcatcagcaccaaaaccaacaagggtgcagaaatgatgcactttgcgtggctcagcagattcaactatcaaggcaaccctagtgcgctcaagagttttaactagatgctgatgaacagcaccaacagccaggagggagctcacagagatgcgtttctttgagaaggctatcacagatacaaataaattagatggatgttcactgtaaaaagtaactttaaccaatacaagcaaaacatagtgcaatacctctatcagacagcacaagagtggtgtagccttcattaattgcatcatgtgcctctgcacacatcctgtccaaggcttcgtccaaccctctcttaccacattcctttgaataagttatgtctataactttgctgcgccatcccctataattcatttttttaatggcttccatttcttcagtggataaaaggggaccttttagtgaaaggcggtgacattgctcctcagtgatttctgtaagatcaccttctggaccaaccatacattgcatagaagtgactattttctctctaataggatcaataggagggtttgtcacttgagcaaacatttgcttgaaatactcaaaagtgagtttttctcttttagacatgacagccaatggagtatcatttcccattgacccaagggcttctacaccatccttggccataggaagtaatagcatttccaatgattcaactgtatatctgcatgaataaagcataatataaaaatatttccttcataaatgcagcagataaaattgaggaaatattaatgatggtcattgcatacccaaaagctttcagtggaactaataaaccatgaattcccatattttccatatctgcatcatcattggata

SEQ ID NO: 3559 - DNA, 556 bp, Glycine max
agaacatgtcaccaacaaagcacgtgaactgtaaataaccaactaaaattaccggtcatcaccaccaacaatgcccttgcattccactggtgcagctaatttgaaaagatttccagatccatcaaggactaaatgttccttcaaatgaaggcgtttggcagcctctgacacctaataacataaacaagcttagaagacaaaacacaattcatctgatatggaacacaggagatacagaaaaaataccaattgataaagaacacagggcaaaaagaaagtgtagttacacttcacatataatgcaatttaaaattaaaacatacttattttttttcacctaccaacaaattttcttacaatttaaattcacccacagtaagttcagtaaaatgcttacaactcaaatcagacaatctacctaaagttaaactgccacacccttcttccttaccttagaatgaaagtcttcattccagcaaattttctttccgttgtcaacagagccgtacaagagggagtctgacttgtccccttgaagaatgcctggtaagacact

SEQ ID NO: 3560 - DNA, 643 bp, Glycine max
aaggtagacttgcagcgcactagccccaatcagtgctgctgattcaaaaattgccttgtgtactgctcttctgctcattgcatcgttcactgcattccagacataagtgaacatgatattgcatccgcagtcaagaagtgttaatagaagaaacaagtttgtagcttttatcaactaagatgcttagtgtatttgtttttctgttcgaaagtcagaaaatggaaatttcaccataatcaatgtcctcaacagtgaacagtgaacagtgaacagtgaacattgtcaaagagatagggagcaatgttctcaacagggtggtctcttttggtatggtatctgaataaattatgatgatcacatgttgggacatttgttcatattaaatggtatcaagaataggaaacaagatggcatacataaacttgggtttttatctttaacacgagtaatatgtataattgataggtataaaagattttatgcacagaaaaatgtaaattgtgcgataaacagcaaagtaaaccttaaataatacctattgcttggcggtcagtctgagcctctaaccaatgctgttcaaactgaatgttgtatagagcttcctccaacttcccaatctgctccagcaaaggggtgaaatgct

SEQ ID NO: 3561 - DNA, 610 bp, Glycine max
aaggtagacttgcagcgcactagccccaatcagtgctgctgattcaaaaattgccttgtgtactgctcttctgctcattgcatcgttcactgcattccagacataagataacaccatattgcatccgcagtcaagaagagttaatagaaggaagaaacaagtttgtagcttttatcaactaagatgcttagtgtattagtttttctgttcgaaacatttcaccagaatcaatgttctcaacagtgaacattgtcaaagagataggaagcaatgttctcaacagggtggtctcttttggtatggtagctgaataaattaggatgatcacatgttgggacattagttcatattaaatggtatcaagaatagaaaacaagatggcatacataaactagggttttacctttaacacgagtaatatgtattgatgggtatgaaagattttatgcacagaaaaatgtaaattgtgagataaacagaaaagtaaaccataaataatacctattgcttggcggtctgtctgagcctctaaccaatgctgttcaaactgaatgttatatagagcttcctccaacttcccaatctgctccagcaaggggggtgaaatgct

SEQ ID NO: 3562 - DNA, 1122 bp, Glycine max
attgagatgggtgaattatctgagacctgatctcaagaggggacagataacaccacaagaagagagcataattctagagttgcatgcaaggtggggaaacaggtaaaatttattttctcattctcttgaacttgcatgtttccataaatggcaacatacttattccaaggccttgattgctaaaccaaaaacttcaggtggtcaacaattgcaaggagcttgccagggagaactgacaatgagataaaaaattattggaggactcatttcaagaaaaaggcaaaaagtccctctgatgcagcagagaaggctagaaatagactcatgaggaagcagcaatttcaccagcaacaacaacaacaacaagaacagttgcagcagcagcatcaggcacaacaacaacaaatgcaattcaactttgacatgaaaggcatcatggccatgcttgaggacaacatccatagaacaccttatatatctcaatcaagacaagaaatgatcaacatgcaccaaaacaccacagaagagcaaggatacttgtactctatgctcaatgacaactcttctgcttcttctgcaccagagacctctgcagtggaaggcgtgaaaaggttagttttgatcaattgcttaatatgaaaacgtggaacatctgttagcgaaagaatccacccgccatgggtttcagtttagattgcaaagttcatttcagtttttgtttgctaagaaacctaaccacacattttagaattctaataaaaatttctaaaacattcaaagcattagacaaaatgtatatttctttgatatggttttctaatttaatcttctgtatgtaaagtacactttgtaaaattgatctgactagaaaggaagcaaataaatggacccgcaaccacaacattgcttaaatgtttctttattgttaataaagttaggtgtcaatcaacgcaagattaggctgtgtttattttaaacattacttttggatagaagagattaattattaatgctttataaaacaaatgataagatgttgataaacaataaataacactggtaaactgttgaaatgctgcctatattaattagtgcaagaaggtatgaacaactctacttctt

SEQ ID NO: 3563 - DNA, 667 bp, Glycine max
ttttctcaatccatgaaaacattctgctacattagattcatcttgaaacatctaaataaaataatgatattagcgaaattctcttaaacaaaaagctttaattgggttgattggttgatactaattttgggatttattatgttatatattaattttagggctttaattttacttttagttttcttgtaaattagctaggattgtttgtctttccttattaagataatacatagaatcaatctggatattatggtaccagacttgaaatcatgggatgaagacactgtcctcttgtcttttttctgtctttctagttcaatacaaaacagctttatcaatggcagatagaagaaggccgaaattctgccatataaacacaccatcgtgcctcatggcgggcctcccttcacaaattttctatggcggttggcagaaaatctgccatgccattccgccatggtgggcgccatagctgctatttaacaacactgatacaaatagagtagttcattctctcatccatcaaataaaatgattttttagcagcagctagtaagattctatttgtattaggtctccactgtaattttgatacctcaacatcgtggaaaatactcacaggactggcaaacttaggtcaaattatagatttttataagcaacatct

SEQ ID NO: 3564 - DNA, 1265 bp, Glycine max
aatccctaatgagtccccaaatgttcagccttcagatcagaaactacttgaccctaataacctcatatttcctcctaacccatttcagccaccaccctcagtccccaaccctcttcagcagcctcctctaattcctaacccattagaaccatcaggcccatcatcacttgttcctaacccactccagcctccctcaacaggaacatcaccaccactgtttccgtttccaacagtaccaggtttaactccaccaccaccagctcttccctttcctttccctccattattccctccacctagcggccctggcacaccctctgtttcctcttcaaagaatgcttctccttaactaaatagtagctatccatgcaattctctaatagctccttccacgtgatgaacttactttctttatggaaattgtaatatggttatgatatgaataggaaagttaacatggggatcgatgtgcatccatagagtgactactgctgaaaaaattgaaacatgaataatgtattattagtaataaatttttggacgtggtcattaattgtgttaatccttgagttgttgtaaaaatggaaacttctgattatgatactgcaggtgcatgtcacgtgagggatacatgctggcacttgtgccagaaagtttgaaaagtattattaccactactaattgagatattggaagcaattattgtggtgatgattataataatgtccacaggaaacaaatgggtggcctctgcaacttctatctgttgcatgcttgtctttggcagcaaaaatggaggaacctcttgttccatctctcttggaccttcaggtataaaactataatgtgttgacctaacttttgcactagaatcaataaaatgaactttaacatacgctccttgcttttgcagtagaatcattgtaatgaaaaatgatctcaaacatacgctcctttgtaatgaaatttttttggcatttgggtttgcttttacacaagaatcaataaaatgaacccaaacatacgctcccttttgcagtagaatcatgggtttacacaggcactattgaattatggtgctagataataatagtatgatattatcttctgtttatagtacattaactttggtggtgggatttagacttgtcccaataaaaactaatcattatattgttattaatgattaaaagttaaagcttccatgttggattggcattttagttcatatacaatactacgtagtaattcacaatgtatttata

SEQ ID NO: 3565 - DNA, 548 bp, Glycine max
aaaatatttattgaatacataatgcttgatggggtgaacgacgaagagcaccatgcccacctattgggaaaactgttggagacatttcaagtggtaaatactcaactgcttcttcctttctctattcaatattcaatgtctctaccaaacatttatgctctgcccccataattcccatgccactcttctactctaataaaatgtaggcaatcgtgaatgaatagtgttgtttctcgataattcagtgactctcaggaaaatgttcttaaaacttgatcgtcattctctgctcagttacacaatgctgttaagtactaacattttgcatatggtctgaattttgaaacaggttgtgaacttaatacctttcaactctattggtaccttgagtcaattcaaacctaccagtgagcagaaagtctcaaattttcagaaaattcttaggggtacctataatattcgaacaacagttcggaagcagatgggtcaggacataagtggtgcttgtggacaattgctggtgaacatatctgacaagtcccttggca

SEQ ID NO: 3566 - DNA, 632 bp, Glycine max
tagagcaccccctcgaaagaacagtagttgctaagctgtaaacaaagttacaacaaattacaaaaaaatgtaggattaatttggttaacttcgaacacttgtgattactgataaatgtaatcggttggccatgaaaacctgaattgtttttaattaactttaatttaattcaatcacataattgcattttgaaagaatatttatcaagccaattcattaaagaaacttcgaaaaaattaacacaataaaattatgagaatggtagtttagttaatcattcaattgagacatctatttgggctttggaaattggaattgagggaaatgaaacaactacaaatcatttttgtcaacaacttaagaaaataaaataaatataacgcgtgagtgcacctgcatccaagtttagttttgttaagtttgaagagtggataataaaactaaaacaaagagaatgacatgtatatatataactatacataatgcatgcatgatcaatatcaaatgggaaaatgtggattgcaatttgtacatacactatatattatatatattggcatatagtttctataccttaagggtattaccgcaatggtggcatcggaagcaagccttatgatagacacggctat

SEQ ID NO: 3567 - DNA, 564 bp, Glycine max
atcctagttgagaagcccaactatcatcagtaccagagaaattgattcatatccaatcatatcaaaatggagaaaacaatccatcttgtatatttcaaatgccttgttttccttctcatgaagcaagtaatagtgatggcagaacctagagccaggactgtcaatataacatgtaacaataagctagagcacaacaccaccatctttgttccaaattttgttgcaaccatggagaagatcagtgaacagatgcgcaataccggttatggaacagcagttgtaggtacaggaggacctgacaccaactacgggttggctcagtgctatggtgatctctcattacttgactgtgttttatgttatgccgaggcacgcacggttcttccccaatgcttcccttacaatggcggtcgcatataccttgatggttgcttcatgagggccgaaaactatagcttctatgatgagtacatagggccaggagacaaggctgtttgtggaaacacgacaaggaagagcacaagttttcaagcagcagcaaagaaggctgttttgagcgctgtt

SEQ ID NO: 3568 - DNA, 522 bp, Glycine max
ggggtcatggattggtactgaggaagcaatgtagcattagtggtttgttgttgagtgtagtaagcttgatcttgcaaatggccaccatattcatagccataattagtagtagtagtagtagtactagagggagccacagcaatggactgtggttgatggtggaactgagacaaacccacatactgtggctgaaattggttggtaggtattggagcatatccaggatttgatggagccatagttgggctaagtgacttggtggagtaaataggtggagtaccatctttgtatgctgctgaggtaacaacactttgtggcattaatggcctgcttgaagctaccacattagggtcagaaatattgtgctgcaatgccatgttgtagggttgtgttacttgtgtaggtccaacaggcatcacataaactgggtactgttgttgacttatatgagggtgaagttgttgtagttgtggtggtggggcataaactgggtagtatgatgaaactggcactggacctgtg

SEQ ID NO: 3569 - DNA, 575 bp, Glycine max
aagcaaaaatatcgtatatcgaagctagattttgacggagaagcactggtatatgtacgacgttatatatgtggtatttttttattttcaattttttatattgctgaatcttacattaaagtgtggaaaatactaacaatctcactcaatgacgattaagcaaacagtaattaattcgtgaaaggtgtgaaaattgtgcattggggtaaaaatgtgttcagtagttagttttagtgtctttcacttttctaggatcattttaaatttaggttgaacacaagttgaaaatatatgagtactgaaaaacctaccttctggcgtcttatttaatccctacgaataaaaaaaaaaattgagttgaacgaattcagtttcgatacgccatattttgtgttctgtcggtccatgcaacgagaaatagttatttttggcactaatacaacttacaattaaacatattattcttgataacttgtgcaaagtctactttggtaagttagttagagagattgggaggagacagaaacgaagattgttcttgcttatctggtgtgtaagtagattctaaaaggttt

SEQ ID NO: 3570 - DNA, 502 bp, Glycine max
tgcctataagaatgaatgatgtatcgtgatgaagcaagcagaaaataaaacttccctttcttaccttcttctctggaggttcctagacctcgaatgctaggaattactaaattgttcttgtttttatccctgatcatatcaccttgactttgatgttagttcttgatgttgtcattgttggcgtggatatgttaataaaaaaatttggaatgacaaacaagggaaagaaacgtctctgtcttattacaaatgccctatgtccatcaaaagaatctgatgaaggaacaaaggaagagcaagttaccaccattgccaaacaaatgactgcccatggtatgaaaatggaaagtataattctgagaggaaagttcagtatggctgcctattggtatgaaaatgaacgcttgttagatattttttcaaaggaaacatcaacaagattgtcgtgtgtggagaatccagtttctttgtttggtgctcttaaaacaagaaatataactcc

SEQ ID NO: 3571 - DNA, 586 bp, Glycine max
attgaaggggattttaagtctgaataaccttcaaacttaaacaaacagaaatcaagttttgtttacctcaactgagaaactagaaagaaaatattgtaggcaaggaaaatttcagagttaaggttttgtcaatacatccaaaactaatgtaattatctttatggttataattatttattttcatgcttgtatgttgtagttgctcatctcttttaagctttcttctttctttctttttttgttctaaatggcaatcttccctatactttgtctcttcacagctttatttttgttcttgatctctgcttcaaagagtagtttaataaaatattactataataacctatttagcatgagtttgttgttgcctgctggaattcagataaaacaactgatttagatgggggctggatccagacattggatgaatctttatggttataataaccaattaaaagcgtcattttctatattgtcacctctagtcaagaagtcaagaactctagcaagaagaaattggtgtctcacaccctttagcatgagtaggcttttcatttaataaactattcttataataacctataaa

SEQ ID NO: 3572 - DNA, 1110 bp, Glycine max
aggtgtgagagccattgcatcttcagcaaatgtgtcaaccatttatacggctggtgcagatgggatggtatgtttgatagatttcatgacaggaaacctgttggagaaatttaaagcttctacaaagccagtatcctgcatgtctgtttctccaggtatttatccttcacagcttttgtagaaatcttgttgttttggtgggaggagatcaagtcaatctgaattagacatttgtctatggtgcgtggtataatttgattgagtttccctcagaattctttaagcttcttgttcttgtatattgttattaataataaaataaaattgcaaatagaaagctcaaatttctaattgtaaggttcaatgatccaaatttagttaaggagaccatctactctcaatgttagttcttttattatcattagaatgaaaaactgtttatcacttgaggtccatatttgttgaatgggtgctaaactattagcatttagcaatattgcaataactccttagctgcagtggaggaaggggatattcatccaatataggtattagaggtacatatattggctttctctaaaaaaattgcaacagaagattctctagactttgcattctgttaccacaaaaggccattttggcctcaatcagtagacagtaggtacagatcaaaacaacaattaccagcaagtccacttgaccagttaaacttaatacaatcatacttcccccatatggtacaggttaatatttgcaggaactcaatgttagtatgtagaatattctatagaaatacaagatctatgttcatagcaaccatttctattttatagtctataataaattactaaagaaagaaatgaggaataatttaaaataaaaaatcaacataagttaacctttgacttaactatctacttctactaacctgggaatccagaaatgtgcatgccgcctccagggcaacttcaagagccctgaactcaaaaggtaaataatcaggggaagagttactaaatacattttcgaaattcctacttcctctccttcgattcatgtcagaactgtctgattgccaaacctcccctaccccagttgttgtcaaccgtc

SEQ ID NO: 3573 - DNA, 748 bp, Glycine max
atagagaatgtgaacttagtgaatgatctgcttataactcccctgaacttcccgatcagattctaacataggcatgggataagctgtgtcaaatgtaattaactacagaaagtaagaaatatcaaatatacataaatatcatttaccagagtaaacaatttttaaactcaaattcaagagtagacattagagacaatagatgatattaatttcatccctctgacatttactccatctaggttgatgaaacaaaacttttgacagataattccaaaaataatgaacgaagcacaaaaggttgttataagaattggttatcacgagaattcaaacaacacaaaaaataagataatcaaataagcaaatacctgaatcattcctggatggtctctagtgttgtttccaggccatggcgtaccatcttgcatcacccatccttcttcaggaaccttttgtgccttcgcaacaagtccattgacgcgaattttaaattcttcatattctctctgtgaagcagaaaaaggaattgaccttaaaaattctctaagaaacattagtgtagggcacatgcataacaggaccacagaatgatccacatttggaactcaatctctcaccttcattgctctacgatctttgacaaatgatggttgaaccttatccttcaagtagtcaatcttctgtgcaaaataccactcaggtgcccgaggttcaatgtatatttctgcaggcagcaagctggcgaatc

SEQ ID NO: 3574 - DNA, 714 bp, Glycine max
gctcaaaaaagtttatgtatattgtttgttcagcatatgtatttccagtttactccagtttggtttctaaaaggcttttcaaactttgaataaatttctacatatctatctatccaaaaacaggtcaaatattaaatactcaagatagcattttcatgcacatccagatggttcaaaagtgaaaatcaggttatttgattagattatacaaaaatctcgaaattaatggtttggatagaagtatggtacttgatagaacattatggcggaagttgatccatgtagccgaccccacctagtgggataaggcgttattgttgttgttgttgtatacaaaaatctacagttgcacactggcagtaagattagaagacgccaagagggtttagacatctaaatctatatacacatgatatataccagtaatatacgtatgccgtctaaggtgtgtgccacatcaaccaaaaagcaaaaaattccttccctcaatcccctttactttccctcccatccgtcttctcccttttcacctagaagcagacgtaaaggaacagccaaggcagcagagtgactttacctggttgttgggtctttcttttgcttctccctatttaggtaagaatgaaggcctgtgagtggatagagccatggattgcaccttccttttcaaatcatggaagctattttggaagaaatgggaaacaccctcgaact

SEQ ID NO: 3575 - DNA, 500 bp, Glycine max
ccgactgatgatacaaatttctaatgtctctccaccagtgggaatatccccttttgtctctatcattttggaattctgacccagagctgttgctgatcagatgcaaaagcccaaatccatcttcccatcaaagctacattgaatttagaaatatcctttatccctagacccccatcagtcttaggcaaacaaatatcagcccatttcacccaaggaatttttttatgatcattgtctccaccccacagaaaattcctttggagggatatcagctttttgactaccttttgaggtattttgaaaaaggagaggagataaattgggagggcattaaggacagaatttataagggtgatcttcccagccatggatatatctctctgagagcccatttggctaatttagacttgaatttagtgatgagaggctcccacaccagctggcttgaaggattagccccaataggtacacccaaatagagaaaaggataatccagctgt

SEQ ID NO: 3576 - DNA, 1074 bp, Glycine max
tacaacaataaagcaggctccaccaatgttcagtcttcaaagaagcctgttgaaaatcctaaagttattgcaaagtttgagtggagaacaaaagtgaattctcctgttgttgaggatgcaattgataacttcaccagacatttaatttctgaatgggtgacagatctatggtattctcgcttaacaccagacaaagagggtcccgaggagttagtgcacataattaatggtgttcttggggaaatttcaggacgcatgagaaacataaatttgatagattttttaataaggttcttaatgtcattttttgactgcggtttttctttaattcagattgtaatttgattgactgggagttaacctttgttggttcagggatcttattaatctcatttgctcacacttggagctgtttcgtgctgcccactcaaaaattgaaaaacgacatacaggttcattaacaatcgaaagtcgagacatggaactaaaaattgttttggctgctgagaacaaattgcatcctgctttattttctgcagaggactggtcatcttctgtatcctgtaaaacaatctgtttacaaaaatacttagtaatgtgtacaatgcatatgcagtaaaatgggttatcagaagactgcatatgctttatatgacaaaatcatcaaatacctcaatgatagcatcggaatcgcggattcggggagggcgggtatcaatggagggaagccggtcaccataaccaccttccacctgtattgctctaccagttggctggtagggaataaatttattagaaactagagatggaattagtgaataaaggaaaatatcttccacaaacataatgctacattgaccaacatcaagcagcccaaaaagcatacataaagcaggtatatgggcttaaaatgtgaaaaattcctacaaacatttagacaaaaaaaatatttagacaaatacatactagtggtggtcgcacacgtccagtcccagaacctttcataacatcgctttgtccgacatctgactttagagaatttgtgttttccacgggactatcatgtataccagt

SEQ ID NO: 3577 - DNA, 1074 bp, Glycine max
attctatatctggttggccaatccaaaaccttctcccttgatctccctgcatgactttcagctttgctattagaaaactcagttcaattatcattgacaaaattccagaagcatgaaacataacacaaaaaacttgcatttccatcaatgaatcacatgttgtaaaattggtgatgtgctgctgaataacaaaagaagttcaccaaaagagagtcaatagtaaaaactataatgcatcaaaatgttcatgatttccttccatttcttccccctttgactcctaccaaaagtctcagaatgtaatgtttgaaagaaacaaatacataccatgcaaaaaggaatccaaacttccatggggcattagctcatatatgagaagattgtagagtggtgcagtgtaatatccatgaagtgtcacaatgttgcggtgctttatgtctgccattgcttccaactctctctcaaaacctttatctctctctgcagtctgcaccttactagctttggcacgagtattattctttgatttactgaccttttccatgagtgaagctgtgaagtctaaaacttcattcatcttatcccagctttgctattttatattgaatcacatcactcgattgaaacctaaaaaatttcctttgttcatacttactttgcattgggaatttgggatgaagcgctattaagtagttttttttttctttttcaaggacctgacgttacattgtggtgctggcagacattggttttaatttctgttaggaaatcactgattctttatttttcttccattgaaaaacataaagaactggctgtgggaaaggatattaggctgaaaatgcaccttatgtttttttcccctgaatttcatctttaactcgtattcagtgagtggattggttaagtaatgaatttggtaatatttggcataattttcacagggtttgtctgaactagcagtaaatgcattcaggttgatgacaactgagggtctgacacctagtctcttagctctcaattcattgatcaatgcattcggtgaagacagaagggatgctgaagcctttgctg

SEQ ID NO: 3578 - DNA, 1133 bp, Glycine max
atgcttctgcttatcttgccctcagcctcagccactaatctagaggcattctatgttgggaaccaaagtaaatgaagatgaatgcatgactgcacgagataaaatagaaagaagagaaatcaatggtgaaggcaaattgatggattagagcctaattaaaattgttcaatattatttagatagggtctcaactctcaacattgtctattaattagactttcaaagatacgggttccatacatgatagagtgtgcctattacaaacatagctccaaagcaacagagttcaatacctcgaaattttaaaccttcctactagtttagacaaagtttaacacaacaggagtaggaagcacgcttatattacagcctaaaaacagcaaacgcaaacacactcaaatgacagtgataacataacaatgctgagagcaacttctaacttctaaggttacattacagaactacaacaggactggttactctgtgcctgccatctgtccaagacaaattcccaaataaaggcaacccatgacgggcaccaattggctgcagaaactaagcgaggcaagttatgtttgcttgagaatattaaacatttttgcatgcctgtcctaatcattataagcgtagttcattcaaatgcacctttggaatatcatctttctcaccatttgttttatactttcttcaaatgcatccatgttcccttaccatagagtaaattgaactgaaagttttgtatgcatgtcctaatcattatagagtagttcattctcatttaacatcaaatgaaattatttattgttgataatcagaaatatttaatgtatagatttattaggatctgatttataggaacatatctgatttagaggaaactgaatatcctctcattatcagtatttattgtaataaccactatataatagaacatccacggtgtactctgatacacggttttcacacaaatatccttcagttttatcctattttacatttgtataccaaaattcaaaacttcaaagttattgatgcttctttatcggagttgcaggatgaaatcgcggaatatgtgcagaataacatgtggagtccagagtaccctacattagtttacaagaaagaatgagtaa

SEQ ID NO: 3579 - DNA, 481 bp, Glycine max
aagattgttctcatagccataccttccatgcagtcaattgaacagaagggtaatcctttttaactttgtttatgactgtactccaaggtcttcctgcaaaccagcctcacactttaattaccatgcaatgcagataaaatagttaggatattttatttacaagtagaattagtcatgtaataccatttgtattattcataagtcagaaaatttttcaaaagattattttgtcatatttaagaaatgattcattatatcttcaaaatgtattagaacacttaacaatgccaggaagctgcctacatttttggtttagtccatgaataaaatcagagagaaatatgaagtgtttttttttctaagaagcttaaattttatctatcactcaatgaatactagtttattaaaacttcaatttgtttgtgtcaaagataaacctatgaaatttttattatttttaaaagttaaataataaaataac

SEQ ID NO: 3580 - DNA, 902 bp, Glycine max
atggacaagtttaatctcaccttttacaatggtttgtgatgacattaggaaagacctacagtaacatgtcctgtatttactgtgtattattttaaattcttgatatccggccctcatattagaagggatccttacggaaggaaagttttatgtggtcttgctcgtaggccaagtaaacgcaaaaacgtatgaaagatcaagaaaggaaatccagaaaatatgtcatttgataaacctaattgaacccattttctatattttcctttcctgcccaaatatttatgtataagcttccttcaacttgtctacatctctgtcactttatgactgccctttatagcatctccaataatgaacatcatttagtttttttaactcttttaatggctcttaccatcccacatcggttttaagaactttagcaacttttcactccaatgatgcatctctgtaagaacttaaacaggtctcaagttttttacatcttaatttttctttaatgggtctcagacgttacctttcaattgttttttaatggttaagagtcagttcttttataagaacagttcttactcgtaatgtccatatcatcttcctccagtggtgaacctagttaaaaatggttcttaactttaagaacctacacaagaactatcttagagatgctcttgtagtgaaggtataggttgttctaagatggtcacatcaatcacagatcaccttatgtgttctatatttagaatttaccttgtctgttacatcttaaagacgatactgaattactgatgcttatgcagtttgaggatgatgtgtacttgccaacggatgagccacatgggtcaattcaagctagtatgagccgcttgtgtcaaagctgtagaaactgcaggcatacaaggttg

SEQ ID NO: 3581 - DNA, 516 bp, Glycine max
tatgaaagcagtcccccattgcaggctgttttgtatattttggttaatagtatctattaagtcttcagaaatattcaggggcaacaagggaacagaacataatgaatcatataattaataatacaataatagacatactgtgaacttgcagattcaatcatgacagtgtcaggagtgggctgaggaaactaacaccagcccatgttcgatcaatttgacataatttcttggaacaaacggtgtggttggggtgctaatatttttggcaaatttactcaaaggagtcacatttaaaaactatttatgcaaaggggttactttttgcatggaacccgccaatgataatggcgaaaaagtatgagtcgccattggcaacagcaatacagtgctgacgtggaagggtgccgtccgtcgcactagcgatactggctggcgtggagggactcgctttcttcattggcgacgtagggtctcgcctctcccattggcgagacaccttcaatttcaaattaaaaa

SEQ ID NO: 3582 - DNA, 1218 bp, Glycine max
tctcatatagaatgctgatgattaccatagtacaccattcctggcagttgaagtggtcggaaattaggaggtgctggggcttgttgtgtcatttttattggttgatgctgacctataggtgtaggctgctgctgagttatttgcattgtctgatgtgtcaaaggaaccattggacccaccatatggggtgggggtggccccaatggtaatggtgcgatgctaccataaccataagaagaaatgacccctcctgttgattgcaaataatgctgggaggatgaattacaaagcatttgatattgaccctgtgatgcagcagctggattctgcaaggtgggttgaggtaccaaaaccgaaggatatgaatgatttggtgtggcaattaactgttgtgaagtcataaaaacatttggatctgatataggtattgacttctcaggttttgacatggtctcagaagttagacaagcactttttgcctcttccgctgcaaatgttgagagaacagaagtcatgattaactgcgatgacgtagaagctgttagcttatctgcaacctcagctgcaattgctgcagcaggattggtgcaggctattgattctatgtttctaactttccatagtacaaggtgatgctgttattcatgttaatctatactcaaagatgtgttgtgtaccaaatgaaaatatttcctagtgttaaatgctaacaaatttgcttttgttttattttttttctcagagggggagttattttgtttggttctgaaatgtttcattcttaagcgtaaatgcttgattgttgttatgttgttgtaaatgttcattcttaagtgaaatatctcatttgctttgattttgcattattacatcatgaaactactgcttggctttcttgattgtcatgttctttgataaaccttgctacctgatgttaacatgatttcctaccagactctcacaattttttgtatgaggcaattgattttgcattcgatggactctttaccttagcaagtagcgggtagaaattacttttttattgacagcaaccttgttattcacttcaaccactcgcgtttcagacttacctaagatccatctcaagacttaagtaggctggattttccaaattcattagatgttggaataagacacacctcagacgaacgaaatatgcatagaatttcttgtaacgttggtgaaccgaagatacaa

SEQ ID NO: 3583 - DNA, 494 bp, Glycine max
tacaaacagcttttcctttgctcttttggaggcatcaccatggtatcagctgcaatatactacaggcagtgttctgcaaccattaattgcttattttcaaaagaaaactataacttgccactttctgagtgttttggagtagtactcagatttagatatccatgtgaaaaataataccttctgtaattcttcaccattcaaaagttgtttaaacttcaaaagatggcaaaatctcttctttcaaaacagagaaccaaaagtggcggggggagggggaatcaacataaaactaaagcaattagttggatgccagttactgtctataaatactattacaaaaagtctaggtatactactaatttttattattcaagggttcaatcgaaaacaacaacagccacacgaaccaatttaaccaaggaagttcatgatcaccaaatgaagcaccaaattacagagaacaaaatccgcaaaagcacgctcaggtgcaagat

SEQ ID NO: 3584 - DNA, 1487 bp, Glycine max
tctagagtcgacctgcagcaccccaggcatactgcccacatctatcaaaattctcaaataatggcagatacattacagggactttgttccctgtagttgtggagaatatggtgctacctacaagataaagaagatatgcacgagtatgttgctcaatcacttccaatggagcatcttcaggacagcgagaaaagaactctttcaaccaacttagcttcaccattccgccacttgtgtaaccagactctggtgatctaccaagatacttttcacacactgaactgcatgcggtataggtaataccaattacaggttctccatcaattgccagcccaagcaagagtgcaacatctttaagagttactgtcatttcaccaacattcaagtgaaatgtgtttgtttctcttctccacctttcaactagagctgagataagaggattgtctagactaatagctgggattgaccttaagtatccaaatccagccttatctaccaactcaacctgtttatgagtaagtgtccactgatcaagctttgaagtatgttcatgacatctaagggcaccacgctcctgttaatgcattaatgagagaacagttatataaataattaagatatagacaagatttttcagaaaagaaaatgaattaaaatatgaagcagaaaggcttctcagctagaaaacagcacctgtccatcccaaactgcaggtttactatagaaggaagtttaaaaaaggaaataataagtcagattagttatttagagtacagccaatagacagtttagcagttggttaggaaataccctttaaataatagttctaaagagtaacagtggcatgttttgtaataagtgagctttgactgggcatattccagtgtggaaaggagaagtctccttttgtattgttctgtacgattctttaccatttcatagcaataaagtgtctttttaccccttttcctctctaacgagttctgtgttagaactgtttcctttctctgagaagagatccctaacagaaagattctttaagatctgatgactgtaataatataacatcaaatagaatgctaatggtattggttatagaaatctgaaatgattgcaagagatgtatattggttgaagcatgtgttgtactggccaatgataacaagatgagtttggagtgttattctgtttcatggtggcatgttatcgaaatataattttactgtgactgaaattttcatcaatatttgtattgcatagtcttcacaagtctgtaatgttttgtaggttgtggcggctgttggctttaagggaaaaagacttgagataccacgtgatttaaatcctcaattagcctcaataattgaggcttgttgggccaagtgagtgtagatatttctttcatttgtagtctgcttgaatattctgcatgaattttattgatatccatggtttactgcaggtcgactatagagaatagaccgggt

SEQ ID NO: 3585 - DNA, 1274 bp, Glycine max
cttctcccatctatgccaagaagtcctggaagagcagataatccaattagccctggatcacgttggaaaaaaggaaagctgcttggcagaggcacatttggacatgtctatgttggctttaataagtatgtgcttgtgaccaaaagttcttgattatattatgaagaaatcttttttatacttttaaatccattagtttatacatcttataaattgtttggttaaaatgttgtcatgtgtagggaaagtggtgaaatgtgtgctatgaaagaggtaactctgttttcagatgatgccaaatctaaagaaagtgctaagcaattaatgcaggtaaattgatttcctttttgacctttgaaatttttttgtgggactgaatagatttcctttttgacctttgtgcaatatgtcagtatctatttctgtttcaaatttggtgtagctttgaaaatctaactcccagattctggcaggaaattaccttgttgagccggttacgacatccaaatattgtgcagtattatggttccgaaacagtaagctctccatttcctgtttctttctcattctcctgtttttattagctgtttgtgagtgatcatggatttattttgggatttatctgcagcaggtctttgatgatcatcttcagcttatcactacacatgctttcaagtccctcaggaatcggtcgccttatttcggaaaaaagcttccgggccaagtctctgagaagctcctcagttttacaagattgagaaacggtaacccaaacacaggctttgaagtgttttcttacttctggatcatcgaatactttctttaccaaagtagtttttcccatccctcccattccagtgacagaaatcacttttcgtccggtacaaccattaatcaaccacccgatcagctgctttttaggcctgtctattccaactagatcagtgttgtccaggagaagggcgtctccccgttgatcatgccacgcgttaactgtttcaagatatgtttattgtactagctcacaagtgagaattgtgtatatagcaaaccgaatacactttccttgttagaatgaaaattgttcactaccacttgctcactttctacatgcacttcattaacactatcagtctattataaaaatgcaagttatgtaagtgaaatttaaatgcatcaatgatgtaaaagaagaggtaaacataatcaccaattggaggttcaaattgttattacttgaagctttcaaattctagacttgtatagtgaaacat

SEQ ID NO: 3586 - DNA, 642 bp, Glycine max
aacggggtacctctgagtcgactgcgcacttctcctctatgccaagagtcctggaagagcagatggtggcattaggcgctggatcacgttggaaaaaaggaaagctgcttggcagaggcacatttggacatgtctatgttggctttaataagtatgtgcttgtgaccaaaagttcttgattatattatgaagaaatcttttttatacttttaaatccattagtttatacatcttataaattgtttggttaaaatgttgtcatgtgtagggaaagtggtgaaatgtgtgctatgaaagaggtaactctgttttcagatgatgccaaatctaaagaaagtgctaagcaattaatgcaggtaaattgatttcctttttgacctttgaaattttttgtggggctgaataatcctcattctttgtgcaaaatgctagtatctatttctgtttcaaatttagtgtagctttcaaatctaactcctagattctggcaggaaattaccttgttgagccggttacgacatccaaatatagtgcagtattatggttctgaaacagtaagctctccatttcctgtttctttctcattctcatgtttttattagctgtttgtgagagatcatgatttattttgggatttatctg

SEQ ID NO: 3587 - DNA, 1087 bp, Glycine max
tatcttccatcccatgtccaccttgcagcttgcagtagacatgaatggacggccaagaatgagaggaatgtcagcatcctcttctatatctatgacaacaaaatcaactgggaatatcaagtgtttaaccttcaccaaaacatcttcaatgactccatatggctttgtaatggaccggtcagctaactggagggtcatgcgtgtaggcattatctctatctcttcaagtcaccgacacatggaaagaggcattaaattgatactagctcccaagtctatgagagctttgcttacaacaacctcaccaatagaacaccgtatcgtgacaactccaaggtctttgtgcttgggtggaagaatgcgttgaatcacagcactacagttaccttccacaacaattttgtcactatggatgtaatgattcttcttcgttagcatatccttcaaaaatttggcatagaggggcatttgctgaagtgcttctccaaatggcaaagtaatttccagtttcttgaagatatcaagaaatctagccaaatgttgctctttatctttccgggagggtaccaatggataaggtacctccttgcatttagtaggagtagcctctttcttcttttctatgttagcctcactcttgcctttcttcttttcagtctcaacaaccttttctttttgtttttcatttttcaactttttttctttttcttctttttcttttgtttcttcttcttcttctttttctttttcttccttcttctttattttctcttgacaatctcttattggcatctctccttcttcaccaccttctgcttcctcaacaatttcttcaagttcaattaaatcatcaaccggttccaatgcccgttcatcagccagctgttgtttcaatccctccatcttctaatcagctttactttcccctgctagtatcgcagctttgcactcttctttaggatttttctttgtgtttgttgtaaatctgtttgatggtctttcagctaattgctttgcaagctggcccacttggacttccaaatttttaaatgcagactcagtgctcttttgattagacattgacact

SEQ ID NO: 3588 - DNA, 602 bp, Glycine max
taaacaacgaccatgaaactaatgacagcaacaacaacgtttgatgtctctgccacttgcttccgtgcccctcctccttcgtgctcaatgaatccatgccacaccaggtcaaataatttaaccattcttctataccatattgctcttctttttctaaaacttcaaagtgttgttacgtgcagtttttcagttataaactccctgaatcctcacaagggacgacggataagcgttgctgttccacccaagtttccaaacttccggtaagcgtcaagaaatgtgtttttctccttcagtgagtggaattaaattattagatacacaagtatggaacataacgtaatattttcgtaattaaataaaaaaaaaaaaagggcccggtacttatactgttatacctcataccctgaatagaataaaaagataagcataatatggatcatgttctatttgtggtagctaacgtgcataagtcaaaacaatagaatttaaatatcattttttacctcttttgatcaattcaaacgtagcttgtgaattgtgacatgggttgtgattagttattaactaaagtgtggtgttattgaaggagggaagcatct

SEQ ID NO: 3589 - DNA, 486 bp, Glycine max
taggaaggtgctaattttggattgggtaatgttgctactcataatatgccttcctgaaattgtgtgattttcctgaaggccggggctacacccttattaaattatgttttatgagttgattgagcttcatgattatcacaggatgttcatcacggaaatgggacacaagaaatatttgaacaaaacaaatctgtgagctgtgtttaatgttatattatgttttctttctccaactgttgtgtgatgaaattttagcaacgtgctattcttgctctttttcccctttcttttttatgttttccactacttttttttataatttttttaaagttttattgtgtctttagtcactaagctactaatcttttcatgatttttcctgtgctaacaagttttttctttcccataggtcttgtatatatcattgcatagacacgagggaggaaaattttatcctggtactggagctgctgaagaggtacatga

SEQ ID NO: 3590 - DNA, 545 bp, Glycine max
gaaaccttgtcgcaaagataattcaagttaacattccaagatataaggaagtcctgccaggtttagaaagttggcaagcccagaaaattgcttcttggcacaatatggaagggcactccatccaatggttatctgtagtatgtatagaccgaaaaggtaagcttactattctgaataatattgattaaatctgctcttgctttggatgtgctaaatacaagtgaacatggttgataattgatagaggatatgctatgcaagagttggtaatcataataatagtgtcaacataagatacatgtcctttactccttgtggcctatgaacattgtggtaactgcattttttttatctaataatgtaagagtagagtgatatctgggtgaaacccattgggtcagagtgtggcttggatatttagtagtgtttcattaaatgctctgcttgatgactaatgtctctgacacagtaatcaaacgttattttgccatcttgcttgattgtaacccagtgaacaattattgcaggcatgatggctgaggtca

SEQ ID NO: 3591 - DNA, 412 bp, Glycine max
agtatcacactggagtaagcaacaaaatgtgtaaacaacaattgagaagctaaaaagaacaactgtttggatataagctcacatttctctcagcttgctccttctgggctacaaggtcacgcatgttcttttcttccaaagcttttgccttacattcccaaaaaactcatggtcaatctcatttattctgtaagtacaatttatgtatgattaacataacaaggttgaagaacttactgcacgctcagctgttcggcgatacctctccagtctagctctacacctctgagctgattcaccttctcgttctgatctttcagtaaaagaggaagcttcaagtaaaggacaatactggttaggattatatcaagtggaagcagtaaaatgttgattgaatttttatacaaaagta

SEQ ID NO: 3592 - DNA, 1324 bp, Glycine max
gcagcagcttggagtctagcttgatgtcgactcaaactatcagtagcctcagtctgagcagtgcttccactgcctgtcccagttgttcctgtgccaggtgaaaataaagcaatattaaataatacagcaaacaagcatatatgccaagtcatttaaaactacaagtgtcaatatgcttatttaatctaacagatattacattcaaaatattttaaacagtctaattgtattggactcaggcaagcaacataatcacccaaaattgaaagaaaacaaggtcttaaaagttgactaaaatgtgtaagaaaatatataataggatctttaagagcttcataatgaatgagaaaatcttcacatgaataaaaaagaaattatgcaatacaaaataaatagaaaaatgaaaatgatttaaaaaacactggtggaaggtacagatagcaaagtgtttgtcagagtctagcttccaactctatttttgtctttgtttccaaagaccctgtgtttctggaaataatatcagttcattccagacatcatgtacattaataacatgttccatgaacactatttaactctagtgagtgattatcatatgattaccctgttgatgggcatctgactgtgatccttgctgccctgcagctatcattgacagaatgacagtcaagagagaaaatcgtgctgtaaccaaagttttggttcaatggaaacatcaactacctgaagatgcaacttgggaattcttttatgacttgaatcagaagtttcctcactttaatccttgaggacaaggattcttttgggtgggaggaattgatacaggcttaggaaggtagttagttagttagactcgattctgttaacttctgttagttggaaagtagttaggcagttagtggttagaagctataagtagcaattggcggttaggaaacatttggaacagaatctgtaatcaacctccttcttgtaatttcttcctctaataatgaaaagcatgaccaccatgctcattggaattcatttgcttcattgagttcccttgtctgtccaagaactttgaatcctttagctgatttcctagttctgctatatcaagtttcactacaaattttaatttagaaagagtgagaaacgaagcgcccaaatcagttctacatgagagcctcttcaaattttcaagcgcccaaattctctttatattcccacgaagaaaacgaagcagctacgatgcttcttctatttccccttcaacagtaaccgagtaagctgaaccacaacactgcagttttttccttttgaatatttaattaattttcat

SEQ ID NO: 3593 - DNA, 757 bp, Glycine max
agcttgcatgcctgcaggggactcccaaatcatgaaaaatcgagactcgcattcgtggctgaaaaatcgcagaacccgagcatggaatcgcctgctcaacttgtctgaattgagaatcttgaactcgcgaagcttccctctaaaccatgcaattctctcttcttcattggcattaagtggagcaactagtactccatggtttctgtcaccaactccttcgttctcttcttgcatggaacgtaaaggggtgtgtgagagagtcaaagttgaccttatcccttctccatttctgtgttgcagcacttctactagtgttccagggtgtagggaatcgtggtagataagaaaatcacagagcatgagataaaatatggctgagaatgtgataaaagagaatatagatatcttggtatgtttgtgatcaagcattttgttacaagatcaagttcttcttctctttgcggtgagagttgaaattggaaaaaacttatgcagaagccagaagcaatataatagcctttgggtgtgtggtaagtttctacattcccacctatcttaaattggaaaactaagttttttatatttggtatatatttattaaaaaaaagattgtcaagatttccgagaatcaatttagtccactttttcgaaaaaactttcttataggaaagtcgaaaatttaactttagtaaattgaagaaaagttttaattatctaaaattactatattagtgattgtgaaataaaaaaactttct

SEQ ID NO: 3594 - DNA, 639 bp, Glycine max
tatcattgacagaatgacagtcaagagagaaaatcgtgctgtaaccaaagttttggttcaatggaaacatcaactacctgaagatgcaacttgggaattcttttatgacttgaatcagaagtttcctcactttaatccttgaggacaaggattcttttgggtgggaggaattgatacaggcttaggaaggtagttagttagttagactcgattctgttaacttctgttagttggaaagtagttaggcagttagtggttagaagctataagtagcaattggcggttaggaaacatttggaacagaatctgtaatcaacctccttcttgtaatttcttcctctaataatgaaaagcatgaccaccatgctcattggaattcatttgcttcattgagttcccttgtctgtccaagaactttgaatcctttagctgatttcctagttctgctatatcaagtttcactacaaattttaatttagaaagagtgagaaacgaagcgcccaaatcagttctacatgagagcctcttcaaattttcaagcgcccaaattctctttatattcccacgaagaaaacgaagcagctacgatgcttcttctatttccccttcaacagtaaccgagtaagctgaaccacaaca

SEQ ID NO: 3595 - DNA, 555 bp, Glycine max
aatatggaagaggatgcttcccatttattcttcaactgcccaaaaacacaacccttgtggtgggaatccctctcctggataaacacattgggagctatgccagccaatccgaggcagcacttcattcaacattcaaatggtttacttgggaagaaacaattcagcagatggaaagtttggtgggttgccttgaatctcacaatttggcgacacagaaatcagctcattttctccaatgaaccattcaatggcagcaagctgatggaggaagcagtgtttttagtatggtcctggttcagacagttggagaaagggttcacagagcattataattgttggtctagcaacctatcagctgctttttgtaactaggatagatgggctggttttaaatattgtagttatacacctagcttagctttaatggtggactaaacaccatctctgtctctatatgtattcttagtacccctggtactccccttatatatatataaatattacttttgccgatcaaaaaaaaaaactagacaatgcacagtatcatcctacctt

SEQ ID NO: 3596 - DNA, 521 bp, Glycine max
gtcaaaatcctttctagctgtcagcaatgatgcagtgagatttctgttgaactcaatgtttgctcttatgattgtctcatctaattttatgacattttttgtataatgtttaataaacataattttaacagcgtgacccagtgaccggaaaggagcctgatttgcagacattttgccagttgacacacaaaaggggaaatggggaatggattgacgaagcatctaaggaaatcaatgtaactgcattttacattactgctatattttcttatatatgatttgatttgatgttccccgtcttctctaaatgaccaattgttgtaccaattcattgtaggacaaagttgctgaacaaactaatgagaagagatgtcaaatagaagattctcaggaagtggtggaaacaacggaacaagaaaacattgatactgccttcaagacaatggttgggaagaaatcatttatgcaaggttttggagcaggactaaggtcatcatcatcaagctcaagtacaattcaac

SEQ ID NO: 3597 - DNA, 627 bp, Glycine max
  misc_feature (418)..(419): n is a, c, g, or t
  misc_feature (422)..(423): n is a, c, g, or t
  misc_feature (430)..(430): n is a, c, g, or t
gacagaggtcaccaaacctagtaagtgacaactacatttttctcttattgaggcatcggttttttgtttcaatttgcctccttaggacttcctccagctcatgtttgttgccagtttcatcatccaccacccttttcttctctggcttctcacgtttattgttgttaaacccatatttatgctctcttcccttcatgtcttgttttatcacaactttagctgaatctcccatcttcagcatagttgaatctcctgtcttattctccaatgacacactttgatggcctatatctcttttcttcgtatgttctagtgcttcagctttagaatgcataaaacaatcagaattttccagtgatcaccaaaggcttctgcatcaccattgacactctccaccctctttggttatggcttctgnnggnncttgcgngcctcctcggtagaatcgtgactttgttcgaggttgcactacaatgatgaccacgaatgtgtgcttcttcctcgtgtgtcaggtcgatatgtttcctttcaacttttgttttgtaaattacagtgtagttacaaaagcaaaggtgaaatgaaagatattgagctggtagaagaggacaatcacagattggtgctgat

SEQ ID NO: 3598 - DNA, 817 bp, Glycine max
tctcaatctacccctgtaactgaagcattcaatctggctgatgatattcttagacaaggtgttcgtggtatatctgatattattacggtatgggaatcatgaagatctttgaacatgaacaaataccttcctgcttttgctttgctctttttttttatctccatcaaatcttgattgttaaaggagtaaaaaggaaagaaagaatgaaaaggaaaccttgtatatgttttgacaattcagtagtccctacctgattcactaagttgtttgatatgttggttcaaagttatgccttaccattagtttatttgctagaattcaatatgattttttgttatcaattttggatgcatgtgggcaaaacatactcttgccatcccactaataagatgtcctgattatatgtttcccatggtttaaaattggtggtgtcttgtctgtactctgtagaatcatttatgctcatttattttgtaattgatttcagataccaggattggtgaatgtagactttgacagatgttcgagctataatggccaatggcagggtctttacttatggggcataggaactgccactgggtgtgttggggtactggaggcttgcgagcttggatgaaacatggtaattatggggtcctttaggaggattggtgtttgtttccaaaatactctcggttttaacgacggcaagctcttacgcgtcgagacttaagggtgattctatgtgtgctgaggtcgtcgtattgtctgttatatggttttcatcccgcttgtctggactgactattgcggataacgtcgtcgtacccatgac

SEQ ID NO: 3599 - DNA, 578 bp, Glycine max
gtgctctggccgatgttctggtgccttattaccctctctcaggcaggctcagagagaccaagaatggtaaactagaagtgtttttcggaccagatcaaggagcactcatcgtcgaggcgcggtctgatatcgccttggctgaattaggagacctcacagctccaaacccagattgggagccgttgatcttcaagtttcccgacgaagaacaatacaaagtccttgaaatgccactggtcattgctcaggttacccttttccgctgtggtggatttagccttggtttgaggctgtgccattgcatctgtgatggcatgggagctatgcagttcctaggtgcatgggctgccactgcaagaacaggaacactagtaacagatcctgagccctgttgggatagggaaatttttaggcctcgtgaccctcctgaggtgaaatttccccacatggagtttatgacaattgaagagggatccaacctgacaatgacactatgggaaaccaagcctgttcagaagtgttacaggatcaagcgtgagttccagaaccacgtaaaatctcttgctcagccatatgat

SEQ ID NO: 3600 - DNA, 1258 bp, Glycine max
aagctggattgtggctcgatagagatagtgaagaggacttagtagatgctactgagtttagaaggattgttggggcattgagatatctctgcaacaccagacctgatctggttttcagtgttggtctgattagcagagttatggacaggcctagagtatcacatctcaatgcagcaaaacgaatattgagatatgtgaaaggaacaattggttatggaattttgatgcccattaaccatagtgaaaatacaagaaatctatatggctatacagatgctgattggtgtggagacaaaagtgataggaagagcactgctgggtttttttttctaattgattcaacaccaatttcttggagctcgaagaaggaatttgtggttgcactttcatcgtgcgaagctgaatacattgctgctacaatgggagcttgtcaagcagtgcggcttgatactttgatgcaggaactgaagatcaaagaagaaggtccagttgagctatatgtagataacaaatctgcaatcaagttagccaaacatccaattgcacatggaagatcaaagcacattgaaaccaaatttcatttcataagagaccaagttgcgaagggaaaattcaagttgaatttttgcagatcagaagatcagcttgcaaatatatttaccaagtccttgaaatctgaaaccttcaagaaacagagaagcatgctgaatattgttgatagcaggaaactagcttaagggggtgtgttacaattaatagaataaataagctagttattgattgatatagatattgccacgtgtaataagtactctcctatatgttgaaccatattgagtattagctatgtgttaacagaaataattttcgttgtaactgttttcccctttctctctctcgttcttgaaaaagtgtatgtgcgtgattctttttttttttgatgaattcatactccaacaaagacattactaagctataatgatcaattatgttctgttatttctaaaaaaagactatcgccattatcctgtcatgatcgaaaaaatctccattgaatcttatatagtaccccatgtcccattatactgccacatcaaggatatctatctatcacattttgcataaaattaatccaaaaaattaaattggtgttagttccatgatctaattatctaaacttaaaaatgttcaatttcataaaaatctaattaacatccaattaagggagaaaaaataaaaatagatgacaacacaagtt

SEQ ID NO: 3601 - DNA, 308 bp, Glycine max
tttagctagtgttgttggtttgattgcgctcttggggttgagtgccttcctaagtttgaacacggcccaagctgtcccaatcgcatgccctgctgcatcaaggccttcatttgtaacctgtgctgcttcctctccatatctaacaacagcaaaaaataaaaaagaccaagtcaatcacaccacatcaataaggctcaaggtgcttcttgtacaggttaattaaatgcaacctacagaaataagggcttgtccaattttaaaaccaagcaagtgcaatccccacatgtcacaaccaaacaacgaactaa

SEQ ID NO: 3602 - DNA, 123 bp, Glycine max
gttccaatctctacccttgatccagtatcaattctatcagcagcgtcttccatccgaaacgataattggtctgctatgccagcagaggccaagaataagccagctgacattaacgtgtcgctt

SEQ ID NO: 3603 - DNA, 1180 bp, Glycine max
aaaataaaatcggagtggctaaccccagaattatggttgccagtttgagtggctttggtagcctggctggggttagtgttgcttcaaaaaaaccatctggatatttcaaccaaaatttagtagcatgacacaaaagatgctctaacaaaggcaaaagtgaggtagtgatagttacatgcaaatgccggagaaactaaccaaacaagagccaagtaagaagagccaattttaaaatagtttcccaaaatgagaagtataagccattgaaaggatccagctttatagagccatctttcagcctccattttgacaacagctgctttaataatgggggtcaactgccttccctttgatagtgtattcgaaagatatttttgaagtagaagaaaaccaaaatgttgaccagtcaatgctccgagaaaagctggtgcaccaaataatccaaccaccaacattgggcttgaaacatatggtactggagatgaagatatcaaaggtaggagaaatgaaacaaggaaggagaaacttaaggcaaagacccacatgaggagaacactcaaacacgacaaggccaatgaagctgcagtgactcaaggacaaaaacattatgttaggtgcttgacaaacacttcaatgcagttcaactaatcataatataatatcaataatcaatgaagaggggttatatctttttctcaataactcaatccatcaatatataatgatctttctaaaccactgttcatcaactcccatatcatcagcgcgtcaccaaatcatatgataagaaaaggttttactgctgtcaaccattcatatgataagaaaagggttttactgctgccaaccatactgttggttgcggttaccacccatcatgtttgatccacgcccagctgccgatccaccataaggagcaccttgaggataatttggagctccaactccatagccgcttccacccccaccacgaggaccaccactgggcccaccgggcataccacttgacccataaggtgcaccccgcccttgaggaggatatggcccacttccataaccacttcctcctccttgacctgcacgattcgggtgattgtatcccccaccagagttcccaccagaaggatatcttcctggcccaccagaaggacctcgaggctttccataatgatggctaggt

SEQ ID NO: 3604 - DNA, 634 bp, Glycine max
gttgagtccatgataatcaaagcatgcagcagctgctaccaatattttcttcgataatcccgtttctgtatgtgtttctatatatatatatatggggcagcggttcggtagaaaccaccacgttgacttgtgtacactccaccagcatatataaatgaaaagaacaccgataaaaaaaaaaaatgaaaagtgtggcatgaatttcgtggtgattaaaaataataattgcatcgagggatgccatgtatcctcccaatttatctcttacaactaacgagggttggttgaccaaaaaaagaaagaaaatggatttggtgcataactaattaggaagagttaaccatgcatccgtaaagtaataaattatggctctttttttatttagaaaagtattttaattgtgtttctgagtaaaattattttttataagaaatatatatctgtgaaaaaataaaataaaaattatttgcaggaattgaatataaataccaaataatttataacaactaatgatgatagataatatttacttgcgtttaaaacatactaataatatccctaccagctcattttctcgtgggtaacctgtacaattatatggtgattctaatttatacttattgaattctcgagt

SEQ ID NO: 3605 - DNA, 1469 bp, Glycine max
agtaggattgagacactgtgatcaatgcatagtagtcgaaattgttacgcacctggtcataaacttgcttggcaacagtggtttttcccacccctgcaattcccaccacagagatgacagtgcgtttttctcttccctttgtcaaccaatttttcaatgtatctctagggccatcaagccccacaacatcattttcctcgataaagagaggatccattcgaagtttcttccaggtgacatcttgatttcctctagaacttgttagtcttggttctaaaggaaaatggctttggaaaccatctctttcagcacgaacaagcgatttaacatcctgaatcttgtacgcactttgaaggcgaaggatttgagttttgatgaagtcaacagcctcacatagtaaagctgcacatcgaggatcatcaggttgcttatcctcacaggagatgttatattcatattcatcttcatcgatgacatcttccatgcgaaaagctgcttctctcagccgcatcaccctttcttttattctatgacaccttccatcatcttgttcagcttcagccactttatcagcatcattaatgaaatcttgaaagctttcaagttcatctgtaatgtctctaacttcttttgggagatctctcaccattttgacagcttccaatatttttggaagcgcatgcttaccagccaaggacactgcagttttggcttgtgatgactcattcccaacattgctattctccatggacagcaaatacagcttattcatgacgtgccctacttttggtcgtcttgaaagaattctcttacatagttccccaatttgagcgtgattctcaatcgctccatcaccactggaaaaaggggaagaagaaaaggttaatgaccaaagaaccatcacaaaattgcaatgttactatactaaatctgaaattggtgattggacatagaaccaaagaaattgtacttgaaaagagaaagttacttatgactaacctcgtagccaatgcagaaaaaagttgcttcatttcatcaagcaagttcaccacctcctccacttcatttttgtcatcaaggttaacagggttttctgacaagcttccatgcattccatgactcaaaccatcaatccaaatattcaaaagttcctagagcataaaaaatgtggaagaaaaacactgaatatattagacactgaactttgatggaaacccattttaacttaatatttgaacgcagcaaaaaaatagcttacctttgtgattgtggaattgtgtagcaccttatgatcaattgcaaaccataaattattcatcgtagcccagaaagagtcagcattggtagacatgccaataatctccctatctgatgtctgagcagtaacaataggagagcttttatttggaaaactggaacagtttgttgaagaaaactccttagacgttgagtcagaagcttctaatact

SEQ ID NO: 3606 - DNA, 467 bp, Glycine max
atagtctattgttcttgctcatggcagattcaggcaaaaggattaaaatctgcaatgatcgacctagtgttcttactgtcttctgacacatgattgtaatgggacccctggcaatagattagtctccatgtagtttctctattgttttgggcctcggccccatactttcactccaaaaaaaatgcatttgcagaactgactgagtagcaagaccgtgatgcaggaaagggaataatagtaattcagtctttactctttatgtatatggtgttcacactataaacttcaattatccagagccattattatatttataagtaatgaataaaaaaaaacataatacctcacaaaagtttccatccttagtcccataaatggaacggggaatttgtgatggattcttcatagcagaaccatgcatcatgccactatgatggctgagaaattggtggtctacatggccaatt

SEQ ID NO: 3607 - DNA, 594 bp, Glycine max
gcttgtgctggaccttcctttacaagacatgttgaagatgatttccatccagggcattcacttaggagcaaggcagtggcaagttattgcaccaaggtaatcaatctttatcctttaagatgcatttgacttcttggatcttggttctaatactacacaattagaagcatgcaggttctataaaatagccacgcaagataacaatggataggtaacaaataaagtgaatgatgtaatactgagttacacctgtcagtattgagctatctaatttccttgtcagagccagttcttgccaaatgagtataatgcttagtgggtttaacaatttcttgttatggcttgtcatacaaaatgactcacatatctcttctactgagataattttgaacatgttgggtgaaaagcaatggtgttgctgcaccaccttatttgatttactttttatttatcgacaaatgttatttttgtttgccgaggggatggaacctacgatctttctcctcttttcttatcccttaaccatcttacccttacttgattatttgttttgtttctttcgactctcgggagttattaaataatgcttattgt

SEQ ID NO: 3608 - DNA, 774 bp, Glycine max
gaggtctccaccgccgcccgactcagcgacggcgccctcctcctcgtcgacgccgtcgaaggcgtccacatccagacccacgccgtcctccgccagtgctggatcgagcgcctcaccccctgcctcgtcctcaacaaactcgaccgcttaatcaccgagctcaaacttaccccctccgaggcctacacgcgcctcttacgaatcgttcacgaggtcaacggaatagtcagcgcttataaatccgaaaagtatctcaccgacgtggattccctcctcgccggcaccggcaccggcaccaccaccggcgagaccctcgaggactacgacgataacgaggatgtttttcagccgcagaaagggaatgttatattcgcatgcgctttagatggttggggatttgggattcgcgagtttgcggagatttatgcttctaagcttggggcgagtgtgaatgccttgctgagggcgttgtggggacagaggtattataaccctaagacgaagatgattgttgggaagaaaggggttggggggaataagaagcctatgtttgttcagattgggttggagcccttgtgggaggggtatcagggggccttggaaggggataaggggctggtggagaacgttattacgacggcttaatttggcgaggccccgagcggggagcttgaaagcctggcaaagctggggggaaagccatgggccatcaagtggtcacctggggtgaagaatgggtgggccgcttcaccatttccacgcccggcttaccgt

SEQ ID NO: 3609 - DNA, 560 bp, Glycine max
atatgttgcgtagtgatttgaacttttatatgtctggtttaaactttcccattatctaagacttgagactggagggtgagaccttggattcaatacacatgacatcttgtgtctggatatgaatgaattattaagatcaaaagaaaaaaacgacaatgattgctagattatgtggccacgctttttcagttgtacaagccatgattgaggcaagttagactgatataggatttggaactgttacggagactgtgtttgttggactaacttctattgaatgaggaggcagtgattgcaaaagtggccttgattttgatcctttccccctatcaaatctttctatccctttctgcctatttctgtttcttttaatctgtatagaaggatgcaatgatcaaggtgaacataattgtgtctggtttactacatttgctattcaattcttgcattgcattttccttcacttgtcttctttgaaaccttgattcctttcctaaatatgtggatgtatcttctctataattgtcattttgtgatttagaaaaatgtttttggttata

SEQ ID NO: 3610 - DNA, 604 bp, Glycine max
tagatgatagacggcagaaaataggacctgggtgcatgctgctctaatctctgacttcgtttcaaactgttgaccaaatatagttagtttcataactgttgaaataggagaaaacaaagggataattgactgaaaactgtgtttgaatacccagcggatgcgggtttatataggtttggttacattaattatacataaatagaggatgttttgtttcctctaaatcgaagattatgtgcctataaaccgctattattaataaatcagaatatcatattctgattttcaacaataaccaagcaacattgaagtttcaagaactaaaactctattaaactcatgctatcaggcaatctagatctaaatatgtgctggtacctcaagagaatgaaggagaaaaggaataacttgtgctgcaaagggcttcttgcaagattctgatatcttctggcaagtgctaatgagaacattacccatacacagacaaaaagaaagagaaacagcagcaacaaattctgagttttcatccccaaactctggagttgaagtttgttcattcttgttattaaagaactgattgatcacataggtgacaacggaattc

SEQ ID NO: 3611 - DNA, 342 bp, Glycine max
tgatggtcataactgcactgttattgcacatggtgctaggggtagtggaaagacgcacataattcaggtttgactcacttagtcattatgttagttttcttttcttctttttttttttgattggggatcaggggagtgtttatgaagaattttgattggtgatttctgtgaaattgtatttttatgctaacaattactccttggctgttcaagggctctgctgagagaccaggtttggcagtgcttgctatcactgagtttctttcagtgactgagcaaaatgggaaatccatagctgtttctttctatgaggttgatcatcaggagcgacccatggattta

SEQ ID NO: 3612 - DNA, 546 bp, Glycine max
catttcctggggggataaggaaaagatcatggaacaaagaacaagaaccagcatccccttttcttcattcccacatagttataattctgctgaaatcaaagacaacaaggtcagtggatttcatactgtttcacatacagctactccaggtggaccaaacccacttcataactgagtgaaataaaatagctatcatcatcatcagaagtctctctagtgatagcagatccggtataattaactagaaagggtagcaatttctttgaagcaagacatagtttaatttcatgttccttaattacctttgcagaatccaaaatggtgctttagttagtttgcatcataaaggtatatatgtcatttcctttgatatatatatatatatatatttgtacttatgaggatcatctgacatctggcatagtatggtgaaggataaggaaacttgtaataatgtaattgtccataatctatgttgattatctcactagcaataacgttcttgttaatatgttcatttttcatctgtatcttgtcaaatcctta

SEQ ID NO: 3613 - DNA, 898 bp, Glycine max
gaaaccattctggcaggtaagaaaatatgaaaagactatatacttccatattcatttggtaatttgtggattctcaataaattgcaatcctcatatgcacaagccttggttggcacaaattatgcaagatagctgtttacttatcttctttatatgtaatgtttgattgcacagggttggatttgaactgtggaaattatcttggccaatatacagaaggggcagtgaagcaagggctattggatgaagcatccattaacaatgctgtctcaaacaattttgccacattgatgcgtcttggtttctttgatggcgatccaagcaagcaaacttatggtaaccttggtccaaatgatgtatgcacttcagagaaccgggagcttgcccgtgaagcagcaagacaagggattgtgttgcttaaaaatagtctgggatcattgcctctcaatgccaaagccattaaatcattggcagttatagggcccaatgctaatgctaccagggtcatgattggaaactacgaaggtatcaaattttcctactcctgtactaggcctcatagatataaagttgggaactatatcgaatttgataaatgattgaacgtatcaattatttctctggggaagcaccaaacttttataactgtaggcaaaatttatcaaatggtttgctactatagttaaatactttattatctctaccttgtgcttaatatcacatttgaccagttcctaaaatttttcaggcattccttgtaactatatatcccccttgcaaaccctaacagccttagttcctacgagctatgctgccggctgtcccaatgtgcaatgtgcgaatgcagagttagatgatgccacacagatagcagcatctggaggtcgactctagagga

SEQ ID NO: 3614 - DNA, 1248 bp, Glycine max
aaaggggaactaacacaccaccaaccatagttattaatcccaaatagtgggaaaccctgcaaaagctatagcggatagtgggatgactactattctaaccaattagaatagaaaaaaatgaaggataaaacttagaagagagcacaagaccgtgagatgaaagaccaaaacgatacagagacagaacaaagcaaggcagtaaaggtcacagttggctagaaacaacaacaggtttgccagaaaatggccgcagagctttcagactgttttaaatcccaaatagtgtgtggccagccccaaaaacacaatcgtgggatagtggatagcaagatagttgctattttgaaattttctatacagtttatatatactatatacatatagactctctaaaatgataaaaattgagaagtcccaaagttagattcccaaaaagccctaacttctctgctcagagggtttttttcggaatcaaacatatattgccattatctcgtctgctatgactgctatttggtcagctacagctagtatgctactgcggccactattgcagctagggacgcttcactctgctattccactatagtgcattatttaaaaccctggactcaaggatgatcataaaccacggatagcagaggctgcagccataaaagagacagatattaatgcaaatggattataaagtattatggtatgacgtgattaacagaaccaattgaagtttaatttaagaagattcttgaaacatgatccatcaaccaagaaagtttccattttgtacttgtttcatatatgcaagtgttgtatatgagtgatttagtgtgtgcacgacgcatgtacgacagcatgtgttaaaaaaaggaaacggataatgggtaagcaatttcctcatgatatctagaggaaaacatttattagactcaccattaataaaaacagcaagaggtggatgctccatcaaattagagggtggagtgacatcttcatgattttcatcaccaacagtatgtgcagaaaagccaactccgggcaggggaacccatcgatgtgaatccaagaccaactgagaacaaatcaatttcataacactacataaaataggcaacttgctgggaaaagagaggaggtccccaaatgttcacttgtttgtataaacaaaaatgatcaattcatgaaatcaattcaaggttaactagcatgtaaaatatttcaacttcactacatttacctgaaaattctcta

SEQ ID NO: 3615 - DNA, 604 bp, Glycine max
atccatacactgtttctctctcttcgtgttccttctggccattggggtaagaaagtttcaaagatgaagaggttggagagaggggttcggaaatttgtgacggtttttgcattttgtgggccccagaaatcgtaactatttatgggaacaacgagagtgacacgtggatttgattatagattttaattttacaatgaaaactttttcatacttcgaggacaaaaaaacatactttatccttttaaggatagaggataaaaaaaatacatattatctataaaggtaaaattaaaaacgttatgccgaggtggaatagttggtaatggtaaaataaaacccaccgccacgagtaaatcattaatcattaatcataattcatgaatacaaatttagagggaaaaacctcaaaaacaacaaaatactcagaaattcacaaaaaaaatacaaatactcagcactcatcctgtagtaactctttttatcaaaataaaacttacaactattacttccatagtatgatggaaacctcaaaaagcgacagaatcaggagcaacaaatgaacacctggtaaaagaatgggtaacgtgtatacaacaatccccaa

SEQ ID NO: 3616 - DNA, 431 bp, Glycine max
atgtgggtaaaacaaatgatgaaggtagatggattttctagacatatcattgattgcaaatcatgctactactgttcaattatcagaattgaacaacatttcttgatataagtagtatcatgcctaagaaattatgtaaaaacagtaaacttcaatactcaatatttagcatttgggaatgaattctcttccactttttcttttgaatatattatttgtcatcctttggtcatacttcattggcatggttatagagaaaattgaaattatattacataatgaaaccaaaaacggggaaacaagctattgtactggaaaataaatagtttggacttttcgatctagaacaattgaatttaactggaaaaatgtttaaaaaatgggttcaattaaagtatagcaggaactatcaataataaggaaaaatggga

SEQ ID NO: 3617 - DNA, 614 bp, Glycine max
atgtgggtaaaacaaatgatgaaggtagatggattttctagacatatcattgattgcaaatcatgctactactgttcaattatcagaattgaacaacatttcttgatataagtagtatcatgcctaagaaattatgtaaaaacagtaaacttcaatactcaatatttagcatttgggaatgaattctcttccactttttcttttgaatatattatttgtcatcctttggtcatacttcattggcatggttatagagaaaattgaaattatattacataatgaaaccaaaaacggggaaacaagctattgtactggaaaataaatagtttggacttttcgatctagaacaattgaatttaactggaaaaatgtttaaaaaatgggttcaattaaagtatagcaggaactatcaataataaggaaaaatgggattgcaggtgttttaaatttaatgtgacatgcatgataatacccttttgttctttgtcattttgcttctatagcttccaggtattcagggcaaaggttttctttgaccccatatatcacaccacgtcttacaccgacaggaactccaaaggtgatttcaacagccgggtctcctagagaatatt

SEQ ID NO: 3618 - DNA, 565 bp, Glycine max
atataatcgatcctggtgagtctcgtgagtggtgcaaaacatctctggttattatgcagattctcatttgtggcaagaaacttatgactatagacctggattaactccttcagaacctaataattccatcgagttccccccccccccccccccccagcagggttgccagacatatttgccttatttggaaaagcagcaagggatattctggatgcaattagctaccatttgaatatacgcagctctccgtttgtagaaatagtggataatgttccactgagaaatagggaaatttcatcttctgttttgtctgtttgttgtcatgcaaggccatcatttcaggggccacagcatcataataatataactactacccaagaggatggccaaattattatgtatcctgaccatgatcaccaagttgatagaagcttgctatcgcttgttaagtccgatagggcaggtttacatgtaagagactttcagggccggtggattcttgtggacggagatctgggacctcaggaagctattgtttttcctgggcttgctctttatcaagcaa

SEQ ID NO: 3619 - DNA, 1228 bp, Glycine max
aacaaaacctctatctccaatataaaaccacaatatatggaccaaggattgtgtattagtttgcttctattcttactgagaatgacattaggatttatcctaggagaacaatttgtcccaggagagcaatttatcgccacaggtgaattaggatagcttaaagaatcctcctgcaagatatttcctattctagacgtatgctgaaggctaaatttcctagaactcttggatagacttaattatgtttttggtctccttagtatttttttgtttttggtccaagtttatttttttaattttagtctctgtaaatttgtgtttttttaattttgattcatataagatattttatttatttatagtctgtgtaagtttacgttttttcaaatggcgtctcacatgacatatgtgaattgacatctttatttggttgttagaataagaatgctttgtatgttattcatgtatctgatgtacaaatgccaagatacatgagtttccaaagattagattgtttccttcttgtatagggtgcttttgtttttgaattgcaaattacattatgcaaataaacacatggtctgcagacagtagtcacagctataagtctcatcaacaacttactttaaccaagtagaaaaaatagccccaatgtagcatagaagtatttatttgtgcatgcatgtaagggacatatcaagtgagaacagaagcatattgcgaaagtaagagccataaatcatgaccactgaatcacacaggttggtaggattagattattatgttttgtgacttcataagttgcaatgggagtatgttaactttagttaatttctctccagatcaccattgcaagacccaatggtgaagatttgttccactcaatcaactaacacccattgcatctattactcattataaatactagttgtgtgtataaagtctatatagcatgaggaaagagaaactgttcattactaattattataaaagatccacaatagttttgtcaccactaccagaacaatcaaaattattttttcttaatctttttgcttataaatacagacagaaaatgttctaaagtttttctttcaaatccacaatgacttatgccccttctgtcaaagcaattctgaatctgcttcccatctgtttttcacttgtcaaaaatttctgcctttgtggtgggaatttaacacctgggtaaaggaggatagagctcttc

SEQ ID NO: 3620 - DNA, 578 bp, Glycine max
aatataaccaggattcagaattaatctagttagtatatcatacaatgcagggccagttacaatacatacatacgcataaccaaaacagtaacatcaatggaacagtaataggacacaatcattattatttttttgttaaggaaatttctaagaaaaacacaaccatttgtacaaaaaaggtattaatacatagctacatggaagaaacctacattaaaatccagtagtgagaaaagatgggggcaattatgataatctcggaaagcctctgccaagggtcagcattcaaaattgagttccttagcctgctgtctgcatatgcttatccacaaggaatattgtctccgtgaggattaaccaaaagcatacctcaatgggtccagatatcctgaagatagcgcccaatttgctgagcaccaatatatagggcatcggcaacgagaaagactccaatctacgccacaaatgtcaaacttgtgaatgtcaaggttaagaaataagatttacaattgaaggtctacagcagatagattaccaggcgtgcagaaaacactaatctatatccccaaccttccttg

SEQ ID NO: 3621 - DNA, 402 bp, Glycine max
tatattttcccaattctatctccatacaaacgagactcaatgaaatcaggagcagagtcaaaaactctgatgctctggtcttgagacaaggataacccatgtttagcaaaaccatctgctaccgaattagtttccctgtatacatgattccaacaaattcggtcaaccatccgagtcatgtgttggatagaagatcgaagaaaatcacccttgtgagcattaatgatctgaatagcttttagagaatcactctccacaattaaatttctgtatccccttgccactactgtttgcattccaatcttgatggcccataattcagcctctaacgcggaagaacactcgatcaaggcatcggaaaagccaagaataaattcacccttccaatccctcagaactcct

SEQ ID NO: 3622 - DNA, 276 bp, Glycine max
ggggaaaatcatagaatgaagccgaaggactttggaaccaatgcacatacatatttatagattaatggaaccaatgcaccatgaacacttttggtcctttgaaactaaaactaaaccagcaaactgcccagtatcctatgctgtttttcctttcattaatagcaaaagtataagataagcaacttatagtaccaagaaaccttttttaaaaagagtaaataagtgcagaactaatacctgtgagccatcttgtaatacttttcattgctttccata

SEQ ID NO: 3623 - DNA, 476 bp, Glycine max
atgagcattaccccagtccacaacagcaaaggttgaaaataagatgtcaaaatataacgtgaactacttttcttccaatctgtcctctgaaaacatcacggaatagaaagtaagcaattgatactattcaattgatttagacaaaacatgcaaatgaaataagataagatgctaacttcttggagaaaaagattcctgctcaggcgtaggagcggctcaaggccaaaaacagcaaagccaatgataccaagggcagggataaattgaatcacacttggttttcctgctatagcattatatgacctacactgattttcaaaaataaataaatcaatagagattgtattcagcaatagatagatgaaaaaggaaagatttgaacaacaataacaaaatttagcatcagatgacatgatttatgatgataaaacttcatgcctacacatatcataataccatgcaatgggtttgttttg

SEQ ID NO: 3624 - DNA, 499 bp, Glycine max
ttcgataccccggattcttctctagagtcgacctgcagatgagcattaccccaggccacaacagcaaaggttgaaaataagatgtcaaaatataacgtgaactacttttcttccaatctgtcctctgaaaacatcacggaatagaaagtaagcaattgatactattcaattgatttagacaaaacatgcaataagataagatgctaacttcttggagaaaaagattcctgctcaggcgtaggagcggctcaaggccaaaaacagcaaagccaatgataccaagggcagggataaattgaatcacacttggttttcctgctatagcattatatgacctacactgattttcaaaaataaatatctcgagattatattcagcaatagatagatgaaaaaggaaagatttgaacaaacagaatttagcatcagatgacatgatttatgatgataaaacttcatgcctacacatatcataataccatgcaatgggtttgttttg

SEQ ID NO: 3625 - DNA, 549 bp, Glycine max
ttatgcgatttctcagagcatggacgcatggacatttagtgttacgagggttgtatttttgaggcaaagtcattagaacttatgaaaaataggcatggtaatcccatcttattttgtgtctgatcagattacttaattttttaatgcttaatttgtactttccttcttatgtttgcgacttcaaaatcattttagttgcaaagccactagttgccgatggaagtgcaaagtcccatgaattatcccttgcttatgagcatttttcccttcaaaatcttgaacctcctcttgttcttcaggagtttgttaaccatggtaagcaattgctgtttattttattttatttttttatactcttcgatgtctagaagcccatcatggtaaagtgaataacaagtgctactttatttttggcgtaggaggtgttcttttcaaggtttatatagttggtgatgctataaaggtcgttaggcggttttcattacctgatgtaagcaagtgggaactctcgaaagatgctgggatatatcgttttccaagggtttcttg

SEQ ID NO: 3626 - DNA, 525 bp, Glycine max
tcatcaatcacagcacgtccaccagcatggatgcagaagtgctcaaaggcttgtttgaagtcaggaatataaggcttccatttggggttgaagattttcctcccaatgagagtgagaaggaagagcaactgctccgaagccggaagcacgagaggacccatggtagtaatgttagacttgagagcctcacctgcaatagccatgagatccttctgaagggaaatccccactttaccttctttgtcttcctcctcaaaaacacaacggtaggctttatcatcagcacctttgtgagtgcgaacaacgtgcaccaacctgtacttggctctcctgcgttcggaggttcggttcgacaacagaatagcagcaccccccattcggaaaaggcaattcggaagaagcatggctctctctttaccttggtagtagttaggggttatgatctcggtgctcacaacgacggcgtttgagttagggtgaacctggagaaggtcacgtgccaagtcaacggatatcaaaccagca

SEQ ID NO: 3627 - DNA, 666 bp, Glycine max
gagtcgacctgcagcaatccgcggagttcaattcgggtgttaaggatggttgcggctgcttctcactcatcttgcctacttttccaagtcatgcaaccctatgttgcatgaccagaagggagatcaataacagggcttgtcatgaaaatgaaatttgtcctcactatatcagtaatctccactgaatcagcaatgctataatctgcatctcccttagtcttttcactcccacctaacctagaacctaggatagttagaggtttaggatcaagactagcctcagccatgatctcctcgcaacaggtctcggaagcccacggtggtggcggagtgggggcccaccgaggatcggcgtcagcggagacgcagaggacgcagaagtggttgaaggcaactgggcggaggaggaagtggtcacggaagaaggagatgaccttcgatattttgatttatttattttacttaaaaatcttcagaaaatttaaatttaattttaaaacaaatattaaaaggttttgagtcgtcacaaattacatcagatatcatggagcggatagaagaaaatttttatcagatgcaaaatttgaatatatatatcaggcagcatatttaattcaaagaaaattatacatcaagggtttttactctttcattgtgaataatgta

SEQ ID NO: 3628 - DNA, 2218 bp, Glycine max
aaccccggacttccgctagagtcgacctgcaggatgtttcaattgctcatgtaatgctactaaattaatattatacatgcattgaatgatatagtgtcatgtgaaagcaccaaatttgagtcttcaaaactgaacaatgataagtttagttttatttgtcatgttgtctaaggacaaatcataggcgttgtacttgagatgttttatggtgttgatctccaatcaaaattagagtttgactttggtaacaaacgctgttttttaacactgacctttaatatgcaggttacttaggtttcactctaattttaattgaagaaacaacaccataaacccatacattgctgctcctaattcttgtcctttgtcttaacctgaattggtagagttgcagttgcaatattctattcccccaccacacaaaaaaagtctacaaacatgtatcttgttttttttccccctcaggtggcagagagagccttgttcttgtggaacaatgatcacatcatgagcttgatcaaacaaaaccgaaaagtgatactgcccatcatattccctgcattggagagaaatgctagaagtcattggaaccaagctgtccatggtttgaccttgaatgtgcggaaggtttttaatgatgtcgatcccgatctatctaaagaatgtttacaaaagtttgaggaagatgagtcaaagaaaagtgaagtcatagcagggcgtgaagccacgtggaaacgcttggaggagcttgctgcaaagaaagctgcaagtggtgaagcagtgcttattggtaaggcaccaactcgcaactctgcaggtcaataccaaaagcgcacagaaaatttccaaattgaacatctactactttgcacaatttaacatattgaaaattgggagatcaacattacctaatgcccattttaatgtaaattaatcagccattatatttagctcaccaatttagtaagtatttccttgacagtaaccgatctaaataacagccatgttggtgccaaactgaacatatgagagcatactaatattcaaaaaatgaagaaaagaataatgacaggaaaaaagaatacatgtaatgtatttaatatttaaggagaaatatatttaccagtgagatcaccaagcaaagctctacaagggccctgagtgacgttgttagccacgtccaaaatccaaaacccgaaaacgaaaactccgacagcccaggggcgatgctcaagggtgtcgccgaaccaccacccgatgtcagcggagtgaccgatgatgagaacagcggcgacgatcgacaatgctccgcccaatataaacggtcttcggcggccaaagcggctagtgcagcggtcgctcaagtggcccaccaggggctggaccaggagcccagagagcggcccacagagccatatgatgctggcccacacgtgcgggatcccgagctgctgcacgtacggcgtgagaagagatagctgcagaagttattgataccatggctttgaacatcccaaagcatgttttccaaccagtttttgaatttgcttctgtaagctgtcaaaatgcaaacccgaagtttcgggaagcatctgttactgctttgggtgtcatttcagaaggttgtttggaactcatgaaaagtaagctagaacctgttctccatattgtcctgggagctctgagggacccagaacaaatggtcagaggggcagcttcctttgctttgggtcaatttgctgagcacttacagcctgaaattgtatcccattatgagagtgttcttccctgcattttaaatgctcttgaggatgtatctgatgaagtaaaggtacacactggagaagagaaaggcttgtcaatacaaaaagaatattaccttagagctactaccaaaactaaatattaaatagattgtctgcatgttgtctaagcattagatttatattcatgcaggagaagtcatactatgcgttggctgctttttgcgagaacatgggtgaagacatccttcctttcttagatcctttgatgggaagactgttgacagctctccaaaatagttcccgagtcttgcaggaaacatgcatggtatggggaagattttgtatggtgtaaagattgtcacaattgcaatgtatcagctattggtttgttatttttctatttaaatttatattgtcctctggatgtccttgcagtctgccattggttctat

SEQ ID NO: 3629 - DNA, 729 bp, Glycine max
tacccaatgatattccaatgatcactgaatggatcactattcctatctccaacacctagcacacaaaccaataaaccaaactgaatattgccaacacaaaaaaactctagtccaacatatataggagtatataaaaaaaaaggtacatatcaataactaaggacttgtttgatttttagttaggaaattttgagcatacatttaaaaagtaaagccgaaaaaacttttttagctttcagttggatcccattattaatcaaaatttgcttcaatttgtcttaaaactcagaagagttacttttgcagactcagttagcaaaataaagttgtttcgaatttaagtttgtaaattttaatccaaacgtgcactgagtgatcttacttgtgatatgatgcgctgccttattacatcagatgtaattgaaccctcagaggacacagctgatccatgagcatgaccatgtgtggcatgtgtatgaacatgtatgtgaccagaatgttcatctcccatttcctcatcatcagcaggaacctgcttagaggggttaaaatgttgcctatgataaaaccctgtggcaaatgagtccaccattaaggtccctatggaggacaacatggcaacaaatccagtgaagggaaacttgccccatggattttccttaaggcaaggtgaagttaggctctcatatgcctctggaagtatgtgcacaaacccagttgcaagaatca

SEQ ID NO: 3630 - DNA, 635 bp, Glycine max
tggttttagaacaagtatgattttgaggacataactgcgagaagctttattcaagaacaatttaatttaatataccttcaccgtcatcattggcccacagaaccaccaggacgtacttcactaaaggaatcaagattaaagtgtacaagacaagtgataaagctccaagaatgtcttcatttccattaataggggcctttctaaacataacactgaacgtatataatggacttgttcccacatcaccaaagacaacaccaagtgtctgaaaagccaatacaattttcttacccacactgatgtcctgcgatgaaatataatgaagacaacaagcagataatagtattaatacattagatgttgatgttccactacagtaacaagctatataatctcatgatgaccagtaagacactttacggggtggacagcagacacaagaccacgaacaattagaaaatacatcagtgatttacagactaaaattcatataatccagaaactcaacaaaagtaacaacactaaattgttgcaaaatagcttgaattgtaagatcatcattaaggttgcaatgctgcttggtttaattttgactgtcaacagtaaactttcactctgttttggccgccgcgaac

SEQ ID NO: 3631 - DNA, 521 bp, Glycine max
agactttgagaaagcacacttcagttgtttacccgatataggagagatacaagttaaagggttaatggtaagtactttactttctgtttagtatctatgcatccttttatgaatttctgcaccaatgagtttttgctcaagttactgcacattctcctaggtgaagcgaaaatcatgcttctactatctgcctgattcgttccctatacagtatgctttccctgcaatcagaggaacatggtttcttcatgtggaagtgaagcatttaaagcgtttgtgcattccgtgtccacctggtgatgcagctgttctttcaaaacataaggacttaaagacctgcaatggtgaggataaggcaaaatcaaacagtgaggaaaataaaatggaagggttccaaccccgttcatgttttgcagaagagcatgaaactactaatcatgtttcaaagaagctgaacaaaaagagaatttctaatgaaaaccacacgcagaatgaagccactggaatgccagaaagatatc

SEQ ID NO: 3632 - DNA, 517 bp, Glycine max
aacaaaggtgagcaagagttaaagcaactcgtctttgaaaagccttttctgaaactcgcatgagatataacaaatggttcagcacctacaaaaagaaaattaataggtgacaaattagaatgagatatagaaataaaaaattgtgggataaggctaggtggtgattgttgtagtagaacttataattgatacagaagtagcatccttgtcatttccatgttaatttcagtaaaatgcatcaagtaacaagttaatgtgacatggtgcttactcggccatgaatcttctcttctaatcttttcaatgtctttgcaacacaatctttagttgcctgcaatgataatcaattccttatagatcagtgtgtgcttaagagagaactagtatgcaattatctgaagtattgaatctccgttgatataggcaacaaagggaaaatgcagaaaccctgaaaccaaaccagagatactgcataggtattaaacaggcaaacttacctgaacaataaactctccat

SEQ ID NO: 3633 - DNA, 594 bp, Glycine max
tcagttcaccaagagaactccacctttcttccacaacctgcacatatccatatagtaaacagcaaatttattacaggatgacagatatctttttacatgggaacaaggaatatctgaaaagcaagcataaaaacctcgttgaatctccgtccttctcgagctgcttgctcttgtgcacgctttaaggctttaagtctccaacttgctcctccatccccaacaagggaagaagatagaagttggtcagcaccaactttagctccactttcttccgggtaaccacttccattatccttcagatatggattcagttccttaggatttgccttctttgactggaaaaaaaaaaaaaaaaaaaaaaagcaaacaatttagtctttttatcactttacattggctgagatttaaagatgaagacaagctgcaaactaaatggaaacatttaagacagaacacaaatagacaggcacttcaactattggaatgccaacaggaaaattgaaacattgttcccaattcagtacttttatcttaaacaaaatccatagatgaataatgtaataaatacatgaattatgaatataaaataattct

SEQ ID NO: 3634 - DNA, 480 bp, Glycine max
aaggtagagagagagagagatggagagcatagagcacagaacggtggaagtgaacggcataaagatgcatgttgcagagaaaggagaaggagcagtggtgttgttcttgcacggcttcccagaactctggtactcatggcgccaccagattctagctctgagctcccacggttaccgtgcggtggcacctgatctccgtggctacggtgacacagaggccccttctacggtgaacagctacacgtgttttcatctggtgggtgatatcattgctctcatcgactctctgggtgtggacaaagtgttcctggtggctcatgattggggtgccatcatcggttggtacctctgcttgttccgaccagacagaatcaaggcttatgtgtgcctcagtgtccccttccgccccttcctcggaagaaaccccaaacagaaaaccgttgactttttccattccttgtatggagatgactactacat

SEQ ID NO: 3635 - DNA, 657 bp, Glycine max
ttatcctctagatcgacctgcagtccaagtacattgctcctggtttaagcagtaacccatccaataaataataagggccttgatatgacattgactaactttgaatgtaattactaagtaatcataccaaattgttctaaattagacacgactatgatcctgaatagaataaataaatactactttctaaattgttagccattaacaaagtcaattaacaccaaatatgtccaagttcagaagcttcctctttttggaccaaatactgtgttacaaatgtcaagcaatgagataactctttcaattaactttagcatgcacaactgcatacaaattccctggttctgaacttctgtgagtggtactgtgattcattaagggaggggataataagatgcaagatagaatataacacataagctaatcggtaatatgaataaaatgcagcaataagacagaaaagaaagagcttcctgcttgcaaaaatatttacataacataatctatgtgtctgtgtgtgtgataattaagaatatgcttgagttaccggaccttgtacttcgcagctaaaacatttttcacaacgacaaagttcaaatccaatgatgctttagtgtgtagaactcctcccatttcagccactaactcttctatctt

SEQ ID NO: 3636 - DNA, 673 bp, Glycine max
agagtcgacctgccaggcatatagaaaaggaactcattcacaaccttactcatttttgtttttttttttttgtcaaaaatgaaaaggaatttctgtgcgcttataatgtactgtaactctaaagaaatggtattgttgaaacgtatggagaatgggggaaaaaatagcattcaacactttctttttgtttggatgagagagaaagagaaaaaaattaatttttcttttctagacttatctttcctccctacttttattttcattatctcttcaacaattaagagaaattcccaatttttaagatgttcttccgtaactattttctttctcccgatccaaaaatagggctaaagaagtacgaagaagagcaattcatataaaaaagcatttgatatagcaaacagaatatcttccttgatacctggtaatatgcacattagaagtagtaaatacactctacataccttctgacggctctggtttatatctggcagttctatacttctgaaatttaaaaataatgtgaaaagcattagattaaataaattgacatacacccataagctatttaagaggatgataaatcacagatgtacctgcaagtggctttttacatgatagatagtaaggccctcaactttcattagattcaacacaccctttggagtagcct

SEQ ID NO: 3637 - DNA, 664 bp, Glycine max
ttagagtcgacctgcaggccagaggcacaccccaacaatgtctccttgatacattgcacaacgaccattgaatcaatttgctaatatagtctatattattcaaaattagtaataaatattatctttgaaaattaacttaataactagcaaatatgaagatcaactgacgtaatatgtatttactttggcgttgaaaattgattttgcgtctatcattgattttgaatgtattttaacatatttcatttcgtgattaaataagaatttaaaattaatttttggttaaaacaattttgagtaatttataagttaaattcaaaattttatattaaattttactcctaattataataacacatccaaatataaatcatcttacttcaaaatcaattttataaaattaatttctttcaaaaattaattttatcaacgtcttccaaatatataagtagagttattttaacttaattagatatctcaaatttaaattctaactgagttaaatattaatttctttccacaataattctttctaatttaaataacactatctttaatataaaaaaaacatgtgatttaaaaaataataattaataactgattaaaatacaaaataattcaaacatattaaataactaatacatatttttcgaacttccggatt

SEQ ID NO: 3638 - DNA, 652 bp, Glycine max
  misc_feature (618)..(618): n is a, c, g, or t
  misc_feature (631)..(631): n is a, c, g, or t
ctcgagttggtgaagaataccaggtggaggtccctggcatcataaaagaatcagaacggcttcaacttcttatgaatcctgctgattcagaagttatgcttgatagctcgctttcttttgcaattggtttgcccatctcagtcacatggatacgtaatgaagtggaggatagtggacgtgaaaggaatcttgcagacgttgatggtacagtcaatacaattgaactagtaaaagaaactaattttaaaaagaacagtatatcagaaagtgaggaagaattgaaactaattgtttttcggtttgtgatgacaggaggcaaaaattcaggtcaactgggtaaaagcaaaaattatgtattggttcctggcacattgagtaactcttggagtgaagctgatgcaaaaagttttctccttggtttgtttatttttgggaagaattttattaagataaaaaaattcttagagaacaaagggatgggggaaatactgtcattttactatggaaagtttttcaaatctgaagaatatcatagatggtcagactgcagggaaataagaatgagatggaaaaatagtgagaacagaatttgatccacgtatttcatttcatgttcantttatgttcgttnttttttttttcatttttggct

SEQ ID NO: 3639 - DNA, 589 bp, Glycine max
tattcggtatgctaaatacatatataattagcaattaattagcatattggttttgtgaagtaattaataatgtatatggttgaatatataaatgagatcgacaggcatgctcacgtgaaatggtggtggtgttgtagggaattgtggcctctggaataatggttgttgtcattgcatggtacggtgtgcaagaataagaggtccattgtatgcatctgttttcaatcctctgatgcttgtggccattgctagttccttgatgctggatgagaacctatacttgggaaggtatataccgaatcctagctaggcacctaaaatataccatataatcattaactttagtttatgatcagggtccacttacatattcatgaattgatttttggaagcatgtttagtgtaattggagcagtgctaattgtgattggattgtacatggtgctgtggggtaagagcaaagaaatgaaaaaagtgactgacttagaaactactctagaattagaagaaattgaggttgttgtcacgtctacggcagcagcagaccatgataaatgtatgcgcagcaacgacagctacaccgcgagcg

SEQ ID NO: 3640 - DNA, 586 bp, Glycine max
tggtgtcaaaagtcacatcccatttgaaggaatactacactataaagtgggcatccgcacatgaagaggtgcttgtgttcttctcgccggcgtggttgagtcctctggagaatgcatatttgtggatcacagggtggaagccctccatggtgttcaagcttctggaaactctcaagaagcaagcgagtggtggtgattttgtgatgacggaggagcaggtgaggaagatcgaggagctgaggaagaggacgaggatggaggaggagaaggtggagagggagatggagaggcagcaggtggccatggctgaccgaaagatggtggagttggtcaagctcaccggcagagcaaggaacaacggtagtggtggtggtggtgatgcggtggatgcggtggtggaggtggccttaaaaggggttcttgcggggttggagagggtcatgaaagcttcggattgcgtgaggctcaagacactcaaaggggtgttggatgtgcttagtccaatgcagtgtgtcgatttcttggctgcaaatattgctatgcagctaagactcaggcaatgggggaagaagaagagggacattgc

SEQ ID NO: 3641 - DNA, 633 bp, Glycine max
tgcaccatttaacagttacaatgataatggatgcttcattccaatttgtctaagatcctacaaaagcagcagctaagccgtatagaacaatttcctgtacagtgaactcttaaagtagtaacatggagaaggtagcaaccctaaaaacctgtcgtctttttcaccacaatctgttctttatgatcccctgaaggttgcaagttcaaactcaaagcgcataaatccgatcaacctcggaattagagaattcagaatgatgccatgagttagatccactcctcctggcagcttgcttctccttcttcctcattgatctgcttctcttagacctcactacatagtaagtcatagtgccaataactccagatattatcacccctccaactaatgtaaccaaaattgcagcccacttattcttcctacccacaacaatgtaagaagaagcaataaacgccaccgaagtacagacagaagccaaccacatgagcttgttgatcacctctaccacccttttctctgctttagtttcacctctaaccaaagtaatttgaacaacaacaacagccaaagatgtaaaaagtgcgatagcattaaagacaaagaagattttaaaagcagcataagctgctacca

SEQ ID NO: 3642 - DNA, 568 bp, Glycine max
actttcacttcatcttcaggcatatactccacaccgccatcagtaaggtcatccaaccagccttgaagatctgatccaatctccttggtaatagatggatcggatgctcgaaccacaaacttgcacagcatggttgtagtctcatcacccaagtccacatttctactcacttcacttgcaccaaatatcatcatgcccaagaagccaccatgccaagttttagcagcataacacatctagtccggtaaaggggggagaaaaagtaaagaattagtaaattcattctatgcaactagatgcatataacccctattgtagtccttgctttttagtttttatcctattttacaatggctaagtttatcgttctttaggtacaaatttactgcttctgtccaagtagaaacagtcaggtaaatgcatacaagggacagattgaatagtaccaccactagattttaataaaacaaggggattccgggaatgaaacataacaacttagtgcatgtttggattgccagtagcggcagtccaacttacgttttcaaaagcatcaactttgatactt

SEQ ID NO: 3643 - DNA, 561 bp, Glycine max
tgacaaacatttatcaatcggcaaggtgcggaaactaataactgaagcagatgggtatcaacctcatgtaatcgctcctgagcaaggatacggccgtcttattgaatcatgcttagtatcaattaggggccctgctgaagcagctgttgatgcggtgtatatttttatacaaatataattaatacgttgctatgaggtgttatatgagaaaattgtagctgacttctttttccgtatttattttgacactagtaacaaaaacagaaaaacagattgacactactggcattacttaggcctaaggaacgtttgcatttctttccttggcacagttaaaagtctctgaaattttatagtctggacttaaggcaaagttgaaagtcacctttggaaaattgagaagcatttctttttatgttgaattatgcatttaatgcttattattataatgttttcaggttcatggaattttgaaagatttgattctgaaatcaatgagtgagacaatggcaagtagcagattgcttattttatcttttacgcatatagttctcagacatg

SEQ ID NO: 3644 - DNA, 619 bp, Glycine max
aaatctctcaggtcattgctaatctgctaataattaatatttacttatgtaataatttctctgactatatttgtgttaactttgcgttgaaattcaccatatgcaggacacttcaactagaatacatagatctctttctgatccactggcccattgctactaagcctggaaaagttgtgtaccccattgaagtatcagagatagtggaatttgacatgaagggtgtgtggggatccatggaggagtgccagagacttggcctcaccaaagccattggagtcagcaacttctccatcaagaagcttgaaaaattgctctcttttgctaccatccctcccgcagtgaatcaagtaattagttaataattaagttgatcacacattagtttaattacctgactgatccactgatcaaaatcactgatcgaactaaaccttaatcaatccttaacaggtagaagttaaccttgggtggcaacaacagaagcttagagatttctgcaaggaaaagggtattactgtaactgccttctcacccctgaggaagggtgctagtaggggtgctaattttgtgctggacaatgatgtaatcaaagaattggcagatgctcatggcaaga

SEQ ID NO: 3645 - DNA, 172 bp, Glycine max
aggaaatgaagaagaggcttgataaattgtttctggttttgatcttgcggagcttacgttcagattatgatcatgtgcatgatcaaattctgtctggtgatcaaaatccttcaatgaacagcctagtcactagacttctccacattcctactttgatgaaaggtgaaaatgc

SEQ ID NO: 3646 - DNA, 1099 bp, Glycine max
attgctttttaccactgcacttgatttgctgtaggatagattttcttggcttcactatgataaaatggagggtttgcatgctggataacatttttaggagaggaaatcattcatgggcatccatcgaatagcttaagcttcataggaaaggagagtttaggaatatgatccttgtcaacccccattttacatattgaagtcaattttttccacaaatggacctgcacataattcatgattcttgcccaaagatcttttgtgtgtgagggtgtgttagacatgtccaaaccattctttgtcctagcagttacaatggaaatttgaggagttctgatagtaatatagtatagttgaaggcttttttatatctcagaggtctgccctttttttttttttgatcagcaaaaatatgatatgttataaatagatgaaagtaccaggggtactaaagatacaatgttaattctaggtaggctgctggatccaattgtgttaggatccaagctgcagcaaagaccacaattcacaacaatctaagagacaaccgcgcacacaaattaagatatctttttttcacagctacatacgaacattcatccgcacaatgcataaaaaaacaaaagcttcaaacagaaaagcaagaaaacaccaaaaacacattcccaataacctagtaaacagcaaaagaaccacagcaagcaaaggtaccttcgaacaaccctctgcaatttgggcaagcgcaatgagggcagcatggtgcttctcccactcaggagcagacaagtaggtgggcaacagctcagaggcaactggcacaatggtgttcccgccgagtgaaatcgagagcctatccaagcactcctgcccaaagccatagttactcgtctcgcccgcgtcctcttcctcatcctctgcaccgtgccacgcaggatcatcctcgatatcaagcaacaaattcatcaacacaccaaaaagctttctcacaaactgtggcagcttcctcatcattccaggagcacgctccctcgcctcagcgagagtaacgacaaattcaatcgccaagtgccgtgttccttcctccaaggcctcggcctctgcc

SEQ ID NO: 3647 - DNA, 691 bp, Glycine max
gccagcttgcatgcctgcagatacaatgttctcaattctacacacgttacttggatcaattccaccatcgaatttaatttgaaggtgataaatattgattcaaaatttaatttgaaggtgataactattgattcaattctacacacgttacttggatcaatgtcctgcttaaccaatacacacaatactactcttggaaacaaattaacttgagttgagaaacctattcaaaataactctccaaaaaaaaatgcaaacactttagaagatcgatacataactcttccaaactaattaaccatgattggtttacatgccatggatttatttatgcttcccaccggttcagaataaccaatctaaccaattatacataaatcattctattgttttggtacaagggttggtggagcagtaggccaaaatacacacatgctaataggaaaattaattttaagcccacatactccaggaagttttataattttatatggatcatacttcaatgatttcgtagcaaactgaaaacaatcacacatatttaatatacctttaccagttttgtcaagcatggcaagattaaacgcataatatgatccgaaacaacaattgtcacttggatggagctcagatcctagagcagttaactcaggcttgcaagtgtcaattactggttcatacccattacata

SEQ ID NO: 3648 - DNA, 618 bp, Glycine max
caaaggcaagtgggagaaactgctttaaataataaaagctcaagatcacatcaaataatcaggctggtaagctcagctgaggaaataaaagtattcattatcatcttttaagatgataatgcatgcatatttcagattcgttaatttacccatttcttttctctggctactttatgtggagattacaaataagacattaatcttactgctctaagatcactatttttatatgaatatttcagactgtagagagcagccttcgtgtaagttcaggtcacataaagtcttacatagccagtttggtatgctttgtcttcatagtttgacatgatagttttgataacaagctagtcatactgatgaatgtttattgtaacctcagaattttgtggatcttgctggaagtgaacgcatctctcaaacaaatacatgtggagcaagaatgaaggaaggtagccacatcaaccgaagtttgttggcacttgcatcagtcataaggaagctaaggtccaataactttgaatatccaaatgcatgtggctgctttgttattgttcttctacaaaagagtgatgattacaagtaaaaagtttcgcagccaagatcaataagctcatt

SEQ ID NO: 3649 - DNA, 618 bp, Glycine max
atttcttatactcaaatttttggtacctctctttccttcaataaaatttcttcttttatacatgtgtgtgtgtgtgtttggatgttggtaataaatttctgccagaggatttgaagatgaagagtccataagtttgttgattacttgatacaatctaatagagtattttaaccggcccattttttttcttgggctaaagtgatgtaacatctaacaagtgttgaggagataaaacattttcaaggagtttgattgttggatatctagagcaattgtagggttttattgtattcatgatgcttcttaatcattcaaattgtttgtgccttttcatgttatagctttgtgaagaggagttactcaaggaagaagcgcttttagtaaaaaaacaacttatttcctttagttttattaatgacttgtatgcagattggacaacactttagggatggctacttgcataaagaagaatttaagatagtttatgttgctccaatgaaggtatgttgatgcttttgtttttctttacatttctctattcagatttgctttttgttccctgcatttgtgtgccattactcatttctaagtatagattcttgtcctttccaggctttg

SEQ ID NO: 3650 - DNA, 528 bp, Glycine max
ggtttccacattcagaaatcataatgaaagcttgtatatatctatgagtacaagcataataaataaattgcagagtgaagaggagaaagcatatagggcagaactttgagatatccaagcaggtataatattaacagaaaccaaataaatatatagaaagttgctagcaatgtcatagctatcataaaggggtgtgtttcgtttttttcccacttcattcttattttaattttcttgtgagcttccgtgaacagtatcaacataacattttatcagcttactttccaacctaagaagcattaaaaaaaaacactccagataaaaagaccttccaggccctctgcaaatcaggaaaagaaatccccccaaagagagtggtatctagaaccaaatgtatgcaaattgtgtaagatatacagaccttgaacctccacagaaatgttggagatggcatagcactttgcacaggtgaaattatattcttcattgtattagtattattgtattataggacctatcagtgtgatt

SEQ ID NO: 3651 - DNA, 1077 bp, Glycine max
atattctgggtatgtgttgtagctttgtgacttgtgtggctgcattgttgagaaatttggatttgaatttgaatttgattttagatttggagcttattggtgtttggattttggtgtgcaggtacttgattcgatacgtgatgaggggcttcaggcggtggctgcaacttgcaaggacttgcgcgagcttcgggtttttcctgtggatgcaagggaggagactgatgggcctgtttctgaggtggggtttgaagcaatttctcagggttgtaggaagttggaatcgattttgtttttcacccagaggatgactaatgcggctgtggtggctatgtcaaagaactgcccggatcttgtggtgtttcgtttatgtataattgggcggtataggccggatcctgtgactgaggaacccatggatgagggttttggtgctattgttatgaattgcaagaagctcactcggcttgctatgtctggtttgctgactgatcgtgtttttgagtacattgggatgtatgggaaattggttaggacgctgtcagttgcctttgctggggacactgacgtcggccttaaatatgtgcttgaaggatgccctaatttgcaaaagcttgaaatcagggatagtccttttggggatggagctctgagatccggtttgcatcattattacaacatgagattcctctggatgtcatcctgtaaattgacgcgccaagcttgccaagaggttgctcgagcattgcccaacctggttttggaagtgatcaacaacaacaacgaggagaatgcaggtgatgaagaggagaatgcaggtgatgaagttgagacattgtacatgtatcggtctcttgatggaccacgggatgatgctccaagatttgttaccatcctgcaatagatttttctttttaattcaagaagattttagctctttctaacggtggctggtcgatgaaacaggatggaacaggggattttaaatataaacctgctagaagatttctctgctatccatggcaaacaaagttaagcttgcaactcctgttcttggtatgggctgcaggcatgcaa

SEQ ID NO: 3652 - DNA, 1115 bp, Glycine max
  misc_feature (1104)..(1104): n is a, c, g, or t
agaaaaagtgttcagaagcagaggaaaaagcgcaggaagctacaatgctgaaacggagagatgatgtgattctgcaactggaggaagagaatatcagcatgaaagataagattaaatggaggaatgaacagtttaaacatctcgaagaagcacatgaaaagcttcaagttgagttccgattgagcaaggaggagtgggacaaggagagatctttgttgcttgaggaaatgtcttccttgcaaattagcttggattctcaaacaagaaatgtggagggacttcagtcacgtttggagatgtgtaaccatgcattggctcatgaagagagcagaaggaaactcctggaggttgaattttctgaattcaagtctagctttgagaatgttttcactcaatatgaggaaaagaagtcagagatacaacaattgacaattctgagaaatgatgagatagcacagctgagaaactcactaggagagaaagagatggtggtgagagaactggaacgtaaaattgttcaacttgaacaagataataaggaattgggagatttacttaaagaactcagggaagctcagatcaataatggtggagcaaattcagtgacatcaaagctccgcaacaagcttagacggttggaagaggtgcataaaaactgtgcctcaattctcaagtctaaagaatctcaatgtggtgatcaagtggcaaagatggaagcagatattgttactttcaagtctacactggccaacaaagaacaagaaataagagagcttcagatggaattggaaaattgttattatgccattgaagagaatcgcttgggactcttgatctttaaatctgtacttgttgagacttactccaaatcattcaggggcagggaagactcttataaagcatttgatgtcaaagagaatgaaaatatgcttctaatttctacagagcaattgggagtgaaagacaagtctctaaaaactatgacacaagcttcacaacaacattctctgttggaggaagagcttaaacaaaaaaagaaaaagcttgaggaatcatatgagggtcaactaatctggaagaacaactactgcaggacatgcaagnttggcgtatag

SEQ ID NO: 3653 - DNA, 982 bp, Glycine max
agatattgacatagggactcagaatccacaatgttaccaatggtggaagctaagaattgtgatagcatcaggtgacacataacgaaattggcttccttcacatgctgcaactaatttatctcatttagactctgacctggcacctttttcagcttcattacatgtcaataactaaagcaagcatttctttctctccaattttggttgctgtccatgttctctcccatgattaatttgtcattgccatcaataatgcttactatctgtgtagtgcttggtcttaattttgggtcagaatgggtgcatgcagctcctaagcttaccaatctcattaactccttcaaattgtactctccatttagtcccgtatctgctaatgcctcaagtggcctttttctcacctcaaattcatgaaccttgttagtataatagtccttgcctctacaataggaattcatattgtctacttcattgtgttttcttttcctctatccttctgttctgtgcatatgcatcattatcctaagaatctcctaattctggtgaacttttttttttgttccattagtgtattatcaatcatggtgtactcccctgccttttgaacctgttgacaaataatcataaaaaaagcattaagaaagacgcttgttggactatatcaaacattactgctggaaataaagaacagatacaggtaagccaacaaatcccaattgtcactgtatgtttttataggttttgtttatggtagttttgttgtcttgaatgtgcataaatgttaaactgaattgatttgttgagaacattcgattgtggcttgttattgtatatttgcttatgcttctgccattatggacaataaatagttaaggtgaagatatggtggaatcgtaaccaagatttagtttgtcctttgatatgccaacagtagagaccgaatattgatttagttctactattaagcctgcaggcatgcaag

SEQ ID NO: 3654 - DNA, 1151 bp, Glycine max
atgcagctctattgtgataatcaggaagcacttcatattgcctctaatcctatattccatgaaagaaccaagcacatagaagtggactactactttgttcgagaggagctaatggctaaggaaattagtacagaaaaaattggctctaatgatcaacttgcagatattttgactaagtcattaagggggcctaggattcaattttatttccaagcttggtgcatatgatttatatgctccagcttgagggggaatgttggaaaataggtcatgatgtacctagagtagtagcttacattttatttttgtcttttgtatacctgctctgttcagagctctgtattttgtacttacctttcttcagcttactgagtaagctaagttttctaatataatagagcctgagtgtggagaacacacttgaggatttccattcaatcatctttagttacatttaagtaaaagtaaagatgaagtaacaatttataggcaggatacgaagtataaaccaggcagcaaaatatgcaggtgaggtgaacagaagtcacataaccaaatcagccgcaaaaacaagtgcaaatggttaatctgagagctgcaatacaaccatgtggcagctttatagacagaaccaaaaaagaagctgaggagctctgaacagattgtcacaaaagattgtgtcacacaccaacatcgatgacaggactgctatgtggtagaagtatatgaaaaggtagatgacagcaaggttgagtaggccaattgatcgaggaaagacaatctgaatgttggaatcaatcaaacttcaaaggataaaaggtctcaaaatgtgtgagctataggacacaaccaaacatgggtggttggagaacacatccaaaccctaactgttagggttgatcacctgattcccatatccaaataaaatgtagaaagatgaaaggatctttgagagatcccatatacagaagtgtctagcagtatatgtgtgtcttggtgttattaataataggtaaaaggctatgtaaattctatagttcaagagaacagctatgcctgtattttatagaacagattaatagatagctagtatctcaaccacctcaaaagtcaactaaagtattagtgcagtaacctacccaattactcgt

SEQ ID NO: 3655 - DNA, 971 bp, Glycine max
gccatcctaagtgtatctatgctagagaaaacagaatcggcaccagaaatgataaaccatttgaactctaataaaagcagcagaatatagggtattgaacatgaccaaatcaatactttaaaagtccaccatgcctgtattatcaaattctaagaactaaaagggctagttatagatattgcaatgggagttttaatgtattactaccaaacatggaaaataaattagagatgatgtaccttcagtacagaaagatatgcatctgagaggttagtatattttcccaccattgcaattctaacctgtgaaaaacaaaatagttgcactcagtactagccactatagagagctgaatattggaactcatagattcatgaaatattattttagatgatatattagaaaatgttgaaactcaccatttcatgaaatttgtcatatacttttgttgtcgcaatccactccttaaaattaggctctgtagcaacactgcaaacaagaccataataattagtggaatgacagaaccactttaagtaacagccataccataaataataatatactcccagaacaacactacatctgcacatcaggataatcaagaaaatgagtttgtcaaacaaaccctcgcaggtttaatgttttcaggattgcctcatgcgccttttggtcctattagtaaaagaatataaaaaggaaaaaatctggttattatatgaatcacatcacatagtgaaaactgaaaaataatgcaattcaactctctaggcaaaaggatactaaaccacaagctaagcaatttaaaacttggtaaacaaggttccagtaatacacaaaaagacaaccacaaaaagcagtttcaaaaaataccacagaattacttactcttaatagcaaaggaatgtgccaaatatttggaacatcatagagagttagtatgcttgatgactaaagtacatgcaagattg

SEQ ID NO: 3656 - DNA, 1034 bp, Glycine max
ttgcatgcctgcagcattattcttgttgcagctatgagcaacaagaaataggagacaaagacatacagtttcaaacacaccaccaccttctcttctttgcttcaaactgaaagagaaagcttttgttcctccaagtttttcatagcaatagacatgatgagtttcatgactttgctgcgagggttctttgttttagtttgtgttgggattttagcttctcaaccatgcatggtttctggccagagaagcaaagatcttgctctgagatgggatcacaaacaatcaccacttgctcgaatagctcgtgtcgtaaagggtgttgcaatggaggatttgcaatcacagctggagttggcacctgcaccttcaatgacatttgatcctaatcaatcaaacaaaaggacagttcgaaaagggtcagacccaattcacaatagatgttaacaacttaacaagctttggctgtttcctttttgctatgctgctgagagattatgacaaatgagttccctaatgagaagattgttctttgcttcgttgacagtttcttgatgaggttggtcggttttcaatgttcttttccccctcatgtgtttttagttttgttgagtctttctgtcaggtgatgaattgctgctgaagcattgtgtaaagaaatcataggtattgaagaatagctagatagtttcatgatattgttagttatcaaatacagaatatagtggatttctctctcactctcactatatatatttatctatctatttacaaatgacttttgctctagtgacacttgtgctcttgtctttccgcaacggatatgttgacctttttcctgcataatacagtagctatctacttatggacatacaatgagagcttctcattctaattacttttttttttctgttcacaagactcaagcttggtaacaacaatgttggtatccatgcttccatttagtaaaattaggatgcagtttccatgtgaagagtctctacatttcagctttattgtaccctgcaggcatgcaa

SEQ ID NO: 3657 - DNA, 992 bp, Glycine max
tgttctcgtttcgatctggaaaccgaaactcggatccgaatccccgagactgttgcaaggtctgagcaaagagctggtatttcctgatgtcagcgtcgctgacactccggcgagcaaacttcatagactcttcaaagtgggcaggctttatctcagggacctcatcagtgtcatcttcttccatggcttcagggttttctctttttcttctctccttctcaatatcctgttattgcagaggattaagtatatatagaaattacacaaaggagtctcttaacttgtactaaaagttagagacattttttttaagaaaaaaaattatatatgtcaacaacaaataaaatgttaccctacaaatattacattaaagtatacatgttaatttgacatatgaaactttctttttacagcagtcgcagaaattgaatttttttttttttttttttgcagacatattttaagaaaatatactcaaaaggaaaaaagatatgaatgttatcgatggtttagtttagggtcagaaaatctaatgacttggacttaagaaaatttaaagagacatatccaagactttataataattatgagtttatgatccatggcaaacacaaggcaaaacccttagtagttacaacatagtatttgaacatatgcatcccatcataccttttcaatatcttccctaatggcatatttgcacgctcgttgacaaatttctgtgatgtctgcaccactgaatccatgagtaaaacgggcaagagctgcaaggtcaacatcctttgagatcggtgacttcctcaagcatgccttgaagatttgaagacgtgaactttcgtccggtaaagggatgtaaatcaattgatccagacgtcccggcctgagcaatgcagggtctataatgtctggtctgtttgttgccccaatgatgaaaactgttttcttagctgtcataccatccatttctgttaacagttggttcaacaccctat

SEQ ID NO: 3658 - DNA, 1214 bp, Glycine max
cttgcatgccctgcagcaaaacctttattgaacttcatgggagtaacttctgtaagtacctctgcataatattaaggaatgttacttttaggatgatagcacgttggcatttattttaattttttcctttagtgattggaccttatactagcatggggtgattgcaaaataatatggattatatatacaggactctcctatgctacaccctgcaaagcagtatctgaaattgaggacccttggtgctcctgctgttcttctctcattagcaatgcagggagtcttccgaggatttaaagacactaaaactcctttatatgccactggtatgccttgacaaacttaaattttcattgatctaatgtcacaatatcctgctattatttgattctaggtactctttctttgatgtatctagtggcaggagatgtaaccaacatagcactagatcctttattcatgtttgtattccgcttgggtgtcagtggtgcagccatcgcccatgttatatctcagtatgttctgtgaagtacatttatgcagaactatcttttccatggtatcttaattttccttttgcttcttttgaccccagtcatcccttgttttcaaatcaactgcgtaggtacctaatttcagcgattctcctgtggaggttgatggaacaagttgaccttgtacctccaagcataaagcatctgcaattagaccgatttcttaaaaatggtaagggtttattttgcttagaccaaatgatccacaaaaaaataagaactgggcagggcgaagtagctgtatttgcttagaccgatttcttgtattaagattgcatccttgaaaccatagttaaaattatttactgaagatgtatttgctatttcctttcctagcaatattacataaaaaataccttatttcatgttatttaatcataaactttgcagaatcaaaattttcttatggaaattgctatggtgttttatatctttttccattcaaattgatacttataatcttctactcttttttttttctgtttaggtttactaacactttagtattgagacttgacaccatctttgtccttccctatattgttgttgtcatccaggttttctattattaatgagagtcatcgctgtaacattctgtgtgacactggctgcatcactagctgcacggcagggaccaacatctatggctgcatttcaagt

SEQ ID NO: 3659 - DNA, 1159 bp, Glycine max
cgccagcttgcatgcctgcagttttcttcccactttaatcaaattatgcaccaaatctaagattttattgctgaaattaagagattaagtgtaagttaccttcatctaagatacctgaagtgtgtttacatcgtcatcttaggtaagtaatgtcaataaacctgttaagtagcaactaagaatttttatttattaattaactacatgtactgacgtataggataaaaagaaggagaaataatttaattgatgattctactaaaatgtaactcaagcttactcttaaatcattcaataacagtttgttaaataattcattctaaaacttaccatttacttgattaaaaattcttatatatagattatatatatctacaaaattttaaattgatctaaaattaatttgttgaagacctgttccgatctactctcaaatgatcattttactcttattgttaatgggttagtgcatgtcattaactatgggtatccaaatcattcagtacttctaacttctacaaaacaaattaaaatcttaagaatgaatcaatgaacactaagaaataacttcaacctctccttaatgaatgtcattaaaatcttatcggtgcacattacgtaattattagttattatcataataaaaatattaccagttaccactggtagcttttgaaccatataattaattatcctatataatatgtctcgtcaattaacctaacaaaatatatacaatatatatgacagatcgatcacattcaaattgtatacatgacttatttaaaatgcagccttcaaatacaaacgagcatggaaaaaaaaagtagaatatatatatatatatatatatatatatatatgacacattgaatgcctataagctaaaaagcagcattagtcaactttatacagtcacctaagccaaaattaaacctgttgggaaaataacaacttgacacttcaactacattactacaaattaaaatctgagtctagcacatcttcaaatgtgaacaaaacctctatctctctctctctcttgaagactcaaatgcggaattagtgttaagaggaaactatttaatttctcttattattttttaatgacacaaccactaatttataggtagaattagtgtcgaagaggaaactaaat

SEQ ID NO: 3660 - DNA, 1229 bp, Glycine max
atcttacttatgcgtttcactgtttgatcgagagagcataatgaaacaaaatatatattaacatgaattaggaaattggattttgtcctgttcagttatcatacttagaaacaaaatgataaactaatcatcttctgtttttttccttgtatctgtttgcttagtatgtttaattgattaatctgaagccttttatgcaactcgttcacatcataagaaacagaaatatatttcccaagaagataacaacctgtgtattactacttctgaaaaaatactagtcctttaaggcattaacaagtacatcaaatacaatcacaaatgtttgaaaaacacattcaatacacaattctaaacaaatattcattttcactattcattccatattcaatggtgagatagatcttcatgtattattcagaataaaacactaacaaactatgaggtcactcttcagcaaagagagagattaatctaaataaaaggaagtagccagttttttggatcaaaactgaaaactgaatgccaatgttttggtgttgagagctacctgaataacttcatctaggagatttaaatccagaattttgggaatgatgccagcaccaaatccttggatcaggtgcttacctttgacatgtgtgcaaatgggaaaaaaaatcagcaaacagcagcctctagtagtagttgcctaaggactgctcaaggtaaagaatatttttacgaatttatgtatgacatttcaaggaagacacattttaacaattcaaatgaatgacaatatttagtacctagataggctagattacaattaaagttaaatgataaacaggaggactgaatccagcttccaacttccaatatataggccagtcaacaatttaacaggatatatccaaacgggaaaacacgtaacactaactaatgtctaatagtgctgcccgagtttgtagttttttacgaggccattttttatgaacataaattctaccgtttggcatatttcaaatagtttccaaaggatgatccaataagcaattttggtattaaaatgattgtcttgatgtctgacttcaagaatttctgcttgaatcaaccaccacatttaaggcttcctatcgctattcatagtaccaacctaattattacttatctctcaaagaatgcagagccacactccaggtctaagcagtaagcacattgaaattgaccctgcacatagtcttggt

SEQ ID NO: 3661 - DNA, 1184 bp, Glycine max
atctgaacttcgtcctgattcgggcgtgaaccgcacggtgatttatctttaattgcagcttctgaatggcaaactgttacagcttcggaaaaattgctttctatcagtagtccatctgttcttttgatatgattatttcagatcatcgaaaagctttcagttagtgctccatctggagaggtaaaactcaaggtcttgagggagattgcagaagaatacaatatagcatgggattcttctaaaactgaggctgaatttaggaaaaaccatgaagatctcctggtaattttatcagtggatgtttgtttcttcattattggacattaaaaatattatcgactactagatccatgtgatatcatacttctgtcattgacggtagatagtaatatagcatctgtataactaataagttctcatttgtctaactataatggttctactaccacctttatccctgacactgaccccagaaattacttcaaatttcatcctaacctcagggtacttggctcttcatgtgatagttctacaatgagccttgagaagtgactctagctgttgagagtatttgtcttaaatgtctcacatcttccgtaaatgttatagatattcaacaaagtttacattggttgtcgattgtctaaacagtctaatacaaccttcaccttttatctgggctcgggactatgtaaagatgttcaacaaaaaaaacataggcaggtttataaatgaggtattccatgaatgcaagagatattgactttatctgattttgatcaatttgtcccagattttttaagcctatactttgttgtctacttttctactgtggtggcagtactttgctcagtttttctcgatttttattatgattttctcgtgttacctgtagggtggagcaaaacaagttagtgctggagctacgctttctcatactcccaacagaaatggttctaataatccatcacctcgtattacggaaccttctatcaagtctgtgcatgctaagcaagaatataaaccccttgaagctcccagcccttctaacaataattctttgttgaatactaatgaaatcgaacattcgcacgaaaataatgatgttcctgctggagatgctaaaagtgagataagatttcaatcctctgatgtactggagaaggcgcgggctgccattgctt

SEQ ID NO: 3662 - DNA, 1039 bp, Glycine max
cctgcaggagcgataaggaaaaagcaacacaacaaatttagcttcaagggaacgagtcaaataggaactgataatccatatagaccagatagtgaagcattctatacataatatgtaaaatgtgtcaaagataagaaactatgtaattgtggttaaaaaataacttggaatacaattttgaaattcggttgcaatgtcatgtcatagaactgaaaaagaagcctcagagatcttggtggataagaatcatcaaatgggcgattcccatcaagagtagcaaatattttctagcatcaccggtcttcattaacaataaaaatgtattttaaaacaaatcttaaaaaaataaaaaaccagacgaaaacaattcatataaaaaatctacttaaaacctaaaacactaagaattacaaaaaaaacagtatgaaggtgatgttgtcagtagttgctggttgtgaaatcacatatataatatcagtgggaatccgtctgatttaatcatcattcaacatcatatattcaataaccatacaaaaatgtagaaaatttaattcatgttataaaaatactaataaataatttgataaaatattaaaagaactttatctatcttgtcaccgaaaaaccctatcaagaaaaaggatactcggagttaaagatagacaacaagtactcatataaatatacacatatatgataaaaaaacaactttcatatagcctaacgatagattctttgacataacaattcgatgtgcaaagaattgcaatattaggcgcagaataaattgttgttcgtatggaatatataataaattaaaaaaactgaaacaacaaaaagaagaaaggaatcgaaaccctggtagtgtaggactcagagagttgctttctgtgctcaacgataaacctttaaggaaagatccatctcatacaagaggtgtcagaatatacaaagctcttcatcttgggcctacaaagaaacattgagatgaacaaaatattttggaattttggaataagctgctgaaggaagggaaagc

SEQ ID NO: 3663 - DNA, 853 bp, Glycine max
ataattgatgagaaatcacttatcaagaaataccaacaagagattcaatgcttaaaggaagaactggaaaaattaaagaggggtattgtcacagttcaaccaaaagataccgaggatgatgacattgagctcctaaaacagaaggtaggtaatgttatatataaatcacggccttgtattttatttgattgttagtagtctgtctcaagtgagaactctttttattttgagaaatgaaaactataaatttggatcaaacaattatacatggatggtcaagattaaaagttaattaatagtcacatgtccacttaacaaagtcatgtacatttttcttttaatcttgaccattaatgacatatatgtgtactccttatttcttatgatagaagagttatcgatgatatgttctttctatatataggtaaggggtcgacttagtctaagggtgactcttgtttaacttactccatttaataacgttttataaacattgaatttcattcatccaacttctggttagacacattaagcagatcaagtatataaaattccatacaattttaaaattattttatgtttcatcaatcaactttattttaacatataaatatttttcagaataaaagtaaaagttggatgtaaaacatatagctatgaatgtgaaattatctaaactttgacatgcatgaccatcaagatgatatcacaagattaattggttgaatttgcaaattttaaatttatatcaaattattaagtgccaaaaaattactcctagagaaaagttgatcctttttcccctacatacatatatatagagaagaggggggggtttccctcttcccaaaaa

SEQ ID NO: 3664 - DNA, 1082 bp, Glycine max
ttgcatgcctgcagagtagactccaacatgaaaacacatctttcatcgacggcctctgcgtcccaacctctgacaaacaactcaccccaatatggcaaaacctccggaagcattcaggcgcgatcctccccttcaacgtggggtccacaatctggtccatggtcccactttggtaacagtacctaacccacttagcaagcgactcctgtttgggatcttcattgcgtataagaggcggacgagcgcacagtacctcaaacaacactaccccgaaagcgtacacgtcagacttgtccgtcaaatgatgccgcttataatactctgggtctatatacccaaagctgcctcttacagcggtggtgctgccataggcatgggatgagtccgtgggcccaaatctggaaagcccaaagtccgaaaccttggccacccagtcatcatccaacaagatgttggtggttttcacatcactatggatgatcatgtatttcccggcacatttgtgaagataatacaacccatgggcggcgccaatacaaatctgcaaacgttgcttccacgataaaggggatttgtcggtgttgtagagatggtcacggagattgccacgtgtcatgaaatcatagaccaagatcatctccttgttgttgttgcagtagccgatgagaggaacgagatggcggtggcggatctgcgagagcatcttgatctcggtcaggaactcttcggacccctgcttcgaacccggcttgagacgcttgatagccaccgggatggaaatgccgtcaatgtagcccatgtacacgtggccgaatcctccaacaccgacgagggaggcgttattgaagttgttggtggcggctttgatatccatgagggagaagcgctggcagaggagattgaacggccacctctgcctgcaattcagcatgtcgtcatcctgcgagagcaagagaggaccgaacttgcaactcccccacaaaaagatgaagaaaacaacaacgccagataccacccctgctacaacaattttaagtgttctgctgctgttctttccttcttggacgagcatggttgttgtt

SEQ ID NO: 3665 - DNA, 1001 bp, Glycine max
aggagcaactgctgcaaaaaagacaccaattggaggtttggctgatggaaattcagccatgacctcaaggagacttctctgagaggcaatcacccactctgaatattcatcctacaaaggcagacaagagtagaatacaaataagaaacataagtagaaaaagttacttaaaatccccatgatacgtggtttaataaaatattaaacctttccagcaggtgaggcaagatgtcttagtcgatcagcttcagatggatcagatgcatgagcagctaaggcaagcaaggcagactggaaaatatgttaaaagtattattaattgtggcagagtgaatctcttagaaagataaagggataaggttgaaattaagggagcatcaagctcaaaacaagcacctttttgggtgaactcaaaacatctgcatatcgtgtaagtgctgttcttagagtacagggtgggaatgtaggtggcaaggagcttccgctacgtggtttgccatcttcatcatcagtatggattgagaaataggtatctggtgacaaacctattaaccttattgcctcttccacagtttcagacaaattctcacagtaaacaccaacatggtccccagtttcatatctgtgaaataaaacagcataagaacaaggaaaatgtaggaacattatatataaaatttttttttgcagttatacttccacaggcagatacttacgtaactccagtgcctgaaatgtcaaattccaaatgagtgcaagatcgatcagatgcaggagtatgaagctcctttctcacagccacatttgccctgcatgagtagtatgtattcgtatcagattatactttacagtatggcataactgatttgcaagtaaatgactattctaacgtacctgactggatgttgagcatccacaatggcgtgaccatttacattatgccacttcttttcgtcgacagatgcttccaatggatcatgaataacaacccggtactccaa

SEQ ID NO: 3666 - DNA, 1228 bp, Glycine max
cagcttgcatgcctgcaggttcattgttggaattgaagggaattctcattcggaacttgggatttttattagacatggcaacattttttatggcacttggccattacttgtatatatggcggcttcatggcatggctttccatctaatagatgcattgctatttctaaatatacgtgtaattatttcattcttgattctttgtgaattttactatccacagaaatttaactgacattttcatattaactacttgtaatcattgatgttgttttgagcaggcattgcttagtgcaataataaatcgcataaaaggctttatcaggctaaggatagctctaggaacacttcatgcagctcttcctgatgcaacaactgaggagctaagagcatatgatgatgaatgtgctatttgtagagtatgctagtctgctgccctgtctttctgattgatcttggtattgattggatatatttttaaataatatcatgaacatgtttatttatgataggaaccaatggccaaggctaaaaggctaaactgcaatcatctcttccatcttgcatgtttgagatcttggtagggttgcttttatccttttctatttgggttaattttatggagatactattggttgctttactgattccaggttggatcaaggcctggctgagatgtatacttgtccaacatgccgaaagccactttttgcgggtgtgcctggaaatgaaacaaactctgatgcggggacgatatctagtgatgagcaacttgcacggcaaataagtgctggattggatcggccaaactctgctaggcataccatgcctacaggattctatccaaatcagacactaaacactcctgaaggtgttccttggaggttcaatcttcatactcaatgctacatggccttctgtctcttttttgaatttagctgttatttgtttgttaaaaatgtagtcttgtaaagttattaagccacaactgaaggtaatacaaaatccgcaggcacagaggcctaacaaatgaaaacactaataataaaagcaaagaaataaactcaatagaactcctgaatgactcagttgaacttaaagaaacacctggaatcctggaggaagtcaattaaacagttatttcaataaaagggcatgaatgggatctctgctggagatccttgatctatattttttttcaaccataaactccacaaccctaaaaaggag

SEQ ID NO: 3667 - DNA, 1073 bp, Glycine max
gcctgggggttcttggtcctagaacaacatatgtacttgctctaaaagacttccctggcacccatgaatttcttctgcttgatgaaggtaagcttgatgccataagatttatgagaatcttgtaaagcaagtagtcacacattattaccatgtgtttatttaaaattaaacttgtcaattaatgacttgcctgaccactcaacatgaaaattgtttatgttcgttccttcattgtttctcattagtgtaaatctttttattgaaaagagaattaagattctccaaggtgactttgtctctgaattgatcaataaccatgtgtccaccattaaattttagtgggttaagatcacaatgcactttcaattatacatatatgctttctcattttagacaaactccctttagatttagaggagtcttattcaaactttatcacatgacaaaaatatctaacatatattcatatttcaggaaaatggcagcatgtcaaagagaccacagaaattggtgaaggaaaattgttctccccaggaaatttgagagccacatctgacaaccccgattatgctaaggtctacctgtgttcttatattagtaaaggaagattttagtgttactatgatgtgtataaatgaatacttacatctttctttgtcatccaatagttgatcgattactatgtcaatgaaaagtacacattgagatacacgggaggaatggtgccagatgtcaaccaggttcttttcttaacatcatatgacattttaatatgttgtagtattttttgagcttaaatatatttttatacttgtaatatctttttttaatttattacttgaaattagtttcacaaactaatagagtatcattccttaatagatttaaactaacaacaaatattaaaattaaagtttgaaaatgtgagataataaaaaatatatgttttaggtaataaactcaaatgaatttattagaggtatgaaaaaacatatttaaatttttttaaggagttcgctactatcaacctaggctaggataataatattatatgctttaaaaatgtcatctgt

SEQ ID NO: 3668 - DNA, 1176 bp, Glycine max
aagggaaggaagagaatgccatcaaggatgatgctcaacaaaaggagcgtgatcatgtgatggaatctgatctgtccattgccatcgacaatttgagtttatcctcagagtgaatgaccgacgactcaacaattgtcttggctgatatagatcctggttctattggcagttcatctggtagaccaaattcatactacttaggccttagattgaagagtcatgatggaggagaacttatgtacccatctcatgaaatccctgaaactgaaagcataattagtttagttgaattaaatcaactgagtacctaactacccatgctgttgtatgtggcttcttgagggaggccttaacaaattgttgtacaattttttgtacagtaaaaaatatcggacgattagaaatatcttttattaagccagtggcatcaggtgatagataaccttgctctttgttaccatctcaatttttttatgggtaaatgttaattattggcaaatattaattattaggattgttagtctttgttaccgtctcattctcattacagttacatcactgttcatgcatgcattgccttggttagctagagtttgaactgattgatagtcccacttgtgatggatgacaatgatagaacagtggcgtttgtttatttgtcaccttggcagcaagactactcatgatagatatgtttgctacgtttggattccaccaacagtggtggggcattgcttggtctctgaaaatgataattgtgacggattgtggcttgtcaccaacaatgtctcctacctctttctgctccattttctttctcaaccttacgcaatacctttttggctcgttttttctagtaaccaacaagttgatgggtagattcctggagacagtttctctcataattatctcacgttagtctgaggtttgtttgtcatcaaccttctgtttacctccaaaaataaaaaaatctaattttgctgtgtctttttgctctagtaacttgtataaacggacaaaatagaaaaaaacccaattccaattactataaatttacgaaatctttaaaaatttcaatgttgtggtggtgtctcttttagtcttttacaattcttgagaataatgactttttttgtctctgtgtacatgagctcataattttctgcgtgtaagaca

SEQ ID NO: 3669 - DNA, 1088 bp, Glycine max
tgcatgcctgcagcttcttgtattttgtggttgcgttagagggcttggttaaaaatgtaccaacccttttgtggttactgtttgaatcactaaaaatttacatttgtacattccaaggcagaaaatggagaagcaacaccagtgtctcattgattatgattatgttgaagcaaattgttttccaaacacactaattgtcatgtcatttctgtttgctatggttgtggatttgaagtagtttccaagtggagctttaccttgtgtttgtctcgtgaatgtgtgaccccccccccccccccccttcccttataattggcatggtaaagaagctagatggattcctctcaaacaaaagtctaaaagaataaaaatatgaagctaaaaggataggttgatttattttcgtgtactcagatagcattctcttgtatgatactccctctggttcttattataaggcatagtttagaaggaaccgatggtcgtttttataagacattttagaattcctatgaagtattaaatcttttttccattagtttcccttattaaatattctaagtatttgtgctttttattgatattgatgcattatactcttggacttaaattaattattaataaggattggtacatttgtaacatttttaaaaaaattcaatgaaatcaacttaattaattacttttattggtctgtgtgattgatgtctgaagtgccttataataaggacaatgaggagtattttggtaagacctgttttttcgtaaattatcattgattccttatcctgtcaatttgttcatcgcatttattttttgcagacaaacttgattaaggaaagcattaggatgggattcaatgattttggagacttttactatgctcatggtcaattgggggacgcttttaaaagttatgtccgtactcgggattattgcactacatcaaagcacattattcatatgtgtatgagtgcaattctggtcagcattgagatgggtcaattttctcatgttacaagctatgttagcaaggcagaacaggcaccagatgcccctaagcagtaacagttgcaaagctacgatgt

SEQ ID NO: 3670 - DNA, 1114 bp, Glycine max
atgttaccgccagcttgcatgcctgcagcttgtgagacccaaaaattattgttgatgatgttagagatgattttttgaccattttgattgatgaatcttgagacatatcaattaaggtgcaaatgtatgttgttttacgttacatagataaaaatgagagtgtcattgagagatttcttggtcttagttcttatttcggatacaagtgtcaaatcatatgaaagatgaatggttgaatggttgaatgattatttagttatatagaatatttttaaagtgtgaaaatgtgtagatgacaattataatttatagaaacttaagtaattcaaattttttttatcatgatgtcatatattttgtaatactttatgatattttacttttataaaaatattaaaaatcatttctcatgctcactaataaaaactttggatccaccattgtctacacctaagtatctaagaaaaaagaagagtaggattttattggctcttttcgagtagcttgtcacttgtcagttggcacttggtgtgtgtcagagttccgtatttttttgtggcctatcaaccacagttctgtgcccatatattcctacggtaatgaaggagctaatttgtggacaacttggttctttatttgatatattttctcattatatctgtatggatgtttatgtctatattgatgctttggctttgcttagatcagcataattactagattcatggaaaaccaaataaacattatgcctagctatctgtagtaaggtgaaactaataactgttataacaaaaactctataatttgttgggccaaaatctgtaagaatgacacatagatagatcagtttttgagtagaggcactatagctcaatttgtgaagaggataagttagaattgttctctaacctcaatcaatcatactaaattgttcctatactcctttttctagtctttaccttggatacaccaatgctggaaactccaaggtgcagtgcaaagtgctaactgctaattgctaaatcatatgcacatttagagtttataactcggagtccaaacacttggaataagatcatcaaattgatgtctcatgtctttaatctatagaatt

SEQ ID NO: 3671 - DNA, 1774 bp, Glycine max
  misc_feature (812)..(812): n is a, c, g, or t
ttacgccagcttgatgcctgcagaccttgtcatttgtctcttgagggccaaaacattgtcatgtatatgcctgcatgttcactggcatgattcaatgagtacatggcttcagtcaaagtcaactcctcgcatgcgctactactactactacttttgtgtcccaaaggaagattctaacttgaccaacaaggaactgggagagtagtgccatgaccagaaagggagacaaggatgattttgcagaacacagcaacttctcagtgcaggaagtgttagggttctgattacttttgaggatattcagtgatttgtttataatgttagccaaattggattactgattaactgctttaaaaaactaatccaggttcttgaactgtttcgaaaggtgtagttcagtttggttcacagtctggtttggttctttgcacaaacctacactatacagggagatgccatagataaatggcagataaaagcaaaaataaaaaataaaaaaaaatacataatttactaaccaatcataacaggtgtactttggttttcaaagtgcatcgctagctctcgacatttttctggaagctcagctccagatctaacattgatgactttgcacgtaacctgttaaagaaaagtaaaccacccaatcaaatcattaagaagtcaattaggctaacaaacaatatatacttcatgcactatgtgcagtaatggatcaagaatttatactctagccttttttggggtcagaggctcaacatgtcttgtcatgattctagccagagaacacaagtgcaatgtcaagttgggcnccaaaagcccaactgcatctatgcagtttaataataaatctacagttgaacattaagaagtattaagaggagtgaatacttacacccagaagtttgtccaaaacaaagctcaattcaatggcaccgatccaatctcgtgatccaacaaaagaagggtctttatcaccaatttcaacaagtgtctgctgtatttccctgagaaagttgtaggtttgtcaggccaaatcatgatcatatgcatgaatatgacaaaacaagattttgacacgagtgaacttcagccagacaaactgatagtctgaacctatgaaaagaaaattcacaatcagacaagagtgaaatgtaaatacctatgagaaggaacttctatggatgtatagttttgaagtctgaaccatgaaatgatagtctggagagagcggtaagcacaaccccatccctagaaaaatcaaaataatttatttttttttgctcagcaaaattaaatatattatagatgagtaccagaggtactaaaatatacagatttagagccatattacaagtagttttggacagacaatgatacagtagctgaaatatcccaaaaactactcaaataagacttggagctatactctaaacctatgatgctgtcctaagaaaagcatctttgagatttgaagaccattgattgaaatgtagagagaaatctttttcaaaacatctgagccatgtccataaaataaacactgcatcatccatcaatttatgagcgtcaaaattagcattggagaaaatgatgctgttcctatgcttccaaatcaagtaagtgagagcgaaccaccaccactgccatctttttccctgcaaccctacggaagctccaaagatatgctgactaaaatgctgatccggctgataagggaaaacacccatcatatttacccaagactgtactcccaccacagaggactaacttt

SEQ ID NO: 3672 - DNA, 1154 bp, Glycine max
gacaagaggacacacagaagtggtgaatgagcttctgtcgaaggattgtagcttgttggagattgctagatccaatggcaaaaatgcgttgcatttagcagctcgtcagggtcatgtggagattgtcaaagccttgctcagtaaagatcctcagttggctcggaggaccgacaagaaagggcaaactgcattgcatatggctgtaaaagggcaaagttgtgatgtggtgaaattgcttcttgaggcagatgctgctattgttatgcttcccgacaaattcggtaacacggcgttgcatgtggcaaccaggaaaaagcgagtagaggtatgtcaacagttgcgcatcattacaagtaccatatatagatgagggcatacaaattaagttatttgaactaatggggctaacactgcatagctaaatatgtcttatctctaccgtagtagtaggataacccaggtcttggtgttgtaccagggtactaataataataataaagttttgttaacatccctaaggctgattttaaacatctaaaggtggcaagtttttttcaaaaagaaaacacttattatacttttatgtttccaatgtaataatgctttctttcctaatataaacttaccacttttaagcatacatcttaatatacatacatgcaaaccccctatatatttttaagcatccattttccattatagttccctcaaataaaaatctaatactatggtttctcaaattcgtgtgcagatagtgaatgagttattacatctaccagacaccaatgtgaatgcattaaccagagaccacaaaacagcccttgacattgctgaaaatcttcccctctctgaagaggcatcagatataaaggactgtctttctcgatatggggcacttagagctaacgagctcaaccaaccaagggacgaactgaggaaaactgttactcaaatcaagaaagatgttcatacccaacttgaacaaacaaagagaaccaacaaaaatgttcacaatatttccaaagagctaaggaaactccacagggaaggaattaacaatgccacaaactcagtgacagtggtagctgtgttgtttgctacagttgcttttgctgctatattcaccgtgcctggtggggatgatgatgatggct

SEQ ID NO: 3673 - DNA, 1085 bp, Glycine max
ttgcatgcctgcagattggccaggaacttacagcagtgtttatagagctcgtgatctcgaaacaaataaaattgttgcactcaagaaggttcgatttgctaatatggatccagaaagtgtccgttttatgtcaagggaaatcattgtgctgcggaggcttgatcatccaaatgtcatgaagcttgaaggcatgattacttcaaggttttctggtagcttgtaccttatttttgaatatatggaccatgatcttgcaggccttgcagcaatacccaacatcaagtttactgaagcacaggtacctcacccaacattctaataatcacacagtcttagatgacaacctttctgtcatttacaactgtaaaatttgtcttcgaaacatttacttttcactttatgttatttttgtgtatataaactggcatagtgagtcagattcttttcgtaaagaaccttgtgagatctagaaaatgtctagtatttgtatagttaatagaagcatcaatcaaattttgaagccagacatggagtagattgcaacaaaagcatcactttctctttgatggaatttgatgagtcaaaagcaccgtatctgctggagtcctagtggcaactttttagcatttttaaaatgaagggtttcaccaggattaccatgaccatgacacttttatgttttatgaattgcttttctcaccatcatgcagccaattaacttataattagaaatagactagaaatatctttaaagcaaaggaggttgctaaccagttagggagctactggttaaggaataaaaaatcgaaagttttcatagtaaagtgtaacatctaacgtgaccaatagaccccaccatggtttccaataaaacccttctatttattgattccttacacttgttagtcggaccccaaagcaaaagccaaaaccaatattaatcttttaccaaaaggctgtatattctttgcatccagttgtatttacagcttgaaagtttcatgtcagatgtcttctcttgtttactttcctcattaattgacctctggttcttgtttccacaatgggacaatattttttgtttt

SEQ ID NO: 3674 - DNA, 1297 bp, Glycine max
cttgcatgcctgcagccttgttctgatctccaaaatattgggatgaagaaatagatttagcatttgagaacttccttcttgcttcatcagtttcctgaatcttatggatacatagcaaagcaaaataaggtgcaggttaaatgaatttctttcaaaaaaaaaaacagagaagttttaaagaatactgaaggtcaccatgataaacgacgcaagatagttctgatgatcatatcaaattataatacacaacctcagacaaaaacaagtctcctggtttttgaaattaaactgatatcccccgtaaaataaatttaggaagttcatgaatttttagaacactttaaactcaatatgttcaattgattattaacatggaaagcaattttaatacatggttctatgtgtatgctagcattcattttttacaaaatgcttgctggctagcacttacttactcccaatgttgaccatgttttgttccatggatctgaatgttgtaaaaaaacgttgaagtgaacggagactagatattcataacttaatcctgtatgctaacttcatgcataagaaataacattgcaggggcaaaagttgaaagcatatggcttacttgcactttggaggagcttggcccagatttctttggaaagccactatccattccaaagtctgcaaagaagcttgatgactttggtggagacacatgactaagcaaatgtgaacctccagtgttcaactcagatgattggacattttctacatactcaaaccgagacgttggagatggcccagcaggcatattgtttgttgaagatgaaactggagcagggggttcctcaggcttctgctcatagagagactcacttggctgcatttcattaggataattagtcatcaaatgaaaatagtgaacaagataatgaaaaaccaacaaccaacaggcgcttctagcatgcatctgcaaacaaagataactatttgcatacctttttagtgagtttacgagcgccgagccccccactcttcactgctttcttagcaccaataggtttcttaacggtacttgaaattactgtatgtgaagctctaggggaagaagtgctctcaggcttttctggcttctccagaatgttttcttttggcacttcattggtcttgacttctggtagcccattaaccccctgggaagactgagaagcaacaggtgatgaaggcaagcctccatcctcagccatactttttgcaacttcctttgaaagaatttgcctatacaagtctgcaggcatgcaagctggcg

SEQ ID NO: 3675 - DNA, 940 bp, Glycine max
ttgcattgctctgcagccacaatatccacgataaaaagaatagaatggcctagaatagtctcatacatttatcaagctacagcatccagactaacggttgcaatttgcccttctttatacaagttattattacccaaggacaatctaaaacctcatacctcatcccacacatagcagtcgtatagtttgagccaaataggaatttttagacgagacatggaaagggaatatacaagttcaccaagcataaggatagtggtagagctgggataaaatttctgctgttatttattaacaatccctacaaaggggtgatacttataaacaaagaaagttccacgatgagtagttaactagaacttgaacaatagattcaaaaacaaggaaagaattcaccaggagagactcccgtgcatgtcagacttgcctcgagcacatgccaaaaaggatgatagatccaggatacccttttgccttccttccaccttcctttatattgctgttgatcacaacaaaaccacttctactaacgtggcttcttctcatgattcttcccaacagattcctcataattcccaactcccccaatggtttctccttgtctctgcctaattaaccctttcctttccttatagtatttagtatttaccggacagtatggagtgctaccctactttgggcctaacgttgaacctctatcagatggatcaaaacccacaattagggtgaatacagtctcccatgaatatagactgttagatttgctaacatgcagagtgatctaacgacagacggtttcttttatttctttcatttttgttgcttcgaaaaaagggtaagcatttagcattactctctctaggcaggggagggaatttagtattgacaaagtacggaggagtttcaaacttccatgttccaggaaaaaaaaaatgcttaa

SEQ ID NO: 3676 - DNA, 1226 bp, Glycine max
aatcttttataccaggatcagagccatgcatgtcaagtaattcccccaaagtggatttcaatggcataatcagaggcccagtcaattctgcttgcaaacatgaaaagctgatgttcataaaaaatagaaacaaatggaaaagggactagtgatagtaggtgctatggcatggaccatcattcccccggcaactctgttcagatcacctccctatgaaaatcttttattcctgtggattttcctcctccaaatcttcccaaaattttaccttctattattcctctagccctacacatggtgtctacgcacatatgacattgaaagcttcgattacaaattttaaggaatatgttattgttccatgtcatttgacatattaatctagccatacagaatgttataaaaaaagtgacagtctttataaaaaaaaaaaaacttcgtaccccattgcccagaggctcttcgctatgcgaaggtatgggggagggatgttgtacgcagtcttacccttgcatatgcaaagaggctgtttccggattcgaacccatgatcaacaagtcaccaaggcacaactttacaactttaccaaaaagtgacagtctttatgtccgttaataaaatctgttccaccatttaaatgcatatgctagtgttaagaattaattttgggcattttagatgtagtaaatggatgtgaagctgggttgtgaggagtgatgatgatactttagagggtattatagtttcttaaaagatagaatgaattatttataaattcttaaaacattttatttaatgattgcttgctatgtttgaaagtgcctagattaattatctgaatagttgtgagtaaagctggaactgggatctagacccatcaagtaatctcagtataaattgagaaaataaatctcatgatactttaatctgtggcccttcaaatgtatgcattaaaacttcatcaaaagttttgcttggttaaactgaaagctgagtgtcaaaagattagagaaactttgattctgccactaggcctaatctcagaattcatttgacttgtagcattgtagaataaaatcaatttgatctttttgctgtgattgttggacattaattctgaaaactaacatgcatgattactgctgatctaaactaatgctagtaaattgtaatgtttcattctttgccagaaaaaggagaagtgttcagtgctcactataaactac

SEQ ID NO: 3677 - DNA, 949 bp, Glycine max
acagcttggatccttgtcaagcgcagtgctgaatataaacctttgcagtttttagcctttgcctttgtttataggctttttgagaagttaaaaacctttgaatctcctgtaacccccaaatataatgtgagtttcatctcttatgacagcatatttggtgaaattttaaaatcttatgtttttgaaccatgttgggtttttagtagaattgtatagttcatgttactgttggctacaggaagagggtgaagacacaggagaaggactccgcatgggaaaacgattgcttcgatcactagccttggtttttggatgtgtagctatttcatctttggtatgatgattccttagatcttttggtgtgactcatggatcagtactttgatatccctaatttttggcttctgtaacaattaatacagaagctgatatatttttttgggtactaggaagctgatataatatatctatatgacttttttcctgaaacaaagaaagataaaagaaacaaggaggaggggagagagggatcaattcatcttataatcctcttttcctattttacttcacgtaaaaccaaattgtttttcatcatggtatgacgcatcattaatattcctttttttttaatctttattgaatttcttatttgaagagaatttttataagaaaaaaatttgtggtagcccatttacagaaattttaattttgtattgtgtatgacttccacttgtaccaagtttaatctttattttccaaataaagattaatattttctggttcttttcttgcaggcatacactttcattttgaacataattgagtttgcaggtggttttattcctactcttttgtacaacagtcaggtatactattaatacatgagcagtccttcctggcttaaaatatataaagatagaactatccactatccttgtgaataatatga

SEQ ID NO: 3678 - DNA, 1130 bp, Glycine max
atagatttacgtgtctccaggactttcaaaagctgaagtctaaaacaatacataaagaagggaatacaatacaacacagatgttaacaaccaattttacacaatgaacagatgctcaacgagtacaacactttaaaaagcaccgattctacatatgtgaactacacaataaggtttgtatgttagcttaactaatttttataacaaaaattcagtcaatgtcacttcatttatcatatgttgtagtgctaattttaatccactaaattcaataaggagtccttatgttgaattgtagataaccttgttggaaagggtggaaggtcaaccccaagtacgagaaatctattattgtttgccagagaaaatgttggcaatcatagtatccataaagataagacaagacctgaagatttcaagatagcatattatcttgttgacctgctggtgtaaattttacaatacaatttatcacaataagctacaagaaatttgtttactttaaatggcaatacaacaagccttatcatagggcaaaaaaacaagggtaaaagttagtcactaaggaatcaattgttcccaattgcaatccatgtattagcaaatgttacaaagccccaataaaattagataaaaaatttagtgtgatattcaggtcaggcatgggctgcattttatattaatcatacacaaccgtcaattaaaatttcctactggatgatcatacaaaagaaggaaaaaagttgaagagatttagaatttactttgagtttccttctgatttggtgcttccatttgtttcaggtggcagtgtatcagactggtacatatccacacagacattagaaaatgataaattaatataagattagggcattcaagaccttctaaccttgtaaagaacaatagctttctcctcattcgtattctgctgagtcttcctgcctgagcaaagcagcaagtcttcttagttgcaaacaattataaatttcagcaaagctttaaatatatccaaatttgttgaatacaagttagttgatagttttacacaataataatttgcaatagatgtacctgttctttcaaaattaccgtcagtgctttccacatgttttatttggtattcttcca

SEQ ID NO: 3679 - DNA, 1040 bp, Glycine max
agacaaaatcacccattgaatcataaaatgccgctcgaagatgtaatagttgcagatctggcttaaaatcaatggctcttgaaagctcttctattgcctcagcttccttatgatcatccattaaaactggtaaacagagtttgagtcagaagttgataacaggttgcagaggttctaatatattgtgttcatattgctctatcaagatgctcatggcaaacaaaagtatctcaccatgaaccaagaccaaaagtcagaacataagcatacaaagccacacggataggcacaaactcaaaagatctcttcataactgatcactcttgatatgataaaacaaagcaaaatgaacatgtaccctacaataatgtatgatttgataggcgtgctatgaacaggaaacctatgaacagccatgattttctgtcaacatttacagcaacgatggtcagtttttactgcataactgtgaaaattccacaagtcatttcctgcaatacttatgcaatataatgtttctgagtaactgcatgattaatgccacaaattcagacaaaaagcatttttagaggggaaacttaaataaatcatgggtggtcaacataaacatttggcatttgagttggggtatataaacaagtaaacaaagaaagcagaaagataaacacagtgatttttcattcatttaaatgttacatagtaaatctaaggaaagtcatcaactactatttttttcatggaaaactaaaatatgtctatgaagttatgctgacaaatcagtttataggaaaaaatttggtaaaaaacaacagcattgaagattgtaccctggaatctaagacagtaataaaaccatcatggctatacaaatgccacagataatatttgaaacacaaaaatggcttgcaaattacaatcacagctacaattcccctccctcaccaagttaccatcatgaataatcaggagaaaacacgggataatagaaccactcatatagactcacctgcaggtgactctagagaaaccccgggttcgag

SEQ ID NO: 3680 - DNA, 1157 bp, Glycine max
  misc_feature (1148)..(1148): n is a, c, g, or t
aaattgcaaatggggatgagcaagttaaagctgatgcgatacgaataggaaactataaagatggccagtatcctacagacagcagggaatttgctaaaagaatattctatactgtgtttatgggatctgaaaacaggcaagtgataaatttcaggttttagtgttttacactattcagatgtatctccctaagtttctatctgctatattccattgatactccatctatatttgtataagaagagacatgtcaaataaattacttgagttcaactaaaaacacactcttatcagatgtgatgttcactaaaaaatctctcatttcagttctgaaatgacaaggtcacgagcgaaggtgctggctgatgaaattggttcatggcaccttgatgttagcattgatgtagttgtgtctgcttttttgtcattgttccaaacacttacaggaaagcgaccacggtataaggtaaatgaagcatgaacttgagaattctctcaaccataaatgagactagtaaaataactgtgtagtttctttatggggaatctctctttctttcctaactaaagatttgaatcatcttgtatattttatgtttctatttcatggtagcctcaaataatttctttgtatggtattgttcctacaggtagatggtggatctaatgttgagaatttaagcttgcagaacattcaagctcgaatcagaatggtgctagctttcatgttagcatcactcttaccttgggttcacagtaagcctgggttttatcttgtcttggggagctccaatgtggatgaagggttacgtggttacctgaccaaggtatctctattttgctttggattatgcctttatttgtaagggactttatgtttttcttccatttcttgttttcactacttacaaaaatgtcaatttatttttactttgcttcctgactacaaatattatacaaaaaattataaaaacacttgaatctatgaaaactggaaatcaaggtggttttgtaattattcgtggaaatagaaagattttcttaaaacggatcctttgtttctcaaatatttttcatgtatgtggtccatttcactcttgttatcaaagtttaactctttttatagtatgactgcaggacatgcaagnctggcgtaa

SEQ ID NO: 3681 - DNA, 984 bp, Glycine max
gacattataattcagggctgaccattcttgctccagttgactctccaaacactgatggaatagatccaggtaaattattattattattattattattattatttccactggctttcagaggaaaacattagataaaaagaaaaaagggaaagagaccggtttgagagaaaacgaatgatattctgcacttgtctgtaataagaaataaaagttagttcgaatacgtacaccaataatgtaaatgctatttggattcggcacctctaaaagttaggggtacactttggagggtaaaatacaacaaaaaccatcaattcgaaagataatggtgagatttgtgataaaatctaaaattacttataatatcaacaattgatttttgaattaacgattattgttccacttctctaaactgctcacaattaattgatttttgaattagttataataaccattaatttgagttggatttatatcgtcacaatcattacttcagaagtcattctaaagtgatttccacataatctgtatacaatctatcaaaattaaactccaaaaaatgtgtttattttccccatattttgaacttctcatcttaataatgtgttttcaatgagaagtaacggacaagctttattacaaattttcaattattaataaataataatacatagtaaactaaattggtccaaaatttagccactgtctaattgtttcctccctttttacagattcttgttccaacattaggattgaagattgctacatagtctccggtgatgattgtgtagcaataaaaagtggttgggatgagtatggaatcaaatttggaatgccaagccaacacataatcattagaaggcttgaatgtgtatccccagatagtgctatgattgctttaggcagtgaaatgtctggtggaatccaagatgttagagctgaagacctcacagccatcaacactcaatcagcagttagaatcaa

SEQ ID NO: 3682 - DNA, 1258 bp, Glycine max
aaaaattgaaggagccatacatctttaaattgcattatccttcactattttatatcaccatagcctctgttcccaacatcaattccatttttcttctattgattcgcttgtaatccatgcacataactagagcaaatttagggttaagctagcatttcagtcaggaactcactcataatattgtgtataattaagaaagtaatgaaggggaaaatctatagaaaattaacatatcttgtgcaaatttatgcataaatgacacctgagcactttgaacaactagtgacaagaacttcaaggatgtcagtgctgtcaatgtgtcatgtaggttttgttcaatctaaactgaatatatgacataattttctacaaaaacatgcagatgtaatattctctttgccaagcaaagatgatttcttaataaagtctgtatcaattcaaacattcactttggaagatatagaggtggccacagaaaggtacaaaactttgattggagaaggaggatttggttctgtttaccgtggcactctaaacgacggtcaagaagtggcagtgaaagtccggtcagccacatcaactcagggaactcgagaatttgataatgaggtacaaatacaatagacatttttagtttattagattatctaagttccccatgaaatgttcctttctaaaaaatttaggcagcaacagttatttaattagtgacaaaaggagaatatcttatattcaaaagttcccatgaaatgctcctaattaaaaaaatttaggctgcaagagtaattcaaaagctgatgtttgcatcccggcaaatgctaaagaagaatataagatactctccttttgtcactacattccaggctcttacacaccccaacccctcttcattgaaatttttaacaattgcctacttttccacctcacaccatctgaccagtctgtgatgtatcttgcagctaaacctactttctgcaatacagcatgagaacctggtgcctcttcttggttactgtaacgaaaatgatcaacaaattctcatgtatcctttcatgtccaatggttctttgcaagatagactctatggtaaacattccaaaatcctttcagcttatttgttttggtacccattaattctaaaattcaactttacaacaggggaacctgcaaagagaaaaatattagactggccaactagactgtctattgctcttggtgcggcacgaggcaagtaatatggtgcttttatttttactaa

SEQ ID NO: 3683 - DNA, 995 bp, Glycine max
cgccagcttgcatgcctgcagttttagcatatgattggcccatgggtttctgaagttcatgaccttcaacaccacttctttcttctcctctctcagtgtggtgctgcttctcataagcgggtttcgcctcgagaacaagctcatgatgtggatcttgatcatggctatgacctcagcactcacattcatgggactcacatacttttgggcacagagcttggtcacccctgatcacattgttgataaagttaataggatgggaattcctttgtctatagtttgggtgatcttgcttctagtgactgttttggttcatgtggttaacttgttcttgtgcgtaaagaagttggtcaagaagtggaagaagcagaagctgctgcttgctcaaagccattcctccgagagttggtccagtgaatgagaattacaattagagaaataggattgttacaacaactaatagatagaataattgtgattggatataattataacatggaagctaaaaaacactaaactagctatgttgtatatcatggatttaaataagtccttatcttttgatccactatttgtgttaaaataattcaactgtagtgagcagtttgtatgtaattaagcatgtttattgttcaaccactatgatcgacggaaaagtcacgcttaactcaaccgaaaaaatgatttgtcaaagaaccatgtttaatttttcacgaggggtgaaccttagtttaggtgtccaaaccaaaaacaccctatcaaatttgaaaaagacgagtctaactcacaagcacaccatcatcacagtgaagcaggagcttattcaacgagaaacaactagcaatgccacgtgaatattgaggagtagacgttaatggtggtagctattatgatggagtttaatttgctgccgtgactatcatataatcatcaataagccgctggtggagttaagtaaaagaatataggaattatctaaattgcaatactattaa

SEQ ID NO: 3684 - DNA, 1134 bp, Glycine max
aatagaaggactataatcttcccctggctgtggatgtgttacatctgcacccaagattattgttggtaagtcagacacgtgaggaattcttctagtaaatgcatcattcaatactgtgttactgccaccaacctatataaacaaacaatgacaggtttaatatttaaaagaaaacaaaaaaaaaataccaaaacaaagttatttattggataacttcaaccttcacatttatcttgagggccacattttcaagatattgtggcttcatctggtaaacatgccttggaagacaacactgagatactatccctaactcagtttcacaaatacgctttattttccctgccaaaacgagagatttaacatgataaaatcaaattagggtgttcagtttgaatatagaaggcactaaccataggatcccttcaaatcaggcaaaattatgatcaataattcgagtcttccttcgtttgctagttttgcaatagcctgcttatgcacattcccaagagcactctctacttgactactatgaacagatgttatgggcagcaaaggatccaagttaaaacgctggcataaaatccaaacaaaaaagaaaattatcaataatgtaaccataaaataacacactaacaaatggctcatactaacagcttaccatgcccttgttattacacattttggccaactcttgacaaaatgaagctgccaaacctcggtttgtttttccagaaaagttgaggcaagtccaatgctgcacagcgccaccattaaccattttctacaaaatataacaagggactaaatctttgttctgctgcaaacaaataattaattatataatagaactaagtggcctacaatactctaattaaaaattaatttaattctaataattcactgtttttactacattatattacaccacccatatctatcatatatatgacaggtccattcacctgaacattgacaatacaaatgataaaataacttaacataaattttaagattgaacatgaatgtcacataaaaatcattattagattacttagcaacataataagaacacacaagtaccacattttctaagataaataatactcttcaatagacttggtcattcaaaga

SEQ ID NO: 3685 - DNA, 1212 bp, Glycine max
atctcgataatttcggagaaatcaggtctcaatgtaggatcttgctgccagacctctcaagaagctccacaaactttggatgagtgttcttcgggatggtgggtcgcaaaccctgaaatccatttaaagttatggtaggaaaaaattactatttgtacgatacacatatttccatttaatcatataaaaaccgctttcctcaaaatttgagtttattctaccactgatgtttaaggaaaaaaataccttttgaaccactcctatagctgcctgtaggggggttaaatattcgtatggaagctggcaagaaaaacacaataatttacatgagaggaaaactaatactgtaagagtcataaggtgttacaaataagaaatacctttccggtgagcaactcccataaaacaattccaaaactaaatacatcagccttgtgatcatacggcttgtgttctataaccttcaatacaaaggaatcatggtaagaaagatgacaatatgagttatacctctcatctatcttagccaccagaaaatatttaaacaagaaaacaaaaactattaaacagcatattttagtgggctagtactaacattcagggcctgagatttatcaaaccttcaaatctttcagcaagaaaaacagcaatgaacaattgatttaccacactacatttccccagatattaaaaaagttaatactattattttgcccgatgtttgaactgaacattttctaccgataactcgaccttaattgttattctgaaatataatgcagcaataatcctttttctcatactaaatccatcgtacaatctaatctcataaaatttggtgaataaagtgatgggggaaagacattatagaagggagaaggaaaagtcgtgggtttgatcccctctgctaatatatgaccacatgacaggacacttagctacagtaatgtcatccatttcatttattataaatttccagaacgacaggttcacataattgatcaaacatcaaaataagatttaacactagacatctatttaggttgaaaaaaccaattaaaaaagtgcaaactcctatggtaatataacaagaaaacagacaacaggtgttgaaaagctaaacaatgtcatcaaaactatttgaacaacttgatggcagtaacatgagaagatcaaatacctcaggagccatccatcgatatgttccagttt

SEQ ID NO: 3686 - DNA, 1088 bp, Glycine max
gattatttgacttcctaactactagttttcatggttatataattttccttattatttatgttgtcattagatgtgtggtttagtgtataatttgtgttttctcgctgtctaggtgctgaaatgaaaccataaagccaatttgttttgctaacttaatttgatcattgcagtacaaaaaaatgaacatgacaacaaccttatgagagaggaaaacaactcagatgtacacatttagtttctagcagttttgttattgtatcaattcaaatgtcactgtctacctctttcctacaaagtcttgtgtgatttagtttgacctttcttggacacattagaggtcactcatcaattgtaactgtgaagaataaaaagtacaattggttaagttaaggcgtattcttaccggctatgccttggcctatgaaatttgaagcgctgagattgtttgttgctacataaacatccttcaatgttatcttcggtgaagttgaatcagactctggataattaaatagtgccacttaagatagagaaataaatggttcaggaccataaaaatgctcaaaggattttagtatttgagtaccatcttgtacggttggagcacttttaattcttgtgataaataatgctagtgcggcaagaaacaccactgctgtaactcctgttataccgaaggcaatccagagacctgctgccatcatgtttttcaacaaaattgtcacgactcagtaatttcgtaaagttgtcatattttttaacaaaatcatcataaatcatatctggtagtaactagaacatatgtacctgagttgatattagcattagcactagccttaaccttaacttcttgattaactgtaataacagaaatataaattaatagattagatgaagttcatcaatattcattgaggatgaaaattgcaaaatcaatcagattactttcaaaaattatttttcatgaataaaagttgaaaccaacaagctctaagaagtaaaataggtgaattttaagatgaaaggattccatcaacttttgttgctaatcaaagtaaaagttaaattaactctagttttagatctca

SEQ ID NO: 3687 - DNA, 1131 bp, Glycine max
aattgagtttcaaatagacagataaaattctagcataaggacccatcattcaaatcaacaaagtattctttgtatttaccaaatataccggactatgaaaaaatcttctcgagattatacaatgaaaacggaaacttgagattctaataaagggtgtgaatagtaacgccctgaagataaagaggccagtccagccccataattttgacacgacaaaaacataaacctctgtcttgtacaaaggagaagcaacgggtatcggataagtagcctggtttcctcgtcctgaaagaaacaccagcaaaccactctcaacctaagaggtaaactaaaaccccttctcaattctcatttagcgaattctatttttctaccatatctctcatatttctaccacaacgctttcagtgttgcaagtttactgaaagcaatggatttagtggcaccagccgaacaggtttgctcatttcaccacttccacataaccagagctagggtttctgataactccatttctcgtcctttcgttctatatcctgatagtagtgttagtcatcatttttcaaaattgaaggcaactaggtctagaaagcgtttagaaaatcgcgtttctgctgtttccaagtccgaagcttctggtttgaacggtagattgcaacaaattgtgagcaccccaaacggggacttgaacgtcataggcatggaatcttcgcccattggggtgaacggttcccggagcttcgaggagtttgcgagtaacattcatctccggaagttggttagaaatggagagttagaggaagggcttaagtttctggagcgcatgatttaccaaggagatatccctgatgtcattgcatgcaccagtttgattcgcgggttttgcaggagtggaaagactaagaaggccacaagaatcatggagattctggagaattctggtgctgttcctgatgtgataacttacaatgttttgattggtggttattgcaaatctggggagatagacaaagccttggaggttttggagcgaatgagtgttgctccggatgttgttacttataacacaattctgcgtagtttgtgcgatagtgggaagctgaaggaggcaatggaggttcttacaggcag

SEQ ID NO: 3688 - DNA, 983 bp, Glycine max
acacaaaaaactaccagcattttcgatcttcatagaggccccttctctaacaagtaaagaagcaacccgatcatgtccattcttaactgcttcaagtaagggtgtgttcccgaagttatctataaaattacccaaataatgatggttgtgtcaggctgtgagtcaaaatttaagtgtctcgtagcaatgaatatttagtaagttagacagttacctttaatattgacatctacacgttcttgaataaggaaaagtgtgatatcttcatatcctctagatgctgcaagatgctatcgttaaaagcaaaaggggttcatatcaggcaagtatttttcataacagaatctatatgttgccaagttgtttttttaccagcaacatcatagatgaagagaaagcaacagaatatttacaagacatcataagaagatgcaagcgccttaccaaaggtgaccttccatcataatctgtcttgttgggatcagctccagcgcgaattaaaccttttagctgatacagatccccattgaaagctgcattattgaccttcaaagcaagctcagcttcttgctttccaatatgaaatgtgatgtctgactccaactgcttatctcgaaaagattcttttccctatataatatgaaaaatttatctgtctcgtgatcagaaattaataaattataatcttaaatgtgtaacttgatacatccattgcttgttcaagcagagagtagcatagtgtattttttattcatgtcagagtcagatactctactaaagggaggaggacatgagaaataacatatataacattattacctctagaaggttgtttaatactttccttccatcataaaagtatatgtctaggatatttgtaaatgattgtttatcaagtcgcaggagtctactcagttcacaaacacggacagtatatggttgaggaatgttgcaaagaatagatatttctccgaatgaactgt

SEQ ID NO: 3689 - DNA, 995 bp, Glycine max
aaaatccaacaacaaaatgtttgtaaaccataagatatcaaacataagtaagattcccactaaactaagtactataaggaattagacccatatgaacagtgtgctcatgaaaaactttaagtatcatacctttagtaagtggatcagctagcttgcaatgggttcctatatgttctatacaaatctgtattttctaaattctttatttaacaaccaaatactttatgtcaacaaacttttacttggttgaatccttaataataccactaagatattgccccaataaacagctgatgactacctaatgttagcaacgacaacaggaaagtcagttacaataatttaacaatcataaattctagtatgatgtcgaatagcaaaatattaaccccaccaacacggttaaatatggatccttatgtggaatgattgctattaagacattctgaaaaaatcgatgtcagaatatcctatgatcactaaacttctagactttcgatatgaaaacatgtagttttttgttctctttaattaatgcataatgtgctttactattttctagtgttggtatatatcaccttaggactcccacaaaaaaatattccaggacaatacaaaaaaacttaagcattcatgataaattgtaatataattgttttccaacaataagtcatatgatgatactaggatgtcatcaacatataataccaaaataataaatttactcaaactaaacttttaacatacacaatcatcaaccaaatttacctcaacatcataaaagataatcttgatgaattttataatatcatagacgagagacttgtttaaagcataaatgaatttctatagtttacataccataaactttagattattttaaacaaggttttcttgttgcaccatataaattatttcatcaatatttccatttagaaacataatctttacatccatctatgcaaaacaattatcaaaatgatctgcgaggtcga

SEQ ID NO: 3690 - DNA, 1262 bp, Glycine max
acacatggacctggagagctgaaactaatgggaatttttctactaaaactgcataccaagttatcaaatctgagcagtcttatgaaggccagcacctgggtttccagcaactttgggagattaaaattcctcctagagccttatcttttgcttggagattgctatgggatagactcctccctactaaggataatttaattaagagacaaatccatattaacaatgacctttgtcccttctgccatagccaacctgaatccgcctctcatttgttcttctcatgtgctaaggttctgcctctctggtgggatttcttctcatgggtgaaggaagacagggtcatccattgcaggcccatcgataacttcctccaacatcatcctttagcaggatcaaaggggtctaatagaagatggaagatgtggtggatagcagttacatatacaatctggaagttcagaaatgagttgatttttcataatcaaccctttgatatccctaagctggctgattcatctcttttcctcatgtggacttggttgaggggatgggaaagggacttcaaggttcctttccagtgttggtcttcagcaatgcctctagtctttatttaattaatgttttcactgtagggcagggtgggggcatgttgtttgttgtttgttttagttcctgctcgtacaggatcccttccctttatatcttgtagtacctctggtacttcttattattaatatagattatctttgcatttcaaaaaaaaaaaacaaatacatacatgtaacatgctcatcgcaccaagtgaatgaaatttaaatccatggaaactcatacagcttatttcataacagttaaaaagtcactgatgaataaagaaaaaggttctaagatcaaaacttgattcctactctaagctatattttgcatatttcttttacttttcattggttccccaaacaccaccaaactttgcttgattccataaggagaaagattatgtaaaatccattaaaaagaacatggctaggccagtcacaaaaaagaacatggtttcaaatgtgataatctgtagggcaaagaaattctgccattgttatagatgtggtaatgtacttacgatacttatgactatgcacacacactgtataaaatcatgtcacaaccataagtaaacttatgaatcaataagaattacgttaacctccttttatataaaaagaaaagaaaaggaattagatccatacttgagtgttggaaactca

SEQ ID NO: 3691 - DNA, 1062 bp, Glycine max
tcagagaaatttttacctctcccatagatgacaaagctacatatacattagaagttgcttcttcatttgaggaaggaaaaacatcttcatgttcaacgtcttcatctctgcattgtgatacaacagtgtcatggacactcttgcttttcaactgcacccattggagagtctaaaataaatcaaaatagaactcatcaatggagtttaatgtggggttagaaacagaataacaaaaacaataaaatggcacagaagtaacatttctttggctcaagtctaaaatacaagggcatttctgaatctctgattccaggaaccagggatcttccacataaagaagcaacagcaaacagagatgatcatatattttcagggaaagcaaaagttatactgttactactgtatgcaattacagacttgttgtgtgtgcaaaatggaagcacatggtaggctctggtgaaatgtcatcctttctccagggagggaaaattaatcaggttctattcaactaaaattatttctcagctcagccaaaattgtgcattaaattcttttcttcttttgaggtatgttggaattaaagacttttcctatatattccgaagaataacccacctactccgcagcattatactaccaacaaaatacagtactcatcattgaattcaataaaagtggaccatgaaagtaaaagtcaacaccaagatgccacaacaacaacaacaaaaaatggacagaaagaaagaagcttctcaacaaggcatagtgagttgaataccaggaggaatcactgcaaggggaatctcataatctggtatatcatcaacaggctcatccttgggcttgatcaaaataaatggatgaggcattttgttatttgccaacagagcagctcggccttcaactgttgactctttaagtggttcagaaagggaccttctccttctgggagtaacttgaggtgatataggtttctttcccttgtcgacaacagcatcttgtgggggaacatgatgagcaccaatccttgcatttccatcagataatgcagccaggctttga

SEQ ID NO: 3692 - DNA, 1170 bp, Glycine max
cagcttgcatgcctgcagaggtggaggattacacaacatattctgcctctgagttgatggagaggattgatgagatagactttggttatttttcttggattgttcaaccctcttcttccctccttgttgttatgcaatttatttctgacatatatcttaaacttggctcagatgattcttcccctttgatctatatatttcagtctatggctcttcgaaggcttgtttacttgaataagcagattaaattgttcaagtatttaaaaaagaaacattatttgcaaaagaagtcttatagatctcaaatcaagacactgaaagaagaggcggctggccttactaattttattttggagtatttatcgtgtgtgtatcaatccccaatctttgtttctgattatgtaacttgtgaagatgtagtttctgtggtcactcaaagcatccaagaccacataaaagaaagatgcaaccaatgggattgggatctaggagtgtatgctgctaacaaaaaatcattgccaacactcatttggtcaaagctttgcaaaaatgttaatatttggagcaaccatgcttcaaagaagcaattgaaaacattcttctcacatttactccatgcttaccttcacagtgtaacaagtagttttcaagagccaggtgtgcaagaaattgacaagtgtaagctgctcaagacgatcactttgtcacaaatatcatcagaacttctgaatgattcccttttttacgaacaaaaagtaagaccctcccttggttatacacaattcatttttacccctcacacacaaacacacataataatagagttgcatattaatctttgccagtgttttttttagcttatttcagttttctgtagaaatctttaattttttttttatttaatgctggggtgtgatattttgagcaagaaaaggttaattcatttcatactgttgtttcagtttgtttacaggagtctggcctcgatgttttgccatgctttagagaaatctgtgctcccattatttagtaacattccatgtactgatgtcaatcttcagtcattgcctaattggccagagtttttaagttcccttgacaactcagcaatgcttgttgataaaaataaagaaattctggtcgattcttctgcaggcatgcaagcttggc

SEQ ID NO: 3693 - DNA, 1171 bp, Glycine max
attccactcctcagcctgccactcttaatattagaaaaagcagatgccctaagatcagggggtatggtaaccccagcattctgaagcttctgaacctcatcagcaagcctctcctcctcctcctcggccttctgaatctccaccaaaggcggccctgaaagcgtctcaatcacaaactgattaaacagcgactcctgaatcctgtcaaagtaggtactcacatgaaaagaggaagccaacaccttcaccataagggtcttcaacaaccacaccaaagtccccacaaggaaacacaccaacaccttagtcacatactcgaggaaatcactgtgggtctccctctgcaccctcttgtcaaacaacaaatgccaagcaatcaacacaagccccaaccaaacacaattctgaacagccttcctcacaccatacacaaaatacaataccctcttcctcaaaaggaagtttctctcaatgcagaacacagcaatcctaacaacccaatcagacaccaacctgccacagatcaaaaccaaaaccataacctcccatttccacaacctaagctgccacagattcttgttcctcagaaagggaacacaaagggtggttatcaacaacccaatgatcgaaatcaaactcaaccactcgagaagaatccacaagctgaaatgagtctccttaaactcatcaggaagatcctcttccaaaaacggatcatcatcctcttcgtcattcttcttccccaaaaacccggataggagttggcccgattttaaaacacgacccgattttctgtcgggttcttcgggcgggtccattagcctagacctcgttttggccttcaacaaggccgattttctctgcatggaaaggtttctttcgaaggaagcgttcgaggtgcaccgaacaacctcgtcgccgcaggctggcgacggcgagggagaccggcgacggtcgtattgcggcggttggggagggcgttggaactccgcgagagacggcgagtccttgctgtgccttcttctgacggcgtcgttttgcgtttcgaggaaattcacattgtaggcaggttcctcgaaggaaaccttgagctctctcgagacgcggtgtgtcatcggagattcctcaaccggcgttaactttccgtcgtcgtcgtcgtcgccgccttcgc

SEQ ID NO: 3694 - DNA, 1002 bp, Glycine max
tgagagcttccattcagaactactatcaagtactgacagttagcttcaatacttcatttataataaacagaataatcgcttaaatgaaattggtttagtttcattcacattaatttcaggcacagtgctttagatgtaatcaattcagggagctgagaaagaaattccacaaaccctcagattttaaaagttgaacatcctcagcttgctgcatcaattaacagtaaaaaagaaaggaaatgagaaaaaatgagatttaagattttatagcaatttcatgtgagatattagagcagatatgagagttgtaactctgaaatttcaactcactatccaattttcttccacagtattatcattgactccatgtaggttattaactgagttcagctgaatcctgtcagttggatttgagaatgaataatgatgttgatatttatgtttttatgttccaaaaggccacctttgggcaaagggaatacaaacaattacaatgaaacaagtaattatatacagaaaactgagaaaagaaaaaaatcaacaaatacctgctttctccatctgaaaatgagcaactcagggcagggagttcagatgataactgcttagcatgatctttagaaccagagcgacataaatccacaccagaacttgactgagataactctgagtgattctgtgcatgaaagtaaattaaatattaagctgaatttaggaaataacgtaattactttatcaggaaggaggaaggagaaagcaaaagcatggataaaaaggaacttctgcttatgttgctttggacacaatttataaattttgtaatatgtttagatgttaaagctgaactaacttcaaaaacagaatgagactcaacatttagcacactttcaagcaaaaattgttcatgaaaatatcatcagttcatcacttttgaagttaatcaaatgttgcctgcttactggtaatattttaccaatactatcagcacaagtagttttatcc

SEQ ID NO: 3695 - DNA, 1038 bp, Glycine max
gcgtgcccttttctttttttgctgattttgtttgttccctttttgtgtttttcgaaggtgtggtcaaagttgtgagcttttttattatgtgggtttcacttttcagatttcggagatttcgataccgcatctcttgacagcatcaatcttctcagcacagagtgcggaccttactgtttatcaccggaatgtgcggttgttggttctgttgtgcgtggcttcgggaatatgcaggtcaaaatcttgtatggtctaatctctcttctacttgctgacactcatgtgattgtttttttcttcttcttttggttcttaattgatgttgctgaaagaacattccatgaaaaaaaggcattgaatttgctttttaatacacacacacacacacacacacacatagcattgtctttctatgtgttttgctttattgagattgatcgtaaagctgatgtttgacttcttgtactgtgattggttccatacactaagattttgtgttttcacgtttgtttgttaagaagctaaacaagttatagcttgagcttccgaacacgtggcttgtagtgcgatttcttatttctcagcgggttttcaaacatgcttttgttaagtagataaaagtttaacttttttttttttttgggtatgatcaatgatgctcttagttctgttgcatttgaaactttttatgttgccggtggggtgtgaccattcttaacaagcattttcctgtgcttcagtggaatacgaggttgcttttttggcattgcaaacatgattctggtgagtttctctgtctgatatttggggatggggatttctatggtttgtgtaaaatacaccagagcgtaatggaataagagatatagttatcaaattaagacttagtacttgagcagtggccatttggctgcctccccccggtccctgatgctttgactttgtgttttcttcacctctttggtgtatacaacttttcaaactttggaaatatgtgcaggttaagagaatgagagaaacactatatcttctcttctt

SEQ ID NO: 3696 - DNA, 1193 bp, Glycine max
taaaaaaacaagttaaactaacctccagtatcatcaagtttgttgtgcattttctttgaacaactgctatcgtccgtctcttgctggctcatttgacatgcagcggataattcacttgtgactttattggtcaacttggctgcttgcatgctctccttatatttgatttcgtccattgaaagtgatttggcatttaagtcaactataaatgtcttagccgacacaagatttgtgaaataatattcagcttcggagatgagttttgcttgccttgtgtacaacttgatgaatttgaggttagaatgcaactttggaggatttgcctgaaagtgacaaaccaaaaggaataaatcacccctttatgtgacacacacacacacaaaaaaataatctacccgtgtcaaagggtagtgtaaagtggattctataggcctaaaatcaatgaaagaaaaagtttaatatttaacctaaacaaagttttaggctcaagacaatgatgctgtacaagctagacaaattgaaattacaatgcaatattattttttgatgaacaaaaaatcatattgttttagttctctacaaatatccttttaatttgggcaacaacatcaataatccaacaacactcattagtccttcttttctaatagttgcctcctacttatatgtacatgaaggttattcaaccagatatttccgcgtgatctgatagccccaacaacaaatacaagatagatccaaatagagaaaataagttattgaattttataataattattttaatatcaatgatgatttgtaattggacaataatgtaaaattattttacactctcagtacataaatattaaattatcttcaaatatcatctaattaaaatttgagtttaagtttaattcaattcaaaaagatagtttgtaggaagagagttatccccacacactcatttatagactatttagactattttagccatcttaatagtcaatgagatctctaacagaaactaagcatttatactattaaaaaaagtgtctgattatccaaaaactatatttgacactcagcagaatgtcttattaccaaggggggcttgccttgattgtaacatatatgagcacagggagaaagccatctgccccagctggaacatactcagacattgcagcattgagcaacagattgttgatgat

SEQ ID NO: 3697 - DNA, 1241 bp, Glycine max
tgttttcgccagcttgctgcctgcgattaactctatggagattgttcttcataattctaggacaagtgataatttggagagttctaccacaaagtttcactctttaactgaaaacaaaatggatgtacataagttgcctggctgtggaatatggatttctgttcagcaaacaactattgtaatatcttgtgaagaagggaaaatggatctcctgactgatttatcaagaattctgtcttctgtttttgaattcaagaactcagttggatacaacattgatcatattgtacttgaaaatttactattgcgttctattaattgtttacatgaaatatctattttgggttgcttgtttactttatgcttgagtggtattcaaaatacctcatcttcaggaactgcaagcaaaacatttggtggttttaatgctaatggcaatacatcttactcagtacgagaaactaatttgacagcctctgaaaggttaagtaatcaatcttcccaatcagttataaaaatgggatctcctacaaatatcagcatgccagcttcagctagtcactggttactaatagatgttgcaataactaatatcttcatagggagatgttcactgaagagtgatctgattgaagcacataaattgaataagcttcattctttgctttcaattggtggagagtttcatatgatatcctggaaggtccaggtaattatttaaggagctagaaagggattaataatctctcaaacatgttcctgcatctattttttgtgccttttacaaattgaatctcagtgagtttatcaattttacagatgaagctgtttttgttgaacatcccggaatttaaaatttacatcttatcatactaaattataaatgttattgatcagggtggattcatttttcttgaaacaacatctttggcaatggccattgataactattcttcatatcttcattgtattggcaatctcacttctgatgcacgacaacctaataaaggcaccaagaaggatgaggatggaaacaatactttagatgatgtgattgatcaagggactgctagtacatctcaacaagcttcacgtagattgccggatgcatttcagttatctttgtctgactttgtttttgttttagctcttgaaaacaaatctggtaaataatctcttctctagttttgtagtgtaacttggatttttttttttcttttccaaatataatacagttcact

SEQ ID NO: 3698 - DNA, 1036 bp, Glycine max
acctgctgtgaaaactactgtaaaggctcccaaaaaatcttctgataaagataatgacaagaagggtaagacagtagaaccaataaaggaagaaccattagatcctgtggctgaaaaacttcgccaacaaaggtatattgttttccacccaatttggtcatcttgatgttcctttaataacattctgttatgcttatgggtacaggtatcacattttattaaactctacacctgacaatgtgtaggtttgccatatctgctggttaggaaaatatgattatgagctaggccagattataacaagaccgttaagttgcttccgtatacttttcaatggcaacttggtttgtttgcatgacaaaataatctgttaaatgtcaatactcggttgttgaagtacaatttctttttgtatcacattttattaaactctacacctgacaatgtgtaggtttgccatatctgctggttaggaaaatatgattatgagctaggccagattataacaagaccattaagttgcttccgtatacttttcaatggcaacttggtttgtttgcgtgacaaaataatctgttaaatgtcaatactctgttgttgaagtacaatttctttttgtgagggccatatcttctttgacttttagtcttctacttaaactactttgtttaagcgaaatgatatctaaggtttgctttaactagctatggcacttataatgaggagctgatttattctttttgggtattatatcattaaaagtaaagaaaaaaaggattgctgagtagggagagggtaaggaatgatcccaataaaattaaagtcagccaccaagcagaaataaaggaaaaactgcaacagaactatgagtatgaattagcccccaaactcaaatgattaaatgcgagaagcctacttggatattcgtactcttattcaatggtattaaatttgatgtttaagtaatgtcattgataaaattatcattctttttactaatgtttgttatagtctctgaatgactgcaggcatgcaa

SEQ ID NO: 3699 - DNA, 1223 bp, Glycine max
actcatgctgacatagtgttgaatttatgaccatgttttgttcactttaagaaacgtgatttgcactgataatcttgttttaaatgaatcaattgctacattttaaaggattatattctgggcttacttcaaaacaaaaaaataaatatgaagacaagatagaaattgtgattaagtgattttagattaatcagtgacttcactgacttgtagttgaactgacaattcatcttatggatgcaggatctgaaaaccgatccaaaagatgaatatctgcaattattgagggcagccattaagtgcttgacttaccctgagaaatattttgcgaaagtcttgaggatggctataaacaagctgggaactgatgaaggggcccttactagagtggtgaccaccagagctgaggttgatttgcagcgaattgctgaggaataccaaagaagaaatagcatttctctggaccgcgcaatagccaatgacacttctggagactatcagagcattctccttgcactggttggacatgaggattaagtgttctttcttacgctcttcagttgtcatgggattgatgcttaggctatttgcttttcctcttatcatgaatgtgatgttgctgtggatctctggacagaggggtataaagtataaaccatccctgctgtttaagaataatgttttgaatgtcgaaaattcaagacacagcgcttcacctctttattactattaaatcataaaatatttgctgcgtcttttttatacttttattaaggatcaattattcctgccagcatatcatcacacttcacaaaaagtcggtctagatagcttaaaggcaactataattgttaacttctcgacaattatcgcataaaaagcataaaccagatatagtaaataatttcttattacaaaaaaatctcaacaattttatttatccaatatatgactgtgtatatcaacataaatgaataataaacaatgttgacaatccaacacactgatccttccagtcaaaacacagaacttcagaggaatttatagaacgcacacagttaattggacgaatttagatgatcaaatttaaacgagggcaatgctgcttcctccaccggggggtctgcgggcacctagtatatggtctctactttctgcctttccatcggcaaatatgtcactcccagccatttctctaagtttagctctgcttgaaggctttt

SEQ ID NO: 3700 - DNA, 1159 bp, Glycine max
ttattgatggagtaagccgtatgtttgataatgtaaataagaagtacaatactaggctgtttggtggcttaataatgtctattatgggctatgtacacacaaaacctccaaaaagagagaattactggaagaaaaggaaagaatgcaaaaaccatttattattattgtgaagtgaagatcaattaaatagttatgatgacatagtatgagctcatatcttatgcttgtatgcagtgtcattgcaataataggtaaaatgacagctgtatatctttaaggatttctacttggagtgcatttgggtaaacaacataattatgcacttaagtggttatcacatgagggttacttgtaagctttactgtgaagcaactaaaataagttaataagaacatgttttgataagcttctgatttatagcttgttgaaagaaattaaaaagaacttataggaaggttatgagccagtttcataagctcaaataaaccttgtaggattttattttaccaaacctgccctaatgctacaaatgatttatggcatgtattaggtatgcactaaaaaaatattgtgcttggattcttcatataagtgctttatacttctaaattttcttttaagccttgatttctgttttttttttcctaagcattttgtttccgtatttctataccatttgcgatattaggtgcataaacttacgcatatctaggagtgaacgttatttacttgttagattcataaacttacacatatctaggagtgaacgttatttacttgttagattgggcttttaccaatcatgcctacttatgttaagttataactgatcatgattcgaaactattttttatttagcggtcaattctcccacgatggtagaattttattaatgggtatgtaatacaatgagtttttatctaatgcttgcacaagtacacaatcatagtgtcttattgacatgcactggggaaagacatgctttaccttgtttccatcctaaatataagccctagtttgtgtggcttgcttcatctgttttctgtttcatttatattatttgttgtcttgtttagagatggcacggcgtgagagacaaagaaggagtaggaggcagagatggatttggggatctattactactgccattgcagttggt

SEQ ID NO: 3701 - DNA, 1063 bp, Glycine max
atattctgcttcatcaaatgcatcataatgagaattgtatttttgtccaacctcatagcgtagaatattaaatgcctgaaacattggttattactcagatactttagaatcaccttaaaaataaaagatttacaaattcgacaaaataaaatggcaccgtagttgcagataattagctcaggaaggaaagctaatataattcgtagtctaaatgttcaagaacattggttttaaaggtgtttaacgtttttcccctttcttttagttaaaaattcattagggttaattaaaggtgaaggcaaaagctctaaacaatacttctagcctacatagaagttttggttgcacctaatcaaaagtaaaattgaagattaaaaatttcaaaaattgtagtaggtgacattatttcaatagcaatgacaactggtggtttgggccatgaaaatatagaatacaacgtagaaaattagtccaaattcactagcaacatggggactattactttgttagggaagcaaagaattaagaagacgccaactcatatcatgtcagtggcaacacaaatgtgtcgttgaaccatgaaagattcgtttgtacaaaatgtacgaaatcaaacctcatagccgtaggcatcaaacaaaaagtttcctgccaaccatgaggaacaaattcaccgtttgaaatggtacagatttacaaaatgattctcagaatcaaaccccattagccaatccccaccaatgtgtgttaattttaatgtaccatttccatcaacagacaggtcttttgatattaaaatgatctcttgatactcaaaggataaatattatcataggaaaaatgttaatcgcatgattgttatgttgaacattgttcacaattaatagatctcttctgcatcaaacaatagtaactgactcagattaaacatctaattaacagtaaattagcagtttttaacttttttatttcagatacagattcaaatagtgaaccagctaaagcaaaaaaactaaaaaaaaattagtaaatcagattaacaagccttttcaaaatgcttttt

SEQ ID NO: 3702 - DNA, 988 bp, Glycine max
gtcgacctgcagaggaatctttatatattggaatgggctgatatagtaaatgctcacattatatctggtccaggaattgtggaaggactgaagttgaaggtctatgctctagtcataacattatcttgactgtggccagaccaaaaatgctagcctaacccgtcttgcgaatcatatttagggtttgcctcgtggaaggggtctattgctgcttgctgaaatgagttcagctggtaaccttgccaagggagattacaccactgctgcggtgaaaattgctgaggatcactctgactttgttattggcttcatctcagtcaatcctgcatcatggcctggagcacccataaatccctcttttgttcatgcaactcctggagttcaaatggtgactggtggtgatgctttaggacaacaatatagtacaccgcattctgtaagtttagcatgttgcagtgtgtataataaagtgcaaagttaaccatatgcattgtcaattagtaactcaagttttaagttgataggcgatggatcataaatggtttttcttagatttagaagaattttgcagagagaaaaagtgtaaagggaacaggagagagagggtgaatagtttgttactcttgcaagcagtcatcggattatacctcctgcctgtgaagtattaagttggaaaagagtggttactatattgtcttgttaacttaacatcatcagattctgtgtattcttaattatagtggacataaatttgtggatattttgggcttattagaatacctaaatatttccattaaaatgtaatagaaatgaaatgatacaaaacgaattattggtttgcttcccttggcaagataacttatttctctagctttagtatgacaatcacccaccccttcatattcatgtgttgaaaatgccttaatgcatgatttctttctaatcctttctgctccttgtgtatggatacctctgcaaggacatgcaa

SEQ ID NO: 3703 - DNA, 1148 bp, Glycine max
  misc_feature (1133)..(1133): n is a, c, g, or t
ttcctctagagtcgacctgcaggttgaatctatctccccagggttttgttcattgcatttgatacatatagtttcaactgttaacttcttcacgtaatttgacatttattattacacattattataggcttgatgctctaaagtttagttttagtgaatccaactaatatatgcggtagaaggaaatgatgtgtttctactcctttaaaaaaaattaaaataggatcaggtgttgttaatttgataaagtacttcaagacttcagggttttatacatgtgtgtgtgcgagcacatgtgtgcatgtatgttactgttaggtatcttatccatcagacccaaaacaaactactttcattttctattgctgacaaaaaacttaacaagaagtctttatatatcaatgttttgaaaaccggaccagtcattgaaccgatgatagtattggttcaaggttcaatggtctaaccgtggttgaaccaataataattaaataatattgttttaaaatataatatattaaacaatttaacaatattagagaaataatataattttatttaatgacataatagcatgtatagttttagatatatttatattaaattaagccaatactaatatttttaattattaaattaaaactcagtaaaaaaatttattaaatcaaaccaatattctagaatgaaataaaaaatataacctaattattattaaaattaaatatataatattacgaacacagtttagtattataacttataaaataaactttctaataaagtaatagttaataagaaccaatatgacgttcaaattatgttattataattttttttaattatagttccattaattagttccacagattggatgaaaatgtttcatattatgttttgttattataaaaatgttattgtttttatagttgtattaattagtcacattgatttgtcagagtgttaaggctgaaaatggttaagatagttttaagttttaacatcaaaatattagattccacattggtaggattttagaaaagtcttagtttgccttacgtggaaatgtttggatggttcaaccatcagaatgttagctccacattattggtagtaaaggcactgcaggtcgatcntagaggatacgaagg

SEQ ID NO: 3704 - DNA, 1170 bp, Glycine max
tcgggtcaggtactccagtaaagtgaagggttatcgcaccaatatgttccccatggcgacctcggaaacgagctgttatccttcaagagtgctgcatccacattgcactattccttctgtcaagtgtctgattttccttttcgagcatggcaccattcagtgtaagactgcgttgtgaggttgatggaaacatgttcccgcaagtctatatgattccagatcttgtcgtttctacgtcgccagatacaccaaagtagcatagcaaacttgatgccaattcggtggagagattttgcagcaatttgaacactgtatcagtcaaggttgtagcgttgttgatgtcttgcgagatctgaggcaagccagaatcgttgaacttgttgacaaccaaaaaacacatgccacgaattttctagattggattggcaatactcacataaaatacagcaatgtacccctctagattgaagacgttatcttgttggaaggctgttccttaagagacgcaacataaagtgtttaacttttggcggaactttgagttgccataacaagttccaatcaccagggactttataatcatccttgttaatcaagttctccatcaagtagtgataaccttagtgtgtatactccagtgctgctgaacttccaagtcaatgaatcttgcgaattggtgtttaggggaggtgatgcttggatggtttggatgtctgcgtgattcacaatttgaggaagaatttctgtcatccaacttccagtggaatttctgataacatacaaattaaccatctacaataatattttaaattaaaacaattaaatatagtaattagatatctatacgtgttcttacttatcatgctgtgtagctcagacgaatgagtttctttctgtattataagtaatcaaaattagatgaggaaaacagaaacacataaaggtcttaaattgtggggaaaaccagaatttttttaatggcattaaaccatctaaagaactattttaattagaggaatgttatgtgtgacttggtacttcaacaaaatcaatgtttagcatcaactaaaagttaatgctatgtacgtccgtgttttgatctgataaatctgttaatatttatcgataaaaaaacatgtcctgaaactaacaatggtgcaaagaatcgtt

SEQ ID NO: 3705 - DNA, 1070 bp, Glycine max
ttgcatgcctgcagcaagtaatgtatactctccggggacaagaaaatgtaggcagaaagagtgtttaatttgttgaagtgggggaatttccatagtaatatcactcagaacacctgaaaaagattgattaaggcaagacaatattagacactgatttgaatgcaagctggttagaaaaagcaagcaaaatttttaaaagttaccagtccatagaacagttgctttggtaccatctacacaattttccccagctacatctctgcatgtaatattaagactcattttgatcatatccttggtgttattgcgaaccagaacttccattggtgtcatttcatgtgcaatcacagaacctttggaagcaggagattcaactaattcagaatctttatcagaataaggttttcctgattcagaaccatctctaacaagcctgaagccaaatgtcaatggatccggcagtaaaacatccatgaccgaagtttggagagctgcctggatagcttccttgatatttaactctccagagctattccgtcctgaatgccattgaaccttaatcctggatataaggttcttgatacaagcattgagttcagctttggtgttcttttcagaaaaggatgcatttcttcctccgccattcccatctgcttgtgcgtccttcataaaaaaggagtcatcaagaacaggtaatttaaaatgctcaagaggcactagaaccctggctgagcaatctctatcaattcttgttttaggatagacatattctgtagcaccctgatcagcaaaatgattgtcctcgttgctagagttctccagtttgacagagacattgatttcaaacacgacatcagttggattagataactcaagttcaaggaatcgcagtccccaacttcctctgaaaggatctattttcaccaatctgtccatttttgtttctgattcaacatcagtagacttgttatttaagtcatccaacttcggaagagtttcaccgacatgagcaggaaactccattaaagaagctgagccttcacaaaagacaaaccctgcaaaacacaaat

SEQ ID NO: 3706 - DNA, 1027 bp, Glycine max
caaatgctctaccactgagctatggaccccatttcttaattgttttgagacatttaataacatatagttaataagaaaagtgagtccaagggaaatcatactaatggcttctaaataaaatatgggaatatctagtcttagaaaataataggacttgcctgttgaagggtttgccgtggaaccttttgttgggtacaacaaaacgttagtatggttttccttggactcacttgtctatttcatttttctccccctttcctatttttgtcattgcagttatataacggcctgctattgctgttcccatagtagaagttattgtggcttgatgggtgatagttgcttgtttaattgtgctgtattaattaattattactagtatagttactttgtggatttgactctttatattactctgtttgtagtaaaaaggttaatcaattcaaggcgggaaagccaaatattatcatgcacgggaaagtgacccatatatctaacaagagagacccaagttcatctcctctttgcatgtttgagttatgcataagagagagatattaattgtacagtgaggactgaggaaattaaggaagagaggaaccatggatgtataataaacttgctgctccctcaaatagtaaaagttagaatttaatctttaaataaattttgtcataatggagttgttcttttttaagataataaaataaggttgggcagccggagttttacatgcaaaaaatgtcctcaaatactaagttgtgcgttatactttcttgtaagcaccgagatgtatatatattttttttcctcacaaaaattgtaggatattatgggggcaaatagtggacaatttataattcgcaaatgtggttagctcaaataccctatattctgaaaagcttagagccaatggatctaattaacgggaaaagatggagtttatatattcaatcaatgagtccaaaatatgataaaagtttatgaaaaagaaggacccaaccgggttcaaactggtactttttat

SEQ ID NO: 3707 - DNA, 980 bp, Glycine max
atcatattaacacagcttgctcagtatacccaaaacggtcttctttcttgttttgaattgttttgggtgcttttagctgttgttactttcatatctccatgtttggtaacatatttaatagtatgaccaataatttatatgcatgttatggcaatataattgataagcactcagaccacctgggcccagagacgcactatttggaaagtttactttaggaaaataggacttaataactgtgatggaactcagttttaataacggccatatggcattggcaatttatggagcagttatgtattttcacttctatggctgtgatagtgttggagacagttatgtgtgatgttagagagtttcggaacagagcctctgtaggagtttctgaactttgggacagcaaattgctgtcatttctttaatctggtgttctttaagcctattttcatctattacaattggtgttttatcaataattttttataatgtgttaattgctttctcattctcccaattgttgattatgaaatttgatgtgttcgagcagccttcaggcttattgtgttatggaggattagtttttcttcctttcttgtgtgttgaatctatttaaagttagatatgctttatactgatgttctattttcctgacatgtgagtcagtgatcactatctctggaactcacataatttcaatacttaatagctacttatatttcttaagcaattaaagtgtttgttcacactaagtcgttctaagttggcaaccaaagcagtcagtgaagagcacttgaatctgtatttctaattaattaagtattaattattgatgtgttcgctttcacagaaagaccaaaataattgccttccataacaagggtaattaacccaattaattattctataatattttctgttgctggaaaattcctgtgtatgctattcttactggaataaatatgatttgtcagctggaggct

SEQ ID NO: 3708 - DNA, 1035 bp, Glycine max
aggactgggtttcattttcaagactgaagattttctaccaactggaccaacaacaaattttttcagccttaacctcattctcaaggaaagtaaactgtaaccaaatatatagcaaaaagcattaatagtccactgttatacctaatatggatgacaatagatcatcatcatcaggaacagactcagcagttctcttggattgagctcccccgtaagattcaattaaatccatactctgcactgtaagagtactttctgtgtagctacgttttttaccagagatgcattttactcctgccgcacctgtatggccttcagttgcaccctgattgtcaggagtagatgccatcagcaaatgatttgcttcaccatcatgctggtaagctgagagcaacttttcaggctctggcatgtcagcagcagcagatttgtttatactttctactttgtcactaaatatctgactctcaagttgcatatctgttttccccgaatcaggcgtttctttaaatacagatggctctatagtctcttggtaacttaaagcaggatttgaaacatcagttacatgacatttttcacctgtaaaaagtataagcaacagattactaaaaaaaatgaaatttaggatgtttaataatgtccatcaacaagattatacaattaaatggagtaacttaacaaccaaacagaatcaactgaaattacaaaaagagggtactatcactataatgttaattacccacgcagaaaagaaaaagaaatttcaaatgggaaacataggtcaaaatgtaaaagtcaacacaacatcatggtgacacaatgttcaatatcgaaatgagttctgaatctttttctcatttgtttttgcattgcccaccagcatctttggaataacttgttcagtgtttttggtgaaacactggtttgtcccaaggacctttagaagacccagtatgttcagaggatttggtaataggaaagatgccaaaaagctttgggggtgttctcaggctgcaaagcatgaagctggcg

SEQ ID NO: 3709 - DNA, 859 bp, Glycine max
tgagaacacccccaaagccttttggcatctttcctattaccaaatcctctgaacatgccgggtcttctaaaggtccgtgggacaaaccagtgttcaccaaaaacattgaacaagttattccaaagatgctggtgggcaatgcaaaataaaatgtgaacaagattcagaactcattgtcaccatgatgttgcgttgacttttacattttgacctatgtttctcatttgaaaattctttttcttttctgcatgggtaattaacgttatagtgatagtaccctctttttgtaatttcagttgattctgttttgttgtcaagttactccatttaattgtataatcttgttgatggacattattaaacatgctaggtccatttttttagtaatctgttgcttatacttttacaggtgaaaaatgtcatgtaactgatgtttcaaatcctgctttaagttaccgagggactatagagccatctgtatttaaagaaacgcctgattcggggaaaacagatatgcaacttgagagtcagatatttagtgacaaagtagaaagtataaacaaatctgctgctgctgacatgccagagcctgaaaagttgctctcagcttaccagcatgatggtgaagcaaatcatttgctgatggcatctactcctgacaatcagggtgcaactgaaggccatacaggtgcggcaggagtaaaatgcatctctggtaaaaaacgtagctacacagaaagtactcttacagtgcagagtatggatttaattgaatcttacggggggagctcaatccaagagaactgctgagtctgttcctgatgatgatgatctattgccatccatattaggtataaca

SEQ ID NO: 3710 - DNA, 1101 bp, Glycine max
ttttcgccagcttgcatgcctgtcagcttgccctttgcttcttaaatatcttcaaaatgatcttgtccatcactaggaaggaactgataaagtttgggtggaatcatcttaagcgtgaagacactgcaagcaaacaatgggcatttgtgaatgtttgccatttcttggaggcatatcaagccccagaaaaaataatactccaggtatggaaacatcgacttcttttaaaatgttccttattcataacttgtaaacatgaacaggtgagaaattgaaagtaaatgagagaaagtagtgaaaaatgtgaaaggagagagttatgtatttgtattgagagaattttgatctgaaaactacgatcggtgtctctacatgctgggaacacctatttgtagagatcataacaggattcgtataacaaagttagttttagatgtgagactgctaccatggaatttaacatctcttgaacagtcttttaacaactctaacagcctgtcaatctaacagaatttgctacaattaatgcatgtgacaaaatataccaactaatagacgattaagtaactaacacaattaatgtgtgatagaatatacaaaatgcagcatgccacacatactctaacaccactccagttgtcatctaaatgattgagtgaaatatataaatgtaaggtggtatagtgcttggatgctttcttgcaaaatatggctaatctgtttaccatttaaacatgtttgacaaataatagacatttagatttgaacatgttttgacaaatatctttcatgttttgctcttgaaggcactggattttatggcatgtaatcatctccagtttctttccctttttatgggtctgttttccatagaaattggatatagtcttgtgcttctaagggtgcttttttgggatttaaggagctttcaagtcaaaactagatgcgtaacagatttcttacagagcctagctaatgggagttgtttttggctttatctgaaatatgaatgtactttgaaatactgtctttattttgtatctaactgaatctcactggcaaaaataatgtgtgtatatctgtaccctgacactgatttgc

SEQ ID NO: 3711 - DNA, 1022 bp, Glycine max
atgaaataaaagtattattttaattgtttaaaaaatataggtatggatgcagaggcccaatttcatgttttggttgtttatgttaatcttattgatataatgttgattgaaaggctcctcaaaacctcttcctttcataatatttcttttctcttctgtttatgatttttaggggggaggtcgtatgaaaatatggacttggactgctatacaatatgatcaaaggaatcatataattatgtgttttgtttggtcttttatgttacatttttttaatggacaattttgttttcttatttagaaatctaattattttttgttatgttttgtaattattgtactatatttagctagtaaggctttaaagtttcttggattggttaaagatgaacagagaaatgaagaacctgcctctattgctctagaaacccaccagactcaattctgcaaaatttcaaaatgctgatacatatggtttaacttttttcagcgggcaagtttataatgacctatgattatatttatgccaaaaatgatgggctatgttatgttgaaaagcttcagttaggaggctaggacagagaaagcctcttttcaccccaaaatttgtccaccaaaaagaaaaaaaaaaagcttgaaaatgaaaatgtagtgagcattgttttgatttttctttggtatatgaactatgaattagattgtgaagatttgggttaagaacattagtcgtgaaaagaggtgctttctttttgtatcctagtagagcatagttgggtttttggaaatcatagagggaatggtttgttaatcatgttgcaagctcctagtcaacgaattaacaaatcataggctgaccatatctaatcaaagaccgaataagaatgaccggccaaggttcatttgttaatcatgttgcaggctgccaacgaatcaaattaaagtattcaacatttcaaaccaaactcttcttctttcaccaatggaccacgtttgctctatagctgtaagaatggcccaaattt

SEQ ID NO: 3712 - DNA, 1144 bp, Glycine max
tttcgccgattgctgctgcagaaaagtaatgaacaaacccagttcttctgttgtgatgaagctaaatacttgtactaagttagggatttttggtttggtttggttagtcacacaacacaacatactctactgcagagttctgagttgaaacaaatgaaatgacaaacaacagttaaattgctcaaaagatggtattggcaatagtatggtatgagtttcactgactagagctatacaaaacagaataatccatattccatggtctttcttggctttgctttttcttttttaaaaaaaattatttccagttgtacagaatctaataatttgcaaagaaaagcttttaaacaaaaaagctatttgtcatggcataatgattgcaagaaaagattttttgatgggaattatgatgagaataaagaatttcagtaatgtggagcaggtgtggtaggacaatgggggagaggacccaaaagtttgtaaaataaaaatggatctgagatgtgatctgaaaagaaaaagactgagaattcaaaattctcagtgaagccactaagaaagtacttcgagtttagtagtaaaagcaactttagttagagatgtcacatggaagagtgcaaagacattattaaaacgggaattctgatcagagggtattgtattgaaggcatcgtattaaatagccacttggtttgtaatgctagctagctagcagctactacattgcccgagaaatatccaagtttaatccaaagtcaacacaatgctgaaatcaaagttgcaaagtgcaggaactttggtggtgagtgagtgaccattttatttttattatggacctaaatgtatgttaagttgttaacactacatttcctgaagaattgttcatgtaaatgtaacccacacgccatggcacgtgattgcagtgaagggtaggctcttttatccaaagttaactaaaaatgttttggtattatccaattatgaatggtataggaagattgttaactttttgtaatataacttaataagattttattttgtaaaagattttttaattagtgcgtcattttgtatgataaacttgtcgagatttataatatttattttaaaatatctataataattactttaaaaagactattaa

SEQ ID NO: 3713 - DNA, 1081 bp, Glycine max
tttacagtgacttcctagaccgtttgatatatctgatgactgataatataatttacaaaatcaaacaaatctatttgctttaccgctacgtacgtgctatatatataataaaaaaaatccactttttatttattattcataaaataccttatttttaatcattataatttataagaaaatattttaaaataaccaattatgaaaggtaagtagaccataaatatttatatattatttctctaaatatgtaattaaacatttttttcatttcatactattaatttttgtatttatcaataatgatatatagttatccttgataaaattattaaatattatatatactgtgtataaatatatgtatatgcgtgtgtattaaaatgtacattaaaaatttattatttttattaatgttttaaaaaataagggagttattttgtgtataaatttaattattttattagttaaatataatacataaataaattttataatattataaatatgatatagttttaaaattcatagacaaaatatatatttgataataaaatatttatattttgtatataaactgtatttttaattatgtagttgaatttaaagtaatctatattaatttatttaaaatacttaattataaatataaaccacaagaaatacattattttttgccatcggtcatgagccacctcctgcacgtaaagcttattgcttaaaaatatggaagttttttcttatataatttaattattaaatatattatatgattatattttgttatagtataaatataaaatatttattaaatttataaaaaaaatatgtatttattaaatgtatacctttttaaatgaatttatatgtattaaaagcatattaattaaaaagtaactatcactaaatttaatacctatttatataaatataataaaatatatatgacaattggaaaaaacattgtctctaagtccacctactggcagcacataaagctagctatagatacgatttgtttgattttgtaggttttattatgatgaaccatcatgtatccaacggttcagtaaactgctataga

SEQ ID NO: 3714 - DNA, 1080 bp, Glycine max
aacatcccagccttttattattaactatatctataaaaatattcttgcagcaactttaagtattataatggagattatatatcattaactataatggcacataatttagttactgcactcaaaatagtagtaaaaaatatacatgataaggggtttggcttgataaataggagacaaaactaaaagatcaattgatccagcatttatgctcttaaaaaatagcagtagtaaacagttaccactagttgttttcctatattcagcatttttatgtttcctacctccagcagcgcgcatacaattgatccattattatggcaggatgtgttgtataataaataaaaataataattaagttaaaaacaattgagatccatttaacacacctttgcaaacatttccaagctcttaatgatttcagaagcaaacagatcccatgtttcttgtatatataactcaataaatctgaaagcgtatctaaggcccatcatcgtcttgtttgaatccatagttgatgtttagatcatcgggtgcaaagcttttaagaactatatacgtattaagaaattaattaaatatatatacttgcgcagatggtgatccgatcgaggaaactagctagacaacaatatatgtgaacaaagagaaaaatatcttgaatatagacaaaaaataactagtggaaaatattaacctcctagggattaaaacttatttaaccacagagactaagtgaatgcttaattagttgataagagaagtttttttaaaaccaaaacattttggttttctattttcttttcgctatcgcagtttcttccctcacttctattgtctaacaatcattttttgaaatttgttttatagaacatttttaaaaatgaaaaacacaatcaaacatggccttaatattttgtttcttatcgccagaacttgttgctccacagacctctcttcagttgctgctctccctcccaaaaaggcaagacaatgcataagcatttctgtactttcagttttaccaacaccactttctccactaaccaaaatagattggctttcttcttcgtttatcatctt

SEQ ID NO: 3715 - DNA, 1004 bp, Glycine max
accttatgtgcaagtcgaacctacaacacaacagttcaatgtacaaccaaaatcaatagttaatttgtgaaagtggttgaattaaatgtagtgcagcactagctacaaaattacaaaaccaaatcaaatttatacattatataaataagaaacaaaaagaagcatattgtctcctgaattttagttgggaaaactagtgttacctttcctcactattttgctccaatacatcgaaaagaaaaaggtttctatacataagatataacgtcaaaaaaagggttaaaaaatctcagggggctaatagacaacggtgacaacacagatataacagccttaccactctaatctatgaagtaaatttgataaaacccacatacaaataattttattgtatgctatcaacaaaaactttctaacagaaacagttacccaaagatcattatttgccagatcaacacactagtgcagtgcatgttttgtttttaggtgaaaaggtacttttgaggcaaaagtaattttaccaaaggatgaggaccttgcttttactttcattttacttctatctgttggatttgcattggaatgtgcacaaaacatttctaacttcaatccaaacatgcacttatggttttagttaattttaagaagacagttaacactaaaaagagtctatttaatgcagagttctcagtgtaacaatacaaaatgtatatttatataagaaactgatacttacttgaccagtaaataccacaagaagccgttgctgcaacttggaaatcaactgaggtgaagccaacagagggacaacttgaagccgaagtggaattccaggaaagcttgaagtacatttaatccctgggtacaaaccccctatttggtcctgccagccacctcctgtacccataagttgttctaacactaaaacaagtctagcaacgttctcagtgctatcatccccatcaattacttggagaagccctttcaccactacaggcatgcaa

SEQ ID NO: 3716 - DNA, 1289 bp, Glycine max
ctcctggtgatgaaatatatgaggatatgtcccaacttccaactagcacatggatgctctgtaatttgtaccatttatatataggacaatttccaacagcttcaagctgagcccgcccatgccatgactacgataattgattacttaaaaatgcaaagtgggtacatcattttcaacactgttttcttttaacttttttttttttatatatctatttaagccttgagtatgctttcacggatatgaagagcctatttactacttgttcctttatttatttatttattactttattttatattttctttctcatccctttgcatgctagatgaatagaagtagaagcttgtgagtgacactaattagaagttgagaaaagtgcaattgagtttgattaagggcaatcggaatctggtattagttcctatctaagttagagaatctcataagaaatccataaataggacccattatctgcttttaaacttgggtaggtggtcttagatggagacgcacttctttagataccttattctcaatccctatgaagcaatgggtttgaataagaagtatatggaggtgaattcctttcaaaacataaatcagggctaagtatatataatttaaagaaaactactaggctattgaatgtcaaacccacatcatgattaactcctacatgattgatgttttcggccgcctgaatagttgaattataacaaaaatcctgtaactttgacatattgttatatatacatgtaactcctttctcccaattcatagtggctagagtcataggttccacctaaaaaaaaaatccttctttttttatggtgaatagatgtataacttactaaaagtaaaagcagcagtgtttatctattcaacatatgacatttgtatatattaattgattttatattttaaaaaattgtagtctacacgtaccagccatgatggagatatttaaagtcttaagaattatagtctgcggaatcaaatatgttttcatagacagtggtccaaattctgtgtgactaactaggtcagattgatagatgaattattgtcttaagatgtgagaggtgaatccaaatttcttaaatttagtctacacgaataatgaagatatttatcaaaacactataacgttcaagttaaaagaaatgccatacaaaggctaaatatgataaatatgtgtataatactaatgctaacaatatctataagagtgaagatggaatcaatttctatgatcacggtttaggtctgcaggcagcaagctggcg

SEQ ID NO: 3717 - DNA, 1211 bp, Glycine max
agctgatattggaatctcaatgggcatttcaggttctgcattagcaagtgagacaggcaatataattcttatgtcaaatgacattaggaagataccagaagccattaaacttgcaagaaaagctcgtaggaaagtgttagaaaacattgttttgtcaatcatgactaaggctgcgattcttggtttggccattggtggtcatccacttgtttgggcagcagttgtggctgatgttggaacatgtctattggtcatctttaacagcatgttacttctgcgaaaaggacacaaccatggaggaaaatgttgtagatcttctactaaaccacataaccacaaaaatggatgtggtggcagtcatggtagttcctctcatcatcaccatcatcatgagcatgatcaaaaacatcaacatgagcatcatagccacaagcattgttgctcagacaagacaaaaaagatgtcccaacctcagaaatgtggtggtgctcatggtagttcctctcatcatcatcaccatcaacatcaacatgaacaacataaccatgaccaacacgatcaacatgaacatcataatcatgaccaactcgatcaacgtgaacatcatggacatagtcaacatgatcaacatcatcagaagtgtgcctcacaaacatgttcctcaacatgtccaccctgctcttcaaattcaagttttggtggaattgttaaccattgtaacaccatgaaggctcatgatcaatgtaaaggaagtgatgaattccatgaacatgatcactgtcatcatggaagatgtgacaagaatcacgatgaagtccacaagcatgacaccgaagataatcatgcagttgcagaaaaaaggcatggtagttgtttgggacataagaaccatgggacaaagcactgccacaaccaaaatcttgacaaggttactcatgatagtgcttcacatagttctccttgccacctcaatctcccttgtaaaaaagaaagccaacaatttactcataatcattgccacctgatccatggttgtgaaaatctgaaagaccatgaatccaaagatgttttaagatccaaccatgacatccagcatgaaaaatcaggttgtcattctgattttgagaagcatgagacaggtgaaatatccattgacatcatcactgagtatgttgaattagcttcaagtttggaggagaaaggaaaaggtt

SEQ ID NO: 3718 - DNA, 1033 bp, Glycine max
tcaaggaagtcatgaataacattgcaaaaaatgttcatctatgccggctcattgatagaaaaaagaaatgataaatttaaattcaacttgcctgcggtcaccctgagtcaaagcacctagagattctaatctcttggcaacaattgatgcaaatcttcgttctccaccaagatttgtaaatagtatcctgtacaacatttatgataatgtaggttaggtacaactggcgtggcatcaagggagagcatcaacaaaacctagaagtgaaccattttgaggtcaagtccaaagtgcttccatcttagcttctatatgttataatgtaatttgataatagtcaaccaagtcacaccagcaatacaattttttgacaaagcaaggtagcatatgtctatgaaacaaaattccatttaaggaaacatattacacacaacacatgtagagtttagctaggcaaatattttttttatcagcaaaagtataattatattatatataatattaagttcagtacaagtggtactgttgtatatacaacctagcaccatgctatgcaaagctaaggtggcctaatacagacaacatagcaagaattaggcaaccatagatctgactgtaagctaggcacccagccacaaaatatctataagctaatcccccccgagcacaaaacccatccctgattttgctggaccagtaatggaatgggatatcaaatcctttttccaaatttttaagccatgtccagcagaagaataaagcatcgtccatcaatttgtgacctttgaagctgtcatttgagaaaacaatccaatttctacggtgccaaatacaccatgtcagggagatccaccaaatctgccatcgctgtaacctaatatccttcagattgcagtaatggtgttggaggagatggtccctcggagtttccaggaatacacacactatgtttaaccaagacatcaattcccaccatagcggcatgattttaacacagcttaaaaataggtgagatgtgtcctcgtcatgattt

SEQ ID NO: 3719 - DNA, 979 bp, Glycine max
tgttatgataaggatagagaagtctcaaaattagtaaaagaaacaacttaatctgaacatagatactagttgcaaatctatattaccggttagaatatcaacaactcttaattctctcagtcttccagcaagaaccaagacaatggcaactgttccatacaagcatataaggaaatgcctacaagatgtgaaagaatcacaaatacaaatagaaccagagattaagaatgtataacttatcgcaaatctatggtaaagttgaaatcagtccctaaattgtttattactatgatcttctagtatttatactacatcttatagaaagggtaaaagactgaagcgttgaatgatgccaaaatagcatactgaaaagcacttgttcacaatgtattgaacaagtttaatacttaagagagagtggagcaatgaattggtacagaagagcagtgaattggtacagaaacattttaagtaacatgcaggaactgaagtttcctgtccagaacagaaataagatttattaaagagaaaagaaggtacagatcatagttattagaattttaagatttgcgatttaaatcctacgattcgacaaaatttgacatatctctctgtgaacctcagttcaataattttatctaaggaaaggaaacttcctaaatcttttctcagtcttctaacatgtcatacttttgggggttccttttgtgaacaagttagattagattacacgaaatgatacttgtgtaagaatacatatagaactcaccacaatagaaaagccatgaaataccgggtgtttttctcccctatgcaattgttctgtgagtaaaacaactttcagcacaactccaaaaaaacacatgatgtatattaaatgagaacaatgcaagcaatcttataaagagggagaatttcaaagattgctaaccatccatccacagtgatgatcaaatcgagcaacacagcgatcacaaat

SEQ ID NO: 3720 - DNA, 1022 bp, Glycine max
aaaaccaaggatatcaataaaattgatcagaatattgaagcagactacaaatgaaagaaatatctgcactcacttggcccaacaagactcaattatagaggctaattgaggatttaaatcacgtggtatctcaagtctttttcccttaaagccaacagctgccacaacctacaaaacattacagacttgtgaagactaagtaatacaaaatgccctgcatctaacacattagttttttttttatcagcaaaaataaatatatatatatatatagatagatagatagatagatagataactgagtaccagaggtactaaattacaaaattccctgcatctaacacattagtgaataacctgatagtccaaaagtaaaaaaaataaaatagaaacaaatattgatgaaaatttcagtcagtaaaattatatgttgatttcaacagcatcagacatcattctgaaagagaaggtgtgtctcataggggaggggaagtcaataacaccaatgatttcaatgaatggatagctgacatagagctcaaagaaataccttctgtggggagaaaattcacgtggtttaagccaaacggggccgcaaagagcaaattagataggttccttgtatccctcaactggctactcaaatggccaggctgcacaagtttcaccttggatagaaacttttcataccactgtccaattctgcttatggctaaatccattgactgggggccaaaactgtttagggtatttgattgttggttgaaggataaaacttttgaaaaggcagtcagagaatgttggacaaactttcacccaaggggctgggggggctttgtactcaaagaaaaatcaagaaactcaaggaggcaatgaaggtatggaacagggtgcagtatggagatacattcaacaaggtacaaagaattgagacagatttaaacagattggaagatgtcagtattaacaggcagctgacctcccaagaatttatgacccgcaaaaaactacaggaggaatta

SEQ ID NO: 3721 - DNA, 1278 bp, Glycine max
aaaagatcacaaaatcaaaactcaaagtttcaagtgcatctatagtgagaactgataatgatagcaaaaaggaaaacagataaataaaaaactaaagcacaaattcaaagtagcaccagaatcatctagcataacaaatgaaggagtggaagaaacacaaaaaaagaagttaaacatacaccagtaagtggttgcaagtacccatgaaaacttgcccatacaaatcctttccgaatacttcagcccctttaagtgatgttccccgtgcaatagtaggcccaatcatatctattttgcactccggacaataccatgccccttctggtatatgcatcttcatcacaccaatacaccttgaatgataaacagcaggacaaccatcacaacaaagcaaggtcccatccatgccacacaagcgacattcatctccattgccatcaacatcaacatcatcctcctcagcattcaattctgaaacatacttcttagtttcagcatccttgcaggcagtagttttggaatatcttggatggactcttctaggcccattttcagcaggaaggcaatcttcattatcataattgatcccaacctctgattcttcacgcatgttcatttcagcttttagctcctcagacgccaaaacttcatcacagagaatttgcaatatcgtcaatttcctacttgcaggcaataaataatactcgccataaaagatttcatcataaaatcctttccactcaggtccttttgtgtatccaaaaattgctaaatactgaaacacaaaaacaggccaagtcaaagcatcaaccaaactccaatcactgcacctgaaaaggaaattacatattccaattaatatcttttttcaacataaaaaaaatctcataaatcgaaaaatactagggcatattaaaaaaatgctacaattaggtgaagataacagatgtaatgtcctctaaaaaaattagtcaacagattaaacaacacgtttagttgcttcaaaaaatttctacaacactcgacctattcgctcaaaagcacgcataacatgcctccagtgtttttagactctaaacaataaggcagccatgtgctccacagagctcccaagaatgaaaaatgaaaatggaaacataatagaacagtttgttttttccaccagtcaaatcaaatccaacaagacacatactaatacataaaatttccacacaacggtctgtaacacggtaagcatgattaaagatatatgagataaagctgcaggtcgactctaca

SEQ ID NO: 3722 - DNA, 1203 bp, Glycine max
tgtagcaggtggtggtagcagtctgccgccgtgggcctctgctccgggttctgctccatgcaccgactctgcaactccctaagcatcttcggcacccctcccaacccacacgtccttatcaagtttcccaccccccacacatccaccttaaccccatgcaaccctctctccatctccggcgcgttcccctcacgctcccccgtcacgcgccaccccttcagctccggcgcccccgccgcctcatcaaacccgcacacgaaccactcctcctccctactatccatcctcctcatcaccttctcccacttcaaatccctatgcataaacgacaagtcgtgcagcgccacaagcgccttcgtcacgtacttcaacgcctccaccagctcctcgcagttccctggcctcacacggcacccccttggcttaaacgacaaccccagttccctctccgaaaccccaacaagaacctccgcatgcggaatcctatgatcgagtatctcataaacctccttaaccgccatccactttctcttttccgaaaacatcctcgtgcacgtgttcggcgtcacctcagtcaccaccccgttaccgtaacaaaccctctcaaaatcactgtaagcaaagcccttggagttacttataatactactgcaacgcttactcagcaatggcagcaacaatccgatccgaaaacacggaactaaagcctttaacctttccgttggggtggttaaattcagttctagtaaatcagtgcggttgattattccttcttgggacctactcatcgcgcaaaacgtcaccgtattggcaactgcatagtatccgagtatgtagggtaaatccatgtaggtccatagtaatttagcaactaacgtggttgatggatttggctgcgtctcttttaactggtgcgtttcttcgcctctccataagcaatagttgttgacaaaacctgttatgttcggccattggtcttgtaataacaaattcgtggattccgttgctgttgctgctgctgttgttgctgttggtgggggtgatgacgtgggttttcggattagggtgagattttcggggcagaatttttggatgacgcggttgatgcaatcgtcccagaggggaatgaaggagtcgcggctggatgacgtagggttgagggaggggcggatgatggggcccacaatttcgaacatgatggct

SEQ ID NO: 3723 - DNA, 1152 bp, Glycine max
gcatcagtccgtcaccatatataatatactaggtcaaaaatctagcttagatattttaggtatttttactcaataaaaaattatgatttaaaaaaccatattatatacaaagggtcaataaatggccgaagaatttaattcaacaaatggaataaattgagtgaattgttataaatcttaatatttattttcaattcatacgaataaaaaaaatttataaatcaacattactcttaataaaatatggcactaagccactaattttttcattgatcatcatgaaaaagactactataaacacataacgaaaatcagtccctcttattaaaattcaatataaacaaatttattagctaatgacgtgtttatgactttcgcatcctgccagcaacaaaagatgtatgtcggtaaagttgccaacacacgagccatccgattttaaatctacgttcaatatcgactcactcttgagttgtaattccgaacggtgcgtctcatactctcattcaatgggcgcaacacgttgcaaaaattttcacgaactcatagtccgtgctagctagagtgaaatgaaataggaataaattcagatgaaaattttgaattgaattaaattaaaataaaacctacaaatgttcatctcaccgttttctattgctagtattatttatttcactcatttttaattttctttttttatgacaataccaaataaataaataaaaaaaaagaagaggacaaaggagtgacgcgtcacgcgtaaattgtaaacattgtggaagtgttgttgttgttgtttatataaagggcttaaaggattccttcgcaaatggaagagtagcgatagacagaggagagagaaagagagggagtaagtgggtaaaggaaagaaaactaaagaaacaaacctaacacaacacaaatccttgaaacgacgacggaaatggccgtttcgagctcgcacatgcgtttcacctttgagtgccgctccgatcccgatttctcgccccccccgccgtccttcgacaacctccgccgccgaaacttccgctcctccgcaggatccggcgcggcgtttcacggcatctcctccctcatcctccgcttccctcccaacttccagcgccagctaagcaccaaggcgcgccgcaa

SEQ ID NO: 3724 - DNA, 1063 bp, Glycine max
aaagcataccaaaccaatcaagcaactaactatagtggcattcgtaataaaagagcattgccaagtgccaactactatgcttgttcataacaaaattcacgcacgtccagtgattgaattatccttctcttatccttttgttattctgttattgctttgctgtatgccaatttaaagccttgccctttattcaataaagattcaaccaaattgaattgagtatcattgttatccctagcaagaccaccttttatttgtgaatgaacaatttgaatcacctagagcaaatgcacatcatacacgaccacaaaaattgaattggacatcacatgggaatatacgtgtcagagcaagtgaaagtgaaaggtggtgaaaggattaaagtaattgggttttttaattttcatttttaaattattctatttatttaaactatttgtttttattataaaatctgctataggaacatatgcgatagtaacatgtgatttgtgaacgttgtataagacgatgctaaggctggagatcaagatttgtgaacgtagcatatttaattcttgttgagaaaaactgataaaagaacaagcataaccgtataagtgaagactagtaattaatgtgcctttgtgttcaattatctttcctgtagaactaaattaaaatactgcaatatagttcaattagattaatttttggccaatgtatgtgctatgtggtatgcacctaatttatgaaaggaccgatctcctctttccttaaaacttttagtagttgccgaagaaaaccacaatacgtagttttgttgtattatatgattcatataggggccaacttagtacattactatctaataatttgatcttatataaatcaaaccctcagagttagggaatacttcttaccaatgaaaggctgaatttccggttgcttcggattgactcattcttttcctacaattattagttggcagcagctaattatagcactgtctaagagaaggggcagactgaagagggtattgaggagaggcagcagaattacgttccctgcaggcatgcaagct

SEQ ID NO: 3725 - DNA, 1231 bp, Glycine max
tagaagtttcctaaacttgatgatgacggaatgctggatcttcaactctttattgattccaatcttacattaactggtggtggtgggggcacaaatcacaatcttgttgatatttctgacatcttgttatgttagtactttttagaatggtttgattagtaaccatttggttcagatagatttgattttaaattatttaataaaaaatactaataagtgaatttaggtattaattaagaaattaaaaagagaattttttatttattaaaatacataaaattatattgcttatatttttagtttattaattaatgtactaaaaatattgatttttaatatcgtaatttattttgaatagcatatttgcatttttcattacagaaatataaaataaacaacgccttaattaaagtgattgtgtgattcatacttctttcatactttacactttattttcactagtttgatctctataaattcttttcttatatgtgttttatataaaaaaaaaaaaaacatattctacaaccaagagtgaaaaagaaagagaaatgtaaaagagaaaaagaaataaaagtaagttatcagaaaagcgtaaaagtttgttataaaaataatttttctcaatgtttggtattctctctccatgcaaagcttttagtagaaaaattgtactagtgagtcaaataattaaatctccaacttaacttttaaaaataattatgctcaaactttatttatttattttaacaagtaaaatttaaagtttgatctttacttattaaaaatatgaaacttagtttagtttatttattagtggaaagataggtactcaaaggttgtctatttataacttttacgttttggaattggatttaattatataaacagttgggtatatttttttcacaaaagtatataaacttaaaaattatgcaataataaatttttaagataaattatgtccaatatattagttagcatttagaagttcaccttggttaaagtatatcactgaacatacttacatatttagattcatttgatggcggtgttaaactagggttcctctttataagaattgaggcatagggtagcgttgggtgctcccaaccgcaacgaataacagccttgatcttccaagtaacttaacttccgtaaatggttgacagatacaagaaaagtagaaagttgaaagagagagaaacatcgagctgcaggcatgcaagct

SEQ ID NO: 3726 - DNA, 1157 bp, Glycine max
tgttttcttttgttgttttcattcttagttgggtttggggggaggaggttgacatgtcttgaatatgtgactacatttgggaggataccatttagtttaatgctaatttctgttgtaaaccactgtgaaattggttggatggtgcaggattttaattagtactataattttgtaattatactttactaatataaattctcaaaattatgtaaagtagagagacgatagtggtagagaaactcctctaagaaatgtacacctggcaaattactcattttgaattttgaactgcatactcttcctgcctattgatatatctatttccaaactgttagaagttgatttgatataaagccttgagaccaatttatgttctgtcagtaatattttaattttttcttttaagaattgagaaggtatccattattctattcaaaaatttcccccatccattctaaaataattttttacattctagtctctcttctgtacaattatttttgtatgcattacactgacaaaacctggaaaataatatataatttttcatcctttgtttgtgcagatgatatgtttgtcctttcaacaagcaaccagcgagtatctgttcaacttttgggtaaagataaaattcatgataagctaagtcgacttgaggagttaaccagtgtatcattgtcatatatgggtattagttcccctggaatcgcatctcacattaataatacagtgccaagtaagcttgattctagaacactcccatttctttgctaatatcaagatgaatgcacatcaacctagtaatatcagtgattctgttttattttttgggataaaattgcagtatcagtgaattagttgcttataccttaagtttttatttttggttaagctgttttgaaatgaagttgtaattggaaactttgtttatttgatatcttcttccatcctgtaagcaatttcaatataggtaacgagttcccttgcaattttctcttttttgatatcttcatgatcttgcactttaaccaccttttttttgttgatagatataaaagaacttgacctgactgggaaccttctttcggagtggaaggtatgttctgcgaccaggttttttccagtgtaaaatcctggctactgctgcaggcatgcaa

SEQ ID NO: 3727 - DNA, 921 bp, Glycine max
catccaattagtgcagctaaaaatagcaaagctaccagcataacttatgtcatgcagctgtcactatatatatatgacaatcaaaatcaaaccaaatatgccttaggtacttctttaaatcttaaccgtattcaaatatctatctttcttcccagatagaaggcattcaaagagaaaaaaagatgattcatgattgattggaaagaactcaagaaaaaacaaaaacttcgtcccttatctaaccacaggctattaaacacgaatacacgatagatagtactactaatgcatatttgttaactcacataattactacggtaagcatttgttttgtctgcttccttattttgagaaactcgaacatgttttttgtgtgaaaactgatgttttaatattctaacaagttattattaacatactttattttctcttttatatcatttaatttttatcttttttctctttatattattatcatattattcattacattggtgactttctccatttgtttttgtttttcattttatttgtctcttttttccactcataaatcctattccaaaattcaataatgacttatacttcctttcctctcaacttttttttttttttgcaggagtaaagaaattatatattagtagtgttaatatacacaaggagtggttatccaccctcgacagtgctcaacaaattaaaagctaagaatcactttccccatgcctacctagtgaataaaatacagcccaaaattaaggaagttgttgcacacatgatcgagggtccagttgccaaacatagaacaaggtatcaaatcctttgatattggcattgatccacgtccatgcacagtaacgagcctcatccaataagtttgttacatcacaaggagtaacattgaacctgatgtgtttccagatt

SEQ ID NO: 3728 - DNA, 1200 bp, Glycine max
tcaattcgatcttattattattattaatcacgttttatatgtagatatttctggatcatgttatattttgatttgaattaactgtatattcttagtgtctttacattttctgctcacttgctcaacccccacgtattattttacaaaagcaaaaaacagaaaaagaataatctatttctgtttctgtttctgtttcgtacagtatatttttttggtagattttggtacgtattatgtggaaacggaatacaccgataacaatgcaattgttgcttttcctacagtaatgtgtaactcgagagtaaagaaaggaaaataaaaacaaaaatcagagactcaaagttgagaggtaacaaaatatatgcctccaaaattctatttttactttactttagtccgtcatcatacgagtgattattgaaatttggacttagattttaactcaattccataaaattattttgtgaggtgattaatgttcacattttataagcacttcttaagtactatctttaatcactaaattttattaatatttctttagaaaatatatttatattcttcattcactagttttaattttttagtaaataactcgtcaagatgggaaaaaggataatgtacaccccatttgaactatgtatgagtggaaagaagtgacaaataaaatgaaaaacaaaagaaaatggagaaagtgaccgatgtaataatgaataatatgataaaaatataaagagaaagaaaattaaaaatgatataaaagagaaaataaagtatgttaataataacttgttagaatattaaaaaacatcattttccacacacaaaaaacgtgttcgagttgttcaaaataagaaagcagacaaaacaaatacttatcgtagtaattatgtgagctaacaagtatgtattagtagtactatctatcgcgtattggcgtttaatttaatagcctggtgagatcgataagggacgaagtttttgtttgttcttgagttctttccaatcaatcatgaatcattttttttttttgaatgccttcttcatttatctgcgaagaaagatagatatttgaatacggttaagatttaagaagtacctaaggcatatttggtttgattttgattgtcatatatagtgacagctgcatgcatgagttatgcttgtagctttgctatttttagctgaactaattggatg

SEQ ID NO: 3729 - DNA, 961 bp, Glycine max
ctgtttttcagtgcccagtgtccagttgtaaaaaagcttttaaggcggtgtttcaactgtcaacgccaattttgggattatatgctttaattattacaagcccgttgattatttattacgaccgacatgatacgtaatttaagaaattaaactaatgtattagtctcggtacattgaaaagtacacccattggccacccagtaatttcctcacaattgctcaattaaaattaaaagtggacgcttaactctgtgccctttattaaaatttgcaaatcttaatagagaaaaacataagctaaaacttttggtagtgataatatgaagaaaaaaatcactgttattaatcataaatttaacataaaaaacctattatcatataaagggaatttgaacctaaagggaattttttcttccttttactcaagcgccttgtgtaccatcttaaacatacaaatgattactaatttcatagatcaaatttcgctcctctttatgattgattgaagctgtgttcaatttggaggtggttaacgtttaattttctaggttgttggttgataatgtagacattccaagttcaatcgtgttgaagcattttaaattaggctttgttggcttgaaaagtaaaaacggctgctaccatttttcttcctttgcgggtgctaattaagaagtcaacaaagtgaacaaaccatgtgtttttcaataccaaatgttgtaatttttgccaagcataatcttcttccgtgtgctagctcacattacaagaagaagatagatttgaataaacacctcaggttaagttgagtcaaattaattgcagttagttaatttttttgccaaactcagtcctttacgggccatggatcaatgggccggcccacaagttttttttttaaaaaaaaaatgtttaatcacatcaacaacatgatctttaattagaagttatgactttttct

SEQ ID NO: 3730 - DNA, 997 bp, Glycine max
ttctgatcagagaagaaaccattgttggcagctacaaatgcgagataatttctttaatataggagtttacaatgttttgtatttaagtaatgaactgcaaaatcttgtttccagaaacttagtatgctattgttgtatttattgtataatatatttgtaatgctgtttgtttttcattattgtgcttagatctgtgatatctaaaatttcaccacttcatattcatcttcaacaatgctttctactatattctgctagtgcagctatacttaactgtgaatcaaatttgtgcatgagaagaagaatgcaaggtaccctatttgttcctagttactaccagtatatttgcatccttgtgttagatcccttctgtacatgcacttttgctttgccaaaagtagcaagcagagcattaaaaattgcatcaagctagtgttaggttgctggacttatcacattttatctatttatctcacagttatcacgacgatagaaaagggtatatcagtaaatgaaattcacacaatgaatgctaatttgaaattctctctcttccgttgcaccaatatgagagtgccaattagatcccatcatctagtccttattttaggaataagtttcgtaagaaaagggaaaggatcataggcagtctaaaacacatcttcatttcatgcagttttgccatttcttttgcaattttcattttttaatttgtattctgccatttaaattgatacacttttctaaatgttgtaaactatcaaacttctagttttataagaagtctgtctgcaataaatggtatcattagtacttagtacatattctcactgctatcactgaaaatatctgttggagatcgactaccttttcaagagaggagtggaccacgtatggttcatcatgggcttagcctgtcaaatcatgatcatgattcgttgaaggttcaccacaagtatttacaataaatctattgcaatactaatttttctttttt

SEQ ID NO: 3731 - DNA, 1121 bp, Glycine max
tctagagtcgacctgcagattccttagagcattcaccaagacattatgcctcattcctttattttttttttaagatataggtgggagtgcttgctgatggagctcgaggtcacaaactggaaggacatagcttagtttcatatgtccatgccttcatgagagtatttgatgtaactttccacaacaccattatatgttttgtaattgttgtattgagaatttaaaagccgttagattaagaacctttaaatcatgtttataatattcacctaatgaactctgattagtttgttttaaaatttacacgttcctaaacatttaggtgtagttacgataatgccctatagagtgtagtatttcatggggtcttaagatgtaaacatgtgaggcattttccaagaaggtttataaattcccacaataaagacttttgaaggagaatcagaagtaaagccgaaagataaaatgaacttcaaaagaaaagcaaagatatcttcaaatctccagagcaaagtacttcgtacttccttatgtatgcatcaagcaatttttagtataataagtggtagattgtgaaactgccaagaagatatgagacactttgaaagtgactcatgaaaggattgaacaagtcaaggagtctatgttggaattttgtcaagagtaccaaatcacttaagtaacacattaataagtatgtgtgcgataaataggtaattaaaagtaaatttaagatgttgtgtttttgatcaagtccaggtagattcttagcaactgattgctagtaagttttgatttaaactcttaatagttagttattgtgctagttgctagaacaagtccgtacctatgagaatatgacaatgtgtatgtatgtatcctgctataaaggttgtttgatgaatgacaaggctattagagcgcagcaatggcctcctcaactttactccattcctattctcccatctgtgtttagcgttattacttcaaagtcaaactgtgatgtacgattaaattcctctctaatcactccatggacttcaccttcgggagtgttttattcgagaagcaggaccttatccccgtgcttgctgtttggtttgccaatatggtatgcaaaa

SEQ ID NO: 3732 - DNA, 1258 bp, Glycine max
agcttgcatgcctgtaggaacagtttatggagtttttctctatactattaataaataaaaaaggcatcctcccatgatattgcctttctttgtgcactccaaaatgaagaagggaaggtaaggagaccagaaggagattttcattcacccttccccttaatccagcacaagttaaatgtcataaataattctagaagtaatacataagtactctacactgaatttgaagtggccacagaagaacatcaaaaccatgtttggtttgtgtatttccagttctcatttacagtaaaaactcaaaacaggcttcaaaacatttttggccgtgttttgataaaataaacatttctcagtaatgggccaaacgtgaaaacagcaattaatccacagtttcattctcaaatttcaaattctggactggaagttgaaacaactgtgacaacttagtaactataataaaaactacaccaaccaaacataatttctaaaattggcaaatgagagtggtgtctaggaaatgaaaatagaagacaaaaaaaaaatgcctccacttaacattatgattttcaaacttaagtacatgccaacaaaatcaaagactaacattcaggttaaatttattgatatatagagaagcaactaaaggcaagtgcatttaagatgctacctgtaggagtgataggtcacgaagaatttcaatattgtcgggatctattctcagtgcatttcgatagcacttgatcgcctccctgtattctctgtcggaccgataaaggagaccataaacatgccagcaaacatgacttttaaggtcattctgtaccagaacaaaaatcaaagctggatcatctgacagacgactattgtaagattgataaattatgtaaaatcaaagacaacaaacaaacctttaatccttgacgaacaagttcatatgcttcggacttacgatccatgcaatttaatgtcaaacccttcatcgataaagtttctatcatcaagaaacaggaacggacacataaataaaaactatgaccaaagaaataaaatatgctgcaaataagaaataatagatagaaaaggggaagggagggaggggctaacattgcatttcttgcatgacttaaacaattaagaagggaaataaaattataaaataatcaccaaaaaaagagtatacctccatggtctgggaattttttcaaaatggcatcagcggctttgagaccctttttatattgtttggtttcatatattt

SEQ ID NO: 3733 - DNA, 1079 bp, Glycine max
atgtcttctataaaagcctgttttactaaaaactccctctcttctttctgacggtctcttagacgagaactacgcacgccaggtaatagtgttcttggcactctattaaatgaacatatcatcaggaggaataaaaattatgtaagacatttgaaacctagataaaagcaaaatacatgttgcaaattgcaataatgcttctgaatgttagaacaatctttgtgatagaaaaacaagaaatggagatggatctatatttatatctgtacaatctaaaagccaacagaaagattccacttcaagatcaaattgaaccaaatatatattacatttttaatccaaaatatctctcaaaactgttttatatgaacattaaatataggcaagtctgttacagattataaaaaaaagtgattctgatataaaacaatctagcgattatttttttggagattctaaaaaaataaaaaataaaaaacaaaaagctaatttatgtttgtttacaatcataaaaatcacttaaaaaaactgattttattatgagaagctgttcaaaatagcttttgattttaattaaattttagattcttttcaacttttgattattttgataaattgaaacaaacaaatgaaaacctgaaattattattttaaaaaatttattcttttacaagaaaagctgtaacaaacaggcccataagctgataaagccccaaacatctctattttgaaatttgaatacggttatggtaacagcaaaggacttataatattaccatccattcatgtcattaaacaactggtgcaataattaattaaaaatcaccaacggcaatcacaaatagttataagttaaaactgattatcaccagcttttataggtaagtaggatataattgaaaagaaacaagaggtaattattgattgaaatgataatataatctccatacagcagtatagtatctatgtatacaagcagtggtggaagattagcttaccttgaaataaaagacatggtcagtaagtaaagcagttgctgatgggaaagcatgggaagatagttcattgcagctctgcgt

SEQ ID NO: 3734 - DNA, 1196 bp, Glycine max
cttgcatgcctgcagaaggagaatgtgatgaaaacttatgcttcatatgataaactatacatgccaatgaggttgtttggggcaaattttattgaagaaaacaagaggttgagagcacaagattagatgataagacattttccaagaaaaataaaataaaagtagcatatggtaggaagtatcaatgtagcatcaaagttgaaatgactctaacctcaggatgtctgtcaaggacattattagaaaaataaacttgtttcacaagatattcagtgtaacaaacattatttgctcaattaatggaaggtactataatctgaaattagtcatcaattaataccgaaatctaacagcttttaacaatgtgttcaatgtatactcaaacaatcaatattatcaacaagttttggcctacttgtatcagattcttgaatacaaatacaattaaaaaactgttcacataaaacctttttatattccatgccttaaagtaagccattcttattgagtttctacttgaagaatgtagacaactgaactgattgttattaatggatcctccatgttcattaacgtagatgcacaaaattcaggaaaaatgctcctaagtggtgaatcttgttaattacttatactccttcaaaaggatatattaagatgggacatagattgagttttggctggacttgatatgaagttaaattattagactatttcatctgaatggctctgaattacataaaaactgttctcatttgctaacttgagttatttattactcactcagcgaattgcatcagaagcttcaggcttaattgcagaaacaagctaaaataactaagataaccagaacagtctacaattgaactacaacaaaatttactacttaaaatcagtttaatgctgtacataccgatgagacatgcattaaacttctcccatcagttacatcaaaggggtttgagtacttcggtgcatttggaagggctgagggaggctgtaaatgaaacaccatatcaattaaattaccaatccatatctaaaccaagagaagagacaaagttagtaatgagttgcatagaacggtaccgctgcattttgataatactgcatgtcatatcccatgccataaggttgaacattctgccaacctgcaagtgatgcagggccagataagtagcttgatgtgaaaaggt

SEQ ID NO: 3735 - DNA, 1033 bp, Glycine max
gtggaccattctttaaaaccttgagcatcgactatgttttatttctatcttctttggttgttagtgctgataaatactgtagttaatattctggggttgtgccattttaagtttgacacttcttaacaagatggaattatctagtacagagtgtgtttctctgttatatttctgaatgttgtgtttattgtcaacttcctatttccttgctttgcattttagccattcatgctatgttccctttgataatcagccatgtgcctttgtccttgtaaatttctttttaatttcaaccatgttccttgcattgcattgcatttatgttatgttaaacagtagattcttttgttattgtattttaactctaatagttttaggtggttggaggacgcacttcatgtggctctggcaagggcaagagccatcagggctcagttaagtatggctttagcctagttaaagggaaagcaaaccacccaatggaggactatcatgtagcaaaaattgtcaagcttggagggcaagagttaggactttttgctatatatgacggacacttgggagacagtgtgcctgcctatttacaaaagcatctcttttctaatatcttgaaggaggtgagttattgaaccaaactagaaagcatcgtgtattggttattaccttaatcacatttgattccttggacaaagggacaaagttttcccctttttcttctggcttcccatactcttattttatgatcaatattaacaatatgaaatataatctggttgagcttgatgtcttgatgaaatttgtaaaacctctttcttgtcagaaaaacttgaaatttggcctaattttctttttgaatctttgtaatgcctcttggcataattttatttttgaattactaattgtactcttaaatatgatgagttattccaggaggacttctggactgatccagccagttccatcattaaagcctatgagacaacagatcaggccattctttctgatagttctgatttggggcgaggaggatcaa

SEQ ID NO: 3736 - DNA, 1191 bp, Glycine max
tcgacctgcagtacgtcatagtcctgattttaccttcgtttgttgaatactttttggttccttaaaaaaaatcactacaaaattaaatcaaatcttaaacctttattgtatggtaatgttaattcattcataagtacatcaaatttatcataagtaataaagtattcgaaagtttgaatgttaaatttaaaaagactttgtttatacttagattaatgtaaatccaatttacaagcaagagataataaatttaaaatatcaaataaaaaaagatagaatataagataaagaaaagataaaagatttaaagataaaattagaagataaagaaaaaagataagataagaaaagtgaaaaatgagaaagaaaaaaaaattaaaataaaaaacataaattcaagataagataatgttgtaatctaagattatcttagtacaaacttaattaaaagtattgatgatgtaaaagttatctgtactcaactatcatttaattaatgatggttatatataacaaatttgtttacttttataatattgtgcacctttaaaagtgatattttagtatgatttttaatgaattgacaatgtaagaatcgttaagcggttcatatatgaaaattaaactactaataggatgcatttatttgaataaaccattaaattaaatacttaaacacatatttaattatcgtataagtatttacttattttctataataaaaaaaattaaattatatatttctatataaattgtacgtaagttcttttcataagatcaacagattagctcaggaaagaggatcatctaaccaagctgactctgtcattcatcttgaacaattcaacagtttgcaagttaatcgttgaatgcttaaaaaaaaaaacagtattagcaaataatgtatctcgtgctacatggcggctgtgtactgacaaacatattggacaaatatacattctattctgtcagctttcgatccttcgttagccagcgatcttcggtgattattggtaaacctatcacagcgtcttaatatatactaagaattaaaaccattttgaaagttcatagctgaaatcacttaagctgtttttaccgaatgtatgaaaaacaatacgtatattctgacttctacaaaactgtcggatgttttaagagaattgttaaaaaataatccatcataatgtt

SEQ ID NO: 3737 - DNA, 1076 bp, Glycine max
atgcttgataacggaataaacctctaaacattcattccgttacttatatttgttaaaattaatgtctcacatgtaaaagggacgtgacttatgtaagaactaataaataattaataattaagggttaaattgtaattgagttaattaggagaaatttctagagataactgaaaggaaagtttacggaagtgaaatcctatttgtctcttcttccaacgaaatcaagatataccagagagaaatttcttcttacaaagaaaggtacacattatctgtttaatatattatttgtgagaatcatagttttcaagatcctattggttttttataattgttaatcaagaaaatcccttaaaatttttataatattgtctttttaaaatatgaattatgcttcgttttctatttttttccctctatccccatctcagggtctgtttttactttcttttctttccgggttgagttgttcactacaactattgtaccagttgcaagatttgatctagaattgttttaccatctctattttgccgagcgattcttgagataactcatgattcaatgaatataccttgccccaatccaaggcatgtctaattggaccctttactcttttagaaatgagaagaataaatttggatcgtaaaatcttttatatatacaataaataagtaatttttaatattttttcttgaattgacaataaaaatcaagaacccaaatcaattagttttatttattccctttcccatactttacatccctagtgggtggtggctaatttttttttatcaactcatatatatgatattagttgtgtttgaagtttgaaattgagtgaatatcttcctttaatacttatttactaaaaacttaaccgtgaacatttgctgatttattaaatttattgaaatcatttcaatgaaaagataacaagaaagacacaatttatttttgaaaacttaaccaaacaaacttctcaacataataagaaaacgtctaaataaaatccacaagtttgaacttaagacataaactccataatctcgctactggcatctaaaggcaggcaa

SEQ ID NO: 3738 - DNA, 1229 bp, Glycine max
cagtgcttctcaatctcctcatctcagggcttctgggactgggaggggtgtatcaatcccagtacagacaaattatcagcgtgctcactcactgaataaagtttctccatctcaattccaggctattcagacaagttctgcaccagggtggaattcaacttctgtgcaagctactgccccacagttgggcaataggcctggcagtgggtctcaatcatcatctccccccagaacatccacgccagtgaattcacatgattctggagaaatggattcagcatcagaatcaggtaaagccaaaggtgcttcggttgggaagggaaggggaggttcccaaggtgcaggaaggggctctttcgtttatggtggggcacaggtaatgggcaccactggaaatgtggctgttagtcatggagatccaaacttcccagccttcttgccaggtttgtacctacattgctgacttaatggaaattttagatccaatctgcctattagttattacttattagaactctgatgttggaatgtatttctcatgctgtggaagttgttgtaagttgtagcagtgtcctgtgaaaaattaagtaactatattatttaatgtcaagatgcatactttgaccatgtaagctctagtattaacactcattttgatttctgtttgtagtccttttaaaacaatactcggcagttattattttcatttaatttgtttatcttgttaatgattttttttcctaattctgattgggttttggtggaatgcagtcatgcaatttgggggccagcatcctggtggtatgggagttcctgctgttggcatggcattccctggatacgttggtcagcctcaacttggtttgggaaagtctgaaatgacatggtatggatataatttccgaatttagagtgtgttggactattgggtaatgtttgaggaatgggcaattcacatgttttagcctttgtgatggtcttaatcagtctctctacatttctataagaacggccaatatcaatgacaacaaatcatgataacagtgatattttggaagggatcatgcaaggatgtcttgttttaattagttttttttacttaaaaagaaaaactctttgattcctttttgttacttttgtaccttttgtattagaacccattataatttcatcctacttcggtttaggctaccagtgtggcgtgtccgcaggcatcaagctggcgtaac

SEQ ID NO: 3739 - DNA, 1073 bp, Glycine max
cggagaatttttcaatctcttgatttgtttgctttcattgtcagatgctatattagctttgtaaccaaagcactgttctctattaatccacagtaaattcagttcctataaagtatattcatagaatactagaaacactgcacgaaagttcataattatggataaaatcatttctaactgataaagaaaaaaaaataaaaataaaaataaaaatatggaaatattactatgacaaataatatattggaaagatgtactcataattcattgaaaaccccttagtaagttgcatttgttttagcatcttgatataggtcttcttgtattagggaggcttttgattttctttaactgcggggtatgccccgtttattatcgtatcattttgggtttaatataatttacatttttcccaaaaaaaaaaaaaaagttgcagtgctgccattggattgaaatatttgattgagggccttgtctagagactagaatgaagttgtttatctcaacaagtcatcatcacccttctaaccatataggactttaggttattttaagtttattatttgtctttacatgagcagaatgggtctatttatttcaggtggagtggattcatgaaacgctcatatgataaaggcaaaacttggacaggaagagaacagcttcctcctggtatattaggacctataaagaataaggtacaacagaatctatttcactgtattttatcaatggcaagaggtttggatttttatagctatattagatttattcttcactacttctgaattttcttactatttctcagcccattttgctagaaaatggtaatttactatgtggatcatccgttgaaagttggaactcttggggtgcctgggtggaggttttaactgaactcgtcctagttggcttgtttgtttaagtgatgcttagaaatgttcacttgctgacgtttatttcttcttgcgtgcaataggtaacaacagattttggtaggtcatggagcaagcatggcccaatttacattgaaaataaacctctgagtgtattcaaccagtaccttatcagac

SEQ ID NO: 3740 - DNA, 1048 bp, Glycine max
ttgaatctttgttaagatcatatgttccaacaatatgccacatctatttattttaataatgcaaagaataagctatgtaaccgggatttggcttttgtctaaaactttacatagtaaagtataagtgggtaacattcatgaaagtcagactacttgtactattcaaaattctacactgttgattttttcatttaaatgttaaccactttactctctaaagttcagggtgtagaccttttttcatacaactgtttgtccactttactctctaaaatctaaatcacatgcatttggatcttgttcctataactggaatagattgaactttgtaatgttattaaaattgttaaaagaagggtatcaacaagtagtttaactatttctaatatctctcagagcaaataatgatgttcatctggttttcagtttctggagagataattcaaatatttggaaatgatgtatgcaatacttacactcattaatgttcatgtatagttttgttgcttaaatagtaaaacttgaccccaaattttttatgatttataaaaactctaaatataatccatagatttttctgcatgttccagactgataattcgaatccattgttgctttgttttactggaacaaaaaactatggttggagattgtaaaataattaataattcatttttgactgatgcaggtattcacatgtggagataattcatcttcttgctgtgggcatagagatacaacccgaccaattttcaggccacgccttgttgaatccctgaagggaattccctgcaaacaagtatgcaaatcatcaataatattatttacagatgataattgttggctgagttgaccttttatatgttaatctcattggatgactagtgtctctcttgtctaaagaatgaatacttcatcctaaactcactttgcttctgttatctataagcttttttgccttgcaatatgatttgaccttagtctgatgtatttcaagatacatgatctagtttttccctgaagtctgcaggcatgcaagctggcgaaa

SEQ ID NO: 3741 - DNA, 1024 bp, Glycine max
ctctagagtcgacctgcagaggatttgtccccaaatggctttcggacaggttctgcttctatcacctctttttttaggcaaaagctaattgagattgttaaggaattaaaaataaaaaaacttattacagagtgtatgatttcctatgcatcacactttatgttaatgtggttaagtgtttttggtgttgctctctaatgagaataggagtttaatcttggtcacttatgctaacttttaatacaaacttttattatggggaatagtgaaattttaattcttactagagaatggcactaaaagcacttaagaaacggtatctttgttttggaagagcttattgatagacttatgttatgacataagaactagtgcaagtgtttgtaaaaacttatgaaaatagcttatgatatgttcataagttgttttagcttatttcaatatgttctctagaataacttgtgaaaacaacttaaaacttgtatgaaattgtttaacctgatttcctttttggttatggaaacaacctatatataagggcttatatgataagcactaaattgagttgtttacccaaacgtgcctaaagttttatgcattatgtttactgttgttagacggacataggtctcgtatcaaaaacctctttgcttaaagaagcaccatctaaatatgtggataggatagatttgttatgtttcagatgagtggttactccaagacactctaagtttcatgttttctcaggtttagaacatgatgcaacctcattctgattatagtaattcagtaagagaaaggaagtggtgataagctgtaattattctttgcagttctggacattgattctgttggcacattcacaatgtgccatgaagcactaaaatatctcaaaaaggggggagaaggaaggagcaactcttctagtgggggatcaataataaacattagtgctaccttgcattacacagcttcttggtatcaaattcacgtgtctgcaggcatgcaagctggcccgtaggtc

SEQ ID NO: 3742 - DNA, 1049 bp, Glycine max
ctaaattattgggctctcggcccataaaacgatagcataacagtaaggaaagcccaaatgtccagacatgctgaaaacaggccgaaatcttttattttctttcttttaaaaattcttatggaacattttttttgtttttacttttaaaaataattttgaaatgcatgtaaataaaaaaattatataaaatattagcatggtatttattattgattttcaaccaataaagtttaaaaataggcctaacttgacccaaaaaaaggtacaacatctaggaattggtgttttacttgttatttgcatttgtaattttttacattttaaaaaggatagtttactagaatattttaatgtgagggagagtagtggttaacttatttgcttttttaatttcattgcaaattcaaactcctaatattaagacaacagttgaacttctctctttttttatgttttataattaagatttattttaaagccaaaacctaaaagggcagtttgttaatgctaataggtttgtgtcaaggaaacgactgaaaaaatgagcgtaataactgaaaagtttacagtaacatgttcagttcagtaatgagaagagtgttgttgtgttgtcatgagcttatgcggatcgagtaaaaatgtcatgatgcctaggccatccagttcgtgtttgactttggacaaagacaaatctacctctataccaagcagtgtgatttggaacaagtatactacagttgctagttcaccagctccttctctaaaacaaattgccgatttccaaagtctaacttcctcaccataaatatttcttttacttccagttatagaagtatagccgaattaaaagctgtgatcctatcatatttacatttgcagtaccgggagctaattcccaagtagtagaaatattttgaaagataaatcaagagaagccttgaagaacatttttttttttgtcaggcgtgtgttacttgtgagattttgactgttctagtgtctttaagaaaatgcataaatacaataagcatctgacaggcatgcaagct

SEQ ID NO: 3743 - DNA, 937 bp, Glycine max
aatgaaggctgcctggaagaatgcagaagcagatccccttggatcggaggctctgataccaacttgaaagataataatctgaatattattgtaattctgtctttcgaagagtgaatacaagacttatttacaagctgccaatgacctaattaagaaaagaaataaaatggaacaaaatctgtacaaataaaaaaaaaatcaaatctgtactaattacagaataaaatctgtgctacttatagaatgtatgacaacatgagtaatttgagccatgattggattagtttattttgaagaaataaattcacttttttcatcttgaaagagctttagaagaaaaagtgattcttttcccataaataatcccaaccaaacatgtactcaatctgttggcaacaaaaagcaatgattcacgcaacaaatcataatacaggtgcttaacttaatctcaaaatgctccattttattcaacaatgtatgttacagagaaagagagtgcagctgaaagctctgtaaaaagtggtggtaaagtaactttgaagtatgacaaataggagtcagtgtcttatttgataactgcatgcattatcatcaaataattctcgtgatctaatcaatcattattgaggagtttcataccttctcaatgcgtgcacgctccagttggaagataggtttgtgttctctagtcaaaacaatggccttcagctgtgtctggacaccatctgggtgattttgggatccattagttgaccgagctaatactgccttggcatctcctatatttgcaaccacaacctaacaaatactcatcaaacaggaaaggccaaaaacaaattacaactgactttaaagaaaacagaaacaaaccaagagctgaattcatcaaaagattgttcaacaaaatacccataattatactgcctatgatgtttat

SEQ ID NO: 3744 - DNA, 1137 bp, Glycine max
aactgcttcggcatgaggaacgtgacgaggatgtttttctttcttgtctcccctgagctgtttcagaccatgcttaagtgccggcaataaagcttccatacactcggcaacagcattagggtttccaggcatgttaatgatctgaatttgaacaaatcaagggccataacttagccagtaagtacaagtctagaagaaagacagattagatgtctggatccagggtgtactagtagttacagcaataaatgcaagattttccttaactactcatgatacagctccattttgaagccaagggcacttgtataccaaatgtaaatggatgaaactaaagtaactagtaataaacacagattatcatataaaaaagcttcagaatctagatttgagtttcctgaaaatagtaactgtttaactaaaacaaccttactgtaacggtgaagattgaaaacaataggtaccttaaaactcaaataattaaaatctaacaacagtacaagacatggacgctttatccctcctaatattctttttaataaaccagcagggttttattcatactaactgtgttggtcatttataatcaattttcttattttcttataatttctaaaacgacacttgttatttcttgtcatcaccctcgtttaattaatttaagattaaaagggctttctggctgttttaacaaaccattttttctgcattgaataacagttaattactttctcacttgttactgataggatattgtacaagtgagagaataagatattttcctagaacagcccataaaaagaaaaagagaaccatgcaaaaccaacaaagaacattttaaaaataaagtcaaccattattgagatgaaatattcttttacaaattaataagtcatttgagagttgagacactaaattcacactcagtaattctatttttttttagataacaagaggaagagaagattgacatatttacattcttacatgaaatacttacattgttctataaagaaattttctaagatgcataaaaagctatagtcacaaagcaattccaattataacactaaaatgagttttaaagtagatattaattagcatttttgccttaccaaggttgatcctctgattcca

SEQ ID NO: 3745 - DNA, 1302 bp, Glycine max
agtttaatggttgaaggttcagataactatttcccatcttgtcatcagccttcaaaaaatctttatcaaatacttcctatccgaaaaccaacttaattacaacctaattaaactcaccatttcaaatatttcgccacaaaacttatcaatatattataataaaatgcatgtaaattgtctgggaggagatatataccactaaaccggttagtaatgtggtaatatttatctttggctgcaaattgaatgtggccaaactcacaaagatacaagtggtgagttaattactacacccttattgtttaccattttacttattaggttatcatattgatacttagaagaaaatatgtagaggtctgactctgacctgttactaacaagtcctaaattttcaatctcaagctctttttttttcaaaacgcaaaatgaatcgccaacaaataaaagtgtatatttataaatgcaaataaataagaggaaactcaccaaattcagaactcccaaaggttctgtcacagtgaaattcagctcttcattccagacaggattcaagcaacaatgaatgaccctggtctttgcggtctgatatacatgataattggtgaatcatttcaacgttcagatgttttaaaaacgctacataatgttgacataaaaaagatacaaggcaaaactgaaatgtaaacccaagttacctgattccccagcttgacaacaacataagggtcactgctcttgaatcccggatcactaattttttgccttgcacaacaatgacttttagtatcctcaattgttcgtccattatactgctaaaaacatgacaaatatctaataaacaacaacaccacaacaaaaaaacatgcagctgagatagagactaaaacacttttaaagaaaggaacatgttgagaaaagcaataaattaagttaaattagcatgcctaccaaacaataacataaactaaacgaaagaaactttgagatttttcatgtaaatatatttataacttaaaaagtgagaaaagagtggcaagccagtgaataccgaggatagatttaactcaagtgaatgttaggagcaagtgccaagtgaagtgatgatgatcttaggaaattaaaaagggcttttttggagatagattacaataaaaaggagacaactaagggaagggatggtgatggtattggtggagaagaataggtgttgctgttagttaaatgttcatctgactcagcactcaaatttaatggcaacggaatttcctcgtccaccgactgctgcaggcatgcaagctg

SEQ ID NO: 3746 - DNA, 1250 bp, Glycine max
actgctttcggtaatccacttacttcattaaatttatatttatattatattaaatttgttttaacaaaaaatctcatatttattatcagtgttcagatttcaagcttcagaactacagaattgtttgtcattatcagtaaggcatacattgtgctgaaatattcatcttttttggaaatttaatgcagtattaacaacttacctagaaaaaaaatctatttgagaatcatgtaatcccacacgattgaagctgttattaagaagcctttcattagtctatttttgttaagttttattggatatgcatgctgtattgattactatgttccatagtgctggaaacttttccttttctgttttggattgaaataacctttttgctagtggaattattgaaaaatttcaatcatcctccagaataagattgaatataaatggagagtttgactcagtttattctataatcttacatatgctaatctgaacttgtgttgtatgctttactagccactagctgtcttctttctgggcggggttatttttgtggtgattgaaaagaatagccatttgaagtatggtctattagttgtaattcagaatgtgggaaatgtgtttgattgtattattttatttgggcattaaatttaatagcgagttttcttgtaattatactaatgatattacaacttgttctatttctcttttgtggataacttcatttaagtcacaatgtatgaccaaatataacctagattcacttatgtcagggagcaacaatagtcgatatgccagttacaatatctctggatccagattaccagcttccacctgctgccttagcatcacctgtgagtcctgcctagaccctttacattttaatattgtacacaagtaacttgactgtttttgccttacaactactaatatttttgcaggtaagagaaactcgaactcctggtggcggtgctgactctgctttccggaaggcagaggatgtggtctccggcatgctagccaagggctttatcttagggaaagatgctgtcaacaaagcaaagacctttgacgagaagcaccagttatcctccacagcctcagcaaaagttgcgtctttcgatcagaaaattgggcttagcgagaaaataagtgctggtgctacagtagtgggtgatagagttcgagaagtggaccaaaagtttcaggtttcagagaagaccaaatcagcatttgcagctgcaggcatgcaagct

SEQ ID NO: 3747 - DNA, 1040 bp, Glycine max
agaaagagagaagagtgaagagtgttatttttttgtttgactctgaaaaaaaattaagatacaacacatggcatgattggagccgtttatatgatcctacgcatgaaaatgtttcaactacacatccggttcccgtcaagaatgggagaggatccgtatgcgatgaactgaacttgaattgattcatttaatatagtgagagagaaaaaagttaaaccaatcaaaatggttgattgctttagttttatatttcctttttacaaattaaccctattgttaacagattaatttggttaatgaatattttatttcttttttattctctttaatttcaatcaaacaattttattttttactttttttctattctgtctcatttatttttcatttctcacgatcaaacagaggattagtctaaaaaaatattaaataatgcttgattttattggaactaattcttaatttcatgaccggaatattcacatgaattaattgaaaaatgtgtaagattggttagattggattaatttacttgactttcttaattgtctttttatgaatttgactaacctaattctttatttattttgcgaagaaagaagtattattgtatccgtgtgtgtatatataaaataaagtcattcaatcggtcctaaattacacaagatacatgtcaaatatgcaaatgaagtaactctttgatctgaaaaaaaaaaaaaaaaaaaacaatccagttttcccttgtgaaaaaagagctccaaatagcttcaggttgaagcaaaaataaaaaattgaagaaaaggttgaagctaaacataaacctcaaaaactggtgtacgtcattaacatgggtgaccccgaagttgccacgtactccaagcgtgtgcggttaacaacgtacgagagtatcgaatctgcctctgctttctttcaatttcaacagaacccatcacacacacacagaccccatcaaccaaaaacaaagaacaatgattctgagatttgcagcagctgcaggtcgactctaggaaagacccggg

SEQ ID NO: 3748 - DNA, 1292 bp, Glycine max
gttttctgaatactagcctttttctgtcagcggttctttaatagtttaaccttagctttgtcaaattattgtccttatgtcataaaatccatcagtcattgtttcaccgtacgccacatcccactttctcttctcagttctcttctcactatccatttttgaccgccattgttctcagttctcacattgattgaaaagaccccattttcctctgtgctccactctccaccctccaccattgacacgcagagcaacacgacgatctcaccgacaacctttttgtcttcgttaacacacacatctgtcacctggcgtgtccttttctcactgcgcaataaataaatactactattaaataacaaatacatgtacatattattacatatagtagctgcttagcttagctctatattcttcactctacttcttctcccatttgattcccttccctctctccaagttttatgatctctgtcatttcctaaactacttttattttccatttatatatcttcacaaagcaacatcatttgcacttgcatttcacacgcatgtgagacatgacccaagtaacacataaagcaaagtaagcttgctttgcattgtgttaacaaacagggcaaccccattatttgttgccactttggttctgaaaaagtttcttcctttagttgtgggtttgctccattgtctctgttctgggaaacagaaacaaaaagaaaataacaaaaaaatgagaccggcacagattgtgttggttctgttttggttgctctgcattcacactcccaagttgttctgcgccaatgtagagtatgatcacagagcattggtcatcgacggcaagcgcagggtcttgatctctggctccattcattaccctcgtagtactccagaggtctctctctctctttctctcttcgtgtgtttctgtgtttcttttctttgaacttaaagagggtaatgtcgcagatgtggccagaccttattcagaaatccaaagatggagggttggatgtgattgagacttatgttttctggaacttacacgaaccagttcgaggccaggttctttttcttctcttcccattcattttctttcttcttcttcttttttttgtatattcctatggcttattgtttcagcattgcatttgttgaaagcatgaaaagttgaacattttttttttgtgtgtgtgtgtgattttgaatgaaaagactaacgaagtcgaaaagaaatttggcagtatgattttgatgggaggaaggacttggtgaaatttgtgaagaca

SEQ ID NO: 3749 - DNA, 1235 bp, Glycine max
ttcaaagtaaatttaaaactgaaagctggccacaagcagagatcaaaacactttgccatacacgcggcaaattggtatccagagatggtatcgcttacatctacataacaccgtaccaataaaactcacaagatcttgaagatcaacaatctttttctctcctaataagtggtacccacgtcatccattccaagcttgcagagaaatttgtcaaaacctacatgcaaaaaacataccacaaatgaccaagcaaacatcattattaaccaaacagacacgtatcatatgcatatattactattacaattcccatccttgaactttagaaagtgtagcttttgcaaaaattaggggtgcttttgattttctgtcacgaagctagtctcgtaccacattaccaccaccatacattgtattttctctatgccttgtcttgtctggtacattcaatgaaatatggacacttattaacggtacatttttttttcatgcctctctcacctgaattattgtatagttgaaagctactacttatttataaattatagtgacacacacaactgcaattttcaatttaaaaataaagaataaataaaactctgccaaatatcatgtaaaaattaggtgagatcatataataatttctcctcagcacgcacgcttgggaagaattggagtattggactatatagctagaggttcttcaattgcatgtgagggtgagaccaatgactttaacttcctcgatagaagtgatgtgagacctaaggaatctatgcataaaagggttcctcctccttaacaccataatcattcaaccccactcagtttaccttcacttttccctttcctcacaaaacagaactccacaaagagaaaaaaaaaaagagaccaactattgtctcttactccacacacaatcccttgattttctctctctctatgaccttgctttacaaggagatcccaatgtagatccccaccaaccgccatttcttcagctgaaagcctcttatccgtcaaacactcatgtcccattacagtactgactgttaggcagatagtggaaaaagaaaaaaaaagatataattgagatggatgtgagtaggagaagacttggagttagatgcagtgtggttgcagggtcagtgtgggagagcagaatgaagagtgatgaagttggtggtggagttaaggtcttcactggagaacaaagtgctaagaaggaggcaatg

SEQ ID NO: 3750 - DNA, 1283 bp, Glycine max
acacgacttctaatttagattttgctctcaagagcttgtaactgaggtttcgaacttttgcaccaattttcgattccttgttctttaaattaatcgtggctgcactcacatgcttcagttgatttcttgtgacatccatagaggccataaacttaaaaacttgttttgtaatggaagccaagtctttctttgctgcctctatttcttcttttgtaggctctaacactacaacatgtcttgattaatcttcttctatatgctcaatgctctgaccacctctttgaagtaaccttttccccgttttcttaacaaacttgaactcattcttcaacatatcaatatcagacaatgttgtggccaatttcatttcgagctcttttgtctcatctatcgcttgaatggcctctttcaatttgttccttgtgttttgaagttgttcaatgtctctaagttcattcaaagcatccattctgtccaattgaaccaccaattgttcttcactggcttcctcaatctcgttcgtcagtttttgtgctactcttgagaaggacaacatgctggatctcgatgctttgacttcgttctccgcttgcaatttctcctccaaaacagaacccacatgaagcttaagttggaaaaattcccgcttagcatgttccaattctgtcataacttgtgaatactgattatcatcgtttctcggtttgacatacttctttagtggtgccatgtctcgcatttcggcttttgccttgtacatagattccccaatcatagagaaaagatctttcactgtctgtttagcattggaaagctcagcttctgcttgagcttttgcacattctgctgcccatttggtctctttgtaccaaacaatatcattggttcctctgtggatttgttttgcttttgaggaatatttaccaaaacaatgttgttatcaactgctctaattaaaaggacacataaagaatctataaatagattttttttaattccaaatcttaataatgttgtgtgggcaagaattgtacacaaatacatattggtgcaattattttgacatatacaaagaagaccactgaaagacatgagtgactagagtagaacatatgatgtgtttatttcatcactagataagacatttattgttattgttgtgtgtttggtaaggggtttttagaaaatcttttgaatttagatttttacttaatagtgacaaacttgcaaaaattcttgttagaaaaattgcacaaaccaatttagtagaaaaaatggtatca

SEQ ID NO: 3751 - DNA, 1026 bp, Glycine max
taagagggttatatgcaggctttcttcctggggttcttgggtcaactatttcatggggtttatatttcttcttgtaagtactaacttctatcagtgagaatgagaatgagaatgagaatttaattgaagtctacttttaacctatctttttcatatctgatgcttactaggagagagtgatattatatagaatggctgactctttgatgtttgcatcctggtttctgtgcatatatgcatcctgtccagtaaaattttaacttgtttaatgagtttgaaaatcttctctcactcctactcactcaccctcatgcacacaggagaaaatacatatcgaaattctttttcttagtcaggaccaaatcaatatgttaatatctcctagtctccagtacatagtagtttcatttaacaccaaacaactacttcaaaatcactcttctttatcatgtcaaaggatctccccccccccccccctccatatttatttattttttccttccagacttgactgattaattattactgttagagtagttactggtccagctgcttgcttttgtagaagaccaaactcatcataccgaacttttttttttcaattgcagctatgacagagccaaacagagatatgcaaggaacagggaggagaagttgagcccaggtctgcaccttgcctcagctgctgaagcaggagctttggtaagtgcgcaaaatctcaatattatgaatagaaagccacatatataattcttagcagtgttgttaaatggtggcaccatgtcaccatggtggaatggcgtggcagattttttgccaaccgccataggaaaaatgtgaagggatgcccgctatggcatcaccatagtccacaatgatgtgtttatatggtagaatttagggcttccgccatctgccattgatataattgattcttagtatgttgtacaaccctgctggaattttgttggagttgagtttctgccgcccctgaggttttgcatttttaaatttggcactattggg

SEQ ID NO: 3752 - DNA, 1270 bp, Glycine max
atgcagtggtctcagtttgtaaataagagaatgtcctagaaaccattccagtgccaacaaatacaggagtatccagtgggccttgacaattaaatagagcagttactgatccagctagctgtaatcaacaattacgagaaaaaataaataaataaataataaataagagagagagagagagagagagagagagaaataaaggaaagttaaaatcgatctaaggagtttgtgacatgacttacaatttttgaaaatctacatttcaactattattaaagtcacaaacaactaggtatgtttgtagtgttttttatcaaagtttgcttatcagctacaccaatcagttacatggaactgcatttacaaaatgtaattcatactttgggaaaaaagtaatgatcataatataaagaatcttccaaatgtgtaatagttaagcaagcacaaaattggttcttccgattttaaatttaaaagttgcaagaatacacacacttcattggtatcgcaaattttgaagcccaccacgccatggaccaccatttgaagcccgccatgccaccgccataatccatatcattgtggtttgttggaaaattgccaccaccatccacaatggcgctgctacggccgctatttgacaacactgactacgggtgatgaaattttcatgcatggaggtatgcaactgacatattaaaaacatttcacatgttgggttgtaattcttcccaaacaccagttgattgtggtataaagttagagaaggaaggaagtgacaaggcaatttatgcaaccttgtacaaagaaattggtggttcattgagatttctgtgtagcaggaggcctgacatagcttatgaagtgtggccaattagtagatttatgaatcatccaaggctttctcatttacttacagctaagaggatactaagatatgtgaagggctctttggactatagattgttgttttcaaaccatggcagaaatgctattgatgaaagtgacagaaagagtacagcaggttatgtgttcatgatgtgtggagcacctatttcaaggtgatttaaggagtcagtggtggcattgttctcatgtgaggctgaatacattgcagcctaaatgagagcctgtcaagccttgtggcttaagaacttgatgtcagaaatgaagattaaaagagaagagcctatgaagatgctaatagacaagattccacttcctaaaagatctaaagggaagctagagttgaaatacgcaaggcatgcaa

SEQ ID NO: 3753 - DNA, 1179 bp, Glycine max
cgccagcttgccatgcctgcaggcattttgtcaatgaagcggctattgtcagaagtgtgaaattaattgctgagagtcttgcggtaagattaattttacctcaaaaagtagaagtcaatgcacacacacaagaaaaccccaaaagattaggaatgtaaccttttggtgtttgtaattttttccttctaataatttggcgttaagagttatgcggagtgttttgttgtttgtttgtcctgggcactgattcttaattatgcttggaaaatctagtatttatttaccatattttcttgtagtatgtatttctaataatgtcaaaacttgtctcttttgtgattgtgtataatatttaatgtgagtttgtttggtagatactttttgatatatgcaccaggtggtttgcatcttttgatgctactttgtcttatccaacaaacacccgtgaatggagctaaattttagctaattattaatgcctgtgtagcactgtgcatatggatgatactgattcataaatgacatgctcttcattatatataatagcattgtgttaagggttgttgatgagatttcactaacatgattccttgaatatgcaaagtttccattctgtagtttgattcattctaacttaaacagtgggttactcgtggcacagattttacttcctctctctttccatcatggattcatgtgttcctcctcatctttccattatccatcttttaagtaaaaagcatagagagagtggggagagagacaagagaatgaggagtaatttttttaaaatgctcctttacctatccttttttaaaaagctaccatttataaaaattaagttgcttaatcttttaagagattttcagaaaatgtttggcctacttttccttttaagaaaaaagctgaaaaaaagggtcaagcacaacctttattgattattgcaaactggcttaattagtgaggctgtagtataaattgagtagatgttcatgaactcaggtgattatttatcatccttttttaaagaattgcccggaaattaaaaattatgttagagatatatattggatttccagtatcttttgatgtgacatgtgtcatcagcttcatatattttttatgagaagccaacttcattgttttaaatgttcttctgatctactttctgcaggtcga

SEQ ID NO: 3754 - DNA, 1173 bp, Glycine max
agagaggccttctttggcagcatctttgattttctcagcagatagcagggttgaccctccctcattttgaccacatgaaccaagtacttttgacttgtcctctgaattcaaaagaaaaaaaaaaagacatttctcaaagaattacacactgggtattagcattttaccagacaatggggatttaattacacatcagcaactgaaaaatgcagcaaccataactcaccatttttctgatttgaatttgcaacctctccatcatggccaccatctctattatgcacgctttctgaatttgtccttcatatatgcaaataaaaaatcctaattatataaacaatgcaataaggctggctgttggtgtagaagaagaataaaatttatggacaaagagaaaagtgaaaagcacaacaggaaacaactagatatccttgtacacattaaaaaatgaaagggaataactgagaaaacacttcaactaagaaatggcaatcacacttaacactcacctattatcattatccggtgcttctatatgtggcgtgctcccggaattattccttgacaatgcagctaatgctgcatgagcacaagttgcagcaactcttggtccaacagcagaggctaaaaaggcaacctttagaatgcatccaccaaaaccaaatgcgtaagaattcaagcaaaagaactccagaatataatagacagactgatttgttgtgaaacagtggcactatcatcattaattgcagtttgggagagctttttctggaggaaaaaatcttttttttttcaaaaactctcaaagctaacaaaaaatgtgattcaccaacataaactgaaaacaaacacacatcaagacttgctcctttaaagagaagaaatgcaactataaaaaaataagttaaaaggacaagatattaggtgcagcactgatagccacttcccagtcttcttaataagcatgcttcacatgcacccattaacaaaaatggcaaacaagaatatcgttaccagtcacctaccagtgccataactggatttccagaatttgcaaaaggaagcctgccatcagaatcttggctgttatgtacaggtcctgtgagaacaaggatatgaaattaaaaccatatcacaactcacaagtagaagtttcaaaagttttagtaagac

SEQ ID NO: 3755 - DNA, 1079 bp, Glycine max
agggacagaaacattagattgagacacatggatccagcaatgggagaagatgctccagatggagtcaaaggtggtgttgaggtaggtggcatcaagacagatggagaaccaagtgcaattggactaactgaacccatctccaatgcagaagcactagcagaataggaccttggagaaggaatagcggaaccagtagaagcatacaaggggcggagctcctcaggcttgtgagcaaagaagcaaaccctccttgtgcatccactctcatccttgcaaagccgtgtccggtactgggcagggtgaagccagcactcaaaaataccatgtgcatactcacaggcatcgcccttgctgcaagaccccttcctgaactcgggacaagggacacagctgtaatgatatttccttggatcacgccgccttgcattttcccctggatgaacaaaggggcactcagtccaatcatgagaatacgccctcgaacaaggcttcactttgaatgtatacatcctaaactcatcagtaccatatatcccattctttatgtctggaagggagagatcaatgggataatctttcgaaacacggggcgtagtcatatcttgcctttgttcctcaatttggtcaatcacttctggaagtgcaagacatgcctgatcagcatcacttgtaccctccaggagggcctgtagcacccttgacctttgactgaagatagaattggtcaccgagccaatcaagtcaattggccggttaccgttggcatcaatagcattaacatcagcagatgcatcaagcaaaagcttgacaacctcaacggaagcggcagaacccccagcaacagcacaatgaagagcagtagccccatctgacctactagcccaattaacatcgacactacccgttgaaaggatataggttgatacaccaaggcttccaaacatggaagcaaccatgagaggtgtcctctcttcataacctattttcttcgaggcaacacaccttccataccaaaaccctaccccatcaatatcatgaccctccttttcaaccgcatcttgaaactaaccagatcatct

SEQ ID NO: 3756 - DNA, 1008 bp, Glycine max
aagttttggtcatcaccttagaacaaacttgttgcttacagaaacttttcctttcaattttcggacagccccttcctgcaaagaataaaccattgattgctttatatgataggaaagtggtatacacaaatactagtttaattactaaatagttataaatcgacagaatgatggagatattgccgtcaaacaaaataatgtaggaaacaagggaatttcaaaccattggtacttgttaattgttattacctttggttctttaattttatgaaacattttttaatgtttgtcatatttttataagacatcttctgaatttttcactatattaattttttatatgaaaacacgctttcattaactaattaagtaaattatattaaaaaactaattaagtaaaaaatcagaagaatggaatattaatataatcttaaggagtactatataattttctaaaattatatataataaaatatatttttttgacatatatatttgtcattggaaataattttacttaagttgagtaagactattataagtgataaagatctccatttaattatttaacataattatatatctaattaagatttaatctttatatcattggttaaattgaaataactacatgtgaattgatttacatttacatgctccgctgttaaattactaataagtttaatatttaactaaatttcttaatcattaattaaaagagtatgaacagattaagagaattataataactctgatgataagtggtggtataggcaaaaaatgtgtcaagtacatgcttttatttcttatttcttacatactagatacttattagatggactcaacaagtatagatgtgttcagttaatatgtgtaatttttacttcaacaacatgtgactttttgacaagaatagtattttttttttaaaaaaacaaactattcaacagaaaagagtggtatgaaaactgtctatattataggggtttatatttgttaagtaggcac

SEQ ID NO: 3757 - DNA, 1104 bp, Glycine max
attcaactgagaaacagaatttgcccctctctcgtgaaggtaattacgatgaagtcaattcccaatctcttcatgtttgccctggctgtggggtttatatgcaagattccaaccctaagcaccctggttattttatcaaaccctctgagaaggacttgagttatagattgtataacaatcttgaacccgttgctcaagagcctgagttctctaacactgttaaaaggggaattgttattgaaccagaaaagcttgatgatgatgatgcaaacttgattaggaaaccagagaagccagtggtgtgtgcgcgctgtcattcgttgaggcactatgggaaggtgaaggatcctaccgtggaaaacttgctacctgattttgactttgatcacacggtgggtaggaagttagcatcagctagtgggacccggtctgtggtgctgatggttgtggatgtagtggattttgatgggtcttttccaaggaaggttgcaaagttggtttctaagacaattgaggatcattctgctgcatggaagcagggtaagtcagggaatgtgcctagagtggtgcttgtggtgacgaagattgacttgttgcctagttcattgtcaccaacaaggttggagcattggattaggcagagagcaagagagggtggaattaataaggtttctagtttgcacatggtgagtgcattgagggattgggggctgaagaatcttgtggataatatagttgatttggctggacctagagggaatgtgtgggctgttggagcacagaatgcaggaaagagtactttgataaactctatagggaaatatgctggagggaagattacacatctgactgaagcacctgtgccagggactacactaggcattgttagagtggagggtgttttttcaagtcaagcaaaactgtttgatacacccggccttcttcatccttaccagattacaacgaggttgatgagggaagagcaaaagcttgttcatgtgggcaaggaattgaaacctaggacttacagaattaaggttagtacattgaaattaatttgtgctactaaggtttttgttagttagtatatgtatgctgatttgc

SEQ ID NO: 3758 - DNA, 1005 bp, Glycine max
aggttgctgctattgctgagtccttgattaagatcatgcatagcagaagacatccactaaggagttgtaacaataggatcttagagtttgcacaaggatggttcatattttaagttcaaaattttgatgctaacttggaattgaaacggttgttgtaaaaaaaactaaactttgaattgaaatgatacatgtttctgttttaaagggataatgctataaaaagtagctgatgttagacaaaagaaaaaggattgcctatttgacataataggtaagagatggtccattcctatttaagaagaaagcattcttaggctcttaagacatttattttttgttgacaataatcatcatcatacactaatttgtgtatttatttttatgtaactttaattgataatatcatattatggcaatgaaatactattatttcaaatttaattttactaagtttaatatcttgtgcaaatattaacatattcaaatttattaaactaaatgttaacagaatataacgcaatagtatgcaaattaaatttcatcaaattacgatcatatcattgtgaaagtagtatttatacaccattaatatatggcataaatgaatgcaaatgactacctaaattattactactaggtattaatcaagagccaagataataacagatccagtttttgacttatattaatcttatatagcatataattggggaataaatacaattttattgaactattaattctgctttattctggaatttaaccgcaagaactgtcactggcccgtggccaatggatatataagccaagccttctgagttataaacagttttatggctattgtttcctgcactcccaagttgtttccacacctcctttatgccttccaaaatgatcagtccggaaagtaaaattacattagggattgcacccttttttgacttccagaatgatcaatctgagaggtaaaaaaacattccagaaaggatgcaggaagcaactgga

SEQ ID NO: 3759 - DNA, 1146 bp, Glycine max
cgccaagcttgcatgcctgcaggtgattgcatttagtgatgaagagggtgttagatttcaaactactttcttgggcagtggtgctatagctggtattttgcctggcacaacattggagatatctgataagaggtttcacctagcaactttctggttacattttatggtaaaattatttatggtcaatatatttattcatagacctctttcagggaggtgatgattaaagattttcttaaggagaactcaatagacattacagaagaaagtcttttaaagctcaagtatgacccaaagtctgtttggggctatgttgaggtataataaacgtttgcattcttcatctataatcctgttttgctcaacaatttcaccattaagctcattaaaatttgcttgtgtgtttattacttgctgtaggttcacattgagcagggtcctgtgctagaacaagttggtttcccacttggtgtggttaaaggcatagctgggcagacacgattgaaggtatacaaataagatttgctatggtttgttctaatactcattgttgcttgtttcagttatggttgttccctatgatgtgaacaagatacaacttactattcaaatggtcttgcaaacaaaaagactttagtcttttcatgcatgtgaaacatatgatgtgaacttgtcaccaaaggatctgtctcctttaaaataacccactttagagggtaaagtaagttgtctcagttgtcaatgagaaaaacaatggtcgatattatatgcacatgcataacaaatcatgaatgtgttggaatgtcaactgttgatgttcttgtcaacgactaagattattactttaatccttactcacttcagaggagccaaatccgtcacaaactaccttttgtgatttggtgactggtgtatctaaataaaattttcaacatcagtgtttgtaaaagatacttttaacaacagaactatctacgcactgctcttgatcagtttacttgtatttcttgctatacgtgtatgtgtgcttgcttgtgtatatgttggtttgtaattcatacataaaaaaccatgcaggttacagtcagagggtcacaaggtcatgctggaactgttccaatgtcgatgcgccaggatcctatggct

SEQ ID NO: 3760 - DNA, 1009 bp, Glycine max
agaaacgtgaaaaggaatttgacaagtcgcaagctaatgtaagcactttatgagtatttgcatgttatgttgaaatgcatgttataggaagaatgagttatgcaaatactattctgatgcgtatttgcctcggagaatgtggcatgtatagtaatgcacttttgttttattgctagtgaatgtgtgtttcgccttgtatatatgatgttctctgagttaatttatgactaattgttaattatttcccatttattgttcattacccccttcaaaacatatgaaaatataaacattaatatgttaacgttctcctggctttaaattttgttctaaagtggcaaatacttttgcagcagattggagagaagtgggatgatagcttgaaatcaaaggagcaagttgaagccaaattgttgaacaggcaagtagctgctatgagaagagaaaaggctttggcctatgcatcaacacatcaagtaagaagagactgccttttattttggattttagtggaacaagagaaacaagttttggattcttggtatggatagcataagtgtaaaataaactcaagtactaaaccaagtcatcaatgtagaattttgttgaaaatgaaaactagaaaataggctgaaaattcatgtgtagactgtaagactagtaaaatataaatgatctcttcctatggataaccatttacttgatcctcaaacagcaaacgtggaggaactcttcaaaatctgctacaaatgccacatttatggatccaaacaatccccattggggttggaattggctagagcgatggatggctgcaaggccgtgggagggtcaaaacactacataccacattggccatgcatctgccaaaagtgttgcaagccaaaccatgtcagttggtgaaatcactaaattgtattctctccgtgatcagaataatgatatcaaaacttcaccagcaaaccaaaaaccaacccgtccctgcaggtcgactctagagaatcccggg

SEQ ID NO: 3761 - DNA, 1137 bp, Glycine max
aaattggaagggacacagaattgaacttttccaaccaaaggaggtggtgattgatgaaacttagtgatagagttagctttcttttcacattgttagtaatagttgtgttctgtgtgtttctgcgccccatgattggcaatttcagaacatatggtgggtaggaaacaggggagtcaagacaaaatagaaggagaacaattagaaggtccccaatgtaatttgcttatggaattatcttcatatattgtcattataatcaaatgctacagcaattaattttcatcttcatagttgagtttgttttgttacaccacgtaattcctcgatttaaacaaggtttacgaacagaaaatatggatgtaaaaagtgaggtcattggattcccaggtttaaaaataacaacttgttatccaaatggagggacattcagtttgaacaagtcaactcgattctacccataaaacagcaaagttcatatggaagtgtttgagtggttcggatctacgcacacccctaactaacaacattttacactaaattttgttgacattgacatatcattgagatcaggaatgctttacaacaaagctaaattgttttttttcccccaacaatttattagttcaagatttgcctaaaatggtgattgttaaataatttatttcacgaaaaagcaaagatttatagtaatttataaatactaataaaaagtcatgcctgtgagatttaaactgcacagtgtgaagttatttataatgattgcagaggatccttttcgttagttcaacctattcaatcgcaactataattaacaattaatgatagggaatcttgaatgtcagggaatgcaggttagtggtcatctcttctgattcatcgcattcactcgtactataattggacgttagctgccatatgtggtatcttcatcttcaaattttttttaattgttttgaattttactgtaggggtaagggtgtgtcttcgtttttgattgcttgttatgttgatgcatgttgcttagataataatccccaaaattgtaccgttctttccaagtactatagtacagtatttttttctccttaaatctctttttaacttccttcgtacacactgcaggcatgcaagctggcg

SEQ ID NO: 3762 - DNA, 1270 bp, Glycine max
agcagaagccaccattcgtgccatctcattaggatcatagtcattctggagccttgggtcaataatagaatcaaaatcatcctcttccaaagctcgtgtgagcaaaggcctagcctgtgattataaagatggttttagttaagagcttctctgtggcacaatgttcaagaaaaagaaaaacagaaacctctctattgcataaatgtatacacattataagttcatagttacaagtgataatcaggcccagaaacaaggagcgccataatacttacccagtctaccaaactatcctccatgaaagtttgatttttatcgacaggccgtcgtccggttattaactcgaggagcatgactccgtaggagaaaacatctgatttgtctgtcagttttccactagaagcatattctggagccaaatacctgaaagtagcaattcatgcatgactcatgagtttgaaatacaatgccaaacaacaaaatatgagacagcttattgttgttggttttacttaatcaaccaaaactgacaacaataaacacatggtacagcacagacacaatatttcactttaaaaatgaaagtttgaggttttgagctatgatgtaccctctctatttcatgtcattaaagaataacataataaattacttcagctcttaataacagattaatgaacaaacaacttttcattatgatatccaaggtttttgagaagatacgtagaaggaagtctgttcctacccaaaagtccccatcactcgagtagaaacatgagtattgacatcagaagaaaactttgcaagaccgaaatctgcaacctgtcaacagaaacaaaggtcttgttactaaacaattctatcacgactttacataacattttaaaggttgcatcaccactatatagaacaatggaagttgttttatcaattagagggcaatgaacagttgttatatcaacttttgcaagtgttggtaagacccataacagaacaacacacctttgcttcaaacttaaaatccagaaggatgttggcagctttgatatcacgatggatgatcttaggatgacctggacacacagaaaatcaaaatcaacatttaggttgacataaattaattacagttgaagaaataaaagtcaagagtacaaacatacaatcttcatgaagatacgccagtcccttagcagatcctaaagcaattcttaatcttgtgggccaatccatggtaggtcgccctcttcctgcaggcatgcaagctggcgaa

SEQ ID NO: 3763 - DNA, 943 bp, Glycine max
agattttgagacttccaagttccaattgaaaacgaaaaacaacctaagaaaagataagctttaaattaaagaatattaaactcacctattccccttaatcttgaaccaggcctcagcacaattcttgtgagcagcacccaaatcatccttacaagaacaccccaattcaatgggaactccggactcttcttgactatcatcactctccaaaccaagatgacaaatcctgcaatccctctccactttggctaaatgcaccttaatttcaggagcaccactttcaatttccacctccacagaatcagtgacagaagaagccctccttgaatcaacatcaccaccatcctcagcatcagaaacacaaccaaatgtgtaatcatcataagggtcaccatttgttgaatagaaatgggaatagcatgaaccattctcagcatcagaaaagcacatgctcatgtcactgccactcactgaacggtggtggtgactgagactcccttgctccaaatctaccacatgacacatctgtagacttgacatttcaataaaaacacaaacaaaattttcaaacctcaaagtttaagcacctcttctactaagaatatatatatatatatatatatatatatatatatatatatatatatatatatatatatataacaaaaacaaaagaaagaaaaaaaaaagagagaagttggagggtatataaaaaaattgagaaatggattaggtgccgtttgcttgcaacccctttaattaatgcatcattctagaagtttcaagttatggaacaggttaaggaaagttccatgctttcaaggctccaatgctggttagaaagagagagagaaaaagggtctcaaacaaagattggtgtgcaagagagggactcttggtgggctgaagaaggcagggatcagtgacactggggggggggggg

SEQ ID NO: 3764 - DNA, 1273 bp, Glycine max
agaacggagaaaaattatttcagtaaaaactgtttatattgaaacaatcaacccatggtacagcagaatttgctagcacttacttctgtatctgtcagcagttttagggaagtctgtgatgataccatcaatttgtgctccctcaatatacgagttgatctcaacagttggatctgagaagaaatcccatgcttgagacacaaactcattgctgaatgtttctacaaaaactgagaggttagcattttttagctttggcacaatatttgtataggccgtcaggaatttattattattaggaattacggagtccttgttgacaacaacagaactagcaaagctctttatatcctcaacagctgcattagctgcatctccaacagtctcgtcaatcttgtacacaagctcataactggttttctccttgaatttcagcagtacagaactattagtggattgaatataaaccttttgggatcctggtttatcataacctgctttgcttaaagcaccaatgacagcatcaatcacacttaatccttgcttgtctgcaagataggctgcattctgataagaagaacaacaacacaatatacatgttagtaaatacaagatgaaagaaaaggaaaaaaaaatcatttacacacaaggaacatgccaaataattctttacttggttgaaataaatcagggtgaatagagtcagtgaagaaatattcgatgtgaaattcacacgatttttggcaggtgagtcattttgtttttggtttcaaaagagaaagttgtcagctgcatgaagcacaagtagaactccaaagagtttaaaacagtatatttcataatttttggccaagttatacagaaatttagaagtaaagtatggccaacaaaaacaagtgagaaacaggtcttgtaacaatttgatagaaataatgcatgatagtcttaatatttcttatttctatttcccctattattccaaggtgaaatcaatcataggaattattaaataacttaagcgaccctaagccattctcacaaaaatttgtcctaattcttcaaaaaaaattatatgttcaaataacagccggtagaatgaatactataaagaatgaataggcatggaagcacacacctcaacaatgatagcaacacctgatagagaagtctgattttttgtcaaggacaagaaatctgataatgccaacaatgtcccagcattcttagatcttggattcctgaacaatctgtattttgcaaaagggttcaatat

SEQ ID NO: 3765 - DNA, 1268 bp, Glycine max
  misc_feature (1261)..(1261): n is a, c, g, or t
aacagctcgaacatgataattaaccttcataccttcggatagaacctgcaagtaaaacaattcaactgaaattatatttggcaaaagatgagaaaagaaactaaaaattgtagatagatcgtaatctaataatggctaagcaaagacatcatctgaataaaagtatcagggaaaaaattagtaccacggagatgtctggaaaattcgatagaacatcattaaactcgatagtgtcacggtgacaacagttgatccactccttgacccggaccagttgttgctcatcatccaccgggtcctgggtattgtctgaacataatgtagatcattaatattctgagttacaggttagtaactgaattagcaattttaaagaaccaaaaaatatttgtgtggagccaataagaacacggaaaatatgattcctctgggttgaatttatataaacacatgcacacacgtacaaacgtgtacacacacttttctcaaagaaagcaaaaagacataatttaccttcttcaataatgccataatcttcctgttcttgcggtttatttgccattgtttacatattaaaagaaagtaatggagaaaatgatattgaaaaaaatcaagtcccatgttggttaaagataaagtcaagttaaagtaatataagtgaggggcaaccttcatcccttgaactagattttgggattgaattaggtttaaactcacatactaagaatttaagaaatggagttgtgcagtaataaaaaaaatatgtctagttacctattggagcaactatatatcgattcccttgagtaagataaacctaaaaattgtgaaatgctgaatataagtaacacgattatttcaatggcaagtcagacagtttcctcactaaaatcttaaatagcaatggccacatcaagcaacatcttcgtttacctcactgtcagtatcataatattcattctgttgcatggaatcatctccagcgctgaaatcgtcttggactccctcattatcatcctcacaagggtcgagcacactcttcacctataaaattgaagaagaaaagataagaaatagatttaaaacctagctgtgaacacgatatccttccattaccttcagagctaacacaaagtgcttgctgtttacattcccaacctccattttcaatggattcttctcccatggatgataagtttcttcatcagtgcatcccttaagaaaggaggctcataatcagctggctgcaggacatgcaagncttggcg

SEQ ID NO: 3766 - DNA, 1092 bp, Glycine max
agctgattatgagcctcctttcttcaagggatgcactgatgaagaagcttatcatccatgggagaagaatccattgaaaatggaggttgggaatgtaaacagcaagcactttgtgttagctctgaaggtaatggaaggatgtcgtgttcacagctatgctttaaatctatttcttatcttttcttattcaattttataggtgaagagtgtgctcgatccttgtgaggatgataatgagggaatccaagacgatttgagcgctggagatgattccatgcaacagaatgagtattatgatactgacagtgaggtaaacgaggatgttgcttgatgtggctattgctattaagattttagtgaggaaactgactgacttgccattgatataatcgtgttacttaaatttagcatttcaccattttcaggttgatcttactcaagggaatcgatatatagttgctccaatacgtaactagaatcttttttttttttttttttattgcacatctccattttctccattactttcttttaatatgtaaacaatgacagataaagagcaagagcaggaagaaaatggcatgattgatgaaggtaaattatgtctttttgctttctttgagaaaagtatgtgtgtacacgatgtatttatataaattcaacccaccagaggaatcatattttccgtattcttattggctccacacagttattttttctggttctttaaaattgctaattcagttcctaacctatataactcagaatatttaatgatctatgttttgttcagacaatacccaggacccggtggaagatgagcaacaactggtccgggtcaaggagtggatcaactgttgtcaccgtgacaccatcgagcttaatgacgttctatcgaattttccagacatctccgtggtacttattttttccttgacacttttattcatatgacttttttgtttagccattatgatctaacctcaatttcagtttcttttctcatcttttgccaaatataatttcagttgaattgttttacttgcaggttctaacagaaggtatgaaggttattataatgttcaagctatt

SEQ ID NO: 3767 - DNA, 1011 bp, Glycine max
tataaagtcatctgctcgaaagttccttccttctaatgagcagcatggtactccatccaagcttgggatattcagttctgatttatcaaagcagtttggcaatgtactatttctggaaatctttcatagtttcaacatataaatggtagatcttgtgcctgtttgagggcatttatgatgaggatatattaatttcttgttttatctagtcatttgtcctgattttcctgtcatgcatttctcttctctgctactaaattctgcaaggagtcctgattgtgctgcccttttttgcctttctctctgctagattaatgagatgactaaagaattggatctacttttgaaatcaatagaagaggctggtggctttagagatgcttgcacaaggtcactacgaagttcaattgaagcagtggagcaaggcatggatgctctgtctaaaaaatgcaaaatactgacggtgatgtttctttattcattttgaccctttcattttatgttaaaactttggagttttggataaatctattccttgtataggcttgttttccatttttcatgtaactcgatttatttgttctagtagttgttgagattccaatgatatattgatcatttttttttatctgcaaaaataatattatatattagataagtttcagtacaagtcgtactgtgatttttaccatcaccaatgaagtctcccatgtttaattgatcatgtttaatttttattcataatttaggtaattaacatgtctttaactgagccccatgatgtcgtgcgactcatgtaattgactttgcctagcggaataaagattttggtgtttaggtgcttaactcaaatcattctattccttgtagacttgtattccatcatttatcctttttcagtggtgacaattttggctagaattattactttaggaatcttaatgatagaaatactcaagtcgggcaatttatttggaaatccaaaactcctttctaaagtgaaatcttgtc

SEQ ID NO: 3768 - DNA, 976 bp, Glycine max
tccttatatatactacctattatctatatatctcaatcttgataattccttttttaaaattgtaataaagcatgtatgtggttgatgtggtagctctaagaagcctaaaacaacaattgaacaaattttggagttaatgtttctaacttaattgattatcataaattgaccagttattatctatttgtgtgatcaatactatcagatctcttctacctactataccaacagaacattgtaaccagttcatcctggaagtagttttacagtttacatttatttatctgagttttattgatgtgctaatttgcagttgccgacacattgctttggaaggataaaaagcaaactttcatcgcattgttagtcttgattgcaatatacttcaacttcattgcatcggaaaataccatcattagtgctctgacaaagcttctattgtttgcatcgatctttttattcattcatgccattctacctgcaaaaatgtgagtacattatgtactgttgaatattgcagttgtcacacaattaacttgtccaatgataactataaagataatctagttgttagaagcattggagtttgtaatgttaaaataaatgctaattattgttctgctttaaatgcttgtgcagattggggtatactcttgagaaaatacccaaatcatggtttcacttatcagaagatttgtctcatcaaattgctctctcagtagcctcatcatggaatattgctgtgaatgttttgaaatcccttgcagaagggaatgattgggtgctgttcttcaaggtatctgcactgcattcgttttaaaatttctctatgaaattttgtttataagcaagcttacatatgcagacaatttactgagtataagtttctcaagtatcagaagtgctgacatctttcccttgctgatcaataggttgttctctctctgttcattctcagcttccttggagccttttc

SEQ ID NO: 3769 - DNA, 1090 bp, Glycine max
aggtgaatgaactgttatgtttttggttgcctatcaacccaatgctattctgaatgttagtttttggattttccctttggttaacatacttacattgatgtgtaggtcaatgatcttgagtcttcagattcctcaatgacggaggctacatctcttggttatttacaatatcctccgcctgctgtttttgtcacaaatattcatcctacagaacatattaatttgtccagcgaactaccttatgtgtcattacctttctatgtaatgcctgcatataatgttgatgagtcaagagcagaactacagcatgctagtcatgatgttgtctcaggtagcatgcaaattgagtcttctgccatggtacagttgcaagcagacccaagtgcagcagagcattatgagactacagtgtctcccatggatacattctctgagatgccctctagctctcaaactggtgcagaatatcctgctcatactgctttctctaatggaatgggaattggcctcagtaatctcacaatggatggtatggagaccgatgaaaccagacctgctgaaggaaaccaacatgggaacttgactaatacctattctcttaatggcatgctacatggactgtctaggcaaactgcaaaccgtggggttccctcagagtttggtcaatttcatcagttttttccttcaagagatccaagtggatgggagattccttttctccatggatggataatgggtcaaagccaagttggtgttccttcaatgcttcctcacatgggtgctagtcgtgacaatctatcccaacagattggttcttcttcttacataatggcatctaatcattccacttctaatgttgatgcagcgatgccatcttcagcaatacctggcagcatcagcataccgggttcttcaatgagatcaggtttacggaatcatttttcacagtcccgtgtacctgtatctgaatctggcaatcttgctgcttctattaatgccccacatgatggattcgatatgcaaaccatcgtaagtcgaattcagtcagaacttgccacatcagtggctgcaacagctgcaggcatgcaag

SEQ ID NO: 3770 - DNA, 1067 bp, Glycine max
acaccccaccctcaaaatccttctgaaagtgtcccagaacatcttgaagtttttcatcctaagggaaagaaaatttgaaatgtaaatcatcgagagaaaagaaagaagattagttatcaaaacaggaacggggactaaatctgacaaaatccaacagatgtagacatatttatgatttatgatatagaaacaaacagcattctataatgaaataatggaacaacttaaatgtgccacgcagccatctcacagttggaacgattttcaaattaaggaagttccttcagtacacacaacttctaaaacacaaattttatgaagcagaaacgtatttcatgctgtgtcataattataaatgagaatacagacaaaacagctccaccatatcgtttggcacttagtggagattatatacaagtctaactgaaggaacacagcacacctaaaccgtaaacatcaatttacaaaaacaaaagcacataaaaaaaccgaacatttagttcttcatgaaaggaaaaagataaaaaaatcaaacgagaagtggaaaaaagggaaattaattgtttacagcaacaatctgattcacacagcatttccatacgccgatcaagcagattgatcagaaacatcctcaacaacccaatgcatcaagttgacatcacaaagatttaaaatcttctacaacaccctctaagccaactacatatcaaatctattcaactcacaacaaaacacaattcagcactacgcaccccaaaaccacacaaccaaccggaaataaaattcaggccatggatctaacaagtaaaacaagtgaacatcaataattccaagttccaaaaccaacaaaactatactcagaacaccagggcaagcaaaatcaagacaaaaaggcccttacaatgtaagagagggaaacatcgggatcaacggtggcatcataatcttcatggttctgaaacgagcacgcctcaccttcctcaagctcagactccaccatctctttcctcccagctcccaatcctaaccctaaccctaaccctagcccctttattgcatccctacct

SEQ ID NO: 3771 - DNA, 949 bp, Glycine max
agtttaatgagttaagataaagcaggaatacaatgaagaaagacagtagtaaatttgttcaagactccaatgacctcgacactggattttcaggacaataaaccttaattaaataattttctatagatcataatgatgacttgaatcccaagcagggacattcaataatgaaagaaagaactcttgtttacggatctcttccctttttactttttagtgttttctttgtccttctttactcattccataatctacttgaagctcagatacagctgaccagcactccagcaattctttttcttattttagttgataaccatgtaagtagttgctatgtatataaacctaggatgatcacaaaggagactggggacaaagctagaataaataagatgggggacctaatatgaaaattactttattgaagggggcaaattaattttgttttagaaaaaaagctacatgggaagaagaaaaaaaattaaaggggaaaaaaaggatgggaacaatcccctcctccaagcaacatttcacatcccctaaatgagaggtaaattattaccagtcattattattttatctttcttctgtattaactgttgtcatacgataagcctatgtcaaatgtttagctatccaacacagtatggattgattctagaatgaaagtcttatttttcaagatagggtactgcccatcaatgactacagttggtcgtaaacctatcaatcttcttctcaaaaagattggatataaaaaggcaaaaaatctaatactataaaatagggaaccaagtaactggcactctgacagtctacaaaccttttttccattggtagcatcaatttcagcatcctttccatttatttttaatacctgtccatcaatccaagatacctctgggtcttcaatccagacatgagaacccacaacaatattcactggagt

SEQ ID NO: 3772 - DNA, 1247 bp, Glycine max
agcttgcatgcctgcagtgtccagcttagacttcctcaacattgctgacaaaattttatccttctgctccaaatccttgtgaaattttgtgatctccaaagacaatttctgcgccatcaaatccgactcctccttgttctccgccgccaaagcaagctcttgtctagtagcttccacttgcttaaccgtgcgaccgagttcagcctcaagctgcctttggtttgacacaagctcaatgaaagcagtcttgtgcttcctaagatcagaagaatgctcttgagcttcgcgcctagcagattctctcgtttcttcagcatccctctcaaccttgttcagcttctcttctagctccttcctcttctgctcctccttttcaatctccttgtctcttgactccaccaaagcctgcatgtccttcaatttctgattcatttcagaaattgcagcatccttgtttctctccaaaactctcagctcactcagtagagccccaatctgctgccgaagtctcctcctttcactcaaccagctttgctcttgtgctgcaaagattcccacaactttctcattggccttggcatcctcatgcctcatttttttcagattctcaatttctctctcagcaattttgagcttgcacaatccctccaccccatttcgcattcccttctgaagcttccacacaaccaaccccaagagctgagcactcccttgaagcattgtgtcacggattttagaccatttctcaacttcaacttgtggttcttctgtgaggacttggagtgcaaagaatgcacaagaaacaccaaaatacatgggatacatgctttcggtgtcactcttgttgtcacaactaactctatccaaaacagaaacttccttctcacccattcctgtgagatcggattccctggcacctctgcaattgaaaaccaaaagttaggaaacaaaaaccagcaaagactgtaagtcccacattaccttacaactcacatgattcagaccacataaatgggggaaaagcacagacccacttcggataaaaacagatcacaaaataattcaataattgggaaaaaccaaaccaactaggcttagtacattggctagtgcaataattgaggaacagcaatacccggtgaaattgatgggtgcagaatgtgactaaagcaacagtttcctttaaaaaaaataaaattcaacaacttacacttcccactgctgcaaaacacagccagtgaagcaga

SEQ ID NO: 3773 - DNA, 1014 bp, Glycine max
atttcaaacagaaggggatgagtacagcaagcacatcttataatattccattttttaagcatctgcttcactactttttgacctttttgcaaactttaatacaatccaattaagattgaaaacgttcctttgactaccaaaccaggcaactcaatttaacgattaccaaagatttgtaagttggtctgaaagtagcagacaaaaaactaattaccaatacgtaagcaagtatttgtttggcacaaatattgttaataatttatgtggtatgtgaatatttagttgcaaggcatacatagccaactaatctctgaacgaagaaaaatgacaaatcttggagactgaagcacatgaattgaattgagggattatatgaagtttggaggagcacctgttcatcattgatcaatggcgtgatcaatcaactttaggcctagcagcttgaagcatctcaacaatgagagtcttcacatccctaaaagaaaaacagtaaaagaatcacttctctgtggaaaataaacccaacatgcttcaggaaaggttattcttcctaattccttatcggaaacccataagcccatggcaataggaagctcacaacttagttattcagcaaaggagtccttggcatggacatgatgaatctcatcatcccaaaaggacgaaaaaagatagaaaagtggtatttgtttgattaacagcatcaagtttaatcaactgaacagtaaagcctagactaatacagtaatactaccattttcatcaaatttcacacaagcatggaattgcataagtaaactggaaaacagaagagcatatttgatctaatgaatatagatatgtccttttttgcagatgggagtttatatcaaatatgatgtctcactttctatcttcagcacgtcgagggaaaggtacacgaagcttgaaagtatcaccctggtaaccagcctacaaaaaaaaaaatcttctaataaataaggtgcaaatttcaaactcaaaaaactatccaaa

SEQ ID NO: 3774 - DNA, 1234 bp, Glycine max
agttcgtttcccttgcacaatgcactcgtcaaagagtaccttcttcgccagaataaccattagtttggtggtatttcctttctttgtcttcactttgacagttctatattttttgtctttagtgggtggacacaaacaagtgaaatattgtggggaattttctggtgtaaattatgattagtacacaaagggtaggcaatttgttaaactggttctttcctaatagtatgttgcattagcctttgagatttcgtgtacaaattaatgatgggctcctctgcaccacacgaaatcagggtttgtagtggaggtttgggaaggattgttatcatagtttttctttttcaatatatagaataatacatactatacacacatactgataagaaaccttatcaaatgagagcattttttgaaacatagaacattaattattaaattttatttgaagtttaaaacatatatataacctatgttagtttttgttaagtaaattttttaaggagtaccaaaatttataggtaaaattgtatttttagtctcccaatttgttttcaattttgattttggtccctctttaaaattattgaaaaaaaatttataggtaaaattgtatttttggtcacgcaatcttggtctcacaacccagaattggacattgactattacaaaggaatgatgttgatggtcaggtgtcacgttttttattggatgtcgaattcatggaagatgaatgcattgttgttgtcattggtcaattttaacatgacacatacaatcatcatccaataagaatgtggcacgtggccgtcaacattcgtttgtaatagtcaacttagttctagattggggaaccaagattacatgattggataaaataggaaggcagatcaaaatcaaaatcgaaattgaagacaaattgagggactaaaaatgtaattttatcaaatttatatacttcatataacagaaataatttttaatatgattttaagataattattataaagtttaagaattttttttatcatacataataatttataattagataatattattgtgtatgttattttttaaagtgatgatgaaactttgattgtttacacatttagtattttatgtatggttagatttgattctgtcactttttttttataaagtgaattatgacttgtgtatggccacgacgctaccatacacagtattcctagttcctcaaggcatgcaagct

SEQ ID NO: 3775 - DNA, 1219 bp, Glycine max
tgcatggcaaaaacttgagcatgtaactaaaaatgtcttacagtatgttttaagtactatattacgtttttgtccctacaaaattattcaattttgatgtttcttatataaaaatttcattggataattcatatgcgtttagtcgggccgacttaatggcatcacagtcctaacatatattttatttactgatattatttttaaaaattaaaaatattacttgataaataatattattttattaagaataactagatattttttattagaaaatgcatttcgatttcattgatgagattttctctctttgtataaattggcatcttttaattttctcaactcattaataccattttttttatacatatcagtttctttttcattcatgtatttccctatcatcacacagttatacttcttttttttgtctgtttttttcctgttatgtacaagtttaaatcttatagtttaatattaaataaatttgattattgtaatagatttagtaaatttgaatctctaaaattttacgagaaaaaatttaaaaaaatcataaataaattctttcattagtttttaaaatgtttattttaaaatgttaggcggactctacttttactctatattagatttgttccattaagcggtgaaattaggttatttcatgtcttaataatctatttgtcatgttttttgcttaatagaatttatctgattgatgacattagaaattaaaaatatgtattacaattgaattatatataaaatatgttataaaaagaccaaaataaataaatagttttttaagaaacaatcttttttgttattgttcatctcttttcttttactttgatgaattccactttatttatcaaaaaagtctttttcaagaaacaaagaatttatcaagctatgtctaggagaactggacgagttggaaaaattctcacctgtatatgagcactctggcagtggaagattttgccgtcattgaaaaaggagagagaagaaacgctggtaattagtaagtgaagcttcatgcatggaaattttttgcaattttaaataactatggtagtacagaaaacgttcgggagaatttgaaaagcaactttaagtggttgaaaatcaattatgtagttagatatcttgtactgcaatcatagagttggaaaaaaggatatattgctttttatgcttcttattctcttctgtgtct

SEQ ID NO: 3776 - DNA, 1072 bp, Glycine max
  misc_feature (986)..(986): n is a, c, g, or t
  misc_feature (1013)..(1013): n is a, c, g, or t
ttgcatgccttcagctagaagtcccaatgatagacatggatttatatacatttgatggtgtggcttattctgttcatatatactgaatagtagagcagaattttgattttctcaatgtgttggtctaaaaagaataaaatgtttgttgggttcattggcgacattgttttacctgatattccattgattgtttcagaactgtcttattagaagttttgccaactataattaatgataatatgatacttaacaaataacaacacctgcaggcaggataatcccagatagtgtgatctacagttatggaactgttcttctggatcttctaagtggcaagcatattcctccaagccatgtatgttgcgttctaacaagatctagtctctgcattcatataagaatgtgctttatgctttattttgtttcataaggcattataagcattctatgttaccctacattttctggatttcattggtgtttgatgtgaatcatatgattcaatccaattcatgtgagtattgcctggttatgactttctggttatgagaatttgcactgaacatatgctggtaaaaagttgttgtcactctagaccctcttgcatgctgccggatattatggttgctttctagttgaagttatgttcacgtagcataaaaaatgaataattcatttcattattatttggaatcctttgatgtcttgacttgatacacaaatgcctattcatactgcctagttaattccatatgaagttgaatttggtatatgggacacaggtgtatgaaagttgttaataggaatgattttgttcttcaggctttggacctaattagagggaaaaatgttttgttgttgatggactcttctctagaagggcaatatgcaaatgatgatgctacaaagttggttgagcttgcttcaaaatgtcttcagtttgaggccagagaacggcctgaaattaaatttcttcttactgctgntgcgcctcttcaaaagcagaaagaggntttagttttttgttttagctttaaatgttgaacttcaatttacttttgctgtactttta

SEQ ID NO: 3777 - DNA, 1186 bp, Glycine max
gacccccaatcttactataaccttgaacaaggattgcgtttataaaatgccacctttctagaatgcctttaacttgattgaaaatttgacatcttaatgtacctactcaaagttcactaaggagtaaaaaaccccacctcaatgtctagatataagcttaaccgcacaagggggagggggtataaagaaccacctactgggatgcatataaattattaaaatatattaaaaaaaaatgtcttctaacttggattccatgcaccattaatttacaaccttttcctctgaacaatcaaactccatgaaacatagatataaccggactccaaaagggtgataaaaaccaatgaagcatagtttatactcaagtcacaatcatatgatcgaaacctcctccagcttgtagtgcaggaacccgattccctccaacattgtgaagcaattgttgtagccacctcctagttgtggggtcttcctgaataaatcaaatcaaagaccagataaatgtaagcaaacaaagcatgtatattcttatgagggcgaatggaaaatttctagctctgaaattaaagattttggtgtacagagtgaatattgtacaacctatgatttctttaatctagcaattcactcaatttcattaaataaaaattttacatcacgggaactagaggtacttacacgaaggcaagtgctgaaagtagcatctcttaacatgtctggtagacagcttcttaatgcatcacaagccctgttttaaccagattgaagttcaattagagttttgaaaattgataacaaaaagggtatgtatggcaagaggcagtttaggtggaagggaagaagaaggaatacacatgcatggagttgtaaattagtaaccaaccttggattatctgacaggcgaagatagcatcgaatgatatgcttcaatagacgagatgagggttgctcagcgagagctgccaccatgttccccagaactcgacctactgcgaaaaagcgctccgctgtagtacaaatatagtccaagcccacatcgtccaacagaattttttgaacaataaatgttgcaacctggggtgatagagctttcattagacaaccatgctccaatatactattatttatttatgtacatatataaaagacagtgacaatttaaaaagatcaagcagctttacgt

SEQ ID NO: 3778 - DNA, 1170 bp, Glycine max
tgaacgacaaaaaaggtgtaccccttcgtgtacctttgaatccgcaagtatcggcggaggatcaagaaatcacctaacctcgtacattctcaattaaaaacacaaacctttatcctaaattattcttcgttgaaatttgatattaaacaaaaacttcctattaaatgagggagcattttaaagataatatcattaaataagataaaaatagttaaattttacttgcatttaagaaaaacaaattagttgactttttgcttataaagagaaaggagggagtactactatgttcctatttataaaatccaactttaaagtggtttttgttccttttatttataagacccaatccattaattatgtcccttgcattaatttatattgagatacatgtagaagagagagggaaacattgatgataatcatctttatggaaaattaaagcatacaaatttaggatgaacttattgttattatttaaattaatcactatttttttttatcttaatgaattaagtaattcaatctgaaaatagaaaccaagatattattttgagacaacaatatttgttaaaaagaaaatgttttaatatttgagttttgctaagcaatgcttaaaaatcattggttgtagaactaaaaaaaaaatatttatgatataaattataggagagtgtaaaaatgattatggataacacggttttcaatctcccaaaaaaaatatttttactttaaatttcttaattaatattcttacaacattaattaacctttgtcttaatattttattaaaaatcgataatatcacttaatatgaaatattttttcttgttaaaatttcaatcaatttggacagataaaagagtacaaagattcagatttaatgacctcactgattgttttaccaccatacttagtgtccacaattgtacctgggtaagactttgttcctagagatatgactacgggcaagtatttattctctgtttgaaagtctgtgcggtggtcaaacttgtgagttagtgtttgaaaaggaaaagatagtaaaggtcaaagaacaccatttaattttcctccccaaaagctttgctcattgtgttcctagattcaagttattagtttaattatcatgtcataatttagcttataccaaagacgacgttatgatgt

SEQ ID NO: 3779 - DNA, 1151 bp, Glycine max
agagattaaaaaaataaagaaaaagaaaaagatttagaatgaaaatgagaataggtgaaagaaaaaatagtagtgaaagttaatgagagagagggttaaatagtactcacctaaagacaattttagtccacccataataaccaactttgacaaggttgtcaattgtggctgatctgagatgctccttccttgaagtaaccaaaatgatttgcacacccctggatttaagttcattgtatagcttcaatgagtgatcaagagcaggtgcattgcctttgcgcatccattcctctagagatgtcacattcagtttctttcccctattgccaaagaaatccatcatcattgagattgcttatttgtaagcacaaggagatcaaagtaagaaccatattgggtaagtaagcaatttaaactatatagctaggaaccaaatagtttagcaggcaatctgagctatacacgatttggattcacattatatgattcaaaatagtaagcaatttaaactatatagctagcatgtttggattcacattatatgattcaaaatcatgctgaagaaggctaacacgattttagataaatgttcgtgtgtttggtgttatattgagaaattgatttcttgattcagaattgcttctgaattatagtaattttaaataatttatgcgttggataaaaaaatctatactaaattttactacttttagtaataaaaacatctaacaaaaatcatgtcacttaaaaatcaattttaacaaaaaataatcttgtaaatgctcttccaaacagagagcaacttaatagcgaaacatcgtgataaggttagcaaatgagagtgaattttagaattacccatatagattattcttgtagtaaggaacagttgaaagcagggtatcatcaatgtcaaaaatccaagcatcgaatccatctttcttcaaattacagctggtgctaaggtaaaccaagcactcttcagatgccctctgtgagtctactttgtactgtgtggacttaacatattttcctatgtattcagtgcactcttcaggcacaacttggaagtccctaatgttgtgcagctccgcattcatcctccagctttcacaatagttcttcaggctgatcttcaatccatcttgtgt

SEQ ID NO: 3780 - DNA, 1193 bp, Glycine max
gctttaattagggaagattttccctactctctgtaacaaccagatttctatcaactggtgtcagaacttttatcttgtagtagtgggtattgaatcttgaagatgattcaatgattggtggggtacaatattttgaagccgttggaacatgatccagaattagcttgtcagcttttgatccaggagaagctatcaaaggctttgaaagctctgagaggtggtgctcttaattggtggctaacatggaaatggcattacccaaatgcagcatggtggatctttgtgaaggtgctggtcaaaagattccaaccagagcatgattttgatcaactagtttgggtctggaaagaggaacaagaactatgggaaccaagatgcagtaatgaagatatggaggtggaaaacaagaagaagcatcatgggagagacgaagcaaacctttgtaaaccagaaccagaaacaaaattagagatcaactaggatcaaggtgacggagaaagaagctatattgtggatgcaaaagaatagagaataacaaaccttagaattggaactcttcaagaaaattatttttcagactcaacagacccagcccaatacactaaagagggagaagggaaagagggaaatgaaaaacacaacagttagattgttttcatgatctatatggagagtactcagattgaagagagggactttggggtagaactgttgaaccaggaaacataagtagatgatgctatgcaattggtagtgtgggcaaaacttttagggtatcaagagctctacactgccttcaagaattataactctgttttagatataaaaaaggtggactgtggtgggttaaaaaatgcatcagagttctcaaccatatcagaagataaattggaagattttgataattctcagcggcaacaggttagtaaaataatttagggtatgaagagcactacactatcttcaagaagtatgactctgttttagttatcagggtggactctggtgggtttaaaaatgcatcagagtgttcaaccatattagtacataaattggaagattttgataattttcagctgcaacaggttagtacaattacagagacactgaggctctgtttcatggcaaaaaaatgccttagcaaacagggcacctgtttgtgtttgtcccaggaggggttggggccattttga

SEQ ID NO: 3781 - DNA, 1236 bp, Glycine max
atccttgctatatatatcggaaagttgaaaagctggtggtggctgatgatggtgccaattactagtacatgactcgtctattatgaaacctgtttctggtttaataacctcagtgtagatagattgagaggtttgaatttgatgattctgcgctgtgttgtttcccagaataaacggggtgttaagatactcagaccattttagatcttcttgttctgcttgtagaggcactacttgagcctctttgttaatgttaacaatcttcatagactctgccaccccccacgtgctgtcaaggtagtttgtgctactttgtaactgcatattcccattgtttttgtttgtgttgttacttgtttcccagttttgaaccccatcagatgaaatggaagaagggttgttgttattagattggagcttcacatgttgtgttgggaaaattgaagggagcatggaggaggaggttatgatggagttgttattattaatgtctgaagaagtggagggtagaatgaaacaaagagaggtgttggggtttgaagagagggccatgcttgttgttgttccatagttcaagtgctggaaggagaagtatgatcctaccaaatcagaagtgttgttgttgttgttttcgtggcaggtggtggtggtggtgccaaacctatctaggaacagttcctgggtggaactagtagtggaaacttcaagagggtatctctctgatgaagaattaggcatggtttttggtggctgatgatgatcaaccaaattactcactacttcattggatcccacagaggctttctgagtgcttttgtcggttgagggtggcatcatattcatgtccttgtcgttctcaacctcagagagtggcttgtgtgtggttgggtcaatgcctctttgcctcagcttcttcttcaggcacgagttccataggttcttaatctcattgtctgttcttcctggtaactgtgctgcaatctgagaccacctgataaagcacccaccaagctaaaaattaataaaaaccatacatcaagaacaaaagtcaaagtaataactgtacgctgaaaaaaaaaaaaaaaaaaatggccttgtatgagatatataaatatataactatataactaaaactacctgtttccaagaactgcatgaagttcaacaatcatgttctcttcttgctgtgagaatgctcctctcttcaaatcaggccttagataatttatccacctc

SEQ ID NO: 3782 - DNA, 1138 bp, Glycine max
tgcgaatatcctggatcctactttattgactgaattgagagtctctttcagaactcctattgtcttttgtgacaataaaagtgctgttgccattgctcataatccagtacttcatgcaagaacaaagcatatggaaatttctttgttcgtgagaaagttctgaccaaacagctagttgttcatcatgttcctgctcttgatcagtggtagatgctctcatcaagcctctttctccgaatatatttggttttctaagaggcaaactcaatgtaattgagactccatcaaagtgtcaactaccttgagtttgagggggggtattatagtattgtaagagttgcagtcattcaactgccctctctgtattagttacactagttagttctagtgagttagtttaccaagttagtgttagttagtgacagctgttgacagctgtcataactaactgtttagtctataaatactaaactataaccttgagttcagtggctaataaaatttccctttcacttttctacagttttttagttcttttaaatatcttctctttagaattctatttgggtggtatggtaacaactaacaaaactgcataaaatgataaaaatggaacagaagcttccaatttttgggttaattgctaaaattgaaagttaaggggtgtgctgtgattctcccttcccctctgttatgatgatatcattaatcataacatttcattaatttggttgcagcttgcagcaaagttccgtaacagtggacaaacatgtgtttgtgcaaatagaattattgtgcaagaaggttagagatgaaaatgacagtaaaatatcgattttatgattacattgcatttatctgatttgccatctcttaaaaactttatatttgaatataacatgtttatggttccaaatttaggaatacttttaggagaatttgatacttttgttgttttctaatagctccttctcctaaatggacgagtttccggaatgtgtcacactcacattctagctgtttccttaaagtgcttttttatcagtattgctgatataatcaagatgacattgtgaatctgagcaggatttttacatagccttttgtgaccttgtcatttggcttattggttgtgact

SEQ ID NO: 3783 - DNA, 1092 bp, Glycine max
ttgcatgcctgcagaagatgcttgaagtctatagcagatgaactcagaatctgtttggagatgtgagggagaataaggggcaatccttcagaagtgatccgaaaagcacatggtgcagacctaccttcacatgacgtttgtctttcctgtaagtgagggcaagtatatgtcacttattcacaagaacaagaactaatcaaagaactgatttctcactgacagtcaagggtagatcaatgattatttatttcattgcaaagtaataagctttttaaagaagattttaaacaaactatctagattttatattacaatgatcccatatcagttatcaagtcaaaaggaaatcatgcagtaaagtagtttaccatgatttaatccaatatatgtgtcccaaagtgagtcaagaaaaccagaaatagaaaccgttaactctactctaaagtcatgcatactgcttcaatatctacgtgtttttatacactataattttgttaatatagcacggtttgactaaatttatttctgtatatagtaatacaggtggtaacctttacccacacaagtctcaacctgatctgtatatatattaaaaaggattttgctcctctgaaaatagaaaggaaaggtgtatccatcttttatttgaattaaagtacctgttaaatttaacccactttaaattaatgacaaatacaccattactttcccactttacacacgttctcactttagacgagtcaaattttatttaaaataaggatcttgtgttataacaaaatcaacaacaaagattgtaataataagaaaaaacactttctaattcagaagaaaatatacttacaaaaatcttcaggccaacagaagttattttaagttgctgtccgactgagaagttcaactccagaacatctttgactgacttggagatgtagtaaattcttttcatgtggcttgtatcactgttcctagttacaaggtgaccattgaatggaaactgctcgtcaatagcataaaattcctttatgctgttaataactacttcatctttgaagaagacaacagggtcaatgcctctccatttgccttaat

SEQ ID NO: 3784 - DNA, 1050 bp, Glycine max
tgatttgatgtctccaagagaagacacttctgctcagaactctgtaacttttcaaccccatcaactatcttggaatttagactacgcacctcctcttcagcacaagagagcttatactccaaactggaaattatctccaagcattgctgataacggagagtggcatcttccttttcttcattaagtttagtgacttctaatttcaaagccttgatttctttttctgctatatctgcatgctccttaatccttcttgcattctcctcagcttcttttattctctcctccagtttagatgttgtctctaagcactggttatattgaacaagggtagcttccttttcagcttctactctagcaaggtcctgctttagggactcagtttcagtttcagctctagtagctcgttcattaagttctcctgattgcttttttgcaaaagaaatatttttctccagattagatattttctccaagcattcgtggtactgaagaagactagcttcactttcagcctgtaatttgatttgggcttccttcaaggcttgaacttcagcttcagctttacttgctcgctcatcaagtctttgagaattctcttgtgcagtagacacttctaactcgagattagacaatttctccaaactctgctgatactgaagcaagccagcttccttttcatcttctaatttggcaatggctttcttcaaggccaaaatttctgtctcagctttcatcacacgttcagactgggacaaattgttgttgtttccactgtttttctcattactctcctcctgcgtctcgaaaaaattgagcccccttctagcaaactttggaagattttcatgttctccagggatgtatagattattgagctgcttcaaaccggttttgttcaaaggagaatagggttcaccagcataaccaccatttcttttgatagcatggaaaggagcagaagcatccttttgaggttcatctggatcaagaaaggcactttcagggtggcgcatttctggagtatgggctcggtctccataggagaaa

SEQ ID NO: 3785 - DNA, 1061 bp, Glycine max
agcagagtgcaacaaatagaaaagggaaaacatccatttcaatagaaagaaaggttgagctgcaaattgttgattaccaatgcaatgggcttcttccatcattatcaggaacatcagggtcagcattccattttgaaacaacgtggtaaaggaaagctgtctgaccatattgtgcagcaacatgcgttgtctgtgtccaagcaaatcataattagtaaaattaacatttacagccacacgcttgtgcttcaagtaaaacaagaatcccaaactaccaaattagcagatgtaaccagaaatagacagccaggtataagagatacataacatgctccaaatgccttaccccagcaatctcttgaataaagggaaaatgaatcacagcaatctaacctgatatccattcatatcggcagcactcactcgagcaccctcctggagtaaaagttccgcaacctgaatagcaccccgaaccgcactccaatgtaaggctgtctggccagtatgatccgttgcatttacatctcccccatgctgccaaccacaaatcaaccagttaatttaggataagactaattccatacttaatatcaagccaaatttggctacatacattcaattgcaaaacaaacaaacaccacattcgatttccatttccataacacaaacatgacctacaagccaacctgagctgagctgagctgagctgagctgagctaagctactttaacaaattcaaaccaccaaaaacatcataatcaaatgttcttctcttctacatctatatcattccttccttaaacagcaataagtaactaattcttacattttcttttcttggagtaaaaaaatagtaattcagcgagtgccaaaataacatacgcattcaaacaagcacaataaaagcaaagtaagcaaagcaaacacaattcaacaaaccgatcaaagaacctcaatgatgtactgagcagcggcagtgcgattgttgagagcagcccactgaagcgcgtagtatcccaacccgtcgggctcggtgacggggcaaccctcttgctccacca

SEQ ID NO: 3786 - DNA, 1149 bp, Glycine max
ttcgccagcttgcatgcctgcagcctttgttctcctagtttctgaccttctggtcatccctgacctctgagaccattttccggtgaacctctcactgtttccagtcatccatgacatttgctgccttgctctgttctgtccccatgttgttttgttttgtagtctaggcatttcatctcactatctcatgctctcttctaaggtttaccctctaattcgacataacagtgaccatcccgctatctgttatcctactatagtatttgctctcttctaaggtttaccctttcatctcactgtcagctgttctgcgtcactctttgggattgacagctatggaattatctacagcaatcatctaacatgaattatcttgtgctgattagggcaactcatatacaccacaaatgaagttaaataaagaactcaaaggcacacactgtatgttttaatgattacatattctcttctcatcctctcgtgatttctctgaccagctactattcttattttcatatctagtcaggtatttctcatcatattaatttactaaagtggaagtcttcttctaacttgaagtcacctttgtaggaatcctattatattttcctttcccttttcttttgtactatctggaaagtttgaatattggatctacgcaaaccgatgctctcttagatgatcattttaaaaatgtaatttaaccatttgtttccttgtatgtcatgcttaagttttgcgctgtagaagggttacttgcaacatttgtttggtttatcttgttttatagcatcacactaatggtttattgtttatattttgcattgttgcaggtaatgttctgctgctgagaaacaacttaaatttgagtccagatattgctgaagtctcacaggagaaattgctttcattggttgctgaacgattaattgattcaaatagtaatgtgaatgtaagagttgcatttgttatcactggtgacattaactcttttatgatactagttgatttgacaatttttcttattgtcctctagaacaaagatgcaggctatgttaaaatcaacaacagaacattgctgatgcaattgacttactccctaggcttgctactggaattgatgtaaatataaaatttaggaggtcagtt

SEQ ID NO: 3787 - DNA, 1112 bp, Glycine max
agcctcatagtggcaacaatagagttccaaagtccaactttgatccagctcaactctagccctacatcctcacatcatcttccacatcctactgatccaataactcctcaagtagtggcttattccacaacacccctcttcgctgtttataacatggttgaccacaagataacaatcatcatgaggggtagtagtatgatccctgagtcgtttatcgcctcacaccctgaccatactgccactcccaaccctccatctacaacccttccttaccaacgcctaagaactccaaatacttctcgatccaggataaacaattaaaataatctaatgttaaaataatgaataaaacattatttaagcattagtcgtttgaataaagttatcagaatgggatggtaatatggtatgattagaagatcattatgtttcttaaatatatgaataaaaactatggaagggcttgtatttagagaaattaatttatctcttagccaaagaatataccgtgaaagaaaaaaaattatttaagaagaatttaattaagttatttaatccagccaacactttgtccttaagtttgtcttcttctacggcttgtagattcaaaatatgattagttttctttttttaatcttttttatcattttcgttgaccagggagaggcgaaagccccgatgatgatttcctttggcagcatttgaacgcggaaagttttggatatacctgacttaaattagttattcgttacctgataccatggaccaagtttttaattttaaaaaataagaattccaaattaattaaaaaatttgaaattacaattacatattaatatatctttatataaaattaaaaataatataaatatctcttttatgtcactttaaatttattaattaatttttctcaaatacttctaggcaaattcagtaagttagttcaatattttaaagctaaaaaaatgacgtagtttgcagaccaaatatagcaagaatcacctgaaagcgcaaagaaagaaaggaaaggtggtgaaaactgaaaagctccttcgatatgcgaagcttcacccctggtttgtgtcacttctgaattcgggaggacaatttca

SEQ ID NO: 3788 - DNA, 934 bp, Glycine max
ttcaatgaagacgggaaaagtctacagacacaagcctaggttctagtttgaatctgaaagccatgtaacactaaataaaaagagccacatttaagacacatccatctaccccttctggatcccatcacctgttttgcactttccaaccaagctaacagattttgtgtcataaatagaggagggaaaaaaagtagtagtagtaatgagaaaagggaaagttacacttacactaatgactaacctaagtgcctatgcaagtgaaggtataattgaatgccatccaacaattactgacctccaatttgtctctaatgatctataaataattattggtatgtttaattcatccaatccctccataattccaccaccattaattctcaattggggacccacaaattttcttatttatatcaaactggctaccatactattcttccatatgcaccttaccttgagcactttcccaagttttctctctcacacccttcatttacaaacaacggaatcattctcctttctgctaacacttttactttttcttcatggctctctttctctttgctattttaatcttgatggtcccttctagtaatgcctattggccaccttcacctggctactggccaagttccaaattcaggtccatgagtttttacaaagggtttagaaacctctggggccctcagcaccaaagcctagaccaaaatgcattaacaatctggcttgatagaacctcaggtctgaatcttatcactttcaatttcaattctctctctctctctctctctttcacttgcataatatcattgaaatttaatccacttccactttttgtttctcataaacaggaagtggattcaagtcagtaaggccatttcgatccgggtactttggtgcttccattaaggttcaacctggatacactcaaagc

SEQ ID NO: 3789 - DNA, 1243 bp, Glycine max
ctctagagtcgacctgcagatcacgacgtgccggaacaaacaaaataataccactacttaaccataaccctttttcttttatattcataaaataaaactaaaataaaatcaataattttctctctatttcccgattatgttgtagtagaagtatttagtgaaatctcacatcaaataaaaataaaaaaattgaacaaagaaaaatctataaattacgtactttaaaattttgagttaaaatggtgagaggttcacttatatagttatttttatgataatatttgttatcactcttattgaaatattcaagccacgttcttgcttctgtttggtccaggattgctccgcatttttgaaaaaaaaatattttcttcccaccaaactaattaataagcacaagtgttcaaattcaagtacttgcttgaaaatactcaatggttttttttctccaaatatgttaaagatcacgaatagttgctttgtgaggtgtatataggcaatcctaaatgcattaggaagaaaaaatttacaagggtcgttatcacattaaacacttgtaaatttgtataatggcaaacccacaagtccaagctcatgcacagagaatcccatatcttactaatcactttaattaaaagccttaaaaacaatatagtatataaacacttgaaattaacaaattattctacaccatgtgagactttgccttttgaaatatccttaaaaaaatacaacattgtttttttttaaaaagagagatgataatagtcactctttaattttatttagttgaatgtattcaatatctttgttagcatacatacaatggttagagcacaagtgaatatattcagaggtagcagtgatcacatactactacaacaatatagtcagcgtaaaaggcagtgaattgaattagcatgagcactcactcacctcacccctgctatcaggtctatatattttagttgaccgtatatggtagtaggaggcagcagggacatttatggcgcatacgtccaatatcatcaacttggtgtttgcgttatctgcatgcgccaaacccagtgccagcttaattcgagtaacctatctgagcacgcatcttcctcgcgtcacatgcaccaccaccaccaccaccacccttttcgacccgttgcattcttccaagctttgaactctttatctggttacatctaggtttcttctcctgctttttctgctttggataatggatatgtgt

SEQ ID NO: 3790 - DNA, 1004 bp, Glycine max
cttgcatgcctgcagttataaatataacagcttttagaaaatcctaatttgagaattatttagccaaggcagagtgaagagggagctcagcatcaggattcttttgtaagtggcaagaatgtaaaacagcaagcattgatcataaatcataatgactgctgattcttagatcattagatgctcattatttaaatggaccatttatttataacctgtggtgttggagaaggaggagcagcatccacaggagacaaggtcaaggctttattggctaacttgcttaaagctacagcaccatcaagttgctgcttagagctagatgagccaagaagcccaataagcaactcaagacctgcatggagaattgctcagcttcagaatagaacaagcacataaaggaatttataaaacaaaaaaaaaacatgaacaaaacccatgacaaacattttagcaagaagatccataccatagtgatcgataaaaattattctctgatcatctgaagagcaaagatgtgcaagagccaaagcaacttgtctttgacagcccttttctgaagctcgcatgagatataacaaatggttcagcacctacagaaaagaaaaatatcagattataaatttgaacacaaaactccaaaaactaaaaaaacaacagggtacccagtagaacacccatcattttccatgatatttacaacaaaatgcagaaagtaatatgaatatgacatcttacacgaccatgaatcttctcctctaatcttttcaacgttttggctacacaatctttagttgcctgcaataaaaaccaattccataaagatcaatataggtcaaagatgaactattttcctcctgttcttaaaaattacaaatgttcagatgcaatcattaagtattttaattttctttaatataggcatccaagggtaaaagcagaaaccctgaaatcaaagctaaagtggctattaaagaaaaaacttacttgaacaataaattctccat

(The sequence listing continues in the following parts.)

What is claimed is:

1-19. (canceled)

20. A set of four oligonucleotides useful for identifying a polymorphism in soybean DNA identified in Table 1 comprising
(a) a pair of isolated nucleic acid molecules which can hybridize to DNA which flanks a polymorphism identified in Table 1;
(b) a pair of detector nucleic acid molecules which are useful for detecting each nucleotide in a single nucleotide polymorphism in a segment of DNA amplified by said pair of nucleic acid molecule primers of (a), wherein said detector nucleic acid molecules comprise
(1) at least 12 nucleotide bases and a detectable label, or
(2) at least 15 nucleotide bases,
and wherein the sequence of said detector nucleic acid molecules is identical except for said nucleotide polymorphism and is at least 95 percent identical to a sequence of the same number of consecutive nucleotides in either strand of said segment of polymorphic soybean DNA locus said polymorphism.

21. A method of marker-assisted breeding comprising the steps of:
(a) identifying trait values for at least two haplotypes in at least two genomic windows of at least about 10 centimorgans across the soybean genome for a breeding population of at least two soybean plants;
(b) breeding two corn plants in said breeding population to produce a population of progeny seed;
(c) identifying the allelic state of polymorphisms in each of said windows in said progeny seed to determine the presence of said haplotypes; and
(c) selecting progeny seed having the higher trait values identified for determined haplotypes in said progeny seed.

22. A method of claim 21 wherein trait values are identified for at least one of yield, lodging, maturity, plant height, drought tolerance and cold germination.

23. A method of analyzing DNA of a soybean plant comprising the steps of
(a) acquiring a set of one or more oligonucleotide primer pairs and cognate oligonucleotide probe pairs for detecting one or more of the allelic SNP or Indel polymorphisms identified in Table 1, wherein a primer pair is useful for amplifying a segment of DNA including said allelic SNP or Indel polymorphism and said cognate oligonucleotide probe pair is useful for detecting allelic forms of said SNP or Indel polymorphism in said segment of DNA; and
(b) analyzing the genome of a population of soybean plants using said oligonucleotide primers and probes to identify the presence of allelic forms of said one or more of the allelic SNP or Indel polymorphisms identified in Table 1.

24. A method of claim 23 further comprising the steps of
(c) characterizing one or more traits for said population of soybean plants and
(d) associating said traits with said allelic SNP or Indel polymorphisms.

25. A method of claim 23 wherein said set of oligonucleotide primers and probes includes primers and probes for detecting at least a polymorphism in each chromosome.

26. A method of claim 23 wherein said set of oligonucleotides primers and probes includes primers and probes for detecting polymorphisms in a plurality of sequences of polymorphic soybean DNA sequences which includes at least one sequence in the set of sequences consisting of SEQ ID NO:1 through SEQ ID NO:6,578.

27. A method of claim 23 wherein said polymorphisms are used to identify at least one haplotype which is an allelic segment of genomic DNA characterized by at least two polymorphisms in linkage disequilibrium and wherein said polymorphisms are in a genomic windows of not more than 10 centimorgans in length.

28. A method of claim 27 wherein said polymorphisms are used to identify a plurality of haplotypes in a series of adjacent genomic windows of up to 10 centimorgans in length in each soybean chromosome.

29. A method of claim 28 wherein a trait value is computed for each of said haplotypes.

30. A method of claim 29 wherein said trait value identifies a trait selected from the group consisting of yield, lodging, maturity, plant height, disease resistance, or a combination of traits as a multiple trait index.

31. A method of claim 29 wherein said trait value is resistance to soybean cyst nematode, brown stem rot, soybean rust or sudden death syndrome.

32. A method of breeding soybean plants comprising the steps of
(a) identifying trait values for at least two haplotypes in at least two genomic windows of up to 10 centimorgans for a breeding population of at least two soybean plants;
(b) breeding two soybean plants in said breeding population to produce a population of progeny seed;
(c) identifying the allelic state of polymorphisms in each of said windows in said progeny seed to determine the presence of said haplotypes;
(c) selecting progeny seed having the higher trait values identified for determined haplotypes in said progeny seed.

33. A method of claim 32 wherein trait values are identified for at least two haplotypes in each adjacent genomic window over essentially the entirety of each chromosome.

34. A method of claim 33 wherein progeny seed is selected for a higher trait value for yield for a haplotype in a genomic window of up to 10 centimorgans in each chromosome.

35. A method of claim 33 wherein said trait value is for the yield trait and trait values are ranked for haplotypes in each window; and wherein a progeny seed is selected which has a trait value for yield in a window that is higher than the mean trait value for yield in said window.

36. A method of claim 33 wherein said polymorphisms in said haplotypes are in Table 1.

37. A method of claim 33 wherein said polymorphisms in said haplotypes are in a set of DNA sequences that comprises all of the DNA sequences of SEQ ID NO: 1 through SEQ ID NO:6,578.
